United States Patent Application Publication US 2021/0199660 A1 - sequence listing, part 22

SEQ ID NO: 305653 - DNA, 120 bp, Artificial Sequence
  ENSG00000133661_9 (sequence is synthesized)
agttctgagccaactggggtgggtggggcagtgcttggcccaggagtttggccagaagtcaaggcttagaccctcatgctgccaatatcctaataaaaaggtgaccatctgtgccgggaa

SEQ ID NO: 305654 - DNA, 120 bp, Artificial Sequence
  ENSG00000133665_0 (sequence is synthesized)
aggagccagtgtaggcgccgcaaagcggaaggggcgcgcggatagagctcccagtgtgccaagcgtgggcggtatacagtaaacaaagacaacccctattcttatcaccttgcctactga

SEQ ID NO: 305655 - DNA, 120 bp, Artificial Sequence
  ENSG00000133665_1 (sequence is synthesized)
gtgcaagtccaggaactgtgtaagcagaccctcagaggagctctgggaaacactgaaaaatagcctctccccccattggctgccaggatggaaactaactacctgaagaggtgctttgga

SEQ ID NO: 305656 - DNA, 120 bp, Artificial Sequence
  ENSG00000133665_2 (sequence is synthesized)
aattgcctggcccaggcactggcagaggtggcgaaggttcggcccagtgacccaatagaatacctggctcactggctttatcattacaggaaaacagcaaaagcaaaagaagagaatagg

SEQ ID NO: 305657 - DNA, 120 bp, Artificial Sequence
  ENSG00000133665_3 (sequence is synthesized)
gaaaagaagatccacctgcaggaggaatatgacagtagcctcaaggaaatggaaatgacagaaatgctgaaacaggaagagtatcagattcaacagaactgtgaaaagtgtcacaaggaa

SEQ ID NO: 305658 - DNA, 120 bp, Artificial Sequence
  ENSG00000133665_4 (sequence is synthesized)
ctgacttctgaaactgtttccacgaagaagaccatattcatgcaggaggacacaaacccccttgagaaggaggccttgaagcaggaattcctgccaggtacttccagtctgattccagga

SEQ ID NO: 305659 - DNA, 120 bp, Artificial Sequence
  ENSG00000133665_5 (sequence is synthesized)
atgcctcaacaggttcctccttcagagtctgctggccagattgaccagaacttcaaaatgccacaagaaataaattacaaggaggcttttcagcatgaagttgctcatgaaatgcctcct

SEQ ID NO: 305660 - DNA, 120 bp, Artificial Sequence
  ENSG00000133665_6 (sequence is synthesized)
ggctccaaatctcctttttaggttacagaaggtagatgcttctgatttacttctctcaaagctagaagccaagaaaatggccagctagaaccaagatttaaggggctgtaaaaggcaagt

SEQ ID NO: 305661 - DNA, 120 bp, Artificial Sequence
  ENSG00000133665_7 (sequence is synthesized)
ttataggataaaataaactcagaataaggatttaaaataagtaaccaagtggctgtgactttttcctcttgttttatcaacgttttggagactacacaatgaaaacacatctgttggggt

SEQ ID NO: 305662 - DNA, 120 bp, Artificial Sequence
  ENSG00000133665_8 (sequence is synthesized)
gatcagacccaacacccggccatgggggctacaaagtccagccgagtcaaaggaaagagaaaagacaagtcaagagagaaagtgggaccagggggccaatgctagtatggaggctgtgaa

SEQ ID NO: 305663 - DNA, 120 bp, Artificial Sequence
  ENSG00000133665_9 (sequence is synthesized)
gtccccaagctctggaagcccacactatttgttggtgatcaaacaaagaaacaggtgatgaggatgtgggagttgaaagaaagtggtgtatcaagcgaatgaactacagctgtgagggtt

SEQ ID NO: 305664 - DNA, 89 bp, Artificial Sequence
  ENSG00000133665_10 (sequence is synthesized)
gacacattacaaaggccacaaggggttttatcctggaccccggacatgttccaagccctgcctcaacttttctcccaacactaagcttt

SEQ ID NO: 305665 - DNA, 120 bp, Artificial Sequence
  ENSG00000133665_11 (sequence is synthesized)
tccaagccctgcctcaacttttctcccaacactaagctttcctcccaacacacatccatctcgtgtgttcatgtcttaacttttgcttcacttcacagtcaggcctctccgagtattttt

SEQ ID NO: 305666 - DNA, 120 bp, Artificial Sequence
  ENSG00000133665_12 (sequence is synthesized)
tacacatatcctggagtctacctatgtcactgatagcagatatttttcttcaacatatattatcaatgttttaatacttttcttcaattttagtaactggtaaaatacatgtaagatgta

SEQ ID NO: 305667 - DNA, 120 bp, Artificial Sequence
  ENSG00000133665_13 (sequence is synthesized)
ccatcttaaccatttttaagtgtacagatcagttgtattaagtagattcatattcttgtgcaaccatcatcaccatccggctgcaaaactctttcatcttgcaaaactgaaactctacac

SEQ ID NO: 305668 - DNA, 120 bp, Artificial Sequence
  ENSG00000133665_14 (sequence is synthesized)
ccattaaaaaataactcgccatttctctctctccccagcccctggcaaccaccattctttctgtctctgtgatttagattactctgtaagtatgttgtataaatagactcatacaatgtt

SEQ ID NO: 305669 - DNA, 120 bp, Artificial Sequence
  ENSG00000133665_15 (sequence is synthesized)
cctttcgcctcccaccatgattctgagacctccccagcaatgtggaactaaacagctgcctccagcgtgaagaaggtgccacagagatggaaggagattccttacccacacctgggagac

SEQ ID NO: 305670 - DNA, 120 bp, Artificial Sequence
  ENSG00000133665_16 (sequence is synthesized)
tgggagacagctagccagccagccagccaactgggcgggggcacccgggcaggggtgccagatacagtattgtatctggcaacctcccggggcgctcagtgtggttttcccacccgggag

SEQ ID NO: 305671 - DNA, 120 bp, Artificial Sequence
  ENSG00000133665_17 (sequence is synthesized)
tctggaagggtctcccgcagcccgcaggagacgcagcgctccccgctcagggggagcaggaggacagctggccgctttcgggagccccaggcgcgaagcggcctctctccgcctcaggct

SEQ ID NO: 305672 - DNA, 120 bp, Artificial Sequence
  ENSG00000133665_18 (sequence is synthesized)
tttcgcctcccaccatgattctgagacctccccagcaatgtggaactaaggagattcctacttaccagttgttccatggtcacattttccttatacttgtaaatccacaatgctaaatat

SEQ ID NO: 305673 - DNA, 120 bp, Artificial Sequence
  ENSG00000133665_19 (sequence is synthesized)
ttgtaaatccacaatgctaaatattctatcggatccactgggcgaactcttgccacttctgcaagaccttgagttaaacaggccccaaggtgcttttgaagatatattgactccatttct

SEQ ID NO: 305674 - DNA, 120 bp, Artificial Sequence
  ENSG00000133678_0 (sequence is synthesized)
gtcctgaagcgcgctcccggggaggtgttgcagccatggctacggcagccggcgcgacctactttcagcgaggcagtctgttctggttcacagtcatcaccctcagctttggctactaca

SEQ ID NO: 305675 - DNA, 120 bp, Artificial Sequence
  ENSG00000133678_1 (sequence is synthesized)
catgggttgtcttctggcctcagagtatcccttatcagaaccttgggcccctgggccccttcactcagtacttggtggaccaccatcacaccctcctgtgcaatgggtattggcttgcct

SEQ ID NO: 305676 - DNA, 120 bp, Artificial Sequence
  ENSG00000133678_2 (sequence is synthesized)
ggctgattcatgtgggagagtccttgtatgccatagtattgtgcaagcataaaggcatcacaagtggtcgggctcagctactctggttcctacagactttcttctttgggatagcgtctc

SEQ ID NO: 305677 - DNA, 120 bp, Artificial Sequence
  ENSG00000133678_3 (sequence is synthesized)
tcaccatcttgattgcttacaaacggaagcgccaaaaacaaacttgaagttgtctgaaagcttgctctacacttttacattcatcctcacccttttttttgtggggtagaggaggtgcag

SEQ ID NO: 305678 - DNA, 120 bp, Artificial Sequence
  ENSG00000133678_4 (sequence is synthesized)
taatttactcagtgatctttctactttctagaaactgtccttcaaagctctttaagaccccctcgttagtcagttttttctcttatatgctctggttgagcttgaatagaccagttgtta

SEQ ID NO: 305679 - DNA, 120 bp, Artificial Sequence
  ENSG00000133678_5 (sequence is synthesized)
cttaagaaagaaacagagaaagattttagcttttcaatcctatttggcagaggacttcagctaccttcttacagtctttggctgtgttggtaccctcgtgtgctctgagctaagccacat

SEQ ID NO: 305680 - DNA, 120 bp, Artificial Sequence
  ENSG00000133678_6 (sequence is synthesized)
actaaactgactttttggtttgtatacccttgctcccgccttctgatgaaaacaccttaccctcacaaccaccatctttcctctcctttccaaagctctttccaccttgctgcactaaga

SEQ ID NO: 305681 - DNA, 120 bp, Artificial Sequence
  ENSG00000133678_7 (sequence is synthesized)
taaagtgacacttccactatatgtcaattccacacacatttattaggtacctgtgaggtaggatcctatcctctcaaacttccatttctcatgctacagagaaagataaggaagatgagc

SEQ ID NO: 305682 - DNA, 120 bp, Artificial Sequence
  ENSG00000133678_8 (sequence is synthesized)
agtgcctggaatggggcaggctgagcagtcacacaggcatagaggcacgctgagaacctggaggggagactgcagagtgccttccctgatgctgcagccggaagtgatccttccctccac

SEQ ID NO: 305683 - DNA, 120 bp, Artificial Sequence
  ENSG00000133678_9 (sequence is synthesized)
ctggcccctgggacactgtgctctgcagtgtgcagggcctgatggcactgctagattgctccttcagctcagggccacagcttaaacagctttacctttcccctcagcacctgtcccact

SEQ ID NO: 305684 - DNA, 120 bp, Artificial Sequence
  ENSG00000133678_10 (sequence is synthesized)
atcttgcacacaggtgctctaaccatgtttattgaacaaaggagggaaactgatttcactttcacttgttcattatcattccaatttttatgtgaaaatggcacaacccatttggggtac

SEQ ID NO: 305685 - DNA, 120 bp, Artificial Sequence
  ENSG00000133678_11 (sequence is synthesized)
cctcaccccaaaataaaagcccaagtctacctttgactggtaccaccttttttgtggtttcgttggtgagaaacctttatctttttcatacctttctattctcaatcacttctccaaaag

SEQ ID NO: 305686 - DNA, 120 bp, Artificial Sequence
  ENSG00000133678_12 (sequence is synthesized)
tgtgtctttccagctctgatttattcaaaacacaagcatttctgtttagagattctagcccatgggttatctggctagttattacctctcctgttcacttagttatactttattattgct

SEQ ID NO: 305687 - DNA, 120 bp, Artificial Sequence
  ENSG00000133678_13 (sequence is synthesized)
cacaggctggggaggcagaatgactctgtcaccactaggagccattagggcttcttccctggaggactgcctgcttgctttctggggacactagccctcatttcccttctgtggtacagt

SEQ ID NO: 305688 - DNA, 120 bp, Artificial Sequence
  ENSG00000133678_14 (sequence is synthesized)
ggggcaaattatttgtattaagcaaacatttatgggaaacaacccgctcccgaaaacggagcccccaagtaaagcacaaccctgaaagattatgaactatgaattgtctctggtagagat

SEQ ID NO: 305689 - DNA, 120 bp, Artificial Sequence
  ENSG00000133678_15 (sequence is synthesized)
aaatttctgcaaacatatctcagtcttccctctgtttctctggtgattaagaagttcctttttggtaaggaaaaggatttttaaccatagagttaggcatcatggaaattcaaaccagat

SEQ ID NO: 305690 - DNA, 120 bp, Artificial Sequence
  ENSG00000133678_16 (sequence is synthesized)
ttcttaatacctggtcttcctcaaagagaaataataacagtaatagtggtgctgggaacaatatggcagattattgaatgaaattgattaacttgaataaaatgctgtgaattttctcta

SEQ ID NO: 305691 - DNA, 120 bp, Artificial Sequence
  ENSG00000133678_17 (sequence is synthesized)
cgcacgcgcatctgacggttgtctcggttactcatccccagcagcggagtgagaccctgtcaaaaaaaaaagaaagaaagaaaatagaagccaagaatggagacccaaatgactgttcag

SEQ ID NO: 305692 - DNA, 120 bp, Artificial Sequence
  ENSG00000133678_18 (sequence is synthesized)
ggacggctggggagctcccagccaactctgtgtctgggtttttcaagaggatggtgaagtcggaggccagcaatgcggctaccgcctatttccgtccagcaagacccttgccctctctgg

SEQ ID NO: 305693 - DNA, 120 bp, Artificial Sequence
  ENSG00000133678_19 (sequence is synthesized)
tgccatagtattgtgcaagcaaaatgagctaagaatacggataaagatgagaaaactgattctgagagattctgagtgatttgcccaggtcacagctggcataaaggcatcacaagtggt

SEQ ID NO: 305694 - DNA, 120 bp, Artificial Sequence
  ENSG00000133678_20 (sequence is synthesized)
gagtccttgtatgccatagtattgtgcaagcaaaatgagctaagaatacggataaaggtatgtgaatgagaacaagttatgatgaccccaggaaaacccttctccgggttacctagccac

SEQ ID NO: 305695 - DNA, 120 bp, Artificial Sequence
  ENSG00000133678_21 (sequence is synthesized)
caactgtgacccttctgaaggaggaggaaacaagcactgctgttcagtgagcctgctcttccaagatggcaactcatctttatttttctttactaaatatcatacacatttacaggatca

SEQ ID NO: 305696 - DNA, 120 bp, Artificial Sequence
  ENSG00000133678_22 (sequence is synthesized)
ctcttaggatagtttctgctttctagtgttcctgtctttgggtcctcacctctgcatggttactaacgggttatccgagcctaagcctctcacgaagcggaaagtcaagttaacagactg

SEQ ID NO: 305697 - DNA, 120 bp, Artificial Sequence
  ENSG00000133678_23 (sequence is synthesized)
ccataggcctgccaagtcagaatagggcttccgaagcagaatgtttgagccaataggaattgtttggaaaacggggataaatctaaaggatgggtaggatttaagtggtaagggaggata

SEQ ID NO: 305698 - DNA, 120 bp, Artificial Sequence
  ENSG00000133678_24 (sequence is synthesized)
aagaggctataactgttctgacataggtgtggaagcaagaagaaagctgtacctagaaaaagagcgacgtttgtttggctgagaaataatctgtttaaaggataacgagaaagatgcgtg

SEQ ID NO: 305699 - DNA, 80 bp, Artificial Sequence
  ENSG00000133687_0 (sequence is synthesized)
cctccgggcagacgccgcgcgccgccggggccccggtaggggaggatgccagacgcccgggagaggccagggcagcagcg

SEQ ID NO: 305700 - DNA, 80 bp, Artificial Sequence
  ENSG00000133687_1 (sequence is synthesized)
agggcagcagcggcggcggcggcgcgatggtggtgaccacctctgcccgaggcggcggcggggaccgcacaccctcccgg

SEQ ID NO: 305701 - DNA, 120 bp, Artificial Sequence
  ENSG00000133687_2 (sequence is synthesized)
tgctggccggggcaagctgcctgtgctacggccgctccctgcagggcgagttcgtgcacgacgacgtgtgggcgatcgtgaacaaccccgacgtgcggcccggcgccccgctccgctggg

SEQ ID NO: 305702 - DNA, 120 bp, Artificial Sequence
  ENSG00000133687_3 (sequence is synthesized)
gcatcttcaccaacgacttctggggcaagggcatggccgagaacaccagccacaagtcctaccggccgctctgcgtcctcaccttcaagctaaacatatttttgactggtatgaacccat

SEQ ID NO: 305703 - DNA, 120 bp, Artificial Sequence
  ENSG00000133687_4 (sequence is synthesized)
tctactttcatgcagtaaatataattttacactgcttagtgactcttgtgctgatgtacacctgtgataaaactgtcttcaagaatcgtggacttgcttttgtaacggcattgctttttg

SEQ ID NO: 305704 - DNA, 120 bp, Artificial Sequence
  ENSG00000133687_5 (sequence is synthesized)
ctgtacatcctattcatactgaggcggtggctgggatcgttggcagagcggacgtgttagcgtgtctgctgtttctattggcctttctctcgtacaacaggagtctggatcagggctgtg

SEQ ID NO: 305705 - DNA, 120 bp, Artificial Sequence
  ENSG00000133687_6 (sequence is synthesized)
ttgggggaagtttcccttccacggtgtctcccttcttcttgctgctcagtttgtttctggggacctgtgcgatgctggtgaaagagacaggcatcacggtgtttggagtgtgcttggttt

SEQ ID NO: 305706 - DNA, 120 bp, Artificial Sequence
  ENSG00000133687_7 (sequence is synthesized)
atgacctcttttccctttccaacaagcaagacaagtcgagcaatggggccctctgtccacgcagcccacagcagcccgggagcccccagccctcctcactgccaggccatcctcaccggg

SEQ ID NO: 305707 - DNA, 120 bp, Artificial Sequence
  ENSG00000133687_8 (sequence is synthesized)
agaatgggaagcagcagcggttccctcacaaaggagcttggggtggctgccactctccactgccaccagaacccaagagcagtggattcccagtgtccccacgagctgtgtggtccatga

SEQ ID NO: 305708 - DNA, 120 bp, Artificial Sequence
  ENSG00000133687_9 (sequence is synthesized)
tgaggtatctgagagcaagcagcaatagaaatttcctgcttaccatgagaccatttttaaaaagggccattttggtcctaagttatgtgcttgtcattttgtacttccgtctgtggataa

SEQ ID NO: 305709 - DNA, 120 bp, Artificial Sequence
  ENSG00000133687_10 (sequence is synthesized)
tgggaggatctatgcccctcttttcagagcaggataatccagcttcattttcgccttacattcttacgagattcctcacctattcctacctcttggccttcaatgtgtggcttctgcttg

SEQ ID NO: 305710 - DNA, 120 bp, Artificial Sequence
  ENSG00000133687_11 (sequence is synthesized)
cacccgtgaccctgtgctatgactggcaggtcggcagtattcctctggtagagaccatatgggacatgcggaacttagccaccatctttctggcggttgtgatggccttattgagcctgc

SEQ ID NO: 305711 - DNA, 120 bp, Artificial Sequence
  ENSG00000133687_12 (sequence is synthesized)
actgcttagcagcctttaagagactggagcacaaggaggttttagtcggcttgttgttcctggtgttcccgttcattccagccagcaacctcttcttcagggtgggttttgtggtggcgg

SEQ ID NO: 305712 - DNA, 120 bp, Artificial Sequence
  ENSG00000133687_13 (sequence is synthesized)
agagagtcctttacatgcctagcatgggctactgcatcctttttgtgcatggactgagcaagctctgcacttggctgaatcgatgtggggccaccaccctgattgtgtccactgtgttgc

SEQ ID NO: 305713 - DNA, 120 bp, Artificial Sequence
  ENSG00000133687_14 (sequence is synthesized)
tgctgttgcttttctcttggaaaactgtgaaacagaatgaaatttggctgtcaagagagtccctattcaggtctggagttcaaactctgccccacaatgccaaggttcactacaactatg

SEQ ID NO: 305714 - DNA, 120 bp, Artificial Sequence
  ENSG00000133687_15 (sequence is synthesized)
ccaatttcctgaaggaccaaggtcggaacaaggaagcgatctaccactacagaacagctctcaagttgtatccacgccatgcaagtgcgctcaacaaccttggaacactgacgagagaca

SEQ ID NO: 305715 - DNA, 120 bp, Artificial Sequence
  ENSG00000133687_16 (sequence is synthesized)
cagcagaggcaaagatgtactatcagagggctctccagctccatccacagcataaccgggctcttttcaatctggggaatctcctcaagtcccaggagaaaaaggaagaagctatcacct

SEQ ID NO: 305716 - DNA, 120 bp, Artificial Sequence
  ENSG00000133687_17 (sequence is synthesized)
agagtttgcagatgcatattcaagcttagcttcgttattggctgagcaggagcggtttaaagaagctgaagaaatataccaaactggaataaagaactgtccagacagctcagatttaca

SEQ ID NO: 305717 - DNA, 120 bp, Artificial Sequence
  ENSG00000133687_18 (sequence is synthesized)
caacaactatggggttttcttagttgatactggcttaccagaaaaggcagtggcccattaccagcaggccatcaaacttagccccagtcatcacgtggccatggtgaacttgggaagact

SEQ ID NO: 305718 - DNA, 120 bp, Artificial Sequence
  ENSG00000133687_19 (sequence is synthesized)
ctacaggtcactgggagagaacagcatggctgaagaatggtacaagcgcgccctgcaggtggcacacaaagctgagatattgtcacctttgggagcactgtattacaacactggccgata

SEQ ID NO: 305719 - DNA, 120 bp, Artificial Sequence
  ENSG00000133687_20 (sequence is synthesized)
cgaagaggctttgcagatttaccaggaagctgcagcacttcagccttctcagagggagctccgcttggcactggctcaggttttggccgtgatgggtcagacaaaagaagctgaaaagat

SEQ ID NO: 305720 - DNA, 120 bp, Artificial Sequence
  ENSG00000133687_21 (sequence is synthesized)
gaccaatcacattgtgtcagaggagaccggatgccttgaatgctatcgcctcttgtcagccatctatagcaagcaggagaaccacgacaaggcacttgatgctatagacaaggctctcca

SEQ ID NO: 305721 - DNA, 120 bp, Artificial Sequence
  ENSG00000133687_22 (sequence is synthesized)
gctgaaaccaaaggacccaaaagtcatttctgaactttttttcacaaaaggaaaccaattaagagagcagaaccttctcgacaaagcttttgagagctatagagtggctgtgcaactaaa

SEQ ID NO: 305722 - DNA, 120 bp, Artificial Sequence
  ENSG00000133687_23 (sequence is synthesized)
cccagaccaagcacaggcctggatgaacatgggtggcatccaacacatcaagggaaaatatgtgtctgcaagagcttattatgagagagccttacagctggttccagacagcaaactgct

SEQ ID NO: 305723 - DNA, 120 bp, Artificial Sequence
  ENSG00000133687_24 (sequence is synthesized)
gaaggaaaatcttgccaaattggatcgcctagaaaaacgattacaagaagttcgagaaaaggatcaaacatagcaccaccgtctgacccaacctcataggataatgtggtgcctctgaaa

SEQ ID NO: 305724 - DNA, 120 bp, Artificial Sequence
  ENSG00000133687_25 (sequence is synthesized)
ggggagtgatggaagccttgctttcacatcagcaggggcacaactaatgagattttctctcattccgagttcagggtgacacattttgggacatctgctggtagcccagtgctgaaggac

SEQ ID NO: 305725 - DNA, 120 bp, Artificial Sequence
  ENSG00000133687_26 (sequence is synthesized)
ttgcttttccatgaagaagacgaaaacagcaaacaagggcaagaaggtctgagagggaaggagaatgacatttacacattttacagatttttgtttggtttaactccagatttctcttga

SEQ ID NO: 305726 - DNA, 120 bp, Artificial Sequence
  ENSG00000133687_27 (sequence is synthesized)
tatatctctgtgcttttgagacctggagatctaattctgtttagacattttttgtcccagaaatacagaagcttgaaatgctatgaaggcagagcttctattctttatgggatgaaatat

SEQ ID NO: 305727 - DNA, 120 bp, Artificial Sequence
  ENSG00000133687_28 (sequence is synthesized)
ttcaaaagaggataaatcctctgtggtaagccatttggaaaatcctaccaagaattggcttatttaattttccagaaccaggaatgagtatctaatagcttttgtagaaccttccagaat

SEQ ID NO: 305728 - DNA, 120 bp, Artificial Sequence
  ENSG00000133687_29 (sequence is synthesized)
atgtggggaaaaagggctattgctaagtgagctttatctaatatcctcctaagagttttactagtgcttttttgaggaattacagggaagctcctggaattgtacatggatatctttatc

SEQ ID NO: 305729 - DNA, 120 bp, Artificial Sequence
  ENSG00000133687_30 (sequence is synthesized)
cctagggggaaatcaaggagctgggcacccctaattctttatggaagtgtttaaaactattttaattttattacaagtattactagagtggtggttctactctaagatttcaaaagtgca

SEQ ID NO: 305730 - DNA, 120 bp, Artificial Sequence
  ENSG00000133687_31 (sequence is synthesized)
tttaaaatcatacatgttcccgcctgcaaatatattgttattttggtggagaaaaaaatagtatattctacataaaaaattaaagatattaactaagagaaatgtcctactttattatct

SEQ ID NO: 305731 - DNA, 120 bp, Artificial Sequence
  ENSG00000133687_32 (sequence is synthesized)
taatgttcagacatcatgagatttattatttttttgaaaaatatattgaaccattgaggaacctttatgatgtatcacagaaatcttcatagattctaactagatggaaaaagagctcta

SEQ ID NO: 305732 - DNA, 120 bp, Artificial Sequence
  ENSG00000133687_33 (sequence is synthesized)
tttatttgtgttcctaggcttaatgagaattctgggcttagaacatcaacgattaatacccagaattctttgttttgagaatattatggagaatgctctaaaaatctagggtaaagatct

SEQ ID NO: 305733 - DNA, 120 bp, Artificial Sequence
  ENSG00000133687_34 (sequence is synthesized)
gagaatgctctaaaaatctagggtaaagatctaaattcaaattttaaatatatatttatatttaagaaataggaaaggcaaagttgaactcacaatttgacatttatttttagtgttatt

SEQ ID NO: 305734 - DNA, 120 bp, Artificial Sequence
  ENSG00000133687_35 (sequence is synthesized)
actttgaagaaacctatcagagtagagggccttcattctgcttctggccttactctcacttgccttgggatctttatcaagtctgttgaatatctttgcactttagtgtctatatctgta

SEQ ID NO: 305735 - DNA, 120 bp, Artificial Sequence
  ENSG00000133687_36 (sequence is synthesized)
aagtggaaaatttttgtgtgtggttttttaaatatctcttaaatcctgataaacagctaaacagtatcaaaaggcagctaaattgtataaaaaaatacctgcaaaaaccatacaaatgct

SEQ ID NO: 305736 - DNA, 120 bp, Artificial Sequence
  ENSG00000133687_37 (sequence is synthesized)
acctgctgagagctgttgccatgaagagaaatccaacaggagctgtgcctgtagataggcgagaccggctactgccagagttggaggtgggagaggctgttaaaacttaaatgaaagcag

SEQ ID NO: 305737 - DNA, 120 bp, Artificial Sequence
  ENSG00000133687_38 (sequence is synthesized)
agatagaaaaagtagtttgcttggcatctcccaaattatcttgagcaaacaataaaataagaaatgtttcagaagacaattcggctcccaggcccaaaccaaaactcgaacctggtactt

SEQ ID NO: 305738 - DNA, 120 bp, Artificial Sequence
  ENSG00000133687_39 (sequence is synthesized)
tttgtaagtgcgggccaagaaaggggctgtaaagttaaagagccggtggcgcctctgaacacacccgggcagggcgagcaggatgtccttgtccagggagaccccttctcctggctttga

SEQ ID NO: 305739 - DNA, 120 bp, Artificial Sequence
  ENSG00000133687_40 (sequence is synthesized)
ggaaggtgctccctatccccgcgggttcctccgccaagcgggacgccgcgccgggcgggtgagagaaagcccgggcaggagagcacagagccggcgactggacgcgagcgcggggcgggt

SEQ ID NO: 305740 - DNA, 120 bp, Artificial Sequence
  ENSG00000133687_41 (sequence is synthesized)
ggagagcgtctctccgggcgccgctgctgttgtcccgggtgctgaaaagccgggaacttcccgggaagcagcggcacttttctccctggaaggctaaacatatttttgactggtatgaac

SEQ ID NO: 305741 - DNA, 120 bp, Artificial Sequence
  ENSG00000133687_42 (sequence is synthesized)
gttttaatatcagctttcaaaactgatcttataaaatgtaaatctaaattgtaaaatagttaagttttaacagtccctcccaaactttgtgttgattattcacttgctaaagagatgtga

SEQ ID NO: 305742 - DNA, 120 bp, Artificial Sequence
  ENSG00000133687_43 (sequence is synthesized)
ggaatcagccttcagttttttggcagtagtatattttggaagtgaagaaattggaacacctgtttctaatttggtcttcatcattagagacaaaaccaaaacactccaggcagtactgtt

SEQ ID NO: 305743 - DNA, 120 bp, Artificial Sequence
  ENSG00000133687_44 (sequence is synthesized)
tcacataattcgcatgctcaggccagggcagggtaaaaatagccttctgcttctttcaacccagtatcaggaagcactaccccagtgttattatttgttttgtcaaggtaagtctaaata

SEQ ID NO: 305744 - DNA, 120 bp, Artificial Sequence
  ENSG00000133687_45 (sequence is synthesized)
aacaagaaaaacttcttcggaaggcatggcgaagggagtattttaaatgaaaatgattacagaatttgaattagcatgcatctctttgtgtgcaacagtaatccaagaatgtatatgtta

SEQ ID NO: 305745 - DNA, 120 bp, Artificial Sequence
  ENSG00000133687_46 (sequence is synthesized)
ccactacaaccatttgtttctaatagttttttcatgttatataacataaatgtatccacaaccttaattaagaactattcttcccccaaaatcatagtcctagtgtcaagaaacatactc

SEQ ID NO: 305746 - DNA, 120 bp, Artificial Sequence
  ENSG00000133687_47 (sequence is synthesized)
cagtgtttattgtaaaataacaaccacaccctcaaattgaaaaaagtgaatgtctaggactttattacaacttttcagaataatctgtaatgaaaactcatgcttaaaaatttaatggaa

SEQ ID NO: 305747 - DNA, 120 bp, Artificial Sequence
  ENSG00000133687_48 (sequence is synthesized)
aagactgagccccaaattttgaatagtgattacgccttacttgaagtgctaataaaggtaggagagtacatttgttggaataacagaaatggtgatttcagcctaaaagtttctgagggt

SEQ ID NO: 305748 - DNA, 120 bp, Artificial Sequence
  ENSG00000133687_49 (sequence is synthesized)
aaaggatcacatgaccttcaggaaactctctgcctcctgtaggtgctttcctatctcccccatccttccctaccccttttcccttttccttcctctctttttctctcactgtcactctgt

SEQ ID NO: 305749 - DNA, 120 bp, Artificial Sequence
  ENSG00000133687_50 (sequence is synthesized)
ctacacacactggcatcttttgaacactaaaagtaagcactgttttttaaaaaagtaattatttgttggatcagatacttttatcccaagtgaataccttcactgagatgtggccaatgc

SEQ ID NO: 305750 - DNA, 120 bp, Artificial Sequence
  ENSG00000133687_51 (sequence is synthesized)
aatagtttcacagtaaaaacagtgcctataagaaaatagatcacatactatttttcaatgatattaagtgtattttgtaactattttcatttggtccttgtaacatgaaataatacatgg

SEQ ID NO: 305751 - DNA, 120 bp, Artificial Sequence
  ENSG00000133687_52 (sequence is synthesized)
aacttacctttataataaaaatggagtgccctggttcatcatagaggtgcatctagtttgcccttaatggaagtatacttgctgtgtggattgatagcaccttcttgaaatggaggagct

SEQ ID NO: 305752 - DNA, 120 bp, Artificial Sequence
  ENSG00000133687_53 (sequence is synthesized)
cagctggcctcatggatgtgcaatttttgcagtcccacagggccttgcatacagaagcaccccgagctcagttgaatgtctgtttgattttttcttatttatttttttgagacacagttc

SEQ ID NO: 305753 - DNA, 120 bp, Artificial Sequence
  ENSG00000133687_54 (sequence is synthesized)
ttttgagacacagttccactttgtctttttgtcacccaggatggagttcagtggcacaaacatggctcactgtagcctcgacctccctggctgaagggatcctcccacctcagcctccca

SEQ ID NO: 305754 - DNA, 120 bp, Artificial Sequence
  ENSG00000133687_55 (sequence is synthesized)
agtgctgggattaaaggcataagccaccatgtccaactgaaattcttaataattaataatttttgagcaagaggtccacactttcattttgcactgggttcccaaacaggtcctgggtag

SEQ ID NO: 305755 - DNA, 120 bp, Artificial Sequence
  ENSG00000133687_56 (sequence is synthesized)
gaaggatggctgaggataaaacaggagttgctttggcctggctgaacatttgaaccaatgatcagagtttcattttatgattgtgttactctgaacagatttgctatttttttccagcta

SEQ ID NO: 305756 - DNA, 120 bp, Artificial Sequence
  ENSG00000133687_57 (sequence is synthesized)
catttagagttcctcatgtatatatcacccctctttttccagtccatctaacctctccttttttttgtgcctagaatcagttctccttgccttcaaaatccctgataagtgtccatttct

SEQ ID NO: 305757 - DNA, 120 bp, Artificial Sequence
  ENSG00000133687_58 (sequence is synthesized)
ttttgtatcctttgatgtagaagccacaagaatggctttagcagcttattttaatcttatgaattattcattcaggattttttaaatgattcagatgctttcaatctgttaacagtattt

SEQ ID NO: 305758 - DNA, 120 bp, Artificial Sequence
  ENSG00000133687_59 (sequence is synthesized)
ataaaacatgtttcagtgatacaacataggtgaactaaaccaaagatgcaaatgccttggaggaaaagaaattgtattatagagaatcctgagatatatccttttgggttgtttaattta

SEQ ID NO: 305759 - DNA, 120 bp, Artificial Sequence
  ENSG00000133687_60 (sequence is synthesized)
aagcctatcacaaaacaaagagaattgtcgcactttaattccaacctcctgcagtacttcacaacccttagcataagattctgaaatttgtaataggtggtacctagtttgatgcagggt

SEQ ID NO: 305760 - DNA, 120 bp, Artificial Sequence
  ENSG00000133687_61 (sequence is synthesized)
tttgcagcagttgtgcgaatgcctctgcgcaacggcctttcagtcagactaaatgagaaaatccaaactgtcctatcaaaactgacccacaataactgtactctgaggcgaaacagagca

SEQ ID NO: 305761 - DNA, 120 bp, Artificial Sequence
  ENSG00000133687_62 (sequence is synthesized)
aatgtgggtttcctgttttcattgtaaaacattccaggttctcagattgaagagctacattcagctgatagttgacatctgttccctcacacgtagtggctctcaacacgggctgcactt

SEQ ID NO: 305762 - DNA, 120 bp, Artificial Sequence
  ENSG00000133687_63 (sequence is synthesized)
tggaatcacctgaggacctttcggaatcttcggttgaatcatcctggctgtcctggtgatgcttcttatgtgcagctaggctggagaaccactacagggctgacacctggaatgggagct

SEQ ID NO: 305763 - DNA, 120 bp, Artificial Sequence
  ENSG00000133687_64 (sequence is synthesized)
tgtaacttttacaaaataatagatgtttatcatcttttgcaatttttacttttaagtctatactaaaatgagccaaagaagtcttaacaatgatgtatggcacaattggttggttgaggc

SEQ ID NO: 305764 - DNA, 120 bp, Artificial Sequence
  ENSG00000133687_65 (sequence is synthesized)
tatcattccatgattacaaataggtggttatgtggggtggttttgcacttgtggcaattggactgcaatttggccttaaaatgacacaattcctcgttctcagatggagaggaattgcct

SEQ ID NO: 305765 - DNA, 120 bp, Artificial Sequence
  ENSG00000133687_66 (sequence is synthesized)
tgaaatttgcatgtaccagactaagtgccagtatatatatgactgatattttcgtgactcatagaaggtgtccatggtatagagtttatgcctacatctctatctttattttgggcacac

SEQ ID NO: 305766 - DNA, 120 bp, Artificial Sequence
  ENSG00000133687_67 (sequence is synthesized)
atgagcttttgttaattatttctttgtacttgttagaatctgtttttgaaaaaaaaaaaaacttttgctttgatttgtggtggattcaccttcttaaaataataaatttagaggatatta

SEQ ID NO: 305767 - DNA, 120 bp, Artificial Sequence
  ENSG00000133687_68 (sequence is synthesized)
ggaatgacattcaaaacaaatatagtgagaggtgattttttaaaaatttttgttcctggtttccaaattatgtttactttgatttgattatatgttggtatctcccaaatataggttaac

SEQ ID NO: 305768 - DNA, 120 bp, Artificial Sequence
  ENSG00000133687_69 (sequence is synthesized)
ttagctatttaaatggtatcttttgacatttaaaaagaattaagtacctgtcaaatctagcattgaggttgcagttgaataagataaaagcttaggatgtcaaaaaataatatagagaaa

SEQ ID NO: 305769 - DNA, 120 bp, Artificial Sequence
  ENSG00000133687_70 (sequence is synthesized)
tattataagattttatgattattcttgacgtttttgatgcaaaaggaaaatatgctgaatagttcttccaaaaaatattatttccctcaatattttatttgtagccatgtaatttaaaga

SEQ ID NO: 305770 - DNA, 120 bp, Artificial Sequence
  ENSG00000133687_71 (sequence is synthesized)
gaacagaaaataactgcaatcaaaagtatggtttaatatcaatcaaagtggcacaacagaattgataagatctttataacaatcaattggctgatattaaaatattgattttaattgatc

SEQ ID NO: 305771 - DNA, 120 bp, Artificial Sequence
  ENSG00000133687_72 (sequence is synthesized)
ttttcaattaaaatctttagggcctgtaactcataaaatcagcatccaccacaatatatggtcattattggtttgtaagcatagatcaccattgactcctacctggagagacatgtctat

SEQ ID NO: 305772 - DNA, 120 bp, Artificial Sequence
  ENSG00000133687_73 (sequence is synthesized)
ttctaaaaatccagtagtttctttgcattctcagtagtacacgttgtatatatatatatgtaacaaatttggtagttttcagtatgtgtgatgtcctttgggggttatttatcttgctgg

SEQ ID NO: 305773 - DNA, 120 bp, Artificial Sequence
  ENSG00000133687_74 (sequence is synthesized)
tccataggaggggtacactaccccaagaatcaagacatctgagttctagttctagttctagctctgccactgaagagccaccttacctggggcaagttagccattgtctcccagtcatgt

SEQ ID NO: 305774 - DNA, 120 bp, Artificial Sequence
  ENSG00000133687_75 (sequence is synthesized)
ttaccacccatgaaaggactcgtcggtttgatgtttccattaagctcaatgagtaactctaatagttactcttgaatctggattgaaaaacaccatgcatctgatgagataattcataaa

SEQ ID NO: 305775 - DNA, 120 bp, Artificial Sequence
  ENSG00000133687_76 (sequence is synthesized)
tgttgccccttttttaaatgatacaaccctaaaagtgactgaattgcccaagtgcttgaacatggcagaggtagttactcctattttgcagtttgtgcacttaaaaattcctacagtgat

SEQ ID NO: 305776 - DNA, 120 bp, Artificial Sequence
  ENSG00000133687_77 (sequence is synthesized)
tgttactttactggggaaaaaagatgaggtgaaacttcctcccaaggaattaaaatatctgtagaagccatggcttgcttttataatgtggaaatcatttgatttgctgtaattcacgca

SEQ ID NO: 305777 - DNA, 120 bp, Artificial Sequence
  ENSG00000133687_78 (sequence is synthesized)
gatccctccttttgtcagggggaaatgatttgcatcatgttcttttttcataatgcttttacttcctgtttggatcagttgtatgtaaatgtacatttttgttactttggctgtgcccgt

SEQ ID NO: 305778 - DNA, 120 bp, Artificial Sequence
  ENSG00000133687_79 (sequence is synthesized)
tagaatttatcttccataaagtatttctcccattgagtctaatgatgtatactttgcctaggtctttccaaaattaaatttatgtaaatgtctattttatataaaatatgattaaaataa

SEQ ID NO: 305779 - DNA, 120 bp, Artificial Sequence
  ENSG00000133687_80 (sequence is synthesized)
aatttctcggaggctgttgggcagctttgcagatgagaagtgtatcagccccttaagggtttcgttcagatgagacgaggcgggagccttgagctgacagggctgcgtgggttcaggaga

SEQ ID NO: 305780 - DNA, 120 bp, Artificial Sequence
  ENSG00000133687_81 (sequence is synthesized)
gggagcagaaaactctcccgagccccccagcccccgccttgcacccttggctgctcccagaggctctccaatctgccagacttctctggatctagactttagaaggtgcagagagaggct

SEQ ID NO: 305781 - DNA, 120 bp, Artificial Sequence
  ENSG00000133687_82 (sequence is synthesized)
cagtagtttttttcaatgttattgttacatgtataaattaatgttacacagatttttgtactaatgatttaatttgtaaacccatattggacaaccaatctctatgtcagtttcttttgg

SEQ ID NO: 305782 - DNA, 120 bp, Artificial Sequence
  ENSG00000133687_83 (sequence is synthesized)
acagaaattacaagcctaattttctcactccaatattctctgtgtatcacaggtcgcttttagacaaagatggtccgttattggccattgatatattctctctcactttggtacagaatc

SEQ ID NO: 305783 - DNA, 120 bp, Artificial Sequence
  ENSG00000133687_84 (sequence is synthesized)
tatcaagaacaatacatgatatttgatgtttttattaccacttacttgtaatatttttctgaggaattgcaagtggtctaagatcgctgaactcaacatggagcaatttgataatcctac

SEQ ID NO: 305784 - DNA, 120 bp, Artificial Sequence
  ENSG00000133687_85 (sequence is synthesized)
aaattctgttttaacatctgttagaatattacagaggctcgtgagagaggctcctaagagaatagtttttatggcataaaacagagatgagttttcaatcccctccttcttttcagtcgt

SEQ ID NO: 305785 - DNA, 120 bp, Artificial Sequence
  ENSG00000133687_86 (sequence is synthesized)
gtctaaatgatttgataccagttttcagagtcttagatgcatgacccctgctatggagaaacagatataagttgtcttctctctaaattgatgatatagttttgttgacacacatagtgc

SEQ ID NO: 305786 - DNA, 120 bp, Artificial Sequence
  ENSG00000133687_87 (sequence is synthesized)
ccttgatagacagtagattctgctaccataaaattaccagattatctttaaaactcaaactcaacatctctgcaacatgcccggcagcattcagttggcttaagggtaataagtgatttg

SEQ ID NO: 305787 - DNA, 120 bp, Artificial Sequence
  ENSG00000133687_88 (sequence is synthesized)
atactgtatgtcagttttgtagggagcgatttgcatcagaaatttttggaggctccagcaagaagcaaaattaggtcattctatgaatatttaagtgacaaagaatataaacctagttgt

SEQ ID NO: 305788 - DNA, 120 bp, Artificial Sequence
  ENSG00000133687_89 (sequence is synthesized)
gggctttagattaaaaacctctgtctgtgttggatgattttaacgcatgctttagtataaagtgtgagctaaaatggtgatggatgtgtctgtgctatacactggcagtcctcagctgcc

SEQ ID NO: 305789 - DNA, 120 bp, Artificial Sequence
  ENSG00000133687_90 (sequence is synthesized)
cttggcttgtgttgaaacagacacagaggctggcttcatcagtgttgcttcatctcacctcaccctggacccttccttttcataagcccctccccctgcctctgacaggctggttgtttt

SEQ ID NO: 305790 - DNA, 120 bp, Artificial Sequence
  ENSG00000133687_91 (sequence is synthesized)
gcagttactcagatgtgctaagtgtgcttctctctcacagcctttgcactaactgttcctgcagcacttctcttccagatagttatcttagagtttccaagatatttcatatcatgctgg

SEQ ID NO: 305791 - DNA, 120 bp, Artificial Sequence
  ENSG00000133687_92 (sequence is synthesized)
tttctgaccaaatgttactatatcagagaggtcttctgagatgaccctttgtaaataggaaccttccgcagcccatcatgttctctactaccatgtcctgccttactttccctatagtat

SEQ ID NO: 305792 - DNA, 120 bp, Artificial Sequence
  ENSG00000133687_93 (sequence is synthesized)
ttatcaccatctaaaacacatttatttgtttatggactttctgccaccgttagaatatttgactctatgagaacagctatgtgttttattcatctaagctcattttaaaaatgatcaaga

SEQ ID NO: 305793 - DNA, 120 bp, Artificial Sequence
  ENSG00000133687_94 (sequence is synthesized)
ttttaatgatgttgaactttattttagttccttctgtagtatctttgcattcagccttactattaacaaattttgtagcagatggaagtttaaacaggataacgtatatactttttcctt

SEQ ID NO: 305794 - DNA, 120 bp, Artificial Sequence
  ENSG00000133687_95 (sequence is synthesized)
acttgtgtgtaagaagtgtcagatggcttatttaaaattgattacttgataaatttaatcttttgtgaactgcagtggcaaattgctatcaagttattgcattttacatagttgaagttg

SEQ ID NO: 305795 - DNA, 120 bp, Artificial Sequence
  ENSG00000133687_96 (sequence is synthesized)
tgaacaattgttaagaacaacaaatgatgactaggatcattatcttttcttacacacaaaggtcccatcttttagcacttttctgttctagatgtgaatgtaaaatgatgtgagatataa

SEQ ID NO: 305796 - DNA, 120 bp, Artificial Sequence
  ENSG00000133687_97 (sequence is synthesized)
gaatggaactgaaagattgaaaagttctttcttctgcccctttgggcatgaaaacaatgaagcagctgttgagcataactcaggactgccttcccctctctgactttcaacatcctatct

SEQ ID NO: 305797 - DNA, 120 bp, Artificial Sequence
  ENSG00000133687_98 (sequence is synthesized)
tcatgtttttaactatttagtcataaaagagtgcatcagatgtgcaagcaagacacaaactgttagagaaaaacccacctagcttaacattttttggtagcaaatgaattcatttcttgg

SEQ ID NO: 305798 - DNA, 120 bp, Artificial Sequence
  ENSG00000133687_99 (sequence is synthesized)
ttgcacaactttatttaacagcatcctggcatttcaaacacccagagtgtatgaaatcagtattgacaaaccttgggcaacatgtaacacacagtgaagccatccccttagtcaagcgac

SEQ ID NO: 305799 - DNA, 120 bp, Artificial Sequence
  ENSG00000133687_100 (sequence is synthesized)
ttgtcctccattgccaccatccgtccacatgcacagcccacgcggactgtggttgtgggtcagtgtcatgccaaaaagctctttcctacactcagctgaaatcagccattttgcaggcag

SEQ ID NO: 305800 - DNA, 120 bp, Artificial Sequence
  ENSG00000133687_101 (sequence is synthesized)
tttttcagaagctggatgaaaggattcattctgtatttacatcagcctgacatattctgtatttatatcagcctgacatttctgattttctaggactttttagtttttttcctgccgtac

SEQ ID NO: 305801 - DNA, 120 bp, Artificial Sequence
  ENSG00000133687_102 (sequence is synthesized)
agtgtattgactaccatttccagctctttcagttggcaaacttgataatagttttagttaaataactagtttgtgttttcgattttaaaaaatgttgtgaagatcagtattagttaggaa

SEQ ID NO: 305802 - DNA, 120 bp, Artificial Sequence
  ENSG00000133687_103 (sequence is synthesized)
gccctgcagcatatctgtagaaccttctttccaggttgacctttatcttatgccagactctttgggtaaacttattcaagcattcgttaatttgttgaattatattatcctctagctcac

SEQ ID NO: 305803 - DNA, 120 bp, Artificial Sequence
  ENSG00000133687_104 (sequence is synthesized)
ctttctcagtcttgtctacagagatgtttcgagacacattttcagacacctgccaaaatccttcccctgatgtaaggctgcaaatctataatatcaaaaaaggaaactaggtttatttgg

SEQ ID NO: 305804 - DNA, 120 bp, Artificial Sequence
  ENSG00000133687_105 (sequence is synthesized)
tataccttgctcttattataagcatgctgctgtctgttgacatcatttcccatcctcagtgccaataaaaccatgaatgtaggatttgtcggaaactaatattgtgttccttactctgtt

SEQ ID NO: 305805 - DNA, 120 bp, Artificial Sequence
  ENSG00000133687_106 (sequence is synthesized)
gtaacctgaggggagaaatttaatctgttcgcgcaaagtaggggatttgacaaatttgaaaaatagattaatgagttgaaaagacattatatggtagaacatattaaggccataatggag

SEQ ID NO: 305806 - DNA, 120 bp, Artificial Sequence
  ENSG00000133687_107 (sequence is synthesized)
cccaagttttacattgatagataataggaagtaacggtaaatatctgaggagagctttctaaaacatgtgaggaagaaaaccttgtggaaaacacatggtgtattttggaaaaggctttt

SEQ ID NO: 305807 - DNA, 120 bp, Artificial Sequence
  ENSG00000133687_108 (sequence is synthesized)
ctatgcattctggtgtgagtagttgagagccttgtttgcagaagaaagtgagggaatggatagaatatcgtggaaaaagaaagatttccatggtacatagggactgtcagcatgtaaagg

SEQ ID NO: 305808 - DNA, 120 bp, Artificial Sequence
  ENSG00000133687_109 (sequence is synthesized)
ttgaatggaaaagaaaaatagaaaattaagaactccaggtcagaacccctaagaaaatgagaagatttatggccactgatagacgtggataagccagacagaagcaatattttaggaaag

SEQ ID NO: 305809 - DNA, 120 bp, Artificial Sequence
  ENSG00000133687_110 (sequence is synthesized)
aaataagatgagtgtcaacattgtttccagttaaacaagtaatataaatatataaaggaaactgtgaaaactcagagaaaataacgtatacatcctttattcataatataatacctggag

SEQ ID NO: 305810 - DNA, 120 bp, Artificial Sequence
  ENSG00000133687_111 (sequence is synthesized)
acaacaaatattatcattctttaatatgcatctcttttaaatatatttatgtgttccatactaatatttatacactgtttgtatcctgtttttttcacttgccattaaattatacatact

SEQ ID NO: 305811 - DNA, 89 bp, Artificial Sequence
  ENSG00000133687_112 (sequence is synthesized)
tgctaccaggatgggtagggaaggaccatcaggtgggggtagggctgggcatatctgagctcagaccctccttgggcgggtcttgctgt

SEQ ID NO: 305812 - DNA, 120 bp, Artificial Sequence
  ENSG00000133687_113 (sequence is synthesized)
catatctgagctcagaccctccttgggcgggtcttgctgtggctgctgtgggggctgggagtgagattcctaggtcactggaattgtgtatgtaggaggattacggctgcctctgctgag

SEQ ID NO: 305813 - DNA, 120 bp, Artificial Sequence
  ENSG00000133687_114 (sequence is synthesized)
agtcacaggcctcacccagctcccacacaaaccgaagggctggtctcactcccaccatgcccccctcaacaacccccagaccgtaagcgatatgaggctgtctgcctcccagctgcataa

SEQ ID NO: 305814 - DNA, 120 bp, Artificial Sequence
  ENSG00000133687_115 (sequence is synthesized)
aagcgatatgaggctgtctgcctcccagctgcataagaaaagggcttggttcttccctagcctgtggagtctgcacatcagatttgcaccctcccccgagttctggccaggaggcttctc

SEQ ID NO: 305815 - DNA, 120 bp, Artificial Sequence
  ENSG00000133687_116 (sequence is synthesized)
tacaaagttcagctagagatttccttctctctgtgtagttttatcccctgcttctctcccattggatccctgtggttccaggcaggaacggcctgccaggggagcccgcgagctcccagg

SEQ ID NO: 305816 - DNA, 120 bp, Artificial Sequence
  ENSG00000133687_117 (sequence is synthesized)
cccgcgagctcccagggcctttctgctgcttcctctaccccagtatttcacttggctctccaaattgactcagctccagattcctcacctattcctacctcttggccttcaatgtgtggc

SEQ ID NO: 305817 - DNA, 120 bp, Artificial Sequence
  ENSG00000133687_118 (sequence is synthesized)
atgctggagattcagaaaaacactgacagatctgccatagacctccagagctctccgactgttcggttaccctggagaaggtttctaacattctaccttgtgtgatgggagtagaaagtc

SEQ ID NO: 305818 - DNA, 120 bp, Artificial Sequence
  ENSG00000133687_119 (sequence is synthesized)
cagagaccacccaacaagtcagcccttcctacacaaaaactcccaagaaatgcctcagctaataagccccgaaagagaaatagtgattctccctgaataaagtcaagatattgatgtgta

SEQ ID NO: 305819 - DNA, 120 bp, Artificial Sequence
  ENSG00000133703_0 (sequence is synthesized)
ggcggcagtggcggcggcgaaggtggcggcggctcggccagtactcccggcccccgccatttcggactgggagcgagcgcggcgcaggcactgaaggcggcggcggggccagaggctcag

SEQ ID NO: 305820 - DNA, 120 bp, Artificial Sequence
  ENSG00000133703_1 (sequence is synthesized)
caggcactgaaggcggcggcggggccagaggctcagcggctcccaggtgcgggagagaggcctgctgaaaatgactgaatataaacttgtggtagttggagctggtggcgtaggcaagag

SEQ ID NO: 305821 - DNA, 120 bp, Artificial Sequence
  ENSG00000133703_2 (sequence is synthesized)
tgccttgacgatacagctaattcagaatcattttgtggacgaatatgatccaacaatagaggattcctacaggaagcaagtagtaattgatggagaaacctgtctcttggatattctcga

SEQ ID NO: 305822 - DNA, 120 bp, Artificial Sequence
  ENSG00000133703_3 (sequence is synthesized)
cacagcaggtcaagaggagtacagtgcaatgagggaccagtacatgaggactggggagggctttctttgtgtatttgccataaataatactaaatcatttgaagatattcaccattatag

SEQ ID NO: 305823 - DNA, 120 bp, Artificial Sequence
  ENSG00000133703_4 (sequence is synthesized)
agaacaaattaaaagagttaaggactctgaagatgtacctatggtcctagtaggaaataaatgtgatttgccttctagaacagtagacacaaaacaggctcaggacttagcaagaagtta

SEQ ID NO: 305824 - DNA, 120 bp, Artificial Sequence
  ENSG00000133703_5 (sequence is synthesized)
tggaattccttttattgaaacatcagcaaagacaagacagagagtggaggatgctttttatacattggtgagagagatccgacaatacagattgaaaaaaatcagcaaagaagaaaagac

SEQ ID NO: 305825 - DNA, 120 bp, Artificial Sequence
  ENSG00000133703_6 (sequence is synthesized)
tcctggctgtgtgaaaattaaaaaatgcattataatgtaatctgggtgttgatgatgccttctatacattagttcgagaaattcgaaaacataaagaaaagatgagcaaagatggtaaaa

SEQ ID NO: 305826 - DNA, 120 bp, Artificial Sequence
  ENSG00000133703_7 (sequence is synthesized)
agaagaaaaagaagtcaaagacaaagtgtgtaattatgtaaatacaatttgtacttttttcttaaggcatactagtacaagtggtaatttttgtacattacactaaattattagcatttg

SEQ ID NO: 305827 - DNA, 120 bp, Artificial Sequence
  ENSG00000133703_8 (sequence is synthesized)
ttttagcattacctaatttttttcctgctccatgcagactgttagcttttaccttaaatgcttattttaaaatgacagtggaagtttttttttcctctaagtgccagtattcccagagtt

SEQ ID NO: 305828 - DNA, 120 bp, Artificial Sequence
  ENSG00000133703_9 (sequence is synthesized)
ttggtttttgaactagcaatgcctgtgaaaaagaaactgaatacctaagatttctgtcttggggcttttggtgcatgcagttgattacttcttatttttcttaccaattgtgaatgttgg

SEQ ID NO: 305829 - DNA, 120 bp, Artificial Sequence
  ENSG00000133703_10 (sequence is synthesized)
tgtgaaacaaattaatgaagcttttgaatcatccctattctgtgttttatctagtcacataaatggattaattactaatttcagttgagaccttctaattggtttttactgaaacattga

SEQ ID NO: 305830 - DNA, 120 bp, Artificial Sequence
  ENSG00000133703_11 (sequence is synthesized)
gggaacacaaatttatgggcttcctgatgatgattcttctaggcatcatgtcctatagtttgtcatccctgatgaatgtaaagttacactgttcacaaaggttttgtctcctttccactg

SEQ ID NO: 305831 - DNA, 120 bp, Artificial Sequence
  ENSG00000133703_12 (sequence is synthesized)
ctattagtcatggtcactctccccaaaatattatattttttctataaaaagaaaaaaatggaaaaaaattacaaggcaatggaaactattataaggccatttccttttcacattagataa

SEQ ID NO: 305832 - DNA, 120 bp, Artificial Sequence
  ENSG00000133703_13 (sequence is synthesized)
attactataaagactcctaatagcttttcctgttaaggcagacccagtatgaaatggggattattatagcaaccattttggggctatatttacatgctactaaatttttataataattga

SEQ ID NO: 305833 - DNA, 120 bp, Artificial Sequence
  ENSG00000133703_14 (sequence is synthesized)
aaagattttaacaagtataaaaaattctcataggaattaaatgtagtctccctgtgtcagactgctctttcatagtataactttaaatcttttcttcaacttgagtctttgaagatagtt

SEQ ID NO: 305834 - DNA, 120 bp, Artificial Sequence
  ENSG00000133703_15 (sequence is synthesized)
ttaattctgcttgtgacattaaaagattatttgggccagttatagcttattaggtgttgaagagaccaaggttgcaaggccaggccctgtgtgaacctttgagctttcatagagagtttc

SEQ ID NO: 305835 - DNA, 120 bp, Artificial Sequence
  ENSG00000133703_16 (sequence is synthesized)
acagcatggactgtgtccccacggtcatccagtgttgtcatgcattggttagtcaaaatggggagggactagggcagtttggatagctcaacaagatacaatctcactctgtggtggtcc

SEQ ID NO: 305836 - DNA, 120 bp, Artificial Sequence
  ENSG00000133703_17 (sequence is synthesized)
tgctgacaaatcaagagcattgcttttgtttcttaagaaaacaaactcttttttaaaaattacttttaaatattaactcaaaagttgagattttggggtggtggtgtgccaagacattaa

SEQ ID NO: 305837 - DNA, 120 bp, Artificial Sequence
  ENSG00000133703_18 (sequence is synthesized)
ttttttttttaaacaatgaagtgaaaaagttttacaatctctaggtttggctagttctcttaacactggttaaattaacattgcataaacacttttcaagtctgatccatatttaataat

SEQ ID NO: 305838 - DNA, 120 bp, Artificial Sequence
  ENSG00000133703_19 (sequence is synthesized)
gctttaaaataaaaataaaaacaatccttttgataaatttaaaatgttacttattttaaaataaatgaagtgagatggcatggtgaggtgaaagtatcactggactaggaagaaggtgac

SEQ ID NO: 305839 - DNA, 120 bp, Artificial Sequence
  ENSG00000133703_20 (sequence is synthesized)
ttaggttctagataggtgtcttttaggactctgattttgaggacatcacttactatccatttcttcatgttaaaagaagtcatctcaaactcttagttttttttttttacaactatgtaa

SEQ ID NO: 305840 - DNA, 120 bp, Artificial Sequence
  ENSG00000133703_21 (sequence is synthesized)
tttatattccatttacataaggatacacttatttgtcaagctcagcacaatctgtaaatttttaacctatgttacaccatcttcagtgccagtcttgggcaaaattgtgcaagaggtgaa

SEQ ID NO: 305841 - DNA, 120 bp, Artificial Sequence
  ENSG00000133703_22 (sequence is synthesized)
ggactcttcttccatattagtgtcatcttgcctccctaccttccacatgccccatgacttgatgcagttttaatacttgtaattcccctaaccataagatttactgctgctgtggatatc

SEQ ID NO: 305842 - DNA, 120 bp, Artificial Sequence
  ENSG00000133703_23 (sequence is synthesized)
tccatgaagttttcccactgagtcacatcagaaatgccctacatcttatttcctcagggctcaagagaatctgacagataccataaagggatttgacctaatcactaattttcaggtggt

SEQ ID NO: 305843 - DNA, 120 bp, Artificial Sequence
  ENSG00000133703_24 (sequence is synthesized)
ggctgatgctttgaacatctctttgctgcccaatccattagcgacagtaggatttttcaaacctggtatgaatagacagaaccctatccagtggaaggagaatttaataaagatagtgct

SEQ ID NO: 305844 - DNA, 120 bp, Artificial Sequence
  ENSG00000133703_25 (sequence is synthesized)
gaaagaattccttaggtaatctataactaggactactcctggtaacagtaatacattccattgttttagtaaccagaaatcttcatgcaatgaaaaatactttaattcatgaagcttact

SEQ ID NO: 305845 - DNA, 69 bp, Artificial Sequence
  ENSG00000133703_26 (sequence is synthesized)
cttcatgcaatgaaaaatactttaattcatgaagcttactttttttttttggtgtcagagtctcgctct

SEQ ID NO: 305846 - DNA, 120 bp, Artificial Sequence
  ENSG00000133703_27 (sequence is synthesized)
caccttggcctcataaacctgttttgcagaactcatttattcagcaaatatttattgagtgcctaccagatgccagtcaccacacaaggcactgggtatatggtatccccaaacaagaga

SEQ ID NO: 305847 - DNA, 120 bp, Artificial Sequence
  ENSG00000133703_28 (sequence is synthesized)
cataatcccggtccttaggtagtgctagtgtggtctgtaatatcttactaaggcctttggtatacgacccagagataacacgatgcgtattttagttttgcaaagaaggggtttggtctc

SEQ ID NO: 305848 - DNA, 120 bp, Artificial Sequence
  ENSG00000133703_29 (sequence is synthesized)
tgtgccagctctataattgttttgctacgattccactgaaactcttcgatcaagctactttatgtaaatcacttcattgttttaaaggaataaacttgattatattgtttttttatttgg

SEQ ID NO: 305849 - DNA, 120 bp, Artificial Sequence
  ENSG00000133703_30 (sequence is synthesized)
cataactgtgattcttttaggacaattactgtacacattaaggtgtatgtcagatattcatattgacccaaatgtgtaatattccagttttctctgcataagtaattaaaatatacttaa

SEQ ID NO: 305850 - DNA, 120 bp, Artificial Sequence
  ENSG00000133703_31 (sequence is synthesized)
aaattaatagttttatctgggtacaaataaacaggtgcctgaactagttcacagacaaggaaacttctatgtaaaaatcactatgatttctgaattgctatgtgaaactacagatctttg

SEQ ID NO: 305851 - DNA, 120 bp, Artificial Sequence
  ENSG00000133703_32 (sequence is synthesized)
gaacactgtttaggtagggtgttaagacttacacagtacctcgtttctacacagagaaagaaatggccatacttcaggaactgcagtgcttatgaggggatatttaggcctcttgaattt

SEQ ID NO: 305852 - DNA, 120 bp, Artificial Sequence
  ENSG00000133703_33 (sequence is synthesized)
ttgatgtagatgggcatttttttaaggtagtggttaattacctttatgtgaactttgaatggtttaacaaaagatttgtttttgtagagattttaaagggggagaattctagaaataaat

SEQ ID NO: 305853 - DNA, 120 bp, Artificial Sequence
  ENSG00000133703_34 (sequence is synthesized)
gttacctaattattacagccttaaagacaaaaatccttgttgaagtttttttaaaaaaagctaaattacatagacttaggcattaacatgtttgtggaagaatatagcagacgtatattg

SEQ ID NO: 305854 - DNA, 120 bp, Artificial Sequence
  ENSG00000133703_35 (sequence is synthesized)
tatcatttgagtgaatgttcccaagtaggcattctaggctctatttaactgagtcacactgcataggaatttagaacctaacttttataggttatcaaaactgttgtcaccattgcacaa

SEQ ID NO: 305855 - DNA, 120 bp, Artificial Sequence
  ENSG00000133703_36 (sequence is synthesized)
ttttgtcctaatatatacatagaaactttgtggggcatgttaagttacagtttgcacaagttcatctcatttgtattccattgattttttttttcttctaaacattttttcttcaaacag

SEQ ID NO: 305856 - DNA, 120 bp, Artificial Sequence
  ENSG00000133703_37 (sequence is synthesized)
tatataactttttttaggggatttttttttagacagcaaaaactatctgaagatttccatttgtcaaaaagtaatgatttcttgataattgtgtagtaatgttttttagaacccagcagt

SEQ ID NO: 305857 - DNA, 120 bp, Artificial Sequence
  ENSG00000133703_38 (sequence is synthesized)
taccttaaagctgaatttatatttagtaacttctgtgttaatactggatagcatgaattctgcattgagaaactgaatagctgtcataaaatgaaactttctttctaaagaaagatactc

SEQ ID NO: 305858 - DNA, 120 bp, Artificial Sequence
  ENSG00000133703_39 (sequence is synthesized)
acatgagttcttgaagaatagtcataactagattaagatctgtgttttagtttaatagtttgaagtgcctgtttgggataatgataggtaatttagatgaatttaggggaaaaaaaagtt

SEQ ID NO: 305859 - DNA, 120 bp, Artificial Sequence
  ENSG00000133703_40 (sequence is synthesized)
atctgcagatatgttgagggcccatctctccccccacacccccacagagctaactgggttacagtgttttatccgaaagtttccaattccactgtcttgtgttttcatgttgaaaatact

SEQ ID NO: 305860 - DNA, 120 bp, Artificial Sequence
  ENSG00000133703_41 (sequence is synthesized)
tttgcatttttcctttgagtgccaatttcttactagtactatttcttaatgtaacatgtttacctggaatgtattttaactatttttgtatagtgtaaactgaaacatgcacattttgta

SEQ ID NO: 305861 - DNA, 120 bp, Artificial Sequence
  ENSG00000133703_42 (sequence is synthesized)
cattgtgctttcttttgtgggacatatgcagtgtgatccagttgttttccatcatttggttgcgctgacctaggaatgttggtcatatcaaacattaaaaatgaccactcttttaattga

SEQ ID NO: 305862 - DNA, 120 bp, Artificial Sequence
  ENSG00000133703_43 (sequence is synthesized)
aattaacttttaaatgtttataggagtatgtgctgtgaagtgatctaaaatttgtaatatttttgtcatgaactgtactactcctaattattgtaatgtaataaaaatagttacagtgac

SEQ ID NO: 305863 - DNA, 120 bp, Artificial Sequence
  ENSG00000133703_44 (sequence is synthesized)
cagctaattcagaatcattttgtggacgaatatgatccaacaatagaggtgttattaagcagtatgtaaaaagtccttacaatacttaatacattaagaaaacatacaatttcaagagga

SEQ ID NO: 305864 - DNA, 120 bp, Artificial Sequence
  ENSG00000133703_45 (sequence is synthesized)
aatccccgagtaatacattattgacattttcagcagttctagttatattgagaagagcatctcatggaattggcagaatgaagatggagattaaatgagatgatgtttgtaatatgctta

SEQ ID NO: 305865 - DNA, 120 bp, Artificial Sequence
  ENSG00000133703_46 (sequence is synthesized)
tgacagtatctggcatataagtaagggctcagtaaatgttgactgctgtaattactattaatagtaatatgattacctttagtaaaagttattagtttctttaggttttttgtttactac

SEQ ID NO: 305866 - DNA, 120 bp, Artificial Sequence
  ENSG00000133703_47 (sequence is synthesized)
aatatagtaaacaaaatctatacttggaatgtatatattgttttgttttgatacatggaatatgtctctgtgtcagagtcactgcctgagttggaaaacccatactcgagtatgttaaaa

SEQ ID NO: 305867 - DNA, 120 bp, Artificial Sequence
  ENSG00000133703_48 (sequence is synthesized)
ggtgaacacactgaataatttagttattaattataatggaaaaatgacaaacttgatgttctggttaatgaggttatcttatcttgaatgagttagcttttaaattcctcaaaataaagg

SEQ ID NO: 305868 - DNA, 120 bp, Artificial Sequence
  ENSG00000133703_49 (sequence is synthesized)
aaacacttcattaaaaaaattatgcaagtcagtgtaaaagaagattaaaattccacatgggcaaaggacacacgttggcgataaatatgcagataagaaaaaaaacctatataacattat

SEQ ID NO: 305869 - DNA, 120 bp, Artificial Sequence
  ENSG00000133703_50 (sequence is synthesized)
tactcctcaaagaaattggtatgaaaacaataaaaatgtgtagcttatcaaaccaacaaaaatttaaaaatatgaaatccattttaagtaatgataaaatgggtgcactcttagtgcttt

SEQ ID NO: 305870 - DNA, 120 bp, Artificial Sequence
  ENSG00000133703_51 (sequence is synthesized)
atagaatagtagtataatgaacctcatgtgtgtaccaaccagctctttcatatcttaacatttagcaacatttgatttagctctttcttttttccaagatagaaaagttaatattgttga

SEQ ID NO: 305871 - DNA, 120 bp, Artificial Sequence
  ENSG00000133703_52 (sequence is synthesized)
agactcctgcattcttttccctagtcttattttcttccctcccataaatgtgttaaaatctctgtgtgtattgttttggttgtatttttacataaaactttacatattatataaaattta

SEQ ID NO: 305872 - DNA, 120 bp, Artificial Sequence
  ENSG00000133703_53 (sequence is synthesized)
attcttaatatatattgtaatttaaaaattaacagcttcattgtcttgataaaatttatggtatcttaaacatgtgcttgtttttctaagagaacattgaaacatagattttaaaacaaa

SEQ ID NO: 305873 - DNA, 120 bp, Artificial Sequence
  ENSG00000133703_54 (sequence is synthesized)
ttgaaacatagattttaaaacaaattgttgaaagattaaaaaatctgcctttgcacactgttacattgaaagtggggcatttgtcgtgaacattcatttcaaatatgtagtatcttcaga

SEQ ID NO: 305874 - DNA, 120 bp, Artificial Sequence
  ENSG00000133703_55 (sequence is synthesized)
ttgtcgtgaacattcatttcaaatatgtagtatcttcagaatatttgagaaggatttgtattatataattgaaaaatctgttaaattgtatttatgttaactgcttaattctaataaaat

SEQ ID NO: 305875 - DNA, 120 bp, Artificial Sequence
  ENSG00000133704_0 (sequence is synthesized)
gtaaaacggtgaatggagagcgagttgtgggggggaaaaagggaggacagggggcgcggagtcagagtggcgcagcaagtggccgcaggtggcgacggtggcggggggtggggtgtgagg

SEQ ID NO: 305876 - DNA, 120 bp, Artificial Sequence
  ENSG00000133704_1 (sequence is synthesized)
taatccaggggtcgcggaagaggaggctgagagggtcaaaagaaaactaaagctgcagtccggcctactgttccgggggccgcggagcccccacccggggagatggacctcaaccggatc

SEQ ID NO: 305877 - DNA, 120 bp, Artificial Sequence
  ENSG00000133704_2 (sequence is synthesized)
atccaggcgctgaagggcaccatcgacccgaagttgcggattgcagccgagaacgagctcaaccagtcctacaagattatcaattttgcccccagtttacttcggattatagtctctgac

SEQ ID NO: 305878 - DNA, 120 bp, Artificial Sequence
  ENSG00000133704_3 (sequence is synthesized)
catgtggaattcccagtacgacaggcagctgccatttacctgaagaacatggtgacacaatactggccagatcgagaacctccaccaggagaagcaatatttccattcaacattcacgaa

SEQ ID NO: 305879 - DNA, 120 bp, Artificial Sequence
  ENSG00000133704_4 (sequence is synthesized)
aacgatcgccagcaaatacgtgataacattgtggaaggaataattcggtctccagatttagtgagagtccaattaacaatgtgtctccgtgccatcataaaacatgattttcctggtcac

SEQ ID NO: 305880 - DNA, 120 bp, Artificial Sequence
  ENSG00000133704_5 (sequence is synthesized)
tggccaggagtggtcgacaagatagactattacttgcaatcacagagcagtgcaagctggcttggcagtttattatgcctgtatcaactggtgaagacatatgaatataagaaagcagaa

SEQ ID NO: 305881 - DNA, 120 bp, Artificial Sequence
  ENSG00000133704_6 (sequence is synthesized)
gagagagaacctcttataatagcaatgcagatattcctgcctcgtattcagcaacaaattgttcagctccttcctgattcctcctattattctgtattactgcagaaacaaattctgaaa

SEQ ID NO: 305882 - DNA, 120 bp, Artificial Sequence
  ENSG00000133704_7 (sequence is synthesized)
atcttttatgcacttgttcagtatgcattgcctcttcagctagtgaataaccaaaccatgacaacatggatggagatcttccgaactattatcgacaggaccgttcctcctgagactctg

SEQ ID NO: 305883 - DNA, 120 bp, Artificial Sequence
  ENSG00000133704_8 (sequence is synthesized)
cacattgatgaggatgatagaccagaactggtatggtggaagtgtaagaagtgggcactgcatattgtagctcggctctttgaacgatatggaagcccaggaaatgtcacaaaagaatac

SEQ ID NO: 305884 - DNA, 120 bp, Artificial Sequence
  ENSG00000133704_9 (sequence is synthesized)
tttgaattttctgaattctttttgaaaacctatgcagtgggcattcagcaggtgctactaaaaattttagatcaatatagacagaaagaatatgtagctccccgtgttcttcagcaagca

SEQ ID NO: 305885 - DNA, 120 bp, Artificial Sequence
  ENSG00000133704_10 (sequence is synthesized)
ttcaactatctcaaccaaggggtggttcattctataacctggaagcagatgaagccacacatacagaatatctctgaagatgtgattttttctgtgatgtgttataaagatgaggatgaa

SEQ ID NO: 305886 - DNA, 120 bp, Artificial Sequence
  ENSG00000133704_11 (sequence is synthesized)
gagctgtggcaagaagatccatatgagtatataaggatgaaatttgatatttttgaagattatgcttctcccaccacagcagcccagactctcttatatactgctgcaaagaaaagaaaa

SEQ ID NO: 305887 - DNA, 120 bp, Artificial Sequence
  ENSG00000133704_12 (sequence is synthesized)
gaggtgttgccaaaaatgatggcattctgttatcaaatcctgacagacccgaactttgaccctaggaagaaagatggagccctgcatgtgattggttccctagctgagattttactgaag

SEQ ID NO: 305888 - DNA, 120 bp, Artificial Sequence
  ENSG00000133704_13 (sequence is synthesized)
aagagtttattcaaggaccaaatggagctgtttctacaaaatcatgtatttccattattattgtctaacctgggatatcttcgagctagatcttgctgggtacttcatgcatttagttct

SEQ ID NO: 305889 - DNA, 120 bp, Artificial Sequence
  ENSG00000133704_14 (sequence is synthesized)
ttgaagttccataatgagctcaatctaagaaatgccgttgaattagcgaagaagagcctgattgaagataaagagatgcctgtcaaagttgaagctgcccttgctcttcagtctttaatt

SEQ ID NO: 305890 - DNA, 120 bp, Artificial Sequence
  ENSG00000133704_15 (sequence is synthesized)
tctaaccagatacaagctaaggaatatatgaagccacatgtgaggcctattatgcaggaactgttgcacattgttagagagacagaaaatgatgatgttactaatgtcatccagaagatg

SEQ ID NO: 305891 - DNA, 120 bp, Artificial Sequence
  ENSG00000133704_16 (sequence is synthesized)
atatgtgaatacagtcaagaggtagcctcaattgctgttgatatgacccaacacttggctgagatatttggcaaagttcttcaaagtgatgaatatgaagaagttgaagacaaaacagta

SEQ ID NO: 305892 - DNA, 120 bp, Artificial Sequence
  ENSG00000133704_17 (sequence is synthesized)
atggctatgggaattttacataccattgatactatcttaacagttgtagaagatcataaagagattacccagcagttagagaatatctgtctacggatcattgatcttgttctgcagaaa

SEQ ID NO: 305893 - DNA, 120 bp, Artificial Sequence
  ENSG00000133704_18 (sequence is synthesized)
catgtaattgaattctatgaagaaattctttccctggcatacagtttaacctgccacagtatttcccctcaaatgtggcagcttctaggtatactatatgaagtgtttcagcaggattgc

SEQ ID NO: 305894 - DNA, 120 bp, Artificial Sequence
  ENSG00000133704_19 (sequence is synthesized)
tttgaatactttacagacatgatgcctctcctgcataattatgtgacaatagatacagataccttactatcaaatgcaaaacatttagaaattctttttacaatgtgtaggaaggtacta

SEQ ID NO: 305895 - DNA, 120 bp, Artificial Sequence
  ENSG00000133704_20 (sequence is synthesized)
tgtggagatgcaggagaagatgcagagtgtcatgcagctaaacttctggaagtcatcattcttcagtgcaaaggaaggggaattgatcagtgcattccactcttcgttcaacttgttttg

SEQ ID NO: 305896 - DNA, 120 bp, Artificial Sequence
  ENSG00000133704_21 (sequence is synthesized)
cttcaggttgcaattgctgccttgtactacaaccctgatttgctgctacatactttagaacgaattcagttgcctcacaaccctggacctatcactgtacagtttataaatcaatggatg

SEQ ID NO: 305897 - DNA, 120 bp, Artificial Sequence
  ENSG00000133704_22 (sequence is synthesized)
aatgatacagattgttttcttgggcatcatgaccggaagatgtgtataataggactgagtatccttttggaattgcaaaatcgacctcctgcagtagatgctgtggtgggacagattgtt

SEQ ID NO: 305898 - DNA, 120 bp, Artificial Sequence
  ENSG00000133704_23 (sequence is synthesized)
ccctcaattcttttccttttccttggcctaaagcaggtctgtgctactagacaactggtaaaccgggaagatcgttcaaaagcagagaaagctgatatggaagaaaatgaggagatttca

SEQ ID NO: 305899 - DNA, 120 bp, Artificial Sequence
  ENSG00000133704_24 (sequence is synthesized)
agtgatgaagaggagacaaatgtaactgctcaagcaatgcagtcaaataatggaagaggtgaagatgaggaggaggaagatgatgactgggatgaagaagtattggaagaaaccgcgctt

SEQ ID NO: 305900 - DNA, 120 bp, Artificial Sequence
  ENSG00000133704_25 (sequence is synthesized)
gaggggttcagtactccacttgaccttgacaatagtgtggatgaatatcagttttttacacaagctctgataactgtgcagagtcgagatgcagcctggtaccagctgctgatggcacca

SEQ ID NO: 305901 - DNA, 120 bp, Artificial Sequence
  ENSG00000133704_26 (sequence is synthesized)
ctcagcgaggatcagaggacagcactgcaggaggtgtacacactggcagagcaccgacggacggtggcagaggcaaagaagaagattgaacaacagggaggcttcacctttgaaaacaaa

SEQ ID NO: 305902 - DNA, 120 bp, Artificial Sequence
  ENSG00000133704_27 (sequence is synthesized)
ggagtcctctccgcatttaattttgggactgtgcccagcaacaactgaaggaaagaacatcagctgaccaaatgtcatcgctgcattttatttcacaagaggagtgtgagggtcaagggg

SEQ ID NO: 305903 - DNA, 120 bp, Artificial Sequence
  ENSG00000133704_28 (sequence is synthesized)
atgaaatgaggggctgcttttagggccctcctgctgtgccagttaccatctggcattaggcagcacttttatctactctttcccctttgacctttgtcaccctgaaatatatattttaaa

SEQ ID NO: 305904 - DNA, 120 bp, Artificial Sequence
  ENSG00000133704_29 (sequence is synthesized)
cagctactgtaagtatgaaatgaaagaaaaacaatcattggacggaaaaggacaacccatatgttccaaaggctgaatgcccaaggttgttttagaggattggatagacttgcacgtctc

SEQ ID NO: 305905 - DNA, 120 bp, Artificial Sequence
  ENSG00000133704_30 (sequence is synthesized)
aggtttttgccatgcagaatcaatggatttatgcggataacagtgccttctgttgtacatgaattatcagaaaaaaatttttggagtgcattgcaattttttttaaagcataaaacatat

SEQ ID NO: 305906 - DNA, 120 bp, Artificial Sequence
  ENSG00000133704_31 (sequence is synthesized)
ttctagatacaacataaaccttggttatatgtcaactattctgcattttactctgtgaatttattgttaggcagttactgcaagtcactctggtttcaaaatcttcacggctccctctgc

SEQ ID NO: 305907 - DNA, 120 bp, Artificial Sequence
  ENSG00000133704_32 (sequence is synthesized)
tcaccctgctgctggggggcttttttcaggggttgtattataaaatatgcactggctgtggtttttcataagatgttttgtggctttttaaagaagtgtcttactccctcttctctcatt

SEQ ID NO: 305908 - DNA, 120 bp, Artificial Sequence
  ENSG00000133704_33 (sequence is synthesized)
tttttctgccttgaaaaggggtggtatttcttttggggtcaacaaatacacatatcagtttcactcctaaccttgtaagttcaggactcattttcttggcagcaagtggcaggggctctt

SEQ ID NO: 305909 - DNA, 120 bp, Artificial Sequence
  ENSG00000133704_34 (sequence is synthesized)
tagtcactggagttaacagtaagtctgagtatattctgaataatgtaattatgcaattaattgataatcatacctaaagcacattgaacttctaagagacaggtgctacgtaagcacact

SEQ ID NO: 305910 - DNA, 120 bp, Artificial Sequence
  ENSG00000133704_35 (sequence is synthesized)
gtctttctggatggggacttgtattttaaataacttatcattccagctatgttggactagggtccaaagcattttataatatttttttttaatctaggaaaaagacccaaacaaatctaa

SEQ ID NO: 305911 - DNA, 120 bp, Artificial Sequence
  ENSG00000133704_36 (sequence is synthesized)
cttcttgctttctcacctatttgaattttctcctacctaatttgtttgtgtctttattatagctcagtttgacttctcaaacttttcaagggttggggcagctgcacttttaggttgcct

SEQ ID NO: 305912 - DNA, 120 bp, Artificial Sequence
  ENSG00000133704_37 (sequence is synthesized)
ataggaaatattgcatatggagattacagtgtttttctgacctagttcaagaccagaacatgggtcatagggtttttattcagcaaaatgaaaacgtatcttcagaacttaacatattac

SEQ ID NO: 305913 - DNA, 120 bp, Artificial Sequence
  ENSG00000133704_38 (sequence is synthesized)
tggatgtgatacagattttgctttctgtggaattgaaaattcacaaaaattcacagcttaaatttcccatcagtgactggaggaatttttttcaggtgcttcctatattaccatccctca

SEQ ID NO: 305914 - DNA, 120 bp, Artificial Sequence
  ENSG00000133704_39 (sequence is synthesized)
tgcatattaactctttagaattttaggttaagtgatgtctatagaagtagcctggaaaaccatgagttttggagttcagtgaccccctgctttcctctgctcctcccttcccaaggcatt

SEQ ID NO: 305915 - DNA, 120 bp, Artificial Sequence
  ENSG00000133704_40 (sequence is synthesized)
gaagctgaatgtgccaactggcagttagaagcgaaagatggcattgggagaaattttagagagctttcaaactctttattctcatgttccacatggtctaattttaacataaataatatg

SEQ ID NO: 305916 - DNA, 120 bp, Artificial Sequence
  ENSG00000133704_41 (sequence is synthesized)
ccttcacactggattgtaaaaggcatgtgatttttgagattttattttgtgatgtattgtcttctgcagtattaaagggaaagagatattaatgtgcattaccctatcttgtttttgaag

SEQ ID NO: 305917 - DNA, 120 bp, Artificial Sequence
  ENSG00000133704_42 (sequence is synthesized)
ccagggtagttgtatgattttgttaccagcagtgctaacctgaatgtgacctggttaccttggaaatgcaggaacttatatgaatgtactataaaataaaatgcggactgattcccagga

SEQ ID NO: 305918 - DNA, 120 bp, Artificial Sequence
  ENSG00000133704_43 (sequence is synthesized)
attagaatgctaggttccccaaatcctcaccaactctgtacaacttaatgaagttttgatgtaaaatgtaaacagcattgaaaggcatttttttcttcataatttgttttttcataattt

SEQ ID NO: 305919 - DNA, 120 bp, Artificial Sequence
  ENSG00000133704_44 (sequence is synthesized)
agatttcaaatcctaaatttaagtggtatttataaattttctgttctgtttaatctattattaaaatacaaggatgctccaagacacctagaaagataatttatctttagcatgacactt

SEQ ID NO: 305920 - DNA, 120 bp, Artificial Sequence
  ENSG00000133704_45 (sequence is synthesized)
aaaagttatgctaatgttaagtggaaatacatctgcaaaatactttttctcttttgcttgtgggcaatctaaagtgttcttgctaccatcaagcgtgctcactgattgatcctgtgaaat

SEQ ID NO: 305921 - DNA, 120 bp, Artificial Sequence
  ENSG00000133704_46 (sequence is synthesized)
attgttgtatatgcagtctgtcactgaccgaaacatttgttatgtggtgcatgactttatatacattttttccagttagagtgtaagcttcgtgagggcaaagattgtctatcttattat

SEQ ID NO: 305922 - DNA, 120 bp, Artificial Sequence
  ENSG00000133704_47 (sequence is synthesized)
gtctgtagcatgtagcatgttttgtactgaatggatgtggaggcaatatccgtcttctgcaactcacagtacagcagaggtgagccatatatctgtttagtacaaagtggactgtagtta

SEQ ID NO: 305923 - DNA, 120 bp, Artificial Sequence
  ENSG00000133704_48 (sequence is synthesized)
ttatgctacagtgtagaggaaagtaatttaaaaaaatgtttcatgagtgtttaatgaaataaatattttcatcaaggtggttaaaatggaaagtttgaccctcaaagggtatgcattgcc

SEQ ID NO: 305924 - DNA, 120 bp, Artificial Sequence
  ENSG00000133704_49 (sequence is synthesized)
acttgttcaggtaggtttctattgcagaaaacaaacatggagtcctgtatttctgcctgacacatggaaagtgctcaataagtgtcacttattattaaaaattattttgtattatcccat

SEQ ID NO: 305925 - DNA, 120 bp, Artificial Sequence
  ENSG00000133704_50 (sequence is synthesized)
gcatgtgtcagagtgccaacagacagccttatttgatgagccaggtggcacctaaacactgtttttgaaattgttagagacttaccctttaagataataaggaattgtcattattgtatg

SEQ ID NO: 305926 - DNA, 120 bp, Artificial Sequence
  ENSG00000133704_51 (sequence is synthesized)
attgttttaatcactcatgatgtcttagctttgcaaaaacctgcacattaatatgtatttcctagtggtgttctcattcacattcttatcctatgttggaggcaaaggtacaaagtaagg

SEQ ID NO: 305927 - DNA, 120 bp, Artificial Sequence
  ENSG00000133704_52 (sequence is synthesized)
aagcttcgtgagggcaaagattgtctatcttattatgtctgtagcatgtagcatgttttgtactgaatggatgtggaggcaatatccgtcttctgcaactcacagtacagcagagtatgc

SEQ ID NO: 305928 - DNA, 90 bp, Artificial Sequence
  ENSG00000133704_53 (sequence is synthesized)
ttagaatgctaggttccccaaatcctcaccaactctgtacaacttaatgaagttttgatgtaaaatattgatcctgtgaaatcaggctgg

SEQ ID NO: 305929 - DNA, 86 bp, Artificial Sequence
  ENSG00000133704_54 (sequence is synthesized)
gaccagcctgggcagtaattaactggcgtggtggtgcacgcctgtattcccaactacttgagagactgaggtgggaggatcaccta

SEQ ID NO: 305930 - DNA, 87 bp, Artificial Sequence
  ENSG00000133704_55 (sequence is synthesized)
caaaaaaacccctaaatcctgtgaaatcagtctgaactgctgacagctgccatttacctgaagaacatggtgacacaatactggcca

SEQ ID NO: 305931 - DNA, 120 bp, Artificial Sequence
  ENSG00000133704_56 (sequence is synthesized)
ctaagacacatcaaatcctacaagattatcaattttgcccccagtttacttcggattatagtctctgaccatgtggaattcccagtacgacaggcagctgccatttacctgaagaacatg

SEQ ID NO: 305932 - DNA, 120 bp, Artificial Sequence
  ENSG00000133706_0 (sequence is synthesized)
agtaaggagccggatgattgcctcagcaggtgtgaagcgtgtgctttagtttcgtgggaggcctggcatccccgagagggaggggaaaggtaaccactcctttgtggaggtcgccagggt

SEQ ID NO: 305933 - DNA, 120 bp, Artificial Sequence
  ENSG00000133706_1 (sequence is synthesized)
cattgtcgtggatttgcacagtcggctgggcggtgcaatggcggaaagaaaaggaacagccaaagtggactttttgaagaagattgagaaagaaatccaacagaaatgggatactgagag

SEQ ID NO: 305934 - DNA, 120 bp, Artificial Sequence
  ENSG00000133706_2 (sequence is synthesized)
agtgtttgaggtcaatgcatctaatttagagaaacagaccagcaagggcaagtattttgtaaccttcccatatccatatatgaatggacgccttcatttgggacacacgttttctttatc

SEQ ID NO: 305935 - DNA, 120 bp, Artificial Sequence
  ENSG00000133706_3 (sequence is synthesized)
caaatgtgagtttgctgtagggtaccagcgattgaaaggaaaatgttgtctgtttccctttggcctgcactgtactggaatgcctattaaggcatgtgctgataagttgaaaagagaaat

SEQ ID NO: 305936 - DNA, 120 bp, Artificial Sequence
  ENSG00000133706_4 (sequence is synthesized)
agagctgtatggttgcccccctgattttccagatgaagaagaggaagaggaagaaaccagtgttaaaacagaagatataataattaaggataaagctaaaggaaaaaagagtaaagctgc

SEQ ID NO: 305937 - DNA, 120 bp, Artificial Sequence
  ENSG00000133706_5 (sequence is synthesized)
tgctaaagctggatcttctaaataccagtggggcattatgaaatcccttggcctgtctgatgaagagatagtaaaattttctgaagcagaacattggcttgattatttcccgccactggc

SEQ ID NO: 305938 - DNA, 120 bp, Artificial Sequence
  ENSG00000133706_6 (sequence is synthesized)
tattcaggatttaaaaagaatgggtttgaaggtagactggcgtcgttccttcatcaccactgatgttaatccttactatgattcatttgtcagatggcaatttttaacattaagagaaag

SEQ ID NO: 305939 - DNA, 120 bp, Artificial Sequence
  ENSG00000133706_7 (sequence is synthesized)
aaacaaaattaaatttgggaagcggtatacaatttactctccgaaagatggacagccttgcatggatcatgatagacaaactggagagggtgttggacctcaggaatatactttactcaa

SEQ ID NO: 305940 - DNA, 120 bp, Artificial Sequence
  ENSG00000133706_8 (sequence is synthesized)
attgaaggtgcttgagccatacccatctaaattaagtggcctgaaaggtaaaaatattttcttggtggctgctactctcagacctgagaccatgtttgggcagacaaattgttgggttcg

SEQ ID NO: 305941 - DNA, 120 bp, Artificial Sequence
  ENSG00000133706_9 (sequence is synthesized)
tcctgatatgaagtacattggatttgagacggtgaatggtgatatattcatctgtacccaaaaagcagccaggaatatgtcataccagggctttaccaaagacaatggcgtggtgcctgt

SEQ ID NO: 305942 - DNA, 120 bp, Artificial Sequence
  ENSG00000133706_10 (sequence is synthesized)
tgttaaggaattaatgggggaggaaattcttggtgcatcactttctgcacctttaacatcatacaaggtgatctatgttctcccaatgctaactattaaggaggataaaggcactggtgt

SEQ ID NO: 305943 - DNA, 120 bp, Artificial Sequence
  ENSG00000133706_11 (sequence is synthesized)
ggttacaagtgttccttccgactcccctgatgatattgctgccctcagagacttgaagaaaaagcaagccttacgagcaaaatatggaattagagatgacatggtcttgccatttgagcc

SEQ ID NO: 305944 - DNA, 120 bp, Artificial Sequence
  ENSG00000133706_12 (sequence is synthesized)
ggtgccagtcattgaaatcccaggttttggaaatctttctgctgtaaccatttgtgatgagttgaaaattcagagccagaatgaccgggaaaaacttgcagaagcaaaggagaagatata

SEQ ID NO: 305945 - DNA, 120 bp, Artificial Sequence
  ENSG00000133706_13 (sequence is synthesized)
tctaaaaggattttatgagggtatcatgttggtggatggatttaaaggacagaaggttcaagatgtaaagaagactattcagaaaaagatgattgacgctggagatgcacttatttacat

SEQ ID NO: 305946 - DNA, 120 bp, Artificial Sequence
  ENSG00000133706_14 (sequence is synthesized)
ggaaccagagaaacaagtgatgtccaggtcgtcagatgaatgtgttgtggctctgtgtgaccagtggtacttggattatggagaagagaattggaagaaacagacatctcagtgcttgaa

SEQ ID NO: 305947 - DNA, 120 bp, Artificial Sequence
  ENSG00000133706_15 (sequence is synthesized)
gaacctggaaacattctgtgaggagaccaggaggaattttgaagccaccttaggttggctacaagaacatgcttgctcaagaacttatggtctaggcactcacctgccttgggatgagca

SEQ ID NO: 305948 - DNA, 120 bp, Artificial Sequence
  ENSG00000133706_16 (sequence is synthesized)
gtggctgattgaatcactttctgactccactatttacatggcattttacacagttgcacacctattgcaggggggtaacttgcatggacaggcagagtctccgctgggcattagaccgca

SEQ ID NO: 305949 - DNA, 120 bp, Artificial Sequence
  ENSG00000133706_17 (sequence is synthesized)
acagatgaccaaggaagtttgggattatgttttcttcaaggaggctccatttcctaagactcagattgcaaaggaaaaattagatcagttaaagcaggagtttgaattctggtatcctgt

SEQ ID NO: 305950 - DNA, 120 bp, Artificial Sequence
  ENSG00000133706_18 (sequence is synthesized)
tgatcttcgcgtctctggcaaggatcttgttccaaatcatctttcatattacctttataatcatgtggctatgtggccggaacaaagtgacaaatggcctacagctgtgagagcaaatgg

SEQ ID NO: 305951 - DNA, 120 bp, Artificial Sequence
  ENSG00000133706_19 (sequence is synthesized)
cagcagatggaatgcgtttggctctggctgatgctggtgacactgtagaagatgccaactttgtggaagccatggcagatgcaggtattctccgtctgtacacctgggtagagtgggtga

SEQ ID NO: 305952 - DNA, 120 bp, Artificial Sequence
  ENSG00000133706_20 (sequence is synthesized)
aagaaatggttgccaactgggacagcctaagaagtggtcctgccagcactttcaatgatagagtttttgccagtgaattgaatgcaggaattataaaaacagatcaaaactatgaaaaga

SEQ ID NO: 305953 - DNA, 120 bp, Artificial Sequence
  ENSG00000133706_21 (sequence is synthesized)
tgatgtttaaagaagctttgaaaacagggttttttgagtttcaggccgcaaaagataagtaccgtgaattggctgtggaagggatgcacagagaacttgtgttccggtttattgaagttc

SEQ ID NO: 305954 - DNA, 120 bp, Artificial Sequence
  ENSG00000133706_22 (sequence is synthesized)
agacacttctcctcgctccattctgtccacatttgtgtgagcacatctggacactcctgggaaagcctgactcaattatgaatgcttcatggcctgtggcaggtcctgttaatgaagttt

SEQ ID NO: 305955 - DNA, 120 bp, Artificial Sequence
  ENSG00000133706_23 (sequence is synthesized)
taatacactcctcacagtatcttatggaagtaacacatgaccttagactacgactcaagaactatatgatgccagctaaagggaagaagactgacaaacaacccctgcagaagccctcac

SEQ ID NO: 305956 - DNA, 120 bp, Artificial Sequence
  ENSG00000133706_24 (sequence is synthesized)
attgcaccatctatgtggcaaagaactatccaccttggcaacataccaccctgtctgttctacgtaaacactttgaggccaataacggaaaactgcctgacaacaaagtcattgctagtg

SEQ ID NO: 305957 - DNA, 120 bp, Artificial Sequence
  ENSG00000133706_25 (sequence is synthesized)
aactaggcagtatgccagaactgaagaaatacatgaagaaagtcatgccatttgttgccatgattaaggaaaatctggagaagatggggcctcgtattctggatttgcaattagaatttg

SEQ ID NO: 305958 - DNA, 120 bp, Artificial Sequence
  ENSG00000133706_26 (sequence is synthesized)
atgaaaaggctgtgcttatggagaatatagtctatctgactaattcgcttgagctagaacacatagaagtcaagtttgcctccgaagcagaagataaaatcagggaagactgctgtcctg

SEQ ID NO: 305959 - DNA, 120 bp, Artificial Sequence
  ENSG00000133706_27 (sequence is synthesized)
ggaaaccacttaatgtttttagaatagaacctggtgtgtccgtttctctggtgaatccccagccatccaatggccacttctcaaccaaaattgaaatcaggcaaggagataactgtgatt

SEQ ID NO: 305960 - DNA, 120 bp, Artificial Sequence
  ENSG00000133706_28 (sequence is synthesized)
ccataatcaggcgtttaatgaaaatgaatcgaggaattaaagacctttccaaagtgaaactgatgagatttgatgatccactgttggggcctcgacgagttcctgtcctgggaaaggagt

SEQ ID NO: 305961 - DNA, 120 bp, Artificial Sequence
  ENSG00000133706_29 (sequence is synthesized)
acaccgagaagacccccatttctgagcatgctgttttcaatgtggacctcatgagcaagaaaattcatctgactgagaatgggataagggtggatattggcgatacaataatctatctgg

SEQ ID NO: 305962 - DNA, 120 bp, Artificial Sequence
  ENSG00000133706_30 (sequence is synthesized)
ttcattaaactcatgcacattggagatttatcctggtttcttaggaatactactactctgattgtgtctactgattggctatcagaaccttaggctggacctaaatagattgatttcatt

SEQ ID NO: 305963 - DNA, 120 bp, Artificial Sequence
  ENSG00000133706_31 (sequence is synthesized)
tctaaccatccaattctgcatgtattcataattctatcaagtcatctttgattcctggacctaataaattttttttccctttctttgggtgtccaagagaaatggtttttgccaaactct

SEQ ID NO: 305964 - DNA, 120 bp, Artificial Sequence
  ENSG00000133706_32 (sequence is synthesized)
ttttaaaaaacaaattgttgctatttcctagaagtttctggtttttaagatgaacataaaagtgtcagtatgcttcttttatgaggtgtactttatactttgatgaaggctaaggtgtac

SEQ ID NO: 305965 - DNA, 120 bp, Artificial Sequence
  ENSG00000133706_33 (sequence is synthesized)
ctaacagctttttatagtatattcatttatggagttagctgtatttttttttaaaaaagaaaagtagtaaattagcagcttttttttttaaatgaagagaacttcatgatgatttaaaag

SEQ ID NO: 305966 - DNA, 120 bp, Artificial Sequence
  ENSG00000133706_34 (sequence is synthesized)
aactaatgagaatattttgacttgacttcaattactaagtattttgtataaagaacaaataggtcctgcattttataagactttttaaagctttaattattcaactaagaaccaataatg

SEQ ID NO: 305967 - DNA, 120 bp, Artificial Sequence
  ENSG00000133706_35 (sequence is synthesized)
gcttcttcaaggctaatatcaatagtttataagcagtatatttcacctacactaaatatgggcattttaaaagaagattccccccttcccccccagaaatctgcatttactaaatttgtc

SEQ ID NO: 305968 - DNA, 72 bp, Artificial Sequence
  ENSG00000133706_36 (sequence is synthesized)
cccccttcccccccagaaatctgcatttactaaatttgtcttaagtccaattgtgtttaaaggtcatgctgg

SEQ ID NO: 305969 - DNA, 120 bp, Artificial Sequence
  ENSG00000133706_37 (sequence is synthesized)
gaccgaggttgcagtgagctgaaaccgtgccattgcactccagcttaggcaacaagagtgaaactctgtctcaatcaatccatcaatcaatcaataaaatagaggtcatgctgactatta

SEQ ID NO: 305970 - DNA, 120 bp, Artificial Sequence
  ENSG00000133706_38 (sequence is synthesized)
tgatatttgatttatgtatttaaatgttttaataagatttatttcacagaattttgtcatgatatttttgcttttttactattgaactgggaaaaattaataaatagccccttactgtca

SEQ ID NO: 305971 - DNA, 120 bp, Artificial Sequence
  ENSG00000133706_39 (sequence is synthesized)
taatcatgtggctatgtggccggaacaaaggtgaatgataaaataggtgtggactagatttattgattgtcaataggggtgtcttgtggcttcaaatatctaataaattattgtggaggg

SEQ ID NO: 305972 - DNA, 120 bp, Artificial Sequence
  ENSG00000133706_40 (sequence is synthesized)
atgtttatttaccttcctttagggagatgcacttatttacatggaaccagagaaacaagtgatgtccaggtcgtcagatgaatgtgttgtggctctgtgtgaccagtggttagtctctta

SEQ ID NO: 305973 - DNA, 120 bp, Artificial Sequence
  ENSG00000133706_41 (sequence is synthesized)
tagcaagaaaattcccctagtcaatttgctcacctttgacttaaaaaaaaacatatcaatttgtccactcccaggtacttggattatggagaagagaattggaagaaacagacatctcag

SEQ ID NO: 305974 - DNA, 120 bp, Artificial Sequence
  ENSG00000133706_42 (sequence is synthesized)
gagaagaatccgcaggggccctggagccggactggccagtctctaggggctctccatgtgctgtcctgaagggaaagtccttttctaaaagagagccacgcttaaggcgtgcctttcgta

SEQ ID NO: 305975 - DNA, 120 bp, Artificial Sequence
  ENSG00000133706_43 (sequence is synthesized)
gagactttgctttttcttgctagtttatgaaccacgaactgatgtctgttaactttacggagtacttggatatcatatttgttatttctctggagtttctaaaatcgaggtggagagccg

SEQ ID NO: 305976 - DNA, 120 bp, Artificial Sequence
  ENSG00000133706_44 (sequence is synthesized)
atttccttaaatgccttaaagctagtagttgcaaacttgggatatgaacttgcttctgtctgtcttgaaagtctgttctcataaccattttaccatgttgtcttgttttcgagtagggca

SEQ ID NO: 305977 - DNA, 120 bp, Artificial Sequence
  ENSG00000133706_45 (sequence is synthesized)
aaatggttaaaggaaaagtagattaaaagaaaaggataaatatctttggagtcatcctacgcactggtattataaagatgaatgagacctgatccttattgtctagcaagagagacaaac

SEQ ID NO: 305978 - DNA, 120 bp, Artificial Sequence
  ENSG00000133706_46 (sequence is synthesized)
tattgtctagcaagagagacaaacacccagtttctaagcacaataatagagacaaggagaattcagagatgtcatgtgacttctgggtttcttttttttttttcctgagacagagtctcg

SEQ ID NO: 305979 - DNA, 84 bp, Artificial Sequence
  ENSG00000133706_47 (sequence is synthesized)
cacaatctcagctcactgcagcctctgccaggttcaagctattcttctgccccagcctccctaccaattttttgtatttttagt

SEQ ID NO: 305980 - DNA, 120 bp, Artificial Sequence
  ENSG00000133706_48 (sequence is synthesized)
aattctgggtttcttgaaaaataaacaatgttttcagggagaggagaaagtgtggataagccatggaaagggtctgatatttatttgaagtacattatcttgtgggcagaggtaggaaat

SEQ ID NO: 305981 - DNA, 120 bp, Artificial Sequence
  ENSG00000133706_49 (sequence is synthesized)
gaaacaggttggggccagattaggccaaattaagaagaacctggattggtatgagaaaatttttttctgatatccagtattagttattgtaaatgcaataattaaaacctggctatggcc

SEQ ID NO: 305982 - DNA, 78 bp, Artificial Sequence
  ENSG00000133706_50 (sequence is synthesized)
tagttattgtaaatgcaataattaaaacctggctatggccaggcactgtggctcacgcctgtaaaccaggcactttga

SEQ ID NO: 305983 - DNA, 90 bp, Artificial Sequence
  ENSG00000133706_51 (sequence is synthesized)
aaaaaaaaattagctgggtgtggtggcttgcgcctgtagtcctagtacttgggaggctgaggtgagaagattctttgtgatcataccact

SEQ ID NO: 305984 - DNA, 120 bp, Artificial Sequence
  ENSG00000133706_52 (sequence is synthesized)
aaaaaaaaaaaaaaaaaaaaaaaacttggctacaaccttagttaggctattttcatgttgcattttgggctttataagaataaagtgtccatcaggaaatttctgaagaagcatcattta

SEQ ID NO: 305985 - DNA, 120 bp, Artificial Sequence
  ENSG00000133706_53 (sequence is synthesized)
gtgtccatcaggaaatttctgaagaagcatcatttattgtcataaacaggagccctaagcagtgtcagatgacagtacttaaggatggatagacaatagagagattgcagtaatttgttt

SEQ ID NO: 305986 - DNA, 120 bp, Artificial Sequence
  ENSG00000133706_54 (sequence is synthesized)
taaggaacgcaaagatggtgttgtgttgagcagttttaaatgttctgggcattgttctcattttactgcttaaatgagcagtatttcaaatttgtatattaaaaagcagtattttaaatt

SEQ ID NO: 305987 - DNA, 120 bp, Artificial Sequence
  ENSG00000133706_55 (sequence is synthesized)
tgtgtatgcagcagttttttatagctatgtataagtgcctttaaactcaataacctttttttccccgtattcaatagtgaattgaatgcaggaattataaaaacagatcaaaactatgaa

SEQ ID NO: 305988 - DNA, 120 bp, Artificial Sequence
  ENSG00000133706_56 (sequence is synthesized)
aagatgatgtttaaagaagctttgaaaacagggttttttgagtttcaggtaggctgttgattcttttggtagctataaaacatgtcaatgtgaacattatgtattttcccccttttttct

SEQ ID NO: 305989 - DNA, 120 bp, Artificial Sequence
  ENSG00000133706_57 (sequence is synthesized)
tcctgctatagcacaattactcgcctaaagtgtagactgaaaatcctgccagaaaaattttaaattcttcaataaattgtgattttaagttattatctttggtattttttctattgtgtc

SEQ ID NO: 305990 - DNA, 120 bp, Artificial Sequence
  ENSG00000133706_58 (sequence is synthesized)
aaaacaaaggcaaaattgtaattaattgccattaatttgagagcaagcgttttctgaggttttccacaaggtgtcagtatttcctcaagtttggcatttaaagtgcttaaagtaaaaatg

SEQ ID NO: 305991 - DNA, 120 bp, Artificial Sequence
  ENSG00000133706_59 (sequence is synthesized)
tagctttacgcaatgagctgtgtaaaatatcacattgagttttatataacttggttttcagagttgtggttaaataaggataaatggctgggcatagcaatgtgttgtatttatagtctt

SEQ ID NO: 305992 - DNA, 120 bp, Artificial Sequence
  ENSG00000133706_60 (sequence is synthesized)
tttttatatttaatatcctatatgctgctaagagcagtcacccttaatatacagttaaagttgttcaacttttatgtctcagttacaaactgtctgtaaaaaaattctttttttgagaat

SEQ ID NO: 305993 - DNA, 120 bp, Artificial Sequence
  ENSG00000133706_61 (sequence is synthesized)
tattagtataaaactgccatatactttggacaaagataaatacttgcagattcttaaagtaaaacctttacagtaatttgttatggatttttaaaagactagaaacttaaaaatgtgtta

SEQ ID NO: 305994 - DNA, 120 bp, Artificial Sequence
  ENSG00000133706_62 (sequence is synthesized)
aaaccaagatactgcaatttttccctttatttttattttaaagaaggtgagggaaatggtaaataatttcaaattttataggccgcaaaagataagtaccgtgaattggctgtggaaggg

SEQ ID NO: 305995 - DNA, 85 bp, Artificial Sequence
  ENSG00000133706_63 (sequence is synthesized)
caaaatccacaggcaacttcctcactttgacccaagctattgacaaattttcagcagatggaatgcgtttggctctggctgatgc

SEQ ID NO: 305996 - DNA, 120 bp, Artificial Sequence
  ENSG00000133706_64 (sequence is synthesized)
caggcgtgagccatggcgcctggcctgttgcaatttttaaaaggatgatcaagcaaggctttgccaaaaaggtggcaaaaacgaggaaagaaaaggaacagccaaagtggactttttgaa

SEQ ID NO: 305997 - DNA, 120 bp, Artificial Sequence
  ENSG00000133710_0 (sequence is synthesized)
atgcatggagtggacctgtaggcgacttgcatcgtcttcaacatgaagatagccacagtgtcagtgcttctgcccttggctctttgcctcatacaagatgctgccagtaagaatgaagat

SEQ ID NO: 305998 - DNA, 120 bp, Artificial Sequence
  ENSG00000133710_1 (sequence is synthesized)
caggaaatgtgccatgaatttcaggcatttatgaaaaatggaaaactgttctgtccccaggataagaaattttttcaaagtcttgatggaataatgttcatcaataaatgtgccacgtgc

SEQ ID NO: 305999 - DNA, 120 bp, Artificial Sequence
  ENSG00000133710_2 (sequence is synthesized)
aaaatgatactggaaaaagaagcaaaatcacagaagagggccaggcatttagcaagagctcccaaggctactgccccaacagagctgaattgtgatgattttaaaaaaggagaaagagat

SEQ ID NO: 306000 - DNA, 120 bp, Artificial Sequence
  ENSG00000133710_3 (sequence is synthesized)
ggggattttatctgtcctgattattatgaagctgtttgtggcacagatgggaaaacatatgacaacagatgtgcactgtgtgctgagaatgcgaaaaccgggtcccaaattggtgtaaaa

SEQ ID NO: 306001 - DNA, 120 bp, Artificial Sequence
  ENSG00000133710_4 (sequence is synthesized)
agtgaaggggaatgtaagagcagtaatccagagcaggatgtatgcagtgcttttcggccctttgttagagatggaagacttggatgcacaagggaaaatgatcctgttcttggtcctgat

SEQ ID NO: 306002 - DNA, 120 bp, Artificial Sequence
  ENSG00000133710_5 (sequence is synthesized)
gggaagacgcatggcaataagtgtgcaatgtgtgctgagctgtttttaaaagaagctgaaaatgccaagcgagagggtgaaactagaattcgacgaaatgctgaaaaggatttttgcaag

SEQ ID NO: 306003 - DNA, 120 bp, Artificial Sequence
  ENSG00000133710_6 (sequence is synthesized)
gaatatgaaaaacaagtgagaaatggaaggcttttttgtacacgggagagtgatccagtccgtggccctgacggcaggatgcatggcaacaaatgtgccctgtgtgctgaaattttcaag

SEQ ID NO: 306004 - DNA, 120 bp, Artificial Sequence
  ENSG00000133710_7 (sequence is synthesized)
cagcgtttttcagaggaaaacagtaaaacagatcaaaatttgggaaaagctgaagaaaaaactaaagttaaaagagaaattgtgaaactctgcagtcaatatcaaaatcaggcaaagaat

SEQ ID NO: 306005 - DNA, 120 bp, Artificial Sequence
  ENSG00000133710_8 (sequence is synthesized)
ggaatacttttctgtaccagagaaaatgaccctattcgtggtccagatgggaaaatgcatggcaacttgtgttccatgtgtcaagcctacttccaagcagaaaatgaagaaaagaaaaag

SEQ ID NO: 306006 - DNA, 120 bp, Artificial Sequence
  ENSG00000133710_9 (sequence is synthesized)
gctgaagcacgagctagaaacaaaagagaatctggaaaagcaacctcatatgcagagctttgcagtgaatatcgaaagcttgtgaggaacggaaaacttgcttgcaccagagagaacgat

SEQ ID NO: 306007 - DNA, 120 bp, Artificial Sequence
  ENSG00000133710_10 (sequence is synthesized)
cctatccagggcccagatgggaaagtgcatggcaacacctgctccatgtgtgaggtcttcttccaagcagaagaagaagaaaagaaaaagaaggaaggtaaatcaagaaacaaaagacaa

SEQ ID NO: 306008 - DNA, 120 bp, Artificial Sequence
  ENSG00000133710_11 (sequence is synthesized)
tctaagagtacagcttcctttgaggagttgtgtagtgaataccgcaaatccaggaaaaacggacggcttttttgcaccagagagaatgaccccatccagggcccagatggaaaaatgcat

SEQ ID NO: 306009 - DNA, 120 bp, Artificial Sequence
  ENSG00000133710_12 (sequence is synthesized)
ggcaacacctgctccatgtgtgaggccttctttcaacaagaagaaagagcaagagcaaaggctaaaagagaagctgcaaaggaaatctgcagtgaatttcgggaccaagtgaggaatgga

SEQ ID NO: 306010 - DNA, 120 bp, Artificial Sequence
  ENSG00000133710_13 (sequence is synthesized)
acacttatatgcaccagggagcataatcctgtccgtggcccagatggcaaaatgcatggaaacaagtgtgccatgtgtgccagtgtgttcaaacttgaagaagaagagaagaaaaatgat

SEQ ID NO: 306011 - DNA, 120 bp, Artificial Sequence
  ENSG00000133710_14 (sequence is synthesized)
agctgtgcagtgaatatcgtcattatgtgaggaatggacgactcccctgtaccagagagaatgatcctattgagggtctagatgggaaaatccacggcaacacctgctccatgtgtgaag

SEQ ID NO: 306012 - DNA, 120 bp, Artificial Sequence
  ENSG00000133710_15 (sequence is synthesized)
ccttcttccagcaagaagcaaaagaaaaagaaagagctgaacccagagcaaaagtcaaaagagaagctgaaaaggagacatgcgatgaatttcggagacttttgcaaaatggaaaacttt

SEQ ID NO: 306013 - DNA, 120 bp, Artificial Sequence
  ENSG00000133710_16 (sequence is synthesized)
tctgcacaagagaaaatgatcctgtgcgtggcccagatggcaagacccatggcaacaagtgtgccatgtgtaaggcagtcttccagaaagaaaatgaggaaagaaagaggaaagaagagg

SEQ ID NO: 306014 - DNA, 120 bp, Artificial Sequence
  ENSG00000133710_17 (sequence is synthesized)
aagatcagagaaatgctgcaggacatggttccagtggtggtggaggaggaaacactcaggacgaatgtgctgagtatcgggaacaaatgaaaaatggaagactcagctgtactcgggaga

SEQ ID NO: 306015 - DNA, 120 bp, Artificial Sequence
  ENSG00000133710_18 (sequence is synthesized)
gtgatcctgtacgtgatgctgatggcaaatcgtacaacaatcagtgtaccatgtgtaaagcaaaattggaaagagaagcagagagaaaaaatgagtattctcgctccagatcaaatggga

SEQ ID NO: 306016 - DNA, 120 bp, Artificial Sequence
  ENSG00000133710_19 (sequence is synthesized)
ctggatcagaatcagggaaggatacatgtgatgagtttagaagccaaatgaaaaatggaaaactcatctgcactcgagaaagtgaccctgtccggggtccagatggcaagacacatggca

SEQ ID NO: 306017 - DNA, 120 bp, Artificial Sequence
  ENSG00000133710_20 (sequence is synthesized)
ataagtgtactatgtgtaaggaaaaactggaaagggaagcagctgaaaaaaaaaagaaagaggatgaagacaggagcaatacaggagaaaggagcaatacaggagaaaggagcaatgaca

SEQ ID NO: 306018 - DNA, 120 bp, Artificial Sequence
  ENSG00000133710_21 (sequence is synthesized)
aagaggatctgtgtcgtgaatttcgaagcatgcagagaaatggaaagcttatctgcaccagagaaaataaccctgttcgaggcccatatggcaagatgcacatcaataaatgtgctatgt

SEQ ID NO: 306019 - DNA, 120 bp, Artificial Sequence
  ENSG00000133710_22 (sequence is synthesized)
gtcagagcatctttgatcgagaagctaatgaaagaaaaaagaaagatgaagagaaatcaagtagcaagccctcaaataatgcaaaggatgagtgcagtgaatttcgaaactatataagga

SEQ ID NO: 306020 - DNA, 120 bp, Artificial Sequence
  ENSG00000133710_23 (sequence is synthesized)
acaatgaactcatctgccctagagagaatgacccagtgcacggtgctgatggaaagttctatacaaacaagtgctacatgtgcagagctgtctttctaacagaagctttggaaagggcaa

SEQ ID NO: 306021 - DNA, 120 bp, Artificial Sequence
  ENSG00000133710_24 (sequence is synthesized)
agcttcaagaaaagccatcccatgttagagcttctcaagaggaagacagcccagactctttcagttctctggattctgagatgtgcaaagactaccgagtattgcccaggataggttatc

SEQ ID NO: 306022 - DNA, 120 bp, Artificial Sequence
  ENSG00000133710_25 (sequence is synthesized)
tttgtccaaaggatttaaagcctgtctgtggtgacgatggccaaacctacaacaatccttgcatgctctgtcatgaaaacctgatacgccaaacaaatacacacatccgcagtacaggga

SEQ ID NO: 306023 - DNA, 120 bp, Artificial Sequence
  ENSG00000133710_26 (sequence is synthesized)
agtgtgaggagagcagcaccccaggaaccaccgcagccagcatgcccccgtctgacgaatgacaggaagattgttgaaagccatgagggaaaaaataaaccccagttctgaatcacctac

SEQ ID NO: 306024 - DNA, 120 bp, Artificial Sequence
  ENSG00000133710_27 (sequence is synthesized)
cttcaccatctgtatatacaaagaattcttcggagcttgtcttatttgctatagaaaacaatacagagcttttgggaatggactcactgattttcagtcttttccatctctttcctccta

SEQ ID NO: 306025 - DNA, 120 bp, Artificial Sequence
  ENSG00000133710_28 (sequence is synthesized)
gactctgtgatctgagggtataaagacatctccaccaagtctgagccctcaaaatgtcctgattacaatgctgtctgtccaactgcctgttcaataaaagtaaactcagcagaacaccct

SEQ ID NO: 306026 - DNA, 120 bp, Artificial Sequence
  ENSG00000133710_29 (sequence is synthesized)
agtgcagacaggttcagaatgaagcggaggatgcaaaatttagacaacctgggcgttccttggcctctgttgccaggatgagtacagatgagtgcagtgaatttcgaaactatataagga

SEQ ID NO: 306027 - DNA, 120 bp, Artificial Sequence
  ENSG00000133710_30 (sequence is synthesized)
aagaaagctaatttacagaaagcaagtttcccagataagctattgccgtctttctttctttccttatctttggcaatttctctggctcaggcattgaagacggaaatgcttgtctctttt

SEQ ID NO: 306028 - DNA, 120 bp, Artificial Sequence
  ENSG00000133710_31 (sequence is synthesized)
cctcaaataatgcaaaggttatttattaaaggataccaaaataaccattttacttttcaccttcagaattttgcattcttctccagctttgggaataataaatatattaatatcttaact

SEQ ID NO: 306029 - DNA, 120 bp, Artificial Sequence
  ENSG00000133710_32 (sequence is synthesized)
acgtgcacattttttgttctcactctaataatgtgataaagctgaattatttccaattttctgacgagagaggtcaagagacttgttcaaggtcttttctcttggatcctaaaggatgga

SEQ ID NO: 306030 - DNA, 120 bp, Artificial Sequence
  ENSG00000133710_33 (sequence is synthesized)
agctaaagtggtgtggtatataagtcccatgaccttgaacaactggttttatgtgggtgtcaccagtgctttataaaagtaaactgcatcgccccgagttcagtcatactgcaccagctg

SEQ ID NO: 306031 - DNA, 120 bp, Artificial Sequence
  ENSG00000133731_0 (sequence is synthesized)
agcccctctacctccggaagagacgagtgcggtaacaccgttcacagagctagccggacgtcctccgactcaagatatttgtcaaatattttcagaagatggctgatccttggcaggaat

SEQ ID NO: 306032 - DNA, 120 bp, Artificial Sequence
  ENSG00000133731_1 (sequence is synthesized)
gcatggattatgcagtaactctagcaagacaagctggagaggtagtttgtgaagctataaaaaatgaaatgaatgttatgctgaaaagttctccagttgatttggtaactgctacggacc

SEQ ID NO: 306033 - DNA, 120 bp, Artificial Sequence
  ENSG00000133731_2 (sequence is synthesized)
aaaaagttgaaaaaatgcttatctcttccataaaggaaaagtatccatctcacagtttcattggtgaagaatctgtggcagctggggaaaaaagtatcttaaccgacaaccccacatgga

SEQ ID NO: 306034 - DNA, 120 bp, Artificial Sequence
  ENSG00000133731_3 (sequence is synthesized)
tcattgaccctattgatggaacaactaactttgtacatagatttccttttgtagctgtttcaattggctttgctgtaaataaaaagatagaatttggagttgtgtacagttgtgtggaag

SEQ ID NO: 306035 - DNA, 120 bp, Artificial Sequence
  ENSG00000133731_4 (sequence is synthesized)
gcaagatgtacactgccagaaaaggaaaaggtgccttttgtaatggtcaaaaactacaagtttcacaacaagaagatattaccaaatctctcttggtgactgagttgggctcttccagaa

SEQ ID NO: 306036 - DNA, 120 bp, Artificial Sequence
  ENSG00000133731_5 (sequence is synthesized)
caccagagactgtgagaatggttctttctaatatggaaaagcttttttgcattcctgttcatgggatccggagtgttggaacagcagctgttaatatgtgccttgtggcaactggcggag

SEQ ID NO: 306037 - DNA, 120 bp, Artificial Sequence
  ENSG00000133731_6 (sequence is synthesized)
cagatgcatattatgaaatgggaattcactgctgggatgttgcaggagctggcattattgttactgaagctggtggcgtgctaatggatgttacaggtggaccatttgatttgatgtcac

SEQ ID NO: 306038 - DNA, 120 bp, Artificial Sequence
  ENSG00000133731_7 (sequence is synthesized)
gaagagtaattgctgcaaataatagaatattagcagaaaggatagctaaagaaattcaggttatacctttgcaacgagacgacgaagattaattaaggcagcctcatagtcaatcccagt

SEQ ID NO: 306039 - DNA, 120 bp, Artificial Sequence
  ENSG00000133731_8 (sequence is synthesized)
tgcttttccccagatttggtgactcatcaatggatatgtgttttggatgtatgatatgcttggtttaaattctctttgtccaggtcaaaaatttggaacttgtttcttattttactatgt

SEQ ID NO: 306040 - DNA, 120 bp, Artificial Sequence
  ENSG00000133731_9 (sequence is synthesized)
ctaggtttgcaagaattgacataatgtttgtttcactgatttaaaaaattttgcatgtaagaatgtactttaggaaacatacccaggaagtacagttgataaatataacatcaactgaaa

SEQ ID NO: 306041 - DNA, 120 bp, Artificial Sequence
  ENSG00000133731_10 (sequence is synthesized)
tagtcaattagcaattttgtgtttctaaatatctatggtcccctgaaattttgacttagtatataggtgcagagacacccacttagaaagttaactgtttggaaaaacatttctctttag

SEQ ID NO: 306042 - DNA, 120 bp, Artificial Sequence
  ENSG00000133731_11 (sequence is synthesized)
tttcaaaaaccatatataattaaatttgtaaggatatactgagtaccctaggccaacttttttttctttgcagagaaccttttttgttttattcttcagtgttcatatagcacctggccc

SEQ ID NO: 306043 - DNA, 120 bp, Artificial Sequence
  ENSG00000133731_12 (sequence is synthesized)
attacatatctaggcaactaaaaacaaacattgtaagaatgaatatttttaatgtagtaattcctagttacaatagatacataaagtaatgaactcagcattctgtacttttgcttcagg

SEQ ID NO: 306044 - DNA, 120 bp, Artificial Sequence
  ENSG00000133731_13 (sequence is synthesized)
tttgaagtaaaaattatctagttaaattttttttatttcacgttaccatgccatttcacattaccataccatcagatagcatggcttattgtgggcatttctgcagtgaatacattttcc

SEQ ID NO: 306045 - DNA, 120 bp, Artificial Sequence
  ENSG00000133731_14 (sequence is synthesized)
aaattgtctgtttggatttgctttaaagtcttgtgtaagagagaagaaactatttctataataaaaagcactctcatcagatatctgacataattagatacaatataacattttactaag

SEQ ID NO: 306046 - DNA, 120 bp, Artificial Sequence
  ENSG00000133731_15 (sequence is synthesized)
ttcagtattcatgttttaaaggtgtttatactgatttgattgtgctggcaaatatactgtattgttaatattgaactgtttatttttctcttagtcttcttatttaattaacttcattgc

SEQ ID NO: 306047 - DNA, 120 bp, Artificial Sequence
  ENSG00000133731_16 (sequence is synthesized)
cgctggattctgttcagcctttaaaaatatttcttagtggtcattgctctgcagaactcaaaaagaaaattgtacttgttcatagacatttttaaagggttaatttattgttcagcctta

SEQ ID NO: 306048 - DNA, 120 bp, Artificial Sequence
  ENSG00000133731_17 (sequence is synthesized)
tcccttggcacgtaaacagactactagacttattgtaggttcgtttgagctttgtgttgtaaaattaaaaatgcttctgtaaagttttcaaggtagggagtgattttattattgtgtata

SEQ ID NO: 306049 - DNA, 120 bp, Artificial Sequence
  ENSG00000133731_18 (sequence is synthesized)
tctaatatattaagtatgtgtgatactaaggtttgactgctataattatttgtactgttgatcacatgtacttaaaacatctgatactgtattctaagacaggttgtttttgcaattaaa

SEQ ID NO: 306050 - DNA, 120 bp, Artificial Sequence
  ENSG00000133731_19 (sequence is synthesized)
tttattttaataagacgatcatgaataaaactttaaattgatatttttattattattaccattatcattattattatttttagattcagggtctcgctctgttgcccagggtctgtctct

SEQ ID NO: 306051 - DNA, 120 bp, Artificial Sequence
  ENSG00000133731_20 (sequence is synthesized)
gactgtgctgtggtgcagtcatagctcactgtatccttaaattcctgggctcaagtgatcctcctctttcagtctcctgagtagctgggactataagttcatgccaccatgccctactaa

SEQ ID NO: 306052 - DNA, 88 bp, Artificial Sequence
  ENSG00000133731_21 (sequence is synthesized)
gtagctgggactataagttcatgccaccatgccctactaatgttttaattttatttttgtaaagatgggatcttcctatgttttccag

SEQ ID NO: 306053 - DNA, 120 bp, Artificial Sequence
  ENSG00000133731_22 (sequence is synthesized)
aaagttaatagttcaaactacttttagaggctttgttttgtttttgttttttgaagacagtgtcttgctcttctgctcaaacagtaatgcagtggcatgatcaccattcattgcagtctc

SEQ ID NO: 306054 - DNA, 83 bp, Artificial Sequence
  ENSG00000133731_23 (sequence is synthesized)
tagtaactggaagtttttgtagagacagaatcttcctatgttgcttaggctggtctcattgggctcaagtgatcctcctgcct

SEQ ID NO: 306055 - DNA, 90 bp, Artificial Sequence
  ENSG00000133731_24 (sequence is synthesized)
cagccttttgcacccaacatacttttagaggtttttgtgttgagttacaaatatttgaaacttgcaaatgtaatttaatatatgttctta

SEQ ID NO: 306056 - DNA, 120 bp, Artificial Sequence
  ENSG00000133731_25 (sequence is synthesized)
atatttgaaacttgcaaatgtaatttaatatatgttcttattttttgcctgtaatctttccaacttttctaaaaacctatatttttttctacaatagcttttccatctgtttattctaaa

SEQ ID NO: 306057 - DNA, 120 bp, Artificial Sequence
  ENSG00000133731_26 (sequence is synthesized)
tgcagttgcatattttgtgtctgaaatttctttagatgctgaaaaaggatgatcgacaagtgaattatctaataatatttgaaaatatttctttgagtaacaggacttcttagacttaac

SEQ ID NO: 306058 - DNA, 120 bp, Artificial Sequence
  ENSG00000133731_27 (sequence is synthesized)
atgtatattttgtatcagggtatattatctttctgcatgtggatacatacacagatacatacataaatatacataaatatatgtacttgaacacataaaatatatgtacttgccttttaa

SEQ ID NO: 306059 - DNA, 120 bp, Artificial Sequence
  ENSG00000133731_28 (sequence is synthesized)
cacagagctagccggacgtcctccgactcaagctcctagaaacttggtgcatccccaggcccaggtagtcactctaagtgatggggcagcgcccaggtcctgtgctgcccgcagtcgcgg

SEQ ID NO: 306060 - DNA, 120 bp, Artificial Sequence
  ENSG00000133731_29 (sequence is synthesized)
tgctgggacaggtggcaaaaaggaaggtggcctggctcctacgctggaaggctgtgaccaggacagaaacagcaggaaacagttcaggtgtttatggctttgggaaaatgaaaatatttg

SEQ ID NO: 306061 - DNA, 120 bp, Artificial Sequence
  ENSG00000133731_30 (sequence is synthesized)
taggagatgcaaagttactcattggcagtgaagggaaaaggatagaataacatttcaaaggttttgtaaggaggagagaaacttaatgagaaggtataagaagaaaaatccaagagacta

SEQ ID NO: 306062 - DNA, 120 bp, Artificial Sequence
  ENSG00000133731_31 (sequence is synthesized)
gggaatcagctgatggagcagtttttcagagaatgtatgtgagggtaggagtcctaacaccggagaagcgttcacttagaaaataggaaagccctgtcttccgaagcaggaggaagagaa

SEQ ID NO: 306063 - DNA, 120 bp, Artificial Sequence
  ENSG00000133731_32 (sequence is synthesized)
atcagttctggtgacctctttctcttgattagtctggaaattaacattttaagtatcccacagtttagccatttcagtccattgttactagtcagtataccagattgtcttgttattttc

SEQ ID NO: 306064 - DNA, 120 bp, Artificial Sequence
  ENSG00000133731_33 (sequence is synthesized)
caattggctttgctgtaaataaaaaggtttggaaccgtaggttcttcccccgattatgaggttgatgggagccaaaatgaatttgtggactgtaaaaaaccaacctgtgtgaatatggag

SEQ ID NO: 306065 - DNA, 120 bp, Artificial Sequence
  ENSG00000133731_34 (sequence is synthesized)
agctaaaagggaaatggaagcaatgggagaaggaagaaaaaagcctgaggtgcctaacttttcaggatagaatttggagttgtgtacagttgtgtggaaggcaagatgtacactgccaga

SEQ ID NO: 306066 - DNA, 120 bp, Artificial Sequence
  ENSG00000133731_35 (sequence is synthesized)
acatggatcattgaccctattgatggaacaactaactttgtacatagatggagtttccctcttgttggccaggctgagatgcaatggcgcagtcttggctcactgcaacccccacctccc

SEQ ID NO: 306067 - DNA, 120 bp, Artificial Sequence
  ENSG00000133731_36 (sequence is synthesized)
tgccaactgtttcaattggctttgctgtaaataaaaagatagaatttggagttgtgtacagttgtgtggaaggcaagatgtacactgccagaaaaggaaaaggtgccttttgtaatggtc

SEQ ID NO: 306068 - DNA, 120 bp, Artificial Sequence
  ENSG00000133739_0 (sequence is synthesized)
aagctcacggacccctcgctgggtgccggttaagaccccgctccccgtcgccagtgctatggaggcggcggcggcggtggtggcggcagaggcggaagtggaaaacgaagacggcgacag

SEQ ID NO: 306069 - DNA, 120 bp, Artificial Sequence
  ENSG00000133739_1 (sequence is synthesized)
cagctgcggggatgtatgcttcatggacaaaggcttgcagagcatatcagaattatctttagattcaactcttcatgccgtcaatcttcattgcaataacatctccaagatcgaagccat

SEQ ID NO: 306070 - DNA, 120 bp, Artificial Sequence
  ENSG00000133739_2 (sequence is synthesized)
tgatcatatttggaatttacaacatctagatctgtcatctaatcaaataagtagaattgaaggactaaacacactgacaaaactgtgcacattaaatttgtcctgcaatttgattacaaa

SEQ ID NO: 306071 - DNA, 120 bp, Artificial Sequence
  ENSG00000133739_3 (sequence is synthesized)
agtagaaggacttgaagaactaattaatctgactagactaaatgtatcttataaccacatagatgatcttagtggattgattccccttcatggaattaagcataaacttagatatattga

SEQ ID NO: 306072 - DNA, 120 bp, Artificial Sequence
  ENSG00000133739_4 (sequence is synthesized)
tctacatagtaatcgtatagatagtatccatcacttacttcagtgtatggtaggattgcacttcctgaccaatcttattttggagaaagatggagacgataatcctgtctgtcgactgcc

SEQ ID NO: 306073 - DNA, 120 bp, Artificial Sequence
  ENSG00000133739_5 (sequence is synthesized)
agggtacagagcagttattctccagactttgccacagcttagaatcctagattgcaagaacatatttggtgaaccagtaaatttgacagaaataaattcatcacagctgcagtgcctaga

SEQ ID NO: 306074 - DNA, 120 bp, Artificial Sequence
  ENSG00000133739_6 (sequence is synthesized)
aggtcttttggataatttagtttcttctgattctcccctaaatataagtgaagatgagatcattgatagaatgccagtgataacagcacctatcgatgagttagttcccttggaacagtt

SEQ ID NO: 306075 - DNA, 120 bp, Artificial Sequence
  ENSG00000133739_7 (sequence is synthesized)
tgcaagtacaccaagtgatgctgtgttgacgtcttttatgtctgtgtgtcaatcttctgagccagagaaaaataatcatgaaaacgatttgcagaatgagataaaacttcagaaattaga

SEQ ID NO: 306076 - DNA, 120 bp, Artificial Sequence
  ENSG00000133739_8 (sequence is synthesized)
tgaccaaattctacaacttctaaatgaaacttctaattcaatagataacgttcttgagaaagaccccagaccaaaaagagacacagatataacttctgaaagtgactatggaaacagaaa

SEQ ID NO: 306077 - DNA, 120 bp, Artificial Sequence
  ENSG00000133739_9 (sequence is synthesized)
agaatgcaatagaaaagttcctcgaagatcaaaaatcccttatgatgccaaaaccattcaaactattaagcaccacaataaaaactacaactcttttgtaagttgtaatcgtaaaatgaa

SEQ ID NO: 306078 - DNA, 120 bp, Artificial Sequence
  ENSG00000133739_10 (sequence is synthesized)
accaccttaccttaaagaattatatgtaagctcatctttagcaaactgtcctatgttacaagaatcagaaaagccaaagactgaaataattaaagtagaccaaagtcactcagaagacaa

SEQ ID NO: 306079 - DNA, 120 bp, Artificial Sequence
  ENSG00000133739_11 (sequence is synthesized)
cacttaccagtcccttgttgaacagctagaccaagagagagagaagagatggagagctgagcaagccgaaaataaactcatggattatattgatgagctgcataaacatgcaaatgaaaa

SEQ ID NO: 306080 - DNA, 120 bp, Artificial Sequence
  ENSG00000133739_12 (sequence is synthesized)
agaggatattcatagtctggctctacttaccacagataggctaaaggaaattatttttagagagagaaattccaaaggacaactcgaagttatggttcacaaacttcaaaatgaaattaa

SEQ ID NO: 306081 - DNA, 120 bp, Artificial Sequence
  ENSG00000133739_13 (sequence is synthesized)
aaaactgactgttgaactaatgaaagcaaaagatcaacaagaggatcaccttaaacacttaagaaccctcgaaaaaacattagaaaaaatggagagacaaaaaaggcagcagcaggcagc

SEQ ID NO: 306082 - DNA, 120 bp, Artificial Sequence
  ENSG00000133739_14 (sequence is synthesized)
acagataagactgatccaagaggtggaactcaaagcttcagctgccgatagagaaatatacttacttagaacttcccttcatcgagaaagagaacaagcgcaacaacttcatcaacttct

SEQ ID NO: 306083 - DNA, 120 bp, Artificial Sequence
  ENSG00000133739_15 (sequence is synthesized)
gaaagaacaggaacacaggaaggaacttgaaacaagggagttttttactgatgctgacttccaggatgccttagctaaagaaatagccaaagaagagaaaaagcatgagcaaatgataaa

SEQ ID NO: 306084 - DNA, 120 bp, Artificial Sequence
  ENSG00000133739_16 (sequence is synthesized)
agaataccaagagaaaattgacgtgttaagccagcagtatatggatttagaaaatgaattccgtattgctttaactgttgaagccagaagatttcaagatgttaaagatggttttgaaaa

SEQ ID NO: 306085 - DNA, 120 bp, Artificial Sequence
  ENSG00000133739_17 (sequence is synthesized)
tgttgcaactgagttagcaaagagcaaacatgctcttatttgggctcaacgaaaagaaaatgagtcttcctctttaattaaagatctgacctgtatggtaaaggaacaaaaaacaaaact

SEQ ID NO: 306086 - DNA, 120 bp, Artificial Sequence
  ENSG00000133739_18 (sequence is synthesized)
ggcagaagtttctaaattgaaacaagaaacagcagcaaatttacagaatcaaatcaacacccttgaaattttaattgaagatgacaagcagaagagtattcaaatagaacttctcaagca

SEQ ID NO: 306087 - DNA, 120 bp, Artificial Sequence
  ENSG00000133739_19 (sequence is synthesized)
cgaaaaagtccagcttatttctgagctagcagccaaggaatcactaatatttggtttaaggacagaaagaaaagtatggggacatgagctggcacaacaaggatcttctctagcccaaaa

SEQ ID NO: 306088 - DNA, 120 bp, Artificial Sequence
  ENSG00000133739_20 (sequence is synthesized)
tcgtggaaaattggaggctcaaattgagagtttatctagagagaatgaatgtctgcgaaagacaaatgaaagtgatagtgatgcattaagaataaagtgcaaaatcatagacgaccaaac

SEQ ID NO: 306089 - DNA, 120 bp, Artificial Sequence
  ENSG00000133739_21 (sequence is synthesized)
tgaaactattagaaaattaaaagattgtttacaagaaaaagatgaacacatcaaaagattacaagaaaagatcacagaaatagaaaaatgcactcaagaacaacttgatgaaaaatcttc

SEQ ID NO: 306090 - DNA, 120 bp, Artificial Sequence
  ENSG00000133739_22 (sequence is synthesized)
acaactggatgaggtacttgagaagttggaaaggcacaatgaaagaaaagaaaaactaaaacaacagttgaaaggaaaggaagtagaacttgaagaaatcagaaaagcttacagtacact

SEQ ID NO: 306091 - DNA, 120 bp, Artificial Sequence
  ENSG00000133739_23 (sequence is synthesized)
gaatcggaagtggcatgataaaggagaacttctatgtcatcttgaaacacaagtaaaagaagtgaaagaaaaatttgaaaacaaggaaaagaaacttaaagcggaaagagacaaaagtat

SEQ ID NO: 306092 - DNA, 120 bp, Artificial Sequence
  ENSG00000133739_24 (sequence is synthesized)
tgaactacaaaagaatgcaatggaaaaacttcatagtatggatgatgcctttaaaagacaagttgatgcaattgttgaagctcatcaagctgaaatagcacagctggccaatgaaaagca

SEQ ID NO: 306093 - DNA, 120 bp, Artificial Sequence
  ENSG00000133739_25 (sequence is synthesized)
gaagtgtattgattctgcaaatttaaaggtccatcaaattgaaaaagaaatgcgtgaacttttggaagaaacatgcaagaacaaaaaaacaatggaagcaaaaattaagcaacttgcttt

SEQ ID NO: 306094 - DNA, 120 bp, Artificial Sequence
  ENSG00000133739_26 (sequence is synthesized)
tgctttaaatgaaattcagcaagatatgtgatggttctgagaatgaatttaattgaaatagaccagcagacctattgtaaaaatgattaaatattgtaatagtagtaactgctatgactt

SEQ ID NO: 306095 - DNA, 120 bp, Artificial Sequence
  ENSG00000133739_27 (sequence is synthesized)
actatcataactagacttacaatatttttcttgtttctgtactatacattgtttggtaattacacatttgcctacaaatttgtgaatgaaaagattagtattttcaccatatgaggtaaa

SEQ ID NO: 306096 - DNA, 120 bp, Artificial Sequence
  ENSG00000133739_28 (sequence is synthesized)
acattttaatcattgttatcttattgtgatgatgaagaactaattatatttgttatttaattgatgtagctcaattcttttaaagtacttatgtagccaaaaagcatttgaaatctgtat

SEQ ID NO: 306097 - DNA, 120 bp, Artificial Sequence
  ENSG00000133739_29 (sequence is synthesized)
gataaaagatgtggcattcttaagaaagtatatgtagccatctccacatcactcattatgaccccttcttttataatgcttatatcttttcattaaagattacatttaaggttttataaa

SEQ ID NO: 306098 - DNA, 120 bp, Artificial Sequence
  ENSG00000133739_30 (sequence is synthesized)
cccagatagtcacatttaaaggttgctagtttgaaatttgcaaatgcttccctgctgtcagagttaggtttcctacagctgtaagatagctgctactcaacctacagcagatgcccgtga

SEQ ID NO: 306099 - DNA, 120 bp, Artificial Sequence
  ENSG00000133739_31 (sequence is synthesized)
cattgtgtgttcctgggtgtatctcccatctagcaactccaaactgtgtatgctgtagtttgtgttcctggaactactatcttcaggagaagcttcagttataaatagtaattggagtga

SEQ ID NO: 306100 - DNA, 120 bp, Artificial Sequence
  ENSG00000133739_32 (sequence is synthesized)
agagatgagttctgtttaggggagatccattaactttcaacaagggaggacagggactttttcaataggaattgcaataacatggtttgtttttgaaaatgcaatagactgtggattaaa

SEQ ID NO: 306101 - DNA, 120 bp, Artificial Sequence
  ENSG00000133739_33 (sequence is synthesized)
tagctattgcacacaaagaagaaaataaagttataatctccagcatgagatctggatttacatatgctctgttagctgcaagaatttgggcaagctatttaatttccataaatttaggta

SEQ ID NO: 306102 - DNA, 120 bp, Artificial Sequence
  ENSG00000133739_34 (sequence is synthesized)
tccttaagatacccactgcttagagttattgtgagaattaattgaggtaagaaaactgaggctcaggttgtcatttgctcaaatcacacagcaaaaccgtgatagaatgcagattcaaac

SEQ ID NO: 306103 - DNA, 120 bp, Artificial Sequence
  ENSG00000133739_35 (sequence is synthesized)
tgggatattaacattccaaagcctttacagttattgactactattcagcactgccttcaatatatgctgatgactgcacacaggagttagaaatgcccactgtcacttgcctgccttgag

SEQ ID NO: 306104 - DNA, 120 bp, Artificial Sequence
  ENSG00000133739_36 (sequence is synthesized)
cggtttcttgtttgtataaataatccaaaatacttggttgtgttgtaagaagcaccgtgttttgtgagacatttcaaaggtaccacaaataggaaagatttcattctagaatgaatagag

SEQ ID NO: 306105 - DNA, 120 bp, Artificial Sequence
  ENSG00000133739_37 (sequence is synthesized)
cacatatttagtatctacgtgctgtttggttaattttagttatttggtcatgcttttaaaatctatttttatagtatatattttcttttatagcatatcagaattatctttagattcaac

SEQ ID NO: 306106 - DNA, 120 bp, Artificial Sequence
  ENSG00000133739_38 (sequence is synthesized)
cagctgcggggatgtatgcttcatggacaaaggcttgcagaggtaaagggcgctccgcagccaggagcgacccgcgcactccccagagccggggccacgagtggctggcggcgacaccag

SEQ ID NO: 306107 - DNA, 120 bp, Artificial Sequence
  ENSG00000133739_39 (sequence is synthesized)
agtggaggcgcggcactgctttaccaagaccataagtgaacgcagtctggctttcggcctccccgctcctccaaaacttacctgccgaagtgccaggttgaatgagccgtggatgccttc

SEQ ID NO: 306108 - DNA, 120 bp, Artificial Sequence
  ENSG00000133739_40 (sequence is synthesized)
ccgcccgtgtctcctgcccagcgtttcacacgactctgcttagcctagaaactgccccaggaccttgtcctccaccagcttctgaccactctttccttctgctggttttccttacttact

SEQ ID NO: 306109 - DNA, 120 bp, Artificial Sequence
  ENSG00000133740_0 (sequence is synthesized)
cttctcctcgtttccacccctcccccctcggtcgtgggcctcattcacgcttccccgggcttggggagggggcggaggcccggcgtgacaagcggcccagactcccgtgggcgccgcaca

SEQ ID NO: 306110 - DNA, 120 bp, Artificial Sequence
  ENSG00000133740_1 (sequence is synthesized)
cctgttgtttgcagcagccagcgacccgcactaccgctctcggcgggcggggaagcggccgcagcggagccgacccggcaggtggccgcgggcggggccggcgagcgaaagtgcgcgggg

SEQ ID NO: 306111 - DNA, 80 bp, Artificial Sequence
  ENSG00000133740_2 (sequence is synthesized)
gcgaaagtgcgcgggggcccgaccaccgcggggccgggacgcgatggcggcggcagagcccgcgagctcgggccagcagg

SEQ ID NO: 306112 - DNA, 120 bp, Artificial Sequence
  ENSG00000133740_3 (sequence is synthesized)
gccccgcagccgcccccgccgccgcagctcgggggcgccgggggcggcagcagcaggcacgagaagagcctggggctgctcactaccaagttcgtgtcgctgctgcaggaggccaaggac

SEQ ID NO: 306113 - DNA, 120 bp, Artificial Sequence
  ENSG00000133740_4 (sequence is synthesized)
ggcgttctggatctcaaagcggctgctgatactttggctgtgaggcaaaaaaggagaatttatgatatcaccaatgtcttagagggaattgacttgattgaaaaaaagtcaaaaaacagt

SEQ ID NO: 306114 - DNA, 120 bp, Artificial Sequence
  ENSG00000133740_5 (sequence is synthesized)
atccagtggaaaggtgtaggtgctggctgtaatactaaagaagtcatagatagattaagatatcttaaagctgaaattgaagatctagaactgaaggaaagagaacttgatcagcagaag

SEQ ID NO: 306115 - DNA, 120 bp, Artificial Sequence
  ENSG00000133740_6 (sequence is synthesized)
ttgtggctacagcaaagcatcaaaaatgtgatggacgattccattaataatagattttcctatgtaactcatgaagacatctgtaattgctttaatggtgatacacttttggccattcag

SEQ ID NO: 306116 - DNA, 120 bp, Artificial Sequence
  ENSG00000133740_7 (sequence is synthesized)
gcaccttctggtacacaactggaggtacccattccagaaatgggtcagaatggacaaaagaaataccagatcaatctaaagagtcattcaggacctatccatgtgctgcttataaataaa

SEQ ID NO: 306117 - DNA, 120 bp, Artificial Sequence
  ENSG00000133740_8 (sequence is synthesized)
tgatgacctcacacagccttcctcccagtccttgactccagtgactccacagaaatccagcatggcaactcaaaatctgcctgagcaacatgtctctgaaagaagccaggctctgcagca

SEQ ID NO: 306118 - DNA, 120 bp, Artificial Sequence
  ENSG00000133740_9 (sequence is synthesized)
gacatcagctacagatatatcttcagcaggatctattagtggagatatcattgatgagttaatgtcttctgacgtgtttcctctcttaaggctttctcctaccccggcagatgactacaa

SEQ ID NO: 306119 - DNA, 120 bp, Artificial Sequence
  ENSG00000133740_10 (sequence is synthesized)
ctttaatttagatgataacgaaggagtttgtgatctgtttgatgtccagatactaaattattagattccatggaaacttgggactgttatctacctctaactgtgtaacattttagactt

SEQ ID NO: 306120 - DNA, 120 bp, Artificial Sequence
  ENSG00000133740_11 (sequence is synthesized)
cttaataacctaaatatttaaaataatgaatgtaacaccttttttagttcactgattctgaagtgttcttccctaatactttctttacttcacaaaacttcaaccataaaaacaaagggc

SEQ ID NO: 306121 - DNA, 120 bp, Artificial Sequence
  ENSG00000133740_12 (sequence is synthesized)
tctgattgctttaggggataagtgatttaatatccacaaacgtccccactcccaaaagtaactatattctggatttcaacttttcttctaattgtgaatccttctgttttttcttcttaa

SEQ ID NO: 306122 - DNA, 120 bp, Artificial Sequence
  ENSG00000133740_13 (sequence is synthesized)
ggaggaaagttaaaggacactacaggtcatcaaaaacaagttggccaaggactcattacttgtcttatatttttactgccactaaactgcctgtatttctgtatgtccttctatccaaac

SEQ ID NO: 306123 - DNA, 120 bp, Artificial Sequence
  ENSG00000133740_14 (sequence is synthesized)
agacgttcactgccacttgtaaagtgaaggatgtaaacgaggatatataactgtttcagtgaacagattttgtgaagtgccttctgttttagcactttaagtttatcacattttgttgac

SEQ ID NO: 306124 - DNA, 120 bp, Artificial Sequence
  ENSG00000133740_15 (sequence is synthesized)
ttctgacattccactttcctaggttataggaaagatctgtttatgtagtttgtttttaaaatgtgccaatgcctgtacattaacaagatttttaaaaataaaattgtataaaacattcaa

SEQ ID NO: 306125 - DNA, 120 bp, Artificial Sequence
  ENSG00000133740_16 (sequence is synthesized)
aagcaagcctcttataggcagcataagttgagtgtttttaaaaatccatttaactactttgcctttttattggagaacttaatccacttacgttcagggttatcattcataggctgctga

SEQ ID NO: 306126 - DNA, 120 bp, Artificial Sequence
  ENSG00000133740_17 (sequence is synthesized)
tgagttaatgtcttctgacggtaagtaggttaaaattttactaactcacttatcagtaatgcttctgtggaatttataagtgaaacatgatttaaaagaaatgaacatatatttgctacc

SEQ ID NO: 306127 - DNA, 120 bp, Artificial Sequence
  ENSG00000133740_18 (sequence is synthesized)
tgctttactatgaagattcatgaaaattctcccttaacacttacagtaagtaataggcaaccttcagaatttatttttctttgcttgcattttgagggaaaggaatccatatggggatac

SEQ ID NO: 306128 - DNA, 120 bp, Artificial Sequence
  ENSG00000133740_19 (sequence is synthesized)
ttctcaccttcattgaaaataaactgttagccctttccactcctgaaggatctggtccaagaagagtaaaataacttgtctaaatcaagcaactgatctgaacacctgcctttgtaaata

SEQ ID NO: 306129 - DNA, 120 bp, Artificial Sequence
  ENSG00000133740_20 (sequence is synthesized)
cccctacccaggccaatttcaagctgccaatgggaagtcactgaattagtattaatattaaccatgttgtcatctaacctgaaaaattattaaatatcagttagctacaatatgctaatt

SEQ ID NO: 306130 - DNA, 120 bp, Artificial Sequence
  ENSG00000133740_21 (sequence is synthesized)
actttaataatttctctccttctgtaagttcttggatcagagtcctactacctaacaaataaagtagaaacctacgaagtggtagcagttaagttagcaaatgttatagtaactagagat

SEQ ID NO: 306131 - DNA, 120 bp, Artificial Sequence
  ENSG00000133740_22 (sequence is synthesized)
gtactaaacatgtatgtagaagcagagaacatcagcaaactttgtaagtccagttcattcttctgtttgcaaagtggaaaacaaaacactttcattagtgttctgttttttttttttaag

SEQ ID NO: 306132 - DNA, 88 bp, Artificial Sequence
  ENSG00000133740_23 (sequence is synthesized)
acaaaacactttcattagtgttctgttttttttttttaaggcagagtctccctctgtcatccaggctggaagctcactgcaacctcca

SEQ ID NO: 306133 - DNA, 89 bp, Artificial Sequence
  ENSG00000133740_24 (sequence is synthesized)
gttagtgccttttagttatattaccttagtgataagttcaaccaataaaaaatttaatttctaggccgggcacaatggctcatgcctgt

SEQ ID NO: 306134 - DNA, 67 bp, Artificial Sequence
  ENSG00000133740_25 (sequence is synthesized)
gaggccaaggcgggcgaataaaaaaataaaaaaaatgagccggtcgtggtggcaggcacctgtagtc

SEQ ID NO: 306135 - DNA, 69 bp, Artificial Sequence
  ENSG00000133740_26 (sequence is synthesized)
gagcttgcagtgggccgagatcgagctactgcactccagcctggacgaaacagggagactccatcttaa

SEQ ID NO: 306136 - DNA, 83 bp, Artificial Sequence
  ENSG00000133740_27 (sequence is synthesized)
actcctctgtttctcaatctaatatcaatattcaatgtacaaattgttactaaatgagaatatttcaaaatacacattacaca

SEQ ID NO: 306137 - DNA, 120 bp, Artificial Sequence
  ENSG00000133740_28 (sequence is synthesized)
gagaatatttcaaaatacacattacacaagactttaatttggaatgatgtatttgagagtattttgttaaagatcattaaccgtatgtagaaaccatctttaacactaaatttgtttttt

SEQ ID NO: 306138 - DNA, 120 bp, Artificial Sequence
  ENSG00000133740_29 (sequence is synthesized)
ttcatcaacattaactggtttgctttcatgacgctgctgaggaatctgaaaggagaaagtattatatttaaaaacacagacaacaatagcagacaaatgacttatataagctgttattca

SEQ ID NO: 306139 - DNA, 120 bp, Artificial Sequence
  ENSG00000133740_30 (sequence is synthesized)
atttaatttttctagtcatatctttggaagtagaacaatctgtatattctgacaatgttttagagtctgaatatgctatttatactatagagcctagtactagagagccaagtactaaaa

SEQ ID NO: 306140 - DNA, 120 bp, Artificial Sequence
  ENSG00000133740_31 (sequence is synthesized)
attacactcaacttacaggctttgaaaacttgggagtttaatttattagcctcaatttgttagccataaaaaaaagcaaatgatttctgcttaccagttctttctgcagaggttcaagtg

SEQ ID NO: 306141 - DNA, 120 bp, Artificial Sequence
  ENSG00000133740_32 (sequence is synthesized)
aaatgctttttgcgaaatgtgcaagttccttttgtacatttacaaaagctttatttactctgttaactttttcctcattcataatgtttatcttttaaaaagaaaaaaagcattaatcta

SEQ ID NO: 306142 - DNA, 120 bp, Artificial Sequence
  ENSG00000133740_33 (sequence is synthesized)
tgatctcataaccattaaagataagatatattcaaccttaacctgttaaatctaaaatctaaaaactcttaccaacaaattagggataattcactcaaaaattcttatagtcttattggg

SEQ ID NO: 306143 - DNA, 120 bp, Artificial Sequence
  ENSG00000133740_34 (sequence is synthesized)
aaattacagacaaaaagttttggtttttaaaaaatgggatttatgtggctatgcctcacacttatggttcagaaggctaaaatatgtgactgtgatattgtgattcataataagatatat

SEQ ID NO: 306144 - DNA, 120 bp, Artificial Sequence
  ENSG00000133740_35 (sequence is synthesized)
atatatatttggtctttgtcctcatttcctgtcatacagctttttaaatcattgtattaagagggataagagtgtcttttgaatgctaataagatggctggtagctgggagtctctagat

SEQ ID NO: 306145 - DNA, 120 bp, Artificial Sequence
  ENSG00000133740_36 (sequence is synthesized)
agcttcaggaggagggctagtcagataaaaacacagggttagaggattaggactttctgctccagaggagtggggataaaggttaagcccatcactaatggccaatgatttaatgaatta

SEQ ID NO: 306146 - DNA, 120 bp, Artificial Sequence
  ENSG00000133740_37 (sequence is synthesized)
tgcctacataatgaagcctccggaaatctacaaaagaactgggttcaaagagcttctggatagctgaacacatgggggctcctagaaagtggcatgcccagagagagcagggaagctcca

SEQ ID NO: 306147 - DNA, 120 bp, Artificial Sequence
  ENSG00000133740_38 (sequence is synthesized)
tgccccttcccatgtaccttgccctctgcacctcttccatctggctacgcatctgtcccctttgtaatatcctttataataaactggtaaaagtattttcctgggttctgtgagctgctc

SEQ ID NO: 306148 - DNA, 120 bp, Artificial Sequence
  ENSG00000133740_39 (sequence is synthesized)
tagcaaattaatcaaacccaaggagggggtcatgggaacacttatttataactggttggtgagaagcacaggtaaaacatctgggacttgtgattgtcactggaagttggggagaggctt

SEQ ID NO: 306149 - DNA, 120 bp, Artificial Sequence
  ENSG00000133740_40 (sequence is synthesized)
aggactcaactctcaacctgtggaatctgacgctatctccaggtcagcagtgtcagattttaattaaaggacacccagctgctgcctgctgaagattcatctgcagaattgttaggtgtg

SEQ ID NO: 306150 - DNA, 120 bp, Artificial Sequence
  ENSG00000133740_41 (sequence is synthesized)
ggggaactgccccacaaatctagtattggaagtgttgagtgaccgtatgagagtgagagtaagagaaactgagttgcttttttcctgtatccttacagtgaccaaaatctttctaggcta

SEQ ID NO: 306151 - DNA, 120 bp, Artificial Sequence
  ENSG00000133740_42 (sequence is synthesized)
cagtgctgtcatcccgcatctatacaagaaacctggatcaaatacttttagtcccttctaacataacaatacgtctctgaatccttcctggaccttcttgtcttaatggaagacccctga

SEQ ID NO: 306152 - DNA, 120 bp, Artificial Sequence
  ENSG00000133740_43 (sequence is synthesized)
tgacagcttccctcgcagtcctcctcttgagtttaacagaggtttttgtttgaattgcagatgtcttcaaagatacaagaattactgaggagaaaaagaatgggtgctcactgacatccc

SEQ ID NO: 306153 - DNA, 120 bp, Artificial Sequence
  ENSG00000133740_44 (sequence is synthesized)
atgtcttgcctctattaatacattcttacatttgagtttagagataagaactgtttcccatactatggtttttaaatgagttctatggttcagtaaaactattaaattgaagcttcacac

SEQ ID NO: 306154 - DNA, 120 bp, Artificial Sequence
  ENSG00000133740_45 (sequence is synthesized)
ctgtttatgaacagagaaataagataggaggtgacatggataggcaattagtagctcctcctcaggattagtccataaggtgacacaaagtattcttattgtgttcttttatttttgcag

SEQ ID NO: 306155 - DNA, 120 bp, Artificial Sequence
  ENSG00000133740_46 (sequence is synthesized)
gctttgtgtcatgaccttaatttctttttctgttccaacatctgctagcttttaaatggaataatttctttggtatttgcagtgtttgggagatgctttgaacatgctcagctattgtcc

SEQ ID NO: 306156 - DNA, 120 bp, Artificial Sequence
  ENSG00000133742_0 (sequence is synthesized)
ctcctccctattctagaaatagaagggaggaggacctattttgttccatcctgtaggctgatcctttacacctaggactggaagaaataagaaaaagaaaactcagtagaagataatggc

SEQ ID NO: 306157 - DNA, 120 bp, Artificial Sequence
  ENSG00000133742_1 (sequence is synthesized)
aagtccagactggggatatgatgacaaaaatggtcctgaacaatggagcaagctgtatcccattgccaatggaaataaccagtcccctgttgatattaaaaccagtgaaaccaaacatga

SEQ ID NO: 306158 - DNA, 120 bp, Artificial Sequence
  ENSG00000133742_2 (sequence is synthesized)
cacctctctgaaacctattagtgtctcctacaacccagccacagccaaagaaattatcaatgtggggcattccttccatgtaaattttgaggacaacgataaccgatcagtgctgaaagg

SEQ ID NO: 306159 - DNA, 120 bp, Artificial Sequence
  ENSG00000133742_3 (sequence is synthesized)
tggtcctttctctgacagctacaggctctttcagttccattttcactggggcagtacaaatgagcatggttcagaacatacagtggatggagtcaaatattctgccgagcttcacgtagc

SEQ ID NO: 306160 - DNA, 120 bp, Artificial Sequence
  ENSG00000133742_4 (sequence is synthesized)
tcactggaattctgcaaagtactccagccttgctgaagctgcctcaaaggctgatggtttggcagttattggtgttttgatgaaggttggtgaggccaacccaaagctgcagaaagtact

SEQ ID NO: 306161 - DNA, 120 bp, Artificial Sequence
  ENSG00000133742_5 (sequence is synthesized)
aacgagccccattcacaaattttgacccctctactctccttccttcatccctggatttctggacctaccctggctctctgactcatcctcctctttatgagagtgtaacttggatcatct

SEQ ID NO: 306162 - DNA, 120 bp, Artificial Sequence
  ENSG00000133742_6 (sequence is synthesized)
gtaaggagagcatcagtgtcagctcagagcagctggcacaattccgcagccttctatcaaatgttgaaggtgataacgctgtccccatgcagcacaacaaccgcccaacccaacctctga

SEQ ID NO: 306163 - DNA, 120 bp, Artificial Sequence
  ENSG00000133742_7 (sequence is synthesized)
agggcagaacagtgagagcttcattttgatgattctgagaagaaacttgtccttcctcaagaacacagccctgcttctgacataatccagtaaaataataatttttaagaaataaattta

SEQ ID NO: 306164 - DNA, 120 bp, Artificial Sequence
  ENSG00000133742_8 (sequence is synthesized)
tttcaatattagcaagacagcatgccttcaaatcaatctgtaaaactaagaaacttaaattttagttcttactgcttaattcaaataataattagtaagctagcaaatagtaatctgtaa

SEQ ID NO: 306165 - DNA, 120 bp, Artificial Sequence
  ENSG00000133742_9 (sequence is synthesized)
gcataagcttatgcttaaattcaagtttagtttgaggaattctttaaaattacaactaagtgatttgtatgtctatttttttcagtttatttgaaccaataaaataattttatctctttc

SEQ ID NO: 306166 - DNA, 120 bp, Artificial Sequence
  ENSG00000133742_10 (sequence is synthesized)
ctttagcccaacagtcaaaaataattgatgctaccctacaaatgtccaaaactctagtatatcatatttctaagttacagcaaatattagtcctgctaaaccagggagctttggcaaaaa

SEQ ID NO: 306167 - DNA, 120 bp, Artificial Sequence
  ENSG00000133742_11 (sequence is synthesized)
tgttttttgacagtaaatttgtccttgattatatattaactagtcaaagaggtgtttgtaacattattagagcttcttgttgtaggtgggttaacaccaccaatcaagaggtcattctaa

SEQ ID NO: 306168 - DNA, 120 bp, Artificial Sequence
  ENSG00000133742_12 (sequence is synthesized)
cagaaagcctggatcagaaaaccatcaccctaaaaaaacatgccttacatatttaacacactctgaaatccagtcaaaatatgactaaaggcccttgccatgactgatgtattctcctgg

SEQ ID NO: 306169 - DNA, 120 bp, Artificial Sequence
  ENSG00000133742_13 (sequence is synthesized)
ccaacgccaaacaaatgggagcctggttacgagtcagccttcagggacttgtcacatttctacttggtttcttccttgttattgtcataataaaatgttttctatgctgtttagtgcaac

SEQ ID NO: 306170 - DNA, 120 bp, Artificial Sequence
  ENSG00000133742_14 (sequence is synthesized)
ttaggccctattctgtagaagtctcctctactattcaggccactcaaacaccccaaataattgagttcaaaatcgacatcaagatataaaggaatcagtgactaaatatatttcatatat

SEQ ID NO: 306171 - DNA, 120 bp, Artificial Sequence
  ENSG00000133742_15 (sequence is synthesized)
ggtatttttattgattattgtgctgtcttgacctagtatggaggccttggctagaggctggtcagtttcctctcttgagcagctgattaaatccacaccccaaccacttcccttatcagg

SEQ ID NO: 306172 - DNA, 120 bp, Artificial Sequence
  ENSG00000133742_16 (sequence is synthesized)
ttctcacactctggggccactatgtacccactctaatcaccacagggccagacatcagacaattaaggacagcgcccatgccccaaagcccgccaaaattatgcaaattattcaaaatta

SEQ ID NO: 306173 - DNA, 120 bp, Artificial Sequence
  ENSG00000133742_17 (sequence is synthesized)
ttcaacctagctaaccccaccctttttgctgtacataagctgcccattccccctccagcctgtggtacccagtcctcaggtgcaaccccctgcgtggtcctctgtggcagccttctctca

SEQ ID NO: 306174 - DNA, 120 bp, Artificial Sequence
  ENSG00000133742_18 (sequence is synthesized)
ctaaaaccattaagtttctactccatttacattcaaaaatcttaaatactttacttgcaagagtattttgcttcaaatacaacaacctaagagcagctggagatgaaatattgggaaatt

SEQ ID NO: 306175 - DNA, 120 bp, Artificial Sequence
  ENSG00000133742_19 (sequence is synthesized)
catttgcttactcctgaagacaaaaatatagctgagatgaccactggatttaatatcgttatgctggcccaacattgctaccatttgtgttgtctgtgatcaaaatgattatcttttata

SEQ ID NO: 306176 - DNA, 120 bp, Artificial Sequence
  ENSG00000133742_20 (sequence is synthesized)
taggaagatgacgcttctggatattgctttcacttcttctccccacgttagcaaggacaatgcttctctgccattattacaactagttagtttgcatggagaatctttactttaaaattg

SEQ ID NO: 306177 - DNA, 120 bp, Artificial Sequence
  ENSG00000133742_21 (sequence is synthesized)
gaagaaaagtcacaagtgaatggtttataaaaatgctaaagaagtcattcttgcttagaatcatatagaaacatcatgcaatcttttagtcagatgtgcgcttcaccttatgctattttt

SEQ ID NO: 306178 - DNA, 120 bp, Artificial Sequence
  ENSG00000133742_22 (sequence is synthesized)
atctttaattgacacacaataattgtacatgtttatggagtatagtgtggtgttttctgtttgtttgtttgttttttgagacaaggtctcactctgccagtcagggtggagtgcgatggt

SEQ ID NO: 306179 - DNA, 120 bp, Artificial Sequence
  ENSG00000133742_23 (sequence is synthesized)
atccctctcttctttcaggggttgcagcagctcagacaatccttaccatgtgaaaggaggaatgactgtcatggcatgaaaaaagcatcactatgaaaaagaaaactcagtagaagataa

SEQ ID NO: 306180 - DNA, 120 bp, Artificial Sequence
  ENSG00000133742_24 (sequence is synthesized)
ggatgtgggggaaaacaagatgaaagtttaggcactaatgtttgttttcacttctactcaatacaatttagtgttggtttatattaaatgcaaagataagctagagtttgtggagcatca

SEQ ID NO: 306181 - DNA, 120 bp, Artificial Sequence
  ENSG00000133742_25 (sequence is synthesized)
attgctgtaatctagtgaggcatcttggacttctggaaaacgcccaggtggtaaagacaatttttggaactcccagctctctattttcagtcttgcttctcaaagtcaccatcacgtctc

SEQ ID NO: 306182 - DNA, 120 bp, Artificial Sequence
  ENSG00000133742_26 (sequence is synthesized)
ggtaaacacactaaataagtagtttaaatcagagaacaagaatttacagatctatggaaatcatttaatgaagtattaaaactggggagtaggaaggccatagtaaaagctaccaactga

SEQ ID NO: 306183 - DNA, 120 bp, Artificial Sequence
  ENSG00000133742_27 (sequence is synthesized)
cagtagaagataatggcaagtccagactggggatatgatgacaaaaatgagtcctctctgtcgcccagctagagtgcaatggcatgatctaggctcactgcaatctctgcctcccaggtt

SEQ ID NO: 306184 - DNA, 120 bp, Artificial Sequence
  ENSG00000133742_28 (sequence is synthesized)
gtggtacccagtcctcaggtgcaaccccctgcgtggtcctctgtggcagccttctctcattcagagctatatgtgtacttcctgataagcagagatgatgaaataatggcctattaaaag

SEQ ID NO: 306185 - DNA, 120 bp, Artificial Sequence
  ENSG00000133742_29 (sequence is synthesized)
acccagtcctcaggtgcaaccccctgcgtggtcctctgtggcagccttctctcattcagagctgttttccacagaggtagtgaaaagaactggattttcaagttcactttgcaagagggg

SEQ ID NO: 306186 - DNA, 120 bp, Artificial Sequence
  ENSG00000133742_30 (sequence is synthesized)
gtggtacccagtcctcaggtgcaaccccctgcgtggtcctctgtggcagccttctctcattcagagctaattttttacaacaccttttttttagatatgtgtacttcctgataagcagag

SEQ ID NO: 306187 - DNA, 120 bp, Artificial Sequence
  ENSG00000133742_31 (sequence is synthesized)
taccatgtgaaaggaggaatgactgtcatggcatgaaaaaagcatcactatgaaaaagaaaactcagtagaagataatggcaagtccagactggggatatgatgacaaaaatggtaagag

SEQ ID NO: 306188 - DNA, 120 bp, Artificial Sequence
  ENSG00000133742_32 (sequence is synthesized)
attaagtatttaaaataattgtacagctataggttaattgttgaactgtctgctttaaataattatactatctttgcatgtattcttagcattgtcttttggggcatggctgactacaaa

SEQ ID NO: 306189 - DNA, 120 bp, Artificial Sequence
  ENSG00000133773_0 (sequence is synthesized)
agtcggctgcaatggcgccggtgaggcggtccgcgaagtggcggcctggtggtattgaggcgcgtggtgaaggggtttccactgtcgggtacaggaataagaatgtgagacagaagacat

SEQ ID NO: 306190 - DNA, 120 bp, Artificial Sequence
  ENSG00000133773_1 (sequence is synthesized)
ggcggcctaaccacccgcaagccttcgtggggagcgttcgcgagggacaaggctttgcttttcgaagaaaactgaaaatacagcaaagttacaagaaattgctacggaaggaaaagaagg

SEQ ID NO: 306191 - DNA, 120 bp, Artificial Sequence
  ENSG00000133773_2 (sequence is synthesized)
ctcaaacgtcactggaatctcaattcacagatcgatacccagataatctgaaacatctctatttagctgaagaggaaagacataggaagcaagcaagaaaagtcgaccatcctttgtcag

SEQ ID NO: 306192 - DNA, 120 bp, Artificial Sequence
  ENSG00000133773_3 (sequence is synthesized)
aacaagttcaccagccgttgcttgaagaacagtgtagcattgacgagcctttatttgaagatcagtgtagctttgaccagcctcagccagaagaacaatgtattaaaacagtaaactcct

SEQ ID NO: 306193 - DNA, 120 bp, Artificial Sequence
  ENSG00000133773_4 (sequence is synthesized)
ttacaattccaaagaaaaataaaaagaaaacatcaaatcaaaaagcacaagaagaatatgaacagatacaagccaaacgtgctgctaagaaacaagaattcgagaggagaaaacaggaga

SEQ ID NO: 306194 - DNA, 120 bp, Artificial Sequence
  ENSG00000133773_5 (sequence is synthesized)
gagaagaagcccaaaggcagtacaaaaagaagaaaatggaagtgtttaaaatactgaacaaaaagactaaaaagggccaaccaaacttgaatgtacaaatggagtaccttcttcaaaaaa

SEQ ID NO: 306195 - DNA, 120 bp, Artificial Sequence
  ENSG00000133773_6 (sequence is synthesized)
ttcctacaggttaaaatatctgctgcctattaggttcttctgtgacatgtgcctcccagcagtgaactaaatttgtcgacataaactggattgctaaactatgctaaatataagatgttc

SEQ ID NO: 306196 - DNA, 120 bp, Artificial Sequence
  ENSG00000133773_7 (sequence is synthesized)
acatatttttattatggtaaaaaattttctaaatatgttctacatgtttcttatttatttgcctctgaaggaaggttggcctgaagaactgaaagaacctcttattttgcaagacaggcc

SEQ ID NO: 306197 - DNA, 120 bp, Artificial Sequence
  ENSG00000133773_8 (sequence is synthesized)
caagcatgtaatacttttgtaccatatgagatttatatgaaataaattttttaaaaataaggaatcagagctatcaatgaagcatttcaatgaaatatttcaatttagtaaacagttacg

SEQ ID NO: 306198 - DNA, 120 bp, Artificial Sequence
  ENSG00000133773_9 (sequence is synthesized)
ttgttttaaaatttattttaatgatgagggaggcaaagactcctcttggactttttatttattttaagtacatgttacagggtgatgggtgctgaaataaactgccctcaccatataaca

SEQ ID NO: 306199 - DNA, 120 bp, Artificial Sequence
  ENSG00000133773_10 (sequence is synthesized)
aagcgaccttcacaaagcagtgaactcaaagtctgatatttataaacattcccttaaatggatgtacatggcttgttagtctaaggtcttttaaataatgatggaaaccccacagtgtca

SEQ ID NO: 306200 - DNA, 120 bp, Artificial Sequence
  ENSG00000133773_11 (sequence is synthesized)
cagcaagaattaagctttccagttcctatggaccctatactttaagaacattatctctgtctcccttgttggtacccttgtgagctgagataagccactgggataactgcttctcatgct

SEQ ID NO: 306201 - DNA, 120 bp, Artificial Sequence
  ENSG00000133773_12 (sequence is synthesized)
ttgcaaattgcagaagaatgagaaaggcttgaaatatatatatagtcattgtaagcaaaaagggctgaccaataatacttgccaaatattgaataataaaattttataaatgatagcaaa

SEQ ID NO: 306202 - DNA, 120 bp, Artificial Sequence
  ENSG00000133773_13 (sequence is synthesized)
gtgagctatttgcgctaaaaataacaggaaatgggaccacggggggtaaaaatgtaattggggatgaaggcagagacacaaaaagtttactacttttggtaggcttgatcattatattgt

SEQ ID NO: 306203 - DNA, 120 bp, Artificial Sequence
  ENSG00000133773_14 (sequence is synthesized)
taaataatcagtataaagttcagggaaaagattagcagtagaaatgtagatttgagttattctctgataattgaagtaaggaagtttaaatcatgagaaaggaaggtaaaaaatcatgct

SEQ ID NO: 306204 - DNA, 120 bp, Artificial Sequence
  ENSG00000133773_15 (sequence is synthesized)
tttaaagattacggtttattttggggtggaaacagggaaaatattgtcattgaggaagttaagcttttcaggactggagaaagagaaatacagtgacagctcagtccacagagaaaagtt

SEQ ID NO: 306205 - DNA, 120 bp, Artificial Sequence
  ENSG00000133773_16 (sequence is synthesized)
gtgagggattagtcagctatcaaatattgtggtcccccgttatctgtttggaagatgttccaagacccccagtggatgccctgaaactgcaaatggtaccaaacccagtttctgtcaatt

SEQ ID NO: 306206 - DNA, 120 bp, Artificial Sequence
  ENSG00000133773_17 (sequence is synthesized)
ggaatgtatttctgttaatgtcttttacttgggaatttaatgccttttccatcttaaatcacgtactgtggccataacttttgcagtttgaagtatgacagcaaaactagcatgaattta

SEQ ID NO: 306207 - DNA, 120 bp, Artificial Sequence
  ENSG00000133773_18 (sequence is synthesized)
tttttccttcacaatttgatgtatagaagattttttttaaaaccatagatcttagcaacttcaacatacgattttttttccttccttattaagtcaagaacttttaccttttcacttaaa

SEQ ID NO: 306208 - DNA, 120 bp, Artificial Sequence
  ENSG00000133773_19 (sequence is synthesized)
gcaaacactcagtgtggtgtacaatttaaaacatatgaattgtttatttctggaatttttcaatttaatatttttggacctctgttgactgcaggtaactgaaaccgtggaacagggaaa

SEQ ID NO: 306209 - DNA, 120 bp, Artificial Sequence
  ENSG00000133773_20 (sequence is synthesized)
ccatggataaggggtgtgctactgtactataaagttgaaggtgaataggactgaggacaggtctctggatttgtggactaggcagtcactagtcactagtccaaagtcgctagtgattag

SEQ ID NO: 306210 - DNA, 120 bp, Artificial Sequence
  ENSG00000133773_21 (sequence is synthesized)
agtaaagttattactgaatcaaggatgctgaggaaatgaatggaattccaagtagttggattagccttgacaaaaaggacatcttcagagaggtgagaagtagttaaagatagaacagtt

SEQ ID NO: 306211 - DNA, 120 bp, Artificial Sequence
  ENSG00000133773_22 (sequence is synthesized)
caaaatggtatctagatccaaggtatggtgattcatgactaggtaggtaaaatggaatagagaggaggggctcagaaaacttcgagattaaagttcatatatacacataattttcttaac

SEQ ID NO: 306212 - DNA, 120 bp, Artificial Sequence
  ENSG00000133773_23 (sequence is synthesized)
atccttaaacaacaagtttaattcttttttcagtctggcatttctatcattcatatactggtttcattacttttaaaagtttttttttttaacattttaggatttttcatagctttctat

SEQ ID NO: 306213 - DNA, 120 bp, Artificial Sequence
  ENSG00000133773_24 (sequence is synthesized)
attttttcctagttgaaatatttctctaagaatccccatttgtgccttttatttaatatatactcttaaaagctacaactgtgtttttaatacctttttggacattttactaataaagtc

SEQ ID NO: 306214 - DNA, 120 bp, Artificial Sequence
  ENSG00000133773_25 (sequence is synthesized)
aataagaatgtgagacagaagacatggcggcctaaccacccgcaagccttcgtggggagcgttcgcgaggctccattcttcgttcaacttcttttctctgaaagtaattttggatgatat

SEQ ID NO: 306215 - DNA, 120 bp, Artificial Sequence
  ENSG00000133773_26 (sequence is synthesized)
cactagggggcgcgtctctgagggcagggcctccgtctccgacgctgacttcctcagcgcagccagcactgtctccggtggcaagtcgaccagctcctcccacacggattctgtgtagaa

SEQ ID NO: 306216 - DNA, 120 bp, Artificial Sequence
  ENSG00000133773_27 (sequence is synthesized)
cagccagaagaacaatgtattaaaacagtaaagtatgtattttcttcatttgaaatcctttaagtgttgttttattatttaaaagtactataggataatttatataggaattgtattttt

SEQ ID NO: 306217 - DNA, 120 bp, Artificial Sequence
  ENSG00000133789_0 (sequence is synthesized)
aggtgactgcgcggcgggctgtggctgcggaggttgaggggcgtccgaggcgcggaggggctggctgggcaggaggggttggcggggcagcagggccgcggccatggggagcttgaagga

SEQ ID NO: 306218 - DNA, 120 bp, Artificial Sequence
  ENSG00000133789_1 (sequence is synthesized)
ggagctgctcaaagccatctggcacgccttcaccgcactcgaccaggaccacagcggcaaggtctccaagtcccagctcaaggtcctttcccataacctgtgcacggtgctgaaggttcc

SEQ ID NO: 306219 - DNA, 120 bp, Artificial Sequence
  ENSG00000133789_2 (sequence is synthesized)
tcatgacccagttgcccttgaagagcacttcagggatgatgatgagggtccagtgtccaaccagggctacatgccttatttaaacaggttcattttggaaaaggtccaagacaactttga

SEQ ID NO: 306220 - DNA, 120 bp, Artificial Sequence
  ENSG00000133789_3 (sequence is synthesized)
caagattgaattcaataggatgtgttggaccctctgtgtcaaaaaaaacctcacaaagaatcccctgctcattacagaagaagatgcatttaaaatatgggttattttcaactttttatc

SEQ ID NO: 306221 - DNA, 120 bp, Artificial Sequence
  ENSG00000133789_4 (sequence is synthesized)
tgaggacaagtatccattaattattgtgtcagaagagattgaatacctgcttaagaagcttacagaagctatgggaggaggttggcagcaagaacaatttgaacattataaaatcaactt

SEQ ID NO: 306222 - DNA, 120 bp, Artificial Sequence
  ENSG00000133789_5 (sequence is synthesized)
tgatgacagtaaaaatggcctttctgcatgggaacttattgagcttattggaaatggacagtttagcaaaggcatggaccggcagactgtgtctatggcaattaatgaagtctttaatga

SEQ ID NO: 306223 - DNA, 120 bp, Artificial Sequence
  ENSG00000133789_6 (sequence is synthesized)
acttatattagatgtgttaaagcagggttacatgatgaaaaagggccacagacggaaaaactggactgaaagatggtttgtactaaaacccaacataatttcttactatgtgagtgagga

SEQ ID NO: 306224 - DNA, 120 bp, Artificial Sequence
  ENSG00000133789_7 (sequence is synthesized)
tctgaaggataagaaaggagacattctcttggatgaaaattgctgtgtagagtccttgcctgacaaagatggaaagaaatgcctttttctcgtaaaatgttttgataagacttttgaaat

SEQ ID NO: 306225 - DNA, 120 bp, Artificial Sequence
  ENSG00000133789_8 (sequence is synthesized)
cagtgcttcagataagaagaagaaacaggagtggattcaagccattcattctactattcatctgttgaagctgggcagccctccaccacacaaagaagcccgccagcgtcggaaagaact

SEQ ID NO: 306226 - DNA, 120 bp, Artificial Sequence
  ENSG00000133789_9 (sequence is synthesized)
ccggaagaagcagctggctgaacaagaggaactggagcgacaaatgaaggaactccaggccgccaacgaaagcaagcagcaggagctggaggccgtgcggaagaaactggaggaagcagc

SEQ ID NO: 306227 - DNA, 120 bp, Artificial Sequence
  ENSG00000133789_10 (sequence is synthesized)
atctcgtgcagcagaagaggaaaagaaacgccttcagactcaagtggaacttcaggccaggttcagcacagagctggaaagagagaagcttatcagacagcagatggaagaacaggttgc

SEQ ID NO: 306228 - DNA, 120 bp, Artificial Sequence
  ENSG00000133789_11 (sequence is synthesized)
tcaaaagtcctctgaactggaacagtatttacagcgagtacgggagctggaagacatgtacctaaagctgcaggaggctcttgaagatgagagacaggcccggcaagatgaagagacagt

SEQ ID NO: 306229 - DNA, 120 bp, Artificial Sequence
  ENSG00000133789_12 (sequence is synthesized)
gcggaagcttcaggccaggttgttggaggaagagtcttccaagagggctgaactagaaaagtggcacttggagcagcagcaggccattcagacaaccgaggcggagaagcaggagttgga

SEQ ID NO: 306230 - DNA, 120 bp, Artificial Sequence
  ENSG00000133789_13 (sequence is synthesized)
gaatcagcgtgtcctgaaggaacaggccctgcaggaggccatggagcagctggagcagcttgagttagaacggaagcaagcacttgagcagtacgaggaagttaaaaagaagctggagat

SEQ ID NO: 306231 - DNA, 120 bp, Artificial Sequence
  ENSG00000133789_14 (sequence is synthesized)
ggcaactaataagaccaagagctggaaggacaaagtggcccatcatgaaggattaattcgactgatagaaccaggttcaaagaaccctcacctgatcactaactggggacctgcagcttt

SEQ ID NO: 306232 - DNA, 120 bp, Artificial Sequence
  ENSG00000133789_15 (sequence is synthesized)
cactgaggcagaacttgaagagagagagaagaactggaaagagaaaaagaccacggagtgactgagcttgctggcagtcacgtcagttatgtagatactgcatggcaggagagctttacg

SEQ ID NO: 306233 - DNA, 62 bp, Artificial Sequence
  ENSG00000133789_16 (sequence is synthesized)
cgtcagttatgtagatactgcatggcaggagagctttacgctaaagacaaaagaaacagctt

SEQ ID NO: 306234 - DNA, 120 bp, Artificial Sequence
  ENSG00000133789_17 (sequence is synthesized)
taactcttcttccttctgtgcctctctaagtgggtcagtatcctaaggaagccttcttatttatcttcctgcaaacaagggttacctgaaaagaaaaaaaaagtcaacattgtcaagctg

SEQ ID NO: 306235 - DNA, 120 bp, Artificial Sequence
  ENSG00000133789_18 (sequence is synthesized)
cagacagcacagtcagctctgcagagtttggaggggctcactgccactgggtactcagaacctctgtggactggatgtcagctctttcctttggcagcgtgtttccttttccgagtatgt

SEQ ID NO: 306236 - DNA, 120 bp, Artificial Sequence
  ENSG00000133789_19 (sequence is synthesized)
gctgttaaactagattggccggttcgctttccatttcctgacacttgacatggaatgcctttgaccattggtgctctgacagagaagtcatggagtcattgccatttcctggttgccctt

SEQ ID NO: 306237 - DNA, 120 bp, Artificial Sequence
  ENSG00000133789_20 (sequence is synthesized)
ttggaatgtgatcctgttagtagaggttttctagcttctactaagatatttctttccctaaccatcatacacttggcatgtttcattcccatctcctttcccctcaccttaaaggagact

SEQ ID NO: 306238 - DNA, 120 bp, Artificial Sequence
  ENSG00000133789_21 (sequence is synthesized)
acccctttgccccatattgtcaacctaattttctctcgtactctctctagtgaatgatgtgctaccaagtatatgccaggctgtgagaggattatactgagtagtagaaagaagctaatt

SEQ ID NO: 306239 - DNA, 120 bp, Artificial Sequence
  ENSG00000133789_22 (sequence is synthesized)
tgaaataaaaattatttgtataattaagaaagcagattagatgcacatggtcaacaggaagttgactgtatgtctgctagttagattcaaaacatcataaagatgatagcatgtcaatat

SEQ ID NO: 306240 - DNA, 120 bp, Artificial Sequence
  ENSG00000133789_23 (sequence is synthesized)
attagcctagccattatgttagcctttgttaggtgggcagcttttctgctttttcccttcctctgtggtgacaacggaggaaatatccaacagaaatacgtctaacagggaaattgggat

SEQ ID NO: 306241 - DNA, 120 bp, Artificial Sequence
  ENSG00000133789_24 (sequence is synthesized)
catagtttatatgcatctgatttgaaaggagtattgaggaaggttttcatatatgatctatctttggattaaaaagaacatttatgaaatcaagccttctaacactagttataattgaga

SEQ ID NO: 306242 - DNA, 120 bp, Artificial Sequence
  ENSG00000133789_25 (sequence is synthesized)
agcaacagtaactccgtggacagcaatcaagcttaaaattgtaaataaatatggggataattcagttgttgcaaaaaaagggcagaattcagtagaataaagtccttttctcttacaggt

SEQ ID NO: 306243 - DNA, 120 bp, Artificial Sequence
  ENSG00000133789_26 (sequence is synthesized)
attaaatgaggacagagaacctcaggtgttcttatgctagtgcttgctgagtgcatactaagaaagcaattccaaatagatgtatacatctagagagagtggtattagagattcagtgta

SEQ ID NO: 306244 - DNA, 120 bp, Artificial Sequence
  ENSG00000133789_27 (sequence is synthesized)
tgtatttatttacatgagaggaaactggaatataatcccataaattatcaccttttatgactggaaaatatttgccaatgaagaaatggtctgtaggtatttgtcttaagatttttggct

SEQ ID NO: 306245 - DNA, 120 bp, Artificial Sequence
  ENSG00000133789_28 (sequence is synthesized)
gtttaataaaaatgtaactttaacggtttcttatagttgcctttataaagtgtattgtctaaaatatttttgtatcatgtgcctttgaaatttgacagctgatttgggtgttggatttct

SEQ ID NO: 306246 - DNA, 120 bp, Artificial Sequence
  ENSG00000133789_29 (sequence is synthesized)
gcccagccatttatcagtattatcattttattcagtagctggcaggtgtattagaccaacgagacttaggtaaggaatggaacctttcctgtggtttgactgcacattacaccagaagac

SEQ ID NO: 306247 - DNA, 120 bp, Artificial Sequence
  ENSG00000133789_30 (sequence is synthesized)
tccagtatccctcattccagaatgaggaaaaagtattctacaaagaacctaatcacctctgtgaaatctatgggatggaaacagtgtggccttaggagtcaaatagtctctgcatggtgg

SEQ ID NO: 306248 - DNA, 120 bp, Artificial Sequence
  ENSG00000133789_31 (sequence is synthesized)
ggaggatcatgatggaatatgtgaatttctacttctagaagttgtgaaataggtcctgcacttttgcagaatgtccttctttaaacctggcttattccacagctgtagctgataacatga

SEQ ID NO: 306249 - DNA, 120 bp, Artificial Sequence
  ENSG00000133789_32 (sequence is synthesized)
cctggggcttagctgctctagccctgggttcttggagacctcacactgcctggcccctggccatccacctaaggactgcctgctttctggtcacatgtggaccttgatacgactaagcgg

SEQ ID NO: 306250 - DNA, 120 bp, Artificial Sequence
  ENSG00000133789_33 (sequence is synthesized)
ttacatatgtggttgtgcaaaagctttctgtttaatgcatagtgttaccgatttacatcttggttttcagtggcactatgtctaggaggcaatatccttttaaacagtgctttggctaag

SEQ ID NO: 306251 - DNA, 120 bp, Artificial Sequence
  ENSG00000133789_34 (sequence is synthesized)
atagatacttgtgaatcaaagatagcacagaaatgaactaagtatatcccatttggaattatattttgatactatttaaaatggtttcacctgttaaagggccaacagaactcttggttt

SEQ ID NO: 306252 - DNA, 120 bp, Artificial Sequence
  ENSG00000133789_35 (sequence is synthesized)
tacttttgtaattactgtacagaaaatttcaagagtgtttgagtgcttgtcatcaggtgttttccttaataagtagggatatgatcatttacaggaattatatatgaaaaaagtttttga

SEQ ID NO: 306253 - DNA, 120 bp, Artificial Sequence
  ENSG00000133789_36 (sequence is synthesized)
aatgtatttttgtgatgtgctatgttgaggggaaaccaaatatttatgattttaaaacattcgtatgaaaacattgtacaatgtaatatgctcaactttctcaattttttgctaattttt

SEQ ID NO: 306254 - DNA, 120 bp, Artificial Sequence
  ENSG00000133789_37 (sequence is synthesized)
ctaagatacattaaaaatgttttatatttttttttaagtaaaatggacccagtaagaaaattaaaaataccagaacatacactttaaactgtctgatttaataaaacagtggggggtaaa

SEQ ID NO: 306255 - DNA, 120 bp, Artificial Sequence
  ENSG00000133789_38 (sequence is synthesized)
agaattgatgcaggccactagagactaaaacggcaacacatgatttattatttagtataattgaatagtggagaatggtaatgtttgtctctccttggcccaatataatgaatcaaaagg

SEQ ID NO: 306256 - DNA, 120 bp, Artificial Sequence
  ENSG00000133789_39 (sequence is synthesized)
cccttaagttatttggttatgatacgtatatgattgtgttgaaagtcagcaggaaatgaatctagattagttgtctggcacagtcactgggaatgctgagcagatcgaagctgggtgcta

SEQ ID NO: 306257 - DNA, 120 bp, Artificial Sequence
  ENSG00000133789_40 (sequence is synthesized)
atgacaacttcataaggcttgggagggcaccttcagaaaggttcaggatgaacctggcaagctacttctagagctgagtttgctactaataggcgctttctgagttacaaacataacaag

SEQ ID NO: 306258 - DNA, 120 bp, Artificial Sequence
  ENSG00000133789_41 (sequence is synthesized)
ctaatacagtttcttggaatgactaacactctggtggagagggagaagtgtctctgctctggctgtgactgagctcgaggtgctgtccagattagaaagactgtggagactcgaccggct

SEQ ID NO: 306259 - DNA, 120 bp, Artificial Sequence
  ENSG00000133789_42 (sequence is synthesized)
ggagtgtttcttttcattctgaggcgctgggaaacccttgcttctggggctaaataagggcctattttagagcagtctggtaggtatgtttgatgaggtacccttagtcttattcgagaa

SEQ ID NO: 306260 - DNA, 120 bp, Artificial Sequence
  ENSG00000133789_43 (sequence is synthesized)
aatccacaaacccagaattacctctgataagagcttggcatcttcaacacgctccagaccagagagggccattggtatgcaggcagaggcctgttcaggccaacgttgccgtcaggtttt

SEQ ID NO: 306261 - DNA, 120 bp, Artificial Sequence
  ENSG00000133789_44 (sequence is synthesized)
gaggaataaggaagaaatatgcagtttctatttggtcattcaggattggtaacattccttcagtaattactacttgaaatcctaattttaaaagtatttgaaacctagattttttttccc

SEQ ID NO: 306262 - DNA, 120 bp, Artificial Sequence
  ENSG00000133789_45 (sequence is synthesized)
cttagaactttatgatagtcatgttcgcagatgaaaattctcaattttgggccttcatggcagcagggaggacaaaataaaatgaagactcccaaagggaaaaattgagcctatcctctg

SEQ ID NO: 306263 - DNA, 120 bp, Artificial Sequence
  ENSG00000133789_46 (sequence is synthesized)
ccagtttctactttgctgccccatttacattatttaaggtgtctgggatgggagacaacactaaaaagtattcactacagtagcagcacagggtccagtctttgatctctgaccccctgt

SEQ ID NO: 306264 - DNA, 120 bp, Artificial Sequence
  ENSG00000133789_47 (sequence is synthesized)
tttggggagcagttatgagatgagctagggtagattttccatggctgccattttacatgtggagcagcaaaagatgtttctttaatctttagataggaagagaaagaagaagccatcttt

SEQ ID NO: 306265 - DNA, 120 bp, Artificial Sequence
  ENSG00000133789_48 (sequence is synthesized)
attttgccaaaagtgacttcaaaaataaataaattgttttggacatttagattttaaatttaaatttttttaaggaaaaattattttctaaatagaaaattaagcatgtagcatattgcc

SEQ ID NO: 306266 - DNA, 120 bp, Artificial Sequence
  ENSG00000133789_49 (sequence is synthesized)
atattgccaggcatatataggccccacaggtgcacattcactgcactgtgaggttaatcaggttcttggaactcccctccagtgccactcggcagtgattttagcagaagagtcactcta

SEQ ID NO: 306267 - DNA, 120 bp, Artificial Sequence
  ENSG00000133789_50 (sequence is synthesized)
cgggaatgtttgagtgccatgtgacgtccagagtgacgttctacatgacactcaacattttttgagccacctcataatttgagccgtgttgagagttaatagattgtttttgtgcaaaga

SEQ ID NO: 306268 - DNA, 120 bp, Artificial Sequence
  ENSG00000133789_51 (sequence is synthesized)
attcgcaggtgaaatatgctatatgtattactgcagttttgtgggaagttgattatgacacagcagagactagatcacagagggaaccagataattctagaaatactagtcttagttatt

SEQ ID NO: 306269 - DNA, 120 bp, Artificial Sequence
  ENSG00000133789_52 (sequence is synthesized)
tagtgtttatagaatgagtgatattttgaataagggataattttggataattgaagccagtggttttttaaccaatgttatgtatcagaatcacctcacaaagcttctgaaaaatacacc

SEQ ID NO: 306270 - DNA, 86 bp, Artificial Sequence
  ENSG00000133789_53 (sequence is synthesized)
acaaagtgtggctcacccaccaacccaggagtttatgaccagcctgagcaacatggtgaaacctcatctttaaaaaaaaaaaaaaa

SEQ ID NO: 306271 - DNA, 120 bp, Artificial Sequence
  ENSG00000133789_54 (sequence is synthesized)
ttagaatttgacattttaaaattaatatttttgtcacaaagatgagtataagtcacttattttcttacactgatttcgtttttttattttttgtttttttgagacagtcttgctctgtcg

SEQ ID NO: 306272 - DNA, 120 bp, Artificial Sequence
  ENSG00000133794_0 (sequence is synthesized)
gacatttagggaaggcagaaagtaggtcagggacggaggtgcctgtttacccgcgccggactcaccgccgccgccgccgcgggatccgagtgcgggcgcgggcgcgggcgctcccggcga

SEQ ID NO: 306273 - DNA, 120 bp, Artificial Sequence
  ENSG00000133794_1 (sequence is synthesized)
gccacggtggtgctggctagagtgtatacgtttggacccaagcttaacttttccaatgtggaatcctgggccttcattggttccgatgtcataggaatctacgctagagggcttcctgtg

SEQ ID NO: 306274 - DNA, 120 bp, Artificial Sequence
  ENSG00000133794_2 (sequence is synthesized)
tgccgggcactgtggtttttggaagaagctgaccgcctgaaaagaaattataaaacatgaaaatcgctttgaggtgaccaagtccagaggcccctaactcctcccaagctggatctgggg

SEQ ID NO: 306275 - DNA, 120 bp, Artificial Sequence
  ENSG00000133794_3 (sequence is synthesized)
tgtaagaactgtgacttcagatcatccaatggcagaccagagaatggacatttcttcaaccatcagtgatttcatgtccccgggccccaccgacctgctttccagctctcttggtaccag

SEQ ID NO: 306276 - DNA, 120 bp, Artificial Sequence
  ENSG00000133794_4 (sequence is synthesized)
tggtgtggattgcaaccgcaaacggaaaggcagctccactgactaccaagaaagcatggacacagacaaagatgaccctcatggaaggttagaatatacagaacaccaaggaaggataaa

SEQ ID NO: 306277 - DNA, 120 bp, Artificial Sequence
  ENSG00000133794_5 (sequence is synthesized)
aaatgcaagggaagctcacagtcagattgaaaagcggcgtcgggataaaatgaacagttttatagatgaattggcttctttggtaccaacatgcaacgcaatgtccaggaaattagataa

SEQ ID NO: 306278 - DNA, 120 bp, Artificial Sequence
  ENSG00000133794_6 (sequence is synthesized)
acttactgtgctaaggatggctgttcagcacatgaaaacattaagaggtgccaccaatccatacacagaagcaaactacaaaccaacttttctatcagacgatgaattgaaacacctcat

SEQ ID NO: 306279 - DNA, 120 bp, Artificial Sequence
  ENSG00000133794_7 (sequence is synthesized)
tctcagggcagcagatggatttttgtttgtcgtaggatgtgaccgagggaagatactctttgtctcagagtctgtcttcaagatcctcaactacagccagaatgatctgattggtcagag

SEQ ID NO: 306280 - DNA, 120 bp, Artificial Sequence
  ENSG00000133794_8 (sequence is synthesized)
tttgtttgactacctgcatcctaaagatattgccaaagtcaaggagcagctctcctcctctgacaccgcaccccgggagcggctcatagatgcaaaaactggacttccagttaaaacaga

SEQ ID NO: 306281 - DNA, 120 bp, Artificial Sequence
  ENSG00000133794_9 (sequence is synthesized)
tataacccctgggccatctcgattatgttctggagcacgacgttctttcttctgtaggatgaagtgtaacaggccttcagtaaaggttgaagacaaggacttcccctctacctgctcaaa

SEQ ID NO: 306282 - DNA, 120 bp, Artificial Sequence
  ENSG00000133794_10 (sequence is synthesized)
gaaaaaagatcgaaaaagcttctgcacaatccacagcacaggctatttgaaaagctggccacccacaaagatggggctggatgaagacaacgaaccagacaatgaggggtgtaacctcag

SEQ ID NO: 306283 - DNA, 120 bp, Artificial Sequence
  ENSG00000133794_11 (sequence is synthesized)
ggacgactgcattctcatgtagttccacaaccagtgaacggggaaatcagggtgaaatctatggaatatgtttctcggcacgcgatagatggaaagtttgtttttgtagaccagagggca

SEQ ID NO: 306284 - DNA, 120 bp, Artificial Sequence
  ENSG00000133794_12 (sequence is synthesized)
acagctattttggcatatttaccacaagaacttctaggcacatcgtgttatgaatattttcaccaagatgacataggacatcttgcagaatgtcataggcaagttttacagacgagagaa

SEQ ID NO: 306285 - DNA, 120 bp, Artificial Sequence
  ENSG00000133794_13 (sequence is synthesized)
aaaattacaactaattgctataaatttaaaatcaaagatggttcttttatcacactacggagtcgatggttcagtttcatgaacccttggaccaaggaagtagaatatattgtctcaact

SEQ ID NO: 306286 - DNA, 120 bp, Artificial Sequence
  ENSG00000133794_14 (sequence is synthesized)
aacactgttgttttagccaacgtcctggaaggcggggacccaaccttcccacagctcacagcatccccccacagcatggacagcatgctgccctctggagaaggtggcccaaagaggacc

SEQ ID NO: 306287 - DNA, 120 bp, Artificial Sequence
  ENSG00000133794_15 (sequence is synthesized)
caccccactgttccagggattccagggggaacccgggctggggcaggaaaaataggccgaatgattgctgaggaaatcatggaaatccacaggataagagggtcatcgccttctagctgt

SEQ ID NO: 306288 - DNA, 120 bp, Artificial Sequence
  ENSG00000133794_16 (sequence is synthesized)
ggctccagcccattgaacatcacgagtacgcctccccctgatgcctcttctccaggaggcaagaagattttaaatggagggactccagacattccttccagtggcctactatcaggccag

SEQ ID NO: 306289 - DNA, 120 bp, Artificial Sequence
  ENSG00000133794_17 (sequence is synthesized)
gctcaggagaacccaggttatccatattctgatagttcttctattcttggtgagaacccccacataggtatagacatgattgacaacgaccaaggatcaagtagtcccagtaatgatgag

SEQ ID NO: 306290 - DNA, 120 bp, Artificial Sequence
  ENSG00000133794_18 (sequence is synthesized)
gcagcaatggctgtcatcatgagcctcttggaagcagatgctggactgggtggccctgttgactttagtgacttgccatggccgctgtaaacactacatgttgctttggcaacagctata

SEQ ID NO: 306291 - DNA, 120 bp, Artificial Sequence
  ENSG00000133794_19 (sequence is synthesized)
gtatcaaagtgcattactggtggagttttacagtctgtgaagcttactggataaggagagaatagcttttatgtactgacttcataaaagccatctcagagccattgatacaagtcaatc

SEQ ID NO: 306292 - DNA, 120 bp, Artificial Sequence
  ENSG00000133794_20 (sequence is synthesized)
ttactatatgtaacttcagacaaagtggaactaagcctgctccagtgtttcctcatcattgattattgggctagctgtggatagcttgcattaattgtatattttggattctgtttgtgt

SEQ ID NO: 306293 - DNA, 120 bp, Artificial Sequence
  ENSG00000133794_21 (sequence is synthesized)
tgaattttttaatcattgtgcacagaagcatcattggtagcttttatatgcaaatggtcatttcagatgtatggtgtttttacactacaaagaagtcccccatgtggatatttcttatac

SEQ ID NO: 306294 - DNA, 120 bp, Artificial Sequence
  ENSG00000133794_22 (sequence is synthesized)
taattgtatcataaagccgtttattcttccttgtaagaatcctttactataaatatgggttaaagtataatgtactagacagttaaatatttttaataaatgtttcccttgttctataaa

SEQ ID NO: 306295 - DNA, 120 bp, Artificial Sequence
  ENSG00000133794_23 (sequence is synthesized)
ggagatgagcaaggaggccgtgagcctgtgggcgctcactgtgtccctccaacccccagtccccttgtgtgtctgcagagagatgacaggatcaggcagaagaaaacagcaatgtgtaac

SEQ ID NO: 306296 - DNA, 120 bp, Artificial Sequence
  ENSG00000133794_24 (sequence is synthesized)
accctaccccagcaggcgctaaaggagagctgacatgatggataacgaaaaagaagacgctgtccttctattcagggagtttaacatctggaagagccgggagttctttgtgctaaaggc

SEQ ID NO: 306297 - DNA, 120 bp, Artificial Sequence
  ENSG00000133794_25 (sequence is synthesized)
cctctacaaagtgcctgagatgcaaaaataagtcactttctctgtcctctcagcaaccgagtcgcatgtcgttatcaaatttttattttctgtaactgtttccttccgtcttgctccgta

SEQ ID NO: 306298 - DNA, 120 bp, Artificial Sequence
  ENSG00000133794_26 (sequence is synthesized)
ggaatcgctccgcgctcgagtattctctttggaactacgggaatgacagctccagtgggacacttggaggtcatgatgaacgcaaagaacgtggtgctggctagagtgtatacgtttgga

SEQ ID NO: 306299 - DNA, 120 bp, Artificial Sequence
  ENSG00000133794_27 (sequence is synthesized)
gcaatgtcaggagacatttttggtcttcacaactgggtgggaggttgctacttaaacatcctgtggatagagaccagggatgctgcttgttaaacatcctacagtaaacaggacagttcc

SEQ ID NO: 306300 - DNA, 120 bp, Artificial Sequence
  ENSG00000133794_28 (sequence is synthesized)
ctcctccccacccaacaaagaattatccaatccaaaatgttagtagtgcctagattaagaaatcctgccttaaataaagaagctaaaccaaaatagcccagcgctaaagagaattcttga

SEQ ID NO: 306301 - DNA, 120 bp, Artificial Sequence
  ENSG00000133794_29 (sequence is synthesized)
gaagacttaactttcttatggctcaaggagcttctcagtgcggatagatgtacctttactttacaggaatgcaggagtagagctgtgaactatcagagtgatctggaccttaacaaaaca

SEQ ID NO: 306302 - DNA, 120 bp, Artificial Sequence
  ENSG00000133794_30 (sequence is synthesized)
ttcactttttttcaatcaaagagctgcccaggattagtactagaaaccaagcagatcagctagttattactagctgtcttgggagagacttcctttccatatgaaagagaaggagcttag

SEQ ID NO: 306303 - DNA, 120 bp, Artificial Sequence
  ENSG00000133794_31 (sequence is synthesized)
aagcagtccacctgggtctgagtcctgggcctgtctctctacctggctatgctgagacttacttaacctcttgctctctgttgatttaaaccataaaaagaaagcactatttcccaagaa

SEQ ID NO: 306304 - DNA, 120 bp, Artificial Sequence
  ENSG00000133794_32 (sequence is synthesized)
ttgtgttaggattgtgagggcactcaggaaagttccaggaacacagcctgacatatagtgagtgcttaaaaattaattaaatctgtctttaagagcagtcgagagggaagcagttatcat

SEQ ID NO: 306305 - DNA, 120 bp, Artificial Sequence
  ENSG00000133794_33 (sequence is synthesized)
aagtctgtccaaatttggggaatagagaaggtggtaaccagattcttcagaacgaaacttaatgtaacataagaaaaggaagaaaacactgctgccgctggattctctcaggagaattag

SEQ ID NO: 306306 - DNA, 120 bp, Artificial Sequence
  ENSG00000133794_34 (sequence is synthesized)
aggctggcctgttttccaattggccataaaggggctgttatccccctataggtaacacagctcttttccaaccccacaggattagtgggtgtgacttctgcatcaggaaggagacatgag

SEQ ID NO: 306307 - DNA, 120 bp, Artificial Sequence
  ENSG00000133794_35 (sequence is synthesized)
ggtagtgtgcagtgtaatcaggttcaaaccctatactttgcatttgcataccctgtattttgcttgagaccatccaagaacagtatcaaacagtccttgacctcaagaattttaaaatct

SEQ ID NO: 306308 - DNA, 120 bp, Artificial Sequence
  ENSG00000133794_36 (sequence is synthesized)
tttataagtctattttctttatgataacaggaaaaagggagggtgcatgggccaaagcaagcaaaagaggaaagatttgaacttggccttagccagggtttgcaataagagtggatgttc

SEQ ID NO: 306309 - DNA, 120 bp, Artificial Sequence
  ENSG00000133794_37 (sequence is synthesized)
cctctagaaaagccagggctattcttgagtgggcatgtgagtggcaaattcagggtcaagaaacaagctacctaactgggcaggctttgtgtaggaaggagacacagagctatgataggc

SEQ ID NO: 306310 - DNA, 120 bp, Artificial Sequence
  ENSG00000133794_38 (sequence is synthesized)
gattaagaaacacaagaaatgatactgtgcagtttggaagaaacctgtaagaccccatttgttgtaggatgctgaacaagcatccaaagtcttgtgttacgctttgtggaagttgcattg

SEQ ID NO: 306311 - DNA, 120 bp, Artificial Sequence
  ENSG00000133794_39 (sequence is synthesized)
gaatagggagagatgaaggtgggcatgtttgacaactcaggaatgaggccttatcctacagagatgacactgccaaaagagaaatcaatcatctaaggtctagcgtttgaagatgaaatc

SEQ ID NO: 306312 - DNA, 120 bp, Artificial Sequence
  ENSG00000133794_40 (sequence is synthesized)
caagatgagaaacctgggaaaatagtggtttcatagacataagtagagaaaggtgggggacactcagcaatttttccgtaagcaattagcagccgtttgtgcatgctgagaatacatgat

SEQ ID NO: 306313 - DNA, 120 bp, Artificial Sequence
  ENSG00000133794_41 (sequence is synthesized)
atgtagttgtaaactgccgttaagaagcttctaatccagaaagaaaacttgttcactcataaatctagagaactaggcagtacaagaaccaaaagacttctgggtggtggaggagtggtc

SEQ ID NO: 306314 - DNA, 120 bp, Artificial Sequence
  ENSG00000133794_42 (sequence is synthesized)
tctgggtcacccaaaagctacattcatccatgtaggagctgagagtcctgtggttacacaactgccatcacactctccctaaactgtagctgcaatgccaagtgatggattctttcctga

SEQ ID NO: 306315 - DNA, 120 bp, Artificial Sequence
  ENSG00000133794_43 (sequence is synthesized)
ggtccttcagcctgacaagtatttaggtggatttacagttctaagtcttcccttctataaatcttctgagagatatgctagataagaaaggcctggacccatttttcatcaaccactgcc

SEQ ID NO: 306316 - DNA, 120 bp, Artificial Sequence
  ENSG00000133794_44 (sequence is synthesized)
ttcgaaggctgcttttcctgtcactactactaggctaccttttagaccctggtgccgtccatgtcctaagagtattcactagctaaacagtgtttgtggagaaggggacaaattgttttc

SEQ ID NO: 306317 - DNA, 120 bp, Artificial Sequence
  ENSG00000133794_45 (sequence is synthesized)
tgtggatcaaagatggaggttgatcttagaagttctcctccaattcacctggattctgtgaggaaataaaactggccacttacttgaaattcaccaactgaatgcaaactccaatccaag

SEQ ID NO: 306318 - DNA, 120 bp, Artificial Sequence
  ENSG00000133794_46 (sequence is synthesized)
caaactccaatccaagggctttgtcagtgagatgcttgactctagggactgcattctagatcaggtgcctgtagaacaaatccagcttgtcatctgtttttgtaaataaagttttattgg

SEQ ID NO: 306319 - DNA, 120 bp, Artificial Sequence
  ENSG00000133794_47 (sequence is synthesized)
ttcgtatctgtggctgctttcaagctgcagaggcagagttgagcatttgtgacaagacaccatatggcctagagagcctactatctggccccttacagaaaaagcttgccaaaccctaat

SEQ ID NO: 306320 - DNA, 120 bp, Artificial Sequence
  ENSG00000133794_48 (sequence is synthesized)
ctagatcttcatcccctttctcacctttaccccttaacaaagcacatacactccactgaaaaaagaaaaggcagtgtaattctcttttctgacaggataagagggtcatcgccttctagc

SEQ ID NO: 306321 - DNA, 120 bp, Artificial Sequence
  ENSG00000133794_49 (sequence is synthesized)
tctagcagccagctactgtttcatcctggaaaaggggatgggaataaaaaacccaactctaggtggcgacacagttggtttttggctttaccttcccctagtttgtaagcaagaaggagc

SEQ ID NO: 306322 - DNA, 120 bp, Artificial Sequence
  ENSG00000133794_50 (sequence is synthesized)
attgcaaccgcaaacggaaaggcagctccactgactaccattcacaggtcgaatttggggagcacaatggctggaggtcagatgcccactaggagatgctatgattaatatagaaagcat

SEQ ID NO: 306323 - DNA, 120 bp, Artificial Sequence
  ENSG00000133794_51 (sequence is synthesized)
tccttatagccattttctttgcactgttacacattctgttacttggggcagcacccatgtcctcaactggagatgagcaaggaggccgtgagcctgtgggcgctcactgtgtccctccaa

SEQ ID NO: 306324 - DNA, 120 bp, Artificial Sequence
  ENSG00000133800_0 (sequence is synthesized)
atgaagtggagcagtgagtgtgagcctcaacatagttccagaactctccatccggactagttattgagcatctgcctctcatatcaccagtggccatctgaggtgtttccctggctctga

SEQ ID NO: 306325 - DNA, 120 bp, Artificial Sequence
  ENSG00000133800_1 (sequence is synthesized)
aggggtaggcacgatggccaggtgcttcagcctggtgttgcttctcacttccatctggaccacgaggctcctggtccaaggctctttgcgtgcagaagagctttccatccaggtgtcatg

SEQ ID NO: 306326 - DNA, 120 bp, Artificial Sequence
  ENSG00000133800_2 (sequence is synthesized)
cagaattatggggatcacccttgtgagcaaaaaggcgaaccagcagctgaatttcacagaagctaaggaggcctgtaggctgctgggactaagtttggccggcaaggaccaagttgaaac

SEQ ID NO: 306327 - DNA, 120 bp, Artificial Sequence
  ENSG00000133800_3 (sequence is synthesized)
agccttgaaagctagctttgaaacttgcagctatggctgggttggagatggattcgtggtcatctctaggattagcccaaaccccaagtgtgggaaaaatggggtgggtgtcctgatttg

SEQ ID NO: 306328 - DNA, 120 bp, Artificial Sequence
  ENSG00000133800_4 (sequence is synthesized)
gaaggttccagtgagccgacagtttgcagcctattgttacaactcatctgatacttggactaactcgtgcattccagaaattatcaccaccaaagatcccatattcaacactcaaactgc

SEQ ID NO: 306329 - DNA, 120 bp, Artificial Sequence
  ENSG00000133800_5 (sequence is synthesized)
aacacaaacaacagaatttattgtcagtgacagtacctactcggtggcatccccttactctacaatacctgcccctactactactcctcctgctccagcttccacttctattccacggag

SEQ ID NO: 306330 - DNA, 120 bp, Artificial Sequence
  ENSG00000133800_6 (sequence is synthesized)
aaaaaaattgatttgtgtcacagaagtttttatggaaactagcaccatgtctacagaaactgaaccatttgttgaaaataaagcagcattcaagaatgaagctgctgggtttggaggtgt

SEQ ID NO: 306331 - DNA, 120 bp, Artificial Sequence
  ENSG00000133800_7 (sequence is synthesized)
ccccacggctctgctagtgcttgctctcctcttctttggtgctgcagctggtcttggattttgctatgtcaaaaggtatgtgaaggccttcccttttacaaacaagaatcagcagaagga

SEQ ID NO: 306332 - DNA, 120 bp, Artificial Sequence
  ENSG00000133800_8 (sequence is synthesized)
aatgatcgaaaccaaagtagtaaaggaggagaaggccaatgatagcaaccctaatgaggaatcaaagaaaactgataaaaacccagaagagtccaagagtccaagcaaaactaccgtgcg

SEQ ID NO: 306333 - DNA, 120 bp, Artificial Sequence
  ENSG00000133800_9 (sequence is synthesized)
atgcctggaagctgaagtttagatgagacagaaatgaggagacacacctgaggctggtttctttcatgctccttaccctgccccagctggggaaatcaaaagggccaaagaaccaaagaa

SEQ ID NO: 306334 - DNA, 120 bp, Artificial Sequence
  ENSG00000133800_10 (sequence is synthesized)
gaaagtccacccttggttcctaactggaatcagctcaggactgccattggactatggagtgcaccaaagagaatgcccttctccttattgtaaccctgtctggatcctatcctcctacct

SEQ ID NO: 306335 - DNA, 120 bp, Artificial Sequence
  ENSG00000133800_11 (sequence is synthesized)
ccaaagcttcccacggcctttctagcctggctatgtcctaataatatcccactgggagaaaggagttttgcaaagtgcaaggacctaaaacatctcatcagtatccagtggtaaaaaggc

SEQ ID NO: 306336 - DNA, 120 bp, Artificial Sequence
  ENSG00000133800_12 (sequence is synthesized)
ctcctggctgtctgaggctaggtgggttgaaagccaaggagtcactgagaccaaggctttctctactgattccgcagctcagaccctttcttcagctctgaaagagaaacacgtatccca

SEQ ID NO: 306337 - DNA, 120 bp, Artificial Sequence
  ENSG00000133800_13 (sequence is synthesized)
tgtccttctgagcccggtaagagcaaaagaatggcagaaaagtttagcccctgaaagccatggagattctcataacttgagacctaatctctgtaaagctaaaataaagaaatagaacaa

SEQ ID NO: 306338 - DNA, 120 bp, Artificial Sequence
  ENSG00000133800_14 (sequence is synthesized)
ggctgaggatacgacagtacactgtcagcagggactgtaaacacagacagggtcaaagtgttttctctgaacacattgagttggaatcactgtttagaacacacacacttactttttctg

SEQ ID NO: 306339 - DNA, 120 bp, Artificial Sequence
  ENSG00000133800_15 (sequence is synthesized)
gtctctaccactgctgatattttctctaggaaatatacttttacaagtaacaaaaataaaaactcttataaatttctatttttatctgagttacagaaatgattactaaggaagattact

SEQ ID NO: 306340 - DNA, 120 bp, Artificial Sequence
  ENSG00000133800_16 (sequence is synthesized)
cagtaatttgtttaaaaagtaataaaattcaacaaacatttgctgaatagctactatatgtcaagtgctgtgcaaggtattacactctgtaattgaatattattcctcaaaaaattgcac

SEQ ID NO: 306341 - DNA, 120 bp, Artificial Sequence
  ENSG00000133800_17 (sequence is synthesized)
atagtagaacgctatctgggaagctatttttttcagttttgatatttctagcttatctacttccaaactaatttttatttttgctgagactaatcttattcattttctctaatatggcaa

SEQ ID NO: 306342 - DNA, 120 bp, Artificial Sequence
  ENSG00000133800_18 (sequence is synthesized)
ccattataaccttaatttattattaacatacctaagaagtacattgttacctctatataccaaagcacattttaaaagtgccattaacaaatgtatcactagccctcctttttccaacaa

SEQ ID NO: 306343 - DNA, 120 bp, Artificial Sequence
  ENSG00000133800_19 (sequence is synthesized)
gaagggactgagagatgcagaaatatttgtgacaaaaaattaaagcatttagaaaacttctttgctttcttatttacgtagatgcattatacctttcatgtaaaattaaagtgaggacca

SEQ ID NO: 306344 - DNA, 120 bp, Artificial Sequence
  ENSG00000133800_20 (sequence is synthesized)
gatcatatcatattgtttgcaaaaataaaagggacaatgttggttgttaaaatacaagcatatgtcaaccaaacagcatatatcatatggggctattcatgctccaaacattttattttg

SEQ ID NO: 306345 - DNA, 120 bp, Artificial Sequence
  ENSG00000133800_21 (sequence is synthesized)
agttggccaagtacatacacattaaacagtcctttactagagatgctggccctccatttccatccatttcagaattcaccagggagccagagatccaggatggctcattcgtctcacttt

SEQ ID NO: 306346 - DNA, 120 bp, Artificial Sequence
  ENSG00000133800_22 (sequence is synthesized)
tgaccgccctgcttctctagttttctctttccctcccgcttagactgctaattgtcttcttcccctcaccagtgaccccacagctccgtggttccttcggcccagatgccacaacctgct

SEQ ID NO: 306347 - DNA, 120 bp, Artificial Sequence
  ENSG00000133800_23 (sequence is synthesized)
ggcataatcttttccggttggcccacggagtataatcttaaaatttgatttcatttccaggcattaaaaatcaagagatttcacatggttacatttctgggttccctctaaaaatggaaa

SEQ ID NO: 306348 - DNA, 120 bp, Artificial Sequence
  ENSG00000133800_24 (sequence is synthesized)
gatctggaagtaaagaacccatgttccctcatagcaatcattatctgatactgagtagcagctgtcccctttcaatggggtctgctctttttgtttcaccacagtcctcatgactctctg

SEQ ID NO: 306349 - DNA, 120 bp, Artificial Sequence
  ENSG00000133800_25 (sequence is synthesized)
ttgcacactcatgccaaagtaaaggtgccctttcctatgaactttgtaacactgtggccttttcttcacacccagcccacgtccctcatatatatcacctgcctgccccagtaggtctat

SEQ ID NO: 306350 - DNA, 120 bp, Artificial Sequence
  ENSG00000133800_26 (sequence is synthesized)
gagtttgaaactggtttgtcagtccttaagctttatcagcttcatccatttctcagggagtaaagaagaaaagagggaaagcgcctaagtagtgatcttccctctgtgtgttagctgaaa

SEQ ID NO: 306351 - DNA, 120 bp, Artificial Sequence
  ENSG00000133800_27 (sequence is synthesized)
atttattcctagtaatttttattctttctctagtcactatttttaaagactattgccttttcttgtatcttagagtttcttgtgtattttttatttgttctgaaattttttgttgttaat

SEQ ID NO: 306352 - DNA, 120 bp, Artificial Sequence
  ENSG00000133805_0 (sequence is synthesized)
tgctgctctcaagtttcccgttggcggcgcggcccgggcgcttcaggtagcctctcggctctctctgctccgctccgcgcccaggtagggcaccgacgggggctgcacgcggctggccgg

SEQ ID NO: 306353 - DNA, 120 bp, Artificial Sequence
  ENSG00000133805_1 (sequence is synthesized)
ccaggtagggcaccgacgggggctgcacgcggctggccggcttcctccctgctgaggcggccctccctcctcccgcggggccctcctggccggggatccgcagcgctgcgccctctgaac

SEQ ID NO: 306354 - DNA, 120 bp, Artificial Sequence
  ENSG00000133805_2 (sequence is synthesized)
gccctggccccggctggcctcagtgcccagcagccccgctccgctctgcccagcgcgtcccctttgctccagccctgcggccgtccctttcggccggcggcatggccctgtcgtccgaac

SEQ ID NO: 306355 - DNA, 120 bp, Artificial Sequence
  ENSG00000133805_3 (sequence is synthesized)
ccgctgagatgccgcggcagtttcccaagctgaacatctctgaagtggatgagcaagtccggctcctggcggagaaggtgtttgctaaagtgctccgagaagaggacagcaaagatgccc

SEQ ID NO: 306356 - DNA, 120 bp, Artificial Sequence
  ENSG00000133805_4 (sequence is synthesized)
tgtccctgttcactgtcccagaggactgccccatcgggcaaaaggaagccaaggagagggagctgcagaaggagctggcagagcagaagtctgtggagaccgcaaaaagaaagaaaagtt

SEQ ID NO: 306357 - DNA, 120 bp, Artificial Sequence
  ENSG00000133805_5 (sequence is synthesized)
tcaagatgattcggtcccagtccctgtctctgcaaatgccgccacagcaagattggaagggccccccggcagccagtccggccatgtctcccacaacccctgtggtcactggagccactt

SEQ ID NO: 306358 - DNA, 120 bp, Artificial Sequence
  ENSG00000133805_6 (sequence is synthesized)
ccctgcccacgccagcaccctatgccatgcctgagttccagcgggtcaccatcagcggagattactgtgccgggatcactttggaggactatgagcaggcagccaagagtctggccaagg

SEQ ID NO: 306359 - DNA, 120 bp, Artificial Sequence
  ENSG00000133805_7 (sequence is synthesized)
ccctaatgatccgggagaagtatgcgcggctcgcctaccaccgcttcccgcggatcacatcccagtacctgggtcatccgcgggcggatactgcacctccggaagagggccttccagact

SEQ ID NO: 306360 - DNA, 120 bp, Artificial Sequence
  ENSG00000133805_8 (sequence is synthesized)
tccaccctcctccactgccccaggaagacccctactgcctggatgatgcaccccccaacctggattacttggtccacatgcaggggggcatcctctttgtgtatgataacaagaagatgc

SEQ ID NO: 306361 - DNA, 120 bp, Artificial Sequence
  ENSG00000133805_9 (sequence is synthesized)
tggagcaccaggagccgcacagcctaccctaccccgacctggagacctacacggtggacatgagccacatcctggctctcatcaccgatggccccacgaaaacctattgtcaccggcgac

SEQ ID NO: 306362 - DNA, 120 bp, Artificial Sequence
  ENSG00000133805_10 (sequence is synthesized)
tgaactttctggaatccaagttcagccttcatgagatgttaaacgaaatgtccgagttcaaagagttgaagagtaacccccaccgggacttctataacgtgagaaaggtggacacacaca

SEQ ID NO: 306363 - DNA, 120 bp, Artificial Sequence
  ENSG00000133805_11 (sequence is synthesized)
tccatgcggccgcctgcatgaaccaaaagcatctgctgcgcttcatcaagcacacataccagacggagcctgacaggactgtggcagagaagcggggccggaagatcaccctgcggcagg

SEQ ID NO: 306364 - DNA, 120 bp, Artificial Sequence
  ENSG00000133805_12 (sequence is synthesized)
tgtttgacggcctgcacatggacccctacgacctcactgtggactcactggatgtccacgcgggccggcagacattccaccgctttgacaagttcaactccaaatacaaccctgtggggg

SEQ ID NO: 306365 - DNA, 120 bp, Artificial Sequence
  ENSG00000133805_13 (sequence is synthesized)
ccagtgagctgcgtgacctgtatttgaaaactgaaaactatctgggaggagagtactttgctcggatggtcaaggaggttgcccgggagctggaggagagcaagtaccagtactcagagc

SEQ ID NO: 306366 - DNA, 120 bp, Artificial Sequence
  ENSG00000133805_14 (sequence is synthesized)
cacggctctccatctacggccgcagtcctgaggagtggcccaacctggcctactggttcatccagcacaaggtctactctcccaacatgcgctggatcatccaggtgccccggatttatg

SEQ ID NO: 306367 - DNA, 120 bp, Artificial Sequence
  ENSG00000133805_15 (sequence is synthesized)
ccccaagatcatcgagagcttcacctcttccttaaatatgtgacggggtttgacagcgtggatgatgagtccaagcacagcgaccacatgttttccgacaagagcccaaacccggacgtc

SEQ ID NO: 306368 - DNA, 120 bp, Artificial Sequence
  ENSG00000133805_16 (sequence is synthesized)
tggaccagtgagcagaacccaccctacagctactacctgtactacatgtatgccaacatcatggtgctcaacaacctccgcagggagcgcggcctgagcacgttcctgttccggccgcac

SEQ ID NO: 306369 - DNA, 120 bp, Artificial Sequence
  ENSG00000133805_17 (sequence is synthesized)
tgtggggaagccggctccatcacccacctggtgtctgccttcctcactgctgacaacatttcccacgggctgctcctcaagaagagtccggtattgcagtatctctactaccttgctcag

SEQ ID NO: 306370 - DNA, 120 bp, Artificial Sequence
  ENSG00000133805_18 (sequence is synthesized)
atccccattgccatgtctcctcttagcaacaacagtttgttcctcgaatattccaagaaccctctgagggaattcctacacaagggactgcatgtttctctttccaccgatgaccccatg

SEQ ID NO: 306371 - DNA, 120 bp, Artificial Sequence
  ENSG00000133805_19 (sequence is synthesized)
cagttccactacacgaaggaagcacttatggaagaatatgccattgcagctcaagtgtggaagctgagcacctgcgacctgtgtgagatcgccaggaacagcgtgctgcagagcggcctc

SEQ ID NO: 306372 - DNA, 120 bp, Artificial Sequence
  ENSG00000133805_20 (sequence is synthesized)
tcgcatcaggaaaagcaaaagtttctgggacaaaattattataaagaaggacctgaaggaaatgatattcgaaagacaaatgtggctcagatccggatggcattccgatatgagacctta

SEQ ID NO: 306373 - DNA, 120 bp, Artificial Sequence
  ENSG00000133805_21 (sequence is synthesized)
tgcaatgagctcagcttcctgtctgatgctatgaaatcagaagagatcaccgccttgaccaactaggtccagcatttgacatgcattttaactttttggttcaatttcaagtctgctgtg

SEQ ID NO: 306374 - DNA, 120 bp, Artificial Sequence
  ENSG00000133805_22 (sequence is synthesized)
gctaatagtggtcaagattccgaactaggactttcctctgtgaagaggatgcctctgaagaaattttaaactggtgattttggttgcactgctcactttaagagttaacatgctcacttg

SEQ ID NO: 306375 - DNA, 120 bp, Artificial Sequence
  ENSG00000133805_23 (sequence is synthesized)
ttagtatttctgagtaacaagatggtgacttctccttggggatctgggagctgagcacttgtctatacttgttcctaattttccaagtatttctcttgaaactgccagtgcctgaactgt

SEQ ID NO: 306376 - DNA, 120 bp, Artificial Sequence
  ENSG00000133805_24 (sequence is synthesized)
tggggccaggattttccctggtcagatgccaagtaacatgtggttttctgccatacttttctccattggcccaggtaggctaattggtagttgttcatttcagcctctggatggctggct

SEQ ID NO: 306377 - DNA, 120 bp, Artificial Sequence
  ENSG00000133805_25 (sequence is synthesized)
gccttaaacacaatcaatttcaaagctccatttcataaaggggctactttgaaggagttaagatggaagacttccttcttgacaaattgtgtttttagtgaatttcttaaaccgttttat

SEQ ID NO: 306378 - DNA, 120 bp, Artificial Sequence
  ENSG00000133805_26 (sequence is synthesized)
ttagccctccttccctctttctagttggaagccaaatgtactcatgaaaacagccactcctattctgagtcttggtttcttcacctagaaagtgagggtttggactagatgagtggcttt

SEQ ID NO: 306379 - DNA, 120 bp, Artificial Sequence
  ENSG00000133805_27 (sequence is synthesized)
cagggtgttctgtgaatctcctcatgaatactttagggtaggggagggaagggagtgagtgatgctcaggggctgtcaaagtgactgcgttcatcagttttacactggggctgctacata

SEQ ID NO: 306380 - DNA, 120 bp, Artificial Sequence
  ENSG00000133805_28 (sequence is synthesized)
atattttcatttgaacgaagaacttcaaaaagcacaggactagatgatctctgttccttttggctctaatatgctacaactgtaggccaattatcactttaccaattaagagttaggcca

SEQ ID NO: 306381 - DNA, 120 bp, Artificial Sequence
  ENSG00000133805_29 (sequence is synthesized)
gataagtgaaatttaacttaagggcacacagctaataagtaataggcctaaactggatttccttattccaaatcctgtcttttccccactattccattagaccccacaaatgttagttgt

SEQ ID NO: 306382 - DNA, 120 bp, Artificial Sequence
  ENSG00000133805_30 (sequence is synthesized)
gtgtgtgtgtgtgtgtgtttttaatcactgtaaccggatgcatttttttaaggcaaaatttctcccttatctactatgatgacttcagaagatacaatggtcccaggggccaagtagaaa

SEQ ID NO: 306383 - DNA, 120 bp, Artificial Sequence
  ENSG00000133805_31 (sequence is synthesized)
tcaaccctgcttggttttagaggattgctcctgtgggtcacttgaggcaggctccaccttccccaggaggagtggcagagtccagccagcgctcggagctggaggcccacgtgggagcag

SEQ ID NO: 306384 - DNA, 120 bp, Artificial Sequence
  ENSG00000133805_32 (sequence is synthesized)
attcacgagagaatttccagcccaggcttttcctgctctggctcactgctgctcacagatatgcaaaacagagacctcctactccagccggcagacaggacccagccagctgcacgcacg

SEQ ID NO: 306385 - DNA, 120 bp, Artificial Sequence
  ENSG00000133805_33 (sequence is synthesized)
atagtctggaggagggagagctgaactctctcttgtcccttctcaaacatgggaacaaagtcaggagggcagggctgccaggtgctgcagattccctgagtttgggaaaatggaagccca

SEQ ID NO: 306386 - DNA, 120 bp, Artificial Sequence
  ENSG00000133805_34 (sequence is synthesized)
cctagttgaacagttcattctttgaattttgaacacttgctttctcctgacacctaagtggccctacatgcttcacatccagttacttattgagctaattttgaaattggcatgctgggt

SEQ ID NO: 306387 - DNA, 120 bp, Artificial Sequence
  ENSG00000133805_35 (sequence is synthesized)
cacagagaggaggacatcagcatggagagactgcagatcagtcccagcaaacctgtggaggccagttaaatgcctggagctcatcccctgccattcaaacggggtcttgctctgttgcct

SEQ ID NO: 306388 - DNA, 76 bp, Artificial Sequence
  ENSG00000133805_36 (sequence is synthesized)
tcatcccctgccattcaaacggggtcttgctctgttgcctggctggagtgcagtggtgctaacatgactcactgca

SEQ ID NO: 306389 - DNA, 120 bp, Artificial Sequence
  ENSG00000133805_37 (sequence is synthesized)
tgtcacaactactcgactctgccattgcagtggaaaagcagccaaggacaatggaaccttcagacctgtagatgggctcttcttggacattctggagtccctgggggaaagggaagtctg

SEQ ID NO: 306390 - DNA, 120 bp, Artificial Sequence
  ENSG00000133805_38 (sequence is synthesized)
gagaagacagaaggaagacagaagaaccagaggagcataaccttcagacctgtagatgggctcttcttggacattctggagtccctgggggaaagggaagtctgaagctcagttggccac

SEQ ID NO: 306391 - DNA, 120 bp, Artificial Sequence
  ENSG00000133805_39 (sequence is synthesized)
cagcctcccaagtagctgggactccaagtgggtgccactacagccatggtgtctttaactgagatatgaagatcacaagcagagaagcttccgagttcagggaggaaatccagagttcgg

SEQ ID NO: 306392 - DNA, 120 bp, Artificial Sequence
  ENSG00000133805_40 (sequence is synthesized)
taagtttgagatctccgttagacatccacgaaggtcagaaccttcagacctgtagatgggctcttcttggacattctggagtccctgggggaaagggaagtctgaagctcagttggccac

SEQ ID NO: 306393 - DNA, 120 bp, Artificial Sequence
  ENSG00000133805_41 (sequence is synthesized)
cttttttcatttttttcttcacttttctccagccttcctctctctctctccttccttcctccttgctttctttatatgccttatcttctgagaaggttgaccccagttccggcgatagac

SEQ ID NO: 306394 - DNA, 120 bp, Artificial Sequence
  ENSG00000133805_42 (sequence is synthesized)
ggacactaagccccccttgagtgactagaaaggcaggggacataggaacagttaggacataagggaagagtaaagagagggacccctgattttgatttcagggtgccctgtttgtctcat

SEQ ID NO: 306395 - DNA, 120 bp, Artificial Sequence
  ENSG00000133805_43 (sequence is synthesized)
gtttgtacaagtagtttaggtgcaatgaaccactcttattggtcaaggagtggtgagaaccctcctgaaatctaggttcccagataccaggcaagggccaatcttgcaagcacatctttc

SEQ ID NO: 306396 - DNA, 120 bp, Artificial Sequence
  ENSG00000133805_44 (sequence is synthesized)
tgtgtgtgtgtgtgtgtgtgtgtatccaagtgaccagaaggacgcctggaagaaaccaatgcttgcgggttgctgcaactacagggagcaagtcacctgtgcggggccgagacccccaga

SEQ ID NO: 306397 - DNA, 120 bp, Artificial Sequence
  ENSG00000133805_45 (sequence is synthesized)
ctcaataaatgcatattgaataactaagtgaatttcttttggcaactttttaaggacatgtgctcttagtacttaagaggctgctcaaggaccttcctatctatttctgtggtcaaattc

SEQ ID NO: 306398 - DNA, 120 bp, Artificial Sequence
  ENSG00000133805_46 (sequence is synthesized)
agactacaggaggtctttttgaatcattatagttagaagaagaatccagtttctgcctgtgaacttatttgactttagattgtctcatcttgtgactttataatgcctgtcccctccact

SEQ ID NO: 306399 - DNA, 120 bp, Artificial Sequence
  ENSG00000133805_47 (sequence is synthesized)
ggtcaattcagcatatggaagtataaatgcagtctttttactaggcagatatatatgctatcttacagctaattatgaaattgaatgaaaatccattgttatcttagggattagttttga

SEQ ID NO: 306400 - DNA, 120 bp, Artificial Sequence
  ENSG00000133805_48 (sequence is synthesized)
aaagcccccgtttatatacatttgccctaacataggaagtattgtgtagtttctcattgtcattttatctgtatcaagtatctttttttaaattgttaaataaagtcagctaggactgtg

SEQ ID NO: 306401 - DNA, 120 bp, Artificial Sequence
  ENSG00000133812_0 (sequence is synthesized)
ggttgtcaaacatggctgaagcgctgccgctgccgctactgccgctgcagggaaaatgctgagccctcccgggccgggtgggcggcggcggcgagggcggcgacggggacccgcttcccg

SEQ ID NO: 306402 - DNA, 120 bp, Artificial Sequence
  ENSG00000133812_1 (sequence is synthesized)
agcgcggcggcggcggccatggcccggctggctgactacttcatcgtggtaggctatgaccacgagaagccaggatcaggagaaggtctggggaaaataatccagagatttccacagaag

SEQ ID NO: 306403 - DNA, 120 bp, Artificial Sequence
  ENSG00000133812_2 (sequence is synthesized)
gactgggatgatacaccttttccacagggaattgagttgttttgtcagcctggcgggtggcagctgtccagagagaggaagcagccaacgttctttgtggttgtcctgacagacattgac

SEQ ID NO: 306404 - DNA, 120 bp, Artificial Sequence
  ENSG00000133812_3 (sequence is synthesized)
tcagatcgacattactgctcatgcctaaccttctatgaggcagagatcaatcttcagggaacaaagaaggaagagattgaaggtgaagcaaaagtgtctggtttaattcagcctgcagaa

SEQ ID NO: 306405 - DNA, 120 bp, Artificial Sequence
  ENSG00000133812_4 (sequence is synthesized)
gtgtttgctcccaaaagcctggtgttggtatccagattatattatccagaaatttttagggcttgcctgggtttgatctataccgtgtatgtggacagcctgaatgtctccttggaaagt

SEQ ID NO: 306406 - DNA, 120 bp, Artificial Sequence
  ENSG00000133812_5 (sequence is synthesized)
ctaattgcaaacctttgtgcctgccttgtcccagcggctggagggtctcagaagctgttttctttgggtgcaggagatagacagttgatccagactcctttacatgatagtcttcctatc

SEQ ID NO: 306407 - DNA, 120 bp, Artificial Sequence
  ENSG00000133812_6 (sequence is synthesized)
acgggcactagtgtggctctcctgttccagcaattgggaattcaaaatgtcctcagcctcttttgtgcagtcctcacagaaaataaggttctcttccattctgcaagtttccagagactt

SEQ ID NO: 306408 - DNA, 120 bp, Artificial Sequence
  ENSG00000133812_7 (sequence is synthesized)
agtgatgcttgtagagccctggaatctttaatgtttcctcttaaatatagttatccttatatccctattctcccggctcagctactggaagttctaagttccccaacgcctttcattatt

SEQ ID NO: 306409 - DNA, 120 bp, Artificial Sequence
  ENSG00000133812_8 (sequence is synthesized)
ggagtacattctgtctttaaaactgatgtccatgaacttttagatgtaatcatagcagatttggatggaggcactattaaaattcccgaatgtattcacctctcttccctcccagaacca

SEQ ID NO: 306410 - DNA, 120 bp, Artificial Sequence
  ENSG00000133812_9 (sequence is synthesized)
cttctacatcagactcaatcagctctttctttgattttacacccagatttggaagtagcagatcatgcttttcctcctccacgaacagctttatcccactcaaaaatgctggataaagag

SEQ ID NO: 306411 - DNA, 120 bp, Artificial Sequence
  ENSG00000133812_10 (sequence is synthesized)
gtgcgagccgttttccttagattatttgcacaactcttccaaggatatagatcctgcctgcaacttataagaattcatgcagagccagtaatacatttccacaagacagcattcttgggg

SEQ ID NO: 306412 - DNA, 120 bp, Artificial Sequence
  ENSG00000133812_11 (sequence is synthesized)
cagcgtggtttggtcgagaatgatttcctcactaaagtactcagtggaatggcatttgcaggttttgtttcagaaagaggtcctccttatagatcttgtgatctctttgatgagttggta

SEQ ID NO: 306413 - DNA, 120 bp, Artificial Sequence
  ENSG00000133812_12 (sequence is synthesized)
gcctttgaagtagagagaattaaagttgaagaaaataacccagtgaagatgataaagcatgtcagggaacttgctgagcaactattcaaaaatgagaatccaaatcctcatatggcattc

SEQ ID NO: 306414 - DNA, 120 bp, Artificial Sequence
  ENSG00000133812_13 (sequence is synthesized)
cagaaagttccacggccaacagaaggatcccatttgcgagttcatattcttcctttcccagagattaatgaagcccgggttcaggaattaatacaggaaaatgttgctaagaaccagaat

SEQ ID NO: 306415 - DNA, 120 bp, Artificial Sequence
  ENSG00000133812_14 (sequence is synthesized)
gcacctcctgccacacgaatagaaaagaaatgtgttgtgccagcaggtccacctgttgtttcgataatggacaaggtgacgacagttttcaacagtgcacaaagactagaagttgtcaga

SEQ ID NO: 306416 - DNA, 120 bp, Artificial Sequence
  ENSG00000133812_15 (sequence is synthesized)
aactgtatctcattcatatttgaaaataaaattttggaaactgaaaagacccttcctgctgcactcagagcccttaaaggaaaggcagcaagacagtgtctcactgatgaattgggtttg

SEQ ID NO: 306417 - DNA, 120 bp, Artificial Sequence
  ENSG00000133812_16 (sequence is synthesized)
catgtccagcaaaaccgggcaatattagaccatcaacagtttgactacataataaggatgatgaattgtactctacaggattgttcaagtttagaagaatacaacattgccgcagcatta

SEQ ID NO: 306418 - DNA, 120 bp, Artificial Sequence
  ENSG00000133812_17 (sequence is synthesized)
ctccctttgaccagtgctttctataggaaacttgcccctggagtcagccagtttgcttacacgtgtgtacaagaccaccccatttggacaaatcagcaattttgggagacaaccttttac

SEQ ID NO: 306419 - DNA, 120 bp, Artificial Sequence
  ENSG00000133812_18 (sequence is synthesized)
aatgcagtgcaggaacaggttcgctccctttatctctcagccaaggaagacaatcatgccccgcatctgaagcaaaaggataagcttcctgatgaccattatcaggagaagacagcaatg

SEQ ID NO: 306420 - DNA, 120 bp, Artificial Sequence
  ENSG00000133812_19 (sequence is synthesized)
gacctggcagctgagcaactacgcctttggcctaccctgagcaagtcaactcagcaagagctagtgcaacatgaggaaagcactgtctttagtcaggccattcactttgcaaacctcatg

SEQ ID NO: 306421 - DNA, 120 bp, Artificial Sequence
  ENSG00000133812_20 (sequence is synthesized)
gtgaacctgctagttccactcgacacaagtaaaaacaagctcctaagaacatcagcgccaggtgactgggagagcggaagcaacagcattgtcacaaacagtattgcaggaagtgtagct

SEQ ID NO: 306422 - DNA, 120 bp, Artificial Sequence
  ENSG00000133812_21 (sequence is synthesized)
gagagctatgatacagagagtgggtttgaagattcagagaatactgacattgccaattctgttgtgcggttcattacccgatttattgacaaagtttgtacagagagtggagttactcag

SEQ ID NO: 306423 - DNA, 120 bp, Artificial Sequence
  ENSG00000133812_22 (sequence is synthesized)
gatcacatcaagagccttcattgcatgataccaggaattgtagctatgcacattgagaccctagaagcagtacatcgagaaagcagaagacttccgcctattcagaagcccaagattctt

SEQ ID NO: 306424 - DNA, 120 bp, Artificial Sequence
  ENSG00000133812_23 (sequence is synthesized)
agacctgctctgctgccaggagaagaaattgtctgtgagggtcttcgagtcttgctggatcctgatggaagagaagaagctactggaggtcttcttggaggccctcagctcctgccagca

SEQ ID NO: 306425 - DNA, 120 bp, Artificial Sequence
  ENSG00000133812_24 (sequence is synthesized)
gaaggagccttgttcctcaccacatacagaattctcttcagaggaacaccccatgatcagttagtgggtgagcagacagttgtgcggagctttcccattgcctccatcaccaaggagaag

SEQ ID NO: 306426 - DNA, 120 bp, Artificial Sequence
  ENSG00000133812_25 (sequence is synthesized)
aagattacaatgcagaaccagctacagcagaacatgcaagaaggactgcagatcacatcagcatcttttcagttgattaaggtagcatttgatgaagaagtcagtccagaagtagtagag

SEQ ID NO: 306427 - DNA, 120 bp, Artificial Sequence
  ENSG00000133812_26 (sequence is synthesized)
atctttaagaaacagctgatgaagttccgttatcctcagtccattttcagtacctttgcttttgctgctggacaaactaccccacaaataattttaccaaaacagaaggaaaagaacact

SEQ ID NO: 306428 - DNA, 120 bp, Artificial Sequence
  ENSG00000133812_27 (sequence is synthesized)
tcttttcgtaccttctcaaaaacaattgtgaaaggtgccaaaagggcagggaaaatgacaattgggcggcaatatttactgaagaagaagacagggacaattgtggaagaaagagtaaat

SEQ ID NO: 306429 - DNA, 120 bp, Artificial Sequence
  ENSG00000133812_28 (sequence is synthesized)
cgtcctggatggaatgaagatgatgatgtatctgtttcagatgagagtgagctccccacaagtaccaccctgaaggcctccgagaagtctacaatggaacagttggtggaaaaagcttgt

SEQ ID NO: 306430 - DNA, 120 bp, Artificial Sequence
  ENSG00000133812_29 (sequence is synthesized)
ttcagagactatcagcgtttaggtttaggaaccataagtggcagctcttcccgttcaagacccgagtattttagaattactgcctccaacaggatgtattcactctgccggagctatcct

SEQ ID NO: 306431 - DNA, 120 bp, Artificial Sequence
  ENSG00000133812_30 (sequence is synthesized)
cctccgatctggaggattccatgggaagggagtcgttggtcttttcaaatctcagaactcccctcaggccgctcctacctcctctttagaatcttccagtagcatagaacaagagaaata

SEQ ID NO: 306432 - DNA, 120 bp, Artificial Sequence
  ENSG00000133812_31 (sequence is synthesized)
cttgcaagccttactgaatgctgtttctgtccatcagaaactcagaggcaacagcactcttactgtcaggccagcctttgctctatctccaggtgtgtgggcaagtcttcgctctagcac

SEQ ID NO: 306433 - DNA, 120 bp, Artificial Sequence
  ENSG00000133812_32 (sequence is synthesized)
tcgcttgatcagctctccaacatccttcattgatgttggcgcccggctggcaggcaaggatcactcggcctccttcagtaacagcagctacctacaaaaccagctcttgaaacggcaagc

SEQ ID NO: 306434 - DNA, 120 bp, Artificial Sequence
  ENSG00000133812_33 (sequence is synthesized)
agccctttacatatttggtgaaaagtcgcaactaaggaacttcaaggtagaatttgctttaaattgtgagtttgttcctgttgaatttcatgaaatccggcaagtgaaagccagttttaa

SEQ ID NO: 306435 - DNA, 120 bp, Artificial Sequence
  ENSG00000133812_34 (sequence is synthesized)
gaagctgatgagggcttgtatcccaagcaccatccctactgactcagaagtgaccttcctgaaagcgctgggagattctgagtggttcccacagcttcacaggataatgcagctggctgt

SEQ ID NO: 306436 - DNA, 120 bp, Artificial Sequence
  ENSG00000133812_35 (sequence is synthesized)
ggttgtatcagaagtacttgagaatggttcctcagttttggtctgtttggaggaaggctgggacatcactgcacaagtgacatccctggttcagttactcagtgatcccttttataggac

SEQ ID NO: 306437 - DNA, 120 bp, Artificial Sequence
  ENSG00000133812_36 (sequence is synthesized)
acttgaaggcttccagatgttggttgaaaaagagtggctctcttttggtcacaaattcagtcagaggagcagcttgaccctcaactgtcaggggagtggttttgctccagtcttcttaca

SEQ ID NO: 306438 - DNA, 120 bp, Artificial Sequence
  ENSG00000133812_37 (sequence is synthesized)
gttcttagactgtgtacaccaggttcacaaccagtatccaactgagtttgaattcaatctctattacttaaagttcttggctttccactatgtgtctaatcgctttaaaacatttctcct

SEQ ID NO: 306439 - DNA, 120 bp, Artificial Sequence
  ENSG00000133812_38 (sequence is synthesized)
ggattcagactatgaaagattagagcacggaactttatttgatgataaaggagaaaagcatgccaaaaaaggagtctgtatttgggaatgtattgacagaatgcacaagaggagtcccat

SEQ ID NO: 306440 - DNA, 120 bp, Artificial Sequence
  ENSG00000133812_39 (sequence is synthesized)
tttctttaattatttatattcaccattggaaatagaggctctaaagcccaatgtaaacgtctctagcctcaagaagtgggattactacatagaagagaccctgtccacaggcccttccta

SEQ ID NO: 306441 - DNA, 120 bp, Artificial Sequence
  ENSG00000133812_40 (sequence is synthesized)
tgactggatgatgctaacccccaagcacttcccctccgaagactctgacctggctggagaagctgggccacggagccagaggagaacagtgtggccatgctatgatgatgtcagctgtac

SEQ ID NO: 306442 - DNA, 120 bp, Artificial Sequence
  ENSG00000133812_41 (sequence is synthesized)
tcagcctgatgctctcaccagccttttcagtgaaattgaaaaattggagcacaaattgaaccaagcccctgagaagtggcagcagctgtgggaaagggtaaccgtggaccttaaagaaga

SEQ ID NO: 306443 - DNA, 120 bp, Artificial Sequence
  ENSG00000133812_42 (sequence is synthesized)
accaagaacagatcgctcccaaagacacctgtcgagatccccaggaattgtgtctaccaacctaccttcctatcagaagaggtctctgctacatctcccagacagcagcatgggggagga

SEQ ID NO: 306444 - DNA, 120 bp, Artificial Sequence
  ENSG00000133812_43 (sequence is synthesized)
acagaattccagcatctccccatccaatggagtggagcgaagagcagccacgctctatagccagtatacatccaagaatgatgaaaacaggtcctttgagggaacactttataaaagagg

SEQ ID NO: 306445 - DNA, 120 bp, Artificial Sequence
  ENSG00000133812_44 (sequence is synthesized)
ggctttgctgaaaggttggaagccccgttggtttgttttggatgtaacaaaacatcagctgcgctactatgactcaggtgaggacacaagctgtaaaggccacattgatctggctgaagt

SEQ ID NO: 306446 - DNA, 120 bp, Artificial Sequence
  ENSG00000133812_45 (sequence is synthesized)
agaaatggtcatccctgctggccccagcatgggagccccaaagcacacaagtgacaaggctttctttgatctcaagaccagcaaacgtgtgtataacttctgcgcccaggatggacagag

SEQ ID NO: 306447 - DNA, 120 bp, Artificial Sequence
  ENSG00000133812_46 (sequence is synthesized)
tgcccagcaatggatggacaagatccagagttgtatctctgatgcctgatgcccatggtcaacccacgcagaagaaacagaagaactcatgctgccagatagatagaaaaagaagcatgg

SEQ ID NO: 306448 - DNA, 120 bp, Artificial Sequence
  ENSG00000133812_47 (sequence is synthesized)
atccttgaggagctgacaacaagttatcccagggcctgaggttctcctgcccagtcccctcttgcaggggttgctatatctacttaacctgaataggtgtttcacacaggtctggtcaac

SEQ ID NO: 306449 - DNA, 120 bp, Artificial Sequence
  ENSG00000133812_48 (sequence is synthesized)
agccccatgcactccctgtatcttgcactaaatttttctaacagggtcttagtggttaatgatcagaagatgtctcctgagccaactgtgaacctcacccaggcaaaatggctaccacct

SEQ ID NO: 306450 - DNA, 120 bp, Artificial Sequence
  ENSG00000133812_49 (sequence is synthesized)
acttgggtccttcttcatgaaagctatagatccttttttgttctctgaggtcataatttcctcggagacctgtttaacaagcaaaaatcaaaaccctccaagattgtctcatattctacc

SEQ ID NO: 306451 - DNA, 120 bp, Artificial Sequence
  ENSG00000133812_50 (sequence is synthesized)
tggactaggtttcctatgagagacatctacttgtaatgcctgacctttgagatgctcagttctctggtgctgccaaaagatgcttccatggtccgtgctctgccagtggggttcacaaca

SEQ ID NO: 306452 - DNA, 120 bp, Artificial Sequence
  ENSG00000133812_51 (sequence is synthesized)
agagacgtcattgttcagtagcaggcaaagagggagcacacagcattattctgatggaaaaagattatccagggaatggtacaacaatgaccagcccaatgcaggaaaacactacttcca

SEQ ID NO: 306453 - DNA, 120 bp, Artificial Sequence
  ENSG00000133812_52 (sequence is synthesized)
aaacactgaattctctagaccagaggtgctctgaggatccagggccttgtgttcttatgtatcttctgcttcctgacagcttctttttcaaaataacatgcaaaaaaagctgaatgcact

SEQ ID NO: 306454 - DNA, 120 bp, Artificial Sequence
  ENSG00000133812_53 (sequence is synthesized)
aactcacaaaacaaacacttgcactgaattcccaatgaagtgaagatgttggaaagacagaggccagctatttaggaccatacgcacctgtgacaagggctgtgttgaccacagtcacac

SEQ ID NO: 306455 - DNA, 120 bp, Artificial Sequence
  ENSG00000133812_54 (sequence is synthesized)
tgtggcatgactggatacccaaactacacttctacacatgaaaagtaagaactgtctttagattttctttactttgataacttgtgattgtttagcttaagacccaagaaatgctgtttg

SEQ ID NO: 306456 - DNA, 120 bp, Artificial Sequence
  ENSG00000133812_55 (sequence is synthesized)
ctcatggtaaacagaaacagcatcttcgctacaaccactgacaccagctggcgtcataggtagctagatcattgcatttgttttgaaatgttaatatgttaaatactaaactaatatttc

SEQ ID NO: 306457 - DNA, 120 bp, Artificial Sequence
  ENSG00000133812_56 (sequence is synthesized)
aaaaatgtgtatatatgatttctatatccttgtttttcagatagcctgcttataatttaatataaattaactgatgcattcataagatttcaataatgaaatggttcccttttaaaaaat

SEQ ID NO: 306458 - DNA, 120 bp, Artificial Sequence
  ENSG00000133812_57 (sequence is synthesized)
aaaaatactttgtagattaaaaataaatcagaatttcaaatttaaaattgtccacacactaggaaatagaactgtgttaatatataagaaatctggggataattaagaatgaaggacttt

SEQ ID NO: 306459 - DNA, 120 bp, Artificial Sequence
  ENSG00000133812_58 (sequence is synthesized)
tctatcatttccattttataaattgccacctgtgaaaatggtttttgcacattatttgtatttttctttgtatatgaaataattttttgtactttgtaaaatatggagcccattgtacct

SEQ ID NO: 306460 - DNA, 120 bp, Artificial Sequence
  ENSG00000133812_59 (sequence is synthesized)
tcagctatttgagactatacacagtgcttcttttgtaactggattactttaactttcgtgaaggcattacattgcctcacattcactaaccaccttgaattaaatttatttcttaagaaa

SEQ ID NO: 306461 - DNA, 120 bp, Artificial Sequence
  ENSG00000133812_60 (sequence is synthesized)
aagcatccctcatttactgtgaactaaagttcattctgtagtgcacagcattcaggagggtaacactcaggattcatacatgggactaaaggttcaagaataaaacaaagcatgacccac

SEQ ID NO: 306462 - DNA, 90 bp, Artificial Sequence
  ENSG00000133812_61 (sequence is synthesized)
tttaatagactggcaatttaagtggggctggtttctatatttgggtgtggtaacttgtagactatatagagaaaaataagcatagacttg

SEQ ID NO: 306463 - DNA, 120 bp, Artificial Sequence
  ENSG00000133812_62 (sequence is synthesized)
taaaatattttttaaaattacaatgttatacatctggttttaaaatctatatactattctcataccttaattgtttattaaggactttgagccaattgatgtggctttaaaaacttagca

SEQ ID NO: 306464 - DNA, 120 bp, Artificial Sequence
  ENSG00000133812_63 (sequence is synthesized)
ctttaaaaacttagcacaaatatattgaaagtttttttctcatttagtacacagtatagacaaataggagtatcttttttatttttatttttcgagacagggtcttgctctgtcacccag

SEQ ID NO: 306465 - DNA, 120 bp, Artificial Sequence
  ENSG00000133812_64 (sequence is synthesized)
caaagtgctgggattatgggcatgagtcattgcatccagtcaaaagtgtcattgtttaatcttgatttgaaagaactttaggtatttaaaacattatgtggttcttttgtgcaagcgctt

SEQ ID NO: 306466 - DNA, 120 bp, Artificial Sequence
  ENSG00000133812_65 (sequence is synthesized)
ctgcactcagaaagcgcttggtctaattgtgttctccttcctgtctcttagcttcacaggataatgcagctggctgtggttgtatcagaagtacttgagaatggttcctcagttttggtc

SEQ ID NO: 306467 - DNA, 120 bp, Artificial Sequence
  ENSG00000133812_66 (sequence is synthesized)
tgtttggaggaaggctgggacatcactgcacaagtaaactattagacatattttttgatattttatatttatatttccatttggtcatttttaaattcttcagatgactcttttgtataa

SEQ ID NO: 306468 - DNA, 120 bp, Artificial Sequence
  ENSG00000133812_67 (sequence is synthesized)
tgactaatgtgtttatggacagagaaagtcctgtgttaaacagcacctggtatccatcagaaaactccgtaccatgagctcttagcccctacgcagcctggagctctggctccgggcatc

SEQ ID NO: 306469 - DNA, 120 bp, Artificial Sequence
  ENSG00000133812_68 (sequence is synthesized)
aagctctcccatccacagatgtaccatgcaggcttgcggatggagcccttgaccagcagtgtgaggcgtggaccatccttcctgggttttgtcagtccatcccctggctctctataagcc

SEQ ID NO: 306470 - DNA, 120 bp, Artificial Sequence
  ENSG00000133812_69 (sequence is synthesized)
ttaacaggtactcaatacatcttttttttgtgactgtgcagctttttgtttgttaattaaatcttctacttttattatatttacatttttcccctgctaattttaaaaattaaatagcct

SEQ ID NO: 306471 - DNA, 120 bp, Artificial Sequence
  ENSG00000133812_70 (sequence is synthesized)
attcttctcttactcaatctgctctgacatttgctgctatatacattttatttctctttctgtctttaatcttacctaccagtgcatgggtacagagataaatgttttactcagtcaaat

SEQ ID NO: 306472 - DNA, 120 bp, Artificial Sequence
  ENSG00000133812_71 (sequence is synthesized)
acaaaaaggcctagttataggtcctaataaaccatctttgccacagtacggcacaccaactagagctctcaccactattcctggctgggagacctcacaggcccatgtccaccactttcc

SEQ ID NO: 306473 - DNA, 120 bp, Artificial Sequence
  ENSG00000133812_72 (sequence is synthesized)
tcaactgccctctggccatgctgctcatctgggcctagtacagaagcagtgtggctttggggcccatcctgatttctatgaaatactgatcagaaaacttttaatttctttgcaggaaat

SEQ ID NO: 306474 - DNA, 120 bp, Artificial Sequence
  ENSG00000133812_73 (sequence is synthesized)
ggataaagaggtgcgagccgttttccttagattatttgcacaactcttccaaggatatagatcctgcctgcaacttataagaattcatgcagagccagtaatacatttccacaagttggt

SEQ ID NO: 306475 - DNA, 120 bp, Artificial Sequence
  ENSG00000133812_74 (sequence is synthesized)
aataagctaggcctgtgcagtacagccttttataaacttgaaatggatttgctttaatttttgtaatgttttagatgtttctttgaaaagacaaaaaacaaaaattacaactaaaaataa

SEQ ID NO: 306476 - DNA, 120 bp, Artificial Sequence
  ENSG00000133812_75 (sequence is synthesized)
ccaaaaagaggtcttccttcctttcttcttatttgaatctttaataggccatttgcatccatagccctgagatagataaaaatgcctgaaaataagaacaaggtctccaggatacgagca

SEQ ID NO: 306477 - DNA, 120 bp, Artificial Sequence
  ENSG00000133812_76 (sequence is synthesized)
agcatctcattggcattctcggaacaattaccttactgaaagtacctctagtaggtgagaaggtgaaaggtaaagtactcaccccctatgaatttctcttgtctttctcttcccagtttg

SEQ ID NO: 306478 - DNA, 120 bp, Artificial Sequence
  ENSG00000133812_77 (sequence is synthesized)
cttcttttctagcatgactaaagataacttgaagaacaggattttcccagcccaatagaggacatgaaagtcttttgtaggctggggagccacaaactctttctataaagggtcagttgg

SEQ ID NO: 306479 - DNA, 120 bp, Artificial Sequence
  ENSG00000133812_78 (sequence is synthesized)
taaatattttcagtttatgagccatagagtctcttgttgcagctattcaactgtgccgcaaaagcagccacagacagtaaggaaatgagtaggcatggccagttttggcccacaggctat

SEQ ID NO: 306480 - DNA, 120 bp, Artificial Sequence
  ENSG00000133812_79 (sequence is synthesized)
aatttgctgacccaggtgtaggcaaggctttcttatgcggtctaattggaatgttttcaagggaatattacttaaaggatgtaaataaagaggcattttcttttttcagttcttgtcatc

SEQ ID NO: 306481 - DNA, 120 bp, Artificial Sequence
  ENSG00000133812_80 (sequence is synthesized)
tctcactgtttttcaaatatgttgagtcttattccatgctttactatatgtaaatatatattttctaaaattacattttcaccatccacaagtttagtcattttcatctccaggtaagat

SEQ ID NO: 306482 - DNA, 120 bp, Artificial Sequence
  ENSG00000133812_81 (sequence is synthesized)
ttttctttgcatttataaattcctgcttaaacagctctgaaatcactttgtaaattgtaagctttgtacatattttagaaagttatcttaatgttactttcaaccctgttgctcttgaag

SEQ ID NO: 306483 - DNA, 120 bp, Artificial Sequence
  ENSG00000133812_82 (sequence is synthesized)
atagatatgtcattttaaatggcaatttaagtttacaaatattaatatgaaacttcagaaacaagttgggaatatagttttgagattgtggccaaataaacattttgcatgaagttctga

SEQ ID NO: 306484 - DNA, 120 bp, Artificial Sequence
  ENSG00000133812_83 (sequence is synthesized)
aaaattggcactctgagtatgcagtaatttttctggaattctccgtcattctaactaaattttctctgaagatgagtcatgttgtcggggtgtgatgtcctgctgtttggaaagtttgct

SEQ ID NO: 306485 - DNA, 120 bp, Artificial Sequence
  ENSG00000133812_84 (sequence is synthesized)
atcaaaattatgccagccattgagaaaacagactcatttatcattccaatctgtcagaagtaaaataaaattttaatagatgacttattagaacactggttataaagcatttatgatggt

SEQ ID NO: 306486 - DNA, 120 bp, Artificial Sequence
  ENSG00000133812_85 (sequence is synthesized)
aaaaagtaatatatatccattaagttattagcaggaaggaaatggaataataaaaaataatccaaaagaaggcaagaaaggaaaaaaaaggggacatagaacaaatggaataaataacaa

SEQ ID NO: 306487 - DNA, 120 bp, Artificial Sequence
  ENSG00000133812_86 (sequence is synthesized)
gtagtaagatggtagatttaaattcaaatatatccataattgcattaattattaattgactaaatgttccaattcaaagaaagagatcagggtttgctttaaaaaaaaaaaaaaaaaaaa

SEQ ID NO: 306488 - DNA, 77 bp, Artificial Sequence
  ENSG00000133812_87 (sequence is synthesized)
agcccagttgtcagcctggcgggtggcagctgtccagagagaggaagcagccaacgttctttgtggttgtcctgaca

SEQ ID NO: 306489 - DNA, 120 bp, Artificial Sequence
  ENSG00000133812_88 (sequence is synthesized)
acaattcagttatatagaaaactgattttgacttacaaaattaaaagaaactggatttctcaatagctatgtaactgtgaacacagcaacaaacactgctacataggaataaaaatcatt

SEQ ID NO: 306490 - DNA, 120 bp, Artificial Sequence
  ENSG00000133812_89 (sequence is synthesized)
gactacataataaggatgatgaattgtactctacaggtaatttgtagttctttcagattattcctcttatttgagaatacttttcatttttccagaatattttgtaattaccaatatatc

SEQ ID NO: 306491 - DNA, 120 bp, Artificial Sequence
  ENSG00000133812_90 (sequence is synthesized)
agttcttgagcctaccacagctaataggatgaagcgtcagtatctctatcatttctgtcaaatacttttttattacttggcataaatattaagagtttttgttctttctttgttttctct

SEQ ID NO: 306492 - DNA, 120 bp, Artificial Sequence
  ENSG00000133812_91 (sequence is synthesized)
ttgaaaatgctagattattttactagttctgtaatataagcaagttctttgaaaatgaaaagtcatctttaaagcattcagttatatattacttaatgtctatagtcacatcagcccttt

SEQ ID NO: 306493 - DNA, 120 bp, Artificial Sequence
  ENSG00000133812_92 (sequence is synthesized)
tcagtcagttttcagttgtccaagcagaggacaatgaatggtggataatccaaacgataaatgaattacttaattaagtatttaagtactttgtgtttgtaaagcacaacaacaaaattt

SEQ ID NO: 306494 - DNA, 120 bp, Artificial Sequence
  ENSG00000133812_93 (sequence is synthesized)
ccacttggcttcaaaatgtgtgtatgatctttcagaaacaaacttcccacaaaacagtgaggacaatttaggagaagctaataatcttgtttcctcatcctgcctcccttgttagagagt

SEQ ID NO: 306495 - DNA, 120 bp, Artificial Sequence
  ENSG00000133812_94 (sequence is synthesized)
ctatgacattggcattctgttgagaggtaatgtaaagttcctttctcaaacattttgcacaaggtggaaatgtaattaaatattaagacttcaaagatcatccgtgggactccagacaaa

SEQ ID NO: 306496 - DNA, 120 bp, Artificial Sequence
  ENSG00000133812_95 (sequence is synthesized)
gtaaataaatgcatgttaaatattggtacattggaaagcaagaattataggatataattaatcaaatttatgaaagaaacaaggcctaaataaatgagaaaatgtatcatttgtatggaa

SEQ ID NO: 306497 - DNA, 120 bp, Artificial Sequence
  ENSG00000133812_96 (sequence is synthesized)
tggaagactcaatatgttaaagatatcaattctccccaaaacaatctacagagacaatgcaattcctatcagaaccttaaacagaagaataaaagccttaaaattaccaatatactccta

SEQ ID NO: 306498 - DNA, 120 bp, Artificial Sequence
  ENSG00000133812_97 (sequence is synthesized)
aagccttaaaattaccaatatactcctaaagaaaaacaacaaagcacagcaatttaccttgtcaggtatcaaaaatttagtttaagattatattatttggccaggcacagtggctcatgc

SEQ ID NO: 306499 - DNA, 120 bp, Artificial Sequence
  ENSG00000133812_98 (sequence is synthesized)
aataattattattatttaagacagtgtagaattggcacacttataaacaaattgaccaacagaataaaatagaaagcccagaaacaaatgcacacatatatggaaacacgatttatggca

SEQ ID NO: 306500 - DNA, 120 bp, Artificial Sequence
  ENSG00000133812_99 (sequence is synthesized)
aaattggcaccagcagtgaaaagatgagcagttcaattaatagtgctgggacatgtacacataacataccattgatacaaaaaatgcatagatacctcccaccacacacaagaatcattt

SEQ ID NO: 306501 - DNA, 120 bp, Artificial Sequence
  ENSG00000133812_100 (sequence is synthesized)
ccacatgtattaaagacttaaatatgaagagccaaaaaaagctaatctataaagcttaaaagttttcaaacataatacaggaaatatccatatgaatttggggtagggaaagatttgtta

SEQ ID NO: 306502 - DNA, 120 bp, Artificial Sequence
  ENSG00000133812_101 (sequence is synthesized)
aactagtcacaactagtgccaatgttaaaagaaaagattgataaatttgactacattaaaattaagaacttctgttcattaaaagataccatagagagagggaaaacataaacctcagag

SEQ ID NO: 306503 - DNA, 120 bp, Artificial Sequence
  ENSG00000133812_102 (sequence is synthesized)
agagaggttaatgctccgattacaagaactataagccaggcatggtggtgtgcatctatagtcccagctactcaggtagctgagataggagaatcacatgagcccaggagttaggctgca

SEQ ID NO: 306504 - DNA, 120 bp, Artificial Sequence
  ENSG00000133812_103 (sequence is synthesized)
gtacactataattgcgcctatcaatagccactgaactccagcctagacaacttatcaagaccccatctctttaaaaaagaaaaaaccctacaaatcagtattttttcaaaaagacaacct

SEQ ID NO: 306505 - DNA, 120 bp, Artificial Sequence
  ENSG00000133812_104 (sequence is synthesized)
aacttgaaaatgagcaaaagatttaagtatcttaaaaggcagagccgagaatgggagaagagcagagtttctgagcgcacagtggcctcccctcctctctcctctcctcactctcgcagc

SEQ ID NO: 306506 - DNA, 120 bp, Artificial Sequence
  ENSG00000133812_105 (sequence is synthesized)
ctacctttacctacccgcctgctcagtgcccagaacaccttccaccatgaccatctcagcaagctcccacttaaacagaggcgtcaagcaggtgtacatgtccctacctcagggtgagaa

SEQ ID NO: 306507 - DNA, 120 bp, Artificial Sequence
  ENSG00000133812_106 (sequence is synthesized)
agtccaggccatgtatatctgaatcgatggtactcaagcaagactgcgctgcaagtgaacccaagcgtgtggaagagttacctgagtagaattttggtggctctagtactttgaaggttc

SEQ ID NO: 306508 - DNA, 120 bp, Artificial Sequence
  ENSG00000133812_107 (sequence is synthesized)
caacagtgacatgtatctcatgcctgctgccatgttttgggaccccttccacaaggacctccacaagctggtgttctgtgaagttttcaagtgcaatcgaaagcctgcagagaccaattt

SEQ ID NO: 306509 - DNA, 120 bp, Artificial Sequence
  ENSG00000133812_108 (sequence is synthesized)
gacatggtgagcaaccagcacccctggtttggcatggagcaggaatatataatctcatggggacagacgggcacccctttggttggccttccagtggattccctgagccccagggtccat

SEQ ID NO: 306510 - DNA, 120 bp, Artificial Sequence
  ENSG00000133812_109 (sequence is synthesized)
cttaactgtagtatgtgagcagacaaaacctatggcagggacattgtggaggctcattaccgggcctgcttgtattctggagtcaagattgcagggactaatgctgaggtcatgcctgcc

SEQ ID NO: 306511 - DNA, 120 bp, Artificial Sequence
  ENSG00000133812_110 (sequence is synthesized)
cagtggaaattccaaatcggaccctgtgaaggaatcagcatggaagatcatctctgggtgacctgtttcatcttacatcgtgtatgtgaagacttcggagtgatagcaacctttgatcct

SEQ ID NO: 306512 - DNA, 120 bp, Artificial Sequence
  ENSG00000133812_111 (sequence is synthesized)
aagcccattcctgggaactggaatggtgcaggctgccataccaacattagcaccaaggccatgcgggagaatggtctgaaatacattgaggaggccatcaagaaactaagcaagcaacag

SEQ ID NO: 306513 - DNA, 120 bp, Artificial Sequence
  ENSG00000133812_112 (sequence is synthesized)
cagtaccacatccacattcccatgaaacttctaacatcaacgacttttctgctcttatagcccatcatagtgccagcatacacattccccagactgttggccaggagaagaagggttact

SEQ ID NO: 306514 - DNA, 120 bp, Artificial Sequence
  ENSG00000133812_113 (sequence is synthesized)
ttgaagatcattgcctctctgccgactgtgacccattttcggtgacagaagccctcatctgcccgtgtcttctcaaaccggagttgagcccttccagtacaaaaactaagtgaactagac

SEQ ID NO: 306515 - DNA, 120 bp, Artificial Sequence
  ENSG00000133812_114 (sequence is synthesized)
aactagacctccagctgtcaagcccctcctagtacttcatccaactccaactcttcccctctcccagttgtcctaattgtaactgaaaggatgctcacgcctgtaatcccagcactttgg

SEQ ID NO: 306516 - DNA, 120 bp, Artificial Sequence
  ENSG00000133812_115 (sequence is synthesized)
aaaaaaaaaagaaaggatggaatatgagggtctttttaaattccttgtgcccagttaatcttgctttctttctttggctgggataaggggtcaaattattaatttcttcacatctttacc

SEQ ID NO: 306517 - DNA, 120 bp, Artificial Sequence
  ENSG00000133812_116 (sequence is synthesized)
ctccttttctttccctatcactgaagctttttagtacattagtggggagctgggtggtgaaacataaccactgcttccatttaacggggtgtgcctgttcaataagcgtagctatcggaa

SEQ ID NO: 306518 - DNA, 120 bp, Artificial Sequence
  ENSG00000133812_117 (sequence is synthesized)
cagactgcatgtttgaaggagggggattttttctttgagggacctgagaggggaagacctgacttattctggttaggttaggatttccctttgtggtggaaatgtttcttaaaagattat

SEQ ID NO: 306519 - DNA, 120 bp, Artificial Sequence
  ENSG00000133812_118 (sequence is synthesized)
aaccaactttctacaaaagtagggattaggagagaaggtaggggttggggatcagggaggagaatgcccttggtctcctgcttgtgtgggactagcctagcttggggtgaaatgctctcc

SEQ ID NO: 306520 - DNA, 120 bp, Artificial Sequence
  ENSG00000133812_119 (sequence is synthesized)
tctgaacacaaagcttagtataaactgatggatatccctaccttaaaagaagaagaggttctttttgcttggtcctctatttatcacacaaaacagagtagtgtttttatatttaaatgt

SEQ ID NO: 306521 - DNA, 120 bp, Artificial Sequence
  ENSG00000133812_120 (sequence is synthesized)
agagcaagaatctgtctcaaaaaaaaaaataaaaacaagaagattatatatatagttttgtggcttatgtgtgttttgctaagggagaaacaacatacaggtcacgggataccaaattca

SEQ ID NO: 306522 - DNA, 120 bp, Artificial Sequence
  ENSG00000133812_121 (sequence is synthesized)
aacaacatacaggtcacgggataccaaattcaaagcaaataatctagacagaaattaagtagccccttttgagtaaggagtgagggaagtggtgcttgaaagttgttgatttgcggttag

SEQ ID NO: 306523 - DNA, 120 bp, Artificial Sequence
  ENSG00000133812_122 (sequence is synthesized)
tccttcatgaccactctagggtttctgtgccctgcccaccctctggagaagacgaatactggtcagttaacagacgacatgttactagcagtcacttgatccccatggctttggtttaaa

SEQ ID NO: 306524 - DNA, 120 bp, Artificial Sequence
  ENSG00000133812_123 (sequence is synthesized)
agacatatacttgtccacatgggtttagaggtaagagttagctggtcaacttgagcatgttactgacagagggaatattggggttattttctggtgggaataacatgtcactaaagcagg

SEQ ID NO: 306525 - DNA, 120 bp, Artificial Sequence
  ENSG00000133812_124 (sequence is synthesized)
acttttgatatattaaatttttaaaaaacaaaatagaagtttagattttaatcaaatctgtagagtttctaagtaatttttgcagaattgcctgtttgctttaactgtctccttctgcct

SEQ ID NO: 306526 - DNA, 120 bp, Artificial Sequence
  ENSG00000133812_125 (sequence is synthesized)
ctgctcttgaaggatatggggacagggctagagtcaaaacacttgaaattttgtatcccaatgtcttttctcccagtgtgaaatattccattcttttgttaagactactgagcagttatt

SEQ ID NO: 306527 - DNA, 120 bp, Artificial Sequence
  ENSG00000133812_126 (sequence is synthesized)
tttttcttttgtaataagaaacaaaccccacctttatctctacatttccgctaccattctctggtttttgtgtttgcttcagggggccagctgtggttttctcttgccatgatgacttct

SEQ ID NO: 306528 - DNA, 120 bp, Artificial Sequence
  ENSG00000133812_127 (sequence is synthesized)
aatcgccaagtacagtatgctcaaagtcagacaactccttactataaacaaattgtgtaactgcccagagcagcacttataaatcagcctaacataagatctccaaaaaaaaaaaaaaaa

SEQ ID NO: 306529 - DNA, 120 bp, Artificial Sequence
  ENSG00000133816_0 (sequence is synthesized)
atgggggaaaacgaggatgagaagcaggcccaggcggggcaggtttttgagaactttgtccaggcatccacgtgcaaaggtaccctccaggccttcaacattctcacacgacacctggac

SEQ ID NO: 306530 - DNA, 120 bp, Artificial Sequence
  ENSG00000133816_1 (sequence is synthesized)
ctagaccctctggaccacagaaacttttattccaagctcaagtccaaggtgaccacctggaaagccaaagccctgtggtacaaattggataagcgtggttcccacaaagagtataagcga

SEQ ID NO: 306531 - DNA, 120 bp, Artificial Sequence
  ENSG00000133816_2 (sequence is synthesized)
gggaagtcgtgcacgaacaccaagtgtctcatagttgggggaggaccctgtggcttgcgcactgccattgaacttgcctacctgggagccaaagtggtcgtggtggagaagagggactcc

SEQ ID NO: 306532 - DNA, 120 bp, Artificial Sequence
  ENSG00000133816_3 (sequence is synthesized)
ttctcccggaacaacgtgctacacctctggcctttcaccatccatgaccttcgtggcctgggagccaagaagttctatgggaagttctgtgctggctccatcgaccatatcagtattcgc

SEQ ID NO: 306533 - DNA, 120 bp, Artificial Sequence
  ENSG00000133816_4 (sequence is synthesized)
caactacagctcatcctattcaaggtggccctgatgctgggagttgaaatccatgtgaatgtggagttcgtgaaggttctagagcctcctgaagatcaagaaaatcaaaaaattggctgg

SEQ ID NO: 306534 - DNA, 120 bp, Artificial Sequence
  ENSG00000133816_5 (sequence is synthesized)
cgggcagaatttctccctacagaccattctctgtcggagtttgagtttgacgtcatcattggtgccgatggccgcaggaacaccctggaagggttcagaagaaaagaattccgtgggaag

SEQ ID NO: 306535 - DNA, 120 bp, Artificial Sequence
  ENSG00000133816_6 (sequence is synthesized)
ctggcgattgccatcaccgccaacttcataaacagaaacagcacagcggaagccaaggtggaagagattagtggtgtggctttcatcttcaatcagaaattttttcaggaccttaaagaa

SEQ ID NO: 306536 - DNA, 120 bp, Artificial Sequence
  ENSG00000133816_7 (sequence is synthesized)
gaaacaggcatagatcttgagaacattgtttactacaaggactgcacccactattttgtaatgacagccaagaagcagagcctgctcgacaaaggtgtcatcattaacgactacatcgac

SEQ ID NO: 306537 - DNA, 120 bp, Artificial Sequence
  ENSG00000133816_8 (sequence is synthesized)
acagagatgctgctgtgtgcggagaacgtgaaccaagacaacctgctatcctatgcccgggaagctgcagactttgccaccaactaccagctgccatccttagactttgccatgaaccac

SEQ ID NO: 306538 - DNA, 120 bp, Artificial Sequence
  ENSG00000133816_9 (sequence is synthesized)
tatgggcagcctgatgtggccatgtttgactttacctgcatgtatgcctcagagaacgcggccctggtgcgggagcggcaggcgcaccagctgctcgtggcccttgtgggtgacagcttg

SEQ ID NO: 306539 - DNA, 120 bp, Artificial Sequence
  ENSG00000133816_10 (sequence is synthesized)
cttgagccattttggcccatgggtacaggctgtgcccgtggcttcctggcagcctttgacacggcatggatggtgaagagctggaaccagggcacccctcccctggagctgctggctgaa

SEQ ID NO: 306540 - DNA, 120 bp, Artificial Sequence
  ENSG00000133816_11 (sequence is synthesized)
agggaaagtctctaccggctgttacctcagacaaccccggagaacatcaacaagaactttgagcagtacacgttggacccagggacacggtacccaaacctcaactcacactgtgtcagg

SEQ ID NO: 306541 - DNA, 120 bp, Artificial Sequence
  ENSG00000133816_12 (sequence is synthesized)
ccccatcaggtgaagcatttgtatatcactaaggagctggagcactaccctctcgagagactgggctcggtgaggagatctgtcaacctctccaggaaggagtcagatatccggcccagc

SEQ ID NO: 306542 - DNA, 120 bp, Artificial Sequence
  ENSG00000133816_13 (sequence is synthesized)
aagctcctgacctggtgccagcagcagacagagggctaccagcatgtcaacgtcaccgacctgaccacatcctggcgcagtgggttggccctgtgtgccatcatccaccgcttccggcct

SEQ ID NO: 306543 - DNA, 120 bp, Artificial Sequence
  ENSG00000133816_14 (sequence is synthesized)
gagctcatcaactttgactctttgaatgaagatgatgctgtggagaacaaccagctcgcatttgatgtggccgagcgagagtttgggatccctccagtgaccacgggcaaagagatggca

SEQ ID NO: 306544 - DNA, 120 bp, Artificial Sequence
  ENSG00000133816_15 (sequence is synthesized)
tctgcccaggagcctgacaagctcagcatggtcatgtacctctccaagttctacgagctcttccggggcaccccactgaggcccgtggattcttggcgcaaaaactatggagaaaatgct

SEQ ID NO: 306545 - DNA, 120 bp, Artificial Sequence
  ENSG00000133816_16 (sequence is synthesized)
gacctcagcttggccaaatcatccatttctaataactatctcaacctcacatttccaaggaagaggactccacgggtggatggtcaaaccggagagaatgacatgaacaaacggagacgg

SEQ ID NO: 306546 - DNA, 120 bp, Artificial Sequence
  ENSG00000133816_17 (sequence is synthesized)
aagggcttcaccaacctggacgagccttcaaacttttccagccgtagcttgggctccaatcaagagtgtgggagcagtaaggaaggtggaaatcagaacaaagtcaagtccatggcgaat

SEQ ID NO: 306547 - DNA, 120 bp, Artificial Sequence
  ENSG00000133816_18 (sequence is synthesized)
cagctgctggccaagtttgaggagagcactcggaacccctcactcatgaagcaggaacgccgtgtctcagggataggtaagccggtcctgtgctcttcctccggccctcctgttcactct

SEQ ID NO: 306548 - DNA, 120 bp, Artificial Sequence
  ENSG00000133816_19 (sequence is synthesized)
tgctgccccaagccggaggaggccacacccagcccatcacctcctctgaaaaggcagttcccctctgtggtcgtgacggggcacgtgctcagagagctcaagcaagtgtctgctggcagt

SEQ ID NO: 306549 - DNA, 120 bp, Artificial Sequence
  ENSG00000133816_20 (sequence is synthesized)
gagtgcctgagcagaccttggagagccagagccaagtctgacctacagctgggtgggacagaaaatttcgctaccctgccttctacccgcccgagggcgcaggctctttccggggtgctg

SEQ ID NO: 306550 - DNA, 120 bp, Artificial Sequence
  ENSG00000133816_21 (sequence is synthesized)
tggcggctgcagcaagtggaggaaaagattctccagaagagggctcagaacttggccaacagggaatttcacacaaagaacattaaggagaaggcggctcaccttgcctccatgtttgga

SEQ ID NO: 306551 - DNA, 120 bp, Artificial Sequence
  ENSG00000133816_22 (sequence is synthesized)
cacggggatttcccgcagaataaactactctctaaaggcctgtctcatactcatcctccatctcctccctctcgccttccgtctcctgatccagctgcttcttcctctccatcaactgtt

SEQ ID NO: 306552 - DNA, 120 bp, Artificial Sequence
  ENSG00000133816_23 (sequence is synthesized)
gactctgcttctcctgccagaaaggaaaagaagtcaccttcagggttccattttcatcccagccatttgagaacagtgcatcctcagctgacggtagggaaagtgtccagcggaataggg

SEQ ID NO: 306553 - DNA, 120 bp, Artificial Sequence
  ENSG00000133816_24 (sequence is synthesized)
agcgacacgtgttacttctgtaagaaacgtgtgtacgtgatggaacggctgagcgccgagggccacttcttccaccgggagtgtttccgctgcagcatctgtgccaccaccttgcgcctg

SEQ ID NO: 306554 - DNA, 120 bp, Artificial Sequence
  ENSG00000133816_25 (sequence is synthesized)
gccgcctacacctttgactgcgatgaaggcaaattttactgcaagcctcacttcattcactgtaaaaccaatagcaaacaacggaagagacgggcagagttgaagcaacaaagagaggag

SEQ ID NO: 306555 - DNA, 120 bp, Artificial Sequence
  ENSG00000133816_26 (sequence is synthesized)
gaggcaacatggcaagagcaggaagcccctcggagagacactcccaccgaaagttcttgcgcagtggccgccattggcaccctggaaggcagccccccagatgagcccacctcccccaag

SEQ ID NO: 306556 - DNA, 120 bp, Artificial Sequence
  ENSG00000133816_27 (sequence is synthesized)
aggccgaagagcatctctgagccacagcacagtgatgcggaaggggacgctgcctctcccctgccctccgagtggacctcagtgaggatcagccctggggaggaagcagctggacaggat

SEQ ID NO: 306557 - DNA, 120 bp, Artificial Sequence
  ENSG00000133816_28 (sequence is synthesized)
gtgctggctgtgcgtgtcctggtcaccagcgaagacagcagctctgacacagagtctgactatggtggcagcgagggctcccacacagaaccctgtgaagagaaaccctggcggccagga

SEQ ID NO: 306558 - DNA, 120 bp, Artificial Sequence
  ENSG00000133816_29 (sequence is synthesized)
tccccgcatctaccgcacacgtccctaggggaggccctgagcagggcagtctctccacagtgccctgaggagcccagagctgtgcacgcagctctgcaacgggccaatagcttccagtct

SEQ ID NO: 306559 - DNA, 120 bp, Artificial Sequence
  ENSG00000133816_30 (sequence is synthesized)
ccaaccccaagcaaataccagaactggaggagagaattctggtggagtttgacgccagtgaacaaaagaactatgtcacctcctaaggacccttctccttctcttcctcttccttcatcg

SEQ ID NO: 306560 - DNA, 120 bp, Artificial Sequence
  ENSG00000133816_31 (sequence is synthesized)
tcttcccattcatcttccccaccatcttcttcttcaaccagtgtttctgggaatgctccagatggttcctccccgcctcagatgacagcttctgagcccctctcgcaagtctcgagaggt

SEQ ID NO: 306561 - DNA, 120 bp, Artificial Sequence
  ENSG00000133816_32 (sequence is synthesized)
catccaagtcctcccaccccaaactttcggaggcgagccgtagcccaaggagcacccagggaaattcccctgtatctgcctcatcacccaaagccagagtgggcagagtactgcctggtg

SEQ ID NO: 306562 - DNA, 120 bp, Artificial Sequence
  ENSG00000133816_33 (sequence is synthesized)
agccctggtgaagatggcctctcagaccctgcagagatgacttctgatgagtgccagccagcagaggcccctcttggggacatcggaagcaaccacagagacccacaccccatctggggg

SEQ ID NO: 306563 - DNA, 120 bp, Artificial Sequence
  ENSG00000133816_34 (sequence is synthesized)
aaggacaggagctggacagggcaagagctatctcccttggctggagaagaccgggaaaaagggagtactggagccaggaaggaagaagagggagggccagtgctggtaaaggagaagttg

SEQ ID NO: 306564 - DNA, 120 bp, Artificial Sequence
  ENSG00000133816_35 (sequence is synthesized)
ggcctgaagaagttagtcctcactcaggagcagaagaccatgttgttggattggaatgactccatccctgagagtgtgcacctcaaagctggggagcgaatttcccagaaaagtgctgag

SEQ ID NO: 306565 - DNA, 120 bp, Artificial Sequence
  ENSG00000133816_36 (sequence is synthesized)
aatggtagaggaggccgtgtgctaaaaccagtccgccccctgctgctccctagggcagcaggagagcccctgccaacccagagaggggcccaggagaagatggggacccctgcggaacaa

SEQ ID NO: 306566 - DNA, 120 bp, Artificial Sequence
  ENSG00000133816_37 (sequence is synthesized)
gctcaaggggagcgaaacgtgcctccacccaagtccccactgcggctcatagccaatgccatccgaaggtctctagagcccctcctttccaactctgaaggcgggaagaaggcctgggcc

SEQ ID NO: 306567 - DNA, 120 bp, Artificial Sequence
  ENSG00000133816_38 (sequence is synthesized)
aagcaagaatccaaaactttgcccgcacaggcctgcactcgctcattcagccttcggaaaaccaattccaataaagacggggaccagcattcccctgggagaaaccagtcctcagccttt

SEQ ID NO: 306568 - DNA, 120 bp, Artificial Sequence
  ENSG00000133816_39 (sequence is synthesized)
agccctcctgaccctgccctccgcacccacagtttgcccaatcggccatccaaggtctttcctgcacttaggtccccaccctgcagcaagattgaagatgtccccacactcctcgagaaa

SEQ ID NO: 306569 - DNA, 120 bp, Artificial Sequence
  ENSG00000133816_40 (sequence is synthesized)
gtgagtttgcaagagaacttcccagatgcttctaagcctccaaagaaaagaatctcacttttttcctccctcagactcaaagacaaatcttttgagagtttcctccaagaatccagacaa

SEQ ID NO: 306570 - DNA, 120 bp, Artificial Sequence
  ENSG00000133816_41 (sequence is synthesized)
agaaaggacatcagggacctctttggcagccccaagaggaaggtgctgcctgaagatagtgcgcaggccctggagaagctgctgcagcctttcaaaagcacctccctgcgccaggcagct

SEQ ID NO: 306571 - DNA, 120 bp, Artificial Sequence
  ENSG00000133816_42 (sequence is synthesized)
ctcctcctcctcctcctcctcctcctacagcgggaggtgcagactccaagaactttcccctcagagcacaggtaacagaggcttcctcttctgcctcttcaacctcctcctcctctgcag

SEQ ID NO: 306572 - DNA, 120 bp, Artificial Sequence
  ENSG00000133816_43 (sequence is synthesized)
tcctcctcctctgcagatgaagaatttgatccccagctttccttgcagttaaaggagaagaagacacttagaagaagaaagaagctagaaaaagcaatgaagcagttggttaagcaagaa

SEQ ID NO: 306573 - DNA, 120 bp, Artificial Sequence
  ENSG00000133816_44 (sequence is synthesized)
gaattgaaaagactctataaggctcaggccatccagaggcagctggaggaggtggaggagcggcagagggcttctgagatccagggtgtgaggctggagaaggcgttgcgaggagaagca

SEQ ID NO: 306574 - DNA, 120 bp, Artificial Sequence
  ENSG00000133816_45 (sequence is synthesized)
gattcaggcacacaggatgaagcacagcttttgcaggaatggtttaagctggttctggagaagaataaattaatgcgatatgagtcggagctcctaatcatggcccaggaactggaatta

SEQ ID NO: 306575 - DNA, 120 bp, Artificial Sequence
  ENSG00000133816_46 (sequence is synthesized)
gaagatcatcaaagcagactggagcagaaactgagagagaaaatgctcaaggaggagagccagaaagatgagaaggatctaaacgaagagcaagaagtattcaccgagctgatgcaagtg

SEQ ID NO: 306576 - DNA, 120 bp, Artificial Sequence
  ENSG00000133816_47 (sequence is synthesized)
attgagcaaagggacaaactcgtcgattccttagaggaacaacgcatcagagaaaaagccgaggaccagcactttgaaagcttcgtattctccagaggctgtcagctgagcaggacttga

SEQ ID NO: 306577 - DNA, 120 bp, Artificial Sequence
  ENSG00000133816_48 (sequence is synthesized)
actcactgaacgcctaccgttcaccaggtaccaccctagcaacaaatgaaacagacaaaaatcactgcttacattctagtcatagaagaaagagacaataaacaaaatgaaaaaaggaaa

SEQ ID NO: 306578 - DNA, 120 bp, Artificial Sequence
  ENSG00000133816_49 (sequence is synthesized)
ttgtatagtttattggagggtgagacacactatgaatgaaaatcaaggggaatggagagcactgaggcatgggctgcaatattaaataggatggtcagggcaggtgacgttccaccaagg

SEQ ID NO: 306579 - DNA, 120 bp, Artificial Sequence
  ENSG00000133816_50 (sequence is synthesized)
acttgaagacagccagtgagtgaatgaggcctgcatggaaacgtctggggataacaccttccaggcagaagcaagagcagtgcaaggggtctgagaaggacgtgtgcccagagtgctgga

SEQ ID NO: 306580 - DNA, 120 bp, Artificial Sequence
  ENSG00000133816_51 (sequence is synthesized)
tggcccctcaggctgccgagggacctgtgtaactggatgcagggactcctgcaagctgctggcctccatatcagggacaatgcttacaactactgctacatgtacgagctcctgagcctg

SEQ ID NO: 306581 - DNA, 120 bp, Artificial Sequence
  ENSG00000133816_52 (sequence is synthesized)
gggctgccactcctctgggcgttctctgaggtcctggcagccatgtacagggaatctgagggctccctcgagagcatctgcaactgggtgctcaggtgcttcccagtcaagctccgctga

SEQ ID NO: 306582 - DNA, 120 bp, Artificial Sequence
  ENSG00000133816_53 (sequence is synthesized)
agacatgaaacgatgtgagctacgagtgagtgacatgatctgacttgaggaggactgctctggttgctgtatggggacagactgcaaagtgacaagggtggaagctgggagaccagatag

SEQ ID NO: 306583 - DNA, 120 bp, Artificial Sequence
  ENSG00000133816_54 (sequence is synthesized)
gagccctgatatcagttcaaaggagagatggccatgacttggataaggaggcagcgtgtgagccggtgaaaattgattggattctatatctgttctgaagatagtaaacaagatttattg

SEQ ID NO: 306584 - DNA, 120 bp, Artificial Sequence
  ENSG00000133816_55 (sequence is synthesized)
ctcaggagcacaggcacccacaacctgtcactgggccatgcaccccagggcccaggcagagctgccacctcgctgtctccaagccgaccttgcctggcgctagctctggagcctgctgca

SEQ ID NO: 306585 - DNA, 120 bp, Artificial Sequence
  ENSG00000133816_56 (sequence is synthesized)
gtccccatcctgtcctacctgcccagtgtgcgcccattccacatactgctcttgttggcagggtgggctgtggtcctgctgggagggacctgggagcttcaaggcaggctagggcaggct

SEQ ID NO: 306586 - DNA, 120 bp, Artificial Sequence
  ENSG00000133816_57 (sequence is synthesized)
gaatctagaggagggaagggagggaggaagcaaggtataagaaaaaaactgcttctctctactctcacaccactcacctctggtcaccaaataaagtggggatgtttctccccaccaaca

SEQ ID NO: 306587 - DNA, 120 bp, Artificial Sequence
  ENSG00000133816_58 (sequence is synthesized)
aaatctataaatggaaaggttttccctgagttctacgagcgatccttgcaaattagttaaacccgaggagggaaacacggttactggtttattatacaggatcttatcaaggatagggag

SEQ ID NO: 306588 - DNA, 120 bp, Artificial Sequence
  ENSG00000133816_59 (sequence is synthesized)
gaacagccaggtgaggagaggcacagggcagggcatgtgggaaagggtgggcacctctctgccgtctctggggcactgcccttcaggggcctctgcatggtccaccctccagaagctcca

SEQ ID NO: 306589 - DNA, 120 bp, Artificial Sequence
  ENSG00000133816_60 (sequence is synthesized)
aaccctaaccttttcggtttctatggaggcttcgttatgaagggcatgatcgattacatcactggctgttggtgattaactcaaccttcagcctctccgcccttgtaggtcagtgtgtgg

SEQ ID NO: 306590 - DNA, 120 bp, Artificial Sequence
  ENSG00000133816_61 (sequence is synthesized)
gactgaaagttccaaccctttaatcacagggttggttcccctggcaaccagccccatcctgaagctatccaggagctcaagagtcacctcgttccagcaaaggatgctcctatcacccag

SEQ ID NO: 306591 - DNA, 120 bp, Artificial Sequence
  ENSG00000133816_62 (sequence is synthesized)
gaaatcccaggggctttaggatctctgcatcagatgctgctgtcactcagaaaggtacaaaggtcttaggagctctgcctcaggaaccagggggcagagtccaaatatgtatttccgacc

SEQ ID NO: 306592 - DNA, 120 bp, Artificial Sequence
  ENSG00000133816_63 (sequence is synthesized)
atatcacaatatcacacaaggtagtcctggcccagagcctgccaagtgccaggcaataggacacacattctctcgtgcagtccttcccacaaactcgggagacaggtataactctcccca

SEQ ID NO: 306593 - DNA, 120 bp, Artificial Sequence
  ENSG00000133816_64 (sequence is synthesized)
ttttactaaatgaggaactgagctcagaagttctgtgctttacgccaagtctcagcactggcccatggtggagctgggcccatacccttcccctggtcttcctggtccctgagcagctgc

SEQ ID NO: 306594 - DNA, 120 bp, Artificial Sequence
  ENSG00000133816_65 (sequence is synthesized)
ctgcagccctccggggacaaggggtctctggaagagggtggccgcagtctggcagtctacctttctgtctgagggggcttggttcctgattttcttctcctctttgcttggcttgtctaa

SEQ ID NO: 306595 - DNA, 120 bp, Artificial Sequence
  ENSG00000133816_66 (sequence is synthesized)
ctcgcaggtttttggggcttttgggtaatgattgggtctgagtaccacgtttaccccatgcccctgctgagtgaagctgtgaatgccccagggctggggggcaggagaccagagtacagt

SEQ ID NO: 306596 - DNA, 120 bp, Artificial Sequence
  ENSG00000133816_67 (sequence is synthesized)
ctggaatcttgaatttatttgctaagcggcctcagatagaccgttcccttctctgggattcatgtacatatctgtgcaatgagaggctcaggaactttggaaggccttgcaccccacggt

SEQ ID NO: 306597 - DNA, 120 bp, Artificial Sequence
  ENSG00000133816_68 (sequence is synthesized)
gaatgtaacagtcccatggcccacccaggactaaaaggcttttggtttttaatcttttttttcctcgaatttttttattgtgttaaaacatacatgacgtaaaatttaccaccttaactt

SEQ ID NO: 306598 - DNA, 77 bp, Artificial Sequence
  ENSG00000133816_69 (sequence is synthesized)
catacatgacgtaaaatttaccatactcttgttgctcaggctggagtacaatggtacgatctcagctcactgcaacc

SEQ ID NO: 306599 - DNA, 120 bp, Artificial Sequence
  ENSG00000133816_70 (sequence is synthesized)
ttacaggcgtgagccaccacacccggccagccttaaccattttttaagggtacggtttagtggtattaaatacatccttcgtgtgcaaccctcaccatcctcccactccagaactcttag

SEQ ID NO: 306600 - DNA, 120 bp, Artificial Sequence
  ENSG00000133816_71 (sequence is synthesized)
gcaaccctcaccatcctcccactccagaactcttagttgttgtaaaactggaactctgtacccactaaacaacagcaaccactgttctactgcctgtctctacgattttgactactctag

SEQ ID NO: 306601 - DNA, 120 bp, Artificial Sequence
  ENSG00000133816_72 (sequence is synthesized)
gtaccacatataagtggaatcctagagtacttgtgtttttgcggccacagggttttatttattttcttttctccacctccagaatccccgcgttctgctcctggctggttttgcttctcc

SEQ ID NO: 306602 - DNA, 120 bp, Artificial Sequence
  ENSG00000133816_73 (sequence is synthesized)
tgggtcgtggggtgctatttgcatgtgggtgaggagccctctccccatccatcctgcttgtgttttcctcctgggtgctaactggcctctacctttgtctctgtctcctctgcctctgct

SEQ ID NO: 306603 - DNA, 120 bp, Artificial Sequence
  ENSG00000133816_74 (sequence is synthesized)
aggatgccctggccctcccgaggctcctcttctcttggaacaagagggggctgagaatgagctgaatcagggcagaagttaaaaggagcctgcttttccttaaagacagatctcactcag

SEQ ID NO: 306604 - DNA, 120 bp, Artificial Sequence
  ENSG00000133816_75 (sequence is synthesized)
gtcccctgtggtctttttgaaaatagagatcttcctgctctctgtggctttggagaacggcctggtagaaaggcccaggtgaggccgtgagcataattgaatggccctcactttcagtgt

SEQ ID NO: 306605 - DNA, 120 bp, Artificial Sequence
  ENSG00000133816_76 (sequence is synthesized)
ttagtgtccaacctgaacagactctgtgcattggattgagaaaaaggtcatggggaaaatagccctttgatttgaattctccctttctctaaactgggctgctcgctgccatcaccagga

SEQ ID NO: 306606 - DNA, 120 bp, Artificial Sequence
  ENSG00000133816_77 (sequence is synthesized)
attttagttgaccattctttctgtttccttttggcccattgccctggaatcgcccaggggtactgctgccctggcccgtgccctcccaattcacaactaggactataactgaccagattt

SEQ ID NO: 306607 - DNA, 120 bp, Artificial Sequence
  ENSG00000133816_78 (sequence is synthesized)
gatgccacaagctttcctcacccaacctgtgccactgcaggggaacaggacacctaaaacatcctcagcgggccagtttcaggacctttgtccagaaccaggtgacacttaatcccaagg

SEQ ID NO: 306608 - DNA, 120 bp, Artificial Sequence
  ENSG00000133816_79 (sequence is synthesized)
acagatcctggaaagaatatcctggggtggacagggttgtgagtaaagcccactccgtcagaccaggatcactcccaccccaaaaccagagcagccaacctcggggagagcccctcccgg

SEQ ID NO: 306609 - DNA, 120 bp, Artificial Sequence
  ENSG00000133816_80 (sequence is synthesized)
gcccaccttgttgtctcgggcctgtctgggagtacagttaacagaagcccctgcagggttggggtctgggttgggggtgtatcttcctacccctccctctttgctgcagtggcagtagca

SEQ ID NO: 306610 - DNA, 120 bp, Artificial Sequence
  ENSG00000133816_81 (sequence is synthesized)
ggaagcagaagcccacgaggtccccagcattcagtgtggaatttctaaaagccttggcctggcatttgaaggctcgggataagccataatacacccactcttctctcccgatccccagga

SEQ ID NO: 306611 - DNA, 120 bp, Artificial Sequence
  ENSG00000133816_82 (sequence is synthesized)
ggaaggcagccccccagttcatttcagccttccagtgctacacccacttcttggctgacacacttctgctctaaggtgactggttttcttgccaattttcaaagagtggtactaaccccc

SEQ ID NO: 306612 - DNA, 120 bp, Artificial Sequence
  ENSG00000133816_83 (sequence is synthesized)
aacccgctttccgcaccccgtcctctccgccagcagtactggttgcactaactgtgagtgtcttgcatactgatggactcatttggtggcatggttggctaacagcatggcggggggtgt

SEQ ID NO: 306613 - DNA, 120 bp, Artificial Sequence
  ENSG00000133816_84 (sequence is synthesized)
tcagcttgagacccatgcctgtgttcatttcccatggagctggcagcctggtctaccccaagtgcatgccccgcctctcctctctcccttgggtctgcctgcgtgcatgcttctccagtt

SEQ ID NO: 306614 - DNA, 120 bp, Artificial Sequence
  ENSG00000133816_85 (sequence is synthesized)
gcgtctgcgaagctacctactttcttgggagggtcgaccttgatcatgaaacaataccatgagggggcctctgtcacctttgaaaagaacactttttgagcagcctcaaaaagctcatac

SEQ ID NO: 306615 - DNA, 120 bp, Artificial Sequence
  ENSG00000133816_86 (sequence is synthesized)
ataccagcgccttcttaaattggctctaatgtaaagattgttaatgtcatttatcaaaaccataggtgattatttggagggatttaaaaaacttaattactctcaggcctcatcccaagc

SEQ ID NO: 306616 - DNA, 120 bp, Artificial Sequence
  ENSG00000133816_87 (sequence is synthesized)
ttgacacatgctctgtaggttgaacacataatcacaaatattctagcaaatgctgccttggttgcagcctgcactgtagacccaagggttttgctgtggctcttcttatctcccttggct

SEQ ID NO: 306617 - DNA, 120 bp, Artificial Sequence
  ENSG00000133816_88 (sequence is synthesized)
cataaagccccagatgatgccagagcttcaattagagccatcatcatcccaggcagggatatctttgagaaatgactcagttcagccccaggcccctgtgactctgcttaaagcacacat

SEQ ID NO: 306618 - DNA, 120 bp, Artificial Sequence
  ENSG00000133816_89 (sequence is synthesized)
ttctgctgactcttgtacctggggcagcaggataatcaccaacacactcttaacgagaaacaacacaccaagcaccgtggagctgtcctaggcaacactcgcggtctcaggctgcggtgg

SEQ ID NO: 306619 - DNA, 120 bp, Artificial Sequence
  ENSG00000133816_90 (sequence is synthesized)
gcgtctgtcctgcatgtggcccagaccaccctgacccccgggcctgcctgcctggccctgcatgctgcacgctcactgtatttgtgcagatcctggccagtacaaagtcgttgctcttgt

SEQ ID NO: 306620 - DNA, 120 bp, Artificial Sequence
  ENSG00000133816_91 (sequence is synthesized)
cttatcttctcttacagagtctccctccctttatagaatgtcaaccaaagagtgccctcctcccctctcagcctcctctttagctagcctccccatctcatcacaacgcatgtctgtgac

SEQ ID NO: 306621 - DNA, 120 bp, Artificial Sequence
  ENSG00000133816_92 (sequence is synthesized)
ctttggtaatcatttacagtgccacacggaaccctgtattttgcacacagcaaaacaaacaatgtttagctttatttatggtatttgatgctgtaaatggaaataaatattgttctttat

SEQ ID NO: 306622 - DNA, 120 bp, Artificial Sequence
  ENSG00000133816_93 (sequence is synthesized)
aagatactgaatgatgaggccaaccacatgctgcaactggggctctgcttccccatgggataaagtcaagccaacaagaatggctttgccttagaattaggaagtagagcctcctccaag

SEQ ID NO: 306623 - DNA, 120 bp, Artificial Sequence
  ENSG00000133816_94 (sequence is synthesized)
gacctcagtgaggatcagccctggggaggaagcagctggacaggatgtgctggctgtgcgtgtcctggtcaccagcgaagacagcagtgtggcctctctgtgcctccatttcctcatctg

SEQ ID NO: 306624 - DNA, 120 bp, Artificial Sequence
  ENSG00000133816_95 (sequence is synthesized)
taaaatggcgacaatcatagtacccatctcagagggagtggtaagattcacagaattcatatgtgttaagtgtatagaacagtgcccacacgtcataagcactgtaagtgttagcaattg

SEQ ID NO: 306625 - DNA, 120 bp, Artificial Sequence
  ENSG00000133816_96 (sequence is synthesized)
ttattttcttgggaagagaaagggcctggccccatgctcttctcaggaggcagtgtcatgctgactgtagtgaggggtgcagaatgggtgtcacctgtcccgagggccgcccactgcaag

SEQ ID NO: 306626 - DNA, 120 bp, Artificial Sequence
  ENSG00000133816_97 (sequence is synthesized)
catcacctgcatcagaagcacctggagtggttattagacatgcagactccaggactcgcccagatgcactgaattcactcaagagctctgacacagagtctgactatggtggcagcgagg

SEQ ID NO: 306627 - DNA, 120 bp, Artificial Sequence
  ENSG00000133816_98 (sequence is synthesized)
ctggggctgggcagaagatctctggttaattctcaggggcagccgttctcattccttacatggtatctctctggcatggcctcctggttgtcagaggcaagaaataaaatataagcttga

SEQ ID NO: 306628 - DNA, 120 bp, Artificial Sequence
  ENSG00000133816_99 (sequence is synthesized)
ttgggcttcctaatcagaaagggagcaaggagctcctgggctttgtttgcaccagtctgccaggcactcctttccctgctcagccctatttagtgcctgtgctttcgctggaagccagtg

SEQ ID NO: 306629 - DNA, 120 bp, Artificial Sequence
  ENSG00000133816_100 (sequence is synthesized)
agttagccttaggccctgaggatgggcactgctaccaggaataggggagctgtggtgagcccgtcatctgctttgcagttccctggactccctgctttatgtttgaggctttctcttatc

SEQ ID NO: 306630 - DNA, 120 bp, Artificial Sequence
  ENSG00000133816_101 (sequence is synthesized)
agtttagatgtgacctcccaagggcagtcttgggttttgatggaagtcatcatttcacccacacacaagttactgttatttggtgtggtgatggatatcaacccctgcccagaggccctg

SEQ ID NO: 306631 - DNA, 120 bp, Artificial Sequence
  ENSG00000133816_102 (sequence is synthesized)
cagcctccattgctgctctctctggccacatctcccagaggctgggttcagaagctggggaggacctagagcttccctcactctacgatcctgggatcaggagcagtgtttctagaatct

SEQ ID NO: 306632 - DNA, 120 bp, Artificial Sequence
  ENSG00000133816_103 (sequence is synthesized)
catgctatgtgtatttacctcccacaagaagagactgcagcgataccagggtgggcttccagagcaggcttccagagctgggggtgaggggtgaaggggagagcaagctggggtttgcag

SEQ ID NO: 306633 - DNA, 120 bp, Artificial Sequence
  ENSG00000133816_104 (sequence is synthesized)
cagtccattctgctgagagtgtgagtaccgagaaagcatggcactgggcttgaaggatgaggagttcgccagacacagaggatgaggagagcagcactgtagtaaacttccagccacctg

SEQ ID NO: 306634 - DNA, 120 bp, Artificial Sequence
  ENSG00000133816_105 (sequence is synthesized)
agcaaacaacgttctaagaattttacatatattgacttatggaagcctgacaacatcactgtgatgtaagtgctattgttatttacattttatggatgaggacaaggaggcactgaacag

SEQ ID NO: 306635 - DNA, 120 bp, Artificial Sequence
  ENSG00000133816_106 (sequence is synthesized)
caaagtatttgccctggatcaccaggatttgggcaaaggtatgctctgagacctttttccccgccttatgcccattacaaggtaccttgaatgaaaaaatacacaagaacattgcatgga

SEQ ID NO: 306636 - DNA, 120 bp, Artificial Sequence
  ENSG00000133816_107 (sequence is synthesized)
aatgaaggtccggccctccccagtgtaggaggcaggtaaatgatcacactgtgacaaatgctcaaacggggatgtgcttgcaaaggctagagacagcacgggaggaaggagcagtccatt

SEQ ID NO: 306637 - DNA, 120 bp, Artificial Sequence
  ENSG00000133816_108 (sequence is synthesized)
ctgctgagagtgtagctcagttccaagaacacttattgatgcttacaccgggccaagccctgtgatgggccctgggttccagaggtgtgacgtttctccagatacttcatgctgttcacc

SEQ ID NO: 306638 - DNA, 120 bp, Artificial Sequence
  ENSG00000133816_109 (sequence is synthesized)
aggaacatggcaacccgtgtgtgtctcatcccagaaagagaagactttaaccactgtgatgcctgagaatccagtgagtgtgacgtttctccagatacttcatgctgttcacctgtgtcc

SEQ ID NO: 306639 - DNA, 120 bp, Artificial Sequence
  ENSG00000133816_110 (sequence is synthesized)
cctcgctcgctcccagctctgtcagtggcccgcggggcccgatcgctgcgcccgcggccagggccgaggcaggcctgacccggggccgggcagcccgcgcgactttcggaacatggcaac

SEQ ID NO: 306640 - DNA, 120 bp, Artificial Sequence
  ENSG00000133816_111 (sequence is synthesized)
tggttgcagggtctggcgagttcagtttgtattggctgttggctttgttgaagtagtcctctggaagacttacagacaaatgccctcatttccatctctttctcaggaggaggcaacatg

SEQ ID NO: 306641 - DNA, 120 bp, Artificial Sequence
  ENSG00000133816_112 (sequence is synthesized)
agacagatgtgggtccatgttctagctttgctctgtgtcgccttgagcaagtcatttaactttgttaagcctcaatttctcatctacagaatgagaataataacgattccaaagggccac

SEQ ID NO: 306642 - DNA, 120 bp, Artificial Sequence
  ENSG00000133816_113 (sequence is synthesized)
tgtaagagttagatgagaaaacacagagctcttggtgcataatcccgctcagtaatgatcattgttggtatactgctgtgctcaaaggtcactgagcggcagtgattatgtagcattctg

SEQ ID NO: 306643 - DNA, 120 bp, Artificial Sequence
  ENSG00000133816_114 (sequence is synthesized)
tttgctcaggctctggccaggaagcctagcattctctaagcaattagctcaaagccaaagaatttcacatgggccacctccgcctggccttatcagggtgaacatctactcacggtgcta

SEQ ID NO: 306644 - DNA, 120 bp, Artificial Sequence
  ENSG00000133816_115 (sequence is synthesized)
gggccagggatgatatgaaggatcttttctatagctttgtgagccatacttctgggtttacatttcaatttttttaattttaattagcccagagaaagcatttttttctatgagtgtcaa

SEQ ID NO: 306645 - DNA, 120 bp, Artificial Sequence
  ENSG00000133816_116 (sequence is synthesized)
tttttctaaacatgggtttgaagcttataaccagttttataaaccccttgaacactgcagtgagttatcaaagccactgcctgcaaagtggatgatttaagattttacacgcatgaaaat

SEQ ID NO: 306646 - DNA, 120 bp, Artificial Sequence
  ENSG00000133816_117 (sequence is synthesized)
tactttttacaacacgaaagcataattattttagaagaagagagtagaagggcagaatagaattcaacttacagaagcacggagcagtgtgtggttggctgttatctgtccccctgggag

SEQ ID NO: 306647 - DNA, 120 bp, Artificial Sequence
  ENSG00000133816_118 (sequence is synthesized)
gaggactgttttgctcccttgttttgatgttaaacagtagcttaaaggctttcccccccataccaactcacagccaaatgacaaagaaccgtggggtttcaacagattctacaaacatgc

SEQ ID NO: 306648 - DNA, 120 bp, Artificial Sequence
  ENSG00000133816_119 (sequence is synthesized)
attttcccttcccactaatgggcactgcagggaaagcccattggcatttgaccatggagctgatgcagtgccaaagatgagctctttcaactgatggcattttagcccctgtggctccca

SEQ ID NO: 306649 - DNA, 120 bp, Artificial Sequence
  ENSG00000133816_120 (sequence is synthesized)
gcggatcccccagcccgggctgcaggctgagccaaggctgtgcagggtccatattggtcaggccaagtggagtggaagactctgtccacttatgtggtgtcctttgggactgagggggtt

SEQ ID NO: 306650 - DNA, 120 bp, Artificial Sequence
  ENSG00000133816_121 (sequence is synthesized)
tgttagcacatcaggctattgctgggaagcgtggcctgcccagtgagcattgcctgtggacatcctgactgcttagctgctccgctgccacacatatgtggtcaaaacagaaaccaattt

SEQ ID NO: 306651 - DNA, 120 bp, Artificial Sequence
  ENSG00000133816_122 (sequence is synthesized)
cacactgccctgggaaaggaatgggtctgacctccaggggaagctctaccatatcttgactggcagggaaggctgggagtggaagctatttatggactgatccaaaggacatatgcatga

SEQ ID NO: 306652 - DNA, 120 bp, Artificial Sequence
  ENSG00000133816_123 (sequence is synthesized)
gtaagggtaaaaatgagcatgcaggtccacctgtgttcttactctgggtatctagaagagtcctcagctctccctactccacgctgcctagacatacacagctgcagggtctggctgaac

SEQ ID NO: 306653 - DNA, 120 bp, Artificial Sequence
  ENSG00000133816_124 (sequence is synthesized)
aatcaaggggccgccagagaaaggccatctacggtgcgcagtgtatctggagttgctgggcccaagatagctctgtggagttatcactagagatgcctctggattaactaagaggtgtgc

SEQ ID NO: 306654 - DNA, 120 bp, Artificial Sequence
  ENSG00000133816_125 (sequence is synthesized)
ctgggtgtgggtgaggagtcagaacctttgagagctttgagatgacagtttctatggggcgggaagaaggaggtgcatttctacaaacacttccctgaaatccttgggaaaaacagaggc

SEQ ID NO: 306655 - DNA, 120 bp, Artificial Sequence
  ENSG00000133816_126 (sequence is synthesized)
atggccgtggccaactctgtgggaactggcgcctctgtccttgttggcactgttctcagtccgatgacttgcattgtgttttctccaatttttgctgggattttaatgttcagcatggtg

SEQ ID NO: 306656 - DNA, 120 bp, Artificial Sequence
  ENSG00000133816_127 (sequence is synthesized)
ggaggaacccttgattccttttgtttgagtatagaaagtaaatttttgaggtcatgatgtgaacggccatgttattgtgattatcttcagctcaggataggctgagatgctttgtggagt

SEQ ID NO: 306657 - DNA, 120 bp, Artificial Sequence
  ENSG00000133816_128 (sequence is synthesized)
gttccatgaagcccgagtcggaatctctgactgtcgtgtacagccataaggagactggtttgaattactgtggcgagacagggcgtgcctgtcagaaatctgagatgtttgtacgctctg

SEQ ID NO: 306658 - DNA, 120 bp, Artificial Sequence
  ENSG00000133816_129 (sequence is synthesized)
agatgttgaacctttctggtgggcagcaccgacacccaggggtggacccccgaggatgaatgcctctaggcctccgcaacatattcaagaatgaatgggagacgctagagtaaaatgggg

SEQ ID NO: 306659 - DNA, 120 bp, Artificial Sequence
  ENSG00000133816_130 (sequence is synthesized)
gcagagaggatatcagggagcaagatgcaaactgtgtgcatccactctcgtaaacaagtagctggtcacaaccagaaaggttcatctctcctaagcaaacagcgactctttcagaggaag

SEQ ID NO: 306660 - DNA, 120 bp, Artificial Sequence
  ENSG00000133816_131 (sequence is synthesized)
tttccctctttcaatcgtggccttattttcaactccggtgccttctcgtgatgttaatcatttccttttttccccacactaagctctcttttctatctttctctctctttccaatcttac

SEQ ID NO: 306661 - DNA, 120 bp, Artificial Sequence
  ENSG00000133816_132 (sequence is synthesized)
gaaaatcaaagtacagtataattttctttttctgcctagaaagcagatactacaaaatagaaattccacttgctgcttccaaagggtgtttctgtaggagttattcttactgggagctgg

SEQ ID NO: 306662 - DNA, 120 bp, Artificial Sequence
  ENSG00000133816_133 (sequence is synthesized)
ttggcataatgccactgaagggtattttactgttttttttttaccattgctatgactttaggtttgctgtttggctccaaggggatttatgattaagccattaaacctgtaatttggtta

SEQ ID NO: 306663 - DNA, 120 bp, Artificial Sequence
  ENSG00000133816_134 (sequence is synthesized)
tgctggcaggggtacaggggtggccctcacaccctgacttcggggaacctatgtgttaaatggggagatgccatgagacccaaccgctacccagagaggtacaagccctgaggattgtgc

SEQ ID NO: 306664 - DNA, 120 bp, Artificial Sequence
  ENSG00000133816_135 (sequence is synthesized)
ttagaacttctaaactaggcagcagtgtgaacgaacttctgaggccaaaaggcagaatgtctgcgaataaaactgtccctgaaaatccagaccctgcagctactggttacagttggtcat

SEQ ID NO: 306665 - DNA, 120 bp, Artificial Sequence
  ENSG00000133816_136 (sequence is synthesized)
ataggggaagagattacctgcaatgccacatcgacaggccaaaaggcacaattctgtatctgttataaatatttatgtttagtattgaacactaaatagtgtggttaatatttgaatgtc

SEQ ID NO: 306666 - DNA, 120 bp, Artificial Sequence
  ENSG00000133816_137 (sequence is synthesized)
ttaaagaaattgcatttttacttctcagcacccatcccccaccctaacctcatcgtccaaagctgacctctgcctccccctactttcacaggtgtgacgtttctccagatacttcatgct

SEQ ID NO: 306667 - DNA, 120 bp, Artificial Sequence
  ENSG00000133816_138 (sequence is synthesized)
aggaactctgctggaagagaacatgcttcctctcccctcctgccacactcctgaccaggcccccaagcagcagtcctcagggagctgcacccgtgccagtggccccctgccctggcccct

SEQ ID NO: 306668 - DNA, 120 bp, Artificial Sequence
  ENSG00000133816_139 (sequence is synthesized)
tgccttggggccgctcgtcctggtccccagccatggtggcaatgagaagggagcgccagggcagaccgtgtgagattcctgcagagcctcactgcctgcgctctccttcttgcagagtca

SEQ ID NO: 306669 - DNA, 120 bp, Artificial Sequence
  ENSG00000133816_140 (sequence is synthesized)
ggtagatggtgtgcttccagctgataccaggagcagaagttttgagaagagactgtttgtcatgtggatagtggaaagccctgctctctggtaacgaatgaagaaaggctttaaagctgg

SEQ ID NO: 306670 - DNA, 120 bp, Artificial Sequence
  ENSG00000133816_141 (sequence is synthesized)
agatggtgtgcttccagctgataccaggagcagaagttttgagaagagactgtttgtcatgtggatagtggaaagccctgctctctggtgtgacgtttctccagatacttcatgctgttc

SEQ ID NO: 306671 - DNA, 120 bp, Artificial Sequence
  ENSG00000133816_142 (sequence is synthesized)
cactgggctctggccttggcctcaggtgtgaccttggctcgggttcctgtccctctggtggctctaggacacccaaacatacccaaaaggaagtatgatgtcatcaggaaagctgctcag

SEQ ID NO: 306672 - DNA, 120 bp, Artificial Sequence
  ENSG00000133816_143 (sequence is synthesized)
ggagactgggagctcctgctagaaggggaggctgcctgtggtcccagggaaggggtagcatcagcactgtggtacggcataccaggtcctggtgggcacctgtgtgcccagggctctatg

SEQ ID NO: 306673 - DNA, 120 bp, Artificial Sequence
  ENSG00000133816_144 (sequence is synthesized)
gggatttcccgcagagcatgaagagctctttatttttcaagccaccaaataatacaagctggcatctagaaaagacccaaatgcgaagattcaaaataaataaatacatcatgagaaagg

SEQ ID NO: 306674 - DNA, 120 bp, Artificial Sequence
  ENSG00000133816_145 (sequence is synthesized)
aatgatgctgattctctcctctgcacagcctcacaatcacctgaatatccccttcaagtgcatcctgccctgggtttcctgtgtgcacattgagtttccttctctagttgaagagagagt

SEQ ID NO: 306675 - DNA, 120 bp, Artificial Sequence
  ENSG00000133816_146 (sequence is synthesized)
ttgcagaggctggcaaacctggagctggactgaatggcctggacaggtggagcaggtgtgacgtttctccagatacttcatgctgttcacctgtgtcctcgccgcaccactgccgcacac

SEQ ID NO: 306676 - DNA, 120 bp, Artificial Sequence
  ENSG00000133816_147 (sequence is synthesized)
aagtttggtagagtgtgttgtggggacagcagtatggtgtgagggaaggagagagttcagtctattataatcattagtctattgacttgtggtaattgagctataggagataaattccta

SEQ ID NO: 306677 - DNA, 120 bp, Artificial Sequence
  ENSG00000133816_148 (sequence is synthesized)
cctcatgggtctttctgcaggatttatcatccctggaacttgttataccttactgcattttttaaaattaaaattctcttgcacgcatggcagcttcccaaggttcttccagagattcaa

SEQ ID NO: 306678 - DNA, 120 bp, Artificial Sequence
  ENSG00000133816_149 (sequence is synthesized)
atgaagaaaacccaaagactctttggcaattggcagtcaacttcagccaggctctcagactggaggtgttgttggcagatgaccagcattgttttccctagaaagtgacacaaagacttg

SEQ ID NO: 306679 - DNA, 120 bp, Artificial Sequence
  ENSG00000133816_150 (sequence is synthesized)
actttcctgctacttttatcattttccttcccaattcattgagttacatactttaagatttttgagaagctgccttttcattaatatatccatatttgccttttttgtatggatgaccag

SEQ ID NO: 306680 - DNA, 120 bp, Artificial Sequence
  ENSG00000133816_151 (sequence is synthesized)
tttccaaatgtcagaaagaagcagccgcagtttaaagattaggttaatatttaaattgtgtttccagagaaagaggagaaaccttgagattactgattacataaagcaaataactcatat

SEQ ID NO: 306681 - DNA, 120 bp, Artificial Sequence
  ENSG00000133816_152 (sequence is synthesized)
agcaggtgttaattcaatccagggtgaatttaatttaccaggtgcatttataagccttaatataatatacataagcaatgagagcttaatagaacatttgagccttaattttattttaag

SEQ ID NO: 306682 - DNA, 120 bp, Artificial Sequence
  ENSG00000133816_153 (sequence is synthesized)
cccccaggtacccagatgccacttgtcagcagcaggatactttttacaacacgaaagcataattattttagaagaagagagtagaagggcagaatagaattcaacttacagaagcacgga

SEQ ID NO: 306683 - DNA, 120 bp, Artificial Sequence
  ENSG00000133816_154 (sequence is synthesized)
acagctgggtgggacagaaaatttcgctaccctgccttctacccgcccgagggcgcaggctctttccggggtgctgtggcggctgcagcaagtggaggaaaagattctccaggaatctat

SEQ ID NO: 306684 - DNA, 120 bp, Artificial Sequence
  ENSG00000133816_155 (sequence is synthesized)
gaacaaactttctttgcaggattgggtcaaccatggggtctgatttggagatgcttcccttctctgtcagctgctcatgtctcaaatgaagagccttttgtgatgaccatgtatggaata

SEQ ID NO: 306685 - DNA, 120 bp, Artificial Sequence
  ENSG00000133816_156 (sequence is synthesized)
agctgaacatggcaacccgtgtgtgtctcatcccagaaagagaagactttaaccactgtgatgcctgagaatccaagacagagtctcactgcgttgcccaggctggtcttgaactcttgg

SEQ ID NO: 306686 - DNA, 120 bp, Artificial Sequence
  ENSG00000133816_157 (sequence is synthesized)
caccttggcctcccaaagagcaggaattacaggtgtgacgtttctccagatacttcatgctgttcacctgtgtcctcgccgcaccactgccgcacacgactcctgaaccatgggggaaaa

SEQ ID NO: 306687 - DNA, 120 bp, Artificial Sequence
  ENSG00000133816_158 (sequence is synthesized)
gaggaagagatgggccagctcggtgcagtgtgaggaacgctctgatatctaggcggggaccatcattctgcgtggggtcacaggatcacttggaaaatgcctctttgtagaggtctagcc

SEQ ID NO: 306688 - DNA, 120 bp, Artificial Sequence
  ENSG00000133816_159 (sequence is synthesized)
atcgtctgcagcctctggcatgggtgcgtgtgacaacagctgcgtcgccgtgtttctatctagattggctctggggagaggaggcagggagctcgtcctgtgtgggccatgccactcttg

SEQ ID NO: 306689 - DNA, 120 bp, Artificial Sequence
  ENSG00000133818_0 (sequence is synthesized)
agacggccatttgtggcggcgctggaggctgcgttcggcaggcgctgcggagacgcgtagaggagcgcgccccccggccgctgccgcccctggcccgtgccgtcaccccgcttctccgcg

SEQ ID NO: 306690 - DNA, 120 bp, Artificial Sequence
  ENSG00000133818_1 (sequence is synthesized)
gtgccgtcaccccgcttctccgcgcctcgggcggtacccagccagtccccagcgccgcgctaccgcgctgaccggccctccagacgcctcccggtacccgggaccccagcccggccgctc

SEQ ID NO: 306691 - DNA, 120 bp, Artificial Sequence
  ENSG00000133818_2 (sequence is synthesized)
gtccccggagccgggcctagggcgggcggcagcggcggctcggcgcagtcaggctgggctctgtagcgtccccatggccgcggccggctggcgggacggctccggccaggagaagtaccg

SEQ ID NO: 306692 - DNA, 120 bp, Artificial Sequence
  ENSG00000133818_3 (sequence is synthesized)
gctcgtggtggtcggcgggggcggcgtgggcaagtcggcgctcaccatccagttcatccagtcctattttgtaacggattatgatccaaccattgaagattcttacacaaagcagtgtgt

SEQ ID NO: 306693 - DNA, 120 bp, Artificial Sequence
  ENSG00000133818_4 (sequence is synthesized)
gatagatgacagagcagcccggctagatattttggatacagcaggacaagaagagtttggagccatgagagaacagtatatgaggactggcgaaggcttcctgttggtcttttcagtcac

SEQ ID NO: 306694 - DNA, 120 bp, Artificial Sequence
  ENSG00000133818_5 (sequence is synthesized)
agatagaggcagttttgaagaaatctataagtttcaaagacagattctcagagtaaaggatcgtgatgagttcccaatgattttaattggtaataaagcagatctggatcatcaaagaca

SEQ ID NO: 306695 - DNA, 120 bp, Artificial Sequence
  ENSG00000133818_6 (sequence is synthesized)
ggtaacacaggaagaaggacaacagttagcacggcagcttaaggtaacatacatggaggcatcagcaaagattaggatgaatgtagatcaagctttccatgaacttgtccgggttatcag

SEQ ID NO: 306696 - DNA, 120 bp, Artificial Sequence
  ENSG00000133818_7 (sequence is synthesized)
gaaatttcaagagcaggaatgtcctccttcaccagaaccaacacggaaagaaaaagacaagaaaggctgccattgtgtcattttctagaatcccttcagttttagctaccaacggccagg

SEQ ID NO: 306697 - DNA, 120 bp, Artificial Sequence
  ENSG00000133818_8 (sequence is synthesized)
aaaagccctcatcttctctttctctcctcagtttacatcttgttggtacctttctagccttagacaaatgatcaccatgttagccttagacgaagaagctggctagtcctttctgtgaag

SEQ ID NO: 306698 - DNA, 120 bp, Artificial Sequence
  ENSG00000133818_9 (sequence is synthesized)
tgattcctttaaaatatatgtctatatacacagacatgctctttttttaagtgcttacattttaatagagatgaatcagttttggaatctaagctgtttgccaagctgaagctacaggtt

SEQ ID NO: 306699 - DNA, 120 bp, Artificial Sequence
  ENSG00000133818_10 (sequence is synthesized)
gtgaaataatttttaacttttggaatcatactgcctactgttactctaaatagaaatatagggttttttttaatgtgaatttttgcctatctttaaacatttcaatgtcagcctttgtta

SEQ ID NO: 306700 - DNA, 120 bp, Artificial Sequence
  ENSG00000133818_11 (sequence is synthesized)
accttaaatacactgaattgaatctacaaaagtgaaccatctcagacctttactgatactacaacttttgttttctgatggccaaaataccaaatgcctgttgtatttatggattaaaaa

SEQ ID NO: 306701 - DNA, 120 bp, Artificial Sequence
  ENSG00000133818_12 (sequence is synthesized)
ctgcttataaaaccctgtgttactactcctactcttggagatgataatattctatgtggtcaaatatttggactcatttaggacttagatatttcagtgtacttgattttttaatttaac

SEQ ID NO: 306702 - DNA, 120 bp, Artificial Sequence
  ENSG00000133818_13 (sequence is synthesized)
tctttttcacagccacgctaagggtaaaaaggaataatttccttctgtcttccttttcaagtatttctgggtaagggattcaaaaaactaaaactgtttttgtttgtaatataaaatatg

SEQ ID NO: 306703 - DNA, 120 bp, Artificial Sequence
  ENSG00000133818_14 (sequence is synthesized)
gaattgatctttccagggtcagagatgattaatgtttttgctatatacttttatacattattttcttatcaaactagttaacaagtatttttatatgtttgtaagcagatatgctttcat

SEQ ID NO: 306704 - DNA, 120 bp, Artificial Sequence
  ENSG00000133818_15 (sequence is synthesized)
agcataccttgtgtatatgtaaagataagtatttaattctcactgttcacttttaactgacaaagaaaaacaagtggaaactacagaaactgtggtagaacttttacttgctggtctggt

SEQ ID NO: 306705 - DNA, 120 bp, Artificial Sequence
  ENSG00000133818_16 (sequence is synthesized)
cttggttgtacccatctttggccagtcacataactactcaagaaaccttcccaatagagtacaacaggatgagactctgaaatcactttcagtattccctgctagatattgattgttatt

SEQ ID NO: 306706 - DNA, 120 bp, Artificial Sequence
  ENSG00000133818_17 (sequence is synthesized)
tcaagtattaagtgtaagcttttaatggataattagtataactgtggatggcatctgattttgtttttaattctgtggattgtgtttaagcaattcaatagtatgttcctgattttgaga

SEQ ID NO: 306707 - DNA, 120 bp, Artificial Sequence
  ENSG00000133818_18 (sequence is synthesized)
tgctaagtggtattgcacagttgtcactttatcaagtgtgtacaacagtcccatgaagtttatagagcatacccttgtatagcttcaggtgctagaattaaaattgatctgttatcacaa

SEQ ID NO: 306708 - DNA, 120 bp, Artificial Sequence
  ENSG00000133818_19 (sequence is synthesized)
aatatttttgaactgtggttgactgtgggtaactgaaaccaaggaaagtgaaactggggataagcaaggtactgtagttttctttgatcagcacctgaaagatactgtgccacttcttct

SEQ ID NO: 306709 - DNA, 120 bp, Artificial Sequence
  ENSG00000133818_20 (sequence is synthesized)
atctcagatgcatgcagctcctgctgggcggtttcattctctgccagccattcattcacattaaaagcaatggcccattaaggaaataagtggatgatgctcctccatcacccatgtcct

SEQ ID NO: 306710 - DNA, 120 bp, Artificial Sequence
  ENSG00000133818_21 (sequence is synthesized)
gtggtattcaggtgatgaatgtggattccgttttgagttggagaaatttctttttgtcagtttggatttaattttaagaaataatgagtcctattttgtaacggattatgatccaaccat

SEQ ID NO: 306711 - DNA, 120 bp, Artificial Sequence
  ENSG00000133818_22 (sequence is synthesized)
attgctctggccgaggccagagacctccgggagaggctgggccaccgagccgggctttactgctccgagggtccgggcgtggggctggagctggagccccgcgcgctgcttttccagccg

SEQ ID NO: 306712 - DNA, 120 bp, Artificial Sequence
  ENSG00000133818_23 (sequence is synthesized)
cctgcggccgcgccttcaccgtcggggcgatagcggtggcaacttggccgcggctccgcgtggtctccgggcttccccgcgccgcctgagccggagctgcccgcttcaagtactgtgtat

SEQ ID NO: 306713 - DNA, 120 bp, Artificial Sequence
  ENSG00000133818_24 (sequence is synthesized)
aaaagcacacttgatgtatttgtatttctattaaaactgcaattgatggctactgataaaagctagtatagagctgaagatttgcagtggtgtcctctccaaaacgtagtttaggaatac

SEQ ID NO: 306714 - DNA, 120 bp, Artificial Sequence
  ENSG00000133818_25 (sequence is synthesized)
tatcatatgattactaatgttgtataaatgcatgagaatgacagataccaaattcaggatattgattacctcttggtgttgggggaggagagaggggaatattattgaggaggcatgcaa

SEQ ID NO: 306715 - DNA, 120 bp, Artificial Sequence
  ENSG00000133835_0 (sequence is synthesized)
attccccgcctcctcctgtcccgcagtcggcgtccagcggctctgcttgttcgtgtgtgtgtcgttgcaggccttattcatgggctcaccgctgaggttcgacgggcgggtggtactggt

SEQ ID NO: 306716 - DNA, 120 bp, Artificial Sequence
  ENSG00000133835_1 (sequence is synthesized)
caccggcgcgggggcaggattgggccgagcctatgccctggcttttgcagaaagaggagcgttagttgttgtgaatgatttgggaggggacttcaaaggagttggtaaaggctccttagc

SEQ ID NO: 306717 - DNA, 120 bp, Artificial Sequence
  ENSG00000133835_2 (sequence is synthesized)
tgctgataaggttgttgaagaaataagaaggagaggtggaaaagcagtggccaactatgattcagtggaagaaggagagaaggttgtgaagacagccctggatgcttttggaagaataga

SEQ ID NO: 306718 - DNA, 120 bp, Artificial Sequence
  ENSG00000133835_3 (sequence is synthesized)
tgttgtggtcaacaatgctggaattctgagggatcgttcctttgctaggataagtgatgaagactgggatataatccacagagttcatttgcggggttcattccaagtgacacgggcagc

SEQ ID NO: 306719 - DNA, 120 bp, Artificial Sequence
  ENSG00000133835_4 (sequence is synthesized)
atgggaacacatgaagaaacagaagtatggaaggattattatgacttcatcagcttcaggaatatatggcaactttggccaggccaattatagtgctgcaaagttgggtcttctgggcct

SEQ ID NO: 306720 - DNA, 120 bp, Artificial Sequence
  ENSG00000133835_5 (sequence is synthesized)
tgcaaattctcttgcaattgaaggcaggaaaagcaacattcattgtaacaccattgctcctaatgcgggatcacggatgactcagacagttatgcctgaagatcttgtggaagccctgaa

SEQ ID NO: 306721 - DNA, 120 bp, Artificial Sequence
  ENSG00000133835_6 (sequence is synthesized)
gccagagtatgtggcacctcttgtcctttggctttgtcacgagagttgtgaggagaatggtggcttgtttgaggttggagcaggatggattggaaaattacgctgggagcggactcttgg

SEQ ID NO: 306722 - DNA, 120 bp, Artificial Sequence
  ENSG00000133835_7 (sequence is synthesized)
agctattgtaagacaaaagaatcacccaatgactcctgaggcagtcaaggctaactggaagaagatctgtgactttgagaatgccagcaagcctcagagtatccaagaatcaactggcag

SEQ ID NO: 306723 - DNA, 120 bp, Artificial Sequence
  ENSG00000133835_8 (sequence is synthesized)
tataattgaagttctgagtaaaatagattcagaaggaggagtttcagcaaatcatactagtcgtgcaacgtctacagcaacatcaggatttgctggagctattggccagaaactccctcc

SEQ ID NO: 306724 - DNA, 120 bp, Artificial Sequence
  ENSG00000133835_9 (sequence is synthesized)
attttcttatgcttatacggaactggaagctattatgtatgcccttggagtgggagcgtcaatcaaggatccaaaagatttgaaatttatttatgaaggaagttctgatttctcctgttt

SEQ ID NO: 306725 - DNA, 120 bp, Artificial Sequence
  ENSG00000133835_10 (sequence is synthesized)
cttagagttatataaaccacttcccagagcaggaaaattaaaatgtgaagcagttgttgctgatgtcctagataaaggatccggtgtagtgattattatggatgtctattcttattctga

SEQ ID NO: 306726 - DNA, 120 bp, Artificial Sequence
  ENSG00000133835_11 (sequence is synthesized)
gaaggaacttatatgccacaatcagttctctctctttcttgttggctctggaggctttggtggaaaacggacatcagacaaagtcaaggtagctgtagccatacctaatagacctcctga

SEQ ID NO: 306727 - DNA, 120 bp, Artificial Sequence
  ENSG00000133835_12 (sequence is synthesized)
tgctgtacttacagataccacctctcttaatcaggctgctttgtaccgcctcagtggagactggaatcccttacacattgatcctaactttgctagtctagcaggttttgacaagcccat

SEQ ID NO: 306728 - DNA, 120 bp, Artificial Sequence
  ENSG00000133835_13 (sequence is synthesized)
attacatggattatgtacatttggattttctgccaggcgtgtgttacagcagtttgcagataatgatgtgtcaagattcaaggcaattaaggctcgttttgcaaaaccagtatatccagg

SEQ ID NO: 306729 - DNA, 120 bp, Artificial Sequence
  ENSG00000133835_14 (sequence is synthesized)
acaaactctacaaactgagatgtggaaggaaggaaacagaattcattttcaaaccaaggtccaagaaactggagacattgtcatttcaaatgcatatgtggatcttgcaccaacatctgg

SEQ ID NO: 306730 - DNA, 120 bp, Artificial Sequence
  ENSG00000133835_15 (sequence is synthesized)
tacttcagctaagacaccctctgagggcgggaagcttcagagtacctttgtatttgaggaaataggacgccgcctaaaggatattgggcctgaggtggtgaagaaagtaaatgctgtatt

SEQ ID NO: 306731 - DNA, 120 bp, Artificial Sequence
  ENSG00000133835_16 (sequence is synthesized)
tgagtggcatataaccaaaggcggaaatattggggctaagtggactattgacctgaaaagtggttctggaaaagtgtaccaaggccctgcaaaaggtgctgctgatacaacaatcatact

SEQ ID NO: 306732 - DNA, 120 bp, Artificial Sequence
  ENSG00000133835_17 (sequence is synthesized)
ttcagatgaagatttcatggaggtggtcctgggcaagcttgaccctcagaaggcattctttagtggcaggctgaaggccagagggaacatcatgctgagccagaaacttcagatgattct

SEQ ID NO: 306733 - DNA, 120 bp, Artificial Sequence
  ENSG00000133835_18 (sequence is synthesized)
taaagactacgccaagctctgaagggcacactacactattaataaaaatggaatcattaaatactctcttcacccaaatatgcttgattattctgcaaaagtgattagaactaagatgca

SEQ ID NO: 306734 - DNA, 120 bp, Artificial Sequence
  ENSG00000133835_19 (sequence is synthesized)
ggggaaattgcttaacattttcagatatcagataactgcagattttcattttctactaatttttcatgtatcattatttttacaaggaactatatataagctagcacataattatccttc

SEQ ID NO: 306735 - DNA, 120 bp, Artificial Sequence
  ENSG00000133835_20 (sequence is synthesized)
tgttcttagatctgtatcttcataataaaaaattttgcccaagtcctgtttccttagaatttgtgatagcattgataagttgaaaggaaaattaaatcaataaaggcctttgataccttt

SEQ ID NO: 306736 - DNA, 120 bp, Artificial Sequence
  ENSG00000133835_21 (sequence is synthesized)
gaggcaccgcatctcttgaggaggaaagagccggaaacacctggtctctcaagcaggattgggccgagcctatgccctggcttttgcagaaagaggagcgttagttgttggtaagttggt

SEQ ID NO: 306737 - DNA, 120 bp, Artificial Sequence
  ENSG00000133835_22 (sequence is synthesized)
gccagaaggtttttaccccgactaaggctgtctgtctaaattacttttaaaagggaaccagtttcacagaattcccagcttaacagaattgataacgaagggctagggggtaggcatgct

SEQ ID NO: 306738 - DNA, 87 bp, Artificial Sequence
  ENSG00000133835_23 (sequence is synthesized)
ggcttgtggctataactccagtgaccaggagttcgagcctgcagagaactatgattataccactgcactccaatctgggtgatggcg

SEQ ID NO: 306739 - DNA, 89 bp, Artificial Sequence
  ENSG00000133835_24 (sequence is synthesized)
acctggtctctcaagcaggattgggccgagcctatgccctggcttttgcagaaagaggagcgttagttgttgacagcatctcgctctgt

SEQ ID NO: 306740 - DNA, 120 bp, Artificial Sequence
  ENSG00000133835_25 (sequence is synthesized)
ggtggaaaacggacatcagacaaagtcaagcctacccaatgtgaggatgatgaggatgaagacctttatgatgatctacttccacttactgaatagtagctgtagccatacctaatagac

SEQ ID NO: 306741 - DNA, 120 bp, Artificial Sequence
  ENSG00000133835_26 (sequence is synthesized)
gggatacaaagacaaaacatgtttgtgccagcaaagacctaatattaagggaaggtagcataaacaaaaacagttccttctttctcctgtagtgaccctttgtgatttgtaaagtatata

SEQ ID NO: 306742 - DNA, 120 bp, Artificial Sequence
  ENSG00000133835_27 (sequence is synthesized)
tcttaataagatcctcaggggtctccaagttttcaaatgccatattctcatctgttacctcacccctccctcattaaatgctgtgaagtatgactgaaattgttatggactctttcagaa

SEQ ID NO: 306743 - DNA, 120 bp, Artificial Sequence
  ENSG00000133835_28 (sequence is synthesized)
gcttagttattaataaatacagagctaaaaatcaacagtaagatgcctgtaatgaattctgccactaagagaaaatgaatacaatctctttcttcacttctgaaataagattagctgtga

SEQ ID NO: 306744 - DNA, 120 bp, Artificial Sequence
  ENSG00000133835_29 (sequence is synthesized)
tcttataggtgtctataaactcaaggtgatggtggtggttgcagaccatgacctgagccactacagaactggaagttccacttctttacctcaaatttctgtattcttgtatttctatat

SEQ ID NO: 306745 - DNA, 120 bp, Artificial Sequence
  ENSG00000133835_30 (sequence is synthesized)
tgtgtagaataagtgccacattaacatggaaactatagaaatgtctgcattttacttggtttattttaccctcattttgttggagagaaaaagatacacattggtttcttcctatttttc

SEQ ID NO: 306746 - DNA, 120 bp, Artificial Sequence
  ENSG00000133835_31 (sequence is synthesized)
agtgtctttgatttagaattaagctaagaagagcttttagtttctgcttcccttgtaacaactggggtaaaaaagaagctgagaaagataggatttgctggcaaagggggcctatgttgg

SEQ ID NO: 306747 - DNA, 120 bp, Artificial Sequence
  ENSG00000133835_32 (sequence is synthesized)
cagaaattcctggactttcaatcaactttgcaaaggtatgcctaataaaaaacctttattttgcttttctatttctgtaaatattattcattaatgtcatatcttatatatatgtgtgtg

SEQ ID NO: 306748 - DNA, 120 bp, Artificial Sequence
  ENSG00000133835_33 (sequence is synthesized)
caccggcgcgggggcaggtgagcatgcgaaggttggaggccgcgccccttgctgaggcgcagctggctgctcttttcgggccggcatacgcgcgcagccgcagctgaggtcaccccgctg

SEQ ID NO: 306749 - DNA, 120 bp, Artificial Sequence
  ENSG00000133835_34 (sequence is synthesized)
agaggagcgttagttgttgctttcaaaatctatgcaataaccctatggagaagatcatttcacaatgcagattctttgtttcaatgaatgatttgggaggggacttcaaaggagttggta

SEQ ID NO: 306750 - DNA, 120 bp, Artificial Sequence
  ENSG00000133835_35 (sequence is synthesized)
gtggttctggaaaagtgtaccaaggccctgcaaaaggtgctgctgatacaacaatcatactttcagatgaagatttcatggaggtggtcctgggcaagcttgaccctcagaagtatggtc

SEQ ID NO: 306751 - DNA, 120 bp, Artificial Sequence
  ENSG00000133835_36 (sequence is synthesized)
accttagtaccctactgaaagtatgtttctgatgcgtccctcttctggagatggcacatctgtgaatgcaggctgggaagacatgggtggtttcagcagccacgtcgccacccacccagc

SEQ ID NO: 306752 - DNA, 120 bp, Artificial Sequence
  ENSG00000133835_37 (sequence is synthesized)
ctccatccctaccctggaaatctatcgtgtaactctgctgctaaagccctttctctcctatcctctcttgctttctcccctgtgtccacaccggagctgtctttgtcaaaggtagtgtgt

SEQ ID NO: 306753 - DNA, 120 bp, Artificial Sequence
  ENSG00000133835_38 (sequence is synthesized)
acttttacttttggctgctgaaatattgttctcactttgagatcaattgccttaaagtgctttgttaacccctcaaacgggaaatcgcagcactttctccaaagggacaattttctgtag

SEQ ID NO: 306754 - DNA, 120 bp, Artificial Sequence
  ENSG00000133835_39 (sequence is synthesized)
aagaagctatttaaatagcagcacaagattgaagacaacacatttaactgtgaaaaggtcatcctcagtagtcttaagaataaggtgggttttgtttttttttttctgttctgtatgttg

SEQ ID NO: 306755 - DNA, 120 bp, Artificial Sequence
  ENSG00000133835_40 (sequence is synthesized)
aactggtttagaaaactccagattcttgttaactttgacaattggaaaagccattaagggatgattacaagaccttccatctataggcacttgttaattatctgcatcctgcagggaaga

SEQ ID NO: 306756 - DNA, 120 bp, Artificial Sequence
  ENSG00000133835_41 (sequence is synthesized)
gaatgaagttgggaggaaaagggaacaaagaacagggaaaaaagaacagagagaaatcagctgcagaactccaacttgaagtcctctcatcagcattggcttcttgtttttctgcagagc

SEQ ID NO: 306757 - DNA, 120 bp, Artificial Sequence
  ENSG00000133835_42 (sequence is synthesized)
gaacttttcatgaaatttgagtcctgaggtgcctctttgtcctttcagactcactatctgctctttctgcctttttaactcccccgagggtagatgggcaggctgctctcctgtgacaca

SEQ ID NO: 306758 - DNA, 120 bp, Artificial Sequence
  ENSG00000133835_43 (sequence is synthesized)
aacagaatccattgcttctggttgaatagcaataatacttgattcaaaatcttaaccttccaactattaaaatgttaaatgtaaacagactcttatgttgccttaaataaatgccttcct

SEQ ID NO: 306759 - DNA, 120 bp, Artificial Sequence
  ENSG00000133835_44 (sequence is synthesized)
taaaaaacaaaaacaaaaacaactgtttctcaaattaattttcccagattcatagatttctctccttaacctgataattggccaaacagtatttactcctaaatactgtttctaaattct

SEQ ID NO: 306760 - DNA, 120 bp, Artificial Sequence
  ENSG00000133835_45 (sequence is synthesized)
tgtgttcagcgcactgggatgcatgagggtatattttttaaggcacaaagaaaatttgtttgcctgtgatctcactaataggtgtttattgccctcctggagccacagttgctgtgtcat

SEQ ID NO: 306761 - DNA, 120 bp, Artificial Sequence
  ENSG00000133835_46 (sequence is synthesized)
ctcaaggctggaattctggatgaagaggaggagcttttttggggtagaacctgaaggatggggatggggcattcatttattcataaaattatatgctctccttggacatatagaaaaaat

SEQ ID NO: 306762 - DNA, 120 bp, Artificial Sequence
  ENSG00000133835_47 (sequence is synthesized)
cgtgtatggcagatgaacctgacagcaataacataagtgtatcccaagaatgacactgtatggcagatgaacctgacagcaacaagttaagcataccctgagaatgaccatatggtctaa

SEQ ID NO: 306763 - DNA, 120 bp, Artificial Sequence
  ENSG00000133835_48 (sequence is synthesized)
gaagaatgcatattcagagttgggagctacagaatctgggtgtggccaacctggagattcattccttgtctatgagggacatctgagccttcagcccatcctgtggaatgcaggcaatac

SEQ ID NO: 306764 - DNA, 120 bp, Artificial Sequence
  ENSG00000133835_49 (sequence is synthesized)
aggggaccaaggcccattgttttagattaaatgaagatttccaagtggaggttgctaagtgaaaatgctgtataaattgcatgcttttaataagtggttgcagttctcctctccagccca

SEQ ID NO: 306765 - DNA, 120 bp, Artificial Sequence
  ENSG00000133835_50 (sequence is synthesized)
ctgccactggaccacccctgtatgtaagtttcctcaacaaaccctatgtattcttcactggctctaggtctcttcttgggcctcttaaacatggtgcggtttctgctgaagtcatagggg

SEQ ID NO: 306766 - DNA, 120 bp, Artificial Sequence
  ENSG00000133835_51 (sequence is synthesized)
tccagcatgtcaaagcgtcaaatcagcattgtaatctaaagacttttctcacccaatcctattccacatccctactcccaccttgctttttgcctctacagtcacaataaagctctccca

SEQ ID NO: 306767 - DNA, 75 bp, Artificial Sequence
  ENSG00000133835_52 (sequence is synthesized)
aatgatttgggaggggacttcaaaggagttggtaaaggctccttagctgctgataaggttgttgaagaaataaga

SEQ ID NO: 306768 - DNA, 120 bp, Artificial Sequence
  ENSG00000133835_53 (sequence is synthesized)
gggcagcatgggaacacatgaagaaacagaagtatggaagctggggagagatgaatggctagtccctgctggctggtgctagtcagacgattattatgacttcatcagcttcaggaatat

SEQ ID NO: 306769 - DNA, 120 bp, Artificial Sequence
  ENSG00000133835_54 (sequence is synthesized)
aagtgatgaagactgggatataatccacagagttcatttgcggggttcattccaagtgacacgggcagcatgggaacacatgaagaaacagaagtatggaaggctggagtacagtggcat

SEQ ID NO: 306770 - DNA, 120 bp, Artificial Sequence
  ENSG00000133835_55 (sequence is synthesized)
ctaaccattggatatagtgcttgcatattcaaacttaaacattgctatagcaacaggtatttttaaacattgtgattgtcctataggtctgtggccctttcaagaccctatctattcttc

SEQ ID NO: 306771 - DNA, 120 bp, Artificial Sequence
  ENSG00000133835_56 (sequence is synthesized)
ctgtaggtagtccttattcaggacttgtcctgttttattcagaactggctattccttcagacagcatatattgataatcatcctcccatgtctttgacttcccacatgctcgttcttgct

SEQ ID NO: 306772 - DNA, 120 bp, Artificial Sequence
  ENSG00000133835_57 (sequence is synthesized)
gtttcagcagagaagtgagtgggagggagagctgttttggaaaaagatgggttgagcctattctagagcagcaggcaagttctccaattttcccatgtaattattttcttccatgaagca

SEQ ID NO: 306773 - DNA, 120 bp, Artificial Sequence
  ENSG00000133835_58 (sequence is synthesized)
ggagacgtcaaggggagtgaggaatcacattggacaacttactgggacagaaattgcagctgatctatgggaattattccgctttagcccaatagttattttagatagtaaaattatttt

SEQ ID NO: 306774 - DNA, 120 bp, Artificial Sequence
  ENSG00000133835_59 (sequence is synthesized)
aaatagttattttaaataactatttaaattaaatattttaaatagttaaatagtaaatttacttggcttcaaccctctcctaccccatctctcaaaccttgtgaactccaaatttgagaa

SEQ ID NO: 306775 - DNA, 120 bp, Artificial Sequence
  ENSG00000133835_60 (sequence is synthesized)
ttgctttatggcattaaaaaaattgtgaaaatttctgtgtctcagcttatatttagttggctatgggtatcaaaattaatccaattaactgaatcagttaaaaggttgctatctctggag

SEQ ID NO: 306776 - DNA, 120 bp, Artificial Sequence
  ENSG00000133835_61 (sequence is synthesized)
ggcattgctgtagtagtataatatttttagaattaatggtcattttctctaattgttaaagtggcttatattcttgaagcatttttgagtgtcttattgcattcatttaaaaaaggaaca

SEQ ID NO: 306777 - DNA, 120 bp, Artificial Sequence
  ENSG00000133835_62 (sequence is synthesized)
taaggttttgcagtaaaagctatatctggcactttatcaataggaaagctctagacacaggcatttctgtcattcccaaagacaaatcttcagtttaacaatcatcagtgtctgactatt

SEQ ID NO: 306778 - DNA, 120 bp, Artificial Sequence
  ENSG00000133835_63 (sequence is synthesized)
atgtttaaataaggttattagtagttgtttatacctctggtttttaaaaagaaaacaatgttaaaaattctccttatgcagcagtaatggtttttatgaatctgtgcattctaactgact

SEQ ID NO: 306779 - DNA, 120 bp, Artificial Sequence
  ENSG00000133835_64 (sequence is synthesized)
tcttgtggaaatagaggtagagcaaagagaaggtaagggagaattatttggggccacctgttacactaaatttttgttaactgaagtctttgacctattatttactattagtcttcagtt

SEQ ID NO: 306780 - DNA, 120 bp, Artificial Sequence
  ENSG00000133835_65 (sequence is synthesized)
ctaactcagcgaagctctattcagttatcttcattttataaacaagaagaatgaagtatattactttggggatctgtggtcatgaagtcagtcttttgatgtgattattatataattaaa

SEQ ID NO: 306781 - DNA, 120 bp, Artificial Sequence
  ENSG00000133835_66 (sequence is synthesized)
ctttttcacatacagcataacattctacctttagtactgtctggcatagtcagaggagaaatttttcccttcagcttcaaatgtttctttaaattgaccttatcctagtgggtttgttgg

SEQ ID NO: 306782 - DNA, 120 bp, Artificial Sequence
  ENSG00000133835_67 (sequence is synthesized)
gaaaaattcattttaaggcttatggtaaaactctttaggagttagaatccctttttttctgaatttcctttctctttaaaaatgaaagggttcttatgcatcttactttctgtctctcaa

SEQ ID NO: 306783 - DNA, 120 bp, Artificial Sequence
  ENSG00000133835_68 (sequence is synthesized)
ttatttcataatttcctcccaggaaatactctttaaaaaatatctactgtgtttcttaaaatagatggtataattcctgctaatgcagtctaaggacatttttaaagtcctgaattaact

SEQ ID NO: 306784 - DNA, 120 bp, Artificial Sequence
  ENSG00000133835_69 (sequence is synthesized)
gtaggttataaaaattagtatccaagccacttcctcatttaggaatttcagttaaggtgactttaagagtggttaggctacgttagaaaattaacaaccatgaaactattcttaattctt

SEQ ID NO: 306785 - DNA, 120 bp, Artificial Sequence
  ENSG00000133835_70 (sequence is synthesized)
ttgaccctcagaagcctataaatacagtggattatatggattgaattttgaagtttaatcagtcttgcatccttggaatagatcagtcttgcatccttggaatagaccccacttggtcat

SEQ ID NO: 306786 - DNA, 120 bp, Artificial Sequence
  ENSG00000133835_71 (sequence is synthesized)
gcagctgagacttatgggccagaagatactggaagatggtgtggccttctcttgcaagagggagaagaaagagccatggagatagtagcagacaggctgcccaaggtatgaagcagatga

SEQ ID NO: 306787 - DNA, 120 bp, Artificial Sequence
  ENSG00000133835_72 (sequence is synthesized)
gggaccagcactcagtctaacatgtaaacatcatacgtaataaaggttgtgtttcaaaccttacctggatatattatttaattaacaaattaatctacctatctattcatcattttcttt

SEQ ID NO: 306788 - DNA, 120 bp, Artificial Sequence
  ENSG00000133835_73 (sequence is synthesized)
gctggtctcgaactcctgggctcaagtgttctacccgcctgggcctcccaaagtgctgggtttgcaggcgtgagccacggcgcccagccctattcattattttcatctatctctccagtg

SEQ ID NO: 306789 - DNA, 120 bp, Artificial Sequence
  ENSG00000133835_74 (sequence is synthesized)
gtttgtgaacgaagttttacatcagcactaaagatatctaccagccttttccagaggcagcaatagccaagctcctgggtttgattagacttctgtgtgacaattttttcaaggctggat

SEQ ID NO: 306790 - DNA, 120 bp, Artificial Sequence
  ENSG00000133835_75 (sequence is synthesized)
atcacatttcatatgagaccatgacaaactccactacatacctatgtttccatcatcccgctttattaagcttagcatttttctacgtttgcttcagatggctttgaagtaaaaatgatt

SEQ ID NO: 306791 - DNA, 120 bp, Artificial Sequence
  ENSG00000133835_76 (sequence is synthesized)
acaaatacagccatagtcccctgttccattgccttacatatggattttgagtattttttaatacttctgtgcatgttttatactattatataaatatataaagtgttttgaatatcttga

SEQ ID NO: 306792 - DNA, 120 bp, Artificial Sequence
  ENSG00000133835_77 (sequence is synthesized)
aagtttcacatactattgtacttcattattagttttcaacttgtttttattaaaaaacaggtttttaagattatccattgtcatacacatatctgtagttaactaatttttactactgta

SEQ ID NO: 306793 - DNA, 120 bp, Artificial Sequence
  ENSG00000133835_78 (sequence is synthesized)
ttatagttcattctatgaatatgccaactttttatttattgtctttttgatgaaatttcagttgcatccaaatttcctctattaccacagaatgtgtgtctctctctagaatgtataccc

SEQ ID NO: 306794 - DNA, 120 bp, Artificial Sequence
  ENSG00000133835_79 (sequence is synthesized)
agacatccattgctgtgctgaattatatagatatttcagtttagtagttactgccgtggtgtatttctttctttgttcaagcattttttttctttcttcattcttcaataatgattaatg

SEQ ID NO: 306795 - DNA, 120 bp, Artificial Sequence
  ENSG00000133835_80 (sequence is synthesized)
cttttctgcacaaatgttatatacaatttttattcgatgcagtccaagatatcttttcttttcattctccttgtaaatggtatgttttttctattatatcttagaattggttattactga

SEQ ID NO: 306796 - DNA, 120 bp, Artificial Sequence
  ENSG00000133835_81 (sequence is synthesized)
attactgatgcatattttaaattttcatttcacatctagcaacctttttgaaatttttcaggtgtaagtatttctatatagtattctgtatttttctatattcaatcatattaaatacaa

SEQ ID NO: 306797 - DNA, 120 bp, Artificial Sequence
  ENSG00000133858_0 (sequence is synthesized)
agaaccccgatcgctgaggagcaagggggcgctaggaaagggaactgggttgcgacggtccggcgagagagagctggggtgctggggtgcggggaagttggggagcagaggccgcttggt

SEQ ID NO: 306798 - DNA, 120 bp, Artificial Sequence
  ENSG00000133858_1 (sequence is synthesized)
gtccgagtagggtaagaccgcaccgacccagtccgttaggaaagaagggaaacgaggcaattgtcgggcggatccccggacggagggctaaggttgtgtggaaggcgctgctccccggat

SEQ ID NO: 306799 - DNA, 120 bp, Artificial Sequence
  ENSG00000133858_2 (sequence is synthesized)
ggcgaccgcagatactccggccccggcctccagtggcctctcgccgaaggaagaaggggagcttgaagatggggaaatcagtgacgacgataataacagccagatacggagtcggagcag

SEQ ID NO: 306800 - DNA, 120 bp, Artificial Sequence
  ENSG00000133858_3 (sequence is synthesized)
cagcagcagcagcggcggcgggctgttaccctatccgcggcgaaggcctcctcactcggcccggggcggtggatctggcggaggcggtggctcttcctcgtcatcgtcctcttctcagca

SEQ ID NO: 306801 - DNA, 120 bp, Artificial Sequence
  ENSG00000133858_4 (sequence is synthesized)
gcagctgaggaatttctcacgctcgcggcacgcgtctgagcggggccacctcaggggacccagcagctaccgacccaaagaaccgttccggtctcatccgccttctgtacggatgccttc

SEQ ID NO: 306802 - DNA, 120 bp, Artificial Sequence
  ENSG00000133858_5 (sequence is synthesized)
gagctcactgtccgaaagcagtccccggccgtctttctgggagcggagccacctcgccttggaccgtttccgctttcgaggcaggccttaccggggtgggagtcgctggagtcgggggcg

SEQ ID NO: 306803 - DNA, 120 bp, Artificial Sequence
  ENSG00000133858_6 (sequence is synthesized)
aggagtgggtgagcgaggaggcaagccggggtgcagacctcctctgggaggaggagcaggatccgggttcagcagcagtcagagctggcgagagccctctccacctcggaagagctccaa

SEQ ID NO: 306804 - DNA, 120 bp, Artificial Sequence
  ENSG00000133858_7 (sequence is synthesized)
aagttttggaaggtctccatcaagaaaacaaaattattcatcaaaaaatgaaaactgtgtggaagaaacttttgaagatttgcttttaaagtataaacaaatacagttggaactagaatg

SEQ ID NO: 306805 - DNA, 120 bp, Artificial Sequence
  ENSG00000133858_8 (sequence is synthesized)
catcaataaggatgaaaaactagcattgagtagcaaagaagagaatgtgcaggaagatcctaaaacattgaacttcgaggaccaaactagcactgataatgtcagtattacaaaggattc

SEQ ID NO: 306806 - DNA, 120 bp, Artificial Sequence
  ENSG00000133858_9 (sequence is synthesized)
aagtaaagaagtagctcctgaggagaaaacacaagtcaaaacttttcaggcatttgaattaaaaccactcaggcaaaaattgactttaccaggagataagaaccgtttgaaaaaagttaa

SEQ ID NO: 306807 - DNA, 120 bp, Artificial Sequence
  ENSG00000133858_10 (sequence is synthesized)
agatggagcaaaaccactttccctgaaatccgacactactgattctagtcaaggattacaagataaagaacaaaatttaacaagaagaattagtacctcagatattctgtctgaaaagaa

SEQ ID NO: 306808 - DNA, 120 bp, Artificial Sequence
  ENSG00000133858_11 (sequence is synthesized)
acttggtgaagatgaagaggaactatctgaattacagcttcgccttttggctcttcagtcagccagtaaaaaatggcaacaaaaagaacagcaggtgatgaaagaaagcaaagaaaagtt

SEQ ID NO: 306809 - DNA, 120 bp, Artificial Sequence
  ENSG00000133858_12 (sequence is synthesized)
gactaagacgaaaactgtacagcaaaaagttaaaacaagtacaaaaacacattcggccaaaaaagttagcactacagctaaacaagcattgaggaagcagcaaacaaaggcatggaagaa

SEQ ID NO: 306810 - DNA, 120 bp, Artificial Sequence
  ENSG00000133858_13 (sequence is synthesized)
actacaacaacaaaaagagcaggaaagacagaaagaagaggatcagcggaaacaagctgaagaagaagagagaaggaaaagagaggaagaaatcagaaaaattcgagatctctcaaatca

SEQ ID NO: 306811 - DNA, 120 bp, Artificial Sequence
  ENSG00000133858_14 (sequence is synthesized)
ggaagaacagtacaatcgattcatgaaattggttggtggcaagaggagatcaagaagtaaatcttcagatcctgacctgaggcgatccttagataagcaacctactgatagtggaggagg

SEQ ID NO: 306812 - DNA, 120 bp, Artificial Sequence
  ENSG00000133858_15 (sequence is synthesized)
catttatcagtatgataactatgaagaagttgctatggatacagatagtgaaaccagttctccagctccttcaccagtgcaaccgccatttttctctgaatgttcattggggtatttttc

SEQ ID NO: 306813 - DNA, 120 bp, Artificial Sequence
  ENSG00000133858_16 (sequence is synthesized)
tccagcaccatctctttctttgcctccaccacctcaggtttcttctctgccacctttgagccagccttatgtggaaggcttgtgtgtttctcttgaacctctacctcctctaccaccatt

SEQ ID NO: 306814 - DNA, 120 bp, Artificial Sequence
  ENSG00000133858_17 (sequence is synthesized)
accacctctcccacctgaagatccagaacagcctccaaaaccaccttttgcagatgaggaagaggaggaagaaatgctgcttcgagaagaactacttaaatctctagcaaataaaagagc

SEQ ID NO: 306815 - DNA, 120 bp, Artificial Sequence
  ENSG00000133858_18 (sequence is synthesized)
ttttaagccagaggaaacatccagtaatagtgacccaccttcacctccagttctgaacaattcacatcctgtgccaagaagcaatctatcaatagtcagtattaacacagtgtctcagcc

SEQ ID NO: 306816 - DNA, 120 bp, Artificial Sequence
  ENSG00000133858_19 (sequence is synthesized)
taggatacagaatccaaagtttcacagaggaccccgtcttccacgaactgtgatctcgcttccaaagcataaatcagtggttgtaacactaaatgattcagatgatagtgaatctgatgg

SEQ ID NO: 306817 - DNA, 120 bp, Artificial Sequence
  ENSG00000133858_20 (sequence is synthesized)
agaggcttccaagtcaacaaatagtgtttttggtggattagagtccatgattaaagaagcaagacgaactgctgagcaagcttcaaaaccgaaagtacctccaaaatctgaaaaagaaaa

SEQ ID NO: 306818 - DNA, 120 bp, Artificial Sequence
  ENSG00000133858_21 (sequence is synthesized)
tgatcctctgcgaacaccggaggctttgcctgaagaaaagaagattgaatatagattgttaaaggaagagattgccaaccgtgagaaacagcgtttgattaaatcagatcagctgaagac

SEQ ID NO: 306819 - DNA, 120 bp, Artificial Sequence
  ENSG00000133858_22 (sequence is synthesized)
aagttcatcatccccagcaaactctgatgtggaaattgatggtattggcaggatagcaatggttactaagcaggttacagatgcagaatcaaaactgaaaaaacataggattctcttgat

SEQ ID NO: 306820 - DNA, 120 bp, Artificial Sequence
  ENSG00000133858_23 (sequence is synthesized)
gaaagatgaatctgttttaaagaatttagtgcaacaagaagctaagaagaaagaatctgttagaaatgctgaagcaaagattacaaaacttacagaacagcttcaagcaactgaaaaaat

SEQ ID NO: 306821 - DNA, 120 bp, Artificial Sequence
  ENSG00000133858_24 (sequence is synthesized)
tcttaatgttaacagaatgtttttgaagaagcttcaggaacaaattcacagagttcaacagcgtgttacaattaagaaagctttgactctaaaatatggagaagagcttgctcgggcaaa

SEQ ID NO: 306822 - DNA, 120 bp, Artificial Sequence
  ENSG00000133858_25 (sequence is synthesized)
ggcagtggccagtaaagaaataggaaaacgtaaactggaacaagatcgctttgggccaaacaaaatgatgagactggacagttctccagtatcaagtccaagaaagcattcagcagaact

SEQ ID NO: 306823 - DNA, 120 bp, Artificial Sequence
  ENSG00000133858_26 (sequence is synthesized)
aattgctatggagaaaagacggttacaaaagctagaatatgaatatgccctgaaaattcaaaaattaaaagaagcccgtgcccttaaagcaaaggaacaacaaaatatctctccagttgt

SEQ ID NO: 306824 - DNA, 120 bp, Artificial Sequence
  ENSG00000133858_27 (sequence is synthesized)
ggaagaggaacccgaattttctttacctcaaccctcacttcatgatctgacacaagataaattaaccctggacactgaagaaaatgatgttgatgatgaaattttgtctggttcaagcag

SEQ ID NO: 306825 - DNA, 120 bp, Artificial Sequence
  ENSG00000133858_28 (sequence is synthesized)
agagcgaagaagatcttttttagaatccaattattttactaaacctaaccttaagcacactgatactgctaacaaagaatgcataaacaaacttaataaaaatactgtagaaaaaccaga

SEQ ID NO: 306826 - DNA, 120 bp, Artificial Sequence
  ENSG00000133858_29 (sequence is synthesized)
cacaggcattacagagaaggttttgcatggtcaggagatttctgtagatgtggattttgtcacagcacaaagtaaaacaatggaagtgaagccatgtccttttagaccctaccatagtcc

SEQ ID NO: 306827 - DNA, 120 bp, Artificial Sequence
  ENSG00000133858_30 (sequence is synthesized)
tcttctagtttttaagtcctacagatttagtccatattatcgaaccaaggaaaaacttcccctgagctcagtatcatacagtaatatgattgaaccggatcagtgtttctgccgttttga

SEQ ID NO: 306828 - DNA, 120 bp, Artificial Sequence
  ENSG00000133858_31 (sequence is synthesized)
tttaacaggaacatgtaatgatgatgattgtcaatggcagcatatacaagactatacacttagccgaaaacagttattccaggacattctgtcatataatctgtctttgattggttgtgc

SEQ ID NO: 306829 - DNA, 120 bp, Artificial Sequence
  ENSG00000133858_32 (sequence is synthesized)
agagacaagtactaatgaagaaattactgcttcagcagaaaaatatgttgagaaactttttggagtaaacaaagatcgaatgtcaatggaccagatggctgttctccttgttagcaatat

SEQ ID NO: 306830 - DNA, 120 bp, Artificial Sequence
  ENSG00000133858_33 (sequence is synthesized)
caatgaaagtaaaggtcatactcctccatttacaacctacaaagataaaagaaagtggaagccaaagttttggagaaaacctatttcagataatagcttcagtagtgatgaggaacagtc

SEQ ID NO: 306831 - DNA, 120 bp, Artificial Sequence
  ENSG00000133858_34 (sequence is synthesized)
tacaggaccaattaagtatgctttccagccagagaaccaaataaatgttccagctctggatacagttgtcactccagatgatgtcagatactttacaaatgagactgatgacatcgctaa

SEQ ID NO: 306832 - DNA, 120 bp, Artificial Sequence
  ENSG00000133858_35 (sequence is synthesized)
tttagaagcaagtgtgcttgaaaatccttctcatgtacaactttggctcaagcttgcgtacaagtacttgaatcaaaatgagggggagtgctcagaatccttggattctgctttaaatgt

SEQ ID NO: 306833 - DNA, 120 bp, Artificial Sequence
  ENSG00000133858_36 (sequence is synthesized)
tctggcgcgagcattggaaaataacaaagacaatccagaaatttggtgccattacctcagattgttctcaaaaagaggaaccaaggacgaggtgcaggaaatgtgtgaaacagctgttga

SEQ ID NO: 306834 - DNA, 120 bp, Artificial Sequence
  ENSG00000133858_37 (sequence is synthesized)
atatgctccagattatcaaagcttttggacttttctacacctagaaagtacctttgaagaaaaggattacgtatgtgagagaatgttggagtttctgatgggagcagccaagcaggaaac

SEQ ID NO: 306835 - DNA, 120 bp, Artificial Sequence
  ENSG00000133858_38 (sequence is synthesized)
atccaatattttgtcctttcagcttttagaggctcttttgtttagagttcagctgcacatatttactggaagatgccaaagtgcactggcaattttacagaatgcattgaaatctgctaa

SEQ ID NO: 306836 - DNA, 120 bp, Artificial Sequence
  ENSG00000133858_39 (sequence is synthesized)
tgatggaatagtagctgaataccttaaaaccagtgatcgatgtttggcatggttggcctacatacatcttattgaattcaacattctcccttcaaaattttatgatccatctaatgataa

SEQ ID NO: 306837 - DNA, 120 bp, Artificial Sequence
  ENSG00000133858_40 (sequence is synthesized)
tccttcaagaattgttaacactgaatcatttgtaatgccatggcaagctgttcaagatgtaaagactaatcctgacatgttgttagcagtttttgaagatgcagtgaaagcttgcacaga

SEQ ID NO: 306838 - DNA, 120 bp, Artificial Sequence
  ENSG00000133858_41 (sequence is synthesized)
tgagagccttgctgttgaggaaagaatagaggcctgccttccactttacacaaacatgattgctctgcaccaactcctggagaggtatgaggctgcaatggagctttgtaaatctttatt

SEQ ID NO: 306839 - DNA, 120 bp, Artificial Sequence
  ENSG00000133858_42 (sequence is synthesized)
ggaatcatgtcctattaactgccagttgctggaagctcttgttgcattatatttgcaaacaaatcagcatgacaaagccagagcagtgtggcttactgcatttgaaaaaaatcctcagaa

SEQ ID NO: 306840 - DNA, 120 bp, Artificial Sequence
  ENSG00000133858_43 (sequence is synthesized)
tgcagaggttttttatcatatgtgcaaattcttcatcttacagaatcgaggcgataatcttcttccatttttgcggaaatttattgcatccttctttaaaccggggtttgagaagtataa

SEQ ID NO: 306841 - DNA, 120 bp, Artificial Sequence
  ENSG00000133858_44 (sequence is synthesized)
taacttggatctgtttcggtatctcttaaatattccaggaccaattgacattccatctcgtttatgtaaagggaattttgatgatgatatgtttaaccaccaagttccttatttgtggct

SEQ ID NO: 306842 - DNA, 120 bp, Artificial Sequence
  ENSG00000133858_45 (sequence is synthesized)
gatttactgcctttgtcatcctcttcaatcaagtattaaagaaacagtggaggcatatgaggcagcattaggggtggctatgagatgtgatatagtacagaagatatggatggattatct

SEQ ID NO: 306843 - DNA, 120 bp, Artificial Sequence
  ENSG00000133858_46 (sequence is synthesized)
tgtctttgcaaataatagagctgctggatccagaaacaaagttcaagaattcaaattttttactgatttagtgaatagatgtttggttacagtccctgcccgataccccattccttttag

SEQ ID NO: 306844 - DNA, 120 bp, Artificial Sequence
  ENSG00000133858_47 (sequence is synthesized)
cagtgctgattactggtccaactatgaatttcataatagggttattttcttttatttgagctgtgttccaaagacccagcattccaaaaccttggaacggttttgttcagttatgccagc

SEQ ID NO: 306845 - DNA, 120 bp, Artificial Sequence
  ENSG00000133858_48 (sequence is synthesized)
taattctggacttgcattgaggttacttcaacatgaatgggaagaaagcaatgttcagattctgaaacttcaagccaagatgtttacatataatatcccaacatgcctggccacctggaa

SEQ ID NO: 306846 - DNA, 120 bp, Artificial Sequence
  ENSG00000133858_49 (sequence is synthesized)
aatagccattgctgctgagattgttctaaagggacaaagagaggtccaccgtttatatcagagagccttacagaagttacctctttgtgcatcactgtggaaagatcaactcttgtttga

SEQ ID NO: 306847 - DNA, 120 bp, Artificial Sequence
  ENSG00000133858_50 (sequence is synthesized)
agcatcagaaggaggtaaaactgataacctgagaaaactagtttccaagtgccaagagattggagtcagcctaaatgagctcttaaatttaaacagtaacaaaacagaaagcaagaatca

SEQ ID NO: 306848 - DNA, 120 bp, Artificial Sequence
  ENSG00000133858_51 (sequence is synthesized)
ctgaacactgggtgcagtcagttctaagtccttataataattgccaaaattatttgaatgattcttcaagattaggctgatccctggctaaggtctgtgtaaggcagacaagcgttattg

SEQ ID NO: 306849 - DNA, 120 bp, Artificial Sequence
  ENSG00000133858_52 (sequence is synthesized)
atcatatcaagttccctacaatatcctgtcctcaaaaccggaagcaatgaacatgatcctcttcggttggataaatgaacttcctgtttggcctgcttctaggccctgccagattctcat

SEQ ID NO: 306850 - DNA, 120 bp, Artificial Sequence
  ENSG00000133858_53 (sequence is synthesized)
aacatcatatacgtaagtatagttcctcaaagtgactgacatttattttaattttgctttgtttttttttattttctcccccattcctttattttgtgttattcctgactcacttgacac

SEQ ID NO: 306851 - DNA, 120 bp, Artificial Sequence
  ENSG00000133858_54 (sequence is synthesized)
tctctgatgcctgagagattcctgtttgggatttaatatccagggctgtgtttacagtaaaaaaagcaggcagtcccttttagtttttcctttttaaatttttttgagattcttcatttc

SEQ ID NO: 306852 - DNA, 120 bp, Artificial Sequence
  ENSG00000133858_55 (sequence is synthesized)
aggatttaaaactatagcagtccatcttaaggaaagtgtaactgccatggccacaagtctgctagttgcacttgaatgctctatcagggttgtttattaccctttctacgttctggactc

SEQ ID NO: 306853 - DNA, 120 bp, Artificial Sequence
  ENSG00000133858_56 (sequence is synthesized)
cttgccgagactgtttaacttgaagattaaagaaactattgcaaatgccagtgcatcagaacctaagagtggtcaaatattatgtgcaatttttttgtaaagaaattttaatttataata

SEQ ID NO: 306854 - DNA, 120 bp, Artificial Sequence
  ENSG00000133858_57 (sequence is synthesized)
ttaacagtttaaagaacagttaatatttgaactgctttgtattgaaatactactttgtagtattgaaattgtttatatacttttttaatataagttaactttctaaaaactcttgctgtc

SEQ ID NO: 306855 - DNA, 120 bp, Artificial Sequence
  ENSG00000133858_58 (sequence is synthesized)
tgtctttattcacttttcacactggtgggaaagggttgaagtcggagatacggatattcaccataacttatagcaatacttttttatcttgaaactgctttcccattaaaaaaaaaaaaa

SEQ ID NO: 306856 - DNA, 120 bp, Artificial Sequence
  ENSG00000133858_59 (sequence is synthesized)
actactgattctagtcaaggtatcccttatcgggtaaaggagggttttactcctattcctggtttgaaattttcagcgtgaatggatgttgaagtttacaaaatctgttttcttcattat

SEQ ID NO: 306857 - DNA, 120 bp, Artificial Sequence
  ENSG00000133858_60 (sequence is synthesized)
tgggatgagcatctaatttattttaatttgttagtgtaatgaattatataatttatttctagtattaaaccacccttgtatgcttgcgtttaatacagtttatgatataccatttttaaa

SEQ ID NO: 306858 - DNA, 120 bp, Artificial Sequence
  ENSG00000133858_61 (sequence is synthesized)
gcaggtattattagccctatgacttgccgagctatacagcaagtaaaggtagactcaggaatgaaaacccagactcctggcttcttgtcagtgttctgcccatggctctcatcactagac

SEQ ID NO: 306859 - DNA, 120 bp, Artificial Sequence
  ENSG00000133858_62 (sequence is synthesized)
catatttcctaattcatatttggaaagtcactaataaaattaatggtaggaactgtaactcacaacatcatacattattataatttatacattcatatcttaaagaccattttggttttc

SEQ ID NO: 306860 - DNA, 120 bp, Artificial Sequence
  ENSG00000133858_63 (sequence is synthesized)
tttttttttttttttcctggacagattgctattcttaatttagatttgtttttagcatttactgaggtttaatgagagtgagtactcattgaatagcctctaaaagcaaaaagcgtagac

SEQ ID NO: 306861 - DNA, 120 bp, Artificial Sequence
  ENSG00000133858_64 (sequence is synthesized)
tggagagatattgcatactaggcctgcatttgctatttattactgaattacactgtgtttgttataattaacttgatgttaaagtcattgaagcacaattgaagagatgctaaggtttag

SEQ ID NO: 306862 - DNA, 120 bp, Artificial Sequence
  ENSG00000133858_65 (sequence is synthesized)
ctgaattacactgtgtttgttataattaacttgatgttaaagtcattgaagcacaattgaagagatgctaaggtttagtatatactagagaagaaaggtcaaaagaaggattctattgta

SEQ ID NO: 306863 - DNA, 120 bp, Artificial Sequence
  ENSG00000133858_66 (sequence is synthesized)
agagaacatttattaaatatttagcaacatactattgattacagaagagtgcctaggagtgcatggatggaagcagtgagccagttaagagcctactgtaataatctaatcaaggggtaa

SEQ ID NO: 306864 - DNA, 120 bp, Artificial Sequence
  ENSG00000133858_67 (sequence is synthesized)
tggtgagaagtcaagggaggaagacttccaagtttccagatgggtagatcttcatttactgagaagcagagtacaggaagtggggatgctgcacttaaaaggatgcttgttttgatgtcc

SEQ ID NO: 306865 - DNA, 120 bp, Artificial Sequence
  ENSG00000133858_68 (sequence is synthesized)
ttcctccttggaagtttagcctgttaactttcaggaagttttgtactcagattcccacagtcagtattctgccagtggtggtgtttcattttgttcaaagatatataaatttttcttttc

SEQ ID NO: 306866 - DNA, 120 bp, Artificial Sequence
  ENSG00000133858_69 (sequence is synthesized)
gtgcatcactgtggaaagatgtaatgctttttatcttttattttatctcgatgttttcctgtaaattttctgcatgtgccatatccattgatgtggtaatgctcaaactctagctaagtc

SEQ ID NO: 306867 - DNA, 120 bp, Artificial Sequence
  ENSG00000133858_70 (sequence is synthesized)
ttttggcagtgtacttcattgaaatgattgtaattatctgtaaattcttttgtactttctatgtagacattcatatcattgaataattactaattttgtttacttttagtctttatttat

SEQ ID NO: 306868 - DNA, 120 bp, Artificial Sequence
  ENSG00000133858_71 (sequence is synthesized)
ttatttattttttgcctgacattctggcctctataatagaatgttatacataagtgataatagtggacacctttgtttcctaatttaaagaaaatggttttgacatttaccattaaatat

SEQ ID NO: 306869 - DNA, 120 bp, Artificial Sequence
  ENSG00000133858_72 (sequence is synthesized)
cttgaaatggtggtgtgtcacctgttgtagtctgatttcttctttcttttaaaggtgttagtgctaggtatttttgactagtaattatgaggtgttttttttttgttgttgttgttgttt

SEQ ID NO: 306870 - DNA, 120 bp, Artificial Sequence
  ENSG00000133863_0 (sequence is synthesized)
ctgtgcgcacctcgctggggggtgctgctgtgttcctgaggcttccagggaaggcagtgggcgaaggtctgtaccgtgctaagattgagtctgaggaactgactgagcaaagaagacagc

SEQ ID NO: 306871 - DNA, 120 bp, Artificial Sequence
  ENSG00000133863_1 (sequence is synthesized)
tcaagatgttcccttatcagttttcatgtatggactgagtactgattataactgtgtaatgctggatgccattgaagagtggccaacaaaatggaaatgaaagaaactgctaaacaggat

SEQ ID NO: 306872 - DNA, 120 bp, Artificial Sequence
  ENSG00000133863_2 (sequence is synthesized)
acactgtggcaaatgagctcaactagcaaacccgtgttgaatactcgtgaagtcaatcctttgaagaaattcaccattcctaagatcaggaggacagctgagaaagtttacttgtcacct

SEQ ID NO: 306873 - DNA, 120 bp, Artificial Sequence
  ENSG00000133863_3 (sequence is synthesized)
tgttacaccaatagtagagagtatagttttatacatgatactcttaaccagtgcaggcttgatgtaaactgtgatctgcagtcgttatggcagtttggggatacaaaactggttcacaat

SEQ ID NO: 306874 - DNA, 120 bp, Artificial Sequence
  ENSG00000133863_4 (sequence is synthesized)
gaggaactggaaaaaaattttactgctaagaggtcagagatgcgtgaaagtggaagacattgcagggaacttgaagaacagttctgctttttagcacttccccagagtgatgtagcccag

SEQ ID NO: 306875 - DNA, 120 bp, Artificial Sequence
  ENSG00000133863_5 (sequence is synthesized)
atatatcagaatggaataagtaccagagcatctacattgaagatactaggaaatcctcttcttggaatttatatgtttagacatgttgatattgccttgaattattctcatagtcaaagc

SEQ ID NO: 306876 - DNA, 120 bp, Artificial Sequence
  ENSG00000133863_6 (sequence is synthesized)
attactgtagaaagtattttaatttttaaggttctctttggaaaagtgaagaaaatccaaccttctgtggataaaaataaagtttctttggatccttctcctaactttgattgccatatg

SEQ ID NO: 306877 - DNA, 120 bp, Artificial Sequence
  ENSG00000133863_7 (sequence is synthesized)
tcaagaaatgcaccttctttgaaagataccattgaactgcaagcctacagttcagcagtgtacttctatgaatacagtgtcctttcaaagcctgtagataaacctaggcaatgtcttcca

SEQ ID NO: 306878 - DNA, 120 bp, Artificial Sequence
  ENSG00000133863_8 (sequence is synthesized)
tatgctgtagtaacagtaaaatttcttggttcaaaagtagataatggacgccttatgacatctttgagattcctctcaacaggatttcctaagagagctgaaaggacatgctctctgaat

SEQ ID NO: 306879 - DNA, 120 bp, Artificial Sequence
  ENSG00000133863_9 (sequence is synthesized)
aactgtacagtggccaaaagatttggaaaaggaaaagatgctactgtcacctttgtgcatttcaagaaacctgtagatccatttgttcaagaaaactgtttatgcaatgcactaaattca

SEQ ID NO: 306880 - DNA, 120 bp, Artificial Sequence
  ENSG00000133863_10 (sequence is synthesized)
gagataaatcctttcatctcaaatatttctaactcctatggaaatgtacaaaatggaaacatttctatacctgaaacatacagtggacagacagagcacagtttagcagaaattagagac

SEQ ID NO: 306881 - DNA, 120 bp, Artificial Sequence
  ENSG00000133863_11 (sequence is synthesized)
acttctcaagtacttgcacatgattcagacatttcacttatgcccagtgatgccaaagacagtgttaatggtgaccttttgttaaattggacaagtcttaaaaatattttaagtggtctt

SEQ ID NO: 306882 - DNA, 120 bp, Artificial Sequence
  ENSG00000133863_12 (sequence is synthesized)
aatgcttcttttcctcttcacaacaatactggctcaagcacagtcactacttcaaaatccatcaaagacccaagactgatgaggagagaagaaagtatgggagaacagagtagtactgca

SEQ ID NO: 306883 - DNA, 120 bp, Artificial Sequence
  ENSG00000133863_13 (sequence is synthesized)
ggcttaaatgaggttttgcaatttgagaagagttcagataatgttaattcagaaataaaatcgacaccatctaattctgcctcctcctcagaagttgtccctggtgattgtgctgttctt

SEQ ID NO: 306884 - DNA, 120 bp, Artificial Sequence
  ENSG00000133863_14 (sequence is synthesized)
actaatggtttggataccccttgctttaaaacttctgttaatgattcacaatcttgggctcacaacatgggctctgaggactatgactgtatacctcccaataaagttaccatggcaggg

SEQ ID NO: 306885 - DNA, 120 bp, Artificial Sequence
  ENSG00000133863_15 (sequence is synthesized)
caatgtaaggaccaaggtaatttttccttcccaatttctgtgtcaaatgtagtgtcagaggttgagaaccaaaaccacagtgaggagaaggctcagagagcccaacaggagtccggtaat

SEQ ID NO: 306886 - DNA, 120 bp, Artificial Sequence
  ENSG00000133863_16 (sequence is synthesized)
gcttatacaaaagagtacagtagtcacatttttcaggactcgcagtcttctgatttaaaaacaatttatcagactggttgccaaacgtctacagtttttccactcaaaaagaaagtaagc

SEQ ID NO: 306887 - DNA, 120 bp, Artificial Sequence
  ENSG00000133863_17 (sequence is synthesized)
attgatgaataccttcaaaatactggaaagatgaaaaacttcgctgacctggaagacagttccaaacatgaagaaaagcaaacttcatggaaagaaattgataatgatttcactaatgaa

SEQ ID NO: 306888 - DNA, 120 bp, Artificial Sequence
  ENSG00000133863_18 (sequence is synthesized)
acaaaaatcagtccaatagataattacattgttttgcaccaagaatacaaagagagtgagagtcataattcttttgggaaaagctgtgataaaatattaattactcaagagttagaaata

SEQ ID NO: 306889 - DNA, 120 bp, Artificial Sequence
  ENSG00000133863_19 (sequence is synthesized)
acaaaatcttctacatctaccataaaggataaggatgaactagatcatctagcattggaatggcaaattactccaagttttgagagcctgtcacaaaagcatcctcagcactctgtggag

SEQ ID NO: 306890 - DNA, 120 bp, Artificial Sequence
  ENSG00000133863_20 (sequence is synthesized)
tatgagggtaacattcatacaagtttagccattgctcaaaagctaatggaactgaaattggggaaaataaatcaaaattatgctagcattataactgaagctttcccgaaaccaaaagac

SEQ ID NO: 306891 - DNA, 120 bp, Artificial Sequence
  ENSG00000133863_21 (sequence is synthesized)
ataccccaggccaaagaaatgttcattgatacagttatttcatcttataacatagaaacagctcatgacagttcaaattgcagcataactagagaacatatatgtgtccataggaaaaat

SEQ ID NO: 306892 - DNA, 120 bp, Artificial Sequence
  ENSG00000133863_22 (sequence is synthesized)
gaaaatgaaccagtgtcattagagaacattcagagagactataaagaaactgcttatgttgaagataggggtcaggatcacaatctgttctgtaattcacagttaagcaatgatatatgg

SEQ ID NO: 306893 - DNA, 120 bp, Artificial Sequence
  ENSG00000133863_23 (sequence is synthesized)
ctgaatgttaatttcaaaaaacaaacagatagagaaaaccaaaatgaggctaaagagaatagtgcttcatgtgtagaaaacaacatagagaacatatatggagacaaaaagcaggattct

SEQ ID NO: 306894 - DNA, 120 bp, Artificial Sequence
  ENSG00000133863_24 (sequence is synthesized)
catacaaacgaaaatttcagcaatatagatgaaaaggaggacaaaaattaccacaatatagaaattttgagttctgaagaattttctactaaatttaacttgatttgcagagaagataat

SEQ ID NO: 306895 - DNA, 120 bp, Artificial Sequence
  ENSG00000133863_25 (sequence is synthesized)
gcagtgtcagcagcaactgcattattagagagtgaagaagataccattagtgccgtgaaacaaaaagatactgaaaatactggaagaagtgtagagcatttggcttccacgacatttccc

SEQ ID NO: 306896 - DNA, 120 bp, Artificial Sequence
  ENSG00000133863_26 (sequence is synthesized)
aaaactgcaagttcttcagtgtgtgtagcctcaaatgctgcaatacagatagctagtgctactatgcctgcattaagcctaaataatgacgatcaccagatataccagtttaaagaaact

SEQ ID NO: 306897 - DNA, 120 bp, Artificial Sequence
  ENSG00000133863_27 (sequence is synthesized)
tgttcttctgaaagtccagattttggtttgttagtaaaacatagggtttctgattgtgaaattgatacggataaaaataaatcacaagaatcatttcatcaatcaataaatgagaactta

SEQ ID NO: 306898 - DNA, 120 bp, Artificial Sequence
  ENSG00000133863_28 (sequence is synthesized)
gttcttcagagcattgaattggaaagtgaaattgaaatagaattagaagattgtgatgatgcttttatatttcaacaagatacacatagccatgaaaacatgctttgtgaagaatttgtg

SEQ ID NO: 306899 - DNA, 120 bp, Artificial Sequence
  ENSG00000133863_29 (sequence is synthesized)
acctcatataaggctctgaagtctcgtatcagttgggaaggtctgttagcacttgataacggggagatggaagttttggaaagcaccacaggaagggagaatagtgatcagcattattct

SEQ ID NO: 306900 - DNA, 120 bp, Artificial Sequence
  ENSG00000133863_30 (sequence is synthesized)
aaggaaagtaactatttttattcctctacacaaaacaatgaaacagaacttaccagcccaattttacttccagatctacaaattaaaattactaatatatttaggccaggattcagcccg

SEQ ID NO: 306901 - DNA, 120 bp, Artificial Sequence
  ENSG00000133863_31 (sequence is synthesized)
acagctgactcccttgcattgaaagatagtttttgcacacatgtaactgaagccacaaaaccggaaataaataaggaagatggagaaattctaggatttgacatttattcccagcctttt

SEQ ID NO: 306902 - DNA, 120 bp, Artificial Sequence
  ENSG00000133863_32 (sequence is synthesized)
ggtgaaaatgcagattatccatgtgaagataaagttgataatataaggcaagaatcagggccagtgagtaactctgaaatctccctttcttttgacttgagtcgtaatacagatgtgaat

SEQ ID NO: 306903 - DNA, 120 bp, Artificial Sequence
  ENSG00000133863_33 (sequence is synthesized)
catacgtctgaaaatcagaacagtgaatctttgtttactgaaccttctaatgtcacaacaatagatgatggaagcagatgtttctttacaaaatcaaaaactgactataatgataccaaa

SEQ ID NO: 306904 - DNA, 120 bp, Artificial Sequence
  ENSG00000133863_34 (sequence is synthesized)
aataaaaaggaggtagaatcaagaattagcaaaaggaagctacatatatcttccagggatcagaacataccacataaagatttaagacgacataaaatttatgggagaaagaggaggcta

SEQ ID NO: 306905 - DNA, 120 bp, Artificial Sequence
  ENSG00000133863_35 (sequence is synthesized)
accagtcaagactcatctgagtgtttctcttcattatcccaaggacgaattaaaacattttcacagtcagaaaagcacattaagagtgtcctaaatatcctaagtgatgaagcatcttta

SEQ ID NO: 306906 - DNA, 120 bp, Artificial Sequence
  ENSG00000133863_36 (sequence is synthesized)
tgtaaaagcaaatgtctttccagaaaactagacaaagcagttgttcacttaaaaaaagctcatagaagagttcacacatctttgcagcttataactaaagtaggagaagaaagaaagggc

SEQ ID NO: 306907 - DNA, 120 bp, Artificial Sequence
  ENSG00000133863_37 (sequence is synthesized)
ccattaccaaaatcatatgcaataatatgcaataatttctgggaaagttgtgaccttcaaggttatagttctgtgtctcaaagaaaatattattctactaagcatttttcgtcaaaaaga

SEQ ID NO: 306908 - DNA, 120 bp, Artificial Sequence
  ENSG00000133863_38 (sequence is synthesized)
aaatatgacaaacggagaaagaaaagagctccaaaagctgatatttctaaatcattaacccatgtgtcaaagcacaagtcttataaaacaagtggagagaaaaaatgcctttctaggaaa

SEQ ID NO: 306909 - DNA, 120 bp, Artificial Sequence
  ENSG00000133863_39 (sequence is synthesized)
agtatggctagcagtgtctcaaaaagtcaccccaccaccagtcacatgggagaattttgtaatcaagaacatcctgaatcacagttgcctgtatcctccacatcccaaagtacaagtcag

SEQ ID NO: 306910 - DNA, 120 bp, Artificial Sequence
  ENSG00000133863_40 (sequence is synthesized)
tcagtttattataatagcagtgtaagcaatccaagtttatcagaagaacatcagcccttttctggaaaaactgcatatctgttttccccagaccactcagatgagaaactaatagaaaaa

SEQ ID NO: 306911 - DNA, 120 bp, Artificial Sequence
  ENSG00000133863_41 (sequence is synthesized)
caactaaagaaaacagttgtgacgctaatgaagtaataaatgaaagtaattctgtatctttaagttgcataaaagaaaacataaattctagtacaggcaacgattgtgatgcaacttgca

SEQ ID NO: 306912 - DNA, 120 bp, Artificial Sequence
  ENSG00000133863_42 (sequence is synthesized)
taggtcacacaaaggcgaaaactgacgtacttatatcagtcttagattcaaatgtgaagcactttttaaatgatctctaccaacaaggtaaccttattttatctgattgtaaaagaaacc

SEQ ID NO: 306913 - DNA, 120 bp, Artificial Sequence
  ENSG00000133863_43 (sequence is synthesized)
tggaagtaaagtggacagatcctattgagagacccaaacaaaacattattacaggaaacttccttatgggcccattaaacctaactttgatagcaagtaaaaagtacagtattcctcagt

SEQ ID NO: 306914 - DNA, 120 bp, Artificial Sequence
  ENSG00000133863_44 (sequence is synthesized)
tatcagccgctgcagtgacagatagtgagggagaatcttcaaaatcttacttggataagcagagaattcttactgtagattcttttgcagcatccagtactgtaccacactgtgagcaga

SEQ ID NO: 306915 - DNA, 120 bp, Artificial Sequence
  ENSG00000133863_45 (sequence is synthesized)
gctgtagagaaaaagagcttctaaagacagaacagtgctcttcaggtaattgcctccatacagatgggaatgaaacaaatgtcactgagaattatgagttggatgtagcatcaggaactg

SEQ ID NO: 306916 - DNA, 120 bp, Artificial Sequence
  ENSG00000133863_46 (sequence is synthesized)
aagaagataaaagttatggggaaaatatagtggaattatcttccagtgatagttctctgcttttaaaagataatgtaaaaggctcctcttcagaaacatgtattgtgaagaaagacactg

SEQ ID NO: 306917 - DNA, 120 bp, Artificial Sequence
  ENSG00000133863_47 (sequence is synthesized)
aggacagaataacgtggaaagttaaacaagcggaaaaagcaaaagattctgtttacaaaagaagcatgactgaaggatcaactgttaatactgagtacaaaaatcaaaagaatcagatct

SEQ ID NO: 306918 - DNA, 120 bp, Artificial Sequence
  ENSG00000133863_48 (sequence is synthesized)
cagaagaatcctgcttaaatgagaaaattattacaactaacttgattgattcccatctgagcactaaaaatactaccactgagtcagtccctttgaagaacacagtttctaatccgctta

SEQ ID NO: 306919 - DNA, 120 bp, Artificial Sequence
  ENSG00000133863_49 (sequence is synthesized)
acaaaagagagaagaagggggaaattaaagttagtaaagactcgcagtctgacttgacattacattcagaaatagcctatatttccaaaccaggaattctaggagttaatcatacgccta

SEQ ID NO: 306920 - DNA, 120 bp, Artificial Sequence
  ENSG00000133863_50 (sequence is synthesized)
ttttacctgcccactctgaaacctgtaaagtccctactcttctgaagaaacctgcgtcatacgtgagtgattttaaagaaaaacattgctcagctaatcatacggcccttatagctaatc

SEQ ID NO: 306921 - DNA, 120 bp, Artificial Sequence
  ENSG00000133863_51 (sequence is synthesized)
tatctcaaattttgcagagggcagatgaagcatcatctttgcagattctacaggaagaaactaaggtttgtctaaatattctccctttatttgtggaagcttttgaaagaaagcaagaat

SEQ ID NO: 306922 - DNA, 120 bp, Artificial Sequence
  ENSG00000133863_52 (sequence is synthesized)
gttcagttgaacaaatcctgatttcaagagaactgttggtagaccaaaacctgtggaataattgcaaacacacattaaaaccatgtgctgttgacactttggtagaacttcaaatgatga

SEQ ID NO: 306923 - DNA, 120 bp, Artificial Sequence
  ENSG00000133863_53 (sequence is synthesized)
tggaaacaattcaattcattgaaaacaaaaaaaggcacttagaaggtgaaccaacattgcgaagcttgctttggtatgatgaaacactgtatgctgagcttcttggaaaaccacgtggat

SEQ ID NO: 306924 - DNA, 120 bp, Artificial Sequence
  ENSG00000133863_54 (sequence is synthesized)
ttcaacagcagtctaatttctatcctggtttccaaggaagattaaaatataatgcattctgtgagttacagacttaccatgatcaattagttgaattgcttgaagaaacaaaaagggaaa

SEQ ID NO: 306925 - DNA, 120 bp, Artificial Sequence
  ENSG00000133863_55 (sequence is synthesized)
agaattcatactatgtattcttaaagtacaaacgacaggttaatgaatgtgaagccataatggagcattgttccgattgctttgatttttctctttctgttccatttacctgtggagtta

SEQ ID NO: 306926 - DNA, 120 bp, Artificial Sequence
  ENSG00000133863_56 (sequence is synthesized)
actttggagatagtttagaagacctggaaatcttaagaaaaagtactttaaagttgatcaatgtatgtggggactctcctaaagttcattcgtatccaggaaaacaggaccatctgtgga

SEQ ID NO: 306927 - DNA, 120 bp, Artificial Sequence
  ENSG00000133863_57 (sequence is synthesized)
ttatcatagaaatgatctcctcaaaggttaattttattaagaacaacgaggcagtacgtgttaaaatatctctttatggtctggaacatatcttttttgatgctgcaaaaaatcttgttt

SEQ ID NO: 306928 - DNA, 120 bp, Artificial Sequence
  ENSG00000133863_58 (sequence is synthesized)
ggaaagagagaacacaatccttcagcaaaaaatactcacaaaagaaggacgaagaaaggctactcagagtgaataaatgtgccttttctaagttgcagaagatatatgatactttgtcta

SEQ ID NO: 306929 - DNA, 120 bp, Artificial Sequence
  ENSG00000133863_59 (sequence is synthesized)
aagatttaaacaatgaaccaatttcccctattgggcttgaggaggatactataattgcttccagaaagtcagatcatccaataaacgaagcaacaattagcatagaaaattctaaattta

SEQ ID NO: 306930 - DNA, 120 bp, Artificial Sequence
  ENSG00000133863_60 (sequence is synthesized)
acagtaatttgcttgcacacccagatatttgttgtattagtgagatattggatcaggctgaatttgcagaccttaaaaaattacaggatctcaccttgagatgtacagatcacttagaaa

SEQ ID NO: 306931 - DNA, 120 bp, Artificial Sequence
  ENSG00000133863_61 (sequence is synthesized)
ttttaaaaaaatactttcagatgctacaagataataacatggataatatttttatcacagaagaaaatgttttagacgtggtgataaaccacagccatgaggctatcattttaaagcctg

SEQ ID NO: 306932 - DNA, 120 bp, Artificial Sequence
  ENSG00000133863_62 (sequence is synthesized)
aagctattgaaatgtatattgaaatcgtcatggtctcagaaacaattcactttcttaaaaactcaatagcaaagaaactagacaaacagaggtttcgaggtatgctttggtttgatttgt

SEQ ID NO: 306933 - DNA, 120 bp, Artificial Sequence
  ENSG00000133863_63 (sequence is synthesized)
cacttcttcctgagctggttcagtgccaagaaaaaatggcttctttttcatttcttaaagataactcaacagatgtttgcctttggaaagtgatagagactgctgtttccgaacttaaga

SEQ ID NO: 306934 - DNA, 120 bp, Artificial Sequence
  ENSG00000133863_64 (sequence is synthesized)
aagatctggatattatctgcaaatataatgaagctgttaattgctcatatgctattcatttgctctcaagagaacttcaagaactttcagaaataaaaaagcttctgaagaagtccaagt

SEQ ID NO: 306935 - DNA, 120 bp, Artificial Sequence
  ENSG00000133863_65 (sequence is synthesized)
attttatttccacatatattgactttgtgccatatatagcatccataaattatggaagcactgtgacagagttagaatacaactacaatcaattttctacactgctgaagaatgtaatgt

SEQ ID NO: 306936 - DNA, 120 bp, Artificial Sequence
  ENSG00000133863_66 (sequence is synthesized)
ctgcccctaggaaagatttaggaaaaatggcccacattaggaaagtcatgaaaacgattgaacatatgaagatgatatgtactaaaaatgctgaactaaccatttcctttttcctatgcc

SEQ ID NO: 306937 - DNA, 120 bp, Artificial Sequence
  ENSG00000133863_67 (sequence is synthesized)
aaatgctgtataacagaaggaagattttacagctgaagagaaaagaaaaaatgaatattcatattgtaaaacctggggaaaataacaataaatttagtatttctacgatgttgcccccag

SEQ ID NO: 306938 - DNA, 120 bp, Artificial Sequence
  ENSG00000133863_68 (sequence is synthesized)
tatcagagtgcataaacaaaaacatctcaaattcctctaaaaaacgaccgagcactgtagacaaatgtgaagactctcaggaacaacagcaagatactactgtttccagttgtaaaaagc

SEQ ID NO: 306939 - DNA, 120 bp, Artificial Sequence
  ENSG00000133863_69 (sequence is synthesized)
taaaggtagacatgaaagatgtcacaaaaatcaacagagaaaaggcaacattcaagcatccaaggactacaggatctcatcccaaaagcgaaaacaaaatagtaccaagttcatgtgaca

SEQ ID NO: 306940 - DNA, 120 bp, Artificial Sequence
  ENSG00000133863_70 (sequence is synthesized)
gtctgaaaagaaatcatttaacgccaaaaaaggttgaaatgcaaagatcactacctggctcacttttacccttagagaacccaaaagacacttgcgcatcaaagtcggaaagcaaaatag

SEQ ID NO: 306941 - DNA, 120 bp, Artificial Sequence
  ENSG00000133863_71 (sequence is synthesized)
acttaactgtttcatctgatcacttcagtggacaacaggaaaatttaaatagcatgaagaaaagaaatgtgaacttcagtgctgctgaaacaaaaagtgataagaaagattgtgctgctt

SEQ ID NO: 306942 - DNA, 120 bp, Artificial Sequence
  ENSG00000133863_72 (sequence is synthesized)
ttgcaatttgtgaccaaaaaagtgtacatggcacattttcaccagaccatgggacgcttttgcagaaatttcttaaaaattccccagatcccacccaaaaatcctgcctttctgatataa

SEQ ID NO: 306943 - DNA, 120 bp, Artificial Sequence
  ENSG00000133863_73 (sequence is synthesized)
acccagaaactgatgtttctcttgtgcctgatgcgtcggtgctctcaaagccaattttctgttttgtgaaagatgtccatcctgatctagaaatgaatgacacagtctttgaacttcaag

SEQ ID NO: 306944 - DNA, 120 bp, Artificial Sequence
  ENSG00000133863_74 (sequence is synthesized)
ataatgatatagtaaattcatctattaaaaattcctcatgcatgacttctccagaacccatctgtatccagaacaaaattcctactctgcagataaacaaactacagcctacagaaactg

SEQ ID NO: 306945 - DNA, 120 bp, Artificial Sequence
  ENSG00000133863_75 (sequence is synthesized)
agtcagaggacaaatacatgaaggatacattgaatcccaatactgtgcatacttttggagcatctgggcatataacccttaatgtgaatcaaggagcagagtactctctttctgaacaac

SEQ ID NO: 306946 - DNA, 120 bp, Artificial Sequence
  ENSG00000133863_76 (sequence is synthesized)
agaatgacaaaaattcaaaagtcctaatgcagaatgctgccacatattggaatgaacttccacagtctgcatgtaacccaacatataattcttctgagcatttatttggaacttcatatc

SEQ ID NO: 306947 - DNA, 120 bp, Artificial Sequence
  ENSG00000133863_77 (sequence is synthesized)
catactctgcttggtgtgtttatcagtacagcaacagcaatggcaatgccattacccagacataccaagggataacatcatatgaagtacagccatctccttctgggctgttgaccacag

SEQ ID NO: 306948 - DNA, 120 bp, Artificial Sequence
  ENSG00000133863_78 (sequence is synthesized)
ttgcaagtactgcccagggcacacattctaatcttctgtactctcaatattttacttattttgcgggggagccacaagcaaatggctttgtgccagtgaatgggtattttcaatctcaaa

SEQ ID NO: 306949 - DNA, 120 bp, Artificial Sequence
  ENSG00000133863_79 (sequence is synthesized)
tacctgcttctaattttcggcagccaattttttcacaatatgcttctcatcagccattaccacaagctacatacccttaccttcctaatcgatttgtgcctccagaagttccttgggttt

SEQ ID NO: 306950 - DNA, 120 bp, Artificial Sequence
  ENSG00000133863_80 (sequence is synthesized)
atgctccatggcaccaagaatcctttcatccaggacactgaaaatagtcttctgtctattgaaataagacataacaagtttttccaaatattttttacttatatattttttaacatttag

SEQ ID NO: 306951 - DNA, 120 bp, Artificial Sequence
  ENSG00000133863_81 (sequence is synthesized)
cgatttttaatgtttgtaaatgtggtaggaaatataaatcatatggtcctttgtaaaatatacaaataatctaacacatatcatataggacatcaatttctaacatctgatataccagaa

SEQ ID NO: 306952 - DNA, 120 bp, Artificial Sequence
  ENSG00000133863_82 (sequence is synthesized)
ttatttccatgcaattataaggggagggtaatatgatcaaagttaagcaatagtggtaaaatctttaaaactagattcttgcttctgatatgtttcaatacattgttgatggcattgtgc

SEQ ID NO: 306953 - DNA, 120 bp, Artificial Sequence
  ENSG00000133863_83 (sequence is synthesized)
caaatttcttcaatttcagtattttatagtttctacttgtaaaatatttttaataagaaaaattggtttgcataatctcagtgtttccttgagtagagatgttttaaatgtttatgttgg

SEQ ID NO: 306954 - DNA, 120 bp, Artificial Sequence
  ENSG00000133863_84 (sequence is synthesized)
aagcaattgtagttaattatattggcaatgaagcactttcaatgcctttttctacaagagccatttccagaagattattttgtttttggatttcacaatttaaatagttattttaatgat

SEQ ID NO: 306955 - DNA, 120 bp, Artificial Sequence
  ENSG00000133863_85 (sequence is synthesized)
tttctagcaaataatagagaataatgtttatgcttatgcagttagtctttattacagtaatttaaacaatgtggcacaaacatagttttttcatgctcttgtcatagacttttcttttta

SEQ ID NO: 306956 - DNA, 120 bp, Artificial Sequence
  ENSG00000133863_86 (sequence is synthesized)
accttctgcaaaagtaaaaactctcttagtaataatcatcatagggcaacaggatatagtatgtaactgcagtcttgagctgtctcttttcatgtattacctttcttgctcaacagctat

SEQ ID NO: 306957 - DNA, 120 bp, Artificial Sequence
  ENSG00000133863_87 (sequence is synthesized)
tcctgttttctgtaagatcctagtcagacagagccctcacaactggatagacctttctcaagggttagccctaaaatgtgacaagagaattggtttggctgaatcacaacaaataactag

SEQ ID NO: 306958 - DNA, 120 bp, Artificial Sequence
  ENSG00000133863_88 (sequence is synthesized)
caaagcttcagtgcttttgcaaactttttatgtaagcaaactttttgtgttatctggcacaggcctttgaaaagactataattctactttgtttaatgtagagtaactaatttttcaatt

SEQ ID NO: 306959 - DNA, 120 bp, Artificial Sequence
  ENSG00000133863_89 (sequence is synthesized)
tagaaagacagtgagaatccccaggataagcctctttatactcacttaaaccaactgggatggaattcagaatacctaagctgcttctttaacatagagatctttaaaaagggaaggtca

SEQ ID NO: 306960 - DNA, 120 bp, Artificial Sequence
  ENSG00000133863_90 (sequence is synthesized)
agcaaagaactgtaaccgaaagaagtaagagatttgaaaagacgatagagttaaaacaatatttaaaaaacatttctatttggtccatgcagttttatttgaaaatagtctgtcaaaatc

SEQ ID NO: 306961 - DNA, 120 bp, Artificial Sequence
  ENSG00000133863_91 (sequence is synthesized)
agaactcctgaacaactttgaaagcagtaatattaactggtattcaaaaatgaataacagccaaaaatgaataacagccatttgatttatgtttccctcagtcatttggtttatgtttgg

SEQ ID NO: 306962 - DNA, 120 bp, Artificial Sequence
  ENSG00000133863_92 (sequence is synthesized)
ttatggcaagatgttacagcatttatagttaatactactactaatatgtaaaccaaaagttaaatattctagttaaggattgtttctttaaacaactttcagattctgttgacattgtct

SEQ ID NO: 306963 - DNA, 120 bp, Artificial Sequence
  ENSG00000133863_93 (sequence is synthesized)
ttgtggtatttttatttcatgggttttaatttctcttaaagacttacctaaatattcagttacatttttaaaaaatctgtacgtgacagaatattaaaacatggaatatttttgcttcaa

SEQ ID NO: 306964 - DNA, 79 bp, Artificial Sequence
  ENSG00000133863_94 (sequence is synthesized)
aaacagagagaggccacgtgagtcatgaaccgcaaatgactgatgtggataatcattgatgactttgaagattgctatt

SEQ ID NO: 306965 - DNA, 120 bp, Artificial Sequence
  ENSG00000133863_95 (sequence is synthesized)
ttctgcatccttcccactaagtacacctaaaaaccctggacatttttatgaaacaaatatgaaaagactttcgaaactggagagaagaccaaccaactagggaatgtgagactcagggaa

SEQ ID NO: 306966 - DNA, 120 bp, Artificial Sequence
  ENSG00000133863_96 (sequence is synthesized)
tggcatagcatttacttgtcaccttgttacaccaatagtagagagtatagttttatacatgatactcttaaccagtgcaggcttgatgtaaactgtgatctgcagtcgttatggcagttt

SEQ ID NO: 306967 - DNA, 120 bp, Artificial Sequence
  ENSG00000133872_0 (sequence is synthesized)
cgttccttcgccgccgccaggggtagcggtgtagctgcgcagcgtcgcgcgcgctaccgcacccaggttcggcccgtaggcgtctggcagcccggcgccatcttcatcgagcgccatggc

SEQ ID NO: 306968 - DNA, 120 bp, Artificial Sequence
  ENSG00000133872_1 (sequence is synthesized)
cgcagcctgcgggccgggagcggccgggtactgcttgctcctcggcttgcatttgtttctgctgaccgcgggccctgccctgggctggaacgaccctgacagaatgttgctgcgggatgt

SEQ ID NO: 306969 - DNA, 120 bp, Artificial Sequence
  ENSG00000133872_2 (sequence is synthesized)
aaaagctcttaccctccactatgaccgctataccacctcccgcaggctggatcccatcccacagttgaaatgtgttggaggcacagctggttgtgattcttataccccaaaagtcataca

SEQ ID NO: 306970 - DNA, 120 bp, Artificial Sequence
  ENSG00000133872_3 (sequence is synthesized)
gtgtcagaacaaaggctgggatgggtatgatgtacagtgggaatgtaagacggacttagatattgcatacaaatttggaaaaactgtggtgagctgtgaaggctatgagtcctctgaaga

SEQ ID NO: 306971 - DNA, 120 bp, Artificial Sequence
  ENSG00000133872_4 (sequence is synthesized)
ccagtatgtactaagaggttcttgtggcttggagtataatttagattatacagaacttggcctgcagaaactgaaggagtctggaaagcagcacggctttgcctctttctctgattatta

SEQ ID NO: 306972 - DNA, 120 bp, Artificial Sequence
  ENSG00000133872_5 (sequence is synthesized)
ttataagtggtcctcggcggattcctgtaacatgagtggattgattaccattgtggtactccttgggatcgcgtttgtagtctataagctgttcctgagtgacgggcagtattctcctcc

SEQ ID NO: 306973 - DNA, 120 bp, Artificial Sequence
  ENSG00000133872_6 (sequence is synthesized)
accgtactctgagtatcctccattttcccaccgttaccagagattcaccaactcagcaggacctcctcccccaggctttaagtctgagttcacaggaccacagaatactggccatggtgc

SEQ ID NO: 306974 - DNA, 120 bp, Artificial Sequence
  ENSG00000133872_7 (sequence is synthesized)
aacttctggttttggcagtgcttttacaggacaacaaggatatgaaaattcaggaccagggttctggacaggcttgggaactggtggaatactaggatatttgtttggcagcaatagagc

SEQ ID NO: 306975 - DNA, 120 bp, Artificial Sequence
  ENSG00000133872_8 (sequence is synthesized)
agctattcggtatgttcaaactcagacacgaaaaccagaactgcatcaggatatggtggtaccaggagacgataaagtagaaagttggagtcaaacactggatgcagaaattttggattt

SEQ ID NO: 306976 - DNA, 120 bp, Artificial Sequence
  ENSG00000133872_9 (sequence is synthesized)
ttcatcactttctctttagaaaaaaagtactacctgttaacaattgggaaaaggggatattcaaaagttctgtggtgttatgtccagtgtagctttttgtattctattatttgaggctaa

SEQ ID NO: 306977 - DNA, 120 bp, Artificial Sequence
  ENSG00000133872_10 (sequence is synthesized)
aagttgatgtgtgacaaaatacttatgtgttgtatgtcagtgtaacatgcagatgtatattgcagtttttgaaagtgatcattactgtggaatgctaaaaatacattaatttctaaaacc

SEQ ID NO: 306978 - DNA, 120 bp, Artificial Sequence
  ENSG00000133872_11 (sequence is synthesized)
tgtgatgccctaagaagcattaagaatgaaggtgttgtactaatagaaactaagtacagaaaatttcagttttaggtggttgtagctgatgagttattacctcatagagactataatatt

SEQ ID NO: 306979 - DNA, 120 bp, Artificial Sequence
  ENSG00000133872_12 (sequence is synthesized)
ctatttggtattatattatttgatgtttgctgttcttcaaacatttaaatcaagctttggactaattatgctaatttgtgagttctgatcacttttgagctctgaagctttgaatcattc

SEQ ID NO: 306980 - DNA, 120 bp, Artificial Sequence
  ENSG00000133872_13 (sequence is synthesized)
agtggtggagatggccttctggtaactgaatattaccttctgtaggaaaaggtagaaaataagcatctagaaggttgttgtgaatgactctgtgctggcaaaaatgcttgaaacctctat

SEQ ID NO: 306981 - DNA, 120 bp, Artificial Sequence
  ENSG00000133872_14 (sequence is synthesized)
atttctttcgttcataagaggtaaaggtcaaatttttcaacaaaagtcttttaataacaaaagcatgcagttctctgtgaaatctcaaatattgttgtaatagtctgtttcaatcttaaa

SEQ ID NO: 306982 - DNA, 120 bp, Artificial Sequence
  ENSG00000133872_15 (sequence is synthesized)
aagaatcaataaaaacaaacaaggggtttagtctcattctttctattagcctaggcgcaaataaatgttactttttgtttttttaaaccctttttcccaaaggggaaagttcatgcagaa

SEQ ID NO: 306983 - DNA, 120 bp, Artificial Sequence
  ENSG00000133872_16 (sequence is synthesized)
cacaccgcctcgccccgccccaagccgcgctgtgctccaggggcgggggcccacggcggccactcactgagccccacgggccgcagcggcagtgacgtagggttggcgcacggatccgtt

SEQ ID NO: 306984 - DNA, 120 bp, Artificial Sequence
  ENSG00000133872_17 (sequence is synthesized)
gtaaagtacagaaatagtttgggaactttagaagatgattatctgtttagcaaccatggttttatttggtgtacctaccaaaaatattaatagcacagttaactgagatcccacttttaa

SEQ ID NO: 306985 - DNA, 120 bp, Artificial Sequence
  ENSG00000133872_18 (sequence is synthesized)
acattctttaaaaatcaaacagggatttgatttaggcttagctctaccatagaccaaggttttaacttgaaccttactgggtgctagcttccccatatatttaattctgtgatctctaga

SEQ ID NO: 306986 - DNA, 120 bp, Artificial Sequence
  ENSG00000133872_19 (sequence is synthesized)
acttgttaataacttgatgcctgagtattattaataattcagtacagatgaaataattgaaatgttacattatctttgcttttgtagactgtcatgtttaagtgaggatacataataaat

SEQ ID NO: 306987 - DNA, 120 bp, Artificial Sequence
  ENSG00000133872_20 (sequence is synthesized)
agtctctgagtcacccttagcggacagggctgcagacctcgcaggtctgttagcagaatcgcagattgcactcttttttttttttttgagtcggagtctcacattgtcgccccggccgca

SEQ ID NO: 306988 - DNA, 120 bp, Artificial Sequence
  ENSG00000133872_21 (sequence is synthesized)
acattattcagtcttttgagggtgcacctacggaaatctcagatcagcctaaaatatgtaagtaaatcaatcactcttcctgtggaagaaatggcctccaaaagaaatgaactgatttta

SEQ ID NO: 306989 - DNA, 120 bp, Artificial Sequence
  ENSG00000133874_0 (sequence is synthesized)
gtcagtttcggaaccccagccagctcacctctgcgccgctgaacccgatccgagcctccggcaaaggtttttccctcctcccccggccgagggcttctgcagcccgggcacccccgcccc

SEQ ID NO: 306990 - DNA, 120 bp, Artificial Sequence
  ENSG00000133874_1 (sequence is synthesized)
gcggcgccccacattcccccagcccggggcccttggcgcgtgcgctccgtgcggctgtgctccgcgggactttgtttgtttcctcctcgtccctctttgttgggctgaacaccagcctcg

SEQ ID NO: 306991 - DNA, 120 bp, Artificial Sequence
  ENSG00000133874_2 (sequence is synthesized)
tcaaagccccccactccggagggagttcggcttctccagcagggcggctgcagcgcgctgccccgaccccgcctgcggcccctcacgccgctagtgctcccaccccgccctcctggcacc

SEQ ID NO: 306992 - DNA, 120 bp, Artificial Sequence
  ENSG00000133874_3 (sequence is synthesized)
ccgcctgcgtccgttcgcccgaggaagccaaccgcgacttcattgatgcacccattccagtggtgtaacgggtgtttctgtggcctgggactggttagcaccaacaagtcctgctcgatg

SEQ ID NO: 306993 - DNA, 120 bp, Artificial Sequence
  ENSG00000133874_4 (sequence is synthesized)
ccacccatcagtttccaggaccttccgctcaacatctatatggtcatcttcggcacaggcatctttgtcttcatgctcagccttatcttctgctgctattttatcagcaaactgcggaac

SEQ ID NO: 306994 - DNA, 120 bp, Artificial Sequence
  ENSG00000133874_5 (sequence is synthesized)
caggcacagagtgagcgatacggatataaggaggtggtgcttaaaggtgatgccaagaagttacaattatatgggcagacctgcgcagtctgtctggaagacttcaaggggaaggatgag

SEQ ID NO: 306995 - DNA, 120 bp, Artificial Sequence
  ENSG00000133874_6 (sequence is synthesized)
ttaggcgtgctcccgtgccaacacgcctttcaccgcaagtgtctggtgaaatggctggaagttcgctgtgtctgccccatgtgtaacaagcccattgctagtccctcagaggccacgcag

SEQ ID NO: 306996 - DNA, 120 bp, Artificial Sequence
  ENSG00000133874_7 (sequence is synthesized)
ctcatggatgtctggtccctctgcacagctccaaccaacaggactgtagggtgatgacgatcactttcccagtgatgagaagggtggtctaggactgggcttctaccctcagtgcaagac

SEQ ID NO: 306997 - DNA, 120 bp, Artificial Sequence
  ENSG00000133874_8 (sequence is synthesized)
cagtgccagatgtgcccccacttcctgcctcctgaagccttcttccctgctactccatgctggtggcctcacccatcaagaccactgtctcctggtactggactatctacctgccttgtc

SEQ ID NO: 306998 - DNA, 120 bp, Artificial Sequence
  ENSG00000133874_9 (sequence is synthesized)
cctgttctgggggaaggtgtccaccccgatcaagaacatggagaaagtcctctttcaaggctcccattaggaggatgagctgccttgacccagaagggatgagacgggctcttacctctc

SEQ ID NO: 306999 - DNA, 120 bp, Artificial Sequence
  ENSG00000133874_10 (sequence is synthesized)
tacaaccttccctccccttcccactccttccggagtaaggttagaagggaaggaaggaaagatcaaggaaccaagcgcctccacgggaggcgagggaggctctgtatgaaacagaagagc

SEQ ID NO: 307000 - DNA, 120 bp, Artificial Sequence
  ENSG00000133874_11 (sequence is synthesized)
agggacataaaggaaaatgtcagtgtttacatgggacctatggaaacaaaggctggcgggcgccagctgactccagagtaagagagggcccttcccctgccaggacccacggtgctatcc

SEQ ID NO: 307001 - DNA, 120 bp, Artificial Sequence
  ENSG00000133874_12 (sequence is synthesized)
attcagtctcttcctcagttaatctcggagcttcctattccatgttgaggtttgtgggcccctctagaggagggctagttctatacttaaattgattcccaggggccttttttttttttt

SEQ ID NO: 307002 - DNA, 120 bp, Artificial Sequence
  ENSG00000133874_13 (sequence is synthesized)
tttttttttttttgatcaaaaggggtgtggggatgggggtgtctacggttaagcaacagatacctccttccctttgtaaatagtatttttatacttcatcctcgcctctcaggctttaga

SEQ ID NO: 307003 - DNA, 120 bp, Artificial Sequence
  ENSG00000133874_14 (sequence is synthesized)
tacgaaatctccagaatggaagggggtggggattttctgttcctccctggagtgggtgagggtgggagaaagttacatatttaaagaaaaataaatttaataacaagtttctctaaccta

SEQ ID NO: 307004 - DNA, 120 bp, Artificial Sequence
  ENSG00000133878_0 (sequence is synthesized)
gtaattggtgcagctctgagaacacacgcatgcattccaggcggtgctgctggggctcggcggggccgtgtctggtctgcaaggcgcgcgggctcgtggggggttggctggggagcccac

SEQ ID NO: 307005 - DNA, 120 bp, Artificial Sequence
  ENSG00000133878_1 (sequence is synthesized)
gctgcctggcgactcgggccaccgaatgtgagaccgagtccctttatgtcaccagcgcacacgctgatttgaaccctgcttcgacgtgtgtgtcatggcttaaaaatagctgctaatctg

SEQ ID NO: 307006 - DNA, 120 bp, Artificial Sequence
  ENSG00000133878_2 (sequence is synthesized)
tcaacctgtcttgggcagaaacagcggcggcgacagcagcaggagcgtcatggccgtggcgctgtctgcgccggcgatccgcctttcggactgaggcccagcgcagcgcttgcaaagagc

SEQ ID NO: 307007 - DNA, 120 bp, Artificial Sequence
  ENSG00000133878_3 (sequence is synthesized)
agcagctacctggcaactgaacccatcatcaccacagccactcctgcagctgccacggtttctgccacctctaagatgtgccctggtaactggctttgggcttctatgacttttatggcc

SEQ ID NO: 307008 - DNA, 120 bp, Artificial Sequence
  ENSG00000133878_4 (sequence is synthesized)
cgcttctcccggagtagctcaaggtctcctgttcgaactcgagggaccctggaggagatgccaaccgttcaacatcctttcctcaatgtcttcgagttggagcggctcctctacacaggc

SEQ ID NO: 307009 - DNA, 120 bp, Artificial Sequence
  ENSG00000133878_5 (sequence is synthesized)
aagacagcctgtaaccatgccgacgaggtctggccaggcctctatctcggagaccaggacatggctaacaaccgccgggagcttcgccgcctgggcatcacgcacgtcctcaatgcctca

SEQ ID NO: 307010 - DNA, 120 bp, Artificial Sequence
  ENSG00000133878_6 (sequence is synthesized)
cacagccggtggcgaggcacgcccgaggcctatgaggggctgggcatccgctacctgggtgttgaggcccacgactcgccagcctttgacatgagcatccacttccagacggctgccgac

SEQ ID NO: 307011 - DNA, 120 bp, Artificial Sequence
  ENSG00000133878_7 (sequence is synthesized)
caccctggtactggcctacctcatgctgtaccaccaccttaccctcgtggaggccatcaagaaagtcaaagaccaccgaggcatcatccccaaccggggcttcctgaggcagctcctggc

SEQ ID NO: 307012 - DNA, 120 bp, Artificial Sequence
  ENSG00000133878_8 (sequence is synthesized)
cctggaccgcaggctgcggcagggtctggaagcatgaggggagggggagagaggtcaggccaggcccgtgggtaggtccctggctcccagctggagataggaggcccaggtggcaggtag

SEQ ID NO: 307013 - DNA, 120 bp, Artificial Sequence
  ENSG00000133878_9 (sequence is synthesized)
caggaggcccagatcacccatcctcccctggggtcaggagaggccgagccccaggccactgtcactctttgtgggaggggacggggagtgaggttgggcagtgtggtggatgggcaccca

SEQ ID NO: 307014 - DNA, 120 bp, Artificial Sequence
  ENSG00000133878_10 (sequence is synthesized)
ggaagggttgaccagggaaggaggcagctaggctgtagatggaagatggtcctgggattcgaacaccgctgggatctggccagggtgctccctgggattcacagtcccttcccctctttg

SEQ ID NO: 307015 - DNA, 120 bp, Artificial Sequence
  ENSG00000133878_11 (sequence is synthesized)
tgcccaagtgtttccctctctccctcaccaaaacaaaagggccatctctgccctgcacttgtgcagaaagtcagggatacggcaagcatgaatgcaatggtgtagagttgtgtgaaaccc

SEQ ID NO: 307016 - DNA, 120 bp, Artificial Sequence
  ENSG00000133878_12 (sequence is synthesized)
ctagcatagagacagacagcgaagagatggtgtgaaaagcttgcagaaccagacagagaaccccacagactttccactccaagcacaggaggaggtagctagcgtgtgagggttggcact

SEQ ID NO: 307017 - DNA, 120 bp, Artificial Sequence
  ENSG00000133878_13 (sequence is synthesized)
aggcccacggctgctgcttgggccaaaaacatacagaggtgcatggctggcagtcttgaaattgtcactcgcttactggatccaagcgtctcgaggataaataaagatcatgaaaaagaa

SEQ ID NO: 307018 - DNA, 120 bp, Artificial Sequence
  ENSG00000133878_14 (sequence is synthesized)
ccacccctgaaggctcctgccagagccaggcttaccttctctccctcgagaatcttctcccgaaggaccagcccagggaagggaagcagctgctctggactcactcaagtgtgtctcaca

SEQ ID NO: 307019 - DNA, 120 bp, Artificial Sequence
  ENSG00000133884_0 (sequence is synthesized)
ggggcttctcggcccgaggcagaggaacagggaagatggcggctgtggtggagaatgtagtgaagctccttggggagcagtactacaaagatgccatggagcagtgccacaattacaatg

SEQ ID NO: 307020 - DNA, 120 bp, Artificial Sequence
  ENSG00000133884_1 (sequence is synthesized)
ctcgcctctgtgctgagcgcagcgtgcgcctgcctttcttggactcacagaccggagtagcccagagcaattgttacatctggatggaaaagcgacaccggggtccaggattggcctccg

SEQ ID NO: 307021 - DNA, 120 bp, Artificial Sequence
  ENSG00000133884_2 (sequence is synthesized)
gacagctgtactcctaccctgcccggcgctggcggaaaaagcggcgagcccatccccctgaggatccacgactttccttcccatctattaagccagacacagaccagaccctgaagaagg

SEQ ID NO: 307022 - DNA, 120 bp, Artificial Sequence
  ENSG00000133884_3 (sequence is synthesized)
aggggctgatctctcaggatggcagtagtttagaggctctgttgcgcactgaccccctggagaagcgaggtgccccggatccccgagttgatgatgacagcctgggcgagtttcctgtga

SEQ ID NO: 307023 - DNA, 120 bp, Artificial Sequence
  ENSG00000133884_4 (sequence is synthesized)
ccaacagtcgagcgcgaaagcggatcctagaaccagatgacttcctggatgacctcgatgatgaagactatgaagaagatactcccaagcgtcggggaaaggggaaatccaagggtaagg

SEQ ID NO: 307024 - DNA, 120 bp, Artificial Sequence
  ENSG00000133884_5 (sequence is synthesized)
gtgtgggcagtgcccgtaagaagctggatgcttccatcctggaggaccgggataagccctatgcctgtgacatttgtggaaaacgttacaagaaccgaccaggcctcagttaccactatg

SEQ ID NO: 307025 - DNA, 120 bp, Artificial Sequence
  ENSG00000133884_6 (sequence is synthesized)
cccactcccacttggctgaggaggagggcgaggacaaggaagactctcaaccacccactcctgtttcccagaggtctgaggagcagaaatccaaaaagggtcctgatggattggccttgc

SEQ ID NO: 307026 - DNA, 120 bp, Artificial Sequence
  ENSG00000133884_7 (sequence is synthesized)
ccaacaactactgtgacttctgcctgggggactcaaagattaacaagaagacgggacaacccgaggagctggtgtcctgttctgactgtggccgctcagggcatccatcttgcctccaat

SEQ ID NO: 307027 - DNA, 120 bp, Artificial Sequence
  ENSG00000133884_8 (sequence is synthesized)
ttacccccgtgatgatggcggcagtgaagacataccgctggcagtgcatcgagtgcaaatgttgcaatatctgcggcacctccgagaatgacgaccagttgctcttctgtgatgactgcg

SEQ ID NO: 307028 - DNA, 120 bp, Artificial Sequence
  ENSG00000133884_9 (sequence is synthesized)
atcgtggctaccacatgtactgtctcaccccgtccatgtctgagccccctgaaggaagttggagctgccacctgtgtctggacctgttgaaagagaaagcttccatctaccagaaccaga

SEQ ID NO: 307029 - DNA, 120 bp, Artificial Sequence
  ENSG00000133884_10 (sequence is synthesized)
actcctcttgatgtggccacccacctgctccccgacatatctaaggctgtttctctcctccacttcatatttcatacccatctttcccttcttcctcctctccttcacaaatccagagaa

SEQ ID NO: 307030 - DNA, 120 bp, Artificial Sequence
  ENSG00000133884_11 (sequence is synthesized)
ccttggggtggttgtgccagcctgcctttggcagctgcaagctgaggtggcagctctgaccacctctggccccaggccctcagggagaaaggagcaacacactgcccctaggcgtgcgtg

SEQ ID NO: 307031 - DNA, 120 bp, Artificial Sequence
  ENSG00000133884_12 (sequence is synthesized)
tggcccagtttctctctgctctccattaagtgcattcactctgcttgccttgggcccagcccctggtgatcacagggttcaaacagtgtcctcctagaaagagtgggagagcagctcact

SEQ ID NO: 307032 - DNA, 120 bp, Artificial Sequence
  ENSG00000133884_13 (sequence is synthesized)
tctctgtgttctgcctcccctctggtctccagagttttcctgtcctctagaggcaagccaggccagggagctgggagcgagcaagctgaggccacgtccacaaggagcttttcatgcccc

SEQ ID NO: 307033 - DNA, 120 bp, Artificial Sequence
  ENSG00000133884_14 (sequence is synthesized)
tgtgccgcatagcctcacctctttcctccagagtggctctctgcggccctgtgttcctgctacagagtgttcttttctggagtcaggatgttctcggtcaccctcctggttctgccctgt

SEQ ID NO: 307034 - DNA, 120 bp, Artificial Sequence
  ENSG00000133884_15 (sequence is synthesized)
tttctcatcttctgcctcccttcctactccttttggttttgtggggagaggggaaggatcagggggccaggccagcagctcgggggccacaaggagatggataatgtgcctgttttttaa

SEQ ID NO: 307035 - DNA, 120 bp, Artificial Sequence
  ENSG00000133884_16 (sequence is synthesized)
cacaacaaaaaagcctacctccaaaatcccctttttgttcttcctggacctgggcattcagcctcctgctcttaactgaattgggagcctctgccacctgccccgtgtatcctggctctc

SEQ ID NO: 307036 - DNA, 120 bp, Artificial Sequence
  ENSG00000133884_17 (sequence is synthesized)
agctcatggggaagccacatagacatccctttcttcccttgcacgctcgctagcagctggtaaggtcttcacaccctgattcctcaagttttctgcttagtggcactgacattaagtagt

SEQ ID NO: 307037 - DNA, 120 bp, Artificial Sequence
  ENSG00000133884_18 (sequence is synthesized)
ggggggacagtccatgccaggacaccctggagtagccttcccccttggccgtgggcaggccctaactcactgtcgctttggagttgaggtgtcttttttttttctttctttagttcctgt

SEQ ID NO: 307038 - DNA, 120 bp, Artificial Sequence
  ENSG00000133884_19 (sequence is synthesized)
attctaaacattagtaaaaataaatgtttttacacagagccctctgctggatggtttatctcctgcctttctccattaagaaggccatttcatcctaagatttccatgatggtggttttt

SEQ ID NO: 307039 - DNA, 120 bp, Artificial Sequence
  ENSG00000133884_20 (sequence is synthesized)
ttttttaatgttttgaaatacagcttttttccccccaaattaaaatttttttgtggaaccccaatatgtaaagcgaatataaaattggttattttgttttgttacataaattcaagttta

SEQ ID NO: 307040 - DNA, 120 bp, Artificial Sequence
  ENSG00000133884_21 (sequence is synthesized)
taacaattctttgttataaagaacaatgaagctgttttgatcaatacaaaatttgggttaaaatcaactttaacatctatttttatgtttcagttgatttggagaattctcctagtcttg

SEQ ID NO: 307041 - DNA, 120 bp, Artificial Sequence
  ENSG00000133884_22 (sequence is synthesized)
gatacatagatggaagtgatgacaggtttataacagttgaccttgcaatctcagacatttaaaacaggaccagaagtttatataaatataattaataagcaaactaatgacatcaccatg

SEQ ID NO: 307042 - DNA, 120 bp, Artificial Sequence
  ENSG00000133884_23 (sequence is synthesized)
ggacacacacaaaagttcttgcaggagcagggtctgtgtggcttcagttgcctgcagcgctcccaggccagagcaagtgctctaggatctgaactgcccgcagtgcagccctgcagcctt

SEQ ID NO: 307043 - DNA, 120 bp, Artificial Sequence
  ENSG00000133884_24 (sequence is synthesized)
tcccagggcacgttgatgtgcacacagtttccctgaaggcaaagtgaacatgtggagagcttacgtggcagcgcgtatgtcttcagtgtgtgttttagaagtccaactgttgtttttatg

SEQ ID NO: 307044 - DNA, 120 bp, Artificial Sequence
  ENSG00000133884_25 (sequence is synthesized)
tttttaaaggaaagatttgaatcaagcagttatgggccccctgaagtatccttttttctagaacattctgaaagtcatccttgcctatgggaagcctaggccggcctgcactgttatgtt

SEQ ID NO: 307045 - DNA, 120 bp, Artificial Sequence
  ENSG00000133884_26 (sequence is synthesized)
caataaataagcagggtgctctgggctggggattgtgtgaggagcagagcgcagcccgtcctcatgcttttccactgaagtaggccaggcagagagggagtacagcaatggatgcgcttt

SEQ ID NO: 307046 - DNA, 120 bp, Artificial Sequence
  ENSG00000133884_27 (sequence is synthesized)
ggcagctgagtagtccgagagccagaaaagaaatgtggaaaataagaacgctgtagcaggcctaggtgaggaaatttaggaagggtttgcgggaggtaggatttgagatgggtcttggag

SEQ ID NO: 307047 - DNA, 120 bp, Artificial Sequence
  ENSG00000133884_28 (sequence is synthesized)
agttggacagtgtcagccggtaggacgggggtgcggacggaagcctgtgaggaaggcagaggatgcggagctgtgagcggagggagcagcgaggctggagagcagctgggctgcgggtca

SEQ ID NO: 307048 - DNA, 120 bp, Artificial Sequence
  ENSG00000133884_29 (sequence is synthesized)
agacgtctgcgtttaattcgggactgaaggttagcagggaagggaacgatgccagatcttgagtttaagaacttgaatcttgtaaagtaccaaatctaataaaatactcgtcctaaatca

SEQ ID NO: 307049 - DNA, 120 bp, Artificial Sequence
  ENSG00000133884_30 (sequence is synthesized)
gcttgctggcctctagggctgtcataaccagcccacctcgcttttcctaaccaagagaagatgtagccacaggcaggagctcctctcttccccccgcatttccgactgtctgtctcactc

SEQ ID NO: 307050 - DNA, 120 bp, Artificial Sequence
  ENSG00000133884_31 (sequence is synthesized)
acttcccccactacagggcatccatcttgcctccaatttacccccgtgatgatggcggcagtgaagacataccgctggcagtgcatcgagtgcaaatgttgcaatatctgcggcacctcc

SEQ ID NO: 307051 - DNA, 120 bp, Artificial Sequence
  ENSG00000133884_32 (sequence is synthesized)
gagaatgacgtgtgtatccccgccccctcctcagcatggctccttctgggcttttactgctgtttgcacagttccctctaaagtgagctttcttttaaaaagggagcaggatccctccca

SEQ ID NO: 307052 - DNA, 120 bp, Artificial Sequence
  ENSG00000133884_33 (sequence is synthesized)
catgccacacgcccctccctagcatctcagtcagaactctgatttgttgccagatatatattgagtgctgattttatgtcagacactgttctagtcactaaagatgctaaagacaaacaa

SEQ ID NO: 307053 - DNA, 120 bp, Artificial Sequence
  ENSG00000133884_34 (sequence is synthesized)
ggtccctgcctcatgagatttacattcttacaggaacaacaataagcaaggatgtaaatgagatttgtataatgtgccatgaaaaaaacgaaatcagtactgtggcagagaataattgca

SEQ ID NO: 307054 - DNA, 120 bp, Artificial Sequence
  ENSG00000133884_35 (sequence is synthesized)
taagtgatttattttgatggtcaggtatggctcttctgggagggtgatgctggtgttgaaattttggtgataccaaggagccagtcaagatttggaggtagaggaatcccaggaaaggag

SEQ ID NO: 307055 - DNA, 120 bp, Artificial Sequence
  ENSG00000133884_36 (sequence is synthesized)
cagccagcgccaaggccttatgttggacaagccagatgacagggcatgggagagtatggtgggcaatgagatgagagaggcaagcactgccagatctctggggcctcgggttttattcta

SEQ ID NO: 307056 - DNA, 120 bp, Artificial Sequence
  ENSG00000133884_37 (sequence is synthesized)
tctggggcctcgggttttattctaggtacaacaggacactgttgaagggttttactcgggaagtgacatggttatttatgtatttatttatttactttttttttttgagatggagtcttg

SEQ ID NO: 307057 - DNA, 120 bp, Artificial Sequence
  ENSG00000133884_38 (sequence is synthesized)
ttatttattttgagacagagtctctctgtcatccaggctggagtgcagtgacgcgatcttagctcactaaaacctttcccttcaggctcaagcagtacaatcctcccacctcagcctccc

SEQ ID NO: 307058 - DNA, 120 bp, Artificial Sequence
  ENSG00000133884_39 (sequence is synthesized)
cagtacaatcctcccacctcagcctcccgggtagctgggaccacagatgcacaccaccatgtctggctacttttttatatttttggtagagacagggtcttgccatattgctgagctggt

SEQ ID NO: 307059 - DNA, 90 bp, Artificial Sequence
  ENSG00000133884_40 (sequence is synthesized)
caccatgtctggccttgtcttatattttattttatatttatttatttatttcaagatggagttttactcttgtcatccaggctggagtac

SEQ ID NO: 307060 - DNA, 120 bp, Artificial Sequence
  ENSG00000133884_41 (sequence is synthesized)
gtcttatattttaaaaagatgactttgggtgccgtgtggagggtagactgtagggacaaggatggaggctcatgcctgtaatcctaacacttgagaggctgaggcgggaggatcacttga

SEQ ID NO: 307061 - DNA, 120 bp, Artificial Sequence
  ENSG00000133884_42 (sequence is synthesized)
gcccaggaattcaagaccagcctgagcaacatagggagatcctgtctccacaaaaaaaataaacacttagccaggtgtggtggcacacacgttagtcccagctacttggcaggctgaggt

SEQ ID NO: 307062 - DNA, 86 bp, Artificial Sequence
  ENSG00000133884_43 (sequence is synthesized)
aggctgcagtgagccatgatcacaccaccgcactctagaaatagtcactgggcacggcgtctcacacctgtaatccaagcactttg

SEQ ID NO: 307063 - DNA, 89 bp, Artificial Sequence
  ENSG00000133884_44 (sequence is synthesized)
aggtgggaggattgcttgagcctgggatttcaggaccagcctgggcaacgtaaggagatcttgtctctccaaaaacattgatagtccca

SEQ ID NO: 307064 - DNA, 120 bp, Artificial Sequence
  ENSG00000133884_45 (sequence is synthesized)
agcctgagtgacagcaataccctgtctcaaaaaaatataccatagagcttgggctttagggaaaaaaaaaaaaaaaaaaaagtggaggtgatttgatcaattaggagctctgaaaggacc

SEQ ID NO: 307065 - DNA, 120 bp, Artificial Sequence
  ENSG00000133884_46 (sequence is synthesized)
caagtgagaaatgacagtgactggatctgcggtggagaggggcagcatggtttcccacataagattctcacatctgttcttacctgctacctacccctcttggaaatagcagtgtcctgt

SEQ ID NO: 307066 - DNA, 120 bp, Artificial Sequence
  ENSG00000133884_47 (sequence is synthesized)
ctgaaacagaagctggagtccaggaagcaggcccctgcagttctgttcttacttcagtccctgattattgtcaggtactgactggcttctctgttgcttctaactatagactctcattca

SEQ ID NO: 307067 - DNA, 120 bp, Artificial Sequence
  ENSG00000133884_48 (sequence is synthesized)
ctctgttgcttctaactatagactctcattcattcacttttatcacagaaggttattattatacacatatataattttcattaaaaaaattaaaataggccagatgcagtggctcatgcc

SEQ ID NO: 307068 - DNA, 60 bp, Artificial Sequence
  ENSG00000133884_49 (sequence is synthesized)
gaggattgctctaataattaaaaaaaaatagccaggcatagcagcatgcgcctgttgtcc

SEQ ID NO: 307069 - DNA, 120 bp, Artificial Sequence
  ENSG00000133884_50 (sequence is synthesized)
tggtggggaaagcatttcaggctaaggaaataacgtgaagcacaggggaaagatatcccaaagtatggaagggagcaggagcaggattatagcatgcttgaaaggcgttggtgaggaatg

SEQ ID NO: 307070 - DNA, 120 bp, Artificial Sequence
  ENSG00000133884_51 (sequence is synthesized)
catgctctgggaaagatttctgccatcctctggggtagggttgcttgtgggggccacagcaggcagggttggcctctcaacagatggcctgcaggtctcctggcctcagttaagccaggg

SEQ ID NO: 307071 - DNA, 120 bp, Artificial Sequence
  ENSG00000133884_52 (sequence is synthesized)
ccccaggggtctgacactgagtttttcaacgtctgttctctttttctttctgtctgccttgccccacttctgtccctccaccctgggagcaccatcgccgctggggtttctctctcgttt

SEQ ID NO: 307072 - DNA, 120 bp, Artificial Sequence
  ENSG00000133884_53 (sequence is synthesized)
gctctgctttcctgctgctgctgctcctgtctcaagtgtatcaaggccttcttctcatgacttttctttctgtctttcagatagtttcaaacaaaagcatacctcgaaagcgccccagag

SEQ ID NO: 307073 - DNA, 120 bp, Artificial Sequence
  ENSG00000133884_54 (sequence is synthesized)
aggtagctctctcaacttttcagacttgtggttttcctttccctttttccctcttcccttgttcctcctgcctttctcatttcctgggatgctagctttaaaatctctggaatggcatgg

SEQ ID NO: 307074 - DNA, 120 bp, Artificial Sequence
  ENSG00000133884_55 (sequence is synthesized)
gggtaggagcagtggaatttctgctgtgctctactcctcaaagtcctgaaggctgcctttaccactgcttgtttcccacaaacctgctcctagagctgctcggcccagtgcatggggtgg

SEQ ID NO: 307075 - DNA, 120 bp, Artificial Sequence
  ENSG00000133884_56 (sequence is synthesized)
cttcagaagcattatcaggagcccattacaatcagacccttccgctccctccccagaccaggcagctggtggtcagctcatgttccccactgccccaccacctcctcctgccatcctctc

SEQ ID NO: 307076 - DNA, 120 bp, Artificial Sequence
  ENSG00000133884_57 (sequence is synthesized)
tccccactcctttcctgctggcccccttgcccttcttggtattacttctcaagatgacaaaatgcctcatggggatctgctttccttgctgattggcaggcctggacagggcaattacat

SEQ ID NO: 307077 - DNA, 120 bp, Artificial Sequence
  ENSG00000133884_58 (sequence is synthesized)
gggagtgtgcttgaatttctttggggaccaactgcccaactggcttcattgataggctatccccaagaaacccatcccctgcttgtttacccacattcaggggagatgggctccatggtg

SEQ ID NO: 307078 - DNA, 120 bp, Artificial Sequence
  ENSG00000133884_59 (sequence is synthesized)
tgtggggtagcatgagcctcccacatttactgaggggtaaaaaagtttggagtcttatccacttttcccccttcctgccaccccaaagatataggaatatccttccctttcctgacctgg

SEQ ID NO: 307079 - DNA, 120 bp, Artificial Sequence
  ENSG00000133884_60 (sequence is synthesized)
agcgtcccagactgttagtatatcccagagcaactaactggtgatggggcaagggctaagccccccaaaagtcaacatggaagagcagtggtggccatggggttggagttcaggagggaa

SEQ ID NO: 307080 - DNA, 120 bp, Artificial Sequence
  ENSG00000133884_61 (sequence is synthesized)
aagagccccagaagctagagagccccacggcctgatgctcctggctgaggggaagtggccgtcactcaaggcctgtcccagagtggagctgctaggggaagggatggttgccctctgcct

SEQ ID NO: 307081 - DNA, 120 bp, Artificial Sequence
  ENSG00000133884_62 (sequence is synthesized)
caggtggagcccccacagcttgcagggatggggacatggcactcttgtatcctaacacctttctctgcaatcttcttcccactcagtttgtggaaaacgttacaagaaccgaccaggcct

SEQ ID NO: 307082 - DNA, 120 bp, Artificial Sequence
  ENSG00000133895_0 (sequence is synthesized)
ggtgtccggagccgcggacctagagatcccagaagccacagcgcagcggcccggcccgccactatttccaggctcagcggggcaggggccgccgcccaccgcccgccgccatggggctga

SEQ ID NO: 307083 - DNA, 120 bp, Artificial Sequence
  ENSG00000133895_1 (sequence is synthesized)
aggccgcccagaagacgctgttcccgctgcgctccatcgacgacgtggtgcgcctgtttgctgccgagctgggccgagaggagccggacctggtgctcctttccttggtgctgggcttcg

SEQ ID NO: 307084 - DNA, 120 bp, Artificial Sequence
  ENSG00000133895_2 (sequence is synthesized)
tggagcattttctggctgtcaaccgcgtcatccctaccaacgttcccgagctcaccttccagcccagccccgcccccgacccgcctggcggcctcacctactttcccgtggccgacctgt

SEQ ID NO: 307085 - DNA, 120 bp, Artificial Sequence
  ENSG00000133895_3 (sequence is synthesized)
ctatcatcgccgccctctatgcccgcttcaccgcccagatccgaggcgccgtcgacctgtccctctatcctcgagaagggggtgtctccagccgtgagctggtgaagaaggtctccgatg

SEQ ID NO: 307086 - DNA, 120 bp, Artificial Sequence
  ENSG00000133895_4 (sequence is synthesized)
tcatatggaacagcctcagccgctcctacttcaaggatcgggcccacatccagtccctcttcagcttcatcacaggcaccaaattggacagctccggtgtggcctttgctgtggttgggg

SEQ ID NO: 307087 - DNA, 120 bp, Artificial Sequence
  ENSG00000133895_5 (sequence is synthesized)
cctgccaggccctgggtctccgggatgtccacctcgccctgtctgaggatcatgcctgggtagtgtttgggcccaatggggagcagacagctgaggtcacctggcacggcaagggcaacg

SEQ ID NO: 307088 - DNA, 120 bp, Artificial Sequence
  ENSG00000133895_6 (sequence is synthesized)
aggaccgcaggggccagacagtcaatgccggtgtggctgagcggagctggctgtacctgaaaggatcatacatgcgctgtgaccgcaagatggaggtggcgttcatggtgtgtgccatca

SEQ ID NO: 307089 - DNA, 120 bp, Artificial Sequence
  ENSG00000133895_7 (sequence is synthesized)
acccttccattgacctgcacaccgactcgctggagcttctgcagctgcagcagaagctgctctggctgctctatgacctgggacatctggaaaggtaccccatggccttagggaacctgg

SEQ ID NO: 307090 - DNA, 120 bp, Artificial Sequence
  ENSG00000133895_8 (sequence is synthesized)
cagatctagaggagctggagcccacccctggccggccagacccactcaccctctaccacaagggcattgcctcagccaagacctactatcgggatgaacacatctacccctacatgtacc

SEQ ID NO: 307091 - DNA, 120 bp, Artificial Sequence
  ENSG00000133895_9 (sequence is synthesized)
tggctggctaccactgtcgcaaccgcaatgtgcgggaagccctgcaggcctgggcggacacggccactgtcatccaggactacaactactgccgggaagacgaggagatctacaaggagt

SEQ ID NO: 307092 - DNA, 120 bp, Artificial Sequence
  ENSG00000133895_10 (sequence is synthesized)
tctttgaagtagccaatgatgtcatccccaacctgctgaaggaggcagccagcttgctggaggcgggcgaggagcggccgggggagcaaagccagggcacccagagccaaggttccgccc

SEQ ID NO: 307093 - DNA, 120 bp, Artificial Sequence
  ENSG00000133895_11 (sequence is synthesized)
ccaggaccctgagtgcttcgcccacctgctgcgattctacgacggcatctgcaaatgggaggagggcagtcccacgcctgtgctgcatgtgggctgggccacctttcttgtgcagtccct

SEQ ID NO: 307094 - DNA, 120 bp, Artificial Sequence
  ENSG00000133895_12 (sequence is synthesized)
aggccgttttgagggacaggtgcggcagaaggtgcgcatagtgagccgagaggccgaggcggccgaggccgaggagccgtggggcgaggaagcccgggaaggccggcggcggggcccacg

SEQ ID NO: 307095 - DNA, 120 bp, Artificial Sequence
  ENSG00000133895_13 (sequence is synthesized)
gcgggagtccaagccagaggagcccccgccgcccaagaagccagcactggacaagggcctgggcaccggccagggtgcagtgtcaggacccccccggaagcctcctgggactgtcgctgg

SEQ ID NO: 307096 - DNA, 120 bp, Artificial Sequence
  ENSG00000133895_14 (sequence is synthesized)
cacagcccgaggccctgaaggtggcagcacggctcaggtgccagcacccacagcatcaccaccgccggagggtccagtgctcactttccagagtgagaagatgaagggcatgaaggagct

SEQ ID NO: 307097 - DNA, 120 bp, Artificial Sequence
  ENSG00000133895_15 (sequence is synthesized)
gctggtggccaccaagatcaactcgagcgccatcaagctgcaactcacggcacagtcgcaagtgcagatgaagaagcagaaagtgtccacccctagtgactacactctgtctttcctcaa

SEQ ID NO: 307098 - DNA, 120 bp, Artificial Sequence
  ENSG00000133895_16 (sequence is synthesized)
gcggcagcgcaaaggcctctgaactactggggacttcggaccgcttgtggggacccaggctccgcccttagtcccccaactctgagcccatgttctgcccccagcccaaaggggacaggc

SEQ ID NO: 307099 - DNA, 120 bp, Artificial Sequence
  ENSG00000133895_17 (sequence is synthesized)
ctcacctctacccaaaccctaggttcccggtcccgagtacagtctgtatcaaacccacgattttctccagctcagaacccagggctctgccccagtcgttagaatataggtctcttctcc

SEQ ID NO: 307100 - DNA, 120 bp, Artificial Sequence
  ENSG00000133895_18 (sequence is synthesized)
cagaatcccagccggccaatggaaacctcacgctgggtcctaattaccagtctttaaaggcccagcccctagaaacccaagctcctcctcggaaccgctcacctagagccagaccaacgt

SEQ ID NO: 307101 - DNA, 120 bp, Artificial Sequence
  ENSG00000133895_19 (sequence is synthesized)
tactcagggctcctcccagcttgtaggagctgaggtttcacccttaacccaaggagcacaggtcccacctccagcccgggagcctaggaccactcagcccctaggagtatatttccgcac

SEQ ID NO: 307102 - DNA, 120 bp, Artificial Sequence
  ENSG00000133895_20 (sequence is synthesized)
ttcagaattccatatcttgcgaatccaagctccctgccccaaataacttcagtcctgctccagaatttggaaatcctagtttcctctccttcgtatcccgagtctgggacacaaaactcc

SEQ ID NO: 307103 - DNA, 120 bp, Artificial Sequence
  ENSG00000133895_21 (sequence is synthesized)
gcccccagcctatgagcatcctgagccccgccctcttcctgacgaaactggccccggatcagagcaggacctcccttccgaccctctgggaacctcccagaggtccagcccatctcggag

SEQ ID NO: 307104 - DNA, 120 bp, Artificial Sequence
  ENSG00000133895_22 (sequence is synthesized)
catcccggaggaaatctgcagagggttaggagtgggtgacaagagcctgatctcttcctgttttgtacatagatttatttttcagttccaagaaagatgaatacattttgttaaaaaaaa

SEQ ID NO: 307105 - DNA, 120 bp, Artificial Sequence
  ENSG00000133895_23 (sequence is synthesized)
gtgcgccgcggtgcctagtgtgggatgtaagcgcggaggtgggcgagggggaccgaggccaggactctccttggggtttgggggcttgacctgggtgcgctttctggacagactttacag

SEQ ID NO: 307106 - DNA, 120 bp, Artificial Sequence
  ENSG00000133895_24 (sequence is synthesized)
ccccgggggcacagtcgtagagagggggcggggcggccattggggctcctcattggggtgcttggggcgcaccccatcgggtaccgggcgtcccggaattgtgggggacaaaaaggctct

SEQ ID NO: 307107 - DNA, 120 bp, Artificial Sequence
  ENSG00000133895_25 (sequence is synthesized)
ggtggggaagcaggggagctgtgcgtgtgtcggggcgggtggaaccttagcggaccctgggaggaggctccccggccgaacctgcccgaccctccctcccccggcttgccttgcaggccg

SEQ ID NO: 307108 - DNA, 120 bp, Artificial Sequence
  ENSG00000133895_26 (sequence is synthesized)
catccaggagtgaggatccccctactagggcctgcagcctgtcctttcttcccctccatcagtttccaaccaccctcgtccaggactgaggcctggctcccacgccccatcccctttcca

SEQ ID NO: 307109 - DNA, 120 bp, Artificial Sequence
  ENSG00000133895_27 (sequence is synthesized)
tccagtccctaggcagcaaggccaccattacccaggaggtagggaccctgattaaggtgtcacatctttccctccctcccctctcctcctaattttttttttctcagaacagtctcaaat

SEQ ID NO: 307110 - DNA, 120 bp, Artificial Sequence
  ENSG00000133895_28 (sequence is synthesized)
ctccaatgtttaaccaccatcatccagcagtgggacttccaccctcggccccatgcccccctcctcattcttgctttcttcctctgggctgacccagacagcatcattttgcagtgagga

SEQ ID NO: 307111 - DNA, 120 bp, Artificial Sequence
  ENSG00000133895_29 (sequence is synthesized)
ccccacctactcccccagcccctgggggctccatcccccgccaggtccctggggctacccccgatggtgagaccccttcagaccctacagagaccccactgctctcacagctacaactac

SEQ ID NO: 307112 - DNA, 78 bp, Artificial Sequence
  ENSG00000133895_30 (sequence is synthesized)
tatatttatgtatatgcacatacacacaaaattaggcgggagtggtggcgcacgcctgtgatcgtgaagtcgaggctg

SEQ ID NO: 307113 - DNA, 120 bp, Artificial Sequence
  ENSG00000133895_31 (sequence is synthesized)
cagtgagcccagatcgagccactgcattccagcctgggcgaaagagaaagaccgtgtctcaaaacaaacaaacaaaagctactcttagcacgtgttagagtatctcgcgggcggaagtgg

SEQ ID NO: 307114 - DNA, 120 bp, Artificial Sequence
  ENSG00000133895_32 (sequence is synthesized)
gaaacgagtgctgcacacagacaacctgatctttttcctcataacttgccgaccgacccgtgacagcaaaaccggcagaagctcggcgacctcccaccccgagtctgcaggtagccgccg

SEQ ID NO: 307115 - DNA, 120 bp, Artificial Sequence
  ENSG00000133895_33 (sequence is synthesized)
caatccctgagtatctcgggaaggaggtgtccggagccgcggacctagagatcccagaagccacagcgcagcggcccggcccgccactatttccaggctcagcggggcaggggtgggccc

SEQ ID NO: 307116 - DNA, 120 bp, Artificial Sequence
  ENSG00000133895_34 (sequence is synthesized)
ggtattgttccctccccccagccttgtccccttcatactgtagtagcccaagccacccaagggactccattttcttgggccacacccctttcttcccatcaccacccacataggaaggga

SEQ ID NO: 307117 - DNA, 120 bp, Artificial Sequence
  ENSG00000133895_35 (sequence is synthesized)
agacagaagagccccttttcctggctgtcattccctgaagcaggcacagggtgggccatcatgagacataatgatctcatccccccctaagagctggctgtacctgaaaggatcatacat

SEQ ID NO: 307118 - DNA, 120 bp, Artificial Sequence
  ENSG00000133895_36 (sequence is synthesized)
gaaacgagtgctgcacacagagtaggcatctttatatgttaacagacactgatacccagctaaagcggctgaacacatttactctctggcagtgtttaaaagtatctgtttttctcatat

SEQ ID NO: 307119 - DNA, 120 bp, Artificial Sequence
  ENSG00000133895_37 (sequence is synthesized)
ttcctaggtaccccatggccttagggaacctggcagatctagaggagctggagcccacccctggccggccagacccactcaccctctaccacaaggtgggggcatctaaggagggtgcag

SEQ ID NO: 307120 - DNA, 120 bp, Artificial Sequence
  ENSG00000133895_38 (sequence is synthesized)
aagggagaccctaacagtggctgaggcaggggccctcatctgggcagatgagaagagaactttgtgtgttggggggtatcgcccatccagtctcactttgtgtcaactgtgtgcagaatc

SEQ ID NO: 307121 - DNA, 120 bp, Artificial Sequence
  ENSG00000133895_39 (sequence is synthesized)
agttcagtcagggctgtctgaggggtgtccagggttccccagcctgggagtggcaggggctgcatttgtcccctcagccctgccttttctgccactgcttactgtccttcctggagtata

SEQ ID NO: 307122 - DNA, 120 bp, Artificial Sequence
  ENSG00000133895_40 (sequence is synthesized)
acagaggtcaaatgtggcaggagcactgatgaagagggggtgttcacttggtgggtgtaggtggggaggagggccattgggctgggcttgaaagtctttggtgatgtgtagaagagtgtc

SEQ ID NO: 307123 - DNA, 120 bp, Artificial Sequence
  ENSG00000133935_0 (sequence is synthesized)
gacaaatggctcaggtggactccgggctggagctgtcctgggggagcttgtttgcggcagcggctgctgctgccactgctgtgctgggggcccggtcgccaggcaaaaagccctcccacg

SEQ ID NO: 307124 - DNA, 120 bp, Artificial Sequence
  ENSG00000133935_1 (sequence is synthesized)
tttgaggggagtcatgagccgtttcctgaatgtgttaagaagttggctggttatggtgtccatcatagccatggggaacacgctgcagagcttccgagaccacacttttctctatgaaaa

SEQ ID NO: 307125 - DNA, 120 bp, Artificial Sequence
  ENSG00000133935_2 (sequence is synthesized)
gctctacactggcaagccaaaccttgtgaatggcctccaagctcggacctttgggatctggacgctgctctcatcagtgattcgctgcctctgtgccattgacattcacaacaagacgct

SEQ ID NO: 307126 - DNA, 120 bp, Artificial Sequence
  ENSG00000133935_3 (sequence is synthesized)
ctatcacatcacactctggaccttcctccttgccctggggcatttcctctctgagttgtttgtctatggaactgcagctcccacgattggcgtcctggcacccctgatggtggcaagttt

SEQ ID NO: 307127 - DNA, 120 bp, Artificial Sequence
  ENSG00000133935_4 (sequence is synthesized)
ctccatcctgggtatgctggtcgggctccggtatctagaagtagaaccagtatccagacagaagaagagaaactgaggccagcattatcacctccaggactttctcgttttccaccttgg

SEQ ID NO: 307128 - DNA, 120 bp, Artificial Sequence
  ENSG00000133935_5 (sequence is synthesized)
ccatcttcttccttcgtcgtctctcctctttaatttcttttctattccatcatctgcccttttattcacttttagcctctttttttaatttttaaaatttaaagatatgcatactgaaaa

SEQ ID NO: 307129 - DNA, 120 bp, Artificial Sequence
  ENSG00000133935_6 (sequence is synthesized)
gtatataacatgtacgtacaatttaaagaataattttaaagtgaatactacgtaactccatccaagtcaagaaattgccagcttctcggaagcccactgtgtctccttcccctacctgca

SEQ ID NO: 307130 - DNA, 120 bp, Artificial Sequence
  ENSG00000133935_7 (sequence is synthesized)
acctcttccaggctcccttttccagccttcccctttttcccttttattttcatgccttgatttgacttgtgtggtgggaacatgtgaactatgaaacttaaacctgctgcccacccagag

SEQ ID NO: 307131 - DNA, 120 bp, Artificial Sequence
  ENSG00000133935_8 (sequence is synthesized)
cagctgtgaccaagggctgcctcaaggggttgtccacgcaggttgggctcctctctgctgctggacccaagactctgaaccttccaagggacaggcagttcttctaagaagggctcccct

SEQ ID NO: 307132 - DNA, 120 bp, Artificial Sequence
  ENSG00000133935_9 (sequence is synthesized)
gcatgagggttggaagagtctgggctgtttttagaccttctggtcagctgtatttgtgtaacaacttttgtaataaatagaaaaaccctctgctctgatcagttcttgtactttgacctc

SEQ ID NO: 307133 - DNA, 120 bp, Artificial Sequence
  ENSG00000133935_10 (sequence is synthesized)
tgctaagacaagagcatggctgcctcctctgagccctaggagaatcacagctttatgcctgattgaatacaccatagtgagtaggacagctcatgacacaggtcagcctggctgcctccg

SEQ ID NO: 307134 - DNA, 120 bp, Artificial Sequence
  ENSG00000133935_11 (sequence is synthesized)
gctccttactgtcatttgctcattcctcttgtattcttgaagtcaaatcttcttttttctcaccttcaagagtctgcgttcacaactaaacactaagtgccctttcttatttcctcctaa

SEQ ID NO: 307135 - DNA, 120 bp, Artificial Sequence
  ENSG00000133935_12 (sequence is synthesized)
agaagaaacagattcttgagagagcagagacaaaaaaatagaactaggcagcatagatgaaacaactgcatgacatgggaagaagacaactaaaccccgaggagaatgcactggaatgga

SEQ ID NO: 307136 - DNA, 120 bp, Artificial Sequence
  ENSG00000133935_13 (sequence is synthesized)
cagttgctcttaaaccctacccagagggcctcccccagctggaccctcatacacagtgtgtgtatccaaaaggccattgctatttcagcaaatatttgttgagtacttctccatgccgga

SEQ ID NO: 307137 - DNA, 120 bp, Artificial Sequence
  ENSG00000133935_14 (sequence is synthesized)
cacttgggaaagagaaatgaacgacacaggcaatgcccctgccctgtgggccttatattatagtcaaggtaacagaatcaacaagccaacacaaaaataaagaacttcaaatagggataa

SEQ ID NO: 307138 - DNA, 120 bp, Artificial Sequence
  ENSG00000133935_15 (sequence is synthesized)
gaactctaacaaacacaaggtattttggtcaagaaggaatgtggggtgggcagtggggaacgtaacttaaattagatcatcagaaagtcctccctgaggagatgggatttttttgttttt

SEQ ID NO: 307139 - DNA, 78 bp, Artificial Sequence
  ENSG00000133935_16 (sequence is synthesized)
gtggcacaatcacagcatcagcttcccaagtagctgggactacaagtgtgtaccaccacatccagctaacatttttgg

SEQ ID NO: 307140 - DNA, 120 bp, Artificial Sequence
  ENSG00000133935_17 (sequence is synthesized)
actacaagtgtgtaccaccacatccagctaacatttttgggggtgggaagagatggggtcttactatgttgtccaggctaagaggtgggatttgagctgagacttgaatgcccaggagtt

SEQ ID NO: 307141 - DNA, 120 bp, Artificial Sequence
  ENSG00000133935_18 (sequence is synthesized)
aaatgtcttaagatatggagcaggccgttagaaaggagggagcagcaactggaaggtagaatagtcttattcaaggaataagaactatgtaatcacagcatggtgaagagttaggaagtg

SEQ ID NO: 307142 - DNA, 120 bp, Artificial Sequence
  ENSG00000133937_0 (sequence is synthesized)
tcctacccgcgggttgagttcagcgaacgctgcggctaggggagggcgggaggagggagagcggacgcagggggcggggaggggcgcagggctgcgcgctcgccggcgctctctttcggt

SEQ ID NO: 307143 - DNA, 120 bp, Artificial Sequence
  ENSG00000133937_1 (sequence is synthesized)
ttggtcggcggctggaggagagtggacccccccactttaaggctctgtcctcggcgcgttcccgccgccccccggtcccgacgcggggctcggggatgcccgccagcatgttcagcatcg

SEQ ID NO: 307144 - DNA, 120 bp, Artificial Sequence
  ENSG00000133937_2 (sequence is synthesized)
acaacatcctagccgcccggccgcgctgcaaggactcggtgttgccggtggcgcacagcgcggcggctcccgtcgtcttcccggccctgcacggggactcgctctacggcgccagcggcg

SEQ ID NO: 307145 - DNA, 120 bp, Artificial Sequence
  ENSG00000133937_3 (sequence is synthesized)
gcgcctcctcggactatggcgccttctacccgcgccccgtggcccccggcggcgcgggcctcccggccgcggtcagcggctcccgcctcggctacaacaactacttctacgggcagctgc

SEQ ID NO: 307146 - DNA, 120 bp, Artificial Sequence
  ENSG00000133937_4 (sequence is synthesized)
ctacttctacgggcagctgcacgtgcaggcggcgcccgtgggcccggcctgctgcggggccgtgccgccgctgggcgcccagcagtgctcctgcgtcccgacgcccccaggctacgaggg

SEQ ID NO: 307147 - DNA, 120 bp, Artificial Sequence
  ENSG00000133937_5 (sequence is synthesized)
gcttctcaaccagctgcactgtcggcggaagcggcggcaccgcaccatcttcactgacgagcagctcgaagctctcgagaacctcttccaggagaccaagtacccggacgtgggcacgcg

SEQ ID NO: 307148 - DNA, 120 bp, Artificial Sequence
  ENSG00000133937_6 (sequence is synthesized)
cgagcagctggcccggaaagtgcacctccgcgaggagaaagtggaggtctggtttaagaaccgccgcgccaaatggaggcggcagaagcggtcctcatcagaggagtcggagaacgcgga

SEQ ID NO: 307149 - DNA, 120 bp, Artificial Sequence
  ENSG00000133937_7 (sequence is synthesized)
gaagtggaacaagacgtcgtcgtcgaaggcgtcaccggagaagagggaagaggaaggtaaaagcgatttggactcggacagctgacggccgcgggacacttgcccgtattacttacctaa

SEQ ID NO: 307150 - DNA, 120 bp, Artificial Sequence
  ENSG00000133937_8 (sequence is synthesized)
ctcgaaggacttgcacagacagacgatgctactttcttgcacacgcgctgccttgcgggagggggtcgagaaagaggaacgaggagctgtaaatagtgtacagagccgggagggtcggcg

SEQ ID NO: 307151 - DNA, 120 bp, Artificial Sequence
  ENSG00000133937_9 (sequence is synthesized)
tctggggtcagggcgcgcacagcccagcagcccgaggccgcccgcgactagcccccaccgtagtatttatagttaaattaagggtgacagtacaataaagtgatggcgatgtagacgggc

SEQ ID NO: 307152 - DNA, 120 bp, Artificial Sequence
  ENSG00000133943_0 (sequence is synthesized)
attctccactgaggcccagctgttcctctccttgaaaagtcaaggcttggttcaagccagatagcacctgaggacagaacatatcaggagccaagttacaccctgtttaaccctgccttc

SEQ ID NO: 307153 - DNA, 120 bp, Artificial Sequence
  ENSG00000133943_1 (sequence is synthesized)
aaagggacgactctgtaagattctctgctacttattcaagttgacacgatgcccttcacactccacctgaggtcccgccttccctctgccataaggagtttgattctacaaaagaaacca

SEQ ID NO: 307154 - DNA, 120 bp, Artificial Sequence
  ENSG00000133943_2 (sequence is synthesized)
aacatcagaaatacatccagcatggctggagagctccgaccagccagcctggtggtcctgcccaggtcccttgctccagcttttgaaagattctgccaggtcaacactggtcctctaccc

SEQ ID NO: 307155 - DNA, 120 bp, Artificial Sequence
  ENSG00000133943_3 (sequence is synthesized)
ctgctgggccagagtgagccagaaaagtggatgctgccccctcaaggtgctatctcagagaccaggatgggccatccccagttctggaaatacgagttcggtgcctgcaccggcagcctg

SEQ ID NO: 307156 - DNA, 120 bp, Artificial Sequence
  ENSG00000133943_4 (sequence is synthesized)
gcttcgctggagcagtactcggagcagctgaaggacatggtggccttcttcctgggctgcagcttctccctggaggaggccttggagaaagcggggctccccagaagagacccagcaggt

SEQ ID NO: 307157 - DNA, 120 bp, Artificial Sequence
  ENSG00000133943_5 (sequence is synthesized)
cacagccagacaacagtgccttgtgttacccatgctggcttctgctgccctctggtggtcacgatgaggcccattcccaaggacaagctggaagggctggtgcgggcctgctgctccctc

SEQ ID NO: 307158 - DNA, 120 bp, Artificial Sequence
  ENSG00000133943_6 (sequence is synthesized)
ggaggtgagcaggggcaacctgttcacatgggcgacccagaactgttgggaatcaaagagctttccaaacctgcctacggggatgccatggtgtgtcccccaggggaggttccagtgttc

SEQ ID NO: 307159 - DNA, 120 bp, Artificial Sequence
  ENSG00000133943_7 (sequence is synthesized)
tggccttctccgctgaccagtctcggagctgtcagcagctgtgagaccccactggcttttgccagcatcccaggctgcacagttatgactgacctgaaggatgcaaaggctccacctggt

SEQ ID NO: 307160 - DNA, 120 bp, Artificial Sequence
  ENSG00000133943_8 (sequence is synthesized)
tgtctcaccccagagagaattccagaggtccatcacatttcccaagatcctctgcactacagcatcgcgtcagtctctgcttctcagaagatcagagaactagagtctatgatcggcata

SEQ ID NO: 307161 - DNA, 120 bp, Artificial Sequence
  ENSG00000133943_9 (sequence is synthesized)
gacccagggaaccgggggattgggcacctgctctgtaaagatgagctgctgaaggcctctctctcgctgtcccatgcccgctcagtgctcatcaccactgggttccccacacatttcaat

SEQ ID NO: 307162 - DNA, 120 bp, Artificial Sequence
  ENSG00000133943_10 (sequence is synthesized)
acagatggcccaccaggagctgttgctctggttgccttcctgcaggccttggagaaggaggtcgccataatcgttgaccagagagcctggaacttgcaccagaagattgttgaagatgct

SEQ ID NO: 307163 - DNA, 120 bp, Artificial Sequence
  ENSG00000133943_11 (sequence is synthesized)
gttgagcaaggtgttctgaagacgcagatcccgatattaacttaccaaggtggatcagtggaagctgctcaggcattcctgtgcaaaaatggggacccgcagacacctagatttgaccac

SEQ ID NO: 307164 - DNA, 120 bp, Artificial Sequence
  ENSG00000133943_12 (sequence is synthesized)
ctggtggccatagagcgtgccggaagagctgctgatggcaattactacaatgcaaggaagatgaacatcaagcacttggttgaccccattgacgatctttttcttgctgcgaagaagatt

SEQ ID NO: 307165 - DNA, 120 bp, Artificial Sequence
  ENSG00000133943_13 (sequence is synthesized)
cctggaatctcatcaactggagtcggtgatggaggcaacgagcttgggatgggtaaagtcaaggaggctgtgaggaggcacatacggcacggggatgtcatcgcctgcgacgtggaggct

SEQ ID NO: 307166 - DNA, 120 bp, Artificial Sequence
  ENSG00000133943_14 (sequence is synthesized)
gactttgccgtcattgctggtgtttctaactggggaggctatgccctggcctgcgcactctacatcctgtactcatgtgctgtccacagtcagtacctgaggaaagcagtcggaccctcc

SEQ ID NO: 307167 - DNA, 120 bp, Artificial Sequence
  ENSG00000133943_15 (sequence is synthesized)
agggcacctggagatcaggcctggactcaggccctcccgtcggtcattaaggaagaaaaaatgctgggcatcttggtgcagcacaaagtccggagtggcgtctcgggcatcgtgggcatg

SEQ ID NO: 307168 - DNA, 120 bp, Artificial Sequence
  ENSG00000133943_16 (sequence is synthesized)
gaggtggatgggctgcccttccacaacacccacgccgagatgatccagaagctggtggacgtcaccacggcacaggtgtaaccgtccatgttccgtgtgagcagagtccctaccaacggg

SEQ ID NO: 307169 - DNA, 120 bp, Artificial Sequence
  ENSG00000133943_17 (sequence is synthesized)
caggtctgcatccggggagaatgcagctgcttctggcgacaatcctgctagtaaacactggtcttcggtgagcaacgaacactcgcctggcctgggaaactgcatgcccactttctggga

SEQ ID NO: 307170 - DNA, 120 bp, Artificial Sequence
  ENSG00000133943_18 (sequence is synthesized)
ggggttagtgcaggtgctgtggacaaaggacaacatttctctggggctttttaacttttattcctaagactctaaaggcgttgatttcaaccctccttcactctggcttcttcaggcaac

SEQ ID NO: 307171 - DNA, 120 bp, Artificial Sequence
  ENSG00000133943_19 (sequence is synthesized)
ccacgtggtctcctgtgagaatcttctcgacagttacttatggggacacttgtgaacaattaactgccaggcagagcatgagaacaaacattcccaggccatgtaggataggatactcca

SEQ ID NO: 307172 - DNA, 120 bp, Artificial Sequence
  ENSG00000133943_20 (sequence is synthesized)
gactccagtcatcctcccccatccatggtttctgttactcatggtttcagttactcatagccaactgcagaccgaaaatactaaatgaaaaatttcagaaataaacaactcttaagtttt

SEQ ID NO: 307173 - DNA, 120 bp, Artificial Sequence
  ENSG00000133943_21 (sequence is synthesized)
cgaggtggcaattggggaaggggttctgggctgccgcaggcacacaggccagagcttcgtggatacctgcagggcccaaaggtccctccctgttttgaagagtgagtgatggctatgagg

SEQ ID NO: 307174 - DNA, 120 bp, Artificial Sequence
  ENSG00000133943_22 (sequence is synthesized)
tagcggccaggctgatcacccctgcgttggctggaggcagaattctgtaaatcctcgccaagtctttctccaggccactggttagctcatctcagcctcctctgggagcatcaacaccaa

SEQ ID NO: 307175 - DNA, 120 bp, Artificial Sequence
  ENSG00000133943_23 (sequence is synthesized)
catggcacaggggactgcagtggtgtgctttggacctgtgtacccacccaaggctaaaggcagagccagatggagaaggaaaggcaagtgacttgtccagagccactctgtcaaaagggg

SEQ ID NO: 307176 - DNA, 120 bp, Artificial Sequence
  ENSG00000133943_24 (sequence is synthesized)
gagatcgagctagctataacccaccttctttcatgagaaccacactaaattgcaaaaattatcccagtgctggaggagggcagcaggttgagattatgttggcaggaagaatgttggcat

SEQ ID NO: 307177 - DNA, 120 bp, Artificial Sequence
  ENSG00000133943_25 (sequence is synthesized)
tgaggacagaacatatcagatggagaaggaaaggcaagtgacttgtccagagccactctgtcaaaaggggacttgagtcctcagggctgttgactccaaagctgacaagcaggtggcatt

SEQ ID NO: 307178 - DNA, 120 bp, Artificial Sequence
  ENSG00000133943_26 (sequence is synthesized)
acgtgagctcaggctgtgggagcggatggagctgctacagtcagcgcttggggctggcctcagcttgtagacccgagccctgcagaacaaccccccgtggcgcaggagagcagaagaaag

SEQ ID NO: 307179 - DNA, 120 bp, Artificial Sequence
  ENSG00000133943_27 (sequence is synthesized)
ggggcctttatgcccttttgagggaagcacacattctgcaaggccgtggaaacaaagggaggaactgtttgtagccctcgtccagacgccccaaacaaacagagccaagttacaccctgt

SEQ ID NO: 307180 - DNA, 120 bp, Artificial Sequence
  ENSG00000133943_28 (sequence is synthesized)
ccatcctgctccatcctacctaggacgtgaatcctccctttgtccagggtacccgtgctgtctacaccacccgcctgccagtcacccagcaggtgatcagatcgactgtcatggtattgc

SEQ ID NO: 307181 - DNA, 120 bp, Artificial Sequence
  ENSG00000133943_29 (sequence is synthesized)
agtgcttatattcaagaacctcttatgtgactcagtaatgtcctcaaagtgcaagagcagagatgctggcaatttggatatgccaaaaagaggccataaagggcttcctttaagtgaaaa

SEQ ID NO: 307182 - DNA, 120 bp, Artificial Sequence
  ENSG00000133943_30 (sequence is synthesized)
agttacagattacgaaaatgatagaaccagaaggtgctaacaaaatgtctgtcctgcatgtgtggcatttgacatgaagaaactgaggcccttgctgggcgcagtggctcatgcctgtaa

SEQ ID NO: 307183 - DNA, 120 bp, Artificial Sequence
  ENSG00000133943_31 (sequence is synthesized)
tcacttgagctcaagagttcaagaccagccttggacaagatagtgaaaccttgtctctaccaaaaaaatacagaagttagccaggcatggtgcagtgtacctgtagtagcagctactgag

SEQ ID NO: 307184 - DNA, 120 bp, Artificial Sequence
  ENSG00000133943_32 (sequence is synthesized)
ccctgccaataaaatcaacctcattttgtgaatgcctgttgtgtgccaaggaccctgctaagtgctttgcttgaagaaaaaatgctgggcatcttggtgcagcacaaagtccggagtggc

SEQ ID NO: 307185 - DNA, 120 bp, Artificial Sequence
  ENSG00000133943_33 (sequence is synthesized)
gatctttgagatcatggagaaagtccagccctggagaaatcccactggctctgccatctgtccactccatcgcccaagccagaaacccgcctgtacaggattaagaagaaaataaaaaac

SEQ ID NO: 307186 - DNA, 120 bp, Artificial Sequence
  ENSG00000133943_34 (sequence is synthesized)
actgaggcccagctgttcctctccttgaaaagtcaaggcttggttcaagccagatagcacctgaggacagaacatatcagaagacacaggaagggctctgaatggactcgcttgggacct

SEQ ID NO: 307187 - DNA, 120 bp, Artificial Sequence
  ENSG00000133943_35 (sequence is synthesized)
ctgctcaccccctgtattaaataaccaccgaggccagatgagtggaaataccctggttagttggcctgagtcacatggcactattgatgggacagatggagaaggaaaggcaagtgactt

SEQ ID NO: 307188 - DNA, 120 bp, Artificial Sequence
  ENSG00000133943_36 (sequence is synthesized)
agggcacctggagatcaggcctggactcaggccctcccgtcggtcattaaggtaacaaaccccagccagccgctcgcctggaagcagcttttaccctggatgagcagcaggcctgaggtc

SEQ ID NO: 307189 - DNA, 120 bp, Artificial Sequence
  ENSG00000133943_37 (sequence is synthesized)
ccaagccgtaagccgagggctggcaccctgctgcccctcaaaagccagaggcagagccagccttgaagcagaggtctcctggattgggtgccctttaagctactcgcagttctgaatcgt

SEQ ID NO: 307190 - DNA, 120 bp, Artificial Sequence
  ENSG00000133943_38 (sequence is synthesized)
tccaggtgctgtagccaggtgtctctgtcatccgggacctctctgtccagcctcagggaccttcacagtgcctggcacagaacctcactcatgactgttgctcaggaacgagctgccctc

SEQ ID NO: 307191 - DNA, 120 bp, Artificial Sequence
  ENSG00000133943_39 (sequence is synthesized)
aattatggagtagcctgagttgtcaaagccttaatccctattctccttcacctcttcctcaaataccatttacaataatcctgcaatttgagtttctgttttagagaaagaaccataaac

SEQ ID NO: 307192 - DNA, 120 bp, Artificial Sequence
  ENSG00000133943_40 (sequence is synthesized)
catgagccaccgctcctggtgctctggggaaccgggggattgggcacctgctctgtaaagatgagctgctgaaggcctctctctcgctgtcccatgcccgctcagtgctcatcaccactg

SEQ ID NO: 307193 - DNA, 120 bp, Artificial Sequence
  ENSG00000133943_41 (sequence is synthesized)
agtccgcagctcgtgcttgacagtgaggagctgctctcctccgtcgccgccgtccgcgctggtccccgcggcgccgccgctgctgccaccctcctcctccatcttctcctttttttccga

SEQ ID NO: 307194 - DNA, 120 bp, Artificial Sequence
  ENSG00000133943_42 (sequence is synthesized)
tcccgcgggtcgctacgaggggaacccaggagacagcggacgcccgtcccctcgcagccgctgccgcggccccaggagtcggggtgcggcggctccagaactcggacgcaaagacgagtc

SEQ ID NO: 307195 - DNA, 120 bp, Artificial Sequence
  ENSG00000133943_43 (sequence is synthesized)
tctttcccgctctggccgcacggctcgctcctcgcctcctcccccttcggcgggcaccgctagtaccgcgcaaccaaaccgccccctgctccaccgccgcctcctcaggccgctccgccc

SEQ ID NO: 307196 - DNA, 120 bp, Artificial Sequence
  ENSG00000133943_44 (sequence is synthesized)
gttgttggaggaaccgaatgcctcacccatggtgggtacttcatactgttagtggtgggcaggtgtcctgtcagccccctccaaggaattcaccacccagcgaggccactaaaacctcca

SEQ ID NO: 307197 - DNA, 120 bp, Artificial Sequence
  ENSG00000133943_45 (sequence is synthesized)
gagtaagtcaatcagccatactaaggaaagtgctaagggggacagacaaggtgagaagagaatcctgtgggctggaggctgcaaggaataagccaagtagaaggagaggaatcccagcgg

SEQ ID NO: 307198 - DNA, 120 bp, Artificial Sequence
  ENSG00000133943_46 (sequence is synthesized)
gaggaatggggggagcaggggcttgggagatgaggacaggcttagtgatggtttgtgggagacagctcttgaggtggagagcaggaggtagggggtgagacaaaagtagaagagggcttc

SEQ ID NO: 307199 - DNA, 120 bp, Artificial Sequence
  ENSG00000133943_47 (sequence is synthesized)
ggaggtccatgagcccctgaagctgtttgcacaattgttcctgtacatgtatttttctgcgcaagactctgtggtttcatcagattcttcaagtagtctggggccattaagaatccctgg

SEQ ID NO: 307200 - DNA, 60 bp, Artificial Sequence
  ENSG00000133943_48 (sequence is synthesized)
cagattcttcaagtagtctggggccattaagaatccctggtccagctgggtacggtgaag

SEQ ID NO: 307201 - DNA, 120 bp, Artificial Sequence
  ENSG00000133943_49 (sequence is synthesized)
caggcctggactcaggccctcccgtcggtcattaagtcaggctggggcaggtgtcagggtgtccctgagccaggcttgatggtggcagcaggtggcctatgccaaggagagctcccacag

SEQ ID NO: 307202 - DNA, 120 bp, Artificial Sequence
  ENSG00000133943_50 (sequence is synthesized)
ccagagcagaaggaggtgaaggccaagacagagctggggcctccagatgccatgtggcgtcatgtgggactgtctgtctttccccgtgtggctgggaggcagatggagccgtttctcccg

SEQ ID NO: 307203 - DNA, 120 bp, Artificial Sequence
  ENSG00000133943_51 (sequence is synthesized)
ctgccacactccccagcccggtccaggcagccagctctcccctgcctattgcaagatgagaccatgattataccagccccatcttgctctacgggaagcctcagcaccatgttcccgcct

SEQ ID NO: 307204 - DNA, 120 bp, Artificial Sequence
  ENSG00000133958_0 (sequence is synthesized)
atttttgctcgtcggctgggagccgggcgtcgggtcgctgggagtttgcctcttgtggcagcatcctgcttagtccagcgaattgtgacacattattaaatgtatcagaatataagaact

SEQ ID NO: 307205 - DNA, 120 bp, Artificial Sequence
  ENSG00000133958_1 (sequence is synthesized)
gtgtcactactacgtcaccagatggccatttccacgaattcatgtttccgttcggcggccggcgtccctcgggtggtcgcatgcaatgagtgcatctttctcgagaacaactcttccgcg

SEQ ID NO: 307206 - DNA, 120 bp, Artificial Sequence
  ENSG00000133958_2 (sequence is synthesized)
gaaagtcattgctgacagtcctggcattccggtggctgcttcttggcagtgagcacttgtctatcttgcttccaagatccggtacttgcaggaatatcataaccgggttctccacaacat

SEQ ID NO: 307207 - DNA, 120 bp, Artificial Sequence
  ENSG00000133958_3 (sequence is synthesized)
ttatcctgtaccatcaggaacagatattgcaaacaccttgaaatacttttctcagaccttgttaagcgtcctgcgagatgctccctcagaacgcggcccgcaaagtcgtgatgctcagtt

SEQ ID NO: 307208 - DNA, 120 bp, Artificial Sequence
  ENSG00000133958_4 (sequence is synthesized)
gtcagactacccttctttggactaccaaggcctctacgtgactttggtgaccctcctggatctagttcctttactacagcacggccaacacgatcttggacagtcgatattttatacaac

SEQ ID NO: 307209 - DNA, 120 bp, Artificial Sequence
  ENSG00000133958_5 (sequence is synthesized)
tacatgtttgctaccttttctcaatgatgatattctgagtactttgccctacacgatgatatcaacgttggctacctttcctccatttctgcacaaggatatcattgaatatcttagcac

SEQ ID NO: 307210 - DNA, 120 bp, Artificial Sequence
  ENSG00000133958_6 (sequence is synthesized)
atcttttctaccaatggctatattgggctcctcaaggagagaaggtgtacctgcccatgttaacctctctgcatcatccatgctaatgattgcaatgcagtacacatccaatccagtgta

SEQ ID NO: 307211 - DNA, 120 bp, Artificial Sequence
  ENSG00000133958_7 (sequence is synthesized)
tcattgtcaattactggaatgcctcatgaaatataaacaagaagtctggaaagatcttttgtatgtgattgcgtatgggccttcacaagtgaagcctccagctgtgcaaatgcttttcca

SEQ ID NO: 307212 - DNA, 120 bp, Artificial Sequence
  ENSG00000133958_8 (sequence is synthesized)
ctactggcccaatttaaaacctcctggggcaataagcgagtacagggggttgcagtacacagcttggaatcccatccactgccagcacattgaatgccacaatgcaattaacaaaccagc

SEQ ID NO: 307213 - DNA, 120 bp, Artificial Sequence
  ENSG00000133958_9 (sequence is synthesized)
tgtgaagatgtgtatagacccttccctgtcagtagcgttgggtgataaaccacccccgttgtatctctgtgaagaatgcagcgagaggattgcaggggaccacagtgagtggctgattga

SEQ ID NO: 307214 - DNA, 120 bp, Artificial Sequence
  ENSG00000133958_10 (sequence is synthesized)
tgttcttctgccacaagctgaaatatctgctatatgtcagaaaaagaactgcagttcccacgttagaagagcagttgtcacctgcttctcagcagggtgctgtggtcgtcacggaaacag

SEQ ID NO: 307215 - DNA, 120 bp, Artificial Sequence
  ENSG00000133958_11 (sequence is synthesized)
gcctgttcggtactgcaagaggtgccactcaaatcatcacagtaatgaagtgggggccgctgcggagactcacctctatcagacctctcctccgcccatcaacacgcgggaatgcggcgc

SEQ ID NO: 307216 - DNA, 120 bp, Artificial Sequence
  ENSG00000133958_12 (sequence is synthesized)
tgaggagctggtctgcgccgtggaagccgtgatcagcttgttgaaagaagccgagttccatgctgagcagcgagaacatgagctgaaccggcggcggcagctgggcctctcctcttccca

SEQ ID NO: 307217 - DNA, 120 bp, Artificial Sequence
  ENSG00000133958_13 (sequence is synthesized)
ccattccctggataatgctgactttgataacaaggacgatgataaacacgatcagaggctgctcagtcaattcggaatatggttcttagtgagcctctgcacacccagtgagaacacgcc

SEQ ID NO: 307218 - DNA, 120 bp, Artificial Sequence
  ENSG00000133958_14 (sequence is synthesized)
tacagaaagcttggcccggctggtggccatggtgtttcagtggtttcactccactgcgtatatgatggatgatgaagtgggaagtctggtggaaaagctgaagcctcagtttgtcaccaa

SEQ ID NO: 307219 - DNA, 120 bp, Artificial Sequence
  ENSG00000133958_15 (sequence is synthesized)
atggctgaagaccgtatgtgatgttcgcttcgatgtcatggtcatgtgccttcttcctaaacccatggaatttgccagggttggtggctactgggataagtcctgtagcacagtgactca

SEQ ID NO: 307220 - DNA, 120 bp, Artificial Sequence
  ENSG00000133958_16 (sequence is synthesized)
gctgaaggaaggtctcaaccgaatcctctgcctgatcccctataatgtgatcaatcaatctgtctgggagtgtattatgccggaatggctggaagccatcagaacagaagtcccagataa

SEQ ID NO: 307221 - DNA, 120 bp, Artificial Sequence
  ENSG00000133958_17 (sequence is synthesized)
tcagttaaaagaattcagggaagtattaagcaaaatgtttgacattgaactctgtcctctgcctttctcaatggaggagatgtttggttttattagttgtcggtttacaggatacccctc

SEQ ID NO: 307222 - DNA, 120 bp, Artificial Sequence
  ENSG00000133958_18 (sequence is synthesized)
ctctgtgcaggagcaagctttactgtggcttcatgtattatcggagttagatatcatggttccacttcaactactaataagtatgttttctgatggagttaattcagtcaaagagctggc

SEQ ID NO: 307223 - DNA, 120 bp, Artificial Sequence
  ENSG00000133958_19 (sequence is synthesized)
aaatcaaagaaaatcaagagtcagtgaactggcagggaaccttgcatctcgaagggtgagtgttgcctctgatcctggccgacgagttcagcacaatatgcttagtccatttcatagtcc

SEQ ID NO: 307224 - DNA, 120 bp, Artificial Sequence
  ENSG00000133958_20 (sequence is synthesized)
tttccagagtccgtttcggagtcctttgcgtagtccgtttcgtagccctttcaagaattttggacacccaggaggaaggactattgactttgattgtgaagatgatgaaatgaatctaaa

SEQ ID NO: 307225 - DNA, 120 bp, Artificial Sequence
  ENSG00000133958_21 (sequence is synthesized)
ttgtttcatcctcatgtttgatcttctcctgaagcagatggagttacaagatgatggaatcacgatgggtttagagcacagcttatcaaaggacattatttctattataaacaatgtctt

SEQ ID NO: 307226 - DNA, 120 bp, Artificial Sequence
  ENSG00000133958_22 (sequence is synthesized)
ccaagccccctgggggggatcccacacctgccagaaggacgaaaaagcaatcgagtgcaacttatgtcagtctagtatcctctgctatcagcttgcttgtgaactcctggagagactagc

SEQ ID NO: 307227 - DNA, 120 bp, Artificial Sequence
  ENSG00000133958_23 (sequence is synthesized)
tcctaaagaagaaagccggctggtggagcccacagacagcctggaggatagcctcctttcttccagaccagagtttatcataggccctgaaggggaggaggaggagaatcctgcaagcaa

SEQ ID NO: 307228 - DNA, 120 bp, Artificial Sequence
  ENSG00000133958_24 (sequence is synthesized)
gcatggggagaacccaggcaactgcaccgagcccgtggaacatgctgcagtaaagaatgataccgaaagaaaattttgctaccaacagcttccggtaacattgagactaatatataccat

SEQ ID NO: 307229 - DNA, 120 bp, Artificial Sequence
  ENSG00000133958_25 (sequence is synthesized)
tttccaggaaatggctaagtttgaagagccagacattctttttaatatgctcaattgcctgaagattctctgtctgcatggagaatgtttatacattgccagaaaagatcaccctcaatt

SEQ ID NO: 307230 - DNA, 120 bp, Artificial Sequence
  ENSG00000133958_26 (sequence is synthesized)
tttagcctacattcaggaccacatgttgattgcaagcctgtggagggtcgtcaaatccgagttctctcagctgtcttccctggcagtccctcttctcctccatgccctgtcacttcctca

SEQ ID NO: 307231 - DNA, 120 bp, Artificial Sequence
  ENSG00000133958_27 (sequence is synthesized)
tggtgctgacatcttctggacaatcataaatggcaatttcaacagcaaagactggaagatgaggtttgaagcagtggaaaaagttgctgtaatttgtagatttctggatattcactcagt

SEQ ID NO: 307232 - DNA, 120 bp, Artificial Sequence
  ENSG00000133958_28 (sequence is synthesized)
aaccaaaaaccacctgctgaagtactccctggcacatgccttctgctgcttcctgacagcagtggaggatgtcaaccccgcagtggctaccagagctggtctcctgcttgacaccataaa

SEQ ID NO: 307233 - DNA, 120 bp, Artificial Sequence
  ENSG00000133958_29 (sequence is synthesized)
gaggccagcattgcagggtctatgtctttgtcttgacttccagtttgatactgtggttaaagacagacccacaattttgagcaagcttttactcttgcactttcttaagcaggatattcc

SEQ ID NO: 307234 - DNA, 120 bp, Artificial Sequence
  ENSG00000133958_30 (sequence is synthesized)
tgctctgagctgggagttctttgtcaatagatttgagacgctttctttggaagcccagctacatttggattgtaacaaggaatttccttttcctacaaccatcactgctgtgaggaccaa

SEQ ID NO: 307235 - DNA, 120 bp, Artificial Sequence
  ENSG00000133958_31 (sequence is synthesized)
tgttgctaacctcagcgatgcagccttatggaagatcaagagagctcgctttgcaagaaaccgccagaagagtgtacgttccctgagggacagcgtgaaagggcctgtggaatccaagag

SEQ ID NO: 307236 - DNA, 120 bp, Artificial Sequence
  ENSG00000133958_32 (sequence is synthesized)
ggcgctctccctccctgagaccctgacctccaaaattcgacaacaatctcctgagaatgacaacaccatcaaggacctgctcccagaagacgctgggatcgaccaccagacagttcacca

SEQ ID NO: 307237 - DNA, 120 bp, Artificial Sequence
  ENSG00000133958_33 (sequence is synthesized)
gctgattacagtgctcatgaagttcatggccaaggatgaaagcagcgctgagtcagacatcagcagtgcaaaggccttcaacacggtcaagcgacacctgtacgtcttactcggctatga

SEQ ID NO: 307238 - DNA, 120 bp, Artificial Sequence
  ENSG00000133958_34 (sequence is synthesized)
ccagcaggaaggttgcttcatgattgcacctcaaaaaatgcgcctgtcaacttgctttaatgcattcattgcaggaattgcccaagttatggactataacattaacttgggaaaacacct

SEQ ID NO: 307239 - DNA, 120 bp, Artificial Sequence
  ENSG00000133958_35 (sequence is synthesized)
tctccccttagtggttcaggtgctcaaatactgctcttgtcctcaactccggcattatttccaacagccgcctcgttgctccctctggtccctaaagcctcacatccggcagatgtggtt

SEQ ID NO: 307240 - DNA, 120 bp, Artificial Sequence
  ENSG00000133958_36 (sequence is synthesized)
gaaggccttgcttgtcatcctttacaagtatccataccgagactgtgatatcagcaagatcctgctgcatctgattcacataacagtcaatacactcaatgcgcagtatcatagctgcaa

SEQ ID NO: 307241 - DNA, 120 bp, Artificial Sequence
  ENSG00000133958_37 (sequence is synthesized)
gccccatgccacggcaggacctttgtacagtgacaacagtaacataagcagatacagcgaaaaagaaaaaggtgaaatagaactggctgaatatagagagacgggtgcattacaagacag

SEQ ID NO: 307242 - DNA, 120 bp, Artificial Sequence
  ENSG00000133958_38 (sequence is synthesized)
ccttctccactgtgtgagagaagaaagcattccgaaaaaaaagctacgctctttcaaacaaaaatctcttgatatagggaatgcagactcgcttttgtttacattagacgaacatcgtag

SEQ ID NO: 307243 - DNA, 120 bp, Artificial Sequence
  ENSG00000133958_39 (sequence is synthesized)
gaagtcgtgcatagatcggtgtgacatagagaagcctccgacccaagctgcgtatatcgcacaaagaccaaacgaccctggacgttctagacagaactctgctacgaggcctgacaatag

SEQ ID NO: 307244 - DNA, 120 bp, Artificial Sequence
  ENSG00000133958_40 (sequence is synthesized)
tgaaatccccgagaacccagctatggaagggtttccagatgctcgaaggcctgtcataccagaggttaggttaaactgtatggagactttcgaggtgaaagttgactcgccggtaaagcc

SEQ ID NO: 307245 - DNA, 120 bp, Artificial Sequence
  ENSG00000133958_41 (sequence is synthesized)
tgctcctaaagaggatttagatctgatagatctatcctcagattcaacctcggggcctgaaaaacactctatactctcaacctccgacagcgactctcttgtatttgagcctcttccccc

SEQ ID NO: 307246 - DNA, 120 bp, Artificial Sequence
  ENSG00000133958_42 (sequence is synthesized)
tctcagaatagtcgagagtgacgaagaagaggagacgatgaaccaaggcgatgacggcccctccggtaaaaatgctgcctcttctccctccgtccccagccatccctccgtcctcagcct

SEQ ID NO: 307247 - DNA, 120 bp, Artificial Sequence
  ENSG00000133958_43 (sequence is synthesized)
gagcacagctccgcttgtacaagtaagtgtggaggattgttccaaagacttttcttctaaggactcaggaaataatcagtcagcagggaacactgactctgccctcatcactctggaaga

SEQ ID NO: 307248 - DNA, 120 bp, Artificial Sequence
  ENSG00000133958_44 (sequence is synthesized)
ccctatggacgccgaaggatcctcaaagccagaggagctgccagagttctcctgcggtagcccactgacgctgaagcaaaaacgagacctccttcagaagtcgtttgctctccccgagat

SEQ ID NO: 307249 - DNA, 120 bp, Artificial Sequence
  ENSG00000133958_45 (sequence is synthesized)
gtcgctggatgatcaccctgacccgggcactgagggggagaagcctggggagctgatgccaagttcaggggcaaaaaccgtcctcctcaaagttcccgaagatgcagagaaccccacaga

SEQ ID NO: 307250 - DNA, 120 bp, Artificial Sequence
  ENSG00000133958_46 (sequence is synthesized)
aagtgagaagcctgataccagtgcagaatctgatacagaacagaatcctgaaaggaaggtggaagaggatggagctgaggaatccgaatttaagattcagattgttcccaggcagaggaa

SEQ ID NO: 307251 - DNA, 120 bp, Artificial Sequence
  ENSG00000133958_47 (sequence is synthesized)
gcagaggaagattgctgtcagtgctatccagagagagtacctcgacatctccttcaacattctggacaaactgggagaacagaaagatccagatccttctactaaaggactttcaacttt

SEQ ID NO: 307252 - DNA, 120 bp, Artificial Sequence
  ENSG00000133958_48 (sequence is synthesized)
ggaaatgccacgagaatcttcatctgcccctacgttagatgcaggtgtgccggaaacaagtagccattcctcaatatcaactcagtataggcagatgaaaaggggatccctgggagttct

SEQ ID NO: 307253 - DNA, 120 bp, Artificial Sequence
  ENSG00000133958_49 (sequence is synthesized)
gacaatgagccagttaatgaagcggcagctggagcatcagtctagcgccccccataacatcagcaactgggacactgaacagatacagcctgggaaacgccagtgtaacgtgccaacgtg

SEQ ID NO: 307254 - DNA, 120 bp, Artificial Sequence
  ENSG00000133958_50 (sequence is synthesized)
cctaaaccctgacctggagggacagccattgaggatgagaggtgccaccaaatccagcctgctatcagcaccaagcatagtcagtatgtttgtgcctgcacctgaagagttcactgacga

SEQ ID NO: 307255 - DNA, 120 bp, Artificial Sequence
  ENSG00000133958_51 (sequence is synthesized)
gcagccgacggtgatgacggacaaatgccatgactgtggggccattcttgaagaatacgatgaagagacacttgggctagccatcgtggtcctctccacattcattcacttaagcccaga

SEQ ID NO: 307256 - DNA, 120 bp, Artificial Sequence
  ENSG00000133958_52 (sequence is synthesized)
cctggcagccccgctgctgctggatatcatgcagtctgtgggaagattggcatccagtactaccttttctaatcaagcagaaagcatgatggttcccggcaatgcggcgggggtggccaa

SEQ ID NO: 307257 - DNA, 120 bp, Artificial Sequence
  ENSG00000133958_53 (sequence is synthesized)
gcagttcctgcgctgcatcttccatcagttggcccccaacggcatcttcccgcagctgttccaaagcacgatcaaagatgggacttttttacggaccttagcctcgtctctgatggactt

SEQ ID NO: 307258 - DNA, 120 bp, Artificial Sequence
  ENSG00000133958_54 (sequence is synthesized)
caatgagctgagctccatcgcagctctcagtcagctcctagagggtctaaataacaaaaagaatttaccagcagggggtgctatgattcgctgtttggaaaacattgcaaccttcatgga

SEQ ID NO: 307259 - DNA, 120 bp, Artificial Sequence
  ENSG00000133958_55 (sequence is synthesized)
agctttgcctatggattctcctagtagcctctggaccacaattagcaaccagtttcagacattttttgccaagctgccttgtgttttacctctgaagtgttctttagattccagtttaag

SEQ ID NO: 307260 - DNA, 120 bp, Artificial Sequence
  ENSG00000133958_56 (sequence is synthesized)
aattatgatttgcctcttgaagatcccttctaccaatgctacaaggagtttgttggaaccattttcaaaactgctcagctttgtaattcagaatgccgtcttcactctggcctacctggt

SEQ ID NO: 307261 - DNA, 120 bp, Artificial Sequence
  ENSG00000133958_57 (sequence is synthesized)
ggagctgtgtggcttatgttaccgagctttcactaaggaacgagataaattctacttgtctcgtagtgttgttctagaacttctgcaggccctaaagctcaaatctcctttaccagatac

SEQ ID NO: 307262 - DNA, 120 bp, Artificial Sequence
  ENSG00000133958_58 (sequence is synthesized)
aaaccttcttctgcttgttcagtttatttgtgcagatgctggaaccaaactagctgagtcaacaatcctgagcaagcagatgatagcctctgtacctggatgtgggactgcagcgatgga

SEQ ID NO: 307263 - DNA, 120 bp, Artificial Sequence
  ENSG00000133958_59 (sequence is synthesized)
gtgtgtgaggcagtacatcaacgaagtgctggatttcatggcagacatgcacacgctgaccaaactgaagagccacatgaagacatgttcccagcctctgcatgaagatacctttggggg

SEQ ID NO: 307264 - DNA, 120 bp, Artificial Sequence
  ENSG00000133958_60 (sequence is synthesized)
acatctcaaagtggggctggcccagattgcagccatggacatctcacggggcaaccacagagataacaaagctgtgatccgctatctgccttggctttatcatcccccctctgcaatgca

SEQ ID NO: 307265 - DNA, 120 bp, Artificial Sequence
  ENSG00000133958_61 (sequence is synthesized)
gcaaggacctaaagaattcattgagtgtgtctcccatatccgactgttgtcctggctgctgctgggttccctcactcacaatgcagtgtgcccaaatgcctcctctccctgcctgcccat

SEQ ID NO: 307266 - DNA, 120 bp, Artificial Sequence
  ENSG00000133958_62 (sequence is synthesized)
tcctctggatgcaggctcccacgttgcagaccatcttattgttatcctgattggatttccagagcaatcaaagacctccgtgctgcacatgtgctccctcttccacgcgttcatctttgc

SEQ ID NO: 307267 - DNA, 120 bp, Artificial Sequence
  ENSG00000133958_63 (sequence is synthesized)
tcagctgtggacagtttattgcgagcaaagtgccgtcgctacaaatctccaaaatcagaatgaattcagcttcacggcgatactgacagcactagaattttggagtagggtgacacccag

SEQ ID NO: 307268 - DNA, 120 bp, Artificial Sequence
  ENSG00000133958_64 (sequence is synthesized)
catccttcagctaatggcccataacaaagtgatggtagaaatggtgtgtctccatgtgattagtttaatggaggcattgcaggaatgcaattcgaccatttttgtcaagctgatacctat

SEQ ID NO: 307269 - DNA, 120 bp, Artificial Sequence
  ENSG00000133958_65 (sequence is synthesized)
gtggttgccaatgattcagtcaaatatcaagcacttatctgcgggactccagcttcgcctccaggctattcagaaccacgtgaaccaccacagcctaaggacgctgccgggctcgggcca

SEQ ID NO: 307270 - DNA, 120 bp, Artificial Sequence
  ENSG00000133958_66 (sequence is synthesized)
gagcagtgctggcctggcagccctccgaaagtggttgcagtgcactcagttcaaaatggcccaggtggagatccagtcctcggaagcagcctctcaattttatcctctatgagtggactc

SEQ ID NO: 307271 - DNA, 120 bp, Artificial Sequence
  ENSG00000133958_67 (sequence is synthesized)
ctcggcgctcagtgtcaacactctggtttagcaataatgggtttaaaaacaaacaatttgatccaagcaggttggggaacatattggtactgtacattctctttctagtttagtaaaaga

SEQ ID NO: 307272 - DNA, 120 bp, Artificial Sequence
  ENSG00000133958_68 (sequence is synthesized)
tgtgcaaaggccagagagggccgaaaatgaagctttcttgctacacatatttctgatgactccttgggctatctgattaagtgtttccttacattattttttaaaaaccaaatcattttt

SEQ ID NO: 307273 - DNA, 120 bp, Artificial Sequence
  ENSG00000133958_69 (sequence is synthesized)
ctttaactaacttctattttttttaagaaaaaaaaatagactggtgggtactcacagaaaagttgtataagtccccctgttgctatttttgatgatagagaataaatagggtttttgaaa

SEQ ID NO: 307274 - DNA, 120 bp, Artificial Sequence
  ENSG00000133958_70 (sequence is synthesized)
tacttttctcagaccttgttaagcattttgtcccgcacagggaagaaggaaaaccaagatgcctccaatttgacagtgcccatgaccatgtgtctttttcctgtgccattcccactcacc

SEQ ID NO: 307275 - DNA, 120 bp, Artificial Sequence
  ENSG00000133958_71 (sequence is synthesized)
gtccgaatggtagcgacacgggcctaagggagggggaaagcgagggggtggggggtggggggtatgcactcttttcctcgcaacatcgctggcggagcgagggagctcacacgacacaga

SEQ ID NO: 307276 - DNA, 120 bp, Artificial Sequence
  ENSG00000133958_72 (sequence is synthesized)
tgtagtgttttttcttaaaatccactcttggcaatgcaataaaaaaaaccgtcaccataagccagtgacacctgactgaagctttttgtctttatcctgggaaaagtggcagcttgcaag

SEQ ID NO: 307277 - DNA, 120 bp, Artificial Sequence
  ENSG00000133958_73 (sequence is synthesized)
gaacattacaaagtgcacttagaaattaggtggttaaactgtgccaattgttttcgttgttttataatatcattttccaaaactgtccagtaagttttattatttttaaaactagttttt

SEQ ID NO: 307278 - DNA, 120 bp, Artificial Sequence
  ENSG00000133958_74 (sequence is synthesized)
caactcattagttctaggctgtactctcttgtaagctttatgataaccactttagttttgtgaataataaattttattcttttgttaatacttgtatacaatttaattgaaaactgtagc

SEQ ID NO: 307279 - DNA, 120 bp, Artificial Sequence
  ENSG00000133958_75 (sequence is synthesized)
ttgcacactggaccagatgagtccctcactggcacagtgccctgcacctggagtgatgtttcataaaacggaattttaatagtgtaagagcaccaagatttctctgcacctatacctagc

SEQ ID NO: 307280 - DNA, 120 bp, Artificial Sequence
  ENSG00000133958_76 (sequence is synthesized)
gttggactgtgcattccaaatgaaattcctcctctttatccctgtaatgcactgactaacagaagacttactacacatttaaactgtatattgacatgctattaaatgcgttttttatta

SEQ ID NO: 307281 - DNA, 120 bp, Artificial Sequence
  ENSG00000133958_77 (sequence is synthesized)
ggaccgcagcgcacagggaagccatgctgagggttcctcctgcattttcttcctcgcggtcctcaggaacatcctcgcgccctccggccccggcgctccagcccgccccggatccgcctc

SEQ ID NO: 307282 - DNA, 120 bp, Artificial Sequence
  ENSG00000133958_78 (sequence is synthesized)
cctctccttcctccccgaggttgagacgaagcgtgggacgcacctgggtccctctctggtcaccctgctgaggctccgggggctgctccgggagcaggatttacaggcccggagaacgcc

SEQ ID NO: 307283 - DNA, 120 bp, Artificial Sequence
  ENSG00000133958_79 (sequence is synthesized)
aatgggagatccaaatggtcggggactccggcgctttaagaggcttttctctgggaaacacccgtcccctccgtgcgccttatgaatggaaatactcctcccccggtcgagcccattttc

SEQ ID NO: 307284 - DNA, 120 bp, Artificial Sequence
  ENSG00000133958_80 (sequence is synthesized)
ccatttcaccaggagccgcagcctgctctctcctttcggtctccccgcccacatcaacgcgggcagctccaggaggggacggacaggaagcctttggccgcctattaaatcccacccatt

SEQ ID NO: 307285 - DNA, 120 bp, Artificial Sequence
  ENSG00000133958_81 (sequence is synthesized)
acgtacttgctgacccagaatgctctttgacatgctgccaaaaaataaacctgtcctcccacaaaaacctcaattgtcctttcatgaagaatgaaaattttgagcttagaattaccactt

SEQ ID NO: 307286 - DNA, 120 bp, Artificial Sequence
  ENSG00000133958_82 (sequence is synthesized)
taatgcttgatttcaactagttaagtaaattaataggtatgtatcaatatatttgccttcaagcagcttagattgtagctggaacaaaagctataacagggatgaaatcggtgcaagatt

SEQ ID NO: 307287 - DNA, 120 bp, Artificial Sequence
  ENSG00000133958_83 (sequence is synthesized)
gtacaagcccctggctctgccttttagggaggctaaagaagagagaggcatgtatgggtttgttgacttgggaactcagagtaggtttgagcccacccttttgtgtggtcagccttcctg

SEQ ID NO: 307288 - DNA, 120 bp, Artificial Sequence
  ENSG00000133958_84 (sequence is synthesized)
tccagaggaaaagtgtagagtgggaatgagaagggtaggaggaaaagatcactggggagcaggaaaatgggcagctgtgttatatctcctcatctctttcctcccctctactggggatgc

SEQ ID NO: 307289 - DNA, 70 bp, Artificial Sequence
  ENSG00000133958_85 (sequence is synthesized)
aactgcaaccttcgcctcctgggtttaagtgatcctcctgcctcagccccccagtagctgtaattacagg

SEQ ID NO: 307290 - DNA, 71 bp, Artificial Sequence
  ENSG00000133958_86 (sequence is synthesized)
catctcagctaactgcaaccttcgcctcctgggtttaagtgatcctcctgcctcagccccccagtagctgt

SEQ ID NO: 307291 - DNA, 79 bp, Artificial Sequence
  ENSG00000133958_87 (sequence is synthesized)
gagaagaaatttctaaaggcaggagtggaaagggtttagaaagagaagctagtcagagaggcagtcagccttgtggaag

SEQ ID NO: 307292 - DNA, 120 bp, Artificial Sequence
  ENSG00000133958_88 (sequence is synthesized)
aaagagaagctagtcagagaggcagtcagccttgtggaagaatgctgtgtaatcctgtgtcaccaaaggctgttcttttctcaagaagctgagatccaggattagagtggaaaacaagaa

SEQ ID NO: 307293 - DNA, 120 bp, Artificial Sequence
  ENSG00000133958_89 (sequence is synthesized)
aaacagatatatcattttgttgacactcaattgccttggcgttttgttttatgtgattgcctgcaagaccacactttcaatcccttccttcaataagcatttgttatgcacccaatgaaa

SEQ ID NO: 307294 - DNA, 120 bp, Artificial Sequence
  ENSG00000133958_90 (sequence is synthesized)
ttctgcaagattaagaccgtatgcatcgcaattgctaatggaaaccttatcagccaattatgtttcttctgagaagaaaatacatcttatcatttgccctcctgtggatgttagaaacac

SEQ ID NO: 307295 - DNA, 120 bp, Artificial Sequence
  ENSG00000133958_91 (sequence is synthesized)
aactttgtgctaatgtcttatttaaagttgtttagattcccagactgtctttccccccgcccccaaattgtttttcggcttacttttataaagataaatcatggagtcaagcaagagttg

SEQ ID NO: 307296 - DNA, 120 bp, Artificial Sequence
  ENSG00000133958_92 (sequence is synthesized)
gcttcccaggcatttctgtctcaaaataatgaagagaaataaaaggctagaaatataatcaaaattctgtgatcagtttttaaaaccagagacaaaacaaaggaaaattcattctctatc

SEQ ID NO: 307297 - DNA, 120 bp, Artificial Sequence
  ENSG00000133958_93 (sequence is synthesized)
taattcttcatgtaccatcttttcaactgaaatctctagagatacaggaaaatacaaaatgaaaacaagaaggccagttgggaactcactaaagcacacattggcatgacctacacaggg

SEQ ID NO: 307298 - DNA, 120 bp, Artificial Sequence
  ENSG00000133958_94 (sequence is synthesized)
cgaggagccaggggaccttcacagagcttcggcaagttctgggaggtcacattggtcttggggacagctcgggtttgggacagggcaagctgacgatgtgataaaatggcgcacccatcc

SEQ ID NO: 307299 - DNA, 120 bp, Artificial Sequence
  ENSG00000133958_95 (sequence is synthesized)
caatgatccaaatgatgttcacaaaaggaattaggcagtcgattcctaatatttctactcagatccgggtttgattcctaactatggtacttgcgattttgtgagcttgacaagtgtgtc

SEQ ID NO: 307300 - DNA, 120 bp, Artificial Sequence
  ENSG00000133958_96 (sequence is synthesized)
taacctctctattattcagattttcatctgtgaaatagacgaggggatggttggagagtgatggaggtgatataggaaaagcctctggcgccatctctggcgtgttgtaggtgctctctc

SEQ ID NO: 307301 - DNA, 120 bp, Artificial Sequence
  ENSG00000133958_97 (sequence is synthesized)
tgcacgtgctttccgctaggaggaggatctccgctgctgctgctatgattatgaacttctgggcgtgtattcacgtatatcacctgctttactcccatgctttgaagagactactattat

SEQ ID NO: 307302 - DNA, 120 bp, Artificial Sequence
  ENSG00000133958_98 (sequence is synthesized)
ccccattttacagatgaggaaacatcctaacatggcagaatgattattctccctaatctagtttagggatgggaatgtcagtttcattaaagggcaagggggtgggtagatttcttcagc

SEQ ID NO: 307303 - DNA, 120 bp, Artificial Sequence
  ENSG00000133958_99 (sequence is synthesized)
aaattaaggtgccttctcttaaaaaatgtgctttgttctctgagcacactcccactggtggagaagagagcacagcagatagtttcaaggtgatgaatcatgactttgtaactctgagat

SEQ ID NO: 307304 - DNA, 120 bp, Artificial Sequence
  ENSG00000133958_100 (sequence is synthesized)
aacgttatgcctttgtgcttcccctgtgctccctggcaagaccaaagccatgcgggaggactccgtggagggccacagcctgctgggatgcaatgcactgatgccgtcttcttccttttc

SEQ ID NO: 307305 - DNA, 120 bp, Artificial Sequence
  ENSG00000133961_0 (sequence is synthesized)
caggctgtaaaaattaaaatgaacaaattacggcaaagttttaggagaaagaaggatgtttatgttccagaggccagtcgtccacatcagtggcagacagatgaagaaggcgttcgcacc

SEQ ID NO: 307306 - DNA, 120 bp, Artificial Sequence
  ENSG00000133961_1 (sequence is synthesized)
ggaaaatgtagcttcccggttaagtaccttggccatgtagaagttgatgaatcaagaggaatgcacatctgtgaagatgctgtaaaaagattgaaagctactggaaagaaagcagttaaa

SEQ ID NO: 307307 - DNA, 120 bp, Artificial Sequence
  ENSG00000133961_2 (sequence is synthesized)
gcagttctgtgggtctcagcagatggactcagagttgtggatgaaaaaactaaggacctcatagttgaccagacgatagagaaagtttctttctgtgccccagacaggaactttgataga

SEQ ID NO: 307308 - DNA, 120 bp, Artificial Sequence
  ENSG00000133961_3 (sequence is synthesized)
gccttttcttacatatgccgtgatggcaccactcgtcgctggatctgtcactgcttcatggctgtcaaggacacaggtgaaaggttgagccatgcagtaggctgtgcttttgcagcctgt

SEQ ID NO: 307309 - DNA, 120 bp, Artificial Sequence
  ENSG00000133961_4 (sequence is synthesized)
ttagagcgcaagcagaagcgggagaaggaatgtggagtgactgctacttttgatgctagtcggaccacttttacaagagaaggatcattccgtgtcacaacagccactgaacaagcagaa

SEQ ID NO: 307310 - DNA, 120 bp, Artificial Sequence
  ENSG00000133961_5 (sequence is synthesized)
agagaggagatcatgaaacaaatgcaagatgccaagaaagctgaaacagataagatagtcgttggttcatcagttgcccctggcaacactgccccatccccatcctctcccacctctcct

SEQ ID NO: 307311 - DNA, 120 bp, Artificial Sequence
  ENSG00000133961_6 (sequence is synthesized)
acttctgatgccacgacctctctggagatgaacaatcctcatgccatcccacgccggcatgctccaattgaacagcttgctcgccaaggctctttccgaggttttcctgctcttagccag

SEQ ID NO: 307312 - DNA, 120 bp, Artificial Sequence
  ENSG00000133961_7 (sequence is synthesized)
aagatgtcaccctttaaacgccaactatccctacgcatcaatgagttgccttccactatgcagaggaagactgatttccccattaaaaatgcagtgccagaagtagaaggggaggcagag

SEQ ID NO: 307313 - DNA, 120 bp, Artificial Sequence
  ENSG00000133961_8 (sequence is synthesized)
agcatcagctccctgtgctcacagatcaccaatgccttcagcacacctgaggaccccttctcatctgctccgatgaccaaaccagtgacagtggtggcaccacaatctcctaccttccaa

SEQ ID NO: 307314 - DNA, 120 bp, Artificial Sequence
  ENSG00000133961_9 (sequence is synthesized)
gctaatggcactgactcagccttccatgtgcttgctaagccagcccatactgctctagcacccgtagcaatgcctgtgcgtgaaaccaacccttgggcccatgcccctgatgctgctaac

SEQ ID NO: 307315 - DNA, 120 bp, Artificial Sequence
  ENSG00000133961_10 (sequence is synthesized)
aaggaaattgcagccacatgttcggggaccgagtggggtcaatcttctggtgctgcctctccaggtctcttccaggccggtcatagacgtactccctctgaggccgaccgatggttagaa

SEQ ID NO: 307316 - DNA, 120 bp, Artificial Sequence
  ENSG00000133961_11 (sequence is synthesized)
gaggtgtctaagagcgtccgggctcagcagccccaggcctcagctgctcctctgcagccagttctccagcctcctccacccactgccatctcccagccagcatcacctttccaagggaat

SEQ ID NO: 307317 - DNA, 120 bp, Artificial Sequence
  ENSG00000133961_12 (sequence is synthesized)
gcattcctcacctctcagcctgtgccagtgggtgtggtcccagccctgcaaccagcctttgtccctgcccagtcctatcctgtggccaatggaatgccctatccagcccctaatgtgcct

SEQ ID NO: 307318 - DNA, 120 bp, Artificial Sequence
  ENSG00000133961_13 (sequence is synthesized)
catccccatcagtcacccagcctggtcaggcagcagacattccctcactacgaggcaagcagtgctaccaccagtcccttctttaagcctcctgctcagcacctcaacggttctgcagct

SEQ ID NO: 307319 - DNA, 120 bp, Artificial Sequence
  ENSG00000133961_14 (sequence is synthesized)
ttcaatggtgtagatgatggcaggttggcctcagcagacaggcatacagaggttcctacaggcacctgcccagtggatccttttgaagcccagtgggctgcattagaaaataagtccaag

SEQ ID NO: 307320 - DNA, 120 bp, Artificial Sequence
  ENSG00000133961_15 (sequence is synthesized)
cagcgtactaatccctcccctaccaaccctttctccagtgacttacagaagacgtttgaaattgaactttaagcaatcattatggctatgtatcttgtccataccagacagggagcaggg

SEQ ID NO: 307321 - DNA, 120 bp, Artificial Sequence
  ENSG00000133961_16 (sequence is synthesized)
ggtagcggtcaaaggagcaaaacagactttgtctcctgattagtactcttttcactaatcccaaaggtcccaaggaacaagtccaggcccagagtactgtgaggggtgattttgaaagac

SEQ ID NO: 307322 - DNA, 120 bp, Artificial Sequence
  ENSG00000133961_17 (sequence is synthesized)
atgggaaaaagcattcctagagaaaagctgccttgcaattaggctaaagaagtcaaggaaatgttgctttctgtactccctcttcccttacccccttacaaatctctggcaacagagagg

SEQ ID NO: 307323 - DNA, 120 bp, Artificial Sequence
  ENSG00000133961_18 (sequence is synthesized)
caaagtatctgaacaagaatctatattccaagcacatttactgaaatgtaaaacacaacaggaagcaaagcaatctccctttgtttttcaggccattcacctgcctcctgtcagtagtgg

SEQ ID NO: 307324 - DNA, 120 bp, Artificial Sequence
  ENSG00000133961_19 (sequence is synthesized)
cctgtattagagatcaagaagagtggtttgtgctcaggctggggaacagagaggcacgctatgctgccagaattcccaggagggcatatcagcaactgcccagcagagctatattttggg

SEQ ID NO: 307325 - DNA, 120 bp, Artificial Sequence
  ENSG00000133961_20 (sequence is synthesized)
ggagaagttgagcttccattttgagtaacagaataaatattatatatatcaaaagccaaaatctttatttttatgcatttagaatattttaaatagttctcagatattaagaagttgtat

SEQ ID NO: 307326 - DNA, 120 bp, Artificial Sequence
  ENSG00000133961_21 (sequence is synthesized)
gagttgtaagtaatcttgccaaaggtaaaggggctagttgtaagaaattgtacataagattgatttatcattgatgcctactgaaataaaaagaggaaaggctggaagctgcagacagga

SEQ ID NO: 307327 - DNA, 120 bp, Artificial Sequence
  ENSG00000133961_22 (sequence is synthesized)
tccctagcttgttttctgtcagtcattcattgtaagtagcacattgcaacaacaatcatgcttatgaccaatacagtcactaggttgtagttttttttaaataaaggaaaagcagtattg

SEQ ID NO: 307328 - DNA, 120 bp, Artificial Sequence
  ENSG00000133961_23 (sequence is synthesized)
tcctggttttaaacctatgatggaattctaatgtcattattttaatggaatcaatcgaaatatgctctatagagaatatatcttttatatattgctgcagtttccttatgttaatccttt

SEQ ID NO: 307329 - DNA, 120 bp, Artificial Sequence
  ENSG00000133961_24 (sequence is synthesized)
aacactaaggtaacatgacataatcataccatagaagggaacacaggttaccatattggtttgtaatatgggtcttggtgggttttgttttatcctttaaattttgttcccatgagtttt

SEQ ID NO: 307330 - DNA, 120 bp, Artificial Sequence
  ENSG00000133961_25 (sequence is synthesized)
gtggggatggggattctggttttattagctttgtgtgtgtcctcttcccccaaacccccttttggtgagaacatccccttgacagttgcagcctcttgacctcggataacaataagagag

SEQ ID NO: 307331 - DNA, 120 bp, Artificial Sequence
  ENSG00000133961_26 (sequence is synthesized)
ctcatctcatttttacttttgaacgttggccttacaatcaaatgtaagttatatatatttgtactgatgaaaatttataatctgctttaacaaaaataaatgttcatggtagaagctttt

SEQ ID NO: 307332 - DNA, 120 bp, Artificial Sequence
  ENSG00000133961_27 (sequence is synthesized)
ggcgcttgagttggtcgggggcagcggcagatttgaggcttaagcaacttcttccggggaagagtgccagtgcagccactgttacaattcaagatcttgatctatatccatagattggaa

SEQ ID NO: 307333 - DNA, 120 bp, Artificial Sequence
  ENSG00000133961_28 (sequence is synthesized)
tattggtgggccagcaatcctcagacgcctcacttaggacaaatgaggaaactgaggcttggtgaagttacgaaacttgtccaaaatcacacaacttgtaaagggcacagccaagattca

SEQ ID NO: 307334 - DNA, 120 bp, Artificial Sequence
  ENSG00000133961_29 (sequence is synthesized)
gcttgagttggtcgggggcagcggcagctgagctgggatgggagacccaactggcctggccgctccggctctgaggatccctaagggaccaggaaagaagtcctcgaggagtggctcgcg

SEQ ID NO: 307335 - DNA, 120 bp, Artificial Sequence
  ENSG00000133961_30 (sequence is synthesized)
ctcagcggaagttttactccagagatagtgccctgcttctactggaagaactacacactttttctccaagggtctttttctttttctttttaataaaccttcatagtcatgtgtaccaaa

SEQ ID NO: 307336 - DNA, 120 bp, Artificial Sequence
  ENSG00000133961_31 (sequence is synthesized)
aaagattttgctcagtacattttagtgacccagtaaaaactgtgtttctgttaaaaagatgtgggcttgctaataaggagcatctcagccaagcgcggtggctcactcctgtaatcctag

SEQ ID NO: 307337 - DNA, 82 bp, Artificial Sequence
  ENSG00000133961_32 (sequence is synthesized)
gaggctgaggcaggaggattttcaagaccctgtctctattaatttcaaaaattttttcttaaataataaaataataattaaa

SEQ ID NO: 307338 - DNA, 120 bp, Artificial Sequence
  ENSG00000133961_33 (sequence is synthesized)
acttttccttctttctacagtaccttggccatgtagaagttgatgaatcaagaggaatgcacatctgtgaagatgctgtaaaaagattgaaagctactggaaagaaagcagttaaagcag

SEQ ID NO: 307339 - DNA, 120 bp, Artificial Sequence
  ENSG00000133961_34 (sequence is synthesized)
gaagcatacccatactaccaaggctaatctccttaacctaaattcaattcattgtaataatatttacagagtagcttctaatttgcccatagaatcaagatcaaagtccttatcaggaat

SEQ ID NO: 307340 - DNA, 120 bp, Artificial Sequence
  ENSG00000133961_35 (sequence is synthesized)
agaaggccttctgtgattaggcctttcctactctatctcccattacgcctttcccattgccaagtctacttaccaagccatactgaaatatttatagagccccagacttgccatgttgtt

SEQ ID NO: 307341 - DNA, 120 bp, Artificial Sequence
  ENSG00000133961_36 (sequence is synthesized)
tgcttccatgtcctgtactgctgtttcttctgcctggcatgtccagtacctctgttacttccctgtctccctacccctacctaagcatcaagaaaaattattccagcacccagttcagtc

SEQ ID NO: 307342 - DNA, 120 bp, Artificial Sequence
  ENSG00000133961_37 (sequence is synthesized)
ttctcctttgtataaccttccccaattccacaaagagatttgattataccttttttctgacatcattgtaccttgttctcagctctactgtagcatttacctacggtattctttattttt

SEQ ID NO: 307343 - DNA, 120 bp, Artificial Sequence
  ENSG00000133961_38 (sequence is synthesized)
tgtctgattgttgcctttcagtaaccttccaggtatttccactggctggcatattataggcactcatcaaatttatggtggtggtggagatgatgaggccgagtggatcacaggttattt

SEQ ID NO: 307344 - DNA, 120 bp, Artificial Sequence
  ENSG00000133961_39 (sequence is synthesized)
cagtaaggccatgtcctcatatcaagttttcctgggcttggatcacttatagaggagaatggtagttctaaaagtctcccttgtcgcttctagaggctgctgcgccaaccttagcaccag

SEQ ID NO: 307345 - DNA, 120 bp, Artificial Sequence
  ENSG00000133961_40 (sequence is synthesized)
attccttttgatctatactttttatgataatctgatacctattctcagccttcatattgcttttgttttattttgctgtatccttgaggcagttaaaaagaaaggacactgttaaattac

SEQ ID NO: 307346 - DNA, 120 bp, Artificial Sequence
  ENSG00000133961_41 (sequence is synthesized)
tattacattccatcacaggaggaattatgcatcagcttgttctcatgtgattctcatgtgccaaaaagtattttctgagccaataaaaagaaaattattttttcagtagtttttaaatct

SEQ ID NO: 307347 - DNA, 120 bp, Artificial Sequence
  ENSG00000133961_42 (sequence is synthesized)
tcctgtgtccccaaaatgtctccatgaatttaatgtcaaattaaaaaccaagccaaggctgggtacagtggtgcacacttgtagtcctggctacacgtggggctgggacaaggggatcac

SEQ ID NO: 307348 - DNA, 73 bp, Artificial Sequence
  ENSG00000133961_43 (sequence is synthesized)
gttcaaggctgtaatgctttatgatcattcgtctctaaaattattagaggctgggcacagtggctcacacctg

SEQ ID NO: 307349 - DNA, 120 bp, Artificial Sequence
  ENSG00000133961_44 (sequence is synthesized)
gagactctgtctcaagaaaaaaaaaaaattattaggaaaaatgtctgtgttaactctgagagaacaaataatggctttttaaagactgttaatagaataatgaagacttactgtgttttt

SEQ ID NO: 307350 - DNA, 120 bp, Artificial Sequence
  ENSG00000133961_45 (sequence is synthesized)
gacttactgtgtttttaacgtgaaaattttaggtgaccaagggtcctgctataacatactgggggtcataggatagtagaatggtcaacatctcaatttagacatgttacttcctgctct

SEQ ID NO: 307351 - DNA, 120 bp, Artificial Sequence
  ENSG00000133961_46 (sequence is synthesized)
aaatacacttgtggacgctacttgtggtgtaactccttatgtatttaataattatctgactctggttttcttggttgatttttttaaatgggtgaagaatctagttatgaattctttgcc

SEQ ID NO: 307352 - DNA, 120 bp, Artificial Sequence
  ENSG00000133961_47 (sequence is synthesized)
ctttatggaatgtgatatcttggtttttattccatctgttacttcccttttacttaattttatcttattgttttgcgttgtgtttctaaaataatggctttggcttgttttttcctgaat

SEQ ID NO: 307353 - DNA, 120 bp, Artificial Sequence
  ENSG00000133961_48 (sequence is synthesized)
gtttctgcagtttggtttgagtatctgggtttgggcaccactcctgaacttggactccatctgtacttgtgacttttggaaggcagagtcagtgttttctgtggaagatgacattttttt

SEQ ID NO: 307354 - DNA, 120 bp, Artificial Sequence
  ENSG00000133961_49 (sequence is synthesized)
gcatacatatttttatttgaaatgaaattattgatagtgattttttttcatttcttgtaaatatttgcaccaggaagccaaaggggggaaaaatcatgctatctgtactagaaaatttaa

SEQ ID NO: 307355 - DNA, 120 bp, Artificial Sequence
  ENSG00000133961_50 (sequence is synthesized)
cctgtattactgttatctaatatgctttagtggtcttcagactattcactaattaagcatgttctttaataccaccaaataatattcattgttatgcacaacaactgcaaagagattgag

SEQ ID NO: 307356 - DNA, 120 bp, Artificial Sequence
  ENSG00000133961_51 (sequence is synthesized)
tcccaagatctacaaaggattgtgagagttggtggttgagatttgtcacaatcagaatgggactcaactggtacccacagtcttacatttactcaaatttaatccagttcaaaattttac

SEQ ID NO: 307357 - DNA, 120 bp, Artificial Sequence
  ENSG00000133961_52 (sequence is synthesized)
acatttactcaaatttaatccagttcaaaattttactactgcatgcttttattcaaatgaaccacaaatgcatgatttaaagactgctttaggtcgggcgtggtggctcatacctgtaat

SEQ ID NO: 307358 - DNA, 66 bp, Artificial Sequence
  ENSG00000133961_53 (sequence is synthesized)
atggtaaaacctcgtgtgtattaaaaataccaaatgagttgggcgtggtggtgtgcacctgtaatc

SEQ ID NO: 307359 - DNA, 120 bp, Artificial Sequence
  ENSG00000133961_54 (sequence is synthesized)
taaataaataaagactgttatatatgacattctttgacacctaatcaaagatatatggttaagcttatgcttatttagacctttctaatgctacagttcccaaagttctcctcccctaac

SEQ ID NO: 307360 - DNA, 120 bp, Artificial Sequence
  ENSG00000133961_55 (sequence is synthesized)
aagactacatattaggaattcataggaactgagtttttaagatctttttcacagtcttaatttataaatcactgaatgagaataaaagatctaacatttctgtcttagtagatatgcttt

SEQ ID NO: 307361 - DNA, 120 bp, Artificial Sequence
  ENSG00000133961_56 (sequence is synthesized)
gtgacatatagtacattactaagccttttatctgtctgaaaaatggatccgaaccctgcttctaacttatgttttaagagacactgggaaggaaatgggtaaaaggacctagagggcttt

SEQ ID NO: 307362 - DNA, 120 bp, Artificial Sequence
  ENSG00000133961_57 (sequence is synthesized)
aaattttctcataatcaaagagaacccttagcaatataaaaccttataacaaagttgaaaatcttaaaaaccgcttcctttagagtggctagtttaatggcttcaaaaatatttactcca

SEQ ID NO: 307363 - DNA, 120 bp, Artificial Sequence
  ENSG00000133961_58 (sequence is synthesized)
ttatagtaagctatctgaggaatcagagtgcagttgaagaagctgcagagacatctcttacccccttcctcccatcctgaaatacctttttaattctgatgtatctgatctctttgagaa

SEQ ID NO: 307364 - DNA, 120 bp, Artificial Sequence
  ENSG00000133961_59 (sequence is synthesized)
gcaaatgaatcaagtacctgcatcttaaaggaagcagcagaggtcccagggcttaaggctgcaaagcatccacggactatgatgctagcagagagatttaacagtaatactgtttatatg

SEQ ID NO: 307365 - DNA, 120 bp, Artificial Sequence
  ENSG00000133961_60 (sequence is synthesized)
atattattgctgttttttagtgctttctagtcacaaaagtctatagattttgagaggtaagcctataactctttttttctatagccctgttaatttaatttagtgtgtgattttatagag

SEQ ID NO: 307366 - DNA, 120 bp, Artificial Sequence
  ENSG00000133961_61 (sequence is synthesized)
tgtgagttttatttaggtacacatggcatcacagcagaaatgcctgtacaaacattcaagttagttggcagtctataaatgtgagttgggtatattttacaactaaatgatagggcttga

SEQ ID NO: 307367 - DNA, 120 bp, Artificial Sequence
  ENSG00000133961_62 (sequence is synthesized)
aaatacttttgaattcttgtatataagtagggttaaaaccaacaagacaagcacaaacaattcaagttaactaatagacattaatataattttgaggccaggtatagtggcttacagctg

SEQ ID NO: 307368 - DNA, 120 bp, Artificial Sequence
  ENSG00000133961_63 (sequence is synthesized)
tacagctgtaatctcaatactttaggaggctgaggaggaaacatcacttgaggccaggagtttgtgaccagactgtgcaacatagactctatcccttaaaaaaaaaaaaaaaaaaaaaaa

SEQ ID NO: 307369 - DNA, 120 bp, Artificial Sequence
  ENSG00000133961_64 (sequence is synthesized)
gtcccgggtgacagggagcagacttgctccaagtaggggcgtctgaggaaacgctcggagggggttggggaccctcctgagaaaagcggctgtccaagggagggggctcctggagagatg

SEQ ID NO: 307370 - DNA, 120 bp, Artificial Sequence
  ENSG00000133961_65 (sequence is synthesized)
gcggagttctcccgaggaaggtaggctacggccggacccgcgcgggtcaggccaggaggtcccttgggacgtccagctgctccggtctagcgcgctgaccggcggccactgtgtgaggaa

SEQ ID NO: 307371 - DNA, 120 bp, Artificial Sequence
  ENSG00000133961_66 (sequence is synthesized)
tctattgctgtgtaacaaagtacctcaaacttagtggcttaaaacaacagtcatttattttgttcatatatttgcagtttgagcaaggcttgattggtagggatgcttgtctctgttaac

SEQ ID NO: 307372 - DNA, 120 bp, Artificial Sequence
  ENSG00000133961_67 (sequence is synthesized)
tggagtggctcagtggctgggaactgggatcctttgaaggtaggcttgctcactcacatatctggtggttaaagctggctgttggctaggacctcagcctgggctgttggcaagaacacc

SEQ ID NO: 307373 - DNA, 120 bp, Artificial Sequence
  ENSG00000133961_68 (sequence is synthesized)
ttcatgtgacttctccttgtggctgcttggcttcttcacagcatggtgcctgggttccgagagagagagcatcccaagagaggaaggcaaaggtgcatggcatatttgacttggttttgg

SEQ ID NO: 307374 - DNA, 120 bp, Artificial Sequence
  ENSG00000133961_69 (sequence is synthesized)
aagtcacatagtgttactttgctctgtcctactggttgatgtagttgtaaaggttctcccaagtttcaaggaagctgtggacatagaccccaccacttgaaaggatcaacatcatattgt

SEQ ID NO: 307375 - DNA, 120 bp, Artificial Sequence
  ENSG00000133962_0 (sequence is synthesized)
gctgattggctgttaccaaaggtgactagagtgctaagccagtcaacagggaaaacttggctcctgactttgggtctttcttctcagtctatatggaagaaaactgagaaaaaatataaa

SEQ ID NO: 307376 - DNA, 120 bp, Artificial Sequence
  ENSG00000133962_1 (sequence is synthesized)
aaagaagaacacaactagttgcgcatctcctaaagagatggaatcgccacttatatatgtttcagttttgcttttgaacatatttgaattttcatcaggaatagtatataataaagatga

SEQ ID NO: 307377 - DNA, 120 bp, Artificial Sequence
  ENSG00000133962_2 (sequence is synthesized)
tacagagaaacgctttgcatgttctaacaaagggttccctcaagagaatgaaataatcaagttgtatcttttcttagaaaacttgaaaatccagtgtttcttccaaactgaaaatgaaat

SEQ ID NO: 307378 - DNA, 120 bp, Artificial Sequence
  ENSG00000133962_3 (sequence is synthesized)
tgcatcaaaagcaatgctaagtgtgttcacatcaggaggacttgctcccagcttgggaatcatgaatagtacatataatggcatcttccactttaatttaacgttgttcagtgatcggat

SEQ ID NO: 307379 - DNA, 120 bp, Artificial Sequence
  ENSG00000133962_4 (sequence is synthesized)
tttgtggttggttgatattcctagagaaaacatcacacaaagcacagatattgcagctgtagaagaatggttagtaagaatcactttacatcatggactaaatatttatgctactgaagg

SEQ ID NO: 307380 - DNA, 120 bp, Artificial Sequence
  ENSG00000133962_5 (sequence is synthesized)
aactctattggatgttattcgagaaccgattcttcagtggactcctggggatgtgattccagaaagtgaaatcagtaaattatatccacatgtggtagatctcaaagtgacaaaatgccc

SEQ ID NO: 307381 - DNA, 120 bp, Artificial Sequence
  ENSG00000133962_6 (sequence is synthesized)
ctgtgccaatgatgtggcattactaggcttcattgtggatacaatagttgatggtgtttacataggcataacctttggtggattctggcatgattatgataccacatggtttaacatgac

SEQ ID NO: 307382 - DNA, 120 bp, Artificial Sequence
  ENSG00000133962_7 (sequence is synthesized)
acagactatctattcccaacttcaagaagaatatgaagacctttcattggtggatatggttttaacgaatcattttttagttatcctcacctctttgggcctttttgtaagtgaagatct

SEQ ID NO: 307383 - DNA, 120 bp, Artificial Sequence
  ENSG00000133962_8 (sequence is synthesized)
tcgttatccatcacgccacagcttatcgttttccagggcagacttttgtggttttgaaagggttgactatgtgaaaggaaaactgtggtataatgaaagatgttttgctaacagagagca

SEQ ID NO: 307384 - DNA, 120 bp, Artificial Sequence
  ENSG00000133962_9 (sequence is synthesized)
ctttgaagttgattatgttacagttacctttgagagaaacagaaccctaagtgagtcaagctcttgtttttatagtcaggaaccatttcttgaatgggtaccctgcttacctcacatttt

SEQ ID NO: 307385 - DNA, 120 bp, Artificial Sequence
  ENSG00000133962_10 (sequence is synthesized)
taaaggaataaaaatttttccaactgtgctaacatttcttgttgaccaagagcgtggtactggagtttacctcttctataacaaggtcaggaaaactgccattgcctctgtgagcaccct

SEQ ID NO: 307386 - DNA, 120 bp, Artificial Sequence
  ENSG00000133962_11 (sequence is synthesized)
gagaaataatgaaccaaattcacaatcaaaatttccaatttttcggtttccttcatcattctcttctcccgttggaatggtatttcatccccgaagccactttttgtatgcttatggcaa

SEQ ID NO: 307387 - DNA, 120 bp, Artificial Sequence
  ENSG00000133962_12 (sequence is synthesized)
tcagatatggctttcagttgatggcggcaacacctttcaattaatagctaactttcatgatgatatcataaagaagacttttcatagtttttatacatcagctattacttttgtttctca

SEQ ID NO: 307388 - DNA, 120 bp, Artificial Sequence
  ENSG00000133962_13 (sequence is synthesized)
acgtggaaaggtttactcgacaaaggcaggaatgggaagatacagtgcagtcggaagtgttactgagagaattttcacattatactatgatcacttgggattcctacataagctgactct

SEQ ID NO: 307389 - DNA, 120 bp, Artificial Sequence
  ENSG00000133962_14 (sequence is synthesized)
gggtcgctttgaagctagtggaccacccacagcctttggaaattctagaaatctttttggacagcctccagatatgggctttgagactgcgcttgccccacagcacacctccttagatga

SEQ ID NO: 307390 - DNA, 120 bp, Artificial Sequence
  ENSG00000133962_15 (sequence is synthesized)
gaaaactggaagagcttacataagaaaggtattgcaacatacgactcctaaaggatttttgtcctcagttattgcagaaatgaaagagccctttggattagaagaagtgaatgagagctc

SEQ ID NO: 307391 - DNA, 120 bp, Artificial Sequence
  ENSG00000133962_16 (sequence is synthesized)
ttgtttgtctagttcccttttgattaataaagctggaaatgtctataaactcactcttgattcacaagttgttcaggccttgtttgaagatacagatatagagaagactgtagtgcttcc

SEQ ID NO: 307392 - DNA, 120 bp, Artificial Sequence
  ENSG00000133962_17 (sequence is synthesized)
cgggtacagcagcttcctcatcacaagcattttagataataagaatgcattagccattgctaccatgcctgaaagtgcacccaacaatatgacctttctaaagagcacatggttcttata

SEQ ID NO: 307393 - DNA, 120 bp, Artificial Sequence
  ENSG00000133962_18 (sequence is synthesized)
caactttgggcaaaggaatggacgaacatggaaaatatattcaaaaccatgtaattattggtttcaacatgatgattcaccatccctcaacatcgtgaaatacattgatctgggaaactc

SEQ ID NO: 307394 - DNA, 120 bp, Artificial Sequence
  ENSG00000133962_19 (sequence is synthesized)
ttatgttttaaaagctaaggtcatacggaatgcaaaaggttttcgaatgcttgaaataccactactgactgtgtttgttggaaaccctaatttgttggaagttacagctgaagtgacttt

SEQ ID NO: 307395 - DNA, 120 bp, Artificial Sequence
  ENSG00000133962_20 (sequence is synthesized)
tgatgatactgacagttatgtaataacaatttctgcagctagcaaagttttacatcagggttcaacttcactggcatttattatgtggtcagcctctactgagtgctttgttacgacaat

SEQ ID NO: 307396 - DNA, 120 bp, Artificial Sequence
  ENSG00000133962_21 (sequence is synthesized)
ggtgccaacactgaaaagcagctgtagttatctcagatctatgcatcacattcctagcaaatttatcccatttgaagactggattagtggagttcataaagacagtcagggttttaacct

SEQ ID NO: 307397 - DNA, 120 bp, Artificial Sequence
  ENSG00000133962_22 (sequence is synthesized)
catcaaaactttgccgataaactacaggcctccatctaatatgggaattgctattccactcacagataatttttatcatgcagatcctagcaaacccataccaagaaacatgtttcacat

SEQ ID NO: 307398 - DNA, 120 bp, Artificial Sequence
  ENSG00000133962_23 (sequence is synthesized)
gtcaaagaaaaccggtaaattcaaacagtgtgctaatgtttccactcgggaggagtgtaactgcacaaaggatcagaagttttcacatgctgttgctttctcggattgcagggaaaaagt

SEQ ID NO: 307399 - DNA, 120 bp, Artificial Sequence
  ENSG00000133962_24 (sequence is synthesized)
tcctcgctttaagtttccaattacacaatatccagtttctttggaaattatcaacgaggatggacgtgtcccattgcaatctccatatctggttactgtgactgaagtgaacatgaggca

SEQ ID NO: 307400 - DNA, 120 bp, Artificial Sequence
  ENSG00000133962_25 (sequence is synthesized)
caactggaaactgaaacacactgtgccagaaaatattaaaagaatgaaacaattagtagaaccaattcttggtgctgcagtgtataatccttcaggtctcaacttaagcataaagggctc

SEQ ID NO: 307401 - DNA, 120 bp, Artificial Sequence
  ENSG00000133962_26 (sequence is synthesized)
tgaacttttccactttagagtgaccgtcatttcaggagtaactttttgtaacttaattgaagaatttcagatttatgttgatgaggcaccattgccattcccaggacacacgcttattgc

SEQ ID NO: 307402 - DNA, 120 bp, Artificial Sequence
  ENSG00000133962_27 (sequence is synthesized)
cgtggcaacagcggtagtgctagggggattaatttttatagcatttatgtttcaactgcaaggcatccatccgtggaggacattccaaagatggattagaagaaaccaagagaagttttc

SEQ ID NO: 307403 - DNA, 120 bp, Artificial Sequence
  ENSG00000133962_28 (sequence is synthesized)
aagtatctctctcagtgagctgattcatagatcaaagtctgaagagtgaacacatggtgatcataatttctctttattttctagttttatcagccaattcctagaacaatatatttaaat

SEQ ID NO: 307404 - DNA, 120 bp, Artificial Sequence
  ENSG00000133962_29 (sequence is synthesized)
gttaaatatgcaagctacataaaatcctaaagaattgtcattataattcaaattgctacttgtcaatatattcaccatttccttttcttattttgaatacatagaaaatgtcttatgcca

SEQ ID NO: 307405 - DNA, 120 bp, Artificial Sequence
  ENSG00000133962_30 (sequence is synthesized)
aatgaaccaaattcacaatcaaaatttccaatttttcggtttccttcatcattctcttctcccgttggaatggtatttcatccccgaagccactttttgtatgcttatggcaatcaggaa

SEQ ID NO: 307406 - DNA, 120 bp, Artificial Sequence
  ENSG00000133962_31 (sequence is synthesized)
tcttgacctttacccacttacgcaaggagaaggaaatcataatgatgtcatgtgatcaaaggaaaccatggaagggttcacgctgatagctgatagcttttacagtgctcattcctaaca

SEQ ID NO: 307407 - DNA, 120 bp, Artificial Sequence
  ENSG00000133962_32 (sequence is synthesized)
acgcaaggagaaggaaatcataatgatgtcatgtgatcaaaggaaaccatggaagggttcacgctgatagctgatagcttttacagtgctcattcctaacagtggatttacttgcagaac

SEQ ID NO: 307408 - DNA, 120 bp, Artificial Sequence
  ENSG00000133962_33 (sequence is synthesized)
tccgttagagaagatttaatccggattccaccgctgctccactgctgctgtcctctgttcttttccacacaacctctacctgacttcactttggtgtggactctggagttgatccctctg

SEQ ID NO: 307409 - DNA, 120 bp, Artificial Sequence
  ENSG00000133962_34 (sequence is synthesized)
cctgggcaacacagcaagacactatctctaaaaataataataataaaataaatgaatggcaagagagatcaagtataaatgaatgacaaatgggcagatatagtggagatttaaaatatc

SEQ ID NO: 307410 - DNA, 120 bp, Artificial Sequence
  ENSG00000133962_35 (sequence is synthesized)
aacatatgctatgaagaaagacaagtatgaaatagtaggtttggagagtgtgcagccccacattatcaaggccactcattttatgtttccgtctggatccctgcactggcaggggccaag

SEQ ID NO: 307411 - DNA, 120 bp, Artificial Sequence
  ENSG00000133962_36 (sequence is synthesized)
agcagttagtttggtagtcctgggatgcagaattcagaatgacacaggctttctaggtcccatgcaactgcacgaggtgaacggcaagcggctgagtaatacttgggttcaaattaccaa

SEQ ID NO: 307412 - DNA, 120 bp, Artificial Sequence
  ENSG00000133962_37 (sequence is synthesized)
acttctattcttactttattattaatgaattgctttccccttttaacttctcaggaattccacttcttcagggaataaatatttattagatatttatcagtttgcagaaatcccgcaacg

SEQ ID NO: 307413 - DNA, 120 bp, Artificial Sequence
  ENSG00000133962_38 (sequence is synthesized)
acgcaaggagaaggaaatcataatgatgtcatgtgatcaaaggaaaccatggaagggttcacgctgatagctgatagcttttacagtgctcattcctaacagtggatttactttagagac

SEQ ID NO: 307414 - DNA, 60 bp, Artificial Sequence
  ENSG00000133962_39 (sequence is synthesized)
aatgggaagatacagtgcagtcggaagtgttactgagagaattttcacattatactatga

SEQ ID NO: 307415 - DNA, 120 bp, Artificial Sequence
  ENSG00000133962_40 (sequence is synthesized)
acagcaagaagttcggcaatatacactatggaaaagtgatacactctgggtagtgatatgcatttatttagatggcatattggtttctagaatctactttttaaattttttgagataggg

SEQ ID NO: 307416 - DNA, 83 bp, Artificial Sequence
  ENSG00000133962_41 (sequence is synthesized)
acgctctggccccagcctccagaatagctgggactgcaggcacacaccaccaagcccggctaagttttgtattttttgtagag

SEQ ID NO: 307417 - DNA, 120 bp, Artificial Sequence
  ENSG00000133962_42 (sequence is synthesized)
cccaaactgctgaggttacaagtgtgagccactgcagctggccaatagaatctaaatttttgggcctacttttttgaataattttcttggtcaaatagagtaagtatttttttgacaccc

SEQ ID NO: 307418 - DNA, 120 bp, Artificial Sequence
  ENSG00000133962_43 (sequence is synthesized)
cacaaggccaaatacatttataaactcctagatgtcttgcatgctgccccaattttagaaacctaggaccatttatatcagtgccatcaggccaagctatagaaatgtgtttcgtgagta

SEQ ID NO: 307419 - DNA, 120 bp, Artificial Sequence
  ENSG00000133962_44 (sequence is synthesized)
tcaaaaatattctggacaacactggatacttcctatccactgagtttactcaaatgacaattcttgtatatcctagagaccaacacatttaatgtagtggaggctatcttttatgaaata

SEQ ID NO: 307420 - DNA, 120 bp, Artificial Sequence
  ENSG00000133962_45 (sequence is synthesized)
ttgcattgaacaatatacagaattctcagaaatgcttacagtaagagtcaataacccttaaagctacctttaaggcctaataactcttattcagaatatgaattctggctgggtgccatg

SEQ ID NO: 307421 - DNA, 67 bp, Artificial Sequence
  ENSG00000133962_46 (sequence is synthesized)
agaatatgaattctcagcagatcagttgagaccaggagttggagaccagtctgaccaacatggtgaa

SEQ ID NO: 307422 - DNA, 120 bp, Artificial Sequence
  ENSG00000133980_0 (sequence is synthesized)
agttggctgtagacggtccatgctcaatggtcctctacagatatgaaactggttctggagtgagacgagctcggctggggacgctacttgagaaggcctttccccacagggtgacttaaa

SEQ ID NO: 307423 - DNA, 120 bp, Artificial Sequence
  ENSG00000133980_1 (sequence is synthesized)
tgtcccaggctggaaggtggagcgagaagtggatgcccccagggctctgggtcacactccaggatgacttctcggaaccagctggtgcagaaggtgctgcaggagctgcaggaagcagtg

SEQ ID NO: 307424 - DNA, 120 bp, Artificial Sequence
  ENSG00000133980_2 (sequence is synthesized)
gagtgcgaaggcctggagggtctcataggtgcttccttggaggccaagcaggtcctgtcttccttcactctccccacctgccgggagggaggccctggcctccaggtgctggaagtggac

SEQ ID NO: 307425 - DNA, 120 bp, Artificial Sequence
  ENSG00000133980_3 (sequence is synthesized)
tcggtggccctgagcctgtatccagaagatgctccacggaacatgctgccgctggtgtgcaagggggagggcagcctgctgttcgaggcggccagcatgctgctgtggggtgacgcaggc

SEQ ID NO: 307426 - DNA, 120 bp, Artificial Sequence
  ENSG00000133980_4 (sequence is synthesized)
ctcagcctggagctgcgggcccgcaccgtggtagagatgctgctgcacagacactactacctccagggcatgatcgactccaaagtgatgctgcaggccgtgcgctactccctatgctct

SEQ ID NO: 307427 - DNA, 120 bp, Artificial Sequence
  ENSG00000133980_5 (sequence is synthesized)
gaggagtcccctgagatgaccagcttgccccccgccacgctggaggccatcttcgatgccgacgtcaaggcctcctgtttccccagcagcttctccaacgtgtggcacttgtatgctctc

SEQ ID NO: 307428 - DNA, 120 bp, Artificial Sequence
  ENSG00000133980_6 (sequence is synthesized)
gcctctgtcctccagcggaacatctactccatctaccccatgcgcaacctcaagatccggccctacttcaaccgtgtcatccggccccgccgctgcgaccacgtgccctccacgctgcac

SEQ ID NO: 307429 - DNA, 120 bp, Artificial Sequence
  ENSG00000133980_7 (sequence is synthesized)
atcatgtgggctggccagcccctcaccagccacttcttccgccaccagtactttgcccctgtggtggggctggaagaggtggaggctgaaggtgcccctggcgtggccccagctcttcca

SEQ ID NO: 307430 - DNA, 120 bp, Artificial Sequence
  ENSG00000133980_8 (sequence is synthesized)
gccctggccccactctcatcgccggccaagaccctggagctgctcaaccgtgaacctggcctcagctactctcacctctgtgagcgctacagcgtcaccaaaagcaccttctaccgctgg

SEQ ID NO: 307431 - DNA, 120 bp, Artificial Sequence
  ENSG00000133980_9 (sequence is synthesized)
cggcggcagtcccaggagcaccggcagaaggttgctgcccgcttctccgccaagcacttcctgcaggacagcttccaccgggggggcgtcgtgccacttcagcagttcctccagcggttc

SEQ ID NO: 307432 - DNA, 120 bp, Artificial Sequence
  ENSG00000133980_10 (sequence is synthesized)
ccggagatctcccgctcaacctactatgcctggaagcatgagctgctgggctctggcacctgcccggccttgccccccagggaggtgctgggcatggaggagctagagaagctgccggag

SEQ ID NO: 307433 - DNA, 120 bp, Artificial Sequence
  ENSG00000133980_11 (sequence is synthesized)
gagcaggtggctgaggaggagctggagtgctccgcactggcggtgtcaagccctggaatggtcttaatgcagcgggccaagttgtacctggagcattgcatctccctgaacacactggta

SEQ ID NO: 307434 - DNA, 120 bp, Artificial Sequence
  ENSG00000133980_12 (sequence is synthesized)
ccctatcgctgcttcaaacgcaggttccctggcatctcacggtccacttattataattggcggcgaaaggccctccggaggaaccccagcttcaagccggcaccagccctctctgctgct

SEQ ID NO: 307435 - DNA, 120 bp, Artificial Sequence
  ENSG00000133980_13 (sequence is synthesized)
gggactccccagctagcatctgttggggaaggggctgtaattccttggaagagtgaggcggaagagggggcagggaatgccacaggtgaggaccctcccgcccccggggagctcctgcca

SEQ ID NO: 307436 - DNA, 120 bp, Artificial Sequence
  ENSG00000133980_14 (sequence is synthesized)
cgcaggcaggtgctgagtgggcatctccctttctgccgcttccgcctccgctaccccagcctgtcaccttctgccttttgggtctggaagagtcttgctcggggttggcccagaggcctg

SEQ ID NO: 307437 - DNA, 120 bp, Artificial Sequence
  ENSG00000133980_15 (sequence is synthesized)
tccaaacttcaggtgccggtccccaccttgggcaaaggggggcaggaggctgaggagaagcaggagaaggaggctggcagggatgtgacagctgtgatggccccacctgtgggggcttct

SEQ ID NO: 307438 - DNA, 120 bp, Artificial Sequence
  ENSG00000133980_16 (sequence is synthesized)
tcagaagatgtagagggagggccttccagagagggggccctgcaggagggggccacagcccagggccagccccacagtgggcccttgctgagccaacctgtggtggcagcagcgggtggc

SEQ ID NO: 307439 - DNA, 120 bp, Artificial Sequence
  ENSG00000133980_17 (sequence is synthesized)
agggatggccggatgctggtgatggacatgatcgctaccacgaagttcaaggcccaggccaagctgttcttgcagaagcgcttccagtccaagagctttccctcctacaaggagttcagt

SEQ ID NO: 307440 - DNA, 120 bp, Artificial Sequence
  ENSG00000133980_18 (sequence is synthesized)
gccctctttcccctcactgcccgctccacatactacatgtggaagcgagccctctatgacggcctgaccctggtagatggctgacagggaggtacaaaaggggctgggaagaagggggac

SEQ ID NO: 307441 - DNA, 120 bp, Artificial Sequence
  ENSG00000133980_19 (sequence is synthesized)
cagtttggagagggtcagggacctgagctgaccccaggcttggccaggatgtcctttgctctgggtcccacagtgtctaccctaagtccaagggtatatttgtgttattttctggctcca

SEQ ID NO: 307442 - DNA, 120 bp, Artificial Sequence
  ENSG00000133980_20 (sequence is synthesized)
ggacagagaatgccagaaatcagccatctggtctcccgtaggaaactgtgggaccagagatatcctctttcgttgtttgctggtcatatttttactgttatgatttagtttttggttttg

SEQ ID NO: 307443 - DNA, 120 bp, Artificial Sequence
  ENSG00000133980_21 (sequence is synthesized)
atttgagtgggttggttggcccccttgctggagttggaagccgtatgtatgtcagggggtttagaggggggttggttagctagagctgctttcagcttttcctggagacaaaaggagtgt

SEQ ID NO: 307444 - DNA, 120 bp, Artificial Sequence
  ENSG00000133980_22 (sequence is synthesized)
tatagcatgatcatcggtcccactgggcagaacgttatcttcagtttcttttgggggttggcatcctctttactcagttgtttcccaaaggaacattaggctcgaatatgggggccaggt

SEQ ID NO: 307445 - DNA, 89 bp, Artificial Sequence
  ENSG00000133980_23 (sequence is synthesized)
agagaccaccctgggcaatgtagtgagacctcatctcttagaaaaaaaaaaagaaagaaaatcaaatgtagagctgatcagcagcttgt

SEQ ID NO: 307446 - DNA, 120 bp, Artificial Sequence
  ENSG00000133980_24 (sequence is synthesized)
aaagaaagaaaatcaaatgtagagctgatcagcagcttgtgcctggcatccccaagggagaaggtgccaggtcagcaggagcagcagcagggatgtatagaaagaaccacagctggcctc

SEQ ID NO: 307447 - DNA, 120 bp, Artificial Sequence
  ENSG00000133980_25 (sequence is synthesized)
taaaggatggcactgaggcaccggagatcttgaggcactggagatcactgaggggctggcctgtcccctgcaaggagtgtgggaccaggtggggcaaggctgggagatgcaggctctgtt

SEQ ID NO: 307448 - DNA, 120 bp, Artificial Sequence
  ENSG00000133980_26 (sequence is synthesized)
tgcagattatggcccagagtctctgcttgtgggtgcttgatccacctgctgggaccctgcagtcctcggccagcctggctgtcagttggggattccacctttctgctgagcgtcttctcg

SEQ ID NO: 307449 - DNA, 120 bp, Artificial Sequence
  ENSG00000133980_27 (sequence is synthesized)
gagctggaggcccatcttcagtgagagatcacaaagcggccaggcaggtgggagactgaatttgccttgttcgagagtaacgtttgaaaaccaaagaaataaagtgatgcagtgcccaca

SEQ ID NO: 307450 - DNA, 120 bp, Artificial Sequence
  ENSG00000133980_28 (sequence is synthesized)
aaaagtaccagagagtggactcggctgacccggcggctacagcgcccccatattttctgggagacttcccttttgacaataggtatccgagagtgtaactactttatggtacgtttcctg

SEQ ID NO: 307451 - DNA, 120 bp, Artificial Sequence
  ENSG00000133980_29 (sequence is synthesized)
aggacagctgctctgtgaagcccactgccccaaaggcacctatcaaagaccctgcaaacaagcagatggcaatccaggttgccaatgacattgcccatcccaggtacctgggctgcctgc

SEQ ID NO: 307452 - DNA, 120 bp, Artificial Sequence
  ENSG00000133983_0 (sequence is synthesized)
aaggacgtactcgtcttggtgagagcgtgagctgctgagatttgggagtctgcgctaggcccgcttggagttctgagccgatggaagagttcactcatgtttgcacccgcggtgatgcgt

SEQ ID NO: 307453 - DNA, 120 bp, Artificial Sequence
  ENSG00000133983_1 (sequence is synthesized)
gcttttcgcaagaacaagactctcggctatggagtccccatgttgttgctgattgttggaggttcttttggtcttcgtgagttttctcaaatccgatatgatgctgtgaagagtaaaatg

SEQ ID NO: 307454 - DNA, 120 bp, Artificial Sequence
  ENSG00000133983_2 (sequence is synthesized)
gatcctgagcttgaaaaaaaactgaaagagaataaaatatctttagagtcggaatatgagaaaatcaaagactccaagtttgatgactggaagaatattcgaggacccaggccttgggaa

SEQ ID NO: 307455 - DNA, 120 bp, Artificial Sequence
  ENSG00000133983_3 (sequence is synthesized)
gatcctgacctcctccaaggaagaaatccagaaagccttaagactaagacaacttgactctgctgattcttttttccttttttttttttttaaataaaaatattattaactggacttcct

SEQ ID NO: 307456 - DNA, 120 bp, Artificial Sequence
  ENSG00000133983_4 (sequence is synthesized)
aatatatacttctatcaagtggaaaggaaattccaggcccatggaaacttggatatgggtaatttgatgacaaataatcttcactaaaggtcatgtacaggtttttatacttcccagcta

SEQ ID NO: 307457 - DNA, 120 bp, Artificial Sequence
  ENSG00000133983_5 (sequence is synthesized)
ttccatctgtggatgaaagtaacaatgttggccacgtatattttacacctcgaaataaaaaatgtgaatactgctccaaaaacagagtcacgtattccactctccaactacccacatatt

SEQ ID NO: 307458 - DNA, 120 bp, Artificial Sequence
  ENSG00000133983_6 (sequence is synthesized)
taaaatcaagcagtaattttctctcatatctattagggaaagaaaaatgatcacagtctgctaagagtcttgattttctttgtaatgcctcacatagtatgataatcagtctccaaagca

SEQ ID NO: 307459 - DNA, 120 bp, Artificial Sequence
  ENSG00000133983_7 (sequence is synthesized)
tcacatgataattacaatgataccattaacatgtcaaggaaattatattatttatggttgtcaaaaattatgaagtagtgtatgattataagcagatatggcaaatttgttcagtaaatc

SEQ ID NO: 307460 - DNA, 120 bp, Artificial Sequence
  ENSG00000133983_8 (sequence is synthesized)
catagatgactacattttgagaaatactaagataatactaaaaattatgccttagcataatttgcatgcaaaattgccctctagtgtttttgttttgttttgagacatagtctcgctctg

SEQ ID NO: 307461 - DNA, 120 bp, Artificial Sequence
  ENSG00000133983_9 (sequence is synthesized)
tgtgagccaccacgcctggccgaaagttagttgttttgaactcattttctcctttttacccctgcctttatcagcttctaccttctggtttcatgctgagttctagttgcctaaagtctc

SEQ ID NO: 307462 - DNA, 120 bp, Artificial Sequence
  ENSG00000133983_10 (sequence is synthesized)
cattgaaacactcctgttataattgccataaaatcataaatccactccccctttctcctcctagtcaaaatttgtattcttttcagcaggttggttttaataaaaagtaaattaagttga

SEQ ID NO: 307463 - DNA, 120 bp, Artificial Sequence
  ENSG00000133983_11 (sequence is synthesized)
ctcatgtttgcacccgcggtgatgcgtgcttttcgcaagaacaagactctcggctatggagtccccatgttggtgtactaggatctgtctgcttgtgagcgtggcgtctttcccatcgtc

SEQ ID NO: 307464 - DNA, 120 bp, Artificial Sequence
  ENSG00000133983_12 (sequence is synthesized)
ggactcaatctccagactatctccccagagaatcttgtcaaggcttggctttaagctttgttgggaaaatcaaagactccaagtttgatgactggaagaatattcgaggacccaggcctt

SEQ ID NO: 307465 - DNA, 120 bp, Artificial Sequence
  ENSG00000133983_13 (sequence is synthesized)
aagccagacgagctgtaaaacatgaacggaagagtggattatttggtcactgaggaagagatcaatcttaccagagggccctcagttgctgattgttggaggttcttttggtcttcgtga

SEQ ID NO: 307466 - DNA, 120 bp, Artificial Sequence
  ENSG00000133985_0 (sequence is synthesized)
cggctggagcagcctctggcagcagcggggagaatgggagtgcggggcgccagaccgccgcggggtgtcacggccgccacgaagcctgcgaggcgcggggccggcgcccgcggcttttaa

SEQ ID NO: 307467 - DNA, 80 bp, Artificial Sequence
  ENSG00000133985_1 (sequence is synthesized)
cggcgggcagatcgcggcgcgcaccaggcgccggggcggcggccgaatggagagaaagggctcggcggccggggccaagg

SEQ ID NO: 307468 - DNA, 120 bp, Artificial Sequence
  ENSG00000133985_2 (sequence is synthesized)
cagcggccaccgccgccgctgtgcgtcccgggcggcggcggaggagccccagcgaggggccaggtcggggcggcggccgagccggccgagctcatccgacgagcgcacgagttcaaaagc

SEQ ID NO: 307469 - DNA, 120 bp, Artificial Sequence
  ENSG00000133985_3 (sequence is synthesized)
gccggccgagctcatccgacgagcgcacgagttcaaaagccaaggggcgcagtgctacaaggacaagaaattccgtgaagccataggcaaataccaccgggcgttgctggagctgaaggg

SEQ ID NO: 307470 - DNA, 120 bp, Artificial Sequence
  ENSG00000133985_4 (sequence is synthesized)
gctgctgccgccccccggggaacgggagcgggactcgcgcccggcctccccggctggggccctgaagcccggccgcctctcggaggagcagagcaagacggtggaagccatcgagatcga

SEQ ID NO: 307471 - DNA, 120 bp, Artificial Sequence
  ENSG00000133985_5 (sequence is synthesized)
ctgttacaacagcctggcagcctgcctgctccaggctgagctggtaaactatgaacgagtcaaggaatattgcctcaaagtcttgaagaaggaaggggagaacttcaaggccctttaccg

SEQ ID NO: 307472 - DNA, 120 bp, Artificial Sequence
  ENSG00000133985_6 (sequence is synthesized)
gtctggtgtggccttctaccaccttggggactatgacaaagcactctactacctgaaagaagcaaggacccaacaaccaacagacaccaacgtgattcggtatatccagctgacggagat

SEQ ID NO: 307473 - DNA, 120 bp, Artificial Sequence
  ENSG00000133985_7 (sequence is synthesized)
gaaactcagccgatgctcccagagagaaaaagaagccatgtaaccaggaagcagctccagagctgcgcccacgcctgaccggggacttccaggcatcccctggcagagagccccgtcctg

SEQ ID NO: 307474 - DNA, 120 bp, Artificial Sequence
  ENSG00000133985_8 (sequence is synthesized)
gattctgtccctttctccccacttcttctggctcctcatttttcctcctgttgcaccccagctctttgtctcctcccagtacgaaaaggagagatgcaaatttggaatctggtaggtcgc

SEQ ID NO: 307475 - DNA, 120 bp, Artificial Sequence
  ENSG00000133985_9 (sequence is synthesized)
ccagacaatggagacatcctctcctctagcaggtcagcgactgagaggggcctgacttctgctgggacagctggagaggagtctcatgggctgggatgctgttgtggctttgactttggc

SEQ ID NO: 307476 - DNA, 120 bp, Artificial Sequence
  ENSG00000133985_10 (sequence is synthesized)
cagtgcttctgacagaggcggagcctggcaagtgtaccatcccacaggcagcaggcacacagcccatgggctggatccttccacactttcctgacagaccagaaccagagcatctcgagg

SEQ ID NO: 307477 - DNA, 120 bp, Artificial Sequence
  ENSG00000133985_11 (sequence is synthesized)
caactgttagaaatccagggacgagacaaacagagaagcgctggtgaagccaacatagagactgtcaatgtgtacactggagttcccacccccaccccccacccgtcacttagcccctgc

SEQ ID NO: 307478 - DNA, 120 bp, Artificial Sequence
  ENSG00000133985_12 (sequence is synthesized)
ctccttcccccactcgttgtcttggcttgtgctttctcctctccccatcggggatccgagactctgccaggattcacatgccactgaagcccactcagtgccctctggtgaccacacata

SEQ ID NO: 307479 - DNA, 120 bp, Artificial Sequence
  ENSG00000133985_13 (sequence is synthesized)
ccattcccccggactcccacccagcaggcagctgtgaccgcagaagggcaggatgaagtgggccaaggtttgggacaggttgactgtgtaggtgacagggagggaaagatgatggccagg

SEQ ID NO: 307480 - DNA, 120 bp, Artificial Sequence
  ENSG00000133985_14 (sequence is synthesized)
ggaaagagcatcgtataggctaggggattgaactgtggactgattcagtgtaaataaaaacaaattaacaggtagtagttcctgtcagttctgttggaagcagcccactccctcactttt

SEQ ID NO: 307481 - DNA, 120 bp, Artificial Sequence
  ENSG00000133985_15 (sequence is synthesized)
actccttcctccaaccctcaatcagagctacttacagccaggcaggatggggctttccccaaagcaattggccgtttgtccagtggcagacaatggtggctacagcctttgtgcttttaa

SEQ ID NO: 307482 - DNA, 120 bp, Artificial Sequence
  ENSG00000133985_16 (sequence is synthesized)
gagtgggctgggattgtggagactgcccaggggcttggctttgtcagaacttgtacaatcttcttttgatgaaattatctgaactcaacatctagcacatagaatgtgttcaacaaatgc

SEQ ID NO: 307483 - DNA, 120 bp, Artificial Sequence
  ENSG00000133985_17 (sequence is synthesized)
ttgttgaatgaataaattatgactgcagactggctctcctgccttaaactaatttcatcccagcctagtctcctgatgtctgtgctcgttatgctatgccatgttgcttcagtcaaacaa

SEQ ID NO: 307484 - DNA, 120 bp, Artificial Sequence
  ENSG00000133985_18 (sequence is synthesized)
gaaacacttactgagggcatattgtttgcccatcattgtgcaatatgctgtgggacatgggatgtcgtctcagtcttcaaggaaatggaagggttaagaaatgcatatgagattattacc

SEQ ID NO: 307485 - DNA, 120 bp, Artificial Sequence
  ENSG00000133985_19 (sequence is synthesized)
aatgacaccgttaatttatatgatgctttaaaattatcagagcactttcatgtatttttcgtgtgactagtgaaaaagacaatgttgtacaaaattaaaatatatacagatgcaataatg

SEQ ID NO: 307486 - DNA, 120 bp, Artificial Sequence
  ENSG00000133985_20 (sequence is synthesized)
tgaatagttaggatttattaaatgcattatcttcagatctttacatgtataatctcatttctttcatgcagttactctgggatactgttcccatttgatgggtaagaatattgaaaacca

SEQ ID NO: 307487 - DNA, 120 bp, Artificial Sequence
  ENSG00000133985_21 (sequence is synthesized)
aaccaggcctgcctgactccagagctctggctagtatctatgctatacttagttgcctctctgtaagtataatattgggcaattataaccatttgagaacaggacaatatgtattaacct

SEQ ID NO: 307488 - DNA, 120 bp, Artificial Sequence
  ENSG00000133985_22 (sequence is synthesized)
gaaaagtgttcatgatgtcagtgatagtacatggcctccttatgtatttactcaagggccccaaaagaccagaggccagaatccctagtagtcagagcagtgacaggtcagaaaaaggca

SEQ ID NO: 307489 - DNA, 120 bp, Artificial Sequence
  ENSG00000133985_23 (sequence is synthesized)
gctgaggtccaatagttatgtctgtgtattgctcattctacttactgatggagccagcatgtatctcaacaactcacctagcattcatcacccatccccagcattgggaaagggtcacaa

SEQ ID NO: 307490 - DNA, 120 bp, Artificial Sequence
  ENSG00000133985_24 (sequence is synthesized)
ttaagaccgaaaggaaacacaaagttaaatatgggttaattatgtaagcagatgccccaccacggcaggatccaatcacagccgaggggcccagaagagagcagcgtaagttatattcac

SEQ ID NO: 307491 - DNA, 120 bp, Artificial Sequence
  ENSG00000133985_25 (sequence is synthesized)
atagttccccaaaggctttcaacgggggctacaggaaggtgctagaaatattgaggggcctgccattactcacctagagctcactctctggagaagaggaaaaggaagaagctatttcag

SEQ ID NO: 307492 - DNA, 120 bp, Artificial Sequence
  ENSG00000133985_26 (sequence is synthesized)
ctgccacattctccccaatccctactatattatgctgtctttcctcttcctcctagctggctttacatgaccctaacccaaaactaccctatggccccacacgggaatgtgttcaaacgc

SEQ ID NO: 307493 - DNA, 120 bp, Artificial Sequence
  ENSG00000133985_27 (sequence is synthesized)
cccgacccccacccccacccccattcccaagcctccaacttagaacgtttgtgatttggcagatggtttgttaggatctgaaggatgaagagaagggtagaggtcacctggagaatgagt

SEQ ID NO: 307494 - DNA, 120 bp, Artificial Sequence
  ENSG00000133985_28 (sequence is synthesized)
tcaaactgccagggtcttcccttggtctttgtgcgtcaggaaggactccgagtaattattccctatgcagagacaggagagaggtcttgtttacatgagtgtgctggggcagggctggac

SEQ ID NO: 307495 - DNA, 120 bp, Artificial Sequence
  ENSG00000133985_29 (sequence is synthesized)
aatccaggatatgattgtagccatcccatgtagaaagatcaaaaaccagaacgaaatgaagacagcctctcagaacctcatagaacaagcgtccaggtcatctgcttgtttggtgactta

SEQ ID NO: 307496 - DNA, 120 bp, Artificial Sequence
  ENSG00000133985_30 (sequence is synthesized)
gatatacaggcttactggaactccattcactgtgacctgaagttaaataatcccaaagagaaaaagctacctggggtattggttgatgtttggggtgatagggctgaattttctgtgcat

SEQ ID NO: 307497 - DNA, 120 bp, Artificial Sequence
  ENSG00000133985_31 (sequence is synthesized)
ttgtccaacaaaggctttagagcacaaaaccaggttcattctccctaccaaatcttcagcttccttctcctcatccctccccaaaacaagaactgtgatttaattccgtacgttgcggat

SEQ ID NO: 307498 - DNA, 120 bp, Artificial Sequence
  ENSG00000133985_32 (sequence is synthesized)
gtcactgctgacctatgtagctggagtactaatcaggcatctgacctgcactgtcatcccctgcctggacttttgcgatggactctttgggggaaaaactaacgctttttaattattgtg

SEQ ID NO: 307499 - DNA, 120 bp, Artificial Sequence
  ENSG00000133985_33 (sequence is synthesized)
aaagcatcatgtgtgtattgtagaagttttaggaaaaaaaggacaaaatccaatccataagcttaccacccaagacaaacgtgtattcttttgaatataccttttagttctttttggtgt

SEQ ID NO: 307500 - DNA, 120 bp, Artificial Sequence
  ENSG00000133985_34 (sequence is synthesized)
aaatgtacacacgcacacacagttgtggatttttttaaacaaaaactggatacactgaatatactctttaataacttttcaagtgtgtatttatattttagaatatgtaatcctacacag

SEQ ID NO: 307501 - DNA, 120 bp, Artificial Sequence
  ENSG00000133985_35 (sequence is synthesized)
atacaaaattcaaaaagtacaaactgctctgtagtcagaagtaaatcttctccctaccccgtctgccagcatctagtttccctctaatttattttgcatcctagtggagatgcttacaca

SEQ ID NO: 307502 - DNA, 120 bp, Artificial Sequence
  ENSG00000133985_36 (sequence is synthesized)
ttgtcaaacatatgtatatattcttttatcacacacaaatggcagcatattggacactttttgttttttgctccttctgttccttcacttaataatatcacgaacattttcggcatatca

SEQ ID NO: 307503 - DNA, 120 bp, Artificial Sequence
  ENSG00000133985_37 (sequence is synthesized)
aactttctcaacagcatcttcattgtatggatggaccctttttttatcatcaatcctcaaatagtgattatttcatttgttcccaatcttcattgtaaatagtgttgcaactgacattct

SEQ ID NO: 307504 - DNA, 120 bp, Artificial Sequence
  ENSG00000133985_38 (sequence is synthesized)
tgtagctaaattttgcacatgtctataacgatttccttaggataaactccaagaagagacttgcttggctatttttaagaattttgatacatgttgccaaccaccctccagaaagtttgt

SEQ ID NO: 307505 - DNA, 120 bp, Artificial Sequence
  ENSG00000133985_39 (sequence is synthesized)
accaaaacgctctcctatttggatcctagagagtaccctgtttcctgcaccctaacactaggtatcatcacttatcaaatctttcccaatttggtagctgggataatagtatgtcaatgt

SEQ ID NO: 307506 - DNA, 120 bp, Artificial Sequence
  ENSG00000133985_40 (sequence is synthesized)
tattttaactttctttgattcttcgcgaataacattttcatatgcttattgaccatttgtacttctttctttgtgaattttctatttatttgatattggtatgtttattatcaatttgta

SEQ ID NO: 307507 - DNA, 120 bp, Artificial Sequence
  ENSG00000133985_41 (sequence is synthesized)
attttattaagaatattatttttgtcaagaaatgctgcaaatatgctttccaagtgctttgctttcaaattttgtttatggtgctttttgacatacataaattcttaattctgcaattaa

SEQ ID NO: 307508 - DNA, 120 bp, Artificial Sequence
  ENSG00000133997_0 (sequence is synthesized)
gaaagagaacctgtaaacgctctcggaattatggcggcggtggatatccgagacaatctgctgggaatttcttgggttgacagctcttggatccctattttgaacagtggtagtgtcctg

SEQ ID NO: 307509 - DNA, 120 bp, Artificial Sequence
  ENSG00000133997_1 (sequence is synthesized)
gattacttttcagaaagaagtaatcctttttatgacagaacatgtaataatgaagtggtcaaaatgcagaggctaacattagaacacttgaatcagatggttggaatcgagtacatcctt

SEQ ID NO: 307510 - DNA, 120 bp, Artificial Sequence
  ENSG00000133997_2 (sequence is synthesized)
ttgcatgctcaagagcccattcttttcatcattcggaagcaacagcggcagtcccctgcccaagttatcccactagctgattactatatcattgctggagtgatctatcaggcaccagac

SEQ ID NO: 307511 - DNA, 120 bp, Artificial Sequence
  ENSG00000133997_3 (sequence is synthesized)
ttgggatcagttataaactctagagtgcttactgcagtgcatggtattcagtcagcttttgatgaagctatgtcatactgtcgatatcatccttccaaagggtattggtggcacttcaaa

SEQ ID NO: 307512 - DNA, 120 bp, Artificial Sequence
  ENSG00000133997_4 (sequence is synthesized)
gatcatgaagagcaagataaagtcagacctaaagccaaaaggaaagaagaaccaagctctatttttcagagacaacgtgtggatgctttacttttagacctcagacaaaaatttccaccc

SEQ ID NO: 307513 - DNA, 120 bp, Artificial Sequence
  ENSG00000133997_5 (sequence is synthesized)
aaatttgtgcagctaaagcctggagaaaagcctgttccagtggatcaaacaaagaaagaggcagaacctataccagaaactgtaaaacctgaggagaaggagaccacaaagaatgtacaa

SEQ ID NO: 307514 - DNA, 120 bp, Artificial Sequence
  ENSG00000133997_6 (sequence is synthesized)
cagacagtgagtgctaaaggcccccctgaaaaacggatgagacttcagtgagtactggacaaaagagaagcctggaagactcctcatgctagttatcatacctcagtactgtggctcttg

SEQ ID NO: 307515 - DNA, 120 bp, Artificial Sequence
  ENSG00000133997_7 (sequence is synthesized)
ttatcatacctcagtactgtggctcttgagctttgaagtactttattgtaaccttcttatttgtatggaatgcgcttattttttgaaaggatattaggccggatgtggtggctcacgcct

SEQ ID NO: 307516 - DNA, 89 bp, Artificial Sequence
  ENSG00000133997_8 (sequence is synthesized)
agctactcgggaggctgagacaggagacttgcttgaacccgggaggtggaggttgccctgagctgattatcatgctgtttgtctcaaaa

SEQ ID NO: 307517 - DNA, 120 bp, Artificial Sequence
  ENSG00000133997_9 (sequence is synthesized)
cactccagcttgggcgacagagcgagactttgtctcaaaaaagaagaaaagatattattcccatcatgatttcttgtgaatatttgttatatgtcttctgtaacctttcctctcccggac

SEQ ID NO: 307518 - DNA, 120 bp, Artificial Sequence
  ENSG00000133997_10 (sequence is synthesized)
ttgagcaacctacacactcacatgtttactggtagatatgtttaaaagcaaaataaaggtatttgtatatattgcttcatcatgacttttttcttcatcataactgatatttttcagatg

SEQ ID NO: 307519 - DNA, 120 bp, Artificial Sequence
  ENSG00000133997_11 (sequence is synthesized)
cactttgaagacataaaggatgttaaagtagtaactaagcatatttctttttgttcagttacataatcctcagtattaaaataaacagttgctgacattttggaagatgaagaaaaggaa

SEQ ID NO: 307520 - DNA, 120 bp, Artificial Sequence
  ENSG00000133997_12 (sequence is synthesized)
aaacctcactcaccaataccattaccctataaatactgtaacagtgttgtgaattttaatcttattctgtgtgtagatacttcttttttcaataaagaaaaggaattttattttttttaa

SEQ ID NO: 307521 - DNA, 120 bp, Artificial Sequence
  ENSG00000133997_13 (sequence is synthesized)
agttatggaggctgagaagtccagcattgattggctccatctggtgagggccttcttgctggtaggaagtctgcaaagtccctaggcagcacagggtatctcatggcaagggggctgagt

SEQ ID NO: 307522 - DNA, 120 bp, Artificial Sequence
  ENSG00000133997_14 (sequence is synthesized)
gtgcttgctgcatgtagatgcttttaaaactgtactttaatcattcctttcgtacaattttactttattatatctgttgtaagcttttccccatgtttatgtagtttttatagactgttt

SEQ ID NO: 307523 - DNA, 120 bp, Artificial Sequence
  ENSG00000133997_15 (sequence is synthesized)
tagtgtccgaatttctgtaaatgattgtatctcagttttctttctgtcttatatttgggatttttcccagtttacattattttatataagactgctgtgattatatctttgtataatgcc

SEQ ID NO: 307524 - DNA, 120 bp, Artificial Sequence
  ENSG00000133997_16 (sequence is synthesized)
agacttcagaaagctgtgtgaagagacaaagggagaatgccatgtgaagatggaggatcggagtgatgcgtctacaagccaaggaatgccaaagatttccggccagtcaccagaagctaa

SEQ ID NO: 307525 - DNA, 120 bp, Artificial Sequence
  ENSG00000133997_17 (sequence is synthesized)
gaggcaaagaaggattcccctacaggtttcagagaaagcatagcccatatccctgctgacactttgattttggattttcagcctccagaattttgagacaataaatttattgtttaagtc

SEQ ID NO: 307526 - DNA, 120 bp, Artificial Sequence
  ENSG00000133997_18 (sequence is synthesized)
ataccataatttatttacttcctgacctaacttgtttttttgattggtttctgtttggggggtctccaagaccacatacatgttcagtactatgctggaggactcaccagacttagcata

SEQ ID NO: 307527 - DNA, 120 bp, Artificial Sequence
  ENSG00000133997_19 (sequence is synthesized)
tggttgtacttacagctaagatttgttatgacaacacagtaagggtacgcagccagattagtactggaaaaagacatgtcaggtggggtctgtaggaatccatgtgcaagtttcttatgc

SEQ ID NO: 307528 - DNA, 120 bp, Artificial Sequence
  ENSG00000133997_20 (sequence is synthesized)
tttccctcttgcttgtgaagggccacagagtgtgccctccatccagcagtgaaatgcagctgcattcaatatgtctgctcagggaagtccatataagactctgagccagggatttttata

SEQ ID NO: 307529 - DNA, 120 bp, Artificial Sequence
  ENSG00000133997_21 (sequence is synthesized)
atatggtagcttgagtttgtgaaacctgcatttccatttgttgctagtaggttttgtgagaaaagaccatttaatacacttaaaataacaaaggtaatttcaagccaataatttggattg

SEQ ID NO: 307530 - DNA, 120 bp, Artificial Sequence
  ENSG00000133997_22 (sequence is synthesized)
tgtgatttaggtaattatgaaaaactttagctttaaaactcttacggttgtgcgtgcttatataccaaaactgaagtatctttaaaagacatatgtatcagcttaaatgttagaatttaa

SEQ ID NO: 307531 - DNA, 120 bp, Artificial Sequence
  ENSG00000133997_23 (sequence is synthesized)
cttcagttaagagggagagttaacaacacttctgtatatgtgctgtgtttaccttattttgggaattatctttggtatagcagccattaaaaataatgaagtttgggtatattcatggtg

SEQ ID NO: 307532 - DNA, 120 bp, Artificial Sequence
  ENSG00000133997_24 (sequence is synthesized)
gtttggtatttatttccttaggatagagttccagaagtggaatcactagagtctctgcatttttattgctcttagtccatattgctaagttgttcctcaaaatgttggactagtgatcac

SEQ ID NO: 307533 - DNA, 120 bp, Artificial Sequence
  ENSG00000133997_25 (sequence is synthesized)
tcaaacagcgaagtttgaaagtatgtatcaggttttccagaattgctaccactgaattttgtcatttatgtttttagtgttaagtagcaaaagtggtattttagtatttaaagtagttga

SEQ ID NO: 307534 - DNA, 120 bp, Artificial Sequence
  ENSG00000133997_26 (sequence is synthesized)
agaatttctcatctttttctgcttttatgaaatgtctaattttatgtattgtgtgagatttttgtctttcaacttcttattttgacataatttccggcaaacagaaaagttgtaagaata

SEQ ID NO: 307535 - DNA, 120 bp, Artificial Sequence
  ENSG00000133997_27 (sequence is synthesized)
ataaactctagagtggtaagtgtcttcacattctttaagcactaaagaaaacttttaattagctaccttgcttccagtaatcaaactagagctcctctgccttgtgtaagttgctataaa

SEQ ID NO: 307536 - DNA, 120 bp, Artificial Sequence
  ENSG00000133997_28 (sequence is synthesized)
gaatgtcttgaactttggttactgtgagccaagtcggtgctcaaagtatatttcatagtctcaattatatagtaatttaggttctgaaaaataggttctgtctttgcatatgtaatattt

SEQ ID NO: 307537 - DNA, 120 bp, Artificial Sequence
  ENSG00000133997_29 (sequence is synthesized)
ctttaggaaaatggctgttgatcttttctaagtgtgtttcactttttcatgggatgatggctttgttgcagctgagattcatgtaactagatgtggtaataatagctttcacataggaac

SEQ ID NO: 307538 - DNA, 120 bp, Artificial Sequence
  ENSG00000133997_30 (sequence is synthesized)
taataatagctttcacataggaacagatgcaagttcactctgttagttaactggtagtctttgttaaggtgattcaaggttttaaaatatttggggccaggtgtggtggctcactcctgt

SEQ ID NO: 307539 - DNA, 120 bp, Artificial Sequence
  ENSG00000134001_0 (sequence is synthesized)
atgcgcggtggagtgagcgaagcgcacgctgaggaggatcggcggccggtgagggggaagcaagtctggtctctgtgattgaagaagtcggctctgggctccagtgcgggaatcacacac

SEQ ID NO: 307540 - DNA, 120 bp, Artificial Sequence
  ENSG00000134001_1 (sequence is synthesized)
atacctcagaatgccgggtctaagttgtagattttatcaacacaaatttcctgaggtggaagatgtagtgatggtgaatgtcagatccattgctgaaatgggggcttatgtcagcttgct

SEQ ID NO: 307541 - DNA, 120 bp, Artificial Sequence
  ENSG00000134001_2 (sequence is synthesized)
ggaatacaacaacattgaaggcatgattcttcttagtgaattatccagaaggcgtatccgttctatcaacaaactcatccgaattggcaggaatgagtgtgtggttgtcattagggtgga

SEQ ID NO: 307542 - DNA, 120 bp, Artificial Sequence
  ENSG00000134001_3 (sequence is synthesized)
caaagaaaaaggatatattgatttgtcaaaaagaagagtttctccagaggaagcaatcaaatgtgaagacaaattcacaaaatccaaaactgtttatagcattcttcgtcatgttgctga

SEQ ID NO: 307543 - DNA, 120 bp, Artificial Sequence
  ENSG00000134001_4 (sequence is synthesized)
ggtgttagaatacaccaaggatgagcagctggaaagcctattccagaggactgcctgggtctttgatgacaagtacaagagacctggatatggtgcctatgatgcatttaagcatgcagt

SEQ ID NO: 307544 - DNA, 120 bp, Artificial Sequence
  ENSG00000134001_5 (sequence is synthesized)
ctcagacccatctattttggatagtttagatttgaatgaagatgaacgggaagtactcattaataatattaataggcgcttgaccccacaggctgtcaaaattcgagcagatattgaagt

SEQ ID NO: 307545 - DNA, 120 bp, Artificial Sequence
  ENSG00000134001_6 (sequence is synthesized)
ggcttgttatggttatgaaggcattgatgctgtaaaagaagccctaagagcaggtttgaattgttctacagaaaacatgcccattaagattaatctaatagctcctcctcggtatgtaat

SEQ ID NO: 307546 - DNA, 120 bp, Artificial Sequence
  ENSG00000134001_7 (sequence is synthesized)
gactacgacaaccctggagagaacagaaggcctttctgtcctcagtcaagctatggctgttatcaaagagaagattgaggaaaagaggggtgtgttcaatgttcaaatggagcccaaagt

SEQ ID NO: 307547 - DNA, 120 bp, Artificial Sequence
  ENSG00000134001_8 (sequence is synthesized)
ggtcacagatacagatgagactgaacttgcgaggcagatggagaggcttgaaagagaaaatgccgaagtggatggagatgatgatgcagaagaaatggaagccaaagctgaagattaact

SEQ ID NO: 307548 - DNA, 120 bp, Artificial Sequence
  ENSG00000134001_9 (sequence is synthesized)
ttgtgggaaacagagtccaatttaaggaacacagagcagcgcttcctggctgtaaatcctagacttgaaagttttccagtattgaaaacttcaaagctgaatattttttatttctaagta

SEQ ID NO: 307549 - DNA, 120 bp, Artificial Sequence
  ENSG00000134001_10 (sequence is synthesized)
tttaaatgttctaacagatcagaacatgaaatgccctcctaaatgtcagctgttgtcacacagtagctccaacactttgagcatttttaagggagtggcctcatttcactagagacaaat

SEQ ID NO: 307550 - DNA, 120 bp, Artificial Sequence
  ENSG00000134001_11 (sequence is synthesized)
ctttaagaatagttctaaaattgggcttgtgatttccatttctgatgtctccagattggcacccctttctagttcaatgcctcacgagatttgccaggggcatccaaggcaaacaatccc

SEQ ID NO: 307551 - DNA, 120 bp, Artificial Sequence
  ENSG00000134001_12 (sequence is synthesized)
aatctttctatataaaatgtattcaagcaaacatcaaataaatttctgggatatttaactataggcttcttccttcttgtcaccagttaaaagcattttaatactaagaccctaattctt

SEQ ID NO: 307552 - DNA, 120 bp, Artificial Sequence
  ENSG00000134001_13 (sequence is synthesized)
ttatctttattttagtcttgatgtggaactgtaggagcaggtgaataaaggatctctataacagatcctttcaaaagaagagttttagagaaaataaatttaactttaaccacagtgaaa

SEQ ID NO: 307553 - DNA, 120 bp, Artificial Sequence
  ENSG00000134001_14 (sequence is synthesized)
gttgacccttagcgggacaaagccttaaaatgcattgaaagaattagatcggttctgtgccttttatctatttgagattgatgacaacctgtgtgagagaatttatcacaccacgtcctt

SEQ ID NO: 307554 - DNA, 120 bp, Artificial Sequence
  ENSG00000134001_15 (sequence is synthesized)
attggaataataagctacttgccttgagtttataattcagggtggtaaagtatgtttttaaattttaaaaagcagctgcattttttatttagttggaatatcacccaattttttattttt

SEQ ID NO: 307555 - DNA, 120 bp, Artificial Sequence
  ENSG00000134001_16 (sequence is synthesized)
attgctattaaaatatccactagatgccacctagagctccagttctttataacaaaacagggatctgtttgaacacttactgttgtttttttttttttacatgtttccatcatttctgtc

SEQ ID NO: 307556 - DNA, 120 bp, Artificial Sequence
  ENSG00000134001_17 (sequence is synthesized)
gtagaaaatcttgagttgctttggtctgcttgtcttcataaatttattctcttatgatacttgaggtaccagttgtatttaattttattcattatccctagatagctattaagatactta

SEQ ID NO: 307557 - DNA, 120 bp, Artificial Sequence
  ENSG00000134001_18 (sequence is synthesized)
gattagacctaacccaccatagtcaatccaagactagactactcaatattaaagggtctggaaaatagaagagtgtgttgggcaggtagtttgtaccatttatgaaggtttgttcctttg

SEQ ID NO: 307558 - DNA, 120 bp, Artificial Sequence
  ENSG00000134001_19 (sequence is synthesized)
ttaaatttagcagcctgtactagcttttgaaatccagaagttttaacttccagtggctggtttctgagagagtgccatgattgctagccagcattccatattgggaatatgtagaggaga

SEQ ID NO: 307559 - DNA, 120 bp, Artificial Sequence
  ENSG00000134001_20 (sequence is synthesized)
acctggatgtacttaagagtggcatataattttcacttctgtctgttgaggcatcaaaaaaacaagtttagaaagctggcaacatgaagaatgcattcaaaatataacaggtgcttcttt

SEQ ID NO: 307560 - DNA, 120 bp, Artificial Sequence
  ENSG00000134001_21 (sequence is synthesized)
gttgtacgcagaggaattttttcttttgattttgtttactgaaatttgttatacttcaaaagccataacttgaaaaatactggtggcgtcgatggtgagtgatttttatcccacgtgggc

SEQ ID NO: 307561 - DNA, 120 bp, Artificial Sequence
  ENSG00000134001_22 (sequence is synthesized)
cttttgctcagttccatggcaattttgtaaattgaccctagccagagaatagatcagtatttcactgataccacgaggaaaagaacaaacaaaacttaaaagtattcatacaccttgcta

SEQ ID NO: 307562 - DNA, 120 bp, Artificial Sequence
  ENSG00000134001_23 (sequence is synthesized)
acctaaaagacagcagggacaagatacatatgaggacaaggtatacacccagttctgaataacttgaagaacaggcttggcaaagaagtaagtttatccaaatcttgaatttctgccagg

SEQ ID NO: 307563 - DNA, 90 bp, Artificial Sequence
  ENSG00000134001_24 (sequence is synthesized)
caaagaagtaagtttatccaaatcttgaatttctgccaggcatggtagctcatgcctgtaaccctggcacttaaggtgagctgtgatcac

SEQ ID NO: 307564 - DNA, 120 bp, Artificial Sequence
  ENSG00000134001_25 (sequence is synthesized)
ctcaaaaaaaaaaaaaaaaaccaaaaatcttgaatctcccatcaaagccttttcattaaaaatacaatttcatctactccctactgtacctttcactgatgtcaagtggctatcaattca

SEQ ID NO: 307565 - DNA, 120 bp, Artificial Sequence
  ENSG00000134001_26 (sequence is synthesized)
tatagctgaaaattagtgatagtttgggtctcatttatgcataaattaattgaaaatcagtaatggccaggaagaaatatgaatattcaaaccacttttttctttttttttttttttttt

SEQ ID NO: 307566 - DNA, 120 bp, Artificial Sequence
  ENSG00000134001_27 (sequence is synthesized)
tggcaaatggtgttatattgcctgggcaggtctcgaaatcctgggctcaagctatcctcctgcctctgcctctgtaagagtgtgagccaccatgccccacccaaaccatttttcatatca

SEQ ID NO: 307567 - DNA, 120 bp, Artificial Sequence
  ENSG00000134001_28 (sequence is synthesized)
gttatagcaaaacaagacaaaccagttcttaataatgttcaaagttggacccatagagacatgctaagcactacatcatgctaagaagaacagttattactcagctgccatacttcagcc

SEQ ID NO: 307568 - DNA, 120 bp, Artificial Sequence
  ENSG00000134001_29 (sequence is synthesized)
attctacttttacaccaagaacaaaatggctagagatttttttaaaaatacaaatgccagtaccttgccgagacttgttcactgatttgccccaaccccaaggtaatggtcatctacttt

SEQ ID NO: 307569 - DNA, 120 bp, Artificial Sequence
  ENSG00000134001_30 (sequence is synthesized)
gcaacctatggagatcctgatagctcccatacaaagtgaggtacactgttgccaatttggaggcaggaagccatcaaactaaacgtagtttaattcagatgaacacctatcgatattcaa

SEQ ID NO: 307570 - DNA, 120 bp, Artificial Sequence
  ENSG00000134001_31 (sequence is synthesized)
aaggcaaaacaaaaaaactaattccagggacattagaccttggtgaaatgccaaatggaaaatggtgctttaaaaggtagtctcttaccatataaggaataagtaaaacattagcttgtg

SEQ ID NO: 307571 - DNA, 120 bp, Artificial Sequence
  ENSG00000134001_32 (sequence is synthesized)
atttctcattattcaggtcaatgttttagacacgactaacaagggacagttcaaactattaaagagaacaaatttttacttaagcactttgaggtatccactccccttaaatgtaagtta

SEQ ID NO: 307572 - DNA, 120 bp, Artificial Sequence
  ENSG00000134001_33 (sequence is synthesized)
tgtattttatctgttgattaaggggaggtccaagcatttgtacttggcaggaatgctggcaatagcttgtgccagattactgtataaacttgaaagtaataaaaatgttctttaaaagta

SEQ ID NO: 307573 - DNA, 120 bp, Artificial Sequence
  ENSG00000134001_34 (sequence is synthesized)
aattgtaaatatctttaatgcttggaggttaagagaaacttgaactttgtagtaatggagattaaagctattctcaagattaggtatacctattcaataaaagaaaggaatatttgggag

SEQ ID NO: 307574 - DNA, 120 bp, Artificial Sequence
  ENSG00000134001_35 (sequence is synthesized)
tattggggataagagaagctagacattgtgaattcaaggaaaaagaattatgagaggaggatgcattttagtttattttgtgattaaaatttttttagtttttgttgttttgacatgtga

SEQ ID NO: 307575 - DNA, 120 bp, Artificial Sequence
  ENSG00000134001_36 (sequence is synthesized)
cactgtaattttggctataataaatgacagaatgtatcatttggtatattggttagggtttaggtagaaaattttttcctttatatagtgagtggtagcgtatacaatgtttgctcactt

SEQ ID NO: 307576 - DNA, 120 bp, Artificial Sequence
  ENSG00000134001_37 (sequence is synthesized)
cggcaaagagtagctttagttttctgattagttataatagtgatgcttcccatcatttgatatgccttaaagtagtattttactcttgaggtattcctttaatccttaggtcttggagta

SEQ ID NO: 307577 - DNA, 120 bp, Artificial Sequence
  ENSG00000134001_38 (sequence is synthesized)
ctttatagatggtcattattttttatgattcctctgaaactaaaggcagagaatcacccaagcattacaaaaatgttgagcaaaataaaaattaaagcttggttcctgaacattatctgt

SEQ ID NO: 307578 - DNA, 120 bp, Artificial Sequence
  ENSG00000134001_39 (sequence is synthesized)
tttctggtaccacttaagaagtttcaaaggatgagaagactaagactaataactatttttttcttcatcttttctttcagtggcaggatgtggaaattgattttttttttattttcacct

SEQ ID NO: 307579 - DNA, 120 bp, Artificial Sequence
  ENSG00000134001_40 (sequence is synthesized)
tttcccgtccctgcgcgggaagtggctggacagcaccgccaccacccgcgctgtcgtgggcctcctcgccggctccgtgtaggtcatcctgtgttccagaggcatcgttgttcgagcaga

SEQ ID NO: 307580 - DNA, 120 bp, Artificial Sequence
  ENSG00000134001_41 (sequence is synthesized)
attcacaaaatccaaaactgtaagttgatctttgagtcaaattagtccactatctgtgtgtttaataaataatttgaaatcttaatttcatactgctactaccttaaagtattgcttatg

SEQ ID NO: 307581 - DNA, 120 bp, Artificial Sequence
  ENSG00000134007_0 (sequence is synthesized)
gggagttcagcagtgtgtttaagactagggtcatgcccacatcaatctcagattcccattttatctttcttttttggtatcactcctagtaccaagtcttgtgtctgtcaatatcctgtc

SEQ ID NO: 307582 - DNA, 120 bp, Artificial Sequence
  ENSG00000134007_1 (sequence is synthesized)
caaaaaagaaaaacacaccaaggaaaattaatataggaaaaatttaaaaagttattagaggactgaaaatataaaaatggaacactgaaagacacagagtttttattttcagcactgcag

SEQ ID NO: 307583 - DNA, 120 bp, Artificial Sequence
  ENSG00000134007_2 (sequence is synthesized)
ctctgatggtccagctccaccaggacacagatccccagatccctaaaggtcagccatgcaccctgaacagctcagagggaggagccagaccagcagtgcctcacaccttgttctcttctg

SEQ ID NO: 307584 - DNA, 120 bp, Artificial Sequence
  ENSG00000134007_3 (sequence is synthesized)
ctctagacagatggctccataatgacagcttcataatggcagtgggtgagcccctggtgcacatcagggtcactcttctgctgctctggtttgggatgtttttgtctatttctggccact

SEQ ID NO: 307585 - DNA, 120 bp, Artificial Sequence
  ENSG00000134007_4 (sequence is synthesized)
ctcaggccaggccctcccagtatttcacttctccagaagtggtgatccctttgaaggtgatcagcaggggcagaggtgcaaaggctcctggatggctctcctatagcctgcggtttgggg

SEQ ID NO: 307586 - DNA, 120 bp, Artificial Sequence
  ENSG00000134007_5 (sequence is synthesized)
gacagagatacattgtccacatgagggtaaataagctgttgtttgctgcacaccttcctgtgttcacctacacagagcagcatgccctgctccaggatcagcccttcatccaggatgact

SEQ ID NO: 307587 - DNA, 120 bp, Artificial Sequence
  ENSG00000134007_6 (sequence is synthesized)
gctactaccatggttatgtggagggggtccctgagtccttggttgcccttagtacctgttctgggggctttcttggaatgctacagataaatgaccttgtttatgaaatcaagccaatta

SEQ ID NO: 307588 - DNA, 120 bp, Artificial Sequence
  ENSG00000134007_7 (sequence is synthesized)
gtgtttctgccacatttgaacacctagtatataagatagacagtgatgatacacagtttccacctatgagatgtgggttaacagaagagaaaatagcacaccagatggagttgcaattgt

SEQ ID NO: 307589 - DNA, 120 bp, Artificial Sequence
  ENSG00000134007_8 (sequence is synthesized)
catataatttcactctgaagcaaagttcttttgtgggctggtggacccatcagcggtttgttgagctggtagtggtcgtggataatattagatatcttttctctcaaagtaatgcaacaa

SEQ ID NO: 307590 - DNA, 120 bp, Artificial Sequence
  ENSG00000134007_9 (sequence is synthesized)
cagtgcagcatgaagtatttaacgttgtcaatatagtggattccttctatcatcctttggaggttgatgtaattttgactggaattgatatatggactgcatcaaatccacttcctacca

SEQ ID NO: 307591 - DNA, 120 bp, Artificial Sequence
  ENSG00000134007_10 (sequence is synthesized)
gtggagacctagataatgttttagaggacttttctatttggaagaattataaccttaataatcgactacaacatgatgttgcacatcttttcataaaagacacacaaggcatgaagcttg

SEQ ID NO: 307592 - DNA, 120 bp, Artificial Sequence
  ENSG00000134007_11 (sequence is synthesized)
tccttttaatactggagttgatgtttttgaagacaacaggttggtcgtttttgcaattactttgggccacgagcttggtcataatttgggtatgcaacatgacacccagtggtgtgtgtg

SEQ ID NO: 307593 - DNA, 120 bp, Artificial Sequence
  ENSG00000134007_12 (sequence is synthesized)
cgagctacagtggtgcataatgcatgcctatagaaaggtgacaactaaatttagcaactgcagttatgcccaatattgggacagtactatcagtagtggattatgtattcaaccgcctcc

SEQ ID NO: 307594 - DNA, 120 bp, Artificial Sequence
  ENSG00000134007_13 (sequence is synthesized)
atatccagggaatatatttagactgaagtactgtgggaatctagtggttgaagaaggggaggaatgtgactgtggaaccatacggcagtgtgcaaaagatccctgttgtctgttaaactg

SEQ ID NO: 307595 - DNA, 120 bp, Artificial Sequence
  ENSG00000134007_14 (sequence is synthesized)
tactctacatcctggggctgcttgtgcttttggaatatgttgcaaagactgcaaatttctgccatcaggaactttatgtagacaacaagttggtgaatgtgaccttccagagtggtgcaa

SEQ ID NO: 307596 - DNA, 120 bp, Artificial Sequence
  ENSG00000134007_15 (sequence is synthesized)
tgggacatcccatcaatgcccagatgatgtgtatgtgcaggacgggatctcctgtaatgtgaatgccttctgctatgaaaagacgtgtaataaccatgatatacaatgtaaagagatttt

SEQ ID NO: 307597 - DNA, 120 bp, Artificial Sequence
  ENSG00000134007_16 (sequence is synthesized)
tggccaagatgcaaggagtgcatctcagagttgctaccaagaaatcaacacccaaggaaaccgtttcggtcactgtggtattgtaggcacaacatatgtaaaatgttggacccctgatat

SEQ ID NO: 307598 - DNA, 120 bp, Artificial Sequence
  ENSG00000134007_17 (sequence is synthesized)
catgtgtgggagggttcagtgtgaaaatgtgggagtaattcccaatctgatagagcattctacagtgcagcagtttcacctcaatgacaccacttgctggggcactgattatcatttagg

SEQ ID NO: 307599 - DNA, 120 bp, Artificial Sequence
  ENSG00000134007_18 (sequence is synthesized)
gatggctatacctgatattggtgaggtgaaagatggcacagtatgtggtccagaaaagatctgcatccgtaagaagtgtgccagtatggttcatctgtcacaagcctgtcagcctaagac

SEQ ID NO: 307600 - DNA, 120 bp, Artificial Sequence
  ENSG00000134007_19 (sequence is synthesized)
ctgcaacatgaggggaatctgcaacaacaaacaacactgtcactgcaaccatgaatgggcacccccatactgcaaggacaaaggctatggaggtagtgctgatagtggcccacctcctaa

SEQ ID NO: 307601 - DNA, 120 bp, Artificial Sequence
  ENSG00000134007_20 (sequence is synthesized)
gaacaacatggaaggattaaatgtgatgggaaagttgcgttacctgtcactattgtgccttcttcctttggttgcttttttattattttgcttacatgtgctttttaagaaacgcacaaa

SEQ ID NO: 307602 - DNA, 120 bp, Artificial Sequence
  ENSG00000134007_21 (sequence is synthesized)
aagtaaagaagatgaagaaggataagagaaatgggaaaaagaaggagactaaactttatacttcatttttaatatccaattttttaatagaaaaatatgaagccatgtctcactgtttaa

SEQ ID NO: 307603 - DNA, 120 bp, Artificial Sequence
  ENSG00000134007_22 (sequence is synthesized)
ataaaacttcatggacatttcatgtcaggattgcaagcattagctatcacagcaaaggattcctagcctattcttacttactctacagtgtcttaagcaatattaaaggttccttttccc

SEQ ID NO: 307604 - DNA, 120 bp, Artificial Sequence
  ENSG00000134013_0 (sequence is synthesized)
gcgactccagcgcgcggctacctacgcttggtgcttgctttctccagccatcggagaccagagccgccccctctgctcgagaaaggggctcagcggcggcggaagcggagggggaccacc

SEQ ID NO: 307605 - DNA, 120 bp, Artificial Sequence
  ENSG00000134013_1 (sequence is synthesized)
gtggagagcgcggtcccagcccggccactgcggatccctgaaaccaaaaagctcctgctgcttctgtaccccgcctgtccctcccagctgcgcagggccccttcgtgggatcatcagccc

SEQ ID NO: 307606 - DNA, 120 bp, Artificial Sequence
  ENSG00000134013_2 (sequence is synthesized)
gaagacagggatggagaggcctctgtgctcccacctctgcagctgcctggctatgctggccctcctgtcccccctgagcctggcacagtatgacagctggccccattaccccgagtactt

SEQ ID NO: 307607 - DNA, 120 bp, Artificial Sequence
  ENSG00000134013_3 (sequence is synthesized)
ccagcaaccggctcctgagtatcaccagccccaggcccccgccaacgtggccaagattcagctgcgcctggctgggcagaagaggaagcacagcgagggccgggtggaggtgtactatga

SEQ ID NO: 307608 - DNA, 120 bp, Artificial Sequence
  ENSG00000134013_4 (sequence is synthesized)
tggccagtggggcaccgtgtgcgatgacgacttctccatccacgctgcccacgtcgtctgccgggagctgggctacgtggaggccaagtcctggactgccagctcctcctacggcaaggg

SEQ ID NO: 307609 - DNA, 120 bp, Artificial Sequence
  ENSG00000134013_5 (sequence is synthesized)
agaagggcccatctggttagacaatctccactgtactggcaacgaggcgacccttgcagcatgcacctccaatggctggggcgtcactgactgcaagcacacggaggatgtcggtgtggt

SEQ ID NO: 307610 - DNA, 120 bp, Artificial Sequence
  ENSG00000134013_6 (sequence is synthesized)
gtgcagcgacaaaaggattcctgggttcaaatttgacaattcgttgatcaaccagatagagaacctgaatatccaggtggaggacattcggattcgagccatcctctcaacctaccgcaa

SEQ ID NO: 307611 - DNA, 120 bp, Artificial Sequence
  ENSG00000134013_7 (sequence is synthesized)
gcgcaccccagtgatggagggctacgtggaggtgaaggagggcaagacctggaagcagatctgtgacaagcactggacggccaagaattcccgcgtggtctgcggcatgtttggcttccc

SEQ ID NO: 307612 - DNA, 120 bp, Artificial Sequence
  ENSG00000134013_8 (sequence is synthesized)
tggggagaggacatacaataccaaagtgtacaaaatgtttgcctcacggaggaagcagcgctactggccattctccatggactgcaccggcacagaggcccacatctccagctgcaagct

SEQ ID NO: 307613 - DNA, 120 bp, Artificial Sequence
  ENSG00000134013_9 (sequence is synthesized)
gggcccccaggtgtcactggaccccatgaagaatgtcacctgcgagaatgggctaccggccgtggtgagttgtgtgcctgggcaggtcttcagccctgacggaccctcaagattccggaa

SEQ ID NO: 307614 - DNA, 120 bp, Artificial Sequence
  ENSG00000134013_10 (sequence is synthesized)
agcgtacaagccagagcaacccctggtgcgactgagaggcggtgcctacatcggggagggccgcgtggaggtgctcaaaaatggagaatgggggaccgtctgcgacgacaagtgggacct

SEQ ID NO: 307615 - DNA, 120 bp, Artificial Sequence
  ENSG00000134013_11 (sequence is synthesized)
ggtgtcggccagtgtggtctgcagagagctgggctttgggagtgccaaagaggcagtcactggctcccgactggggcaagggatcggacccatccacctcaacgagatccagtgcacagg

SEQ ID NO: 307616 - DNA, 120 bp, Artificial Sequence
  ENSG00000134013_12 (sequence is synthesized)
caatgagaagtccattatagactgcaagttcaatgccgagtctcagggctgcaaccacgaggaggatgctggtgtgagatgcaacacccctgccatgggcttgcagaagaagctgcgcct

SEQ ID NO: 307617 - DNA, 120 bp, Artificial Sequence
  ENSG00000134013_13 (sequence is synthesized)
gaacggcggccgcaatccctacgagggccgagtggaggtgctggtggagagaaacgggtcccttgtgtgggggatggtgtgtggccaaaactggggcatcgtggaggccatggtggtctg

SEQ ID NO: 307618 - DNA, 120 bp, Artificial Sequence
  ENSG00000134013_14 (sequence is synthesized)
ccgccagctgggcctgggattcgccagcaacgccttccaggagacctggtattggcacggagatgtcaacagcaacaaagtggtcatgagtggagtgaagtgctcgggaacggagctgtc

SEQ ID NO: 307619 - DNA, 120 bp, Artificial Sequence
  ENSG00000134013_15 (sequence is synthesized)
ctggcgcactgccgccacgacggggaggacgtggcctgcccccagggcggagtgcagtacggggccggagttgcctgctcagaaaccgcccctgacctggtcctcaatgcggagatggtg

SEQ ID NO: 307620 - DNA, 120 bp, Artificial Sequence
  ENSG00000134013_16 (sequence is synthesized)
cagcagaccacctacctggaggaccggcccatgttcatgctgcagtgtgccatggaggagaactgcctctcggcctcagccgcgcagaccgaccccaccacgggctaccgccggctcctg

SEQ ID NO: 307621 - DNA, 120 bp, Artificial Sequence
  ENSG00000134013_17 (sequence is synthesized)
cgcttctcctcccagatccacaacaatggccagtccgacttccggcccaagaacggccgccacgcgtggatctggcacgactgtcacaggcactaccacagcatggaggtgttcacccac

SEQ ID NO: 307622 - DNA, 120 bp, Artificial Sequence
  ENSG00000134013_18 (sequence is synthesized)
tatgacctgctgaacctcaatggcaccaaggtggcagagggccacaaggccagcttctgcttggaggacacagaatgtgaaggagacatccagaagaattacgagtgtgccaacttcggc

SEQ ID NO: 307623 - DNA, 120 bp, Artificial Sequence
  ENSG00000134013_19 (sequence is synthesized)
gatcagggcatcaccatgggctgctgggacatgtaccgccatgacatcgactgccagtgggttgacatcactgacgtgccccctggagactacctgttccaggttgttattaaccccaac

SEQ ID NO: 307624 - DNA, 120 bp, Artificial Sequence
  ENSG00000134013_20 (sequence is synthesized)
ttcgaggttgcagaatccgattactccaacaacatcatgaaatgcaggagccgctatgacggccaccgcatctggatgtacaactgccacataggtggttccttcagcgaagagacggaa

SEQ ID NO: 307625 - DNA, 120 bp, Artificial Sequence
  ENSG00000134013_21 (sequence is synthesized)
aaaaagtttgagcacttcagcgggctcttaaacaaccagctgtccccgcagtaaagaagcctgcgtggtcaactcctgtcttcaggccacaccacatcttccatgggacttccccccaac

SEQ ID NO: 307626 - DNA, 120 bp, Artificial Sequence
  ENSG00000134013_22 (sequence is synthesized)
aactgagtctgaacgaatgccacgtgccctcacccagcccggcccccaccctgtccagacccctacagctgtgtctaagctcaggaggaaagggaccctcccatcattcatggggggctg

SEQ ID NO: 307627 - DNA, 120 bp, Artificial Sequence
  ENSG00000134013_23 (sequence is synthesized)
ctacctgacccttggggcctgagaaggccttgcgggggtggggtttgtccacagagctgctggagcagcaccaagagccagtcttgaccgggatgaggcccacagacaggttgtcatcag

SEQ ID NO: 307628 - DNA, 120 bp, Artificial Sequence
  ENSG00000134013_24 (sequence is synthesized)
cttgtcccattcaagccaccgagctcaccacagacacagtggagccgcgctcttctccagtgacacgtggacaaatgcgggctcatcagcccccccagagagggtcaggccgaaccccat

SEQ ID NO: 307629 - DNA, 120 bp, Artificial Sequence
  ENSG00000134013_25 (sequence is synthesized)
ttctcctcctcttaggtcattttcagcaaacttgaatatctagacctctcttccaatgaaaccctccagtctattatagtcacatagataatggtgccacgtgttttctgatttggtgag

SEQ ID NO: 307630 - DNA, 120 bp, Artificial Sequence
  ENSG00000134013_26 (sequence is synthesized)
ctcagacttggtgcttccctatccacagcccccaccccttgtttttcaagatactattattatattttcacagacttttgaagcacaaatttattggcatttaatattggacatctgggc

SEQ ID NO: 307631 - DNA, 120 bp, Artificial Sequence
  ENSG00000134013_27 (sequence is synthesized)
ccttggaagtacaaatctaaggaaaaaccaacccactgtgtaagtgactcatcttcctgttgttccaattctgtgggtttttgattcaacggtgctataaccagggtcctgggtgacagg

SEQ ID NO: 307632 - DNA, 120 bp, Artificial Sequence
  ENSG00000134013_28 (sequence is synthesized)
gcgctcactgagcaccatgtgtcatcacagacacttacacatacttgaaacttggaataaaagaaagatttatgaaacgtgtctgtgtttcctttgacccacagcacctgggccctgagc

SEQ ID NO: 307633 - DNA, 120 bp, Artificial Sequence
  ENSG00000134013_29 (sequence is synthesized)
agcaggcttcctatgttcagtggccagaagcagagcttcaggtacattcgtggttttctccggtggacatgggtcctcagatcccctccagcccagtgtggccaccagggcacctccttc

SEQ ID NO: 307634 - DNA, 120 bp, Artificial Sequence
  ENSG00000134013_30 (sequence is synthesized)
aatagactccaaaaggggcagctcctaccatctgggagaagcaatctaaggagatcacaaaaagtaacggaacaggagtcataatctttcttgaactcctgtggtttttactgaaacttg

SEQ ID NO: 307635 - DNA, 120 bp, Artificial Sequence
  ENSG00000134013_31 (sequence is synthesized)
gaattgccagacttcaagtgctggcagtgatgcggggcctggacttcaatattgctggtggtggtgcaaactgcaatgcgtaccccagaagggaagctggcagcttaaaagttagcagcg

SEQ ID NO: 307636 - DNA, 120 bp, Artificial Sequence
  ENSG00000134013_32 (sequence is synthesized)
tgtgtgccctttgattcagagagccacttgcgcgtggctctccggagagatttctacctgggtccatgaatggacttacggaaggattccttggtaatgattctgagtgactgtgttgat

SEQ ID NO: 307637 - DNA, 120 bp, Artificial Sequence
  ENSG00000134013_33 (sequence is synthesized)
cccagcccggccactgcggatccctgaaaccaagttctgaactcccggtctccccagtccctggaggctgcctgcagctttgcttagcttctcagcctgttgatcactgccgtggaattg

SEQ ID NO: 307638 - DNA, 120 bp, Artificial Sequence
  ENSG00000134013_34 (sequence is synthesized)
ggggccggagttgcctgctcagaaagtgagagctcctcccctccctccccaccgggctcccaaggggaccagagtcccaccagttattcctcaagagactctgaagccttgccatgagcc

SEQ ID NO: 307639 - DNA, 120 bp, Artificial Sequence
  ENSG00000134013_35 (sequence is synthesized)
aagcaatagaggaaggtagaatgaaatcctaagggagaaaaactgggggcaagagagatgaccgccaccccaaccacagatcgctgtctatgatgtagtggggagaaaagcgggagggag

SEQ ID NO: 307640 - DNA, 120 bp, Artificial Sequence
  ENSG00000134013_36 (sequence is synthesized)
acacacacacacacacacacacatccatacatcaagcatagttgcagctcccagactgagtgcctggcctgggaacagggtggcagggaagggagggggcggggacagtggtcacccgct

SEQ ID NO: 307641 - DNA, 120 bp, Artificial Sequence
  ENSG00000134013_37 (sequence is synthesized)
gcgagaatgggctaccggccgtggtgagttgtgtgcctgggcaggtcttcagccctgacggaccctcaagattccggaaagcgtacaagccagagcaggaccgtgtgtctcttcagcaac

SEQ ID NO: 307642 - DNA, 83 bp, Artificial Sequence
  ENSG00000134013_38 (sequence is synthesized)
ggcacgatcttggctgactgcaaggcctcctgagtaactgggactacagaaagctcctgctgcttctgtaccccgcctgtccc

SEQ ID NO: 307643 - DNA, 120 bp, Artificial Sequence
  ENSG00000134013_39 (sequence is synthesized)
aagtgctgggattacagatgtgagcccactggccgatttcctagaacaagtaaagtagtccaaccacagcaggcttgacccagcctctgacaaagagcaaatgccctatctgtctcttct

SEQ ID NO: 307644 - DNA, 120 bp, Artificial Sequence
  ENSG00000134013_40 (sequence is synthesized)
ttcttgattcgcttttctttctcctcctcttcctttttcctgtatccatcaaagggtctctgtgatttctgtgttcaggaaacagcgaatatcttgtgagtgggtgggaatagcaactgg

SEQ ID NO: 307645 - DNA, 120 bp, Artificial Sequence
  ENSG00000134013_41 (sequence is synthesized)
gaagaggagagggagggataggagaagtgaccgatcatttctcaggggctgatgccctgtgccaggtaaaacctcagtacttagtgcactgtttgctgacgcggcatgagtagatgagac

SEQ ID NO: 307646 - DNA, 120 bp, Artificial Sequence
  ENSG00000134013_42 (sequence is synthesized)
ccagtgcctgcctagtactttggagtctctgcaggcctagactgtagcactgtgttataagcaaggttgatccaaacttgcttagaagcaaccttgttacaagaaagaattattatccat

SEQ ID NO: 307647 - DNA, 120 bp, Artificial Sequence
  ENSG00000134013_43 (sequence is synthesized)
ctgaggctgcagaaagtatagccacagagctctggggtgaaccctggaagtgaccaggtgctgctgctagtactgctgcagacattgccacttggcatttgcaatgtttagttccccctc

SEQ ID NO: 307648 - DNA, 120 bp, Artificial Sequence
  ENSG00000134013_44 (sequence is synthesized)
gaacctcgggcctggccctggcccggcagcaggcccaagcccctgtgtgcagtgtgagctggaaaggccctgcctccttgcatgttaacatctgaggtgagttacctcacctctgcccca

SEQ ID NO: 307649 - DNA, 120 bp, Artificial Sequence
  ENSG00000134013_45 (sequence is synthesized)
ccacctccaaagacaggcgtgggaccggctagccacaaccttatcaaaacacggtgcagcctggctgtgctctgctggctggaggcgttctctttcctctattcatgttcagaaaaaaac

SEQ ID NO: 307650 - DNA, 120 bp, Artificial Sequence
  ENSG00000134014_0 (sequence is synthesized)
ggctgtcagctttccccgtggtctgagtttgtggctgcatttttatctctggtggctctgctacggcggcgcagaaatgaggcagaagcggaaaggagatctcagccctgctgagctgat

SEQ ID NO: 307651 - DNA, 120 bp, Artificial Sequence
  ENSG00000134014_1 (sequence is synthesized)
gatgctgactataggagatgttattaaacaactgattgaagcccacgagcaggggaaagacatcgatctaaataaggtgaaaaccaagacagctgccaaatatggcctttctgcccagcc

SEQ ID NO: 307652 - DNA, 120 bp, Artificial Sequence
  ENSG00000134014_2 (sequence is synthesized)
ccgcctggtggatatcattgctgccgtccctcctcagtatcgcaaggtcttgatgcccaagttaaaggcgaaacccatcagaactgctagtgggattgctgtcgtggctgtgatgtgcaa

SEQ ID NO: 307653 - DNA, 120 bp, Artificial Sequence
  ENSG00000134014_3 (sequence is synthesized)
accccacagatgtccacacatcagttttacaggaaatatatgtgtatactgccctggtggacctgattctgattttgagtattccacccagtcttacactggctatgagccaacctccat

SEQ ID NO: 307654 - DNA, 120 bp, Artificial Sequence
  ENSG00000134014_4 (sequence is synthesized)
gagagctatccgtgccagatatgaccctttcctacagacaagacaccgaatagaacagttaaaacaacttggtcatagtgtggataaagtggagtttattgtgatgggtggaacgtttat

SEQ ID NO: 307655 - DNA, 120 bp, Artificial Sequence
  ENSG00000134014_5 (sequence is synthesized)
ggcccttccagaagaatacagagattattttattcgaaatttacatgatgccttatcaggacatacttccaacaatatttacgaggcagtcaagtattctgagagaagcctcacaaagtg

SEQ ID NO: 307656 - DNA, 120 bp, Artificial Sequence
  ENSG00000134014_6 (sequence is synthesized)
tattggaattactattgaaaccagaccagattactgcatgaagcgacatttaagtgacatgttgacctatggctgcacaaggctggagattggggtgcagagtgtttatgaagatgtggc

SEQ ID NO: 307657 - DNA, 120 bp, Artificial Sequence
  ENSG00000134014_7 (sequence is synthesized)
tagagacaccaacaggggccacactgtgaaggcagtgtgtgagtcatttcacctggccaaagattccggttttaaagtggtggcccatatgatgcctgacctgccaaacgtgggactaga

SEQ ID NO: 307658 - DNA, 120 bp, Artificial Sequence
  ENSG00000134014_8 (sequence is synthesized)
aagagacattgaacagttcacagagttttttgagaaccctgcttttcgtcccgatgggctgaaactctatcctaccctggtgattcgtgggaccgggctttatgagctttggaaatcagg

SEQ ID NO: 307659 - DNA, 120 bp, Artificial Sequence
  ENSG00000134014_9 (sequence is synthesized)
aagatataagagttactctcctagtgacctggttgaattggtggctcggatcctagccctcgtgcctccatggactcgagtgtaccgagtacagagggatattccaatgcctttagttag

SEQ ID NO: 307660 - DNA, 120 bp, Artificial Sequence
  ENSG00000134014_10 (sequence is synthesized)
ctcaggagtagagcatggtaacctgagagagctggcacttgcaagaatgaaagacctcggaatacagtgtcgagatgtgagaaccagagaagttggaatccaagaaattcatcacaaagt

SEQ ID NO: 307661 - DNA, 120 bp, Artificial Sequence
  ENSG00000134014_11 (sequence is synthesized)
acggccataccaggttgaattggtaaggagagattatgttgcaaatggtggctgggaaacattcttgtcatacgaagacccagatcaagacattttgattggcctcctacgattacgcaa

SEQ ID NO: 307662 - DNA, 120 bp, Artificial Sequence
  ENSG00000134014_12 (sequence is synthesized)
gtgttcagaagaaactttccgtttcgaattgggtggaggtgtctccatagtacgagagctgcatgtgtatgggagtgtggtccctgtgagcagccgggatcctactaaatttcagcatca

SEQ ID NO: 307663 - DNA, 120 bp, Artificial Sequence
  ENSG00000134014_13 (sequence is synthesized)
gcagaaagaatagctagagaagaacatgggtctgggaaaatcgctgtgatatcaggggtcggcaccaggaattattatagaaagatcggctacagattacaaggcccgtacatggtgaag

SEQ ID NO: 307664 - DNA, 120 bp, Artificial Sequence
  ENSG00000134014_14 (sequence is synthesized)
atgctgaaataatggccacaccagtccactcttctgcagtatcctccctggcagaacacggagaatcaggatttcttaaatactcaacagagaggctgagcagagcaaatggggggcttc

SEQ ID NO: 307665 - DNA, 120 bp, Artificial Sequence
  ENSG00000134014_15 (sequence is synthesized)
accctcatcccgcagctgcagagactggaaactgccttcaaggccacggctggtcatctgctgaccacaccccagatccgccctctcctgcgtgcaccccaaaaaatcacttgcgttttt

SEQ ID NO: 307666 - DNA, 120 bp, Artificial Sequence
  ENSG00000134014_16 (sequence is synthesized)
gaggcttaaatcatctatccagtttctacattttgcatgaggcctgcaggtggcctattttgactcagacggtgaaaaaagcaaattaactcatttggacaccataactcatgcaataaa

SEQ ID NO: 307667 - DNA, 120 bp, Artificial Sequence
  ENSG00000134014_17 (sequence is synthesized)
actgattgtcattcgaggagcaaacttaagagtagtttatttatataccctggggacagaaagtcaggttgaaacaggaaaaccaccagactctaatctcagccctttaacgacatacgc

SEQ ID NO: 307668 - DNA, 120 bp, Artificial Sequence
  ENSG00000134014_18 (sequence is synthesized)
attggagcgcaagttaggaaaatgagcttttgttttcatggaaatcattctgattacagtgctgatgtttagaaataaatagcagtgtgactgggaaagaggaattgcagttgtgggggt

SEQ ID NO: 307669 - DNA, 120 bp, Artificial Sequence
  ENSG00000134014_19 (sequence is synthesized)
gtgagcctggcagcagccagccagcagcctctcccaggcgggagtctaccatccgagacggcgatgacaaagagcttcattccacattctttgttatctctacttcccaccctcttggca

SEQ ID NO: 307670 - DNA, 120 bp, Artificial Sequence
  ENSG00000134014_20 (sequence is synthesized)
actacagagcagtgtgggcagccccaagtgtggtccccagagagcgtttggctttcctgtctgtctatcctgagcgggtggagtctcaggttgtgtgcccctaaatcaagatttgcttcc

SEQ ID NO: 307671 - DNA, 80 bp, Artificial Sequence
  ENSG00000134014_21 (sequence is synthesized)
gagtctcaggttgtgtgcccctaaatcaagatttgcttccacagaagccattacttgcaattttttttttttttctgaga

SEQ ID NO: 307672 - DNA, 120 bp, Artificial Sequence
  ENSG00000134014_22 (sequence is synthesized)
attacaggcatgagccaccgctcccagcctttgattttttaaggtggattttggttgttataaatggagaaaggtaagagttcaagttcaacccgtgtgtgaaagcaaaacaatggaaaa

SEQ ID NO: 307673 - DNA, 120 bp, Artificial Sequence
  ENSG00000134014_23 (sequence is synthesized)
agttcaacccgtgtgtgaaagcaaaacaatggaaaacaggattggcttcttcaaaggctcctcttgtagaactgcctctttgaaatttcgaggtaatctactttggagactctgcctgga

SEQ ID NO: 307674 - DNA, 120 bp, Artificial Sequence
  ENSG00000134014_24 (sequence is synthesized)
gagggtcagttcctaagttaaaagcatcgcttaaccttggctcctgtggcattttacaaaggtttaaaggaattgattcctctgaaagggcctgaaaataaaaagtctttaacatacaaa

SEQ ID NO: 307675 - DNA, 120 bp, Artificial Sequence
  ENSG00000134014_25 (sequence is synthesized)
cgaagcttcaggagacctatcctcatctgtgcaaggaggagtggccaactctggagcccaggctgttgcttcctggtctggtggtgaatcctccatagtctggagatctcagccctgctg

SEQ ID NO: 307676 - DNA, 120 bp, Artificial Sequence
  ENSG00000134014_26 (sequence is synthesized)
atgtcaaggtgctggcatctggcaagagccttcttactacgtcatcacacggcaaaagacaagagaaacaaaaagcggaccaattcacccttttataatggcattaatcttacccacaag

SEQ ID NO: 307677 - DNA, 120 bp, Artificial Sequence
  ENSG00000134014_27 (sequence is synthesized)
ggcagtcacgtggtgtcttgtttgaatggcagggaaaccattattccaatatatgccctccgaggagttaacgtcgatttaacgggttgtaggacttttcatttgttaagatttgtttca

SEQ ID NO: 307678 - DNA, 120 bp, Artificial Sequence
  ENSG00000134014_28 (sequence is synthesized)
agaagcggaaaggtgcgaaaggggaaggagatgggggaaaggggtggtccgaaaggggcgaacgcccaggcaatcaaatgctgaaccgaacttttaccgcgagaatccgctacccagtcc

SEQ ID NO: 307679 - DNA, 120 bp, Artificial Sequence
  ENSG00000134014_29 (sequence is synthesized)
aatagtaaactgacatggcatactggtgggcatcttatggaaagttgcttccacccctgccctgtttcagctagtcctcaacttgatccagtgtccaaactctgcctccagaacagagtc

SEQ ID NO: 307680 - DNA, 120 bp, Artificial Sequence
  ENSG00000134014_30 (sequence is synthesized)
aacaggtacatttttaaaaaacatgtttcttaaaaattaggtgtttatacttagtaagaagccattgttgcttgattcaaattgaacctgaaataagaatgaaaaaggtgtttttcctct

SEQ ID NO: 307681 - DNA, 120 bp, Artificial Sequence
  ENSG00000134014_31 (sequence is synthesized)
ttgtaagttttcaatatccatttgagggagggagaatttgccatgcctagcaaggtcaaaaacactactttctttaaagactgtatttattgtttaagggttttatattctctaagtttt

SEQ ID NO: 307682 - DNA, 120 bp, Artificial Sequence
  ENSG00000134014_32 (sequence is synthesized)
tttgaatttgtagaaagtcatttgtagtatgaaatttgtggaataaagatgtatgaaagttcttagacaatgggtgggtgtgttgacttttaatttccaaaagtcagattaagaagtatt

SEQ ID NO: 307683 - DNA, 120 bp, Artificial Sequence
  ENSG00000134014_33 (sequence is synthesized)
cagattaagaagtattttgactggccatgcgcaatggctcatgcctgtaatcccaaccctttggaaggctgtgacagcaggtcacttgagcctaagagttcgagaccagcctgggcaaca

SEQ ID NO: 307684 - DNA, 120 bp, Artificial Sequence
  ENSG00000134014_34 (sequence is synthesized)
agcatccccatgtgcatagttaggaagtagcagagccaggatttgaactcaggcagcctggctccagagcctacactctttaccactatctcatactaggaggacagagagaaggcagtt

SEQ ID NO: 307685 - DNA, 120 bp, Artificial Sequence
  ENSG00000134014_35 (sequence is synthesized)
aatagaacagaaagcagacttgaagtgcctcctgtgcctggaatcatccatcaattttagactgctgtcttgatttttctttccaatctattctttttttcttccattacatcaaatcct

SEQ ID NO: 307686 - DNA, 120 bp, Artificial Sequence
  ENSG00000134014_36 (sequence is synthesized)
tattatgttacataatcattcatgtatcattgttgaccataaatgccacctttttgtcctctaggcttaccaccaagtctgacataaaatacatgatcaataaatacttactgttttgca

SEQ ID NO: 307687 - DNA, 120 bp, Artificial Sequence
  ENSG00000134014_37 (sequence is synthesized)
attaatgactttagatcctccaactatgttcttacctgtctgagaaaagctgaagtgctaggtaatgctaggtaccaggcccagaagacaatttcgtagacttgcacagctgcaacggaa

SEQ ID NO: 307688 - DNA, 120 bp, Artificial Sequence
  ENSG00000134020_0 (sequence is synthesized)
agtcctcccaaagtacttgtgtccgggtggtggactggattagctgcggagccctggaagctgcctgtccttctccctgtgcttaaccagaggtgcccatgggttggacaatgaggctgg

SEQ ID NO: 307689 - DNA, 120 bp, Artificial Sequence
  ENSG00000134020_1 (sequence is synthesized)
tcacagcagcactgttactgggtctcatgatggtggtcactggagacgaggatgagaacagcccgtgtgcccatgaggccctcttggacgaggacaccctcttttgccagggccttgaag

SEQ ID NO: 307690 - DNA, 120 bp, Artificial Sequence
  ENSG00000134020_2 (sequence is synthesized)
ttttctacccagagttggggaacattggctgcaaggttgttcctgattgtaacaactacagacagaagatcacctcctggatggagccgatagtcaagttcccgggggccgtggacggcg

SEQ ID NO: 307691 - DNA, 120 bp, Artificial Sequence
  ENSG00000134020_3 (sequence is synthesized)
attctggagacattggctggtaacagatatcaagggcgccgacctgaagaaagggaagattcagggccaggagttatcagcctaccaggctccctccccaccggcacacagtggcttcca

SEQ ID NO: 307692 - DNA, 120 bp, Artificial Sequence
  ENSG00000134020_4 (sequence is synthesized)
tcgctaccagttctttgtctatcttcaggaaggaaaagtcatctctctccttcccaaggaaaacaaaactcgaggctcttggaaaatggacagatttctgaaccgtttccacctgggcga

SEQ ID NO: 307693 - DNA, 120 bp, Artificial Sequence
  ENSG00000134020_5 (sequence is synthesized)
acctgaagcaagcacccagttcatgacccagaactaccaggactcaccaaccctccaggctcccagagaaagggccagcgagcccaagcacaaaaaccaggcggagatagctgcctgcta

SEQ ID NO: 307694 - DNA, 120 bp, Artificial Sequence
  ENSG00000134020_6 (sequence is synthesized)
gatagccggctttgccatccgggcatgtggccacactgcccaccaccgacgatgtgggtatggaaccccctctggatacagaaccccttcttttccaaataaaaaaaaaatcatccaggg

SEQ ID NO: 307695 - DNA, 120 bp, Artificial Sequence
  ENSG00000134020_7 (sequence is synthesized)
gcgccgccgcgctgctgctgggctccagcctcccggccagctcgcggccactcagaaactccggcagggcagcccaggccggacgtgggcccaggagcggacgcgcgcgctgcactgcag

SEQ ID NO: 307696 - DNA, 120 bp, Artificial Sequence
  ENSG00000134020_8 (sequence is synthesized)
caggggcgccgggagaggggcgaggccgccgccgctacgcgcccgggcccgcggcgaaggcgctgccgcgaagacgcctggcgctgcagtcccaggtgcccatgggttggacaatgaggc

SEQ ID NO: 307697 - DNA, 120 bp, Artificial Sequence
  ENSG00000134020_9 (sequence is synthesized)
ggatccagatgcccctagcagagcagaacccagacagagattctggagacattggctggtaacagatatcaagatggggaaagcagagcccagagaagttgaatgatgccatctcttagc

SEQ ID NO: 307698 - DNA, 120 bp, Artificial Sequence
  ENSG00000134028_0 (sequence is synthesized)
agatgtgagtcctcaatgagctataaccacagccataaatatctctcaaagatgaggaacattctcatgatgttgacactgcaattttttgacaatttcccaacactcttaagaaacatt

SEQ ID NO: 307699 - DNA, 120 bp, Artificial Sequence
  ENSG00000134028_1 (sequence is synthesized)
ccccaatctcacacgaaaagtgggggttttaattttcttgttcaacttctaaagagaaattggagaagataaaactggacactggggagaccacaacttcatgctgcgtgggatctccca

SEQ ID NO: 307700 - DNA, 120 bp, Artificial Sequence
  ENSG00000134028_2 (sequence is synthesized)
gctacctgcagtggccaccatgtcttgggtcctgctgcctgtactttggctcattgttcaaactcaagcaatagccataaagcaaacacctgaattaacgctccatgaaatagtttgtcc

SEQ ID NO: 307701 - DNA, 120 bp, Artificial Sequence
  ENSG00000134028_3 (sequence is synthesized)
taaaaaacttcacattttacacaaaagagagatcaagaacaaccagacagaaaagcatggcaaagaggaaaggtatgaacctgaagttcaatatcagatgatcttaaatggagaagaaat

SEQ ID NO: 307702 - DNA, 120 bp, Artificial Sequence
  ENSG00000134028_4 (sequence is synthesized)
cattctctccctacaaaaaaccaagcacctcctggggccagactacactgaaacattgtactcacccagaggagaggaaattaccacgaaacctgagaacatggaacactgttactataa

SEQ ID NO: 307703 - DNA, 120 bp, Artificial Sequence
  ENSG00000134028_5 (sequence is synthesized)
aggaaacatcctaaatgaaaagaattctgttgccagcatcagtacttgtgacgggttgagaggatacttcacacatcatcaccaaagataccagataaaacctctgaaaagcacagacga

SEQ ID NO: 307704 - DNA, 120 bp, Artificial Sequence
  ENSG00000134028_6 (sequence is synthesized)
gaaagaacatgccgtctttacatctaaccaggaggaacaagacccagctaaccacacatgtggtgtgaagagcactgacgggaaacaaggcccaattcgaatctctagatcactcaaaag

SEQ ID NO: 307705 - DNA, 120 bp, Artificial Sequence
  ENSG00000134028_7 (sequence is synthesized)
cccagagaaagaagactttcttcgggcacagaaatacattgatctctatttggtgctggataatgccttttataagaactataatgagaatctaactctgataagaagctttgtgtttga

SEQ ID NO: 307706 - DNA, 120 bp, Artificial Sequence
  ENSG00000134028_8 (sequence is synthesized)
tgtgatgaacctactcaatgtgatatataacaccatagatgttcaagtggccttggtaggtatggaaatctggtctgatggggataagataaaggtggtgcccagcgcaagcaccacgtt

SEQ ID NO: 307707 - DNA, 120 bp, Artificial Sequence
  ENSG00000134028_9 (sequence is synthesized)
gcgggattagcttcaacaatcgacgtgtgggactggcagcttcaaattccttgtgttccccatcttcggttgctgttattgaggctaaaaaaaagaataatgtggctcttgtaggagtga

SEQ ID NO: 307708 - DNA, 120 bp, Artificial Sequence
  ENSG00000134028_10 (sequence is synthesized)
tgtcacatgagctgggccatgtccttggtatgcctgatgttccattcaacaccaagtgtccctctggcagttgtgtgatgaatcagtatctgagttcaaaattcccaaaggatttcagta

SEQ ID NO: 307709 - DNA, 120 bp, Artificial Sequence
  ENSG00000134028_11 (sequence is synthesized)
catcttgccgtgcacattttgaaagataccttttatctcagaaaccaaagtgcctgctgcaagcacctattcctacaaatataatgacaacaccagtgtgtgggaaccaccttctagaag

SEQ ID NO: 307710 - DNA, 120 bp, Artificial Sequence
  ENSG00000134028_12 (sequence is synthesized)
tgggagaagactgtgattgtggctctcctaaggagtgtaccaatctctgctgtgaagccctaacgtgtaaactgaagcctggaactgattgcggaggagatgctccaaaccataccacag

SEQ ID NO: 307711 - DNA, 120 bp, Artificial Sequence
  ENSG00000134028_13 (sequence is synthesized)
agtgaatccaaaagtctgcttcactgagatgctaccttgccaggacaagaaccaagaactctaactgtcccaggaatcttgtgaattttcacccataatggtctttcacttgtcattcta

SEQ ID NO: 307712 - DNA, 120 bp, Artificial Sequence
  ENSG00000134028_14 (sequence is synthesized)
ttcacttgtcattctactttctatattgttatcagtccaggaaacaggtaaacagatgtaattagagacattggctctttgtttaggcctaatctttctttttacttttttttttctttt

SEQ ID NO: 307713 - DNA, 120 bp, Artificial Sequence
  ENSG00000134028_15 (sequence is synthesized)
atcatgaatttgtgacttagttctgccctttggagaacaaaagaaagcagtcttccatcaaatcaccttaaaatgcacggctaaactattcagagttaacactccagaattgttaaatta

SEQ ID NO: 307714 - DNA, 120 bp, Artificial Sequence
  ENSG00000134028_16 (sequence is synthesized)
caagtactatgctttaatgcttctttcatcttactagtatggcctataaaaaaaataataccacttgatgggtgaaggctttggcaatagaaagaagaatagaattcaggttttatgtta

SEQ ID NO: 307715 - DNA, 120 bp, Artificial Sequence
  ENSG00000134028_17 (sequence is synthesized)
ttcctctgtgttcacttcgccttgctcttgaaagtgcagtatttttctacatcatgtcaagaatgattcaatgtaaatatttttcattttatcatgtatatcctatacacacatctcctt

SEQ ID NO: 307716 - DNA, 120 bp, Artificial Sequence
  ENSG00000134028_18 (sequence is synthesized)
catcatcatatatgaagtttattttgagaagtctacattgcttacattttaattgagccagcaaagaaggcttaatgatttattgaaccataatgtcaataaaaacacaacttttgaggc

SEQ ID NO: 307717 - DNA, 120 bp, Artificial Sequence
  ENSG00000134028_19 (sequence is synthesized)
atgctgcgtgggatctcccagctacctgcagtggccaccatgtcttgggtcctgctgcctgtactttggctcattgttcaaactcaagcctcaaactgtgcgtggcctaaagtcagcatt

SEQ ID NO: 307718 - DNA, 120 bp, Artificial Sequence
  ENSG00000134030_0 (sequence is synthesized)
actctcctacattctctttccctgtgtcagatcagggatcattttttttccttcctctactccctcccccctacccgcccctccctccctgtttcccttccctccctccctcccctctct

SEQ ID NO: 307719 - DNA, 120 bp, Artificial Sequence
  ENSG00000134030_1 (sequence is synthesized)
gctgggtctgtgcgctggggcgcccgatcccctccgcagctgggacgctccgaactcgaggcaggagtcggctctccggagcctcgtccctcccttccccttccctgcccccttccccca

SEQ ID NO: 307720 - DNA, 120 bp, Artificial Sequence
  ENSG00000134030_2 (sequence is synthesized)
cccccgactcgggcttggcgcggcggccagaggaaccccgagtcccggcccaggcccctgagctggagggatggaaaactcctctgcagcatcagcctcctcggaggcagggagcagccg

SEQ ID NO: 307721 - DNA, 120 bp, Artificial Sequence
  ENSG00000134030_3 (sequence is synthesized)
ctcccaggagatcgaggagctggagcgcttcatcgacagctacgtgctggagtaccaggtgcaggggctgctggctgacaagacggagggtgatggcgagagcgagaggacccagtccca

SEQ ID NO: 307722 - DNA, 120 bp, Artificial Sequence
  ENSG00000134030_4 (sequence is synthesized)
catctcccagtggacagcggactgcagcgaaccgctggacagcagctgttccttctcccgagggcgagcccccccacagcagaatggcagcaaagacaactctctggacatgctgggcac

SEQ ID NO: 307723 - DNA, 120 bp, Artificial Sequence
  ENSG00000134030_5 (sequence is synthesized)
ggacatctgggcggccaacaccttcgattccttcagtggtgccacctgggacctgcagccggaaaagctggacttcacccagttccaccgcaaagtccgacacacgcccaagcagcccct

SEQ ID NO: 307724 - DNA, 120 bp, Artificial Sequence
  ENSG00000134030_6 (sequence is synthesized)
gccacacatcgaccgcgaagggtgtggcaaagggaagctggaagatggggatggcatcaacctgaatgacatcgagaaggtccttccagcctggcagggctaccacccgatgccccatga

SEQ ID NO: 307725 - DNA, 120 bp, Artificial Sequence
  ENSG00000134030_7 (sequence is synthesized)
agtggagatcgcacacaccaagaagctgttccgcaggaggagaaatgatcgaaggcggcagcagagacctccggggggcaacaagccccaacagcatggtgaccaccagccaggcagtgc

SEQ ID NO: 307726 - DNA, 120 bp, Artificial Sequence
  ENSG00000134030_8 (sequence is synthesized)
caaacacaacagggaccaccagaaatcctaccaggggggctcagcaccccacccctcagggaggcccactcaccatggctacagccagaaccggcgctggcaccatggcaacatgaagca

SEQ ID NO: 307727 - DNA, 120 bp, Artificial Sequence
  ENSG00000134030_9 (sequence is synthesized)
cccaccaggcgacaagggggaggcaggcgcacaccgcaatgccaaagagaccatgaccatcgagaacccaaaactggaggacactgcaggggacaccgggcacagcagccttgaggcccc

SEQ ID NO: 307728 - DNA, 120 bp, Artificial Sequence
  ENSG00000134030_10 (sequence is synthesized)
ccgcagccctgacaccctggccccggtggcttctgagcggctgcccccacagcagtcaggggggccagaggttgagacaaaacgtaaagacagtattcttcccgagcgcatcggggagcg

SEQ ID NO: 307729 - DNA, 120 bp, Artificial Sequence
  ENSG00000134030_11 (sequence is synthesized)
gcccaaaattaccctgctccagtcttccaaagacagactgcggcgaaggctaaaggaaaaggatgaagtggccgtggagacgaccactccccagcagaacaagatggacaagctgatcga

SEQ ID NO: 307730 - DNA, 120 bp, Artificial Sequence
  ENSG00000134030_12 (sequence is synthesized)
gatcctgaacagcatgcggaacaacagcagcgacgtggacaccaagctcaccaccttcatggaggaggcccagaactccaccaactccgaggagatgctgggcgagatcgtgcgcacaat

SEQ ID NO: 307731 - DNA, 120 bp, Artificial Sequence
  ENSG00000134030_13 (sequence is synthesized)
ctaccagaaggctgtgtccgaccgcagcttcgccttcaccgctgccaagctctgcgacaagatggcgctctttatggtggaggggaccaagttccggagcctgctcctcaacatgctgca

SEQ ID NO: 307732 - DNA, 120 bp, Artificial Sequence
  ENSG00000134030_14 (sequence is synthesized)
gaaggacttcacggtgcgcgaggagctgcagcagcaggacgtggagcgctggctgggcttcatcaccttcctgtgcgaggtcttcggcaccatgcgcagcagcacaggcgagcccttccg

SEQ ID NO: 307733 - DNA, 120 bp, Artificial Sequence
  ENSG00000134030_15 (sequence is synthesized)
tgtgctcgtgtgccccatctacacctgcctcagggagctcttgcaatctcaggatgtgaaggaagatgctgtcctttgctgctctatggagctgcagagtacaggccggctgctggagga

SEQ ID NO: 307734 - DNA, 120 bp, Artificial Sequence
  ENSG00000134030_16 (sequence is synthesized)
acagctgcctgagatgatgacagagctcctggccagcgcacgggacaagatgctgtgcccctcggagtccatgctgacccggtcgctgctcctagaggtcatcgagctccacgctaacag

SEQ ID NO: 307735 - DNA, 120 bp, Artificial Sequence
  ENSG00000134030_17 (sequence is synthesized)
ctggaaccctctgacgccccccatcacgcagtactacaacagaaccatccagaaactgacagcctgacagccagggggcctggcaggcggcccacgggcagctggggccctggtgcacag

SEQ ID NO: 307736 - DNA, 120 bp, Artificial Sequence
  ENSG00000134030_18 (sequence is synthesized)
ggccagatggacaggcgggaggacaggggtggccctggcgggagaaagaaatggggaggagggcaggcagagtcggtggccagtctggagccagacggggaagggagcaaatccctgaga

SEQ ID NO: 307737 - DNA, 120 bp, Artificial Sequence
  ENSG00000134030_19 (sequence is synthesized)
ggagtgcccccgcacaagccccccagcccgagcatgcaagctcacaccaataagggaagcatgtttctttttcctggtggccctggccctccccttcctcactcccgcctctcccctccc

SEQ ID NO: 307738 - DNA, 120 bp, Artificial Sequence
  ENSG00000134030_20 (sequence is synthesized)
catcagacccatcccccacggagctttgtgtgagggatctcatcgctgtgactcctcggagaccttggcagcctcgcacgccggggcaccgcttgggtcagaaaggacctcggaaggctg

SEQ ID NO: 307739 - DNA, 120 bp, Artificial Sequence
  ENSG00000134030_21 (sequence is synthesized)
aaaaagtgggtcggagacgggctcgcattgttcccgcatgctgtcagccgcagtcgccaactggcagcaggcgacgtgtagcagatgtccgggaggacaaaggcaggcacggtccccacc

SEQ ID NO: 307740 - DNA, 120 bp, Artificial Sequence
  ENSG00000134030_22 (sequence is synthesized)
agccgcccgtaattgacggcctttgtcagccatggcagagctgacgctccacctcccacctccaagtcctcctcactgcagcccccacagcctcaggcctagggggtcaggcgcagcggg

SEQ ID NO: 307741 - DNA, 120 bp, Artificial Sequence
  ENSG00000134030_23 (sequence is synthesized)
ggagatggagtttgcagttccacttgcactcttttgtttattgtgttttatttttcaaaagtcggttgctttgaagtctctttggccaatgaaaatgcccgtgatgtgatcacacagtca

SEQ ID NO: 307742 - DNA, 120 bp, Artificial Sequence
  ENSG00000134030_24 (sequence is synthesized)
gttgaggacccccggattagtgggagatcaaacccagctcccctctagaagaaggattcgagccacagacagcttgccagtagccaattagggtaattggaaacttctgccccggcgggg

SEQ ID NO: 307743 - DNA, 120 bp, Artificial Sequence
  ENSG00000134030_25 (sequence is synthesized)
ggtccccgctggaatcctgtgttcctcgccactggcttccagcgcctctgttttctcaaagggctgatactgtcaccactgggaccaagttaaacctggtcctggccccaggggccttgt

SEQ ID NO: 307744 - DNA, 120 bp, Artificial Sequence
  ENSG00000134030_26 (sequence is synthesized)
ggcaaacagggcacagaacgagactggcaaattaaaaccaaaattctagatggtgtcttgcgctccacacgcaggtcttactggggaaaaggatgggagtgggggctccccaggactcga

SEQ ID NO: 307745 - DNA, 120 bp, Artificial Sequence
  ENSG00000134030_27 (sequence is synthesized)
ttttagctaatgcgctgtgtcactgccccagctcggacgtagaagcccagccctccgtgagctcttgggaaaggggtgaattcactgggtcatggaagggacagtcaggtgaccagcggg

SEQ ID NO: 307746 - DNA, 120 bp, Artificial Sequence
  ENSG00000134030_28 (sequence is synthesized)
gtcgccagatgaagcttcccagccgggaaacaagacggggtttcttggcaggccctggtcctggggagcaggccctgttgttggctggagaggaaggtgtggggtggaacaggtgtccac

SEQ ID NO: 307747 - DNA, 120 bp, Artificial Sequence
  ENSG00000134030_29 (sequence is synthesized)
atagctccatctctgggggctggagcacacactttgatgagcccccccggaaatgatgtcagagcctagccgcttccttatttgctcttttattgaggccgggcaggccctgggtcactt

SEQ ID NO: 307748 - DNA, 120 bp, Artificial Sequence
  ENSG00000134030_30 (sequence is synthesized)
tggaggcccctcttggtccacactggactggccgggaggtgatgggcggggaaggttctcgtgattgattgattctgagtctgagagtggcgagtggggagaggcttccccagttctctc

SEQ ID NO: 307749 - DNA, 120 bp, Artificial Sequence
  ENSG00000134030_31 (sequence is synthesized)
cagctttccctgcagctgcaacctgccctctggtcccaggtgtggagcctttgcctgtctctaaaaagagcctgttggcgacaaggtgtagggggcacaagtttacctgaaacaggtcag

SEQ ID NO: 307750 - DNA, 120 bp, Artificial Sequence
  ENSG00000134030_32 (sequence is synthesized)
tggtctctcccaagaagcgcacgccacctctggtccctggccctgaaccctgccttcttcctccctccacggtttcttcccagactttctcaagctcctcctcactgcccttcctcccca

SEQ ID NO: 307751 - DNA, 120 bp, Artificial Sequence
  ENSG00000134030_33 (sequence is synthesized)
gcccagcctgggaacacagatgccccgcgggtaggaggcctcgagggaggagccgggctgatgcggggctgctcagggcaggccccagggcgagcttgccatcgtggccaggcagcctcc

SEQ ID NO: 307752 - DNA, 120 bp, Artificial Sequence
  ENSG00000134030_34 (sequence is synthesized)
acctgtgcttcagtggcccctgcccccctgaagcatgtggggtttgtccgctaggaggaggcaaggcccccgaagagaggagagacctgggagtgggagctcaggtcagggaggaggcag

SEQ ID NO: 307753 - DNA, 120 bp, Artificial Sequence
  ENSG00000134030_35 (sequence is synthesized)
gggagtggggtctcccagacccaacggtgagctcagagcaagcttcacgcaggacgctccgaaacactgtgtggagggggctgtgttgtgggcaccttggggcctgattctccttcctcc

SEQ ID NO: 307754 - DNA, 120 bp, Artificial Sequence
  ENSG00000134030_36 (sequence is synthesized)
gaacgggctccttgatggcctggccacaggggcagctccccattggctgttaggaccagagtgtgaagaagaagtgaaatataaatatgtatacatatataaatatatttttaattacat

SEQ ID NO: 307755 - DNA, 120 bp, Artificial Sequence
  ENSG00000134030_37 (sequence is synthesized)
gtcgtgtcacggtggctccagacatactgtttgcctagtttattccactgcttgaaagcgcttcctagccaatctgaacaacaacactttaagctgtttttctaaatgcaggttgctgct

SEQ ID NO: 307756 - DNA, 120 bp, Artificial Sequence
  ENSG00000134030_38 (sequence is synthesized)
cctttttcagatatggaaggaaaacgttaagactattttttttttaaagaaacaacagtcaagcctaaaatttgagaccccgaggcagcttcccgagggagactgctcagacaggaactg

SEQ ID NO: 307757 - DNA, 120 bp, Artificial Sequence
  ENSG00000134030_39 (sequence is synthesized)
caggacagaagtggatgccccacagaccctggccccctccccaagtccatcccctctctgtggcatgaggaaggccgcgtccgagttgacctctgaatgtatgtgatgagaggcagagct

SEQ ID NO: 307758 - DNA, 120 bp, Artificial Sequence
  ENSG00000134030_40 (sequence is synthesized)
ggatattgcatttctaaggcttgcattgctttcccctcgcccgcggttcttggcgcatggaagaggcggtccagccatctgatgttgatcctgtctcagtctccccactgcctgtcagga

SEQ ID NO: 307759 - DNA, 120 bp, Artificial Sequence
  ENSG00000134030_41 (sequence is synthesized)
tgagttagtcattgtttttctccgaggcggcctgcttgccacagccctgctccccaaggcctggtggctttgccgaagctctgggaccgcagccccagcgaggcccccaacctcacccag

SEQ ID NO: 307760 - DNA, 120 bp, Artificial Sequence
  ENSG00000134030_42 (sequence is synthesized)
acgaggccaggagccccgccaccctccacgggatgtgcaccctcagaccccattctctctgttcgtccttccttgaccagtctgtaaaccttcactgtttggggatcgtcctgtccatcc

SEQ ID NO: 307761 - DNA, 120 bp, Artificial Sequence
  ENSG00000134030_43 (sequence is synthesized)
atgtaaatgtaaatgttggccgagtcggtatttattctgattgatttttattttattctattattttctccgagggatgagggtggggggtgtgggaagggtaccacagatcaggccggg

SEQ ID NO: 307762 - DNA, 120 bp, Artificial Sequence
  ENSG00000134030_44 (sequence is synthesized)
gcagctgtaggggcgggggcccagacagccaggccgccaccagagcagccccatggggtgccccagacgcgggcctccaagaagccaagtcccagtctgttttctggcatcagacaccgg

SEQ ID NO: 307763 - DNA, 120 bp, Artificial Sequence
  ENSG00000134030_45 (sequence is synthesized)
cccgtgttccttgtcagacagacagactctcaggcctgcctggggagtcgtgtccctcagctgcagggcactgtgttgggaaaccattggctgggcctttgaggacacagatcagaagaa

SEQ ID NO: 307764 - DNA, 120 bp, Artificial Sequence
  ENSG00000134030_46 (sequence is synthesized)
agaaagacaactttcctctgcgcggaacactcacacggaagggctggccgcctccctgagccggctgggagtggacgacaggacctacctccccagagcaagggcctggggcttcccgcc

SEQ ID NO: 307765 - DNA, 120 bp, Artificial Sequence
  ENSG00000134030_47 (sequence is synthesized)
aaagctgccgcggaaccccgctagtgcgaccaccctccctccgtcggtatgtcctgctttccagctgaacccaaactacaagtgggtttaaaaaaataaacaccaccaccaaaaacaaaa

SEQ ID NO: 307766 - DNA, 120 bp, Artificial Sequence
  ENSG00000134030_48 (sequence is synthesized)
ctcgggcttggcgcggcggccagaggaaccccgagcccgcatttgctgcatcgagcagttggtttagtatcagccaaacttgcagctgttcagaccgcgctccgccgagtcccggcccag

SEQ ID NO: 307767 - DNA, 120 bp, Artificial Sequence
  ENSG00000134030_49 (sequence is synthesized)
gagggatgatgaggactgtgtcgtcaggaggtgcgagtcctgagccctggagtggccccacatgaggaagaaagaatgtgaggagaagtgagcctagagaccagtgaggcaggagggaac

SEQ ID NO: 307768 - DNA, 120 bp, Artificial Sequence
  ENSG00000134030_50 (sequence is synthesized)
ctcagcctcctgagtgtttggttctcaagccagagactagctgcccttggaacttgatcccaccatggaagggctcaaggaaagctatagattttctcgtctaacctcactgtgttacct

SEQ ID NO: 307769 - DNA, 120 bp, Artificial Sequence
  ENSG00000134030_51 (sequence is synthesized)
atgaggaaactgaggcccagagagtgaaatcacttacccaaagccacacagctagaggcagagagtgggatctagagccttggtctgtgccttctaggccagagcttctattgtcaggga

SEQ ID NO: 307770 - DNA, 120 bp, Artificial Sequence
  ENSG00000134030_52 (sequence is synthesized)
cagaagaccaagcttggatctcatttcatgaccctgaccctgcccttccagccagatctcacttccttgcagttaagttgttcccattcttggccaccaagaatgagtcaatacaataag

SEQ ID NO: 307771 - DNA, 120 bp, Artificial Sequence
  ENSG00000134030_53 (sequence is synthesized)
atgacatttttttcttcttcaagcccctggtctggtcctagttgcagtgaaatctcataaggctgtagggctttttacttgtaatatccctcctagaagcccaactgttttagtggcaca

SEQ ID NO: 307772 - DNA, 120 bp, Artificial Sequence
  ENSG00000134030_54 (sequence is synthesized)
tgggaggattccttggtgtgtggcatatgtctacagaagaccagcacagtctccacaggacaaaaagccagggctgtgcccacagggggccctatgcccagagaacaagtcatcattggg

SEQ ID NO: 307773 - DNA, 120 bp, Artificial Sequence
  ENSG00000134030_55 (sequence is synthesized)
catttggagctgagggtgtaggggacaaggtggccactgcctgggccgcttttaaccaccactgcaggcattttggatctgacctgccttcctgaccaagtcttcctaccctcattttct

SEQ ID NO: 307774 - DNA, 120 bp, Artificial Sequence
  ENSG00000134030_56 (sequence is synthesized)
ctttggcccgatttcatatttgttatcttatttcctctttcataatttccattaaatcttttctagattaagatatttgatggacaaataaacaaaaaaagccaatgtatatgagaatcc

SEQ ID NO: 307775 - DNA, 120 bp, Artificial Sequence
  ENSG00000134030_57 (sequence is synthesized)
tgggtaggagctagaacccaaaaacagtatcagccctggatgtcataggggccaagaaaaaaggcaacaaggagcttttggcgcatgaggggtctttggtggaggttcccagagggacca

SEQ ID NO: 307776 - DNA, 120 bp, Artificial Sequence
  ENSG00000134030_58 (sequence is synthesized)
gccctcagatccagggaagtaggcctggtcctgctttctgggggtggccaccctctttccaccaggccacccctgcacagagacctcggcttcactcaggcacattcatttgtctccgac

SEQ ID NO: 307777 - DNA, 120 bp, Artificial Sequence
  ENSG00000134030_59 (sequence is synthesized)
aaatccgggaaaaccgccccaaacaatcagcccccttccccccatccctgctcctgggccagcggggtgtccgcacccatctaccatcccctcctccccctcggtggggaactgcactcc

SEQ ID NO: 307778 - DNA, 120 bp, Artificial Sequence
  ENSG00000134030_60 (sequence is synthesized)
acagtgtcgccccctccctgggtttgtcccattccctgccgggttccccgccccgcggggtgtcgtggccctggagctccggcgccaaggggggctcttgggggacgcacggctggagcc

SEQ ID NO: 307779 - DNA, 120 bp, Artificial Sequence
  ENSG00000134030_61 (sequence is synthesized)
cggctcgctttggagctgcgcggtgtagccgctgtcatgtgccgggttccgacctgggaggaggaaaagagcgagcgcgattcctctcccttttgttttgaagcccgcatttgctgcatc

SEQ ID NO: 307780 - DNA, 120 bp, Artificial Sequence
  ENSG00000134030_62 (sequence is synthesized)
attctagaatctttgctttctcagaacatggtaccctgcctcattacttctcaaactttagcgtgcatatgaatagcatgcagatctggtgaacatgcagcttctgattcaggaggacta

SEQ ID NO: 307781 - DNA, 120 bp, Artificial Sequence
  ENSG00000134030_63 (sequence is synthesized)
agcagaggaagaaaccaaatcggtggacccgttgcggtctcccctttggttattcccaacggttgtggttctgttggctttttttattattcctgtcgctgcggtgcaatcgggcctggg

SEQ ID NO: 307782 - DNA, 120 bp, Artificial Sequence
  ENSG00000134030_64 (sequence is synthesized)
gaatagatacgcccggcggagaggggttcacttgacaggctctgaaaagccacctctgggtggcgagtgacccgagaggccgtggggtgggctccggctcgggttcatcaggacgacgag

SEQ ID NO: 307783 - DNA, 120 bp, Artificial Sequence
  ENSG00000134042_0 (sequence is synthesized)
attcatattcacccttcatgaggatgagcacagagcaagaagctagccacgctgggctcctcattgcctagctcaggaattcagggctgggaaaatttagccgagtcatcacatttggct

SEQ ID NO: 307784 - DNA, 120 bp, Artificial Sequence
  ENSG00000134042_1 (sequence is synthesized)
actacccgggaaagcagccctcccgagtcaggaacgggctccggttcatcacgtggcagccgcctgcaggagccgcagttccatggaccaaagacagaggagaatcctgggccagcccct

SEQ ID NO: 307785 - DNA, 120 bp, Artificial Sequence
  ENSG00000134042_2 (sequence is synthesized)
ttccatccctacttcccagcccaagcagaaaaggacatcaatgatatctttcttttccaaggtctcttggaaactgaggttccagaagcgggagcctctgaagaatgtgtttttcatctt

SEQ ID NO: 307786 - DNA, 120 bp, Artificial Sequence
  ENSG00000134042_3 (sequence is synthesized)
ggcagaaagagctcgggaccccagtgctaaaaagcgtcacatggcaatgagaaacttgggaaccatggcctatgaagcccctgacaaggtgagaaagtataagaaaattgtcctcgacct

SEQ ID NO: 307787 - DNA, 120 bp, Artificial Sequence
  ENSG00000134042_4 (sequence is synthesized)
gctggtgtatggactgtatgaccctgtgaatttggaagtcatccatgagagtatgaagactctgaccgtcgttctgggcaagatccaggggaaaggtttgggttccttcttcatagatat

SEQ ID NO: 307788 - DNA, 120 bp, Artificial Sequence
  ENSG00000134042_5 (sequence is synthesized)
cacccttcagaccaggactttattagatgacgagaacgacagtctgagatactcggcctttgttttgtttgggcaattggctgcctttgccgggaggaaatggaaaaaatttttcaccag

SEQ ID NO: 307789 - DNA, 120 bp, Artificial Sequence
  ENSG00000134042_6 (sequence is synthesized)
tcaggttaagcagacacgagattccctcctgatccatttacaggacagaaatccccaggttgccaaggcttgcaaaacaacatttcaagcctgttctccatatctgaaactaaaggagga

SEQ ID NO: 307790 - DNA, 120 bp, Artificial Sequence
  ENSG00000134042_7 (sequence is synthesized)
atacagcttccagagtgaagaagatcaaaggaacactaagctctaccagcagctgagccactatcatccagagatcctgcagttcttctacgcaaataaaattctgtaagcgcagagcag

SEQ ID NO: 307791 - DNA, 120 bp, Artificial Sequence
  ENSG00000134042_8 (sequence is synthesized)
cagggaaatggttctgtatgagtgcattgctgagccatcatgttcccctgttttatctcactggatgcctcttctcactgcttgcctcttgggattgtaatgggaaagagggtgctggga

SEQ ID NO: 307792 - DNA, 120 bp, Artificial Sequence
  ENSG00000134042_9 (sequence is synthesized)
gagcaatcaaaggcaaaaataatacatggaattgtatgattttatctaaagtaaaattctagactgctttcacttatttcatttcctccccatacaaatttgatgagcaggtacacactt

SEQ ID NO: 307793 - DNA, 120 bp, Artificial Sequence
  ENSG00000134042_10 (sequence is synthesized)
tctttaaaacattccaagtgtatatagattcagtgcttatttctcagctttttctttcttaagttcatctctgtcacctagcttttatttttaatactcaatttctgaggcttaggagaa

SEQ ID NO: 307794 - DNA, 120 bp, Artificial Sequence
  ENSG00000134042_11 (sequence is synthesized)
tttttgttgttgttgttttgtttttttttagtgtatttgctattgatactttgctattgatacctttacttgccaagatttatttaaagttggccaagataccaagaaggtggcttgcag

SEQ ID NO: 307795 - DNA, 120 bp, Artificial Sequence
  ENSG00000134042_12 (sequence is synthesized)
gccaagataccaagaaggtggcttgcaggggcatctttggcttctcataattttaaacagtcattgctttcaagatcatgctaaacaagaattaatagagagaaaaaaatctataaagca

SEQ ID NO: 307796 - DNA, 120 bp, Artificial Sequence
  ENSG00000134042_13 (sequence is synthesized)
tgtgttgaaaatcctcaggctcatgataacttacgggataacaatagtaggtaacaccgagtgcttacaattcagtgggcacggtcaaagtgctttttgtaagttctatttaatacttgc

SEQ ID NO: 307797 - DNA, 120 bp, Artificial Sequence
  ENSG00000134042_14 (sequence is synthesized)
gacaaccctgagatagtaagtattattattgttctcattttatagatgagaaagctaacacatagggaaattaggtaactttccccagataactcagtaaacagtggagctggaattcaa

SEQ ID NO: 307798 - DNA, 120 bp, Artificial Sequence
  ENSG00000134042_15 (sequence is synthesized)
acatgtacggtctgacttcttgagcccatactcaataatcatgccatcctgcctttccatggaataactgatggatggttagaaatgttaaaaacaaagcaaatgcaaacatctctgctt

SEQ ID NO: 307799 - DNA, 120 bp, Artificial Sequence
  ENSG00000134042_16 (sequence is synthesized)
ctgctcctctactaagcccagttaacttttgattttatatgtactaagtatacatttttattaatttatgtgagctgagtgtttttattaattactttttggctattaatgtcaattatt

SEQ ID NO: 307800 - DNA, 120 bp, Artificial Sequence
  ENSG00000134042_17 (sequence is synthesized)
ttggtgatcaatcctagttatccaaggagtcacatcactcgtaaaaattacaagaaaaatctctaagtccctctcaccctccctctaaccagattgcatcccaagcttctatagaaactc

SEQ ID NO: 307801 - DNA, 120 bp, Artificial Sequence
  ENSG00000134042_18 (sequence is synthesized)
tggtaccacccctgaattcagtatccaggccacacccggagcgttttgttcaagacaatttaaaacacgggggattataaaagctatagctggatcttaagtggcattctgagaatgagg

SEQ ID NO: 307802 - DNA, 120 bp, Artificial Sequence
  ENSG00000134042_19 (sequence is synthesized)
aactcaattttctgctgtagctcccagggacagggtggtgtgacacagatgcggggatgaggagagacctaggcgagatgaggatgtgggagatggcagacagagtggcaagtgccaggc

SEQ ID NO: 307803 - DNA, 120 bp, Artificial Sequence
  ENSG00000134042_20 (sequence is synthesized)
aggaatggattttcttccttcctgttctgaatctgaagaacatgacagcaagagattttaggagggacacaggctcacgagcaaatgggtggttctgagctgtaagccccctgcccctcc

SEQ ID NO: 307804 - DNA, 120 bp, Artificial Sequence
  ENSG00000134042_21 (sequence is synthesized)
cccactccccggatgctggcctctttgaaattttgttgcaaggttggtttaaacttgatgcagttccattaagtgatcagtgagtggtctgagaaatggctgcatgtggctggcattcaa

SEQ ID NO: 307805 - DNA, 120 bp, Artificial Sequence
  ENSG00000134042_22 (sequence is synthesized)
aaaggtggggatagggtgagatgggtggggttacgtgctctggagtagaaaaacctatgcagttaatgtccctctgtcggttaaaattgtggaagatgcggttggattatttgactttaa

SEQ ID NO: 307806 - DNA, 120 bp, Artificial Sequence
  ENSG00000134042_23 (sequence is synthesized)
gattcaatggtaggcttttattttggtggcccccaatgagtcatgcctcctgatactcatgtctttatttagtcccttctgtttgaatctgggctgcctttgtgacttgctttaatcagg

SEQ ID NO: 307807 - DNA, 120 bp, Artificial Sequence
  ENSG00000134042_24 (sequence is synthesized)
agattgtgataaatggcactgtgccgggcatagaaaccctggcagtttcctcgtttgaattgtgggggaagccagctgccacataaggagttgaactaccaggaacaaatgagagtgcct

SEQ ID NO: 307808 - DNA, 120 bp, Artificial Sequence
  ENSG00000134042_25 (sequence is synthesized)
gagatcaccatgtgaaggagaacggagacacccaacccacagcagagtctgaggcccggacacatgacacaagttgtcccttccagccagacccgagctgttgaagctactccagctgac

SEQ ID NO: 307809 - DNA, 120 bp, Artificial Sequence
  ENSG00000134042_26 (sequence is synthesized)
accatacggaaaagagacgagcgtctccatcaagcctgtgtcagttgcagaagcatgaacaaagaatcaaatgattgttgttttaagtcattaacctttgggataatttgtcacactgca

SEQ ID NO: 307810 - DNA, 120 bp, Artificial Sequence
  ENSG00000134042_27 (sequence is synthesized)
ataagtaaccagagaagattccttattattaactgttgtcttggctaattttgttttgctcttcataagtcctctttgagtttaaattctatttccagaaatttatgttatcatgaaatt

SEQ ID NO: 307811 - DNA, 120 bp, Artificial Sequence
  ENSG00000134042_28 (sequence is synthesized)
tggtggcaagagcaagggactatgtttttttgtttgtttgtttctgtttctcaccatacctaccacagagcctggccatgtgattaaggaacatttgctgaatgactaaatgattccaaa

SEQ ID NO: 307812 - DNA, 120 bp, Artificial Sequence
  ENSG00000134042_29 (sequence is synthesized)
ttgtagagggaataaagtccaatgtccagtctgccatttcaggctttcaaccttcgttttcttctgttactctctttgcttcagacaagtttgggtcctttctcttctctcaacatgtct

SEQ ID NO: 307813 - DNA, 120 bp, Artificial Sequence
  ENSG00000134042_30 (sequence is synthesized)
tgttctcctataccccctcacctttgctcagtctgctatttctgtgttgagtcccctccctgctcacctgtacacacccacctggaatcacatgcacacacacacacacacatttcacgt

SEQ ID NO: 307814 - DNA, 120 bp, Artificial Sequence
  ENSG00000134042_31 (sequence is synthesized)
gtatctcttatctgtactccaatgcctaggtcaaagtcctgatccccccaatcaggggagagctcaagtctctgaattcccagaacattctagcaatattataccacttatatcttatct

SEQ ID NO: 307815 - DNA, 120 bp, Artificial Sequence
  ENSG00000134042_32 (sequence is synthesized)
gaaaagtttttttttgtatatggctttatgtttttttttttatcctgttagattgaaactacagaaggcagggctgtatcttgtacatcattgtatctccccggtgactgcaaaagtact

SEQ ID NO: 307816 - DNA, 120 bp, Artificial Sequence
  ENSG00000134042_33 (sequence is synthesized)
ctgtaaatgaatgttgattagggggaaaaatgtcagaaagtcatctgaagctgtcattccttactgggaggagcccattttgacaaatgagggtcaccaatttcattccttataaccaat

SEQ ID NO: 307817 - DNA, 120 bp, Artificial Sequence
  ENSG00000134042_34 (sequence is synthesized)
gtacaggttacttttatgcttgtgcatttcaagtttccccttccccacgtttatctgaatgccaacccaaaggtaatgttttgacatttcttaattttgaacattaattttgaaccttat

SEQ ID NO: 307818 - DNA, 120 bp, Artificial Sequence
  ENSG00000134042_35 (sequence is synthesized)
tgagcagttgaatgaaagaaagaaaaaaggaatgttcaagtgccccgaccctcatgctaagtgcccagggtagagctttgcttggtccctgtgtctctggtgctcatgagataggtcttt

SEQ ID NO: 307819 - DNA, 120 bp, Artificial Sequence
  ENSG00000134042_36 (sequence is synthesized)
acaggcgtgagccaccgctcctggctgagataggtctttcttaaaggggagagggaagtggtggagagagaggagagaaaatgacaaaggaggaggctgagaatctaacaggtgtgacca

SEQ ID NO: 307820 - DNA, 120 bp, Artificial Sequence
  ENSG00000134042_37 (sequence is synthesized)
caaaggaggaggctgagaatctaacaggtgtgaccaattctgctactgaatgagagcagaagcctgtgaacttccagttaatagaccacttaattgggggaacgcttcacacgttataaa

SEQ ID NO: 307821 - DNA, 120 bp, Artificial Sequence
  ENSG00000134042_38 (sequence is synthesized)
aaagcactagaatgttttgaaagcgagaaacaacagctgtgtagggtagctagcagttagtgttgtacagaagacagatatttgtgcatttctgcattttctaagtttgctgcaatgagc

SEQ ID NO: 307822 - DNA, 120 bp, Artificial Sequence
  ENSG00000134042_39 (sequence is synthesized)
atgtattactttcatagttataaaacacatgcaaaatgcccttttaaaatgaaaaaaaagtccatgagtgtaagtgatatatatgctttggaaagcctgggacggtcattgtttactctc

SEQ ID NO: 307823 - DNA, 120 bp, Artificial Sequence
  ENSG00000134042_40 (sequence is synthesized)
aatagtatgtgtttgcctttgtctttttgagacattttgttttaatctgttgatgacaataacctgttgataatataacttgataacaaataaaatgacttatgattgattatcatttta

SEQ ID NO: 307824 - DNA, 120 bp, Artificial Sequence
  ENSG00000134042_41 (sequence is synthesized)
agaattgccatctgcagaatttctgcagaaagtgtcgaccaggctggcatgagggaagaaggaggggaaatcacagcaaggagaaggaaaaacacctcagcatggcgtggggaagcaaag

SEQ ID NO: 307825 - DNA, 120 bp, Artificial Sequence
  ENSG00000134042_42 (sequence is synthesized)
attgccatctgcagaatttctgcagaaagtgtcgaccaggctggcatgagggaagaaggaggggaaatcacagcaaggagaaggaaaaacacctcagcatggcgtggggaagcaaagttc

SEQ ID NO: 307826 - DNA, 120 bp, Artificial Sequence
  ENSG00000134042_43 (sequence is synthesized)
ccctcccctgcccaaatactctataaactttgactttcccctcttatttgattctcactttccaacactctgtgccgacccgttatcctggacagaccctgcgtcacctcctaatttccc

SEQ ID NO: 307827 - DNA, 120 bp, Artificial Sequence
  ENSG00000134046_0 (sequence is synthesized)
atgatgcttgcgcgcgtcccccgcgcgccgcgctgcgggcggggcgggtctccgggattccaagggctcggttacggaagaagcgcagcgccggctggggagggggctggatgcgcgcgc

SEQ ID NO: 307828 - DNA, 80 bp, Artificial Sequence
  ENSG00000134046_1 (sequence is synthesized)
ggagagtgcggcgggcggcagcggcgctggcggcgactccgccatagagcaggggggccagggcagcgcgctcgccccgt

SEQ ID NO: 307829 - DNA, 80 bp, Artificial Sequence
  ENSG00000134046_2 (sequence is synthesized)
gccatagagcaggggggccagggcagcgcgctcgccccgtccccggtgagcggcgtgcgcagggaaggcgctcggggcgg

SEQ ID NO: 307830 - DNA, 120 bp, Artificial Sequence
  ENSG00000134046_3 (sequence is synthesized)
gggagccggtccctttcccgtcggggagcgcggggccggggcccaggggaccccgggccacggagagcgggaagaggatggattgcccggccctcccccccggatggaagaaggaggaag

SEQ ID NO: 307831 - DNA, 120 bp, Artificial Sequence
  ENSG00000134046_4 (sequence is synthesized)
tgatccgaaaatctgggctaagtgctggcaagagcgatgtctactacttcagtccaagtggtaagaagttcagaagcaagcctcagttggcaaggtacctgggaaatactgttgatctca

SEQ ID NO: 307832 - DNA, 120 bp, Artificial Sequence
  ENSG00000134046_5 (sequence is synthesized)
gcagttttgacttcagaactggaaagatgatgcctagtaaattacagaagaacaaacagagactgcgaaacgatcctctcaatcaaaataagggtaaaccagacttgaatacaacattgc

SEQ ID NO: 307833 - DNA, 120 bp, Artificial Sequence
  ENSG00000134046_6 (sequence is synthesized)
caattagacaaacagcatcaattttcaaacaaccggtaaccaaagtcacaaatcatcctagtaataaagtgaaatcagacccacaacgaatgaatgaacagccacgtcagcttttctggg

SEQ ID NO: 307834 - DNA, 120 bp, Artificial Sequence
  ENSG00000134046_7 (sequence is synthesized)
agaagaggctacaaggacttagtgcatcagatgtaacagaacaaattataaaaaccatggaactacccaaaggtcttcaaggagttggtccaggtagcaatgatgagacccttttatctg

SEQ ID NO: 307835 - DNA, 120 bp, Artificial Sequence
  ENSG00000134046_8 (sequence is synthesized)
ctgttgccagtgctttgcacacaagctctgcgccaatcacagggcaagtctccgctgctgtggaaaagaaccctgctgtttggcttaacacatctcaacccctctgcaaagcttttattg

SEQ ID NO: 307836 - DNA, 120 bp, Artificial Sequence
  ENSG00000134046_9 (sequence is synthesized)
tcacagatgaagacatcaggaaacaggaagagcgagtacagcaagtacgcaagaaattggaagaagcactgatggcagacatcttgtcgcgagctgctgatacagaagagatggatattg

SEQ ID NO: 307837 - DNA, 120 bp, Artificial Sequence
  ENSG00000134046_10 (sequence is synthesized)
aaatggacagtggagatgaagcctaagaatatgatcaggtaactttcgaccgactttccccaagagaaaattcctagaaattgaacaaaaatgtttccactggcttttgcctgtaagaaa

SEQ ID NO: 307838 - DNA, 120 bp, Artificial Sequence
  ENSG00000134046_11 (sequence is synthesized)
aaaaatgtacccgagcacatagagctttttaatagcactaaccaatgcctttttagatgtatttttgatgtatatatctattattcaaaaaatcatgtttattttgagtcctaggactta

SEQ ID NO: 307839 - DNA, 120 bp, Artificial Sequence
  ENSG00000134046_12 (sequence is synthesized)
aaattagtcttttgtaatatcaagcaggaccctaagatgaagctgagcttttgatgccaggtgcaatctactggaaatgtagcacttacgtaaaacatttgtttcccccacagttttaat

SEQ ID NO: 307840 - DNA, 120 bp, Artificial Sequence
  ENSG00000134046_13 (sequence is synthesized)
aagaacagatcaggaattctaaataaatttcccagttaaagattattgtgacttcactgtatataaacatatttttatactttattgaaaggggacacctgtacattcttccatcatcac

SEQ ID NO: 307841 - DNA, 120 bp, Artificial Sequence
  ENSG00000134046_14 (sequence is synthesized)
tgtaaagacaaataaatgattatattcacagactgattggaattctttctgttgaaaagcacacacaataaagaacccctcgttagccttcctctgatttacattcaactctgatccctg

SEQ ID NO: 307842 - DNA, 120 bp, Artificial Sequence
  ENSG00000134046_15 (sequence is synthesized)
ggccttaggtttgacatggaggtggaggaagatagcgcatatatttgcagtatgaactattgcctctggacgttgtgagaattgtgctttcaccagaatttctaagaatttctgctaaat

SEQ ID NO: 307843 - DNA, 120 bp, Artificial Sequence
  ENSG00000134046_16 (sequence is synthesized)
atcacctagcatgtgtaattttttttccttgcctgtgacttggacttttgatagttctataagaataaggctttttcttcccttgggcatgagtcagatacacaaggacccttcaggtgt

SEQ ID NO: 307844 - DNA, 120 bp, Artificial Sequence
  ENSG00000134046_17 (sequence is synthesized)
tactagaaggcgtccatgtttattgttttttaaagaatgtttggcactctctaacgtccactagcttactgagttatcaggtgcaggtcagactcttggctacagtgagaggcagcttct

SEQ ID NO: 307845 - DNA, 120 bp, Artificial Sequence
  ENSG00000134046_18 (sequence is synthesized)
agacagagttgcttaatgaaagggtttgtaatactttacaaaccattacctgtacctggcctggcctccaaaatattaacattctttttctgttgaaactcgcgagtgtaactttcatac

SEQ ID NO: 307846 - DNA, 120 bp, Artificial Sequence
  ENSG00000134046_19 (sequence is synthesized)
cacttgaatttattgatatttaattatgaaaactagcattacattattaaacgatttctaaaatcaaaacatacttaatctgataccaaggaagggagggagtggttataagcaaatgaa

SEQ ID NO: 307847 - DNA, 120 bp, Artificial Sequence
  ENSG00000134046_20 (sequence is synthesized)
aagtaaaatcattctatagaaaaggtgtgtttatttcttaactcttgagttcttttaaaattagaacctaaatgatgcagtcaggggtatgaccaattccacatgagtgtcacctgtaca

SEQ ID NO: 307848 - DNA, 120 bp, Artificial Sequence
  ENSG00000134046_21 (sequence is synthesized)
ttttattaccactacctccagtttccaaggcagggaagaagaggggaatagtcaaagcaatatgactagctaggtttgggctgctgtttgggctgctgtttttcctggacttttatgcca

SEQ ID NO: 307849 - DNA, 120 bp, Artificial Sequence
  ENSG00000134046_22 (sequence is synthesized)
aactacataaatacttcttggaattcctgatttacgctcaactttgatccctggaccctagggccattagtttccttgaagcagtcctgctggtggatgagcagggaaacttgtagaccc

SEQ ID NO: 307850 - DNA, 120 bp, Artificial Sequence
  ENSG00000134046_23 (sequence is synthesized)
tgggaagccaattggtagagggtgcctgcccgccccatcagactgtcccaactggggtgggggtgaggatcatagtgatttctttttaaaagctagtatgactagtgagaatggatgtcc

SEQ ID NO: 307851 - DNA, 120 bp, Artificial Sequence
  ENSG00000134046_24 (sequence is synthesized)
aagggcttttctcttcctcccccgagtccacgattcttcatttgtgatcagggttggggtaacttcaccttggtgatcatatattctttttacaaaccaatccagccaagatatatgtgc

SEQ ID NO: 307852 - DNA, 120 bp, Artificial Sequence
  ENSG00000134046_25 (sequence is synthesized)
ttttctaaacagcttgtaaaagcaaaaacacaatgtatacacatataaaactgatttttttttttttgcttatatactttgctcaggtggagaacaaggtatgaaagccattatatggtg

SEQ ID NO: 307853 - DNA, 120 bp, Artificial Sequence
  ENSG00000134046_26 (sequence is synthesized)
tcccttggggaccatcccataagtccagggtgttcccaatatacccacaagacaacatgttcaaaacttcatcacctggtccccacaaacctaccaccctcttccattccctcactctgg

SEQ ID NO: 307854 - DNA, 120 bp, Artificial Sequence
  ENSG00000134046_27 (sequence is synthesized)
taaaagcaagccatcttctccagttacgcaaggcagaagcccaggagtgagcacaatgctgccctttcccttgcttctgacttctcatcaatcctattagaactactgactgcaccccac

SEQ ID NO: 307855 - DNA, 120 bp, Artificial Sequence
  ENSG00000134046_28 (sequence is synthesized)
ctctcctccatccccacgatcactgccttcatatgaactgcctttcctgtcctctggactttcagtggcttccttttttgctcacctgtccactttcttccccttccctctctccatccc

SEQ ID NO: 307856 - DNA, 120 bp, Artificial Sequence
  ENSG00000134046_29 (sequence is synthesized)
tccacatagtcatcagaaagatcatcaaaacaggcaaatgtgactgtattatttccctcacttatctttgtatgcagtttagagtgatttttaagagcacacactttgaaattaggagaa

SEQ ID NO: 307857 - DNA, 120 bp, Artificial Sequence
  ENSG00000134046_30 (sequence is synthesized)
cctgtgtctgaatcctgatttttgccatttgtgtgacttgtcaggttatttaatctctttgagcctgtccctcctcagtgaaataggaataataatacctacctcatagagttgttgtga

SEQ ID NO: 307858 - DNA, 120 bp, Artificial Sequence
  ENSG00000134046_31 (sequence is synthesized)
ggattcagtgagatagactgtttctaaagtgtgtagcacagtgcctggcacatagtgggtgctcacattggagcacactattgtcgctatccctgcaggtgtgagttttacatcctttcc

SEQ ID NO: 307859 - DNA, 120 bp, Artificial Sequence
  ENSG00000134046_32 (sequence is synthesized)
aagaggcatttgctaataaccctaactaccgcctatccctgtgacactattttctgcctcagcaccctatttcttttgtagacattttctaagtctgtattttatttatttgttggcttt

SEQ ID NO: 307860 - DNA, 120 bp, Artificial Sequence
  ENSG00000134046_33 (sequence is synthesized)
ttgtctatttctctactagaatgtaagctccatgagagcaaggatgtgtttgtctgatttcccgttacagccccagcacttagctgagtgactggcacctagtaagcactcagtaactgt

SEQ ID NO: 307861 - DNA, 120 bp, Artificial Sequence
  ENSG00000134046_34 (sequence is synthesized)
ttgctgaataaatggaagaatggtcaaaaggctcttcttgatctgatccctgcttgtctgtctggcctcatgctgccactattcctcactgcaccttcagctcaagaaaaacctctttac

SEQ ID NO: 307862 - DNA, 120 bp, Artificial Sequence
  ENSG00000134046_35 (sequence is synthesized)
ttgcttctttgaagtgccccttgggcctctgtgtctttgtacctgttgttccctttgcctgaaacaccctttgcctgcccgtctacatggtgaattcctaatcattgatgaagtctcagc

SEQ ID NO: 307863 - DNA, 120 bp, Artificial Sequence
  ENSG00000134046_36 (sequence is synthesized)
tcaatggctacctcctctgtgaagctgtccctgatttcttcaggcagatgttctttcccgccttccctgttcccaccgcactttgtaaatacctccatggaagcactttattgtattgta

SEQ ID NO: 307864 - DNA, 120 bp, Artificial Sequence
  ENSG00000134046_37 (sequence is synthesized)
ttgtaatttttttttgcatgtctgtttctactattagactgtaagcaccgtaaaagcagagattgtgctttttcatcctcatgttccccgagcctagcccagtgcctggcacgtaatagc

SEQ ID NO: 307865 - DNA, 120 bp, Artificial Sequence
  ENSG00000134046_38 (sequence is synthesized)
ttgtcattaaatatttgttgaatgaatctgtgaatgaacaagagtcatgcagttggaaaagtgttagaagctgtatgtattataaaggaaagaaatgcccttggtggcttccagggtgtt

SEQ ID NO: 307866 - DNA, 120 bp, Artificial Sequence
  ENSG00000134046_39 (sequence is synthesized)
tttttttttttttttggtctaaagaggagatctagagagtgttatacaatctctttgaatataagattactcgtttggatttttaaaataatatagatcttcataaataattgcaaagat

SEQ ID NO: 307867 - DNA, 120 bp, Artificial Sequence
  ENSG00000134046_40 (sequence is synthesized)
ataaacaagctttgtgatttctcaaatgctatgaagtccaaaataaatatttgcactattagtatttccatagtaaatgctatgagaaaatgtacagcaataaattttgaagctttaaaa

SEQ ID NO: 307868 - DNA, 120 bp, Artificial Sequence
  ENSG00000134046_41 (sequence is synthesized)
cgctgtttgctctgcttggaatgtgcttacccccttccccttcatctggtgaactcctactcatccaagacccagcttcattgtctccatctctgggaagcctgccctgcatactccagg

SEQ ID NO: 307869 - DNA, 120 bp, Artificial Sequence
  ENSG00000134046_42 (sequence is synthesized)
cagaaccaatcctttcctccataatgcttccctggtgctttgccattgtatttgtgacttgtttgtctgcttcagctagactgtgagctccatgagggcagggaccatgtctttttttgc

SEQ ID NO: 307870 - DNA, 120 bp, Artificial Sequence
  ENSG00000134046_43 (sequence is synthesized)
ttttgcacacggtaggtacttaatattgctttatgtttatttgatttaccatccacctcattctagaagtgtatagtggtaataaatgtttattaaataaataaattataccgtacatta

SEQ ID NO: 307871 - DNA, 120 bp, Artificial Sequence
  ENSG00000134049_0 (sequence is synthesized)
gtaggaaggcgccggccgtggaggcgccacgtcccttgcggcggcgggagagaaatcgcttggacttcggggcggcctcggacggccatggcctttaccctgtactcactgctgcaggca

SEQ ID NO: 307872 - DNA, 120 bp, Artificial Sequence
  ENSG00000134049_1 (sequence is synthesized)
gccctgctctgcgtcaacgccatcgcagtgctgcacgaggagcgattcctcaagaacattggctggggaacagaccagggaattggtggatttggagaagagccgggaattaaatcacag

SEQ ID NO: 307873 - DNA, 120 bp, Artificial Sequence
  ENSG00000134049_2 (sequence is synthesized)
ctaatgaaccttattcgatctgtaagaaccgtgatgagagtgccattgataatagtaaactcaattgcaattgtgttacttttattatttggatgaatatcagtggagaaaatggagact

SEQ ID NO: 307874 - DNA, 120 bp, Artificial Sequence
  ENSG00000134049_3 (sequence is synthesized)
cagaagaggacatgccagtagaagttattactttggtcattattggaatatttatatcttagctggctgaccttgcacttgtcaaaaatgtaaagctgaaaataaaaccagggtttctat

SEQ ID NO: 307875 - DNA, 120 bp, Artificial Sequence
  ENSG00000134049_4 (sequence is synthesized)
ttatctgtttttttttttaatgttgcacttgtagtttcattacaaaagatcagatcatgaaaggcagtaactctccaggactggaatatctgattgctcagtgttaatagtagttcatgc

SEQ ID NO: 307876 - DNA, 120 bp, Artificial Sequence
  ENSG00000134049_5 (sequence is synthesized)
tgtggtgagattgttaaaagggtgcaagactgttgcttctctttttttagatatttttctatctctcacttctcagggatgaaattctttttcaaagttttgaagttccttgcaacttag

SEQ ID NO: 307877 - DNA, 120 bp, Artificial Sequence
  ENSG00000134049_6 (sequence is synthesized)
ccatgatgtgagtggttatccctagataaaattaaaaggatttttaaaaagtaattactgcacataaaatgataaataggtaatttgaataattttattttaagctccttggttaattat

SEQ ID NO: 307878 - DNA, 120 bp, Artificial Sequence
  ENSG00000134049_7 (sequence is synthesized)
tttgtctattgtctcagctataaattcaaatttatacatactattgagtattaatattctctgatttcagggagaattctgtcagtcacatgatgattatgtttttgtttaacattcttt

SEQ ID NO: 307879 - DNA, 120 bp, Artificial Sequence
  ENSG00000134049_8 (sequence is synthesized)
ccatgcacttgttattttattaatttgcctgaatgatgagaccagaccagtgtctacagattttcattgtcagaaaaatctataagtctgccctttttacaatgatgatttaaaaaaaac

SEQ ID NO: 307880 - DNA, 120 bp, Artificial Sequence
  ENSG00000134049_9 (sequence is synthesized)
aacagcgtaaatattagcccacaagagcagtcctaaacaatcacaattacactgtactacccaagaagactgtttattgtgaagcatttacctttcaaaaaatcattacatttctatttc

SEQ ID NO: 307881 - DNA, 120 bp, Artificial Sequence
  ENSG00000134049_10 (sequence is synthesized)
ttggtggagcagcacattgtggagtgtgattcttaattcttcattgagtttgtcaataggacattgatgctggataggttgtcttttgtttttatgtctcagaccatcttgtgagattgt

SEQ ID NO: 307882 - DNA, 120 bp, Artificial Sequence
  ENSG00000134049_11 (sequence is synthesized)
ttgcctatctcataatacagttttatgcagaaaggttgaaactatgtaaatggtttttatggaaattatcagttacaatattttaaaggtgtagaatggcatctttgtttataggagaac

SEQ ID NO: 307883 - DNA, 120 bp, Artificial Sequence
  ENSG00000134049_12 (sequence is synthesized)
atttgtaaataaagttaaatttctaagtcaagcacttgtttttgtaccttagtataaacctgtcagtgttaactgcattaatctccattttgggtgaacacctcttattatatgttcttt

SEQ ID NO: 307884 - DNA, 120 bp, Artificial Sequence
  ENSG00000134049_13 (sequence is synthesized)
gctgtaaaattgccgagtatagagttaatgaaagtaaatatttacatgtatttttttttcttcagtgaattaactgaattgctgacatacatccagaagactcatgagcaccttttattt

SEQ ID NO: 307885 - DNA, 120 bp, Artificial Sequence
  ENSG00000134049_14 (sequence is synthesized)
catgacttcagttacttctaaaactatggagcaggtattaagtaccttttggcctttcctaagttagagatcagtgatctttggactataggcttgcagctagtccaaggaaagtaccaa

SEQ ID NO: 307886 - DNA, 120 bp, Artificial Sequence
  ENSG00000134049_15 (sequence is synthesized)
actgatgcctgagttcaagtttgagctactgaaaagattcaaaagaagcagttacttgagggcaggcccatttccccatatggtatgagcagtacaaaattttttaaaatgaaagaaaag

SEQ ID NO: 307887 - DNA, 120 bp, Artificial Sequence
  ENSG00000134049_16 (sequence is synthesized)
agagaccttgatctgatgttatttttcatataagacattacagcataccttcatcttaattcagtgttgggattttgtccaaatattccatcagggagcagtcacagaagggccaggatc

SEQ ID NO: 307888 - DNA, 120 bp, Artificial Sequence
  ENSG00000134049_17 (sequence is synthesized)
aaagtattctgtagccaagtagttctgaggaaagtgaagcactgaactgaacatcaaaatatgtcatatctggaggccacttcataattccagtttgtggctgaagaggggtctgtaagc

SEQ ID NO: 307889 - DNA, 120 bp, Artificial Sequence
  ENSG00000134049_18 (sequence is synthesized)
tttcactggtcagccctggtttccccagagcagttgtgattcagtaaacagagtgtgttattttagtagacagtaacttaagtgcctgttggcctgcccatgtcctcccctttatctatt

SEQ ID NO: 307890 - DNA, 120 bp, Artificial Sequence
  ENSG00000134049_19 (sequence is synthesized)
accaggattaacaatttgtgatgattctggactccaaataccgatgatgtttatagtccttatgtattctggccctgtgtttgcatgtctctgaactgtgcgaaggttcttggctctagt

SEQ ID NO: 307891 - DNA, 120 bp, Artificial Sequence
  ENSG00000134049_20 (sequence is synthesized)
ctgtagatattaaccaaattcatcgctaatcaagtacagtggttttcaaacttttatagttaacagcagaaccagattttcaaaggaattctgacacagaactgtaacattcccgtatct

SEQ ID NO: 307892 - DNA, 120 bp, Artificial Sequence
  ENSG00000134049_21 (sequence is synthesized)
aaaccagatgagagtaggtccatttatttgtttttagttgaagtagagctgggattcaaaggctcactattcagcctccactgcactcttgtcaggcttcccaaggcatttccataaaac

SEQ ID NO: 307893 - DNA, 120 bp, Artificial Sequence
  ENSG00000134049_22 (sequence is synthesized)
cctaaattttcaaaaatatagctaaaaagtatcttataaaaatccctgctttagccataaaaaagaattagataataccttctgtgggaacatggatggagctggaagccatcatcctta

SEQ ID NO: 307894 - DNA, 120 bp, Artificial Sequence
  ENSG00000134049_23 (sequence is synthesized)
acaaactaatgtaggaacagaaaaccaaataccacatgttattacttataagtgggagctaaatgataagacctcatggacataaggagggggacaacagacactgggggctatttgagg

SEQ ID NO: 307895 - DNA, 120 bp, Artificial Sequence
  ENSG00000134049_24 (sequence is synthesized)
gtggagggtgagaaagagtgccagaaaaattactgggtactaggcttagcacctggataacgaaataatctgtgccaaacccccgtgacacaagtttacctatttaacaaatgtactgta

SEQ ID NO: 307896 - DNA, 120 bp, Artificial Sequence
  ENSG00000134049_25 (sequence is synthesized)
cccctaaaagttaaaaaagtaaaaatataaaaaaataaaatccctgctttagggagggtgggagggggtgagggaaacagaaactacatactgagtacaatgtacagtagtccagtgatg

SEQ ID NO: 307897 - DNA, 120 bp, Artificial Sequence
  ENSG00000134049_26 (sequence is synthesized)
ggtgcactaaaatttcagactttacaccactatacaattcatccatgtaaccagaaaccacttgtacccctaaagctattgaaataaaaagctaaatgagttcccccaccttcctctccc

SEQ ID NO: 307898 - DNA, 120 bp, Artificial Sequence
  ENSG00000134049_27 (sequence is synthesized)
catcaaaatccttgctttagatacaataagagtaggcaatctgtgttctatatgtgttagatgtgtattactggtgaaatgacaagagaaagcaagatatttgactagtaaaaagactag

SEQ ID NO: 307899 - DNA, 120 bp, Artificial Sequence
  ENSG00000134049_28 (sequence is synthesized)
gaggcaagatatttctaatatatcaagcaaaccttttaccatgtgactgaaagcaaataaacttcctaagacctcagtagtttttggttgtcctatctgtaaaattggtcaataaccttc

SEQ ID NO: 307900 - DNA, 120 bp, Artificial Sequence
  ENSG00000134049_29 (sequence is synthesized)
agaacagaagtctggtccagatatatatatatatcttttccagatcactaatgtttgtatctagatgtgcttcaaccaaagagatgttctccttaagtaaaatgtttcttatgaagcaaa

SEQ ID NO: 307901 - DNA, 120 bp, Artificial Sequence
  ENSG00000134049_30 (sequence is synthesized)
aatgaaccttattcgatctgtaagaaccgtgatgagaggtaagaagaaaagctaatagagcattcttaagttttaatgttgtggtttaagtagcaaggcttctgagtgtgaataccatat

SEQ ID NO: 307902 - DNA, 120 bp, Artificial Sequence
  ENSG00000134049_31 (sequence is synthesized)
ttggtacaaatagaatgcttagtataatacatataatctgtttgtgtgttacctgtcagagctaaaagacaaaattatattcttgccttttggaaactgttgtttccaagttgtaaaatc

SEQ ID NO: 307903 - DNA, 90 bp, Artificial Sequence
  ENSG00000134049_32 (sequence is synthesized)
tcttgccttttggaaactgttgtttccaagttgtaaaatcacatacagtattgggaggtttccaagagaaagctgggcgtgttggtttac

SEQ ID NO: 307904 - DNA, 66 bp, Artificial Sequence
  ENSG00000134049_33 (sequence is synthesized)
gagtttgagaccagggtgcatacctgtaatcctagctatttgggaggctgaggcaggaggatggct

SEQ ID NO: 307905 - DNA, 120 bp, Artificial Sequence
  ENSG00000134056_0 (sequence is synthesized)
acagctgcccgggactccagtgatcgccgcggctcgctcgcgccccggaaactgccccttctcgggggtcatgatgggcagcaagatggcgtctgctagtagggtcgttcaggtagtcaa

SEQ ID NO: 307906 - DNA, 120 bp, Artificial Sequence
  ENSG00000134056_1 (sequence is synthesized)
accacacactccattaataaggtttcctgacagaagagacaatcctaaacccaatgtatcagaagctttgagatcagcagggctaccatctcactcttctgtaatttcacaacattctaa

SEQ ID NO: 307907 - DNA, 120 bp, Artificial Sequence
  ENSG00000134056_2 (sequence is synthesized)
aggaagtaaatcaccagatttgctgatgtatcagggtccaccagacactgcagaaataataaaaacattacctcagaaatacagaaggaaacttgtgtctcaagaagaaatggaatttat

SEQ ID NO: 307908 - DNA, 120 bp, Artificial Sequence
  ENSG00000134056_3 (sequence is synthesized)
ccaacgtggaggtcctgaataaccatggtggctgctgtttgtcatcagacaatagaattgtctttacaataaaggacttccaaaatgacagatgagaaactgtatattaaacacctttaa

SEQ ID NO: 307909 - DNA, 120 bp, Artificial Sequence
  ENSG00000134056_4 (sequence is synthesized)
taaatattatgaaaaaaatgaaatatagaaaatttagatggacacttgtatttcctaatttatgtatcttggtcagcttctccacaagcttacctaattgtttatatactttatacttat

SEQ ID NO: 307910 - DNA, 120 bp, Artificial Sequence
  ENSG00000134056_5 (sequence is synthesized)
atttcactttactttctgtttaggcatggaaaaatttatcagtcagaattgctgttttagggacatgattttcctgaaattgggtgaggatcagtgaaataattactctattacttgttc

SEQ ID NO: 307911 - DNA, 120 bp, Artificial Sequence
  ENSG00000134056_6 (sequence is synthesized)
ttaattctctgttctctaatgttttttcattcacaagtttactggagtataactggcttagtaagtatatcctactctgaatgataaaaatatagtcaagctaaaataggtgactatact

SEQ ID NO: 307912 - DNA, 120 bp, Artificial Sequence
  ENSG00000134056_7 (sequence is synthesized)
attaagatagagatcatacaaaagattccaaagaaagtcaaaaagtgtaaaatggaaaataagagatcaaaatgaatatagcataggaataaagatttcactagaaattgcaatttatta

SEQ ID NO: 307913 - DNA, 120 bp, Artificial Sequence
  ENSG00000134056_8 (sequence is synthesized)
tgttttggaggttgtaaggaagtcttgttttttggtttattttactgttttgtgatcttgtatgcaaatcctgataaccattaaccttctcaaacttaatgtctgagagcctcataaaat

SEQ ID NO: 307914 - DNA, 120 bp, Artificial Sequence
  ENSG00000134056_9 (sequence is synthesized)
caacatatttacttattaagcagtttatgaaactttaatggggcccctcctgtgccaagggtacgtatattgtgaagtaaagcctcacaaagctaaataaattctcttccatacctttaa

SEQ ID NO: 307915 - DNA, 120 bp, Artificial Sequence
  ENSG00000134056_10 (sequence is synthesized)
ccgcggctcgctcgcgccccggaaactgccccttctcgggggtcatgatgggcagcaagatggcgtctgctagtagggtcgttcagtatcagaagctttgagatcagcagggctaccatc

SEQ ID NO: 307916 - DNA, 120 bp, Artificial Sequence
  ENSG00000134056_11 (sequence is synthesized)
gcgtttccgcatcttgggcggtagggacggtgctgactatggcgacggcgtcggggagtaaaggcggtggcagaggcagagcggtgaccgcgcctctgcggagggccagtgacggcgccc

SEQ ID NO: 307917 - DNA, 120 bp, Artificial Sequence
  ENSG00000134056_12 (sequence is synthesized)
aggtgggtccggcgccgagggttcgagccttgcggcaaccgtgcagcatcttggcagtcaaaccacacactccattaataaggtttcctgacagaagagacaatcctaaacccaatgtat

SEQ ID NO: 307918 - DNA, 120 bp, Artificial Sequence
  ENSG00000134057_0 (sequence is synthesized)
ggcgtgctgcggcggaacggctgttggtttctgctgggtgtaggtccttggctggtcgggcctccggtgttctgcttctccccgctgagctgctgcctggtgaagaggaagccatggcgc

SEQ ID NO: 307919 - DNA, 120 bp, Artificial Sequence
  ENSG00000134057_1 (sequence is synthesized)
tccgagtcaccaggaactcgaaaattaatgctgaaaataaggcgaagatcaacatggcaggcgcaaagcgcgttcctacggcccctgctgcaacctccaagcccggactgaggccaagaa

SEQ ID NO: 307920 - DNA, 120 bp, Artificial Sequence
  ENSG00000134057_2 (sequence is synthesized)
cagctcttggggacattggtaacaaagtcagtgaacaactgcaggccaaaatgcctatgaagaaggaagcaaaaccttcagctactggaaaagtcattgataaaaaactaccaaaacctc

SEQ ID NO: 307921 - DNA, 120 bp, Artificial Sequence
  ENSG00000134057_3 (sequence is synthesized)
ttgaaaaggtacctatgctggtgccagtgccagtgtctgagccagtgccagagccagaacctgagccagaacctgagcctgttaaagaagaaaaactttcgcctgagcctattttggttg

SEQ ID NO: 307922 - DNA, 120 bp, Artificial Sequence
  ENSG00000134057_4 (sequence is synthesized)
atactgcctctccaagcccaatggaaacatctggatgtgcccctgcagaagaagacctgtgtcaggctttctctgatgtaattcttgcagtaaatgatgtggatgcagaagatggagctg

SEQ ID NO: 307923 - DNA, 120 bp, Artificial Sequence
  ENSG00000134057_5 (sequence is synthesized)
atccaaacctttgtagtgaatatgtgaaagatatttatgcttatctgagacaacttgaggaagagcaagcagtcagaccaaaatacctactgggtcgggaagtcactggaaacatgagag

SEQ ID NO: 307924 - DNA, 120 bp, Artificial Sequence
  ENSG00000134057_6 (sequence is synthesized)
ccatcctaattgactggctagtacaggttcaaatgaaattcaggttgttgcaggagaccatgtacatgactgtctccattattgatcggttcatgcagaataattgtgtgcccaagaaga

SEQ ID NO: 307925 - DNA, 120 bp, Artificial Sequence
  ENSG00000134057_7 (sequence is synthesized)
tgctgcagctggttggtgtcactgccatgtttattgcaagcaaatatgaagaaatgtaccctccagaaattggtgactttgcttttgtgactgacaacacttatactaagcaccaaatca

SEQ ID NO: 307926 - DNA, 120 bp, Artificial Sequence
  ENSG00000134057_8 (sequence is synthesized)
acatactttggccaaatacctgatggaactaactatgttggactatgacatggtgcactttcctccttctcaaattgcagcaggagctttttgcttagcactgaaaattctggataatgg

SEQ ID NO: 307927 - DNA, 120 bp, Artificial Sequence
  ENSG00000134057_9 (sequence is synthesized)
tgaatggacaccaactctacaacattacctgtcatatactgaagaatctcttcttccagttatgcagcacctggctaagaatgtagtcatggtaaatcaaggacttacaaagcacatgac

SEQ ID NO: 307928 - DNA, 120 bp, Artificial Sequence
  ENSG00000134057_10 (sequence is synthesized)
tgtcaagaacaagtatgccacatcgaagcatgctaagatcagcactctaccacagctgaattctgcactagttcaagatttagccaaggctgtggcaaaggtgtaacttgtaaacttgag

SEQ ID NO: 307929 - DNA, 120 bp, Artificial Sequence
  ENSG00000134057_11 (sequence is synthesized)
ttggagtactatatttacaaataaaattggcaccatgtgccatctgtacatattactgttgcatttacttttaataaagcttgtggccccttttacttttttatagcttaactaatttga

SEQ ID NO: 307930 - DNA, 120 bp, Artificial Sequence
  ENSG00000134057_12 (sequence is synthesized)
atgtggttacttcctactgtagggtagcggaaaagttgtcttaaaaggtatggtggggatatttttaaaaactccttttggtttacctggggatccaattgatgtatatgtttatatact

SEQ ID NO: 307931 - DNA, 120 bp, Artificial Sequence
  ENSG00000134057_13 (sequence is synthesized)
gggttcttgttttatatacctggcttttactttattaatatgagttactgaaggtgatggaggtatttgaaaattttacttccataggacatactgcatgtaagccaagtcatggagaat

SEQ ID NO: 307932 - DNA, 120 bp, Artificial Sequence
  ENSG00000134057_14 (sequence is synthesized)
ctgctgcatagctctattttaaagtaaaagtctaccaccgaatccctagtccccctgttttctgtttcttcttgtgattgctgccataattctaagttatttacttttaccactatttaa

SEQ ID NO: 307933 - DNA, 120 bp, Artificial Sequence
  ENSG00000134057_15 (sequence is synthesized)
gttatcaactttagctagtatcttcaaactttcactttgaaaaatgagaattttatattctaagccagttttcattttggttttgtgttttggttaataaaacaatactcaaatacaaaa

SEQ ID NO: 307934 - DNA, 120 bp, Artificial Sequence
  ENSG00000134057_16 (sequence is synthesized)
tgagcagaggaagcatgagagcacctaggaaaggagtctttagctttgtcttaaatttcagttatattaattatacagtacccatctcttttccactcctgaataacatctaacatctag

SEQ ID NO: 307935 - DNA, 120 bp, Artificial Sequence
  ENSG00000134057_17 (sequence is synthesized)
gcgctccgagtcaccagggtgagccgcttcggactgcgaactaacgcggccttcttagctgctgcctgctctccctgcctcgcctgcgggagcctcccgagcgggagagggccgcaggag

SEQ ID NO: 307936 - DNA, 120 bp, Artificial Sequence
  ENSG00000134058_0 (sequence is synthesized)
agtgggtgttggaggctttaaggtagctttaaattcgtgttgtcctgggagctcgcccttttcggctggagtcgggctttacggcgccggatggctctggacgtgaagtctcgggcaaag

SEQ ID NO: 307937 - DNA, 120 bp, Artificial Sequence
  ENSG00000134058_1 (sequence is synthesized)
cgttatgagaagctggacttccttggggagggacagtttgccaccgtttacaaggccagagataagaacaccaaccaaattgtcgccattaagaaaatcaaacttggacatagatcagaa

SEQ ID NO: 307938 - DNA, 120 bp, Artificial Sequence
  ENSG00000134058_2 (sequence is synthesized)
gctaaagatggtataaatagaaccgccttaagagagataaaattattacaggagctaagtcatccaaatataattggtctccttgatgcttttggacataaatctaatattagccttgtc

SEQ ID NO: 307939 - DNA, 120 bp, Artificial Sequence
  ENSG00000134058_3 (sequence is synthesized)
tttgattttatggaaactgatctagaggttataataaaggataatagtcttgtgctgacaccatcacacatcaaagcctacatgttgatgactcttcaaggattagaatatttacatcaa

SEQ ID NO: 307940 - DNA, 120 bp, Artificial Sequence
  ENSG00000134058_4 (sequence is synthesized)
cattggatcctacatagggatctgaaaccaaacaacttgttgctagatgaaaatggagttctaaaactggcagattttggcctggccaaatcttttgggagccccaatagagcttataca

SEQ ID NO: 307941 - DNA, 120 bp, Artificial Sequence
  ENSG00000134058_5 (sequence is synthesized)
tacttctaagggttccttttttgccaggagattcagaccttgatcagctaacaagaatatttgaaactttgggcacaccaactgaggaacagtggccggacatgtgtagtcttccagatt

SEQ ID NO: 307942 - DNA, 120 bp, Artificial Sequence
  ENSG00000134058_6 (sequence is synthesized)
atgtgacatttaagagtttccctggaatacctttgcatcacatcttcagtgcagcaggagacgacttactagatctcatacaaggcttattcttatttaatccatgtgctcgaattacgg

SEQ ID NO: 307943 - DNA, 120 bp, Artificial Sequence
  ENSG00000134058_7 (sequence is synthesized)
ccacacaggcactgaaaatgaagtatttcagtaatcggccagggccaacacctggatgtcagctgccaagaccaaactgtccagtggaaaccttaaaggagcaatcaaatccagctttgg

SEQ ID NO: 307944 - DNA, 120 bp, Artificial Sequence
  ENSG00000134058_8 (sequence is synthesized)
caataaaaaggaaaagaacagaggccttagaacaaggaggattgcccaagaaactaattttttaaagagaacactggacaacattttactactgagggaaatagccaaaaaggcaaataa

SEQ ID NO: 307945 - DNA, 120 bp, Artificial Sequence
  ENSG00000134058_9 (sequence is synthesized)
aaaggcaaataatggaaaaatagtaaacattaagtaaatgctgtagaagtgagtttgtaaatattctacacatgtaaaatatgtaaaactatgggttatttttattaaatgtattttaaa

SEQ ID NO: 307946 - DNA, 120 bp, Artificial Sequence
  ENSG00000134058_10 (sequence is synthesized)
ttctggtttttctgattagagtgcaaaagtgagaaaagttcaatactcttgaaatgtagaattgaaaatgcattagggaaaacttaataaaaattattaccagttatttggaagatctga

SEQ ID NO: 307947 - DNA, 120 bp, Artificial Sequence
  ENSG00000134058_11 (sequence is synthesized)
gtggaggccagaggtctggcttggctgctcgttctcgttgggggaaaccgtccagacgcacttgctgcccattctttacatcctgggggtgaatccctgaggggcctctccttgctgaag

SEQ ID NO: 307948 - DNA, 120 bp, Artificial Sequence
  ENSG00000134058_12 (sequence is synthesized)
agtagcctggagctggacggagactgacccgccacgtttccagccgccgcgagtctgctcaggaactctgggctctttgcttcgcgaaatgtaaaaatgcaaaaaggcaaacacaaaaac

SEQ ID NO: 307949 - DNA, 120 bp, Artificial Sequence
  ENSG00000134058_13 (sequence is synthesized)
aaccaaattgtcgccattaagaaagagtctctgctggtagccactacagctgtgaatgtgctgtgtcatacctgaagccaatatgtctcggagtttcacctgaggcccatgatcaaactt

SEQ ID NO: 307950 - DNA, 120 bp, Artificial Sequence
  ENSG00000134058_14 (sequence is synthesized)
tcctggagaaattcctttgtcccagtttatcaaacaagaacctaaatatttgttttctacccaagaagatactggtagtaaaagaaaaaaagcttaattttgttgaaatttggatgtact

SEQ ID NO: 307951 - DNA, 120 bp, Artificial Sequence
  ENSG00000134058_15 (sequence is synthesized)
ctgaggcaaaaggatctctagttattttcttctaatcatttagtgatatccccagtgttacatacaaagatttggatttcattggcatttctgccttctaagttcccatagctagttgac

SEQ ID NO: 307952 - DNA, 120 bp, Artificial Sequence
  ENSG00000134058_16 (sequence is synthesized)
gtcatttttggagaaatgagcattagacctataagatttgtttgcttttttttttttttgtgatggagtctcagtctgttcacccagcctggagtgcaatggcgtgatctcggctctctg

SEQ ID NO: 307953 - DNA, 78 bp, Artificial Sequence
  ENSG00000134058_17 (sequence is synthesized)
cacccagcctggagtgcaatggcgtgatctcggctctctgcagccatcacctcctgggttccagtgattctctgcccg

SEQ ID NO: 307954 - DNA, 120 bp, Artificial Sequence
  ENSG00000134061_0 (sequence is synthesized)
acagagccacagaatgctgagcagtcaacagcatttcttgttccaagatcacccttctgagtacctctctggctgccaaattgccagggccttcacagtttgattccatttctcagctcc

SEQ ID NO: 307955 - DNA, 120 bp, Artificial Sequence
  ENSG00000134061_1 (sequence is synthesized)
aagcattaggtaaacccaccaagcaatcctagcctgtgatggcgtttgacgtcagctgcttcttttgggtggtgctgttttctgccggctgtaaagtcatcacctcctgggatcagatgt

SEQ ID NO: 307956 - DNA, 120 bp, Artificial Sequence
  ENSG00000134061_2 (sequence is synthesized)
gcattgagaaagaagccaacaaaacatataactgtgaaaatttaggtctcagtgaaatccctgacactctaccaaacacaacagaatttttggaattcagctttaattttttgcctacaa

SEQ ID NO: 307957 - DNA, 120 bp, Artificial Sequence
  ENSG00000134061_3 (sequence is synthesized)
ttcacaatagaaccttcagcagactcatgaatcttacctttttggatttaactaggtgccagattaactggatacatgaagacacttttcaaagccatcatcaattaagcacacttgtgt

SEQ ID NO: 307958 - DNA, 120 bp, Artificial Sequence
  ENSG00000134061_4 (sequence is synthesized)
taactggaaatcccctgatattcatggcagaaacatcgcttaatgggcccaagtcactgaagcatcttttcttaatccaaacgggaatatccaatctcgagtttattccagtgcacaatc

SEQ ID NO: 307959 - DNA, 120 bp, Artificial Sequence
  ENSG00000134061_5 (sequence is synthesized)
tggaaaacttggaaagcttgtatcttggaagcaaccatatttcctccattaagttccccaaagacttcccagcacggaatctgaaagtactggattttcagaataatgctatacactaca

SEQ ID NO: 307960 - DNA, 120 bp, Artificial Sequence
  ENSG00000134061_6 (sequence is synthesized)
tctctagagaagacatgaggtctctggagcaggccatcaacctaagcctgaacttcaatggcaataatgttaaaggtattgagcttggggcttttgattcaacgatcttccaaagtttga

SEQ ID NO: 307961 - DNA, 120 bp, Artificial Sequence
  ENSG00000134061_7 (sequence is synthesized)
actttggaggaactccaaatttgtctgttatattcaatggtctgcagaactctactactcagtctctctggctgggaacatttgaggacattgatgacgaagatattagttcagccatgc

SEQ ID NO: 307962 - DNA, 120 bp, Artificial Sequence
  ENSG00000134061_8 (sequence is synthesized)
tcaagggactctgtgaaatgtctgttgagagcctcaacctgcaggaacaccgcttctctgacatctcatccaccacatttcagtgcttcacccaactccaagaattggatctgacagcaa

SEQ ID NO: 307963 - DNA, 120 bp, Artificial Sequence
  ENSG00000134061_9 (sequence is synthesized)
ctcacttgaaagggttaccctctgggatgaagggtctgaacttgctcaagaaattagttctcagtgtaaatcatttcgatcaattgtgtcaaatcagtgctgccaatttcccctccctta

SEQ ID NO: 307964 - DNA, 120 bp, Artificial Sequence
  ENSG00000134061_10 (sequence is synthesized)
cacacctctacatcagaggcaacgtgaagaaacttcaccttggtgttggctgcttggagaaactaggaaaccttcagacacttgatttaagccataatgacatagaggcttctgactgct

SEQ ID NO: 307965 - DNA, 120 bp, Artificial Sequence
  ENSG00000134061_11 (sequence is synthesized)
gcagtctgcaactcaaaaacctgtcccacttgcaaaccttaaacctgagccacaatgagcctcttggtctccagagtcaggcattcaaagaatgtcctcagctagaactcctcgatttgg

SEQ ID NO: 307966 - DNA, 120 bp, Artificial Sequence
  ENSG00000134061_12 (sequence is synthesized)
catttacccgcttacacattaatgctccacaaagtcccttccaaaacctccatttccttcaggttctgaatctcacttactgcttccttgataccagcaatcagcatcttctagcaggcc

SEQ ID NO: 307967 - DNA, 120 bp, Artificial Sequence
  ENSG00000134061_13 (sequence is synthesized)
taccagttctccggcatctcaacttaaaagggaatcactttcaagatgggactatcacgaagaccaacctacttcagaccgtgggcagcttggaggttctgattttgtcctcttgtggtc

SEQ ID NO: 307968 - DNA, 120 bp, Artificial Sequence
  ENSG00000134061_14 (sequence is synthesized)
tcctctctatagaccagcaagcattccacagcttgggaaaaatgagccatgtagacttaagccacaacagcctgacatgcgacagcattgattctcttagccatcttaagggaatctacc

SEQ ID NO: 307969 - DNA, 120 bp, Artificial Sequence
  ENSG00000134061_15 (sequence is synthesized)
tcaatctggctgccaacagcattaacatcatctcaccccgtctcctccctatcttgtcccagcagagcaccattaatttaagtcataaccccctggactgcacttgctcgaatattcatt

SEQ ID NO: 307970 - DNA, 120 bp, Artificial Sequence
  ENSG00000134061_16 (sequence is synthesized)
tcttaacatggtacaaagaaaacctgcacaaacttgaaggctcggaggagaccacgtgtgcaaacccgccatctctaaggggagttaagctatctgatgtcaagctttcctgtgggatta

SEQ ID NO: 307971 - DNA, 120 bp, Artificial Sequence
  ENSG00000134061_17 (sequence is synthesized)
cagccataggcattttctttctcatagtatttctattattgttggctattctgctattttttgcagttaaataccttctcaggtggaaataccaacacatttagtgctgaaggtttccag

SEQ ID NO: 307972 - DNA, 120 bp, Artificial Sequence
  ENSG00000134061_18 (sequence is synthesized)
agaaagcaaataagtgtgcttagcaaaattgctctaagtgaaagaactgtcatctgctggtgaccagaccagacttttcagattgcttcctggaactgggcagggactcactgtgctttt

SEQ ID NO: 307973 - DNA, 120 bp, Artificial Sequence
  ENSG00000134061_19 (sequence is synthesized)
ctgagcttcttactcctgtgagtcccagagctaaagaaccttctaggcaagtacaccgaatgactcagtccagagggtcagatgctgctgtgagaggcacagagccctttccgcatgtgg

SEQ ID NO: 307974 - DNA, 120 bp, Artificial Sequence
  ENSG00000134061_20 (sequence is synthesized)
aagagtgggaggaagcagagggagggactgggcagggactgccggccccggagtctcccacagggaggccattccccttctactcaccgacatccctcccagcaccacacaccccgcccc

SEQ ID NO: 307975 - DNA, 120 bp, Artificial Sequence
  ENSG00000134061_21 (sequence is synthesized)
tgaaaggagatcatcagcccccacaatttgtcagagctgaagccagcccactacccacccccactacagcattgtgcttgggtctgggttctcagtaatgtagccatttgagaaacttac

SEQ ID NO: 307976 - DNA, 120 bp, Artificial Sequence
  ENSG00000134061_22 (sequence is synthesized)
taatcttcttaatccttaggtctgtaaggtctctgtaatgcccctagggtgtgaatggctataaaaaatagaacccacccccaaggtttagaatttcttccacatttgcctcactcagtt

SEQ ID NO: 307977 - DNA, 120 bp, Artificial Sequence
  ENSG00000134061_23 (sequence is synthesized)
cagaaaccaggcaggctctctctgcctatctggtgttctggctcttatgttacagatcctaacttgcaggtgggctgtgacccaaaatgctcttctcatttgggcatccggttcttagaa

SEQ ID NO: 307978 - DNA, 120 bp, Artificial Sequence
  ENSG00000134061_24 (sequence is synthesized)
gtctcttttccagaagaactgtgaaataaatcgtggtttggttctcaggcttgcccttaaaagcctatttgcttcggagagcatttgaattagcacatttacgtgaaaatgaggaagaag

SEQ ID NO: 307979 - DNA, 120 bp, Artificial Sequence
  ENSG00000134061_25 (sequence is synthesized)
gcatccctgcatgctagctgttgggaacacagtaaagctggcttagtgagaagtggtttctgttgaggctggggatgtcaccaaaggtcacaccagccatggacaggggcctgaaccact

SEQ ID NO: 307980 - DNA, 120 bp, Artificial Sequence
  ENSG00000134061_26 (sequence is synthesized)
gaatgcagatagacaaagagcaatgtcatgacttaggcttaaagggccatactcacacaggcctgtatcttctgaagtcttgattgccagacaagcttggcgggagctcctggactcaag

SEQ ID NO: 307981 - DNA, 120 bp, Artificial Sequence
  ENSG00000134061_27 (sequence is synthesized)
tggtgcattgttctgttcaataaccaattttagggtagagatagagatggtaacttatagttatgaaattctgataagctaacaaaataaaaatggatccaaccaatcagaatatattag

SEQ ID NO: 307982 - DNA, 120 bp, Artificial Sequence
  ENSG00000134061_28 (sequence is synthesized)
tccttaagttgaaggcatactagtgggacatcataacagagtgaaaacttgggggtcatcctttttgtctcttcgcccccaggaaaagcagggcaggcagggaacagcagtgggtgaacc

SEQ ID NO: 307983 - DNA, 120 bp, Artificial Sequence
  ENSG00000134061_29 (sequence is synthesized)
tcttctctgctcagggatttcaggccttcacacttgctctttcctttgcctctaagatgctgccattggcctccaaatggctccttccttcatcttgagatttcagtgctaatattttct

SEQ ID NO: 307984 - DNA, 120 bp, Artificial Sequence
  ENSG00000134061_30 (sequence is synthesized)
cctttgagggatttcttctctgacctagctaatccaaagcaacctctatgcctcacctggttttattatctttataatgcttatcagtgtttggaattaacttcttcatttgttttaatt

SEQ ID NO: 307985 - DNA, 120 bp, Artificial Sequence
  ENSG00000134061_31 (sequence is synthesized)
agtttctcttgtcttgtctctcccaaatacaagtgccatgagagggtctttgcctaaagataccctagaacatgcctgggacatagtaaggactctctctctctctctccatatgtgtgt

SEQ ID NO: 307986 - DNA, 89 bp, Artificial Sequence
  ENSG00000134061_32 (sequence is synthesized)
gtgtgtgtatgtgtgtgtatgtgtgtgtgtatatatatatataattttttttttgagacttatagtgcaatcttggctcactgtaacct

SEQ ID NO: 307987 - DNA, 83 bp, Artificial Sequence
  ENSG00000134061_33 (sequence is synthesized)
agagccatcgtgcccggccaagattcaatatatttttaatatgtgctgatccctgagcctttattagctcctagttctgccac

SEQ ID NO: 307988 - DNA, 120 bp, Artificial Sequence
  ENSG00000134061_34 (sequence is synthesized)
tgctgatccctgagcctttattagctcctagttctgccaccatgcctatgctgctgactcttagctcctgacctctccacggtttcctgggcctcccacatgtttttcactggcatctcc

SEQ ID NO: 307989 - DNA, 120 bp, Artificial Sequence
  ENSG00000134061_35 (sequence is synthesized)
tagggaagtttttacaaaatggattcccaggcctcacccccagatactgagattctgttggactgaggttggctcagggttcccagccaaatgattccatgtaaaatgtggaaggtccaa

SEQ ID NO: 307990 - DNA, 120 bp, Artificial Sequence
  ENSG00000134061_36 (sequence is synthesized)
actctaagaatccagtcttagacagcaccaacccattgagtccctgcatattctgtcacaggtaagctctttcttgccttagggatttaagctgcagatggaaaatactaattgctgatt

SEQ ID NO: 307991 - DNA, 120 bp, Artificial Sequence
  ENSG00000134061_37 (sequence is synthesized)
taccaacccatagacatactgccctccataatatttaatatgtaacttggaaaaacgaaacaattctgtagaaaacctctgatgtgaattacatcacactaacaatgaaaggggcccagg

SEQ ID NO: 307992 - DNA, 120 bp, Artificial Sequence
  ENSG00000134061_38 (sequence is synthesized)
ccttagcaaagcataattgcccatcctgctttcacttctcaggcccgctcccttccatgcgatgcagcttgctgctccgtaactgatctaaggctttgtgacagctcctctgttttaagc

SEQ ID NO: 307993 - DNA, 120 bp, Artificial Sequence
  ENSG00000134061_39 (sequence is synthesized)
aacagtaaattcaccccacaaagtcagaaagggagcttgttgatggctgctgtcaattttattgctttaacctgtttactaggatagactctgtaacatggtgtgtttattggttttatg

SEQ ID NO: 307994 - DNA, 120 bp, Artificial Sequence
  ENSG00000134061_40 (sequence is synthesized)
tattgcatgttgttgctgctctgacaagctactcctataaaaatgtgttattattgcacgatgtagctcagtgagctgaccctgcatttcaaagggtactggagcaaatagcactgaagt

SEQ ID NO: 307995 - DNA, 120 bp, Artificial Sequence
  ENSG00000134061_41 (sequence is synthesized)
ccataaaagctgactggcctccatcacagaggactctctgcatgagctgcaactcctacaacccaggagagaattacacctttccctgtgccagcagccactgcttagtacagcacagcc

SEQ ID NO: 307996 - DNA, 120 bp, Artificial Sequence
  ENSG00000134061_42 (sequence is synthesized)
cttgaacacaggcaatatctgtaaaattccaagacagaaaactgtcgtgccattcttatttgtccaactctccaatcagtgtagtttgcaattttgatgtttataaaagtatgaaacaaa

SEQ ID NO: 307997 - DNA, 120 bp, Artificial Sequence
  ENSG00000134061_43 (sequence is synthesized)
tatttttttcagttttagaggattccattttgtgaatgtaccatgttttgttcaagtagtcctatattgatgaatagtctggttattgtcaattttgctattacaaaaaaagtactacag

SEQ ID NO: 307998 - DNA, 120 bp, Artificial Sequence
  ENSG00000134061_44 (sequence is synthesized)
ttaacaatgtgcattcatcatcttgtttttggcaagtgtatatttggtaaagattactagaagtacgattgccgctcggaaggtaaaacatatataattttgctagatagtctataaaat

SEQ ID NO: 307999 - DNA, 120 bp, Artificial Sequence
  ENSG00000134070_0 (sequence is synthesized)
agtcgtcccgcgccggagccggccccgtagcgtgccatggcctgctacatctaccagctgccctcctgggtgctggacgacctgtgccgcaacatggacgcgctcagcgagtgggactgg

SEQ ID NO: 308000 - DNA, 120 bp, Artificial Sequence
  ENSG00000134070_1 (sequence is synthesized)
atggagttcgcctcctacgtgatcacagacctgacccagctgcggaagatcaagtccatggagcgggtgcagggtgtgagcatcacgcgggagctgctgtggtggtggggcatgcggcag

SEQ ID NO: 308001 - DNA, 120 bp, Artificial Sequence
  ENSG00000134070_2 (sequence is synthesized)
gccaccgtccagcaacttgtggacctcctgtgccgcctggagctctaccgggctgcccagatcatcctgaactggaaaccggctcctgaaatcaggtgtcccattccagccttccctgac

SEQ ID NO: 308002 - DNA, 120 bp, Artificial Sequence
  ENSG00000134070_3 (sequence is synthesized)
tctgtgaagccagaaaagcctttggcagcttctgtaagaaaggctgaggatgaacaggaagaggggcagcctgtgaggatggccacctttccaggcccagggtcctctccagccagagcc

SEQ ID NO: 308003 - DNA, 120 bp, Artificial Sequence
  ENSG00000134070_4 (sequence is synthesized)
caccagccggcctttctccagcctcctgaagaagatgcccctcattccttgagaagcgacctccccacttcgtctgattcaaaggacttcagcacctccattcctaagcaggaaaaactt

SEQ ID NO: 308004 - DNA, 120 bp, Artificial Sequence
  ENSG00000134070_5 (sequence is synthesized)
ttgagcttggctggagacagccttttctggagtgaggcagacgtggtccaggcaaccgatgacttcaatcaaaaccgcaaaatcagccaggggacctttgctgacgtctacagagggcac

SEQ ID NO: 308005 - DNA, 120 bp, Artificial Sequence
  ENSG00000134070_6 (sequence is synthesized)
aggcacgggaagccattcgtcttcaagaagctcagagagacagcctgttcaagtccaggatcaatcgaaagattcttccaggcagagttgcagatttgtcttagatgctgccaccccaat

SEQ ID NO: 308006 - DNA, 120 bp, Artificial Sequence
  ENSG00000134070_7 (sequence is synthesized)
gtcttacctgtgctgggcttctgtgctgcaagacagtttcacagcttcatctacccctacatggcaaatggttccctacaggacagactgcagggtcagggtggctcggaccccctcccc

SEQ ID NO: 308007 - DNA, 120 bp, Artificial Sequence
  ENSG00000134070_8 (sequence is synthesized)
tggccccagcgtgtcagcatctgctcagggctgctctgtgccgtcgagtacctgcatggtctggagatcatccacagcaacgtcaagagctctaatgtcttgctggaccaaaatctcacc

SEQ ID NO: 308008 - DNA, 120 bp, Artificial Sequence
  ENSG00000134070_9 (sequence is synthesized)
cccaaacttgctcacccaatggctcatctgtgtcctgtcaacaaaaggtcaaaatacaccatgatgaagactcacctgctccggacgtcagccgcgtatctgccagaggatttcatccgg

SEQ ID NO: 308009 - DNA, 120 bp, Artificial Sequence
  ENSG00000134070_10 (sequence is synthesized)
gtggggcagctgacaaagcgagtggacatcttcagctgtggaatagtgttggccgaggtcctcacgggcatccctgcaatggataacaaccgaagcccggtttacctgaaggacttactc

SEQ ID NO: 308010 - DNA, 120 bp, Artificial Sequence
  ENSG00000134070_11 (sequence is synthesized)
ctcagtgatattccaagcagcaccgcctcgctctgctccaggaagacgggcgtggagaacgtgatggcaaaggagatctgccagaagtacctggagaagggcgcagggaggcttccggag

SEQ ID NO: 308011 - DNA, 120 bp, Artificial Sequence
  ENSG00000134070_12 (sequence is synthesized)
gactgcgccgaggccctggccacggctgcctgcctgtgcctgcggaggcgtaacaccagcctgcaggaggtgtgtggctctgtggctgctgtggaagagcggctccgaggtcgggagacg

SEQ ID NO: 308012 - DNA, 120 bp, Artificial Sequence
  ENSG00000134070_13 (sequence is synthesized)
ttgctcccttggagtgggctttctgagggtacaggctcttcttccaacaccccagaggaaacagacgacgttgacaattccagccttgatgcctcctcctccatgagtgtggcaccctgg

SEQ ID NO: 308013 - DNA, 120 bp, Artificial Sequence
  ENSG00000134070_14 (sequence is synthesized)
ggctgactcctcctctgaggcctgtgttggcctggagcctccccaggatgttacagaaacttcgtggcaaattgagatcaatgaggccaaaaggaaactgatggagaatattctgctcta

SEQ ID NO: 308014 - DNA, 120 bp, Artificial Sequence
  ENSG00000134070_15 (sequence is synthesized)
caaagaggaaaaagtggacagcattgagctctttggcccctgatgaccggaacacagctgaggacccttgtcctcagttggaaagatgagcatcagatcaagaaaaaggtctgaggcaga

SEQ ID NO: 308015 - DNA, 120 bp, Artificial Sequence
  ENSG00000134070_16 (sequence is synthesized)
atccaagatctgccaggaaacacacaacaaaacatctgctgtcctgggtgggagggaaacttcatttcactggaatgagttgggagagaaaggccctcagcttttagagacacaaaaatc

SEQ ID NO: 308016 - DNA, 120 bp, Artificial Sequence
  ENSG00000134070_17 (sequence is synthesized)
catgaagtctcttcctttctgggctttgttagtcagagcaggggatcagaggagactgaagcagaaaccctgcacacgggcccaggatgtggctgattttgtggttccggggagtatgtg

SEQ ID NO: 308017 - DNA, 120 bp, Artificial Sequence
  ENSG00000134070_18 (sequence is synthesized)
atgataatcacccccagcagattccattacctcagcagctcttgttcccccgccactggcagttctgcaatgccatagcattttccagagctaagatctctgggttgtatttgctgacag

SEQ ID NO: 308018 - DNA, 120 bp, Artificial Sequence
  ENSG00000134070_19 (sequence is synthesized)
atttgctgacagcctgcaagcttgcatgctctgaaagattttttttagtttttaatttttttgtagagatggggtctcgctttgttggcgcaatcctcccacctcagactcccaaagtgc

SEQ ID NO: 308019 - DNA, 120 bp, Artificial Sequence
  ENSG00000134070_20 (sequence is synthesized)
tgggagccactgtgcctggcctggaagactttcaacttgtgtctcagtgcagttcttgactcacctctctgggcctcaggttctacaaatgccagacacctagcgaagagctctgcaggc

SEQ ID NO: 308020 - DNA, 120 bp, Artificial Sequence
  ENSG00000134070_21 (sequence is synthesized)
tttccactgcctgtattggaaatcttgcaattcacataattattcagtcactgcctggtacctttatcttcccatcccactaatgttagtgttttttaatggagcttttattctgagaat

SEQ ID NO: 308021 - DNA, 120 bp, Artificial Sequence
  ENSG00000134070_22 (sequence is synthesized)
tacaggcttgagccaccgcacccggccgagaatatgtgttgttatttatgactggattatgaagaatcaggagaatgcatttcatgtctgattctgctgctaattaagtcaatcatttaa

SEQ ID NO: 308022 - DNA, 120 bp, Artificial Sequence
  ENSG00000134070_23 (sequence is synthesized)
ttcatgtctgattctgctgctaattaagtcaatcatttaatttttgggacctcagtttctttgtaagtaaaataacacctgcttgttcttcatccctgggctgttgggaggaacagatga

SEQ ID NO: 308023 - DNA, 120 bp, Artificial Sequence
  ENSG00000134070_24 (sequence is synthesized)
gacagtggctatagaagcacttggaaaatgcacttgtcctgttttgtaaaataaaaaggtattaaatgtgtatttctgccatgtacctaatgattattcagtgcgtatatatctgaaaag

SEQ ID NO: 308024 - DNA, 120 bp, Artificial Sequence
  ENSG00000134070_25 (sequence is synthesized)
tcatgttgcaaatctttctgtgaaacagatgctattttaaattcactgggagaaatatcctatttaaagtaatctatagtaatttctttttatataataaaaatatatttgtaaagtcga

SEQ ID NO: 308025 - DNA, 80 bp, Artificial Sequence
  ENSG00000134072_0 (sequence is synthesized)
agctccagcaagagcgcgggcgggtggcccaggcacgcagcggtgaggaccgcggccacagctcggcgccaaccaccgcg

SEQ ID NO: 308026 - DNA, 120 bp, Artificial Sequence
  ENSG00000134072_1 (sequence is synthesized)
cctggctgtggtcggggggcagtgggccatgctgggggcagtggaaggccccaggtggaagcaggcggaggacattagagacatctacgacttccgagatgttctgggcacgggggcctt

SEQ ID NO: 308027 - DNA, 120 bp, Artificial Sequence
  ENSG00000134072_2 (sequence is synthesized)
ctcggaggtgatcctggcagaagataagaggacgcagaagctggtggccatcaaatgcattgccaaggaggccctggagggcaaggaaggcagcatggagaatgagattgctgtcctgca

SEQ ID NO: 308028 - DNA, 120 bp, Artificial Sequence
  ENSG00000134072_3 (sequence is synthesized)
caagatcaagcaccccaacattgtagccctggatgacatctatgagagtgggggccacctctacctcatcatgcagctggtgtcgggtggggagctctttgaccgtattgtggaaaaagg

SEQ ID NO: 308029 - DNA, 120 bp, Artificial Sequence
  ENSG00000134072_4 (sequence is synthesized)
cttctacacggagcgggacgccagccgcctcatcttccaggtgctggatgctgtgaaatacctgcatgacctgggcattgtacaccgggatctcaagccagagaatctgctgtactacag

SEQ ID NO: 308030 - DNA, 120 bp, Artificial Sequence
  ENSG00000134072_5 (sequence is synthesized)
cctggatgaagactccaaaatcatgatctccgactttggcctctccaagatggaggacccgggcagtgtgctctccaccgcctgtggaactccgggatacgtggcccctgaagtcctggc

SEQ ID NO: 308031 - DNA, 120 bp, Artificial Sequence
  ENSG00000134072_6 (sequence is synthesized)
agcaaggctgtggattgctggtccataggtgtcatcgcctacatcttgctctgcggttaccctcccttctatgacgagaatgatgccaaactctttgaacagattttgaaggccgagtac

SEQ ID NO: 308032 - DNA, 120 bp, Artificial Sequence
  ENSG00000134072_7 (sequence is synthesized)
gagtttgactctccttactgggacgacatctctgactctgccaaagatttcatccggcacttgatggagaaggacccagagaaaagattcacctgtgagcaggccttgcagcacccatgg

SEQ ID NO: 308033 - DNA, 120 bp, Artificial Sequence
  ENSG00000134072_8 (sequence is synthesized)
attgcaggagatacagctctagataagaatatccaccagtcggtgagtgagcagatcaagaagaactttgccaagagcaagtggaagcaagccttcaatgccacggctgtggtgcggcac

SEQ ID NO: 308034 - DNA, 120 bp, Artificial Sequence
  ENSG00000134072_9 (sequence is synthesized)
atgaggaaactgcagctgggcaccagccaggaggggcaggggcagacggcgagccatggggagctgctgacaccagtggctggggggccggcagctggctgttgctgtcgagactgctgc

SEQ ID NO: 308035 - DNA, 120 bp, Artificial Sequence
  ENSG00000134072_10 (sequence is synthesized)
gtggagccgggcacagaactgtcccccacactgccccaccagctctagggccctggacctcgggtcatgatcctctgcgtgggagggcttgggggcagcctgctccccttccctccctga

SEQ ID NO: 308036 - DNA, 120 bp, Artificial Sequence
  ENSG00000134072_11 (sequence is synthesized)
accgggagtttctctgccctgtcccctcctcacctgcttccctaccactcctcactgcattttccatacaaatgtttctattttattgttccttcttgtaataaagggaagataaaacca

SEQ ID NO: 308037 - DNA, 120 bp, Artificial Sequence
  ENSG00000134072_12 (sequence is synthesized)
cttctgtcggattttccagcaccacacaaagagctgtcttcgagaccagacaccctaccccttcttccttctgcttgggtacttccttctgcttggctcccagagtgagaaactaggcat

SEQ ID NO: 308038 - DNA, 120 bp, Artificial Sequence
  ENSG00000134072_13 (sequence is synthesized)
tcatttgttcaatcttcaaacatagtctatttgaaaatacctctcccctattgacaccctaatgtctaaaacaccaccataaacattttcatcctccttttgtgccccctattaagaagc

SEQ ID NO: 308039 - DNA, 120 bp, Artificial Sequence
  ENSG00000134072_14 (sequence is synthesized)
ctattaagaagcaaacctgtgaagctactatcgtttatcatcagtgtgaatgcactgagattagtcaagaacaacttttttttttttttctttcttttttgagacgcagtctcgctctgt

SEQ ID NO: 308040 - DNA, 120 bp, Artificial Sequence
  ENSG00000134072_15 (sequence is synthesized)
gtgcccggccatatgtttttcttaagagagaaaggaaagagctggaaggcacggggtgggagggcctgaagaagagcataggttgggtggggtggggcatggactgatttggcctctttg

SEQ ID NO: 308041 - DNA, 120 bp, Artificial Sequence
  ENSG00000134072_16 (sequence is synthesized)
gggcatgggtggtccacaaaggtgcacccgggctggagtggagggcctgcccctgcggccacctctgttctgtcttcccatgcagggccggcagctggctgttgctgtcgagactgctgc

SEQ ID NO: 308042 - DNA, 120 bp, Artificial Sequence
  ENSG00000134072_17 (sequence is synthesized)
catctaacatatgtgcgtgtgtgtgtgtaaatatataataaagccttgtagaggtttttggggggctttaggggaattaataaaataactcctgaatgaaaataacagaacaattgcaag

SEQ ID NO: 308043 - DNA, 120 bp, Artificial Sequence
  ENSG00000134077_0 (sequence is synthesized)
gcggcttccggcggcgtgacctgaccgcaagaggccaatggagtgtgggagctgaaagggtcttcgctggcggccggtaactggcggcggttgggaacggccgagtgtggctcttctggt

SEQ ID NO: 308044 - DNA, 120 bp, Artificial Sequence
  ENSG00000134077_1 (sequence is synthesized)
gtttcagcttggggagagaggggtggccttcctcttgcagttgaggccggcgccgagccggacttcaggcggatctcgtggcggagcccatcttgctccctctcccaggcctttacccgc

SEQ ID NO: 308045 - DNA, 120 bp, Artificial Sequence
  ENSG00000134077_2 (sequence is synthesized)
tccctaggattcccgggccctgtaggtgggagttgggagacgacagtactgcttttaaagagacagtgttagggatcttggaagcacagccaacatgtgtgacattgaagaagccactaa

SEQ ID NO: 308046 - DNA, 120 bp, Artificial Sequence
  ENSG00000134077_3 (sequence is synthesized)
ccaactcctagatgtgaaccttcatgagaaccagaagtctgtacaagtgacagaaagtgacctcggaagtgaatctgagcttctagtcactattggagccactgtacctactggctttga

SEQ ID NO: 308047 - DNA, 120 bp, Artificial Sequence
  ENSG00000134077_4 (sequence is synthesized)
gcaaacagctgcagatgaagtcagagagaaacttgggtcatcatgcaaaatcagcagagaccgtggcaagatatattttgtcatttcagtggaaagtctggcacaggttcattgtctgag

SEQ ID NO: 308048 - DNA, 120 bp, Artificial Sequence
  ENSG00000134077_5 (sequence is synthesized)
atcagttgataacttatttgtggtggttcaggagtttcaagattaccagttcaaacaaacaaaggaagaagttctaaaggattttgaagacttggctggaaaactcccatggtcaaaccc

SEQ ID NO: 308049 - DNA, 120 bp, Artificial Sequence
  ENSG00000134077_6 (sequence is synthesized)
cttaaaagtgtggaaaattaatgccagttttaaaaagaaaaaagcaaagcgcaaaaagataaatcagaattcaagtaaagagaagattaataatggacaagaagtcaaaatcgatcagag

SEQ ID NO: 308050 - DNA, 120 bp, Artificial Sequence
  ENSG00000134077_7 (sequence is synthesized)
aaatgttaaaaaagagttcactagccatgctttagattctcatatcttagattattatgaaaatccagccatcaaagaggatgtatcaacattaataggtgatgatttggcatcttgcaa

SEQ ID NO: 308051 - DNA, 120 bp, Artificial Sequence
  ENSG00000134077_8 (sequence is synthesized)
agatgagactgatgaaagctcaaaagaagaaactgagcctcaagtgctgaagtttagagtcacatgcaacagggcaggagagaaacattgctttacctcaaatgaggctgcaagagattt

SEQ ID NO: 308052 - DNA, 120 bp, Artificial Sequence
  ENSG00000134077_9 (sequence is synthesized)
tgggggtgctgttcaagattattttaagtggaaggccgacatgaccaactttgatgtggaggttcttttgaacatccatgataatgaagtcattgtgggcattgcattgactgaagagag

SEQ ID NO: 308053 - DNA, 120 bp, Artificial Sequence
  ENSG00000134077_10 (sequence is synthesized)
tctccaccgaagaaatataacacattttggacctacaactcttagatcaactcttgcctatgggatgctcaggctctgtgatcctctaccttatgatataatagtcgatccaatgtgtgg

SEQ ID NO: 308054 - DNA, 120 bp, Artificial Sequence
  ENSG00000134077_11 (sequence is synthesized)
aactggggcaataccaatagagggggccactgaatggtctgactgtttccatattgctggtgataataatccactggctgtgaatagagcagcaaataacattgcatctttattgaccaa

SEQ ID NO: 308055 - DNA, 120 bp, Artificial Sequence
  ENSG00000134077_12 (sequence is synthesized)
gagccaaattaaagaaggcaaaccctcctggggcttgcccatagatgctgttcagtgggatatctgcaatctgccattgagaactggctctgtggatattattgtaacagatttgccatt

SEQ ID NO: 308056 - DNA, 120 bp, Artificial Sequence
  ENSG00000134077_13 (sequence is synthesized)
tggaaaaaggatgggatccaagaagagaaactggaacctttatccagcttgcctacgggagatgagccgtgtctgcacacctaccacaggccgagctgtactacttactcaagacacaaa

SEQ ID NO: 308057 - DNA, 120 bp, Artificial Sequence
  ENSG00000134077_14 (sequence is synthesized)
atgctttaccaaggcgttatctggaatgcgacacgtatggcgaaaggtggatacagtctgggtgaacgttggtggtcttcgtgctgcagtttacgttctgatacgtacacctcaagcttt

SEQ ID NO: 308058 - DNA, 120 bp, Artificial Sequence
  ENSG00000134077_15 (sequence is synthesized)
tgttcatccttcagaacaagacggagaaagaggaactctttggcaatgcaaagaatgaagatgactaatagtacttgtacttcccaccactggaaatgttagcataaaagaacttggaga

SEQ ID NO: 308059 - DNA, 120 bp, Artificial Sequence
  ENSG00000134077_16 (sequence is synthesized)
gaaaaaagtattaacaaaactgcagtctgcactctttaaacctgtttaaggctcttcatcctggttagcaaaaggtgtgaatgtaatgtgatggaatttaaaagttttatgagaccaggc

SEQ ID NO: 308060 - DNA, 120 bp, Artificial Sequence
  ENSG00000134077_17 (sequence is synthesized)
ggaatttaaaagttttatgagaccaggcacagtggctcacgactgtaattccagcagtttaggaagccgaagtgtgcagatcacctgaggtccggagaccagcctggccaacatggtgaa

SEQ ID NO: 308061 - DNA, 120 bp, Artificial Sequence
  ENSG00000134077_18 (sequence is synthesized)
cctgtgcgacaagagcgaaactctgtctcaaaaagattttataagaaagcagagcttttccttgaagctcttttgaagtggtagcttaattagtattttgttgaaaatactttaaagatg

SEQ ID NO: 308062 - DNA, 120 bp, Artificial Sequence
  ENSG00000134077_19 (sequence is synthesized)
cctagtgaaaagcctactaaagtgctgtgagattggggtttagaacattttattttcaggctttatggcctattttccattgtgtcaagtgcaaaactaccctggcccaaaggaagggca

SEQ ID NO: 308063 - DNA, 120 bp, Artificial Sequence
  ENSG00000134077_20 (sequence is synthesized)
gagaacataattacatcttaggccacatttcattctttgcagctttgctaatccagttgctcaagttctttacctcaacctgaaggaatgaagcattattacattttgtgaatggtgttc

SEQ ID NO: 308064 - DNA, 120 bp, Artificial Sequence
  ENSG00000134077_21 (sequence is synthesized)
agcctataagacgaagtctcacaagacctataggaaagtttaccatctgccttaaatattaaaatatccatctgttattcacattaatacacagaatgaaaatagaggtctaggaattat

SEQ ID NO: 308065 - DNA, 120 bp, Artificial Sequence
  ENSG00000134077_22 (sequence is synthesized)
caaaggtactgcaaaaatactgtatagaacttatttgtaaatagcacatacattgatagatggggtgtgggaccaacaaaccaaattaaaagaaattgtttttctttcagtacactaagg

SEQ ID NO: 308066 - DNA, 120 bp, Artificial Sequence
  ENSG00000134077_23 (sequence is synthesized)
tgtgtgttttcaaaaccaaacacaaacctgtcaagagtatttgttggctagtttcttaaaaggccaagagaaaaaaaatgatatatctttggaaaacttttaatttgggagttatgtgag

SEQ ID NO: 308067 - DNA, 120 bp, Artificial Sequence
  ENSG00000134077_24 (sequence is synthesized)
ttgttactttctcctggatcacgattcacatttaattgcttttccagttgcaacaagtccttcttgagagttttgtggaaaatggtgcttccctggaacaaagagtagttgaggtttttt

SEQ ID NO: 308068 - DNA, 120 bp, Artificial Sequence
  ENSG00000134077_25 (sequence is synthesized)
tgtggaactcatcatagtattgtttattttggagcctctggctgcaatcagtatagattttcagtatcctattagtattataatagtactcctcttaatactttctgatgtctccattga

SEQ ID NO: 308069 - DNA, 120 bp, Artificial Sequence
  ENSG00000134077_26 (sequence is synthesized)
gaataaaaggacacaatacttttgaaagaagagttcacattagcagcacagccagcaatcctcatctggtttctctgatctcctaccccacacttcataatgaatgggaaataagatgtt

SEQ ID NO: 308070 - DNA, 120 bp, Artificial Sequence
  ENSG00000134077_27 (sequence is synthesized)
tatgaaggttttatatcctagactggcctttttaccactatcagaattcacagctgctttgtttatgggccgaacacaaaacttttcacctgatgggagaaaccatttaaacctcaaatt

SEQ ID NO: 308071 - DNA, 120 bp, Artificial Sequence
  ENSG00000134077_28 (sequence is synthesized)
cctgatgggagaaaccatttaaacctcaaattaagcaacccacagaaccaggaagttcaaggaccatgtctgttttcaccacgatgtctttccccacccccccaccccccactccacccc

SEQ ID NO: 308072 - DNA, 120 bp, Artificial Sequence
  ENSG00000134077_29 (sequence is synthesized)
tgggtatttgttgaacaagcgagtattttcgcctattagcttagtttttaaggaaatcattttttacttgattcatcatagctttaattctattacatactacaataaaaatttgacaag

SEQ ID NO: 308073 - DNA, 120 bp, Artificial Sequence
  ENSG00000134077_30 (sequence is synthesized)
actgatacaaatatgtagtgggcaatagtttgccgtcttcttccctagtatggtgtttttcaatctggtgactagaataggcagtgggctataagcaggattcataaggcctggagctga

SEQ ID NO: 308074 - DNA, 120 bp, Artificial Sequence
  ENSG00000134077_31 (sequence is synthesized)
gttatatgtgacactgccacctattcattgtgtgaccttggttttaaccttcaaagtgggtctcctggactaaaagaatgtgaaaagatggggaaataaatctgtaatctgaacatggaa

SEQ ID NO: 308075 - DNA, 120 bp, Artificial Sequence
  ENSG00000134077_32 (sequence is synthesized)
ttctctttcattctgcgcctctcattggctctctgaccttgtgcggaacgcgtcctttagctgacctcagctgcattttttagaagatggagattgtattcacagtgactgtcagctttt

SEQ ID NO: 308076 - DNA, 120 bp, Artificial Sequence
  ENSG00000134077_33 (sequence is synthesized)
taacggcgggaactgacgtagtgttaaacactgtcgtgtatcgctggcacagcacaaggacattataggtattctgtactcaattaagttattttgagtcacagaccttttgaaaatctc

SEQ ID NO: 308077 - DNA, 120 bp, Artificial Sequence
  ENSG00000134077_34 (sequence is synthesized)
gtgtaagctatggcccctccacctctctaatacttcccccggcccccaccccaagcacacacaaaagcttatgcataggaaatttgttttactatttcggattacttccaagatctctct

SEQ ID NO: 308078 - DNA, 120 bp, Artificial Sequence
  ENSG00000134077_35 (sequence is synthesized)
ttagagttagagaatcactttttatattgactttatgaattaaaactcccagtgcattgtgacgtcattgtaaccaaaatgaatatactatgagactccatttacatttttaaagtttat

SEQ ID NO: 308079 - DNA, 120 bp, Artificial Sequence
  ENSG00000134077_36 (sequence is synthesized)
tgaaaataagttatatttttaaaatattattttagcgataatttccccaccatatgcaatttttcatttgtcttattcatatgtcttttcccctacatattggaagaatattttatagac

SEQ ID NO: 308080 - DNA, 120 bp, Artificial Sequence
  ENSG00000134077_37 (sequence is synthesized)
gacaaggtctcacagtgttgctcagctggtctcaaattcctggagtccagtgatcctcccacctcagcccctgaaagtgctgattataggcacaagctaccatgcccagcctgacctatt

SEQ ID NO: 308081 - DNA, 120 bp, Artificial Sequence
  ENSG00000134077_38 (sequence is synthesized)
ttttacctttgtgccatttcttaaattttgaataggttgatattatcactgatatccttagcagtttatgttttgctgtagcagtctctcttcagaaacaaaaattgttgtaataacttt

SEQ ID NO: 308082 - DNA, 90 bp, Artificial Sequence
  ENSG00000134077_39 (sequence is synthesized)
ggcggcttccggcggcgtgacctgaccgcaagaggccaatggagtgtgggagctgaaagggtcttcgctggcggccgggccctcccacct

SEQ ID NO: 308083 - DNA, 120 bp, Artificial Sequence
  ENSG00000134077_40 (sequence is synthesized)
cagcctcccaagtagctggactccaggcgcccaccaccacgcccagctattttttgtgtttttggtagagatgagattttgccatcttacgcagattggtctcgaactcttggcctcaag

SEQ ID NO: 308084 - DNA, 120 bp, Artificial Sequence
  ENSG00000134086_0 (sequence is synthesized)
tgagtgtttatgtttgtagttttaattgctctgaagtaaatatctgattttccaatttccaccagagtgctctgcacatagtaggtctaattatttttccctctttactaatcacccatg

SEQ ID NO: 308085 - DNA, 120 bp, Artificial Sequence
  ENSG00000134086_1 (sequence is synthesized)
ccttgtaagaattcagttagttgactttttgtactttataagcgtgatgattgggtgttcccgtgtgagatgcgccaccctcgaaccttgttacgacgtcggcacattgcgcgtctgaca

SEQ ID NO: 308086 - DNA, 120 bp, Artificial Sequence
  ENSG00000134086_2 (sequence is synthesized)
tgttacgacgtcggcacattgcgcgtctgacatgaagaaaaaaaaaattcagttagtccaccaggcacagtggctaaggcctgtaatccctgcactttgagaggccaaggcaggaggatc

SEQ ID NO: 308087 - DNA, 120 bp, Artificial Sequence
  ENSG00000134086_3 (sequence is synthesized)
caacatagcgagactccgtttcaaacaacaaataaaaataattagtcgggcatggtggtgcgcgcctacagtaccaactactcgggaggctgaggcgagacgatcgcttgagccagggag

SEQ ID NO: 308088 - DNA, 80 bp, Artificial Sequence
  ENSG00000134086_4 (sequence is synthesized)
agcccaccaaaccttagaggggcgaaaaaaaattttatagtggaaatacagtaacgagttggcctagcctcgcctccgtt

SEQ ID NO: 308089 - DNA, 120 bp, Artificial Sequence
  ENSG00000134086_5 (sequence is synthesized)
tggaaatacagtaacgagttggcctagcctcgcctccgttacaacggcctacggtgctggaggatccttctgcgcacgcgcacagcctccggccggctatttccgcgagcgcgttccatc

SEQ ID NO: 308090 - DNA, 120 bp, Artificial Sequence
  ENSG00000134086_6 (sequence is synthesized)
ctctaccgagcgcgcgcgaagactacggaggtcgactcgggagcgcgcacgcagctccgccccgcgtccgacccgcggatcccgcggcgtccggcccgggtggtctggatcgcggaggga

SEQ ID NO: 308091 - DNA, 120 bp, Artificial Sequence
  ENSG00000134086_7 (sequence is synthesized)
atgccccggagggcggagaactgggacgaggccgaggtaggcgcggaggaggcaggcgtcgaagagtacggccctgaagaagacggcggggaggagtcgggcgccgaggagtccggcccg

SEQ ID NO: 308092 - DNA, 120 bp, Artificial Sequence
  ENSG00000134086_8 (sequence is synthesized)
gaagagtccggcccggaggaactgggcgccgaggaggagatggaggccgggcggccgcggcccgtgctgcgctcggtgaactcgcgcgagccctcccaggtcatcttctgcaatcgcagt

SEQ ID NO: 308093 - DNA, 120 bp, Artificial Sequence
  ENSG00000134086_9 (sequence is synthesized)
ccgcgcgtcgtgctgcccgtatggctcaacttcgacggcgagccgcagccctacccaacgctgccgcctggcacgggccgccgcatccacagctaccgaggtcacctttggctcttcaga

SEQ ID NO: 308094 - DNA, 120 bp, Artificial Sequence
  ENSG00000134086_10 (sequence is synthesized)
gatgcagggacacacgatgggcttctggttaaccaaactgaattatttgtgccatctctcaatgttgacggacagcctatttttgccaatatcacactgccagtgtatactctgaaagag

SEQ ID NO: 308095 - DNA, 120 bp, Artificial Sequence
  ENSG00000134086_11 (sequence is synthesized)
cgatgcctccaggttgtccggagcctagtcaagcctgagaattacaggagactggacatcgtcaggtcgctctacgaagatctggaagaccacccaaatgtgcagaaagacctggagcgg

SEQ ID NO: 308096 - DNA, 120 bp, Artificial Sequence
  ENSG00000134086_12 (sequence is synthesized)
ctgacacaggagcgcattgcacatcaacggatgggagattgaagatttctgttgaaacttacactgtttcatctcagcttttgatggtactgatgagtcttgatctagatacaggactgg

SEQ ID NO: 308097 - DNA, 120 bp, Artificial Sequence
  ENSG00000134086_13 (sequence is synthesized)
ttccttccttagtttcaaagtgtctcattctcagagtaaaataggcaccattgcttaaaagaaagttaactgacttcactaggcattgtgatgtttaggggcaaacatcacaaaatgtaa

SEQ ID NO: 308098 - DNA, 120 bp, Artificial Sequence
  ENSG00000134086_14 (sequence is synthesized)
tttaatgcctgcccattagagaagtatttatcaggagaaggtggtggcatttttgcttcctagtaagtcaggacagcttgtatgtaaggaggtttgtataagtaattcagtgggaattgc

SEQ ID NO: 308099 - DNA, 120 bp, Artificial Sequence
  ENSG00000134086_15 (sequence is synthesized)
taagaaggcattggcatctgcttttaatggatgtataatacatccattctacatccgtagcggttggtgacttgtctgcctcctgctttgggaagactgaggcatccgtgaggcagggac

SEQ ID NO: 308100 - DNA, 120 bp, Artificial Sequence
  ENSG00000134086_16 (sequence is synthesized)
aagtctttctcctctttgagaccccagtgcctgcacatcatgagccttcagtcagggtttgtcagaggaacaaaccaggggacactttgttagaaagtgcttagaggttctgcctctatt

SEQ ID NO: 308101 - DNA, 120 bp, Artificial Sequence
  ENSG00000134086_17 (sequence is synthesized)
tttgttggggggtgggagaggggaccttaaaatgtgtacagtgaacaaatgtcttaaagggaatcatttttgtaggaagcattttttataattttctaagtcgtgcactttctcggtcca

SEQ ID NO: 308102 - DNA, 120 bp, Artificial Sequence
  ENSG00000134086_18 (sequence is synthesized)
ctcttgttgaagtgctgttttattactgtttctaaactaggattgacattctacagttgtgataatagcatttttgtaacttgccatccgcacagaaaatacgagaaaatctgcatgttt

SEQ ID NO: 308103 - DNA, 120 bp, Artificial Sequence
  ENSG00000134086_19 (sequence is synthesized)
gattatagtattaatggacaaataagtttttgctaaatgtgagtatttctgttcctttttgtaaatatgtgacattcctgattgatttgggtttttttgttgttgttgttttgttttgtt

SEQ ID NO: 308104 - DNA, 78 bp, Artificial Sequence
  ENSG00000134086_20 (sequence is synthesized)
ctgggttcacgtaaggccaatttttgtacttttagtagagacagtgtttcgtcatgttggccaggctggtttcaaact

SEQ ID NO: 308105 - DNA, 120 bp, Artificial Sequence
  ENSG00000134086_21 (sequence is synthesized)
aaatggtgggattacaggtgtgtgggccaccgtgcctggctgattcagcattttttatcaggcaggaccaggtggcacttccacctccagcctctggtcctaccaatggattcatggagt

SEQ ID NO: 308106 - DNA, 120 bp, Artificial Sequence
  ENSG00000134086_22 (sequence is synthesized)
agcctggactgtttcatagttttctaaatgtacaaattcttataggctagacttagattcattaactcaaattcaatgcttctatcagactcagttttttgtaactaatagatttttttt

SEQ ID NO: 308107 - DNA, 120 bp, Artificial Sequence
  ENSG00000134086_23 (sequence is synthesized)
tccacttttgttctactccttccctaatagctttttaaaaaaatctccccagtagagaaacatttggaaaagacagaaaactaaaaaggaagaaaaaagatccctattagatacacttct

SEQ ID NO: 308108 - DNA, 120 bp, Artificial Sequence
  ENSG00000134086_24 (sequence is synthesized)
taaatacaatcacattaacattttgagctatttccttccagcctttttagggcagattttggttggtttttacatagttgagattgtactgttcatacagttttataccctttttcattt

SEQ ID NO: 308109 - DNA, 120 bp, Artificial Sequence
  ENSG00000134086_25 (sequence is synthesized)
aactttataacttaaatattgctctatgttagtataagcttttcacaaacattagtatagtctcccttttataattaatgtttgtgggtatttcttggcatgcatctttaattccttatc

SEQ ID NO: 308110 - DNA, 120 bp, Artificial Sequence
  ENSG00000134086_26 (sequence is synthesized)
ctagcctttgggcacaattcctgtgctcaaaaatgagagtgacggctggcatggtggctcccgcctgtaatcccagtactttggaaagccaaggtaagaggattgcttgagcccagaact

SEQ ID NO: 308111 - DNA, 120 bp, Artificial Sequence
  ENSG00000134086_27 (sequence is synthesized)
tcaagatgagcctgggctcatagtgagaacccatctatacaaaaaatttttaaaaattagcatggcggcacacatctgtaatcctagctacttggcaggctgaggtgagaagatcattgg

SEQ ID NO: 308112 - DNA, 79 bp, Artificial Sequence
  ENSG00000134086_28 (sequence is synthesized)
atcctagctacttggcaggctgaggtgagaagatcattggagtttaggaattggaggctgcagtgagccatgagtcctc

SEQ ID NO: 308113 - DNA, 87 bp, Artificial Sequence
  ENSG00000134086_29 (sequence is synthesized)
tgggcatgagcctccgcgcccggcccagagcattctttataaggccgaatagtttgcatttgaaggtggctccccccagtcccccac

SEQ ID NO: 308114 - DNA, 120 bp, Artificial Sequence
  ENSG00000134086_30 (sequence is synthesized)
aatagtttgcatttgaaggtggctccccccagtcccccaccccacgtgtattttcccctcaaagaaaagctgcatccttaacaccccatctgttcagtcctcatgactccagtgggccag

SEQ ID NO: 308115 - DNA, 120 bp, Artificial Sequence
  ENSG00000134086_31 (sequence is synthesized)
ttctgcgtagtccctgccctcgtggagaacacattcctcctggggagactgacagatgcaaagacaggaacaagccagggtcatgttggcgccggaagagccgaccgtgtgtggcgtggg

SEQ ID NO: 308116 - DNA, 120 bp, Artificial Sequence
  ENSG00000134107_0 (sequence is synthesized)
attcacttggctcgcacggcgcagacagaccgcgcagggagcacacaccgccagtctgtgcgctgagtcggagccagaggccgcggggacaccgggccatgcacgcccccaactgaagct

SEQ ID NO: 308117 - DNA, 120 bp, Artificial Sequence
  ENSG00000134107_1 (sequence is synthesized)
gcatctcaaagccgaagattccagcagcccaggggatttcaaagagctcagactcagaggaacatctgcggagagacccccgaagccctctccagggcagtcctcatccagacgctccgc

SEQ ID NO: 308118 - DNA, 120 bp, Artificial Sequence
  ENSG00000134107_2 (sequence is synthesized)
tagtgcagacaggagcgcgcagtggccccggctcgccgcgccatggagcggatccccagcgcgcaaccaccccccgcctgcctgcccaaagcaccgggactggagcacggagacctacca

SEQ ID NO: 308119 - DNA, 120 bp, Artificial Sequence
  ENSG00000134107_3 (sequence is synthesized)
gggatgtaccctgcccacatgtaccaagtgtacaagtcaagacggggaataaagcggagcgaggacagcaaggagacctacaaattgccgcaccggctcatcgagaaaaagagacgtgac

SEQ ID NO: 308120 - DNA, 120 bp, Artificial Sequence
  ENSG00000134107_4 (sequence is synthesized)
cggattaacgagtgcatcgcccagctgaaggatctcctacccgaacatctcaaacttacaactttgggtcacttggaaaaagcagtggttcttgaacttaccttgaagcatgtgaaagca

SEQ ID NO: 308121 - DNA, 120 bp, Artificial Sequence
  ENSG00000134107_5 (sequence is synthesized)
ctaacaaacctaattgatcagcagcagcagaaaatcattgccctgcagagtggtttacaagctggtgagctgtcagggagaaatgtcgaaacaggtcaagagatgttctgctcaggtttc

SEQ ID NO: 308122 - DNA, 120 bp, Artificial Sequence
  ENSG00000134107_6 (sequence is synthesized)
cagacatgtgcccgggaggtgcttcagtatctggccaagcacgagaacactcgggacctgaagtcttcgcagcttgtcacccacctccaccgggtggtctcggagctgctgcagggtggt

SEQ ID NO: 308123 - DNA, 120 bp, Artificial Sequence
  ENSG00000134107_7 (sequence is synthesized)
acctccaggaagccatcagacccagctcccaaagtgatggacttcaaggaaaaacccagctctccggccaaaggttcggaaggtcctgggaaaaactgcgtgccagtcatccagcggact

SEQ ID NO: 308124 - DNA, 120 bp, Artificial Sequence
  ENSG00000134107_8 (sequence is synthesized)
ttcgctcactcgagtggggagcagagcggcagcgacacggacacagacagtggctatggaggagaatcggagaagggcgacttgcgcagtgagcagccgtgcttcaaaagtgaccacgga

SEQ ID NO: 308125 - DNA, 120 bp, Artificial Sequence
  ENSG00000134107_9 (sequence is synthesized)
cgcaggttcacgatgggagaaaggatcggcgcaattaagcaagagtccgaagaaccccccacaaaaaagaaccggatgcagctttcggatgatgaaggccatttcactagcagtgacctg

SEQ ID NO: 308126 - DNA, 120 bp, Artificial Sequence
  ENSG00000134107_10 (sequence is synthesized)
atcagctccccgttcctgggcccacacccacaccagcctcctttctgcctgcccttctacctgatcccaccttcagcgactgcctacctgcccatgctggagaagtgctggtatcccacc

SEQ ID NO: 308127 - DNA, 120 bp, Artificial Sequence
  ENSG00000134107_11 (sequence is synthesized)
tcagtgccagtgctatacccaggcctcaacgcctctgccgcagccctctctagcttcatgaacccagacaagatctcggctcccttgctcatgccccagagactcccttctcccttgcca

SEQ ID NO: 308128 - DNA, 120 bp, Artificial Sequence
  ENSG00000134107_12 (sequence is synthesized)
gctcatccgtccgtcgactcttctgtcttgctccaagctctgaagccaatcccccctttaaacttagaaaccaaagactaaactctctaggggatcctgctgctttgctttccttcctcg

SEQ ID NO: 308129 - DNA, 120 bp, Artificial Sequence
  ENSG00000134107_13 (sequence is synthesized)
ctacttcctaaaaagcaacaaaaaagtttttgtgaatgctgcaagattgttgcattgtgtatactgagataatctgaggcatggagagcagattcagggtgtgtgtgtgtgtgtgtgtgt

SEQ ID NO: 308130 - DNA, 120 bp, Artificial Sequence
  ENSG00000134107_14 (sequence is synthesized)
gcgtgttggtataggactttaaagctccttttggcatagggaagtcacgaaggattgcttgacatcaggagacttgggggggattgtagcagacgtctgggcttttccccacccagagaa

SEQ ID NO: 308131 - DNA, 120 bp, Artificial Sequence
  ENSG00000134107_15 (sequence is synthesized)
tagcccccttcgatacacatcagctggattttcaaaagcttcaaagtcttggtctgtgagtcactcttcagtttgggagctgggtctgtggctttgatcagaaggtactttcaaaagagg

SEQ ID NO: 308132 - DNA, 120 bp, Artificial Sequence
  ENSG00000134107_16 (sequence is synthesized)
gctttccagggctcagctcccaaccagctgttaggaccccacccttttgcctttattgtcgacgtgactcaccagacgtcggggagagagagcagtcagaccgagctttctgctaacatg

SEQ ID NO: 308133 - DNA, 120 bp, Artificial Sequence
  ENSG00000134107_17 (sequence is synthesized)
gggaggtagcaggcactggcatagcacggtagtggtttggggaggtttccgcaggtctgctccccacccctgcctcggaagaataaagagaatgtagttccctactcaggctttcgtagt

SEQ ID NO: 308134 - DNA, 120 bp, Artificial Sequence
  ENSG00000134107_18 (sequence is synthesized)
gattagcttactaaggaactgaaaatgggccccttgtacaagctgagctgccccggagggagggaggagttccctgggcttctggcacctgtttctaggcctaaccattagtacttactg

SEQ ID NO: 308135 - DNA, 120 bp, Artificial Sequence
  ENSG00000134107_19 (sequence is synthesized)
tgcagggaaccaaaccaaggtctgagaaatgcggacaccccgagcgagcaccccaaagtgcacaaagctgagtaaaaagctgcccccttcaaacagaactagactcagttttcaattcca

SEQ ID NO: 308136 - DNA, 120 bp, Artificial Sequence
  ENSG00000134107_20 (sequence is synthesized)
tcctaaaactccttttaaccaagcttagcttctcaaaggcctaaccaagccttggcaccgccagatcctttctgtaggctaattcctcttgcccaacggcatatggagtgtccttattgc

SEQ ID NO: 308137 - DNA, 120 bp, Artificial Sequence
  ENSG00000134107_21 (sequence is synthesized)
taaaaaggattccgtctccttcaaagaagttttatttttggtccagagtacttgttttcccgatgtgtccagccagctccgcagcagcttttcaaaatgcactatgcctgattgctgatc

SEQ ID NO: 308138 - DNA, 120 bp, Artificial Sequence
  ENSG00000134107_22 (sequence is synthesized)
gatcgtgttttaactttttcttttcctgtttttattttggtattaagtcgttgcctttatttgtaaagctgttataaatatatattatataaatatattaaaaaggaaaatgtttcagat

SEQ ID NO: 308139 - DNA, 120 bp, Artificial Sequence
  ENSG00000134107_23 (sequence is synthesized)
atttgtataattacttgattcacacagtgagaaaaaatgaatgtattcctgtttttgaagagaagaataattttttttttctctagggagaggtacagtgtttatattttggagccttcc

SEQ ID NO: 308140 - DNA, 120 bp, Artificial Sequence
  ENSG00000134107_24 (sequence is synthesized)
tgaaggtgtaaaattgtaaatatttttatctatgagtaaatgttaagtagttgttttaaaatacttaataaaataattcttttcctgtggaagagaaagatggtctcctgagttttttaa

SEQ ID NO: 308141 - DNA, 120 bp, Artificial Sequence
  ENSG00000134107_25 (sequence is synthesized)
aatagctcacttggtgtgatatggctgactcccatgtccttctttcttggctgaagcaaaccagttaatctcagtgtaatttcattcagcttttcatgtgctttgtattcaatcagaata

SEQ ID NO: 308142 - DNA, 120 bp, Artificial Sequence
  ENSG00000134107_26 (sequence is synthesized)
ctgagtttccaagaaaagttttctcgctttgaggttggcgaggggatgcagggtgtgggctcggtgcctcttctgagtgacttggaaaagaaagggcagacgatggttctgggtgctact

SEQ ID NO: 308143 - DNA, 120 bp, Artificial Sequence
  ENSG00000134107_27 (sequence is synthesized)
gccctgcagagtggtttacaagctggtgagtgctgattctggctatgctctctttaagagtttgagtgcaaatagagagcccgtgggctcaacatctgatgtaataaacattactgcaac

SEQ ID NO: 308144 - DNA, 120 bp, Artificial Sequence
  ENSG00000134108_0 (sequence is synthesized)
atatgatccgctcggcttcctgggtctggctgctgccgcccgccggtgtccgcccgtgtcgcgccggggcaccaaggagccgttggagggtccgggcggaggcccgctcgtgtggaagtc

SEQ ID NO: 308145 - DNA, 120 bp, Artificial Sequence
  ENSG00000134108_1 (sequence is synthesized)
gtcgacgccgccgctcgtccgtcctcccgtccgttctcgctcccggccgccatcatgctggcgctcatctcccgcctgctggactggttccgttcgctcttctggaaggaagagatggag

SEQ ID NO: 308146 - DNA, 120 bp, Artificial Sequence
  ENSG00000134108_2 (sequence is synthesized)
ctgacgctcgtggggctgcagtactcgggcaagaccaccttcgtcaatgtcatcgcgtcaggtcaattcagtgaagatatgatacccacagtgggcttcaacatgaggaaggtaactaaa

SEQ ID NO: 308147 - DNA, 120 bp, Artificial Sequence
  ENSG00000134108_3 (sequence is synthesized)
ggtaacgtcacaataaagatctgggacataggaggacaaccccgatttcgaagcatgtgggagcggtattgcagaggagtcaatgctattgtttacatgatagatgctgcagatcgtgaa

SEQ ID NO: 308148 - DNA, 120 bp, Artificial Sequence
  ENSG00000134108_4 (sequence is synthesized)
aagatagaagcttcccgaaatgagctacataatcttctagataaaccacagttacaaggaattccagtgctagtgcttggaaacaagagagatcttcctaatgccttggatgagaaacag

SEQ ID NO: 308149 - DNA, 120 bp, Artificial Sequence
  ENSG00000134108_5 (sequence is synthesized)
ctaattgaaaaaatgaatctgtctgctattcaggatagagaaatttgctgctattcaatttcttgcaaagaaaaggataatatagatatcacacttcagtggcttattcagcattcaaaa

SEQ ID NO: 308150 - DNA, 120 bp, Artificial Sequence
  ENSG00000134108_6 (sequence is synthesized)
tctagaagaagctgaagcatctcctgaagtcttccagtccttcttggctataatcctagaattattgtccgttcctctgaagtaattcccagaatacggtccttcctaaaccccagaaat

SEQ ID NO: 308151 - DNA, 120 bp, Artificial Sequence
  ENSG00000134108_7 (sequence is synthesized)
tgcctttttcagagtttatttctcatgtgcactgctgaagatgaatatccctaatccttcataaagaatcagctagagttgtcatgataaagtcagcacacacaaaaaggcttcttacac

SEQ ID NO: 308152 - DNA, 120 bp, Artificial Sequence
  ENSG00000134108_8 (sequence is synthesized)
atacctgtcttaaaccatgtgtagagctttaaaaacagaaaaaaaaccccatatacttatgaccatcttaaatcaagaaaattgcatatttccattctggtctttctgggccagattttt

SEQ ID NO: 308153 - DNA, 120 bp, Artificial Sequence
  ENSG00000134108_9 (sequence is synthesized)
atattggttttcagtaaatgtctatctataatatttcattatagagtccagtagcttaatactgacactgacttgatacagcatgaagtttctagtgccacacacagtatttagaaaacc

SEQ ID NO: 308154 - DNA, 120 bp, Artificial Sequence
  ENSG00000134108_10 (sequence is synthesized)
tttaggcgtgaatgactcatgtgggatatatgtaaacataatgtttattttatctcacaaatgcatgtgaaatgtataattacatcttaggaatccaaaatggtctgcagagagtgagcg

SEQ ID NO: 308155 - DNA, 120 bp, Artificial Sequence
  ENSG00000134108_11 (sequence is synthesized)
gaggcaccagatcaatgttggttctttgcactggtgagattctgcctgatgaatattaaagatatcctgctttctgagaactctatcaccagatggcagttgggatatgggaggaactaa

SEQ ID NO: 308156 - DNA, 120 bp, Artificial Sequence
  ENSG00000134108_12 (sequence is synthesized)
tcctggttcaggatacttttttaaggggttgagaattgaagattttccaaaagcgttcatgaatttagagcattccacccaatataataaaacctgttaagaatgtcagtctttgttcaa

SEQ ID NO: 308157 - DNA, 120 bp, Artificial Sequence
  ENSG00000134108_13 (sequence is synthesized)
acatctgtttgttctatctccagtcattaaatcagtgctgctgcatgacactcttaactcctgactttttatatccagtcataaagttgactttcagcacaaaagatacttataaacaaa

SEQ ID NO: 308158 - DNA, 120 bp, Artificial Sequence
  ENSG00000134108_14 (sequence is synthesized)
taaaaaatttttatttttctctcttactgatgtaagctttggcactcttttgactggtgccattagacatcttgattattgtgacaactctagacctgcctgctttatctaatgtaatca

SEQ ID NO: 308159 - DNA, 120 bp, Artificial Sequence
  ENSG00000134108_15 (sequence is synthesized)
tgctcaatgtctacaggttgtttaataatcagtcacacagagaactgaggaactgatgctgtttgtttgcttctatgatacagagatgtctaaaaacttcaaatggacatgttttgtagt

SEQ ID NO: 308160 - DNA, 120 bp, Artificial Sequence
  ENSG00000134108_16 (sequence is synthesized)
ttagcgacttccgtatacataaagggacatattaatactggttcatttgtaaattattattcatatagaccactgtagtagataaaactctatggtacacctgcttatgtgttgcctcac

SEQ ID NO: 308161 - DNA, 120 bp, Artificial Sequence
  ENSG00000134108_17 (sequence is synthesized)
actgtgtgtgattttgtttcttttgttaagcagcacttatgtagactgcatttccaaatgtgttgagcactcagagtgtagtcaacagtaagttcttttaatgaatatcagttttaattt

SEQ ID NO: 308162 - DNA, 120 bp, Artificial Sequence
  ENSG00000134108_18 (sequence is synthesized)
atagactgccatggccttaaaaatattctgtacaatatactgcactgtgttgcacagacactacttgcttttctccattcatatttttatgagtagaatctgggcttttaaatttctctt

SEQ ID NO: 308163 - DNA, 120 bp, Artificial Sequence
  ENSG00000134108_19 (sequence is synthesized)
cttattctttgaagcatgttgcatactaccctggtgggatggatggttctgtaaatgaagggatatttaaacttgctactgttgttcaacaccattaatggtcagtgtgaaccattacaa

SEQ ID NO: 308164 - DNA, 120 bp, Artificial Sequence
  ENSG00000134108_20 (sequence is synthesized)
agaatgtggcaacttgcttgtgcctaaaaggaggaattggaactagaatgtgtgactctgtggggactgcataggtttgttaattgacctatagctaaaccttaatgtgtttgtgtgtct

SEQ ID NO: 308165 - DNA, 120 bp, Artificial Sequence
  ENSG00000134108_21 (sequence is synthesized)
atacattgctttccgcatttcaagacatccagacgctattaccaacattttcctgtgcattaacctctgcatgtgaaaacttttaacagttactgaactatgtaaatatgtgaatttttt

SEQ ID NO: 308166 - DNA, 120 bp, Artificial Sequence
  ENSG00000134108_22 (sequence is synthesized)
tatttaggtggatgcattttttgtctgtttactgctcttctcagctttattcaataaacttgcattttaagggttgtattggcaattttaacttaaaatgtgcatcatgatggaaggtgc

SEQ ID NO: 308167 - DNA, 120 bp, Artificial Sequence
  ENSG00000134108_23 (sequence is synthesized)
agacttttttggaagtttccgagaggagggtctatagaccatttgtcagaaatcagatcagccctcaaagaatggggtctgtgggctagttaaaatagaaataaacttttaaaatatcca

SEQ ID NO: 308168 - DNA, 120 bp, Artificial Sequence
  ENSG00000134108_24 (sequence is synthesized)
ataggaatctgtctgctattcaggatagagaaatttgctgctattcaatttcttgcaaagaaaaggataatatagatatcacacttcagtggcttattcagcattcaaaatctagaagaa

SEQ ID NO: 308169 - DNA, 120 bp, Artificial Sequence
  ENSG00000134108_25 (sequence is synthesized)
ataaaggtaagttatttcttgccgtacgcaatttaaattgttagcacagacccctagaaatttttctgttaaatttctgtgtttttactgaaaatttgcagtttttcagtaatgaatgtg

SEQ ID NO: 308170 - DNA, 90 bp, Artificial Sequence
  ENSG00000134108_26 (sequence is synthesized)
gtttttttgttttttttttggaaacagagtttcgcgatctccactcactgcaacctctacctcccggttcaagtgattctcctgcctcag

SEQ ID NO: 308171 - DNA, 85 bp, Artificial Sequence
  ENSG00000134108_27 (sequence is synthesized)
cagtgtcgcgatctccactcactgcaacctctacctaatagctaagatgacaggcttgtgccaccacacccagctaattttttgt

SEQ ID NO: 308172 - DNA, 120 bp, Artificial Sequence
  ENSG00000134108_28 (sequence is synthesized)
cttgaaagccaaatgttctcattaagaagctgttagagtgcaataatgcattctaaatgcctgtcttagaagatatttcacaagttaatggattttttaagtttttcaaagatatatcag

SEQ ID NO: 308173 - DNA, 120 bp, Artificial Sequence
  ENSG00000134109_0 (sequence is synthesized)
aaaggggaagcgagccgggctacggggcgagcgcggggtgcggtggtcggcggggaggcccccgcgctttaaaataatgcccgcggcgcccgcgcgaccatgcaatggcgagcgctcgtc

SEQ ID NO: 308174 - DNA, 120 bp, Artificial Sequence
  ENSG00000134109_1 (sequence is synthesized)
ctggggctggtgctcctccggcttggcctccatggagtattgtggctcgtcttcgggctggggcccagcatgggcttctaccagcgctttccgctcagcttcggcttccagcgtctgagg

SEQ ID NO: 308175 - DNA, 120 bp, Artificial Sequence
  ENSG00000134109_2 (sequence is synthesized)
cgctttccgctcagcttcggcttccagcgtctgaggagccccgacggccccgcgtcgcccacctcggggcccgtgggccggcctgggggggtatccgggccgtcgtggctgcagccgccg

SEQ ID NO: 308176 - DNA, 120 bp, Artificial Sequence
  ENSG00000134109_3 (sequence is synthesized)
cggcgtcctgggccggggatgtgcggcccagccaactggggctacgtgctgggcggccggggccgcggcccggacgagtacgagaagcgctacagcggcgccttccctccgcagctgcgt

SEQ ID NO: 308177 - DNA, 120 bp, Artificial Sequence
  ENSG00000134109_4 (sequence is synthesized)
gcccagatgcgcgacctggcacggggcatgttcgtctttggctacgacaactacatggctcacgccttcccccaggacgagctcaaccccatccactgccgcggccgtgggcccgaccgc

SEQ ID NO: 308178 - DNA, 120 bp, Artificial Sequence
  ENSG00000134109_5 (sequence is synthesized)
ggggacccttcaaatctgaacatcaatgatgtactagggaactactcattgactcttgttgatgcattggatacacttgcaataatgggaaattcatccgagttccagaaagccgtcaag

SEQ ID NO: 308179 - DNA, 120 bp, Artificial Sequence
  ENSG00000134109_6 (sequence is synthesized)
ttagtgatcaacacagtttcatttgacaaagattccaccgtccaagtctttgaggccacgataagggtcctgggaagcctcctttctgctcacagaataataactgactccaagcagccc

SEQ ID NO: 308180 - DNA, 120 bp, Artificial Sequence
  ENSG00000134109_7 (sequence is synthesized)
tttggtgacatgacaattaaggactatgataatgagttgttatacatggcccatgacctggcggtgcggctcctccctgcttttgaaaacaccaagacagggattccatatcctcgggtg

SEQ ID NO: 308181 - DNA, 120 bp, Artificial Sequence
  ENSG00000134109_8 (sequence is synthesized)
aatctaaagacaggagttcctcctgacaccaataatgagacatgcacagcgggagccggttccctcctggtggaatttgggattctgagtcgactcctgggggactccacatttgagtgg

SEQ ID NO: 308182 - DNA, 120 bp, Artificial Sequence
  ENSG00000134109_9 (sequence is synthesized)
gtggccagacgagcagtgaaagccctttggaacctccggagcaatgatacaggattactaggcaatgtcgtgaacattcagacgggccactgggttggaaagcagagtggcctgggtgcc

SEQ ID NO: 308183 - DNA, 120 bp, Artificial Sequence
  ENSG00000134109_10 (sequence is synthesized)
gggctggactccttctatgaatacctcttgaaatcttacattctctttggagaaaaagaagacctagaaatgtttaatgctgcatatcagagtattcagaactacttaagaagagggcgg

SEQ ID NO: 308184 - DNA, 120 bp, Artificial Sequence
  ENSG00000134109_11 (sequence is synthesized)
gaagcctgcaatgaaggagaaggagaccctccactctatgtcaacgtgaacatgttcagtgggcagctgatgaacacctggattgactctctgcaggcctttttccctggactgcaggtg

SEQ ID NO: 308185 - DNA, 120 bp, Artificial Sequence
  ENSG00000134109_12 (sequence is synthesized)
ctgataggagatgtggaagatgccatctgccttcatgccttctactatgccatatggaaacgatatggtgccctccctgagagatataactggcagctgcaggcccctgacgttctcttc

SEQ ID NO: 308186 - DNA, 120 bp, Artificial Sequence
  ENSG00000134109_13 (sequence is synthesized)
tacccactgagaccagagttagtggaatccacatatctcctctaccaggcaaccaagaatcccttctacctccatgtaggaatggatattctgcagagtctggaaaagtacacaaaagtc

SEQ ID NO: 308187 - DNA, 120 bp, Artificial Sequence
  ENSG00000134109_14 (sequence is synthesized)
aagtgtgggtacgccacgctgcatcacgtcattgacaagtccacagaagaccggatggagagcttctttctcagtgagacctgtaaatatttgtatctgctgtttgatgaagacaatcca

SEQ ID NO: 308188 - DNA, 120 bp, Artificial Sequence
  ENSG00000134109_15 (sequence is synthesized)
gtacacaagtctggaaccagatacatgttcacaacagagggacacattgtatctgtggatgagcatcttcgggaattgccatggaaggaattcttctctgaagagggagggcaggaccaa

SEQ ID NO: 308189 - DNA, 120 bp, Artificial Sequence
  ENSG00000134109_16 (sequence is synthesized)
gggggaaagtctgtgcacaggccgaaacctcatgagttaaaagtcatcaactccagctccaactgcaatcgtgtacctgatgagaggaggtactccctgcccttaaagagcatctacatg

SEQ ID NO: 308190 - DNA, 120 bp, Artificial Sequence
  ENSG00000134109_17 (sequence is synthesized)
cgacagattgaccagatggttggtttgatttgatctgctctctgtgaggcctcatcttgaaccagaccttaacgaccaaacccagaccatgccaaagtccagtctgaaatgaaaggggac

SEQ ID NO: 308191 - DNA, 120 bp, Artificial Sequence
  ENSG00000134109_18 (sequence is synthesized)
agaagtcttgctgtccatggtggtgtaggaatttctgtgcaacacctcaccacgtctggttaatccttgcacacttcagtgtttctctcctgttcaataaaatgccctgttaaggatata

SEQ ID NO: 308192 - DNA, 120 bp, Artificial Sequence
  ENSG00000134109_19 (sequence is synthesized)
atttgaagtgagaagatacatggaaattgccctcttatgacatgttgatgttataagcacaatagatggggcatctttggattgatgttcacagctttatacttcagaacctaagtctct

SEQ ID NO: 308193 - DNA, 120 bp, Artificial Sequence
  ENSG00000134109_20 (sequence is synthesized)
tcactttgctggcacctgctatactggagtattgctatgtctttaaaaaattttttttattatattttatttttttgagacagggtcttgatatttttttgggacagggttacctgggct

SEQ ID NO: 308194 - DNA, 120 bp, Artificial Sequence
  ENSG00000134109_21 (sequence is synthesized)
agtagctgggattacaggtgagcaccactgtacctggctagctacttctttgttagaggattgagaatgaaatttctgcaaaagggcccatggttcatttggtatccctatttaattgca

SEQ ID NO: 308195 - DNA, 120 bp, Artificial Sequence
  ENSG00000134109_22 (sequence is synthesized)
gttcatttggtatccctatttaattgcattgaaaatgtcatcctttctgttgttagataattggggtcttcccctgatatccaaccgtgattttggatcacatgggagaaaaagtcatcc

SEQ ID NO: 308196 - DNA, 120 bp, Artificial Sequence
  ENSG00000134109_23 (sequence is synthesized)
agtttttcatgtttgcctcaagtaatctttacagtgttacaaattatttgcttaagaagaatggtcttaaccagaattcttaacagatagtctcttaggttattatgttatggtctaaga

SEQ ID NO: 308197 - DNA, 120 bp, Artificial Sequence
  ENSG00000134109_24 (sequence is synthesized)
ggttaactgacatcttttgggtggtattttgcattttgaatatgaacttacctgaggaactcccatagttccagaatcaggtgccttttagggagagaacaatacctaagattgtctgag

SEQ ID NO: 308198 - DNA, 120 bp, Artificial Sequence
  ENSG00000134109_25 (sequence is synthesized)
agaaagaaatgatcacatgacttttagcatccttgagccatttctctgtgtaatacaggctttagattagtgccttatattggttttggtttggggcactggatgtcgcagctactgcta

SEQ ID NO: 308199 - DNA, 120 bp, Artificial Sequence
  ENSG00000134109_26 (sequence is synthesized)
tggtttcaggaggcctgtttagccacatggtgagaccgtggtgaaagggggatggaaattgcttggccagtctttgcctttcatcctgtaaaagtaagcatgtagaaggaggaagttgtg

SEQ ID NO: 308200 - DNA, 120 bp, Artificial Sequence
  ENSG00000134109_27 (sequence is synthesized)
ctaaaatgcctttgtttttttgttattattttcttagccagaacatctctctttgaactcacactgatacacacctgctactcttacacagtgcagcagggttgactcttagtctggctt

SEQ ID NO: 308201 - DNA, 120 bp, Artificial Sequence
  ENSG00000134109_28 (sequence is synthesized)
ccatgaagcgtcatgggtggaaacgcattctagtaaaaaaggtaggaaatccctaaaacttccagcctcacatagcacggttctcacctgtcactgttttcccacctctaaggatttcat

SEQ ID NO: 308202 - DNA, 120 bp, Artificial Sequence
  ENSG00000134109_29 (sequence is synthesized)
gtacatcttttcaaagctagaaataagcactgtctaagtttatgttgcatttttagtcaaaagggagaaatcttattccttcttgaaaattttaagtgttatggttttatatagttcagt

SEQ ID NO: 308203 - DNA, 120 bp, Artificial Sequence
  ENSG00000134109_30 (sequence is synthesized)
tctttgagatttttgaaaagagtattttcagtaataaacgtgccatctctatctcttaaacatttattacaacaattgttttaaaatagaaaaaataaaatgcttctattttaccttttt

SEQ ID NO: 308204 - DNA, 120 bp, Artificial Sequence
  ENSG00000134109_31 (sequence is synthesized)
tcatttcagaagcattattctgtttattaacagtgtcccatctactgaatagaaaactttgagaataatatatatatatattttaaatgttttcactgactcattgaaaatgttaattac

SEQ ID NO: 308205 - DNA, 120 bp, Artificial Sequence
  ENSG00000134109_32 (sequence is synthesized)
acacacatgcatgcatgcacacacgagcatacttgtacctttgtctctgggcaaacaggtgggactgttagtgacccatttgggaaaatagagcatctcagagaaggaggtgagttcttc

SEQ ID NO: 308206 - DNA, 120 bp, Artificial Sequence
  ENSG00000134109_33 (sequence is synthesized)
ctgcctgtgatttctcttggcgctcccctcctctcccgctctggcttctgtggcggcagtggtgggtaagcactccagtgttctcttaatgaggcactttgcctgtcactcgagcaagcc

SEQ ID NO: 308207 - DNA, 120 bp, Artificial Sequence
  ENSG00000134109_34 (sequence is synthesized)
tgggtgttccttcctcctcatgctcctggaatagggaatagggatctcatgcttgcaaactacacaatgctgcaggtgcttcccaggggccacaggctgtcaggaaacgtgttttatgtt

SEQ ID NO: 308208 - DNA, 120 bp, Artificial Sequence
  ENSG00000134109_35 (sequence is synthesized)
aagtcacaaacccacttgacttctgggtactggaattaataccagtgggtgagactgagggtgagtgagttagtacatattaatcctggttgttgagcttccagactaccccgtccaaag

SEQ ID NO: 308209 - DNA, 120 bp, Artificial Sequence
  ENSG00000134109_36 (sequence is synthesized)
tttgatgctatgtagtcagtggtttgtggggctggatgccagaaggttctttgagccagtttcaaaggttacttgttttttttttttttttttaaagtcagaatgttaacagctgtgata

SEQ ID NO: 308210 - DNA, 120 bp, Artificial Sequence
  ENSG00000134109_37 (sequence is synthesized)
tatcctgcagggcttttgcagtttcttctgttctgtgttctgaaatactgggtagagaatggctgaggaggagattaccagagaagttgctttgctcagtgctttgccccaggattgcct

SEQ ID NO: 308211 - DNA, 120 bp, Artificial Sequence
  ENSG00000134109_38 (sequence is synthesized)
caaatctgagtggacttcatcctttgcggcggctctgagcctggcccatcttcctattcccacgtgtagctagtgtctagtgtcagctttgctcagtgtggtggaaacattttgcagaac

SEQ ID NO: 308212 - DNA, 120 bp, Artificial Sequence
  ENSG00000134109_39 (sequence is synthesized)
tgttgtagaaagctgccttatagttggcttgacaaagcataattctctcataacaaactttcaaatcattacagtagcttagctactttagttgatgtgaccgaggaatcccttctagaa

SEQ ID NO: 308213 - DNA, 120 bp, Artificial Sequence
  ENSG00000134109_40 (sequence is synthesized)
tcataggtggcaagggagggtttgctagctctccatttgcactggccattgtgaaaaaccagcttctgtattcaaatctttccttcatttttttaaattttttttttggcagcgcttgtg

SEQ ID NO: 308214 - DNA, 120 bp, Artificial Sequence
  ENSG00000134109_41 (sequence is synthesized)
ctggaacttactcattgtaactgaatcctcagggcttttcttgttttagatcatggactgtgcacgtgacacttaaataattttctatgtatttaaagaaaaatgcaccaggatggtgtc

SEQ ID NO: 308215 - DNA, 120 bp, Artificial Sequence
  ENSG00000134109_42 (sequence is synthesized)
tgtgcacgtgactattagaggagcgtctgtagaagtacctggtttggtcagtgcagttgtgcaatctgagggccttgtttcctcctcccctttccccttctccccaccaaaggaaaatat

SEQ ID NO: 308216 - DNA, 120 bp, Artificial Sequence
  ENSG00000134109_43 (sequence is synthesized)
ccctcttaatgatttcgtagttcagtttactgaatgattaccacctgtaattcctctttggattgtgtagactcaacatgagacattcctttctgctttctggagggcaccaggggcctt

SEQ ID NO: 308217 - DNA, 120 bp, Artificial Sequence
  ENSG00000134109_44 (sequence is synthesized)
tctctttgataaattttttttgtctgttgacaaaaacaaaaatcttttttcaaatgtagtgctggtgaaaaggtagggctgagtgattaccttagccacagggtggctgagcaggaactt

SEQ ID NO: 308218 - DNA, 120 bp, Artificial Sequence
  ENSG00000134109_45 (sequence is synthesized)
tagaagaaaatcctgagctttcctgtccattcccagcatccagctcctattctagtgcctcttccctgcagggcagggaccccttgggaaatcgaggaggtgggacgggctgggccctgt

SEQ ID NO: 308219 - DNA, 120 bp, Artificial Sequence
  ENSG00000134109_46 (sequence is synthesized)
gtcccaggtttcacagggctcagggttatgctcccgcttgaatctggacgtgaatctggtaaaaatatcaagtacctgtggaactccctgattctataccctcttccttctttctgcaag

SEQ ID NO: 308220 - DNA, 120 bp, Artificial Sequence
  ENSG00000134109_47 (sequence is synthesized)
gcagaggaataatatttttaaaggttattttgttttagttttaaatagcaaaacacaagctgcatttttatttattttgcataagaaaggtaaatctttttacaaaaaaaagtatagagt

SEQ ID NO: 308221 - DNA, 120 bp, Artificial Sequence
  ENSG00000134109_48 (sequence is synthesized)
tggaaactctgggaaaacttacggaaatacacaaatgcttctctgtaatgtgcaatatgctttgcaactgtagatgatattttatgtttaatctgtaaataagaaatgtatttaaattaa

SEQ ID NO: 308222 - DNA, 120 bp, Artificial Sequence
  ENSG00000134109_49 (sequence is synthesized)
aagggatctttttgtaaaaggaccaaatgttcttttataaatgtaataaggaatatcttgctctttaaaatttattaggatttttatgagtaatttttattaaaagatttctttttttga

SEQ ID NO: 308223 - DNA, 120 bp, Artificial Sequence
  ENSG00000134109_50 (sequence is synthesized)
tctgacaggtacttactggctaaagctatgtgctggacattgtgcattcccaggatgcaaacgctgtcagaaccaaaggatattactatcttctttcatggtttccaaccttgttgaaaa

SEQ ID NO: 308224 - DNA, 120 bp, Artificial Sequence
  ENSG00000134109_51 (sequence is synthesized)
agccttttcaaaattctaggaaaccgatgagtttttcttgcttaaccatagcgtttatacgtataagtgtattttctatctcaatttttttgagaaaaaatattaaattttgaaaaaaaa

SEQ ID NO: 308225 - DNA, 120 bp, Artificial Sequence
  ENSG00000134115_0 (sequence is synthesized)
aagagagattttctgatgacccgacaggagtgactatctccagtcaaagaaagaggagggtgaatttaatctttcatggccctggaatggcagctgctctcagctctctctgattctgtg

SEQ ID NO: 308226 - DNA, 120 bp, Artificial Sequence
  ENSG00000134115_1 (sequence is synthesized)
aaggttgatgaagatagagctggctttcaatgtagaaagaattttccttttgaatattccaaacgagagctttgcacatgtgcctcaagaactgattgtctggctccgacaggaatgcag

SEQ ID NO: 308227 - DNA, 120 bp, Artificial Sequence
  ENSG00000134115_2 (sequence is synthesized)
caggagaggagcgtatttcatgcttaagaccagagaagagccacgcaatactcagtggataaaaggcttgcagtcccagctgggaaaaagagtcccattatctcccagctgcatagacat

SEQ ID NO: 308228 - DNA, 120 bp, Artificial Sequence
  ENSG00000134115_3 (sequence is synthesized)
tccatacggcttggttctgcctggacgcacagcatgcctggctgagagcttgaaacagagttctgcagaaaaactgtaaagatcccgagacatttccctggtaagatctactcttgagat

SEQ ID NO: 308229 - DNA, 120 bp, Artificial Sequence
  ENSG00000134115_4 (sequence is synthesized)
actgactggaagatagactgttttgttccacctgattgtatgggagaaatttttgaccttagaaagtggaaatgaggttgctatggaaactggtaattctgctgccactcataaactctt

SEQ ID NO: 308230 - DNA, 120 bp, Artificial Sequence
  ENSG00000134115_5 (sequence is synthesized)
ctgcaggtgatggtcttttaagccgtcctatttttactcaggagccacatgatgtcatttttcctttggatttatcaaaatctgaggtcatcctgaattgtgctgctaatggttaccctt

SEQ ID NO: 308231 - DNA, 120 bp, Artificial Sequence
  ENSG00000134115_6 (sequence is synthesized)
cgcctcattataggtggaagcaaaatggcacagacattgattttactatgagttatcactacaggttggatggaggcagtcttgcaatcaatagcccccacacagatcaagatattggca

SEQ ID NO: 308232 - DNA, 120 bp, Artificial Sequence
  ENSG00000134115_7 (sequence is synthesized)
tgtaccagtgcctggccaccaatcttctggggacaattctgagtcggaaggcaaagctccaatttgcatatattgaagactttgaaactaaaacaagaagcacagtatctgtccgagaag

SEQ ID NO: 308233 - DNA, 120 bp, Artificial Sequence
  ENSG00000134115_8 (sequence is synthesized)
gtcaaggtgtggtgcttctctgtggcccaccgccacattttggagatttatcttatgcatggaccttcaatgataaccccttatacgtccaagaggacaataggcgatttgtatctcaag

SEQ ID NO: 308234 - DNA, 120 bp, Artificial Sequence
  ENSG00000134115_9 (sequence is synthesized)
agacgggaaacttgtacattgccaaagtggaaccatcagatgtgggcaactacacttgctttataactaacaaagaggcccagagaagtgttcaaggtccacccactccattagtgcagc

SEQ ID NO: 308235 - DNA, 120 bp, Artificial Sequence
  ENSG00000134115_10 (sequence is synthesized)
gcactgatggtgtgatgggggaatatgaaccaaagattgaagtgcgttttcctgaaactatacaagctgcaaaggattcatctgtaaaactggaatgttttgcccttggaaatccagtcc

SEQ ID NO: 308236 - DNA, 120 bp, Artificial Sequence
  ENSG00000134115_11 (sequence is synthesized)
ccgatattagttggagaaggttggacgggagcccgttgccagggaaagtcaagtacagcaaatcccaagctatccttgaaatcccgaacttccaacaagaagatgaaggcttttatgagt

SEQ ID NO: 308237 - DNA, 120 bp, Artificial Sequence
  ENSG00000134115_12 (sequence is synthesized)
gcattgcaagcaaccttcgaggaagaaaccttgcaaagggtcaactcattttttatgctcctccagaatgggaacagaaaatccaaaatacacacctctctatctatgacaacttgctct

SEQ ID NO: 308238 - DNA, 120 bp, Artificial Sequence
  ENSG00000134115_13 (sequence is synthesized)
gggaatgtaaagctagtggaaagccaaacccttggtatacatggttaaaaaatggtgaacgactcaacccagaggagagaattcaaatagaaaatgggacactcatcataacgatgctga

SEQ ID NO: 308239 - DNA, 120 bp, Artificial Sequence
  ENSG00000134115_14 (sequence is synthesized)
atgtgtcagattctggtgtgtaccaatgtgctgcagaaaacaaatatcagataatttatgcaaatgctgaattgagagttttagcctcagctccagatttctccaaaagtccagttaaaa

SEQ ID NO: 308240 - DNA, 120 bp, Artificial Sequence
  ENSG00000134115_15 (sequence is synthesized)
gacccttagacaaagcaaaagaatatttctcttggaggatggcagcctcaagatatataatattaccaggtcagatgctggatcatatacatgcatagccacaaatcagtttggcactgc

SEQ ID NO: 308241 - DNA, 120 bp, Artificial Sequence
  ENSG00000134115_16 (sequence is synthesized)
aaagaacactggcagcctcattgtaaaagagagaactgtcattaccgtcccaccttccaaaatggatgttacagttggcgagagtatagtgctaccatgccaggtgtcccatgacccctc

SEQ ID NO: 308242 - DNA, 120 bp, Artificial Sequence
  ENSG00000134115_17 (sequence is synthesized)
cattgaagtggtatttgtatggtttttcaatggagatgtcatagacttaaaaaaaggagtggctcattttgaaaggattggaggagaatctgttggggatttgatgataaggaatattca

SEQ ID NO: 308243 - DNA, 120 bp, Artificial Sequence
  ENSG00000134115_18 (sequence is synthesized)
gttacatcattcaggaaaatatctctgcacagtacaaacaaccctagaaagtttatctgcagtagccgatatcattgttagaggtccaccaggtcctcctgaggatgtgcaagtggaaga

SEQ ID NO: 308244 - DNA, 120 bp, Artificial Sequence
  ENSG00000134115_19 (sequence is synthesized)
catttccagtactacttctcaactaagttggagagcaggcccagataataacagtcccattcaaatatttactattcagactcggacaccattttctgtgggttggcaggctgttgctac

SEQ ID NO: 308245 - DNA, 120 bp, Artificial Sequence
  ENSG00000134115_20 (sequence is synthesized)
agttccagaaattctcaatggtaagacatacaatgcaacagtggttggtttgagtccttgggtggaatatgaatttcgtgttgttgccggcaacagcattgggattggagaaccaagtga

SEQ ID NO: 308246 - DNA, 120 bp, Artificial Sequence
  ENSG00000134115_21 (sequence is synthesized)
accatcagaattgttaagaactaaagcatcagtccctgttgtggcaccagtaaacatccatggaggtggaggaagtcggtctgaactcgtcattacgtgggagtcaattccagaagaact

SEQ ID NO: 308247 - DNA, 120 bp, Artificial Sequence
  ENSG00000134115_22 (sequence is synthesized)
gcagaatggggagggatttggatatatcatcatgttccggccagtgggctcgacaacctggtccaaggagaaagtgtcatctgtggaatcatcaaggtttgtctacagaaatgaaagcat

SEQ ID NO: 308248 - DNA, 120 bp, Artificial Sequence
  ENSG00000134115_23 (sequence is synthesized)
catcccactgtctccctttgaagtcaaagtgggtgtgtataataatgaaggagaaggatccctgagtactgtgaccattgtctactctggggaagatgaacctcaactggccccaagggg

SEQ ID NO: 308249 - DNA, 120 bp, Artificial Sequence
  ENSG00000134115_24 (sequence is synthesized)
aacttctctccagagtttttctgcttctgaaatggaggtttcatggaatgctattgcctggaatagaaacactggaagagtgctgggctatgaggtcttatactggacagatgactccaa

SEQ ID NO: 308250 - DNA, 120 bp, Artificial Sequence
  ENSG00000134115_25 (sequence is synthesized)
agaatccatgataggtaaaattagagtcagtggaaatgtcacaaccaaaaacatcacggggctgaaagctaataccatctactttgcttccgtaagagcttacaacactgctgggacagg

SEQ ID NO: 308251 - DNA, 120 bp, Artificial Sequence
  ENSG00000134115_26 (sequence is synthesized)
gccctcaagccccccagtcaatgttaccaccaaaaagtctcctccaagccaaccaccagcaaacattgcctggaagctgacaaactctaaattatgcttgaactgggagcatgtaaaaac

SEQ ID NO: 308252 - DNA, 120 bp, Artificial Sequence
  ENSG00000134115_27 (sequence is synthesized)
catggaaaatgagtctgaagttttggggtacaagattctgtaccggcaaaacagacagagtaaaactcatattttggaaacaaacaatacatcagctgagcttctggttccatttgaaga

SEQ ID NO: 308253 - DNA, 120 bp, Artificial Sequence
  ENSG00000134115_28 (sequence is synthesized)
agactacttaattgaaataagaacagtcagtgatggtggagatggaagcagcagtgaggaaattaggattccaaaaatgtcaagtttgagttccagaggaattcaattcttagaacctag

SEQ ID NO: 308254 - DNA, 120 bp, Artificial Sequence
  ENSG00000134115_29 (sequence is synthesized)
cacccattttctttccattgtcattgtgatttttcactgttttgctattcagccacttatctgatgaataaaaccataaatctttgagagttttttgaaagcaaatcattctgtatatat

SEQ ID NO: 308255 - DNA, 120 bp, Artificial Sequence
  ENSG00000134115_30 (sequence is synthesized)
gctctccagcctctgacacaagatgcgttcttaatacagacttgtttgcaaagaaaaaaaaaagtatattattaaaatcctgtaaatatctatggtatattaataaaacaattttaaaca

SEQ ID NO: 308256 - DNA, 120 bp, Artificial Sequence
  ENSG00000134115_31 (sequence is synthesized)
atgattacatgaattcctaggtgccacattaacctggggagttgtaactgctgtgtcttttaagttacttatatggagaaaataaataactcccctcaatgatgctgatgatgaatacaa

SEQ ID NO: 308257 - DNA, 120 bp, Artificial Sequence
  ENSG00000134115_32 (sequence is synthesized)
acttggctcctagttaccataactcacatgtacatttttatgtattccagacaatcacttcagtatttaaaatttccaccctacttcaaaataaaatacaattatttgtttatagttggg

SEQ ID NO: 308258 - DNA, 120 bp, Artificial Sequence
  ENSG00000134115_33 (sequence is synthesized)
attctttaaaaatacaaactattccaaagcatggggtgcttttatctctgaatcaagttggaataagaaatctttttactcaagaatatttcaatatacatgatgttcttctcagcccac

SEQ ID NO: 308259 - DNA, 120 bp, Artificial Sequence
  ENSG00000134115_34 (sequence is synthesized)
ttttcagaagattcagtcacaataaaggcagaaaaagtattttatggcaaagaaaaataaatgatgggaaatgagcacccacctaaaataatcttctaacaactctggtatatattaagc

SEQ ID NO: 308260 - DNA, 120 bp, Artificial Sequence
  ENSG00000134115_35 (sequence is synthesized)
aattgctcatggcaaagttgaacatttgaactgctgcatgaacaaatctcaggtaattatgacaagttgattgcaatgtatgtggccttatttttataataaaacaatgtggaaacagaa

SEQ ID NO: 308261 - DNA, 120 bp, Artificial Sequence
  ENSG00000134115_36 (sequence is synthesized)
tgatgataccctgaggatgacatgtgaggccaagagggagtgaagcctcatccccactttgtgcttctttattaaccagactcttgagatactgactggaagatagactgttttgttcca

SEQ ID NO: 308262 - DNA, 120 bp, Artificial Sequence
  ENSG00000134115_37 (sequence is synthesized)
tttttgttttcctggttgcattaatttttttttattaaaaacctttttgttattcatatattgctctaaggtaaattaccaagtagatttcaaatgctgggcaacagtggaactttctga

SEQ ID NO: 308263 - DNA, 120 bp, Artificial Sequence
  ENSG00000134115_38 (sequence is synthesized)
tttgaatttaaacaaacatgtctaatactgagacaatgaccaggcctgtaactgaaaatgatcagggctgcaattcttccctacaggtgctgatatttccttagtttaagcataatgaga

SEQ ID NO: 308264 - DNA, 120 bp, Artificial Sequence
  ENSG00000134115_39 (sequence is synthesized)
cccatttaggcagcacattgcaagggaataagtgcactcgtataagatgatgggcaagtcactaaaccttccacatatccttcactccatcttgtcctacatccagaaatacattgcctg

SEQ ID NO: 308265 - DNA, 120 bp, Artificial Sequence
  ENSG00000134115_40 (sequence is synthesized)
aattaatatatttcaaatgacactgaagacattttagctccttctatgcaaatcatcgaagacttattttttcttttcatgttgatgcatcatactttgaccatgagctaattaacattc

SEQ ID NO: 308266 - DNA, 120 bp, Artificial Sequence
  ENSG00000134115_41 (sequence is synthesized)
ttccagttatggcttaaatgttgggtgataagataaattttcaattgtgagcaaaaggtgatgagccatttttttaagttattctccaaaattataacatacactataaatggttttatg

SEQ ID NO: 308267 - DNA, 120 bp, Artificial Sequence
  ENSG00000134115_42 (sequence is synthesized)
cttcctcatttgaaaaccaaaaagagaacaggaaaaaaaatctttgtgtcattagagcataattgtatcactcattctattatcacaaaaatcagaaagatttttcatagattctttcgg

SEQ ID NO: 308268 - DNA, 120 bp, Artificial Sequence
  ENSG00000134121_0 (sequence is synthesized)
gcagaacccaggaagggagcagaggcgagagccagcctccggcaggagggcgtagaccccggtgccagccagaacggctccagccttcccgcggccagagagccagcggcgggaggggac

SEQ ID NO: 308269 - DNA, 120 bp, Artificial Sequence
  ENSG00000134121_1 (sequence is synthesized)
agagagccagcggcgggaggggacgggcgggacctccgcggacagccccgggtgcggaccagcgggcagcggccggcgagaccctccctggatccgcccagagcttaccggaccctgcgc

SEQ ID NO: 308270 - DNA, 120 bp, Artificial Sequence
  ENSG00000134121_2 (sequence is synthesized)
ctcgggggagaaggcgcccgaggggaggcgccggacagatcgcgtttcggaggcggcgcaggtgctgtaaactgcaaaccataatcctgtcttaatactgcaaacaaatcatagtggaac

SEQ ID NO: 308271 - DNA, 120 bp, Artificial Sequence
  ENSG00000134121_3 (sequence is synthesized)
taaggggaacttaatttactgtttccaggttaactaaggtctcagctgtaaaccaaaagtgagaggagacattaagattttcattcttaccgggttgtcttcttcctgaagagcaatgga

SEQ ID NO: 308272 - DNA, 120 bp, Artificial Sequence
  ENSG00000134121_4 (sequence is synthesized)
gccgcttttacttggaagaggactaatcgtatatctaatgttcctcctgttaaaattctcaaaagcaattgaaataccatcttcagttcaacaggttccaacaatcataaaacagtcaaa

SEQ ID NO: 308273 - DNA, 120 bp, Artificial Sequence
  ENSG00000134121_5 (sequence is synthesized)
agtccaagttgcctttcccttcgatgagtattttcaaattgaatgtgaagctaaaggaaatccagaaccaacattttcgtggactaaggatggcaaccctttttatttcactgaccatcg

SEQ ID NO: 308274 - DNA, 120 bp, Artificial Sequence
  ENSG00000134121_6 (sequence is synthesized)
gataattccatcgaacaattcaggaacattcaggatcccaaacgaggggcacatatctcactttcaagggaaataccgctgctttgcttcaaataaactgggaatcgctatgtcagaaga

SEQ ID NO: 308275 - DNA, 120 bp, Artificial Sequence
  ENSG00000134121_7 (sequence is synthesized)
aatagaatttatagttccaagtgttccaaaattcccaaaagaaaaaattgaccctcttgaagtggaggagggagatccaattgtcctcccatgcaatcctcccaaaggcctcccaccttt

SEQ ID NO: 308276 - DNA, 120 bp, Artificial Sequence
  ENSG00000134121_8 (sequence is synthesized)
acacatttattggatgaatattgaattagaacacatcgaacaagatgaaagagtatacatgagccaaaagggagatctatacttcgcaaacgtggaagaaaaggacagtcgcaatgacta

SEQ ID NO: 308277 - DNA, 120 bp, Artificial Sequence
  ENSG00000134121_9 (sequence is synthesized)
ctgttgctttgctgcatttccaagattaaggactattgtacagaaaatgccaatgaaactaacagttaacagtttaaagcatgctaatgactcaagttcatccacagaaattggttccaa

SEQ ID NO: 308278 - DNA, 120 bp, Artificial Sequence
  ENSG00000134121_10 (sequence is synthesized)
ggcaaattccatcaagcaaagaaaacccaaactgctgttgcctcccactgagagtggcagtgagtcttcaattaccatcctcaaaggggaaatcttgctgcttgagtgttttgctgaagg

SEQ ID NO: 308279 - DNA, 120 bp, Artificial Sequence
  ENSG00000134121_11 (sequence is synthesized)
cttgccaactccacaggttgattggaacaaaattggtggtgacttaccaaaggggagagaaacaaaagaaaattatggcaagactttgaagatagagaatgtctcctaccaggacaaagg

SEQ ID NO: 308280 - DNA, 120 bp, Artificial Sequence
  ENSG00000134121_12 (sequence is synthesized)
aaattatcgctgcacagccagcaatttcttgggaacagccactcacgattttcacgttatagtagaagagcctcctcgctggacaaagaagcctcagagtgctgtgtatagcaccggaag

SEQ ID NO: 308281 - DNA, 120 bp, Artificial Sequence
  ENSG00000134121_13 (sequence is synthesized)
caatggcatcttgttatgtgaggctgaaggagaacctcaacccacaatcaagtggagagtcaatggctccccagttgacaatcatccatttgctggtgatgttgtcttccccagggaaat

SEQ ID NO: 308282 - DNA, 120 bp, Artificial Sequence
  ENSG00000134121_14 (sequence is synthesized)
cagttttaccaaccttcaaccaaatcatactgctgtgtaccagtgtgaagcctcaaatgtccatggaactatccttgccaatgccaatattgatgttgtggatgtccgtccattgataca

SEQ ID NO: 308283 - DNA, 120 bp, Artificial Sequence
  ENSG00000134121_15 (sequence is synthesized)
aaccaaagatggagaaaattacgctacagtggttgggtacagtgctttcttacattgcgagttctttgcttcacctgaggcagtcgtgtcctggcagaaggtggaagaagtgaaacccct

SEQ ID NO: 308284 - DNA, 120 bp, Artificial Sequence
  ENSG00000134121_16 (sequence is synthesized)
ggagggcaggcggtatcatatctatgaaaatggcacattgcagatcaacagaaccaccgaagaagatgctgggtcttactcatgttgggtagaaaatgctataggaaaaactgcagtcac

SEQ ID NO: 308285 - DNA, 120 bp, Artificial Sequence
  ENSG00000134121_17 (sequence is synthesized)
agccaatttggatattagaaatgctacaaaacttagagtttctcctaagaatcctcgtatccccaaattgcatatgcttgaattacattgtgaaagcaaatgtgactcacatttgaaaca

SEQ ID NO: 308286 - DNA, 120 bp, Artificial Sequence
  ENSG00000134121_18 (sequence is synthesized)
cagtttgaagttgtcctggagtaaagatggagaagcctttgaaattaatggcacagaagatggcaggataattattgatggagctaatttgaccatatctaatgtaactttagaggacca

SEQ ID NO: 308287 - DNA, 120 bp, Artificial Sequence
  ENSG00000134121_19 (sequence is synthesized)
aggtatttactgctgttcagctcatactgctctagacagtgctgccgatataactcaagtaactgttcttgatgttccggatccaccagaaaaccttcacttgtctgaaagacagaacag

SEQ ID NO: 308288 - DNA, 120 bp, Artificial Sequence
  ENSG00000134121_20 (sequence is synthesized)
gagtgttcggctgacctgggaagctggagctgaccacaacagcaatattagcgagtatattgttgaatttgaaggaaacaaagaagagcctggaaggtgggaggaactgaccagagtcca

SEQ ID NO: 308289 - DNA, 120 bp, Artificial Sequence
  ENSG00000134121_21 (sequence is synthesized)
aggaaagaaaaccacagttatcttacctttggctccatttgtgagataccagttcagggtcatagccgtgaacgaagtagggagaagtcagcctagccagccgtcagaccatcatgaaac

SEQ ID NO: 308290 - DNA, 120 bp, Artificial Sequence
  ENSG00000134121_22 (sequence is synthesized)
accaccagcagctccagataggaatccacaaaacataagggttcaagcctctcaacccaaggaaatgattataaagtgggagcctttgaaatccatggagcagaatggaccaggcctaga

SEQ ID NO: 308291 - DNA, 120 bp, Artificial Sequence
  ENSG00000134121_23 (sequence is synthesized)
gtacagagtgacctggaagccacagggagccccagtggagtgggaagaagaaacagtcacaaaccacacattgcgggtgatgacgcctgctgtctatgccccttatgatgtcaaggtcca

SEQ ID NO: 308292 - DNA, 120 bp, Artificial Sequence
  ENSG00000134121_24 (sequence is synthesized)
ggctatcaatcaactaggatctgggcctgaccctcagtcagtgactctctattctggagaagactatcctgatacagctccagtgatccatggggtggacgttataaacagtacattagt

SEQ ID NO: 308293 - DNA, 120 bp, Artificial Sequence
  ENSG00000134121_25 (sequence is synthesized)
taaagttacctggtcaacagttccaaaggacagagtacatggacgtctgaaaggctatcagataaattggtggaaaacaaaaagtctgttggatggaagaacacatcccaaagaagtgaa

SEQ ID NO: 308294 - DNA, 120 bp, Artificial Sequence
  ENSG00000134121_26 (sequence is synthesized)
cattctaagattttcaggacaaagaaactctggaatggttccttccttagatgcctttagtgaatttcatttaacagtcttagcctataactctaaaggagctggtcctgaaagtgagcc

SEQ ID NO: 308295 - DNA, 120 bp, Artificial Sequence
  ENSG00000134121_27 (sequence is synthesized)
ttatatatttcaaacaccagaaggagtacctgaacagccaacttttctaaaggtcatcaaagttgataaagacactgccactttatcttggggactacctaagaaattaaatggaaactt

SEQ ID NO: 308296 - DNA, 120 bp, Artificial Sequence
  ENSG00000134121_28 (sequence is synthesized)
aactggctatcttttgcaatatcagataataaatgacacctacgagattggagaattaaatgatattaacattacaactccatcaaagcccagctggcacctctcaaacctgaatgcaac

SEQ ID NO: 308297 - DNA, 120 bp, Artificial Sequence
  ENSG00000134121_29 (sequence is synthesized)
taccaagtacaaattctacttgagggcttgcacttcacagggctgtggaaaaccgatcacggaggaaagctccaccttaggagaagggagtaaaggtatcgggaagatatcaggagtaaa

SEQ ID NO: 308298 - DNA, 120 bp, Artificial Sequence
  ENSG00000134121_30 (sequence is synthesized)
tcttactcaaaagactcacccaatagaggtatttgagccgggagctgaacatatagttcgcctaatgactaagaattggggcgataatgatagcatttttcaagatgtaattgagacaag

SEQ ID NO: 308299 - DNA, 120 bp, Artificial Sequence
  ENSG00000134121_31 (sequence is synthesized)
agggagagaatatgctggtttatatgatgacatctccactcaaggctggtttattggactgatgtgtgcgattgctcttctcacactactattattaactgtttgctttgtgaagaggaa

SEQ ID NO: 308300 - DNA, 120 bp, Artificial Sequence
  ENSG00000134121_32 (sequence is synthesized)
ttcagtcagtaaaagatgaaacctttggtgaatacagtgacagtgatgaaaagcctctcaaaggaagccttcggtcccttaatagggatatgcagcctactgaaagtgctgacagcttag

SEQ ID NO: 308301 - DNA, 120 bp, Artificial Sequence
  ENSG00000134121_33 (sequence is synthesized)
tcgaatacggagagggagaccatggtctcttcagtgaagatggatcatttattggtgcctacgctggatctaaggagaagggatctgttgaaagcaatggaagttctacagcaacttttc

SEQ ID NO: 308302 - DNA, 120 bp, Artificial Sequence
  ENSG00000134121_34 (sequence is synthesized)
cccttcgggcataaacacaacatatgtaagcaacgctactggttcaccccaaccttccatatttatctgttcaaaggagcaagaactttcatataggaatagaaacatgctggccgaaga

SEQ ID NO: 308303 - DNA, 120 bp, Artificial Sequence
  ENSG00000134121_35 (sequence is synthesized)
tttcatccagaagtcaacatcctgcaattatgttgaaaagagtagtactttcttcaaaatataaaatgccaagcacttcaggcctatgttttgcttatattgttttcaggtgctcaaaat

SEQ ID NO: 308304 - DNA, 120 bp, Artificial Sequence
  ENSG00000134121_36 (sequence is synthesized)
gcaaaacacaaaacaaatcctgcatttagatacacctcaactaaatccaaagtccccattcagtatattccatatttgcctgattttactattcggtgtgtttgcatagatgttgctact

SEQ ID NO: 308305 - DNA, 120 bp, Artificial Sequence
  ENSG00000134121_37 (sequence is synthesized)
tggtgggtttttctccgtatgcacattggtatacagtctctgagaactggcttggtgactttgcttcactacaggttaaaagaccataagcaaactggttatttaaaatgtaaaaaggaa

SEQ ID NO: 308306 - DNA, 120 bp, Artificial Sequence
  ENSG00000134121_38 (sequence is synthesized)
tatgaaagtcttattaaaacacttcattgaaaatatacagtctaaatttattatttaaattttactagcaaaagtcttaggtgaacaatcaactagtatttgttgagctcctatttgccc

SEQ ID NO: 308307 - DNA, 120 bp, Artificial Sequence
  ENSG00000134121_39 (sequence is synthesized)
agagatggtcatatttaaacagaagtatacgtttttcagtttcaacatgaatttttttatttctgtcagttatgacatccacaagcatcactttttgtgtctgttttttttttttttctt

SEQ ID NO: 308308 - DNA, 120 bp, Artificial Sequence
  ENSG00000134121_40 (sequence is synthesized)
ggactaaattcaactgcatggaagcggtggtcagaaggttgttttatacgagaacaggcagaaagtgcccattgttcaggattctaatagctacatctacttaatatcttcatttctaaa

SEQ ID NO: 308309 - DNA, 120 bp, Artificial Sequence
  ENSG00000134121_41 (sequence is synthesized)
ttgactgcttttacctttttctcatgtttatataatggtatgcttgcatatatttcatgaatacattgtacatattatgttaatatttacacaatttaaaatatagatgtgttttatttt

SEQ ID NO: 308310 - DNA, 120 bp, Artificial Sequence
  ENSG00000134121_42 (sequence is synthesized)
gaagtgagaaaatgaacattaacaggcatgtttgtacagctagaatatattagtaagatactgtttttcgtcattccagagctacaactaataacacgaggttccaaagctgaagacttt

SEQ ID NO: 308311 - DNA, 120 bp, Artificial Sequence
  ENSG00000134121_43 (sequence is synthesized)
gtataaagtatttgggttttgttcttgtattgctttctttcaacagtttcaaaataaaatatcatataaatattgagggaaatgttttcatatttttcaaaataggtttttattgttgaa

SEQ ID NO: 308312 - DNA, 120 bp, Artificial Sequence
  ENSG00000134121_44 (sequence is synthesized)
tgtacatctaccccagcccctcaaaagaaaaactgtttacatagaaattcctacacatacgtttgcgtatatgttattttaaacatctttgtggtgagaattttttccccgatattctcc

SEQ ID NO: 308313 - DNA, 120 bp, Artificial Sequence
  ENSG00000134121_45 (sequence is synthesized)
ttctgtcaaagtcagaacaaattcagggaatttattttctggcagttgtgctccagtccttttaaaattgtacatgaacatgttttagaaacaatatggaggatgatgcatacatgtcgg

SEQ ID NO: 308314 - DNA, 120 bp, Artificial Sequence
  ENSG00000134121_46 (sequence is synthesized)
tcaagttcagcgctcgacattttatggaaagatttttttaaccttaccacgaaatacttaactactgtttaagtgaattgacttatttcactttagtttttgaactgtgattattggtat

SEQ ID NO: 308315 - DNA, 120 bp, Artificial Sequence
  ENSG00000134121_47 (sequence is synthesized)
actgttatatcctcaacttggatttatggtaaccccttatagttcatggagaccaaaatttggggtatttataatagtcagcgcaggaatgcacatggaatatctacttgtccttttgaa

SEQ ID NO: 308316 - DNA, 120 bp, Artificial Sequence
  ENSG00000134121_48 (sequence is synthesized)
cctcacgagtcatccagaatgtatagacaggaaaagcatgtcttatttaaaactgtaatttatgggctcaggatctgaccgcagtcccgggagtaagcatttcaaagggggaaggcagtg

SEQ ID NO: 308317 - DNA, 120 bp, Artificial Sequence
  ENSG00000134121_49 (sequence is synthesized)
tggtccctaccctgtgtgaatgtgaggatgtagacatccatcagtgcaactcgagctccatcctcctccgatttctaaggttccagttttctggagggacagtcatcatgttttgattta

SEQ ID NO: 308318 - DNA, 120 bp, Artificial Sequence
  ENSG00000134121_50 (sequence is synthesized)
tctgggagaaaactgtggtgcacagcttgtgaggagggcaaggttgtgacgttcgagcttagttctggtgttattctgtctcctcttctttgtcatcagccaaaacgtggtttttaaaga

SEQ ID NO: 308319 - DNA, 120 bp, Artificial Sequence
  ENSG00000134121_51 (sequence is synthesized)
gagtcatgcaggttagaaataatgtcaaaaatatttaggaatttaataacctttaagtcagaaactaaaacaaatactgaaatattagctcttcctacacttcgtgttcccctttagctg

SEQ ID NO: 308320 - DNA, 120 bp, Artificial Sequence
  ENSG00000134121_52 (sequence is synthesized)
cctgaaaatcaagattgctcctgctcagatcttctgagtggctaaaacttatggatatgaaaaatgagattgaatgatgactatgctttgctatcattgttacctttcctcaatactatt

SEQ ID NO: 308321 - DNA, 120 bp, Artificial Sequence
  ENSG00000134121_53 (sequence is synthesized)
tggcaactactgggactcttcagcacaaaaggaatagatctatgattgaccctgattttaattgtgaaattatatgattcatatattttatgaatcagaataaccttcaaataaaataaa

SEQ ID NO: 308322 - DNA, 120 bp, Artificial Sequence
  ENSG00000134121_54 (sequence is synthesized)
tctaagtcggttaaaatggatttcatgattttccctcagaaaatgagtaacagagtccacggcgtgcaatggtaattataaattggtgatgcttgtttgcaaattgcccactcgtgataa

SEQ ID NO: 308323 - DNA, 120 bp, Artificial Sequence
  ENSG00000134121_55 (sequence is synthesized)
gtcaacagccaatatttaaaactttgttcgttactggctttaccctaactttctctagtctactgtcaatatcattttaatgtaattgattgtatatagtctcaagaatggttggtgggc

SEQ ID NO: 308324 - DNA, 120 bp, Artificial Sequence
  ENSG00000134121_56 (sequence is synthesized)
atgagttcctagagaactgtccaagggttgggaaaatccaaattctcttcctggttccagcactgattttgtacataaacattaggcaggttgcttaacctttttatttcaaactctctc

SEQ ID NO: 308325 - DNA, 120 bp, Artificial Sequence
  ENSG00000134121_57 (sequence is synthesized)
aactctaaagtgctaataataatctcagttaccttatctttgtcacagggtgttcttttttatgaagaaaaatttgaaaatgataaaagctaagatgccttctaacttcataagcaaacc

SEQ ID NO: 308326 - DNA, 120 bp, Artificial Sequence
  ENSG00000134121_58 (sequence is synthesized)
tttaactaattatgtatctgaaagtcacccccacataccaactcaacttttttcctgtgaacacataaatatatttttatagaaaaacaaatctacataaaataaatctactgtttagtg

SEQ ID NO: 308327 - DNA, 120 bp, Artificial Sequence
  ENSG00000134121_59 (sequence is synthesized)
agcagtatgatttgtacatgccattgaaaattattaatcagaagaaaattaagcagggtctttgctatacaaaagtgttttccactaattttgcatgcgtatttataagaaaaatgtgaa

SEQ ID NO: 308328 - DNA, 120 bp, Artificial Sequence
  ENSG00000134121_60 (sequence is synthesized)
tttggtggttttattctatcggtataaaggcattgatattttagatgcacccgtgtttgtaaaaatgtagagcacaatggaattatgctggaagtctcaaataatatttttttcctattt

SEQ ID NO: 308329 - DNA, 120 bp, Artificial Sequence
  ENSG00000134121_61 (sequence is synthesized)
tatactcatggaagagataagctaaagaggggacaataatgagaaatgttggtgtgcttttctaagcatttaaaacataattgccaattgaaaccctaaatatgtttacataccattaag

SEQ ID NO: 308330 - DNA, 120 bp, Artificial Sequence
  ENSG00000134121_62 (sequence is synthesized)
atatgattcatgtaacaatgttaaattaattataatgggattgggtttgttatctgtggtagtatatatcctagtgttcctatagtgaaataagtagggttcagccaaagctttctttgt

SEQ ID NO: 308331 - DNA, 120 bp, Artificial Sequence
  ENSG00000134121_63 (sequence is synthesized)
tttgtaccttaaattgttcgattacgtcatcaaaagagatgaaaggtatgtagaacaggttcacgtgattacctttttcttttggcttggattaatattcatagtagaactttataaaac

SEQ ID NO: 308332 - DNA, 120 bp, Artificial Sequence
  ENSG00000134121_64 (sequence is synthesized)
gtgtttgtattgtaggtggtgtttgtattatgcttatgactatgtatggtttgaaaatattttcattatacatgaaattcaactttccaaataaaagttctacttcatgtaatccaaaaa

SEQ ID NO: 308333 - DNA, 120 bp, Artificial Sequence
  ENSG00000134121_65 (sequence is synthesized)
gctcaaatggcttaggaagcaggcagctgcagctgtggggctggccgcccctccaccaggagctcggataattattgatggagctaatttgaccatatctaatgtaactttagaggacca

SEQ ID NO: 308334 - DNA, 120 bp, Artificial Sequence
  ENSG00000134121_66 (sequence is synthesized)
aaaatgccgccagcctggagcggggaatccatggaccgtggggttgtggggttggggagcacgaaaacccagagaggggctagagctccacctccccagaccgccgaggggcgagagggc

SEQ ID NO: 308335 - DNA, 120 bp, Artificial Sequence
  ENSG00000134121_67 (sequence is synthesized)
gcgccgggggccgtggttgccatggctcctggtagcggagcccggggggctggagatgccggtcgcggatggtcccttcttcctctttgtgcctctctctttctctcgcttttttttttt

SEQ ID NO: 308336 - DNA, 120 bp, Artificial Sequence
  ENSG00000134121_68 (sequence is synthesized)
ttttggagtgtgagtgtgcgtggggaggcagcacggagaaagtgattaatttggggagcagggattggagccgggaggctggggaaagccagcccctccgttcccactctccgggctcgc

SEQ ID NO: 308337 - DNA, 120 bp, Artificial Sequence
  ENSG00000134121_69 (sequence is synthesized)
tgcgagccacagtgtctcagccaggggcagggccggggaactcctgcgaaaaaccacgggccggaggagcagcagccgcgcgggcccaggtgctgtaaactgcaaaccataatcctgtct

SEQ ID NO: 308338 - DNA, 120 bp, Artificial Sequence
  ENSG00000134121_70 (sequence is synthesized)
tcggacagctcggggtcagtcgacggagcacaccgggcgcccgaatccgccgggtcccactcacgcccgccggccgccggtgctgtaaactgcaaaccataatcctgtcttaatactgca

SEQ ID NO: 308339 - DNA, 120 bp, Artificial Sequence
  ENSG00000134121_71 (sequence is synthesized)
aatcttcaagctctgattagattacaacatatgaatgctaattttgtttttacaggtttcaacacccaaatttatctgaacttagggcacaataagcagtttaactgttagaaatcttat

SEQ ID NO: 308340 - DNA, 120 bp, Artificial Sequence
  ENSG00000134121_72 (sequence is synthesized)
gagattgagtttgtgcctatcagatgaatacatatttgtatataacatttcaattattgctacatttatgtataatttatccaaaagcgatgttatccatgcatcttaacagaaggctta

SEQ ID NO: 308341 - DNA, 120 bp, Artificial Sequence
  ENSG00000134121_73 (sequence is synthesized)
agtagttgaatgacagggactacatttttgctgcagaagatcatgataaaacatgtgctgtgtggtcaccttgggtaatgtgccgagactgcttgatggtacttatctctacacactgca

SEQ ID NO: 308342 - DNA, 120 bp, Artificial Sequence
  ENSG00000134121_74 (sequence is synthesized)
tctcatactgatttatggatttggatgacttattttatgtcaaagacataaagagagtagagaagagagaatagtattttcatttcagtcttaaaaaagttctatcctatgagatgttaa

SEQ ID NO: 308343 - DNA, 120 bp, Artificial Sequence
  ENSG00000134121_75 (sequence is synthesized)
cagctgccttctcttggtggtctgtgaagtttttataaagatattgattattttccaatgacacacaaatctactgctagagaccattcaaatgcttagttacaccagggcttggctcct

SEQ ID NO: 308344 - DNA, 120 bp, Artificial Sequence
  ENSG00000134121_76 (sequence is synthesized)
gttctcaggacaatgagctgcacatacggcacaaatgcaatttgcttgaccaatcttgcctctgtctccttctatctccgtttacatgcttcatgctcagttgaaattaattctctacac

SEQ ID NO: 308345 - DNA, 120 bp, Artificial Sequence
  ENSG00000134121_77 (sequence is synthesized)
attggtctcatgaacacatctttgagagcagagttcaagttaaatttttattttcatcattacctctgagaacacaatctggggcatattagacgctttgtaagtgtagaggtggggaga

SEQ ID NO: 308346 - DNA, 120 bp, Artificial Sequence
  ENSG00000134121_78 (sequence is synthesized)
aagaagaagaaagagaggaacagaaggagggaaagattttcctgatagatcactttctggacactttctgtgctgagaagttctgagattgcctctctggatcctgctatcttggcagtc

SEQ ID NO: 308347 - DNA, 120 bp, Artificial Sequence
  ENSG00000134121_79 (sequence is synthesized)
ttgctaagagtttccatttacacttaaacatggttactgatgcgtcttaatgttgccttaactatcaggtttctgatagccccacatagccaagtgggaccctggtcaagaagttcacct

SEQ ID NO: 308348 - DNA, 120 bp, Artificial Sequence
  ENSG00000134121_80 (sequence is synthesized)
ctgttaaataaatatgcatagattttcaacatctcttcacatgcattcagaggtgatgaaagattccactggatgctagaacattgtgcataaataatcgaagttgtatgctcttcagca

SEQ ID NO: 308349 - DNA, 120 bp, Artificial Sequence
  ENSG00000134121_81 (sequence is synthesized)
atgatgctaccccatatcctttttttttctttcccatgatatgaggatatgagtgcagcagaactagctccatgcccttgtcccagaattaatcattcctatccatatttgatgtcttta

SEQ ID NO: 308350 - DNA, 120 bp, Artificial Sequence
  ENSG00000134121_82 (sequence is synthesized)
ccttttaaatatttatgggctgttatgttcctttcttgttgttcacccactctggggacattcagaagcctcacatttcttccttagccaaacaccccattcccttcatcctctctcagc

SEQ ID NO: 308351 - DNA, 120 bp, Artificial Sequence
  ENSG00000134121_83 (sequence is synthesized)
tgttctttggattacctccaaattgcatacataattttggtattgaggtgccaaaaatgcatttgtttcaactggagttttattgaagttgcttttactcaaatcaagtacacaaataaa

SEQ ID NO: 308352 - DNA, 120 bp, Artificial Sequence
  ENSG00000134121_84 (sequence is synthesized)
tttgatttccaaggcatgaaaattcagttaggtctccgaagggaagctgaggtatacttatatttcattataatgctacaggtagattttaagtcactaggaaaatgacatctcaaaatc

SEQ ID NO: 308353 - DNA, 120 bp, Artificial Sequence
  ENSG00000134121_85 (sequence is synthesized)
aaaagattatagaatgagcactatatgaagaattacattttaaagcataggtctgtgatcattttgtaggtttttgttgttactgtcagtctattggtttttattaataattttattgag

SEQ ID NO: 308354 - DNA, 120 bp, Artificial Sequence
  ENSG00000134121_86 (sequence is synthesized)
gtataactgatacacaaacgacatatttaatgtgtacaatttgatgagtttggacatatccgaggactcatgagactgtcactgcaatcaaggtaataaatgtatttattacttccaaaa

SEQ ID NO: 308355 - DNA, 120 bp, Artificial Sequence
  ENSG00000134121_87 (sequence is synthesized)
agtatttttatttcactgttactttgcatgaattgtcacatgggttcagtctgtcttcatttgcccaaatggaataataccatttaagttggagtaccagataaagttctttgaaccgtt

SEQ ID NO: 308356 - DNA, 120 bp, Artificial Sequence
  ENSG00000134121_88 (sequence is synthesized)
tgattataaagtgggagtaattctgaggatggtcttgtgaagaaagcatcatgaacgccttattctagatctggagatggcatccaggattatgaatgtcttgcccatcaccacacaacc

SEQ ID NO: 308357 - DNA, 120 bp, Artificial Sequence
  ENSG00000134121_89 (sequence is synthesized)
agaaatccgcaaagctaggatttatgtatgaggatctttggactccaaacctcactttttcctcctttacatatctcggttaaatgttattaaatagacttcaccatttgaattttgcat

SEQ ID NO: 308358 - DNA, 120 bp, Artificial Sequence
  ENSG00000134121_90 (sequence is synthesized)
aaaaatgcccatctacccagataattttaattattctagggtcatttccaaattttttctgtaacagtggggcattttattttctctctactacttggatgtatttaatgaccagtatat

SEQ ID NO: 308359 - DNA, 120 bp, Artificial Sequence
  ENSG00000134121_91 (sequence is synthesized)
agaaagggaagaaggcaaacaggaaaagagccagaagagcagagttcccagcagaggggaagcaagtggagaggcggtgtggaggaatcaatttggccccatctggaatggacagaaggc

SEQ ID NO: 308360 - DNA, 120 bp, Artificial Sequence
  ENSG00000134121_92 (sequence is synthesized)
agtgtctcagccaggggcagggccggggaactcctgcgaaaaaccacgggccggaggagcagcagccgcgcgggcccagtaagaagaattgaaaaataattcacagagaattgattccca

SEQ ID NO: 308361 - DNA, 120 bp, Artificial Sequence
  ENSG00000134121_93 (sequence is synthesized)
tgatgcgttcacctatgtcctgctcagaacacatctaggatcatttcagcgctgatagactgttcaaggagatgcagcctaactcaagaaaaattcatcatgctcctcctctttccttct

SEQ ID NO: 308362 - DNA, 120 bp, Artificial Sequence
  ENSG00000134121_94 (sequence is synthesized)
ggtgaattccaagatgaaatagatagactttctggcctgaagttgcttactgttaccactgaatatatgcccataaaatattaaaatagacctaaatgccttttctgaggtctggaactc

SEQ ID NO: 308363 - DNA, 120 bp, Artificial Sequence
  ENSG00000134121_95 (sequence is synthesized)
tcaaagtgttgtgagcctccaatctaattaaagaactcactcaagtataatgcaaaatagaggatgaaaaatgccatacgaatgtatagataatgttttatgggagattagaatagagaa

SEQ ID NO: 308364 - DNA, 120 bp, Artificial Sequence
  ENSG00000134121_96 (sequence is synthesized)
gaatttatagttccaagtaagtactataacgggaatttcattttacaagtgttttagtgaagtgttaaataggagttagattgggttccaatgaaataaagcagttattaactaaatcaa

SEQ ID NO: 308365 - DNA, 120 bp, Artificial Sequence
  ENSG00000134138_0 (sequence is synthesized)
gcactcgttgcatatcagaggctcggcgcggcgcgctcctcctcgctcccgctccccactcccgggatgtgtctccgccgtacgacgggctatggccaccacgacttccgggttccgtca

SEQ ID NO: 308366 - DNA, 120 bp, Artificial Sequence
  ENSG00000134138_1 (sequence is synthesized)
tttcgttctcccgccgccgacccgcgccgccaaactgaggctcttcaataagccaggcagcagccaacctgccaacacctactgacactcactcatctcccagagagagaaagagagcga

SEQ ID NO: 308367 - DNA, 120 bp, Artificial Sequence
  ENSG00000134138_2 (sequence is synthesized)
gagagagcgagcgcgagagagcgagcgcgagtgagagcgagcgagcgagcgagaaagagagagagggagagacaaaatacctaccaggaaagggggggaggaagtccaatttttgcaaac

SEQ ID NO: 308368 - DNA, 120 bp, Artificial Sequence
  ENSG00000134138_3 (sequence is synthesized)
tattcatttttttttcttgatttttctcactgctttctttgaacaatactttaaagagagaggatcgtattatagataccgcgggggcaaagctaaaaaaggggggaggggggaggaaaa

SEQ ID NO: 308369 - DNA, 120 bp, Artificial Sequence
  ENSG00000134138_4 (sequence is synthesized)
aattcaagaagcagaaacccctcgcggagttttactggaagaaaaaaacgggtctgaaagattcctcctcttcatcatcatcaaccatcattcattcactaccttgacattccgggcttt

SEQ ID NO: 308370 - DNA, 120 bp, Artificial Sequence
  ENSG00000134138_5 (sequence is synthesized)
gattgacagctggagtggcaaaaagccatgaaacacgacagttcggttacatgtgggctgctgacgggccgctcgtaaccttcagttcgggggcttgacaatttttttcttctttttctt

SEQ ID NO: 308371 - DNA, 120 bp, Artificial Sequence
  ENSG00000134138_6 (sequence is synthesized)
ctttttcttttctttctttttttttccaactgaggggaagagaagagaaagagggggaaaggaggaccgaagaggaggaggaggggaggggggaggaggaggaggtggaggaggaggagg

SEQ ID NO: 308372 - DNA, 120 bp, Artificial Sequence
  ENSG00000134138_7 (sequence is synthesized)
aagatcaggaggaggaggaagaagaggaaaaaagagaaaaagaagaaatatcacagaaaaaaaaattcttcgttgtctagactgggctttttttcccccctaaaaaatagcatattggag

SEQ ID NO: 308373 - DNA, 120 bp, Artificial Sequence
  ENSG00000134138_8 (sequence is synthesized)
aattgggagaagtctctttggtttggaaaaaaaaaaaaggaatcttcagcctagatcactttcttatccggactgggatattaaatatacgacacatccaggagtttattggagcgcaga

SEQ ID NO: 308374 - DNA, 120 bp, Artificial Sequence
  ENSG00000134138_9 (sequence is synthesized)
ctgatggcgcaaaggtacgatgagctgccccattacggcgggatggacggagtaggggttcccgcttccatgtacggagaccctcacgcgccgcggccgatccccccggttcaccacctg

SEQ ID NO: 308375 - DNA, 120 bp, Artificial Sequence
  ENSG00000134138_10 (sequence is synthesized)
aaccacgggccgccgctccacgccacacagcactacggcgcgcacgccccgcaccccaatgtcatgccggccagtatgggatccgctgtcaacgacgccttgaagcgggacaaggacgcg

SEQ ID NO: 308376 - DNA, 120 bp, Artificial Sequence
  ENSG00000134138_11 (sequence is synthesized)
atctatgggcacccgttgtttcctctgttagctctggtctttgagaagtgcgagctggcgacctgcactccccgggaacctggagtggctggcggagacgtctgctcctccgactccttc

SEQ ID NO: 308377 - DNA, 120 bp, Artificial Sequence
  ENSG00000134138_12 (sequence is synthesized)
aacgaggacatcgcggtcttcgccaagcaggttcgcgccgaaaagccacttttttcctcaaatccagagctggacaatttgatgatacaagcaatacaagtactaaggtttcatcttttg

SEQ ID NO: 308378 - DNA, 120 bp, Artificial Sequence
  ENSG00000134138_13 (sequence is synthesized)
gagttagaaaaggtccacgaactgtgcgataacttctgccaccgatacattagctgtttgaaggggaaaatgcccatcgacctcgtcattgatgaaagagacggcagctccaagtcagat

SEQ ID NO: 308379 - DNA, 120 bp, Artificial Sequence
  ENSG00000134138_14 (sequence is synthesized)
catgaagaactttcaggctcctccacaaatctcgctgaccataacccttcttcttggcgagaccacgatgatgcaacctcaacccactcagcaggcaccccagggccctccagtgggggc

SEQ ID NO: 308380 - DNA, 120 bp, Artificial Sequence
  ENSG00000134138_15 (sequence is synthesized)
catgcttcccagagcggagacaacagcagtgagcaaggggatggtttagacaacagtgtagcttcacctggtacaggtgacgatgatgatccggataaggacaaaaaacgccagaagaaa

SEQ ID NO: 308381 - DNA, 120 bp, Artificial Sequence
  ENSG00000134138_16 (sequence is synthesized)
agaggcattttccccaaagtagcaacaaatatcatgagagcatggctcttccagcatctcacacatccgtacccttccgaagagcagaagaaacagttagcgcaagacacaggacttaca

SEQ ID NO: 308382 - DNA, 120 bp, Artificial Sequence
  ENSG00000134138_17 (sequence is synthesized)
attctccaagtaaacaactggtttattaatgccagaagaagaatagtacagcccatgattgaccagtcaaatcgagcaggttttcttcttgatccttcagtgagccaaggagcagcatat

SEQ ID NO: 308383 - DNA, 120 bp, Artificial Sequence
  ENSG00000134138_18 (sequence is synthesized)
agtccagagggtcagcccatggggagctttgtgttggatggtcagcaacacatggggatccggcctgcaggtttgcagagcatgccaggggactacgtttctcagggtggtcctatggga

SEQ ID NO: 308384 - DNA, 120 bp, Artificial Sequence
  ENSG00000134138_19 (sequence is synthesized)
atgagtatggcacagccaagttacactcctccccagatgaccccacaccctactcaattaagacatggacccccaatgcattcatatttgccaagccatccccaccacccagccatgatg

SEQ ID NO: 308385 - DNA, 120 bp, Artificial Sequence
  ENSG00000134138_20 (sequence is synthesized)
atgcacggaggaccccctacccaccctggaatgactatgtcagcacagagccccacaatgttaaattctgtagatcccaatgttggcggacaggttatggacattcatgcccaatagtat

SEQ ID NO: 308386 - DNA, 120 bp, Artificial Sequence
  ENSG00000134138_21 (sequence is synthesized)
aagggaactcaagggaaaaggaaacacacgcaaaaactattttaagactttctgaactttgaccagatgttgacacttaatatgaaattccagacagctgtgattattttttacttttgt

SEQ ID NO: 308387 - DNA, 120 bp, Artificial Sequence
  ENSG00000134138_22 (sequence is synthesized)
agatcctctggaaaaagactccgagagttataactactgtagtataaatataggaactaagttaaacttgtacatttctgttgatcacgccgttatgttgcctcaaatagttttagaaga

SEQ ID NO: 308388 - DNA, 120 bp, Artificial Sequence
  ENSG00000134138_23 (sequence is synthesized)
gaaaaaaaaatatatccttgttttccacactatgtgtgttgttcccaaaagaatgactgttttggttcatcagtgaattcaccatccaggagagactgtggtatatattttaaacctgtt

SEQ ID NO: 308389 - DNA, 120 bp, Artificial Sequence
  ENSG00000134138_24 (sequence is synthesized)
gggccaatgagaaaagaaccacactggagatcatgatgaacttttggctgaacctcatcactcgaactccagcttcaagaatgtgttttcatgcccggcctttgttcctccataaatgtg

SEQ ID NO: 308390 - DNA, 120 bp, Artificial Sequence
  ENSG00000134138_25 (sequence is synthesized)
tcctttagtttcaaacagatctttatagttcgtgcttcataagccaattcttattattatttttgggggactcttcttcaaagagcttgccaatgaagatttaaagacagagcaggagct

SEQ ID NO: 308391 - DNA, 120 bp, Artificial Sequence
  ENSG00000134138_26 (sequence is synthesized)
tcttccaggagttctgagccttggttgtggacaaaacaatcttaagttgggcagctttcctcaacacaaaaaaaagttattaatggtcattgaaccataactaggactttatcagaaact

SEQ ID NO: 308392 - DNA, 120 bp, Artificial Sequence
  ENSG00000134138_27 (sequence is synthesized)
caaagcttgggggataaaaaggagcaagagaatactgtaacaaacttcgtacagagttcggtctattaattgtttcatgttagatattctatgtgtttacctcaattgaaaaaaaaaaga

SEQ ID NO: 308393 - DNA, 120 bp, Artificial Sequence
  ENSG00000134138_28 (sequence is synthesized)
atgtttttgctagtatcagatctgctgtggaattggtattgtatgtccatgaattcttcttttctcagcacgtgttcctcactagaagaaaatgctgttacctttaagctttgtcaaatt

SEQ ID NO: 308394 - DNA, 120 bp, Artificial Sequence
  ENSG00000134138_29 (sequence is synthesized)
tacattaaaatacttgtatgaggactgtgacgttatgttaaaaaaaaaaaggtgttaagtcacaaaaagcggtaataaatatttcatttttgattttttgttaggcttttgcgtttttaa

SEQ ID NO: 308395 - DNA, 120 bp, Artificial Sequence
  ENSG00000134138_30 (sequence is synthesized)
tggttttaggacaagactgcacaatgccaactctatacagtgttaaaagtaggtttttccccccagcagttgagtatattttaaactcatcaataatttttaaggtaatcatctatagcc

SEQ ID NO: 308396 - DNA, 120 bp, Artificial Sequence
  ENSG00000134138_31 (sequence is synthesized)
tttcaatgtctatttgacctataagttccaccagcagaaaacttctaaaggtacgaaactatgtgtacatgatgagccaggttgaaagatccccttgaacatgctcaacctcctttttag

SEQ ID NO: 308397 - DNA, 120 bp, Artificial Sequence
  ENSG00000134138_32 (sequence is synthesized)
atgcatgacgttaaaaaatatatactttcagataaagcttttcatgggcatcctctgccagaataaaggacttttcagggttaattttacaacataagaaataatgtctgtgctcaaagg

SEQ ID NO: 308398 - DNA, 120 bp, Artificial Sequence
  ENSG00000134138_33 (sequence is synthesized)
taatttatctgcctgtgtttttcctctgcctgtcttactacaatattgttggatatgtaaatgaaaatttacatatgggtgttcatagataagtaaacaacttctatggagtttgaaatt

SEQ ID NO: 308399 - DNA, 120 bp, Artificial Sequence
  ENSG00000134138_34 (sequence is synthesized)
ctgactttaaaagattacttaatcattaatattttataaattatattgtggtatatttttatttcagacacatccatgtgcagggatgctagtgtgatgatttgataactaaacttaaac

SEQ ID NO: 308400 - DNA, 120 bp, Artificial Sequence
  ENSG00000134138_35 (sequence is synthesized)
ttttttctgaaaacaaaacaaaacaaaatggacggtataatgccattttcaaaattttatgcaacattcctggaaatctataccattagcttattgatactgcacaaacaatgtctgcta

SEQ ID NO: 308401 - DNA, 120 bp, Artificial Sequence
  ENSG00000134138_36 (sequence is synthesized)
aagtgtgcaaaaagggtgaggcatgtcccctcaattttcaaataaatatactatcctggaattttttaactcttaaattttgaatctttgtttagaaagaataatgtcatatactttggc

SEQ ID NO: 308402 - DNA, 120 bp, Artificial Sequence
  ENSG00000134138_37 (sequence is synthesized)
tagatatgtgatgtcaaccggctaaggaaattattcatcatctctgcaaacttaaacttggaagaaatccatagttattatttggggctcttccatctttccatttcagacagcatttat

SEQ ID NO: 308403 - DNA, 120 bp, Artificial Sequence
  ENSG00000134138_38 (sequence is synthesized)
ggaggttctatataaatgaacgaggaaatacacttctattgttttgtgttatatttagtcaggtagaatttttacaaatacatttcagtttaagtgttgtgttgctgtttaaacatagaa

SEQ ID NO: 308404 - DNA, 120 bp, Artificial Sequence
  ENSG00000134138_39 (sequence is synthesized)
ataatgcttctgacacaaactaacttaatagagaaattcagtgccacttgggaaagagagatagcttccctctcatttttgctattctattttacatgaagtctttttgtaaattttaaa

SEQ ID NO: 308405 - DNA, 120 bp, Artificial Sequence
  ENSG00000134138_40 (sequence is synthesized)
tatttgcctatttttactttaaatacttttatgtaaactatgaaaattccccattataaatcaactctcacatcaggtgggaaaaagaacctttttttctttccactcagtaaattctga

SEQ ID NO: 308406 - DNA, 120 bp, Artificial Sequence
  ENSG00000134138_41 (sequence is synthesized)
agggtttccttggcaattggctcgtgtttaggatgtgttttatgcaattatcaagttatctcattgaagtttagagaccagagctctcaactcttggttttaatgaataaagtcatctca

SEQ ID NO: 308407 - DNA, 120 bp, Artificial Sequence
  ENSG00000134138_42 (sequence is synthesized)
tgcttagtttattcgtcaaacccacgtcctatcatgttaactttaaccttcttaaatatttggagatgaatgataattgtaatatttgtttgcattaccttgctctcccccacccccaac

SEQ ID NO: 308408 - DNA, 120 bp, Artificial Sequence
  ENSG00000134138_43 (sequence is synthesized)
cccatgataacacagagaagtgatagatttgtccaatttttataatgctttttttacaccaccccggaaggcacttgctcctatctcgggtttactatttagtgtaaagagttccgattt

SEQ ID NO: 308409 - DNA, 120 bp, Artificial Sequence
  ENSG00000134138_44 (sequence is synthesized)
gggtatatttaagaaagactcagctgtcaaaagcaaagaaactgggaatggtgttttgacaaccatatagtgttaaaggaaatactgtagtctgaataaaattgcttatgttctccaaaa

SEQ ID NO: 308410 - DNA, 120 bp, Artificial Sequence
  ENSG00000134138_45 (sequence is synthesized)
accgcttggagggagtgtgctctgagttaagctggtctcttctggtcctggaaaaaaatgagtattgacaaggttgctggatctgcgcagaaaagaaagtgccacttaataaaaaattta

SEQ ID NO: 308411 - DNA, 120 bp, Artificial Sequence
  ENSG00000134138_46 (sequence is synthesized)
gcccggcagtggtaccgtctgcagagcttgctgcccttggacgttagcaggaagccttcggggtgctgtaatcggcgggcagaggagagggaggccgcggaattaaaaggaacaaaagct

SEQ ID NO: 308412 - DNA, 120 bp, Artificial Sequence
  ENSG00000134138_47 (sequence is synthesized)
gatccggcctgcaggacctatgagtggaatgggcatgaatatgggcatggatgggcaatggcactacatgtaaccttcatcatgtaaagcaatcgcaaagcaagggggaagtttgcagag

SEQ ID NO: 308413 - DNA, 120 bp, Artificial Sequence
  ENSG00000134138_48 (sequence is synthesized)
tcagacagcctaattgatggctttgctgacctaacaataccttgtgaaagccgagtgctagagcctggtctccatttatgaccagctgcaaggggaagctgggtctccctatcacgggga

SEQ ID NO: 308414 - DNA, 120 bp, Artificial Sequence
  ENSG00000134138_49 (sequence is synthesized)
gtctagggaaagggggaaagtcttccagcctgtgaactttaaccagattcctacttgtgcaagaagcagaagcacaatttgaagttaatagaagctttctcatggagaactttattccgt

SEQ ID NO: 308415 - DNA, 120 bp, Artificial Sequence
  ENSG00000134138_50 (sequence is synthesized)
ccctgagctcttctagcaagttgttttggagttgactacgcagtgacgacggagattacccagtcaactatttttgaacgctgaaagggaaaatcacctttaaattgaaaagataatttt

SEQ ID NO: 308416 - DNA, 120 bp, Artificial Sequence
  ENSG00000134138_51 (sequence is synthesized)
acttgtccacttgagggcttgacaggcagctaacagctggcctgctagactgtatgggagaatcagcctacatcttcttctgagcagatgacaagctaatcagagacatatccatagcac

SEQ ID NO: 308417 - DNA, 120 bp, Artificial Sequence
  ENSG00000134138_52 (sequence is synthesized)
agggcatgtccccggtcactgagctacctacgcctttccccagttgatctgatctctcttcaacggttcagtccccttccctgcgcaaagcaatccatgcagaatcttcaattccagcta

SEQ ID NO: 308418 - DNA, 120 bp, Artificial Sequence
  ENSG00000134138_53 (sequence is synthesized)
tccccaaacttcaaggagaagagccttctctgaccctcctgagcatctctgctggtttcaaggtttattaatgccagaagaagaatagtacagcccatgattgaccagtcaaatcgagca

SEQ ID NO: 308419 - DNA, 120 bp, Artificial Sequence
  ENSG00000134138_54 (sequence is synthesized)
ttataatttgcccccattttatttttccttgcccataactgcatgcctttccaaactaaggacctgtttttaaatatatatcacccatctctgaagtcacagatgacactgatgtgcact

SEQ ID NO: 308420 - DNA, 120 bp, Artificial Sequence
  ENSG00000134138_55 (sequence is synthesized)
tttgaaaaggccaactgacaagcctgcgtgtgttttaagcaggtgggactgccttttagcctatttactgtggccccaatgtgcacaaacacagacatcaggcagatattggacatttaa

SEQ ID NO: 308421 - DNA, 120 bp, Artificial Sequence
  ENSG00000134138_56 (sequence is synthesized)
atttttcagatttatccccattttccagatgaagtggcttggccttggagagggtcagttacttgactgtcacgatagaaagaggaagcagaagaatgaagacaaagccatttaaaattt

SEQ ID NO: 308422 - DNA, 120 bp, Artificial Sequence
  ENSG00000134138_57 (sequence is synthesized)
tcttgttctttaccttttgcataaaaggtattcagttcacaaatgatgtaaaatttaattaaggcaagtgactgtcctgagaaagtcattaaaaccctcatgtcatttctctaatcaaaa

SEQ ID NO: 308423 - DNA, 120 bp, Artificial Sequence
  ENSG00000134138_58 (sequence is synthesized)
ctatctgttcctctggcccagtccgctctctacgcctcctccccatccctgagcctgggggcgaattggaagtggagataaatatgggtgtttgttttcccccccagcaggaatacaggg

SEQ ID NO: 308424 - DNA, 120 bp, Artificial Sequence
  ENSG00000134138_59 (sequence is synthesized)
gtcgaccctcgaattaaagttgacctgctcctaatctggggcttggcctttttcccccgcctccagctacttgaacaagaattggggagaggggctgtgagggacccgggagtgcccggg

SEQ ID NO: 308425 - DNA, 120 bp, Artificial Sequence
  ENSG00000134138_60 (sequence is synthesized)
gatatggaactcgaggccctgagaacgaccctgagttcctggctacagcttagtcgtaccaggtcccccttaatggggccaggaccagaatgccctgattcttcttcagggactccacta

SEQ ID NO: 308426 - DNA, 120 bp, Artificial Sequence
  ENSG00000134138_61 (sequence is synthesized)
atttaaggttcgcgccgaaaagccacttttttcctcaaatccagagctggacaatttgatgatacaagcaatacaagtactaaggtttcatcttttggagttagaaaaggtaagcaggaa

SEQ ID NO: 308427 - DNA, 120 bp, Artificial Sequence
  ENSG00000134138_62 (sequence is synthesized)
cccgatgcctcctctcccttcaacgcttctgctgctgctcgctgcttgatgatggcggccagtattttaaaaaatagcaaaattattcatcggcttctttccctcccgtgcctctgcgtg

SEQ ID NO: 308428 - DNA, 120 bp, Artificial Sequence
  ENSG00000134138_63 (sequence is synthesized)
tgtgcgagtgtgtgtgcgtgcgtgtgtgcgtgtctgggcgcgcgtgttccagcgctgtgcgagcgggcgggcggcgagtgcgtgtgagtggtgtgtgtgtgtgcgtgtgcaatcgttaca

SEQ ID NO: 308429 - DNA, 120 bp, Artificial Sequence
  ENSG00000134138_64 (sequence is synthesized)
cgctttcgcctcgctccagcttttaccccagcagcgcgattcccccggttctcctgctgccgctgctgcgccgctgccgccgtggctcgcgcggctcggggcgggcacgggctgcgtagg

SEQ ID NO: 308430 - DNA, 120 bp, Artificial Sequence
  ENSG00000134138_65 (sequence is synthesized)
agccgccgccggggccgccgctggggccgcgctgccgcagccgctgcgccgccgcctagactactagcctgggctgcttgttttgtctctgaaattgacaaggacgcagggaatccgctg

SEQ ID NO: 308431 - DNA, 120 bp, Artificial Sequence
  ENSG00000134138_66 (sequence is synthesized)
catctttatcccttcctctcttttctgttcgccctcttctccctgctctttttccctttccacccccctcctctgttctccctcacctcctgcgccccctcccccttcccgggttctgac

SEQ ID NO: 308432 - DNA, 120 bp, Artificial Sequence
  ENSG00000134138_67 (sequence is synthesized)
atttaattccctggactcccactctgaacccagttatttccagtcctgtttctttctctctctattgtaacttgttgctcagagaagtctctggagaataatatctgctgcaacaattac

SEQ ID NO: 308433 - DNA, 120 bp, Artificial Sequence
  ENSG00000134138_68 (sequence is synthesized)
tctattgtttccttgccttcaactattacaccctttaattagagttagtttggaagacatcacactgttgctctttgcaaatgtaaccttgcaacctggtatttttcctttctaaaaatg

SEQ ID NO: 308434 - DNA, 120 bp, Artificial Sequence
  ENSG00000134138_69 (sequence is synthesized)
gggtggaaatatcaggtcagtcctccttggttgctgtaaaagtggtggggaaagagtagataattaagttctttttctgattggaggagggatgcttctggaagtctttgtgatctagtc

SEQ ID NO: 308435 - DNA, 120 bp, Artificial Sequence
  ENSG00000134138_70 (sequence is synthesized)
agatattcattcctcagcaacatttcaggtgacaggtgggaagaaagatgcagtttcaactctccttttgttttcacctctacatagctgatcactttcttttttgacaactgagctaca

SEQ ID NO: 308436 - DNA, 120 bp, Artificial Sequence
  ENSG00000134138_71 (sequence is synthesized)
ctttcttaagtaataaagaagtccattgttttgcaaacaaacaccatatgcaaaagactcctttggttttctcccagctattattcctcagcttaattgtattcccaccagagtgctcac

SEQ ID NO: 308437 - DNA, 120 bp, Artificial Sequence
  ENSG00000134138_72 (sequence is synthesized)
aggaggcccgaccgagtggggcctgactgtcctcctccaaagggacttcagcttcctcggaacacagagctgccagcacacactgaatttttctggctaatttcaaagagtgagttttca

SEQ ID NO: 308438 - DNA, 120 bp, Artificial Sequence
  ENSG00000134138_73 (sequence is synthesized)
gttcctgcctgtggccccaggtggactcattaatcatgaagtccccctgtgcttaagatctgaaactggaaatattgacagatgttatcaatgggtatatttttagggagaagctagctg

SEQ ID NO: 308439 - DNA, 120 bp, Artificial Sequence
  ENSG00000134138_74 (sequence is synthesized)
gatgctccctgctcctccgaaatgcgtggtcagtgaatcgtgtgcatgagctcaaatgtgtggggaatacacgtcgttaagtgcacagggacaagggtaactcacaaatggtagaaaatt

SEQ ID NO: 308440 - DNA, 120 bp, Artificial Sequence
  ENSG00000134138_75 (sequence is synthesized)
gttttgtttttattaaatttggagaaataaaggagatttcttatcatcttactctgtttgtacatgaatatttgatgggcattattaaacattaaagtaacatgaagtaggcacttattt

SEQ ID NO: 308441 - DNA, 120 bp, Artificial Sequence
  ENSG00000134138_76 (sequence is synthesized)
ttggatttccaacaaaattagatccaggcttcttagatgaaataactgcttctcctttgcattcctgcgattcagccaccacctgatttgcaaacgtttcttgagctctaatatcaaaca

SEQ ID NO: 308442 - DNA, 120 bp, Artificial Sequence
  ENSG00000134138_77 (sequence is synthesized)
tgtgtacctgaggctctgtctttctagtgggttgaaaggtggctgggtttatggttggcagttaccttatcctctgccctgggtgtcccagcttaggctggaaaggctgcccccagctgg

SEQ ID NO: 308443 - DNA, 120 bp, Artificial Sequence
  ENSG00000134138_78 (sequence is synthesized)
ttttcctcacaacttttaactccgttgttttggctggtttggtttctgtgtgctcaacttgtgctcggtacttttctcctttctgactttgtttttatttttattttctctctctctctc

SEQ ID NO: 308444 - DNA, 120 bp, Artificial Sequence
  ENSG00000134138_79 (sequence is synthesized)
attttccccaaagtagcaacaaatatcatgagagcatggctcttccagcatctcacagtaagtcaagatgaaagagaaaaaaaaaatagtttttgttgttttgctagcaagttatacggt

SEQ ID NO: 308445 - DNA, 120 bp, Artificial Sequence
  ENSG00000134138_80 (sequence is synthesized)
ctcatactgatttttttttaaactaaggtgcctattttcttattcttgaaatctgatgactaacagactagttaaagttttttttttcatcaactattaccatccaaagagcaccctcta

SEQ ID NO: 308446 - DNA, 120 bp, Artificial Sequence
  ENSG00000134138_81 (sequence is synthesized)
gaaagtagcaggtttttgttttaagaagctgggaatggactttatttaaaatgatctaagaccctaaacagcatatataagtaaatttgttatttatgctaaaagtatgagagcaacttc

SEQ ID NO: 308447 - DNA, 120 bp, Artificial Sequence
  ENSG00000134138_82 (sequence is synthesized)
ggatactgcaacagcaaccaagggaaatggctgtaaggagctcacaaatccataaacgttgctgattacactgttaacgaaagctgtctcctctaggaggccaaaaaaaaaaaaaaaaaa

SEQ ID NO: 308448 - DNA, 120 bp, Artificial Sequence
  ENSG00000134146_0 (sequence is synthesized)
gcacgcacgcgcactgcgcccagcatgagggtcgcggctctgatcagtggtgggaaggacagctgctataatatgatgcagtgcattgctgctgggcatcagatcgttgctttagcaaat

SEQ ID NO: 308449 - DNA, 120 bp, Artificial Sequence
  ENSG00000134146_1 (sequence is synthesized)
ctaagaccagctgaaaaccaagtggggtctgatgaactggatagctacatgtatcagacagtggggcaccatgccattgacttgtatgcagaagcaatggctcttcccctctatcgccga

SEQ ID NO: 308450 - DNA, 120 bp, Artificial Sequence
  ENSG00000134146_2 (sequence is synthesized)
accataagaggaaggagcttggatacaagacaagtgtacaccaaatgtgaaggtgatgaggttgaagatctctatgagcttttgaaacttgttaaggaaaaagaagaagtagaggggata

SEQ ID NO: 308451 - DNA, 120 bp, Artificial Sequence
  ENSG00000134146_3 (sequence is synthesized)
tcagtaggtgctatactttctgactatcagcgtattcgagtggaaaatgtgtgtaaaaggcttaatctccagcctttagcttatctttggcagagaaaccaggaagatttgctcagagag

SEQ ID NO: 308452 - DNA, 120 bp, Artificial Sequence
  ENSG00000134146_4 (sequence is synthesized)
atgatatcatctaacattcaagcaatgatcatcaaagtagcagctttgggtttagatcctgataagcatcttgggaaaaccctggatcaaatggagccttatctcatagagctttctaag

SEQ ID NO: 308453 - DNA, 120 bp, Artificial Sequence
  ENSG00000134146_5 (sequence is synthesized)
aagtatggagtacatgtttgtggagaaggtggagagtatgaaactttcactttggattgccctctatttaagaagaaaataattgtggattcatcagaagtagtcatacattcagctgat

SEQ ID NO: 308454 - DNA, 120 bp, Artificial Sequence
  ENSG00000134146_6 (sequence is synthesized)
gcatttgcacctgtggcttatctacgctttttagaattgcacttggaggacaaggtgtcctcagtgcctgacaactacagaacatctaattatatatataatttttgaaaagtgttttgg

SEQ ID NO: 308455 - DNA, 120 bp, Artificial Sequence
  ENSG00000134146_7 (sequence is synthesized)
aacattgttcattaaaccaccatttctatacaaaaaaattgcatagtattttctcagttactatgactagtttatttttttctcatgactcttatttttttagagaaacatactttcact

SEQ ID NO: 308456 - DNA, 120 bp, Artificial Sequence
  ENSG00000134146_8 (sequence is synthesized)
tagtgccaactttcttggaattcactctttctctttcgttaacacatcttccctatgaccttttttttcttttatttcatctataaaccccatttctgtagcatttctttttttatcaca

SEQ ID NO: 308457 - DNA, 120 bp, Artificial Sequence
  ENSG00000134146_9 (sequence is synthesized)
ctagtttcttttcctccttctctctttcttgctccaatccctaccaataatgtcatgatgcagaggcatttgaaaatgaagatgaaaagatggtcactttatttagccagtcaagcttat

SEQ ID NO: 308458 - DNA, 120 bp, Artificial Sequence
  ENSG00000134146_10 (sequence is synthesized)
tctactgggtgtcgccaaagcgatttatcatttttattttaaatatattcatggttgaagtgtttcaacgttattggacaattaggaagaatgtccttaactcttacaagttattttata

SEQ ID NO: 308459 - DNA, 120 bp, Artificial Sequence
  ENSG00000134146_11 (sequence is synthesized)
actgatttttaaaatgctgtttttcagtattaactatgttgaccttagaaaacttttacaaaaaatagactttatgttttagaacagttttaggttcacagcaaaaatggagcagaaaat

SEQ ID NO: 308460 - DNA, 120 bp, Artificial Sequence
  ENSG00000134146_12 (sequence is synthesized)
gcagagatttcccatataccctctacctccacacattcacagcctcccctaccgtcaatgtcttataatagagtggtacatttgttacaactgatgaacctacattgacacattattatc

SEQ ID NO: 308461 - DNA, 120 bp, Artificial Sequence
  ENSG00000134146_13 (sequence is synthesized)
acccaaagtccatagtttacgtgagggttcactcttggtgttgtacataatatgggttttgacaaatgtgtaatgacatttgtcaaccgttatagtattatacagaataatttcactgcc

SEQ ID NO: 308462 - DNA, 120 bp, Artificial Sequence
  ENSG00000134146_14 (sequence is synthesized)
ttaaaaaatcctctgtgttttacttattcatccctccctctcctttaacccttagcaactgatcttttcactgtgtacatagttttgcttttaccagaatgtaatgtagttgaaatcata

SEQ ID NO: 308463 - DNA, 120 bp, Artificial Sequence
  ENSG00000134146_15 (sequence is synthesized)
cagtatatagcttttcatgcagtatatagcttttcagattggcttctttcatgtattaatatgcatttaggtttctctgtatcttgtcatgtatatgtagctcattttttttttagtgta

SEQ ID NO: 308464 - DNA, 120 bp, Artificial Sequence
  ENSG00000134146_16 (sequence is synthesized)
gaataaaattttattgtctggttctaccacatttcatttgtccatgcacctattgaagaacatctcagttgcttccatgttttggcgattatgaataaagcgactataaacatccatgaa

SEQ ID NO: 308465 - DNA, 120 bp, Artificial Sequence
  ENSG00000134146_17 (sequence is synthesized)
aacttgttaaggaagagtaagaaagagccacaggaatctcagactttactgtgtaagtgaagtacaaattaacccaatgattgaagtgcagttgaaaaagagctggtgagcctggaagag

SEQ ID NO: 308466 - DNA, 120 bp, Artificial Sequence
  ENSG00000134146_18 (sequence is synthesized)
atttaggccaagtaagaagataattgctcaaatagtcttgtagccttggggtgttttctttacatttgggtgcctcttctacataaagggttttcttctgggcttatgcatattaaatag

SEQ ID NO: 308467 - DNA, 120 bp, Artificial Sequence
  ENSG00000134146_19 (sequence is synthesized)
aagggcatcactagaatgaccttgcttgctgaatatgatgctctgaatctccaagattttcacatgcatttgaaagtgggcagccaggcgattgtttacaggactccaaatgaactgtgc

SEQ ID NO: 308468 - DNA, 120 bp, Artificial Sequence
  ENSG00000134146_20 (sequence is synthesized)
actcacagcaagtttgataaacacacatttcctccttttatcagtgagattgcaaaatgtgaagtatgagtttccagttttactgattcccctcaacccttttcctgtttaaaaacttag

SEQ ID NO: 308469 - DNA, 120 bp, Artificial Sequence
  ENSG00000134146_21 (sequence is synthesized)
acatactaattggatgctgatctgtccctgtttttcattctgcttgctggtagttgacggcttagtttagtacttacctaggcaagatttggcaaaccttcaaaaatgaactttccatgt

SEQ ID NO: 308470 - DNA, 120 bp, Artificial Sequence
  ENSG00000134146_22 (sequence is synthesized)
attcaacttaaaggagattcatcccaaggaatgtaatgtgaacactaattaacattaatgactgctaatcactttgctttttatactcctttaggagcactgctattatccaatgtagtt

SEQ ID NO: 308471 - DNA, 120 bp, Artificial Sequence
  ENSG00000134146_23 (sequence is synthesized)
aagtaaaatgcttgtatatgaatcaacaatgttgcatccttttagcagctattgctcacaatcaagctttgcataaattaaagttgactaaaattgattttaatatgctgctcttcttca

SEQ ID NO: 308472 - DNA, 120 bp, Artificial Sequence
  ENSG00000134146_24 (sequence is synthesized)
atagtaaactaaaatatctagttaaatatcctgcatattaaaaatacattgcctgattttttttgtagtcatcctgtggtagatgaaaagcaatattgcaaatacattttctcacagttc

SEQ ID NO: 308473 - DNA, 120 bp, Artificial Sequence
  ENSG00000134146_25 (sequence is synthesized)
atgacactttctcttagatttcttcaaaattgaacacaactcttcatagtcctatcagcactttgattctgttgtaagcattaattttgttagatcaatgaaaagcaatcagcctatgtt

SEQ ID NO: 308474 - DNA, 120 bp, Artificial Sequence
  ENSG00000134146_26 (sequence is synthesized)
taatttttctgaatttgttcatttacttcctagaggatcttacagattctttagatgatatagtctatttatataaagttggttcataggattgtacattcaacattcattaaaaaaggt

SEQ ID NO: 308475 - DNA, 120 bp, Artificial Sequence
  ENSG00000134146_27 (sequence is synthesized)
tgtttattatgtttagtgaattacaggaccattataaaagctttctgtttatttacatgcattcaatgtacctgtgactagaactgccttgccttaggaggaaactaagcaaaacccata

SEQ ID NO: 308476 - DNA, 120 bp, Artificial Sequence
  ENSG00000134146_28 (sequence is synthesized)
aattaataatttaagggagcaatactcaagtagcatttcagttaaaaagtaaagcctcagagtcagtactagccactttagcattgctttactttttgacttttattggctgaaaataac

SEQ ID NO: 308477 - DNA, 120 bp, Artificial Sequence
  ENSG00000134146_29 (sequence is synthesized)
ttgttaaactggagcttttgtaataaaatgaaatctacataccatctaaagccccttcccctccttttgatttatgagtaggttgacatattactggagaatttgtaacactttcacagt

SEQ ID NO: 308478 - DNA, 120 bp, Artificial Sequence
  ENSG00000134146_30 (sequence is synthesized)
tctgcactttgatttcagagaaggtgctaatctctctggaattttgagagtgacaaaatgagttgtatactgtttttccagggaatttgggttcctttattagaggccttagttttatta

SEQ ID NO: 308479 - DNA, 120 bp, Artificial Sequence
  ENSG00000134146_31 (sequence is synthesized)
gattagatatacattaatggaggatttttttttcattgtacatattctacttggtttgatcatattataattctcacagctaatgtccatgtttctacagaggttcagcaattcaggata

SEQ ID NO: 308480 - DNA, 120 bp, Artificial Sequence
  ENSG00000134146_32 (sequence is synthesized)
ttattttcaaattaccaaaatgagataatttaactcccttttacttttgcattatttttagtggaaaaaaattaaatggtagtattataagaagctttatgctgtgtatgctagtcttat

SEQ ID NO: 308481 - DNA, 120 bp, Artificial Sequence
  ENSG00000134146_33 (sequence is synthesized)
tgtatatatgtactgaaagtacctttgacactgtacttaattggatttaatttcaaagaattgtaacaggaattatgtgagagaatagaaaatatatggaacttaattaagtgctgtcca

SEQ ID NO: 308482 - DNA, 120 bp, Artificial Sequence
  ENSG00000134146_34 (sequence is synthesized)
tatgtaaaggtaagattcatgactattgtttgatgtaacttatttattttacatcctgatactgttgtataatagcacaaaatgcatgtctatgaggaaaaacttgctttttctatttta

SEQ ID NO: 308483 - DNA, 120 bp, Artificial Sequence
  ENSG00000134146_35 (sequence is synthesized)
tctatgaggaaaaacttgctttttctattttactttgagtttttatgtgtaataaaattatgcttaaaataggcgaggatttcagttttgattcttcttcttttgttttttttttgtttt

SEQ ID NO: 308484 - DNA, 120 bp, Artificial Sequence
  ENSG00000134146_36 (sequence is synthesized)
gattgatctgtagctgtcattttatccaagaagggacaaatggaattggtcttttagacaaaagtatgcaaacagactgcattctttctgttgatagaattatggaagaattgcatgagg

SEQ ID NO: 308485 - DNA, 120 bp, Artificial Sequence
  ENSG00000134146_37 (sequence is synthesized)
tgccacattcagttgcctattgattgtaaagaggattctgcagtggggtgctgtttccaatggataaggaggtgctatgattacttacctttctcatgaaagcactacaaagggaaatgc

SEQ ID NO: 308486 - DNA, 120 bp, Artificial Sequence
  ENSG00000134146_38 (sequence is synthesized)
aaaatgtgtgcagtgcagtcttctctatttgacagttgtttttgttaagttttttcccccattgaagtccagcctgttttagaaaaacatacattttagttctttcccctttatatcagg

SEQ ID NO: 308487 - DNA, 120 bp, Artificial Sequence
  ENSG00000134146_39 (sequence is synthesized)
cttagtagatttccatgcatttgaccctttagagaaattacatgttatagacagttttctttttctcagcctctattgtaaagcttcaaagctgatgcaacagtgccctctatagtcttt

SEQ ID NO: 308488 - DNA, 120 bp, Artificial Sequence
  ENSG00000134146_40 (sequence is synthesized)
tagtgaacattagacagatgtagatgatttcaaatgttcaggtaagaaacaggacatttaaatttaatttttgttcaaacaagagacccctttttcctaagtagacattcttgtttttca

SEQ ID NO: 308489 - DNA, 120 bp, Artificial Sequence
  ENSG00000134146_41 (sequence is synthesized)
ctagtggctttactttaaacaaagagaacaaaagaccattctgagttttcatttagaattattggctgcttcttctttttatcccttggtaaatctcaagttttatcagacgttcatcag

SEQ ID NO: 308490 - DNA, 120 bp, Artificial Sequence
  ENSG00000134146_42 (sequence is synthesized)
agtaatttgagaaagatggaatcttacaggctgtactgtctgttcatgaaatatctttttgaagttgaactctgataggagtattttttaaaaataatttagttcctttgtacttgtttt

SEQ ID NO: 308491 - DNA, 120 bp, Artificial Sequence
  ENSG00000134146_43 (sequence is synthesized)
ttctatttaattagaatctgagtgggctgcctaaaatttgacttctatttattcctgaattgtgaaacccagtcgttatacatgacattatttaaattcaaaccaagggagttacacaat

SEQ ID NO: 308492 - DNA, 120 bp, Artificial Sequence
  ENSG00000134146_44 (sequence is synthesized)
gactaaagtgtttgtcattcattagcattgatttaaattttagatttcctttttctctttttggttacctttttgattgtatatattgatagctaagtttttcattgtaaaatgcaacta

SEQ ID NO: 308493 - DNA, 120 bp, Artificial Sequence
  ENSG00000134146_45 (sequence is synthesized)
gatgtgaagttatggataataaaagcaggaatcatatttagatatgattagaagagaaaaatgttatggattaagtttattttgcttctgaaagtgttttaataaaaagatcacgggccc

SEQ ID NO: 308494 - DNA, 120 bp, Artificial Sequence
  ENSG00000134146_46 (sequence is synthesized)
ttaccagtggactagcagcatctgagccacgtttctctcattcagtggagaaagcatgttacatgcagctgcttaagccttttcttttctccaaggtgctaatttagttagtatttagtg

SEQ ID NO: 308495 - DNA, 120 bp, Artificial Sequence
  ENSG00000134146_47 (sequence is synthesized)
agtaagaaaattgctttttaaaacagaaaataaattaacaggtttatttatttttctttacttttattcttcccaaaacctgaatctataaatgtctggtattaaatgatgtttaatgat

SEQ ID NO: 308496 - DNA, 120 bp, Artificial Sequence
  ENSG00000134146_48 (sequence is synthesized)
ctcaccagatggtggcatctttatagtggacttttcagcctccagaactgtgagttcattcatgagggtggagtcatcatggtctaattaattattacagatcctactatgagccaattc

SEQ ID NO: 308497 - DNA, 120 bp, Artificial Sequence
  ENSG00000134146_49 (sequence is synthesized)
atttctgttcttaataaattactcagtctgtagtattctgttacagcagcataaaacaggctaagacactcatcagttgtaacaaatctactacactaatccaaaatattaatagaggaa

SEQ ID NO: 308498 - DNA, 120 bp, Artificial Sequence
  ENSG00000134146_50 (sequence is synthesized)
actgtggggagaggttgggaggtgatgtgggacctcttggtatttcccactcaacttttctgtaaacgtaaaactgccctcccaaaatagtctatttttaaaaaataaaagtagtcaaaa

SEQ ID NO: 308499 - DNA, 120 bp, Artificial Sequence
  ENSG00000134146_51 (sequence is synthesized)
atctaaaagaaaaaaattatagtagacagagatatatgatatcacaagtatagtaaaatgttaatagtggtagtgtatgtggatgttccttattatactctgctttgtgtttgacatttt

SEQ ID NO: 308500 - DNA, 120 bp, Artificial Sequence
  ENSG00000134146_52 (sequence is synthesized)
tcataataaatgtgtaacaaagtcattgtgggtaatattaaaagaaagcttagcatagtaaggttcagttgaacctgtgggacttaattctaattccattatggatttctcatatgattc

SEQ ID NO: 308501 - DNA, 120 bp, Artificial Sequence
  ENSG00000134146_53 (sequence is synthesized)
tactaaaaaatgtaacttgatttaactacttgaattacttatctaaattatgaaacccagttggccctgtcttcagaaactagaatccagataaaattacctattgtttgtgatgttaac

SEQ ID NO: 308502 - DNA, 120 bp, Artificial Sequence
  ENSG00000134146_54 (sequence is synthesized)
atgtattatcccatcagcagaagaatctgagcagtgcattgtagtttttttaaacaatattgatgatatggtagtagaaactgaacagctactccctggactttgtcaatgtacttgtta

SEQ ID NO: 308503 - DNA, 120 bp, Artificial Sequence
  ENSG00000134146_55 (sequence is synthesized)
tgacttagcactgttttatttaccatccaaaaacatattttttattactcactgcaacatgacaataattccagttttgagtggtgtatatttctcattatgaatctaaatacacagaac

SEQ ID NO: 308504 - DNA, 120 bp, Artificial Sequence
  ENSG00000134146_56 (sequence is synthesized)
gtttgctctgttttcagtcactaggctgcgtgaaaatggtgtattaaaaatagtctgacatatttgcatatttatctgtattaaaagcgtcatgaaacagttattgcagatacacagctg

SEQ ID NO: 308505 - DNA, 120 bp, Artificial Sequence
  ENSG00000134146_57 (sequence is synthesized)
ttgcttttcaactattttttaaaggaaccatatctgctctcctatataaaatacatacattttcaaaagtatcgtctgagccaaatgaatttcaaagccttaaagaggaaagcttatctc

SEQ ID NO: 308506 - DNA, 120 bp, Artificial Sequence
  ENSG00000134146_58 (sequence is synthesized)
agagaattataaatttttagtcactgtgtctaaatgataaatttttaacctaaaatgataaacttgttcctttgccaagtcagatattatgcattgtaaacagaaagtaattctggaagc

SEQ ID NO: 308507 - DNA, 120 bp, Artificial Sequence
  ENSG00000134146_59 (sequence is synthesized)
tcctacaaattatggctgcatttcagcatagaggctgtttacctactctacagagcacataaaaggatgctgctttatatcaaccacattacggaagagaagactacactttgtgactta

SEQ ID NO: 308508 - DNA, 120 bp, Artificial Sequence
  ENSG00000134146_60 (sequence is synthesized)
tatcatctttcttttcaattaaaaagaaaactgtatgcctctggaatcctagctactatcatcttagtagttgccagaaaaggaccctgatttaaaaacaattctagtgactttcattat

SEQ ID NO: 308509 - DNA, 120 bp, Artificial Sequence
  ENSG00000134146_61 (sequence is synthesized)
tttttaaggatttcaatatggactctcttggtgtaagaaaacatacattttttttcaattctgtgatcatatcaggttcagttgattgtcatataattcaaataaacaccagacgttctc

SEQ ID NO: 308510 - DNA, 120 bp, Artificial Sequence
  ENSG00000134146_62 (sequence is synthesized)
attttagtatcttaattacactgcttgttttgttttaattaaaaaaaaaagctttaagcatagttgaacaaaagatctcacgtttcataattcagtttcaccatgttagctaaataagag

SEQ ID NO: 308511 - DNA, 120 bp, Artificial Sequence
  ENSG00000134146_63 (sequence is synthesized)
agtccaaagaagagaggattatcatatgttaaataaaaagttggccactttgtagcattaatcctattagaaaaagataatttctgtctaacttaatcagtaagaagtctttattgccct

SEQ ID NO: 308512 - DNA, 120 bp, Artificial Sequence
  ENSG00000134146_64 (sequence is synthesized)
gagtattaattgattaggttctcattaaggtcaaaagtacacttgactgaccacaggcagccaattagcaaattgtcagccatgcttacttatattgactgaacataatggtagttattt

SEQ ID NO: 308513 - DNA, 120 bp, Artificial Sequence
  ENSG00000134146_65 (sequence is synthesized)
gactgtcaagtcagaaggtcactgaatcttttgtgcactttgccctctgaaagggcaacagtcattcagaccccagaatgcattcataacaaagatttagcttattacttattgacttaa

SEQ ID NO: 308514 - DNA, 120 bp, Artificial Sequence
  ENSG00000134146_66 (sequence is synthesized)
atcacccttagaaaaaggtgtttcgttctctttgaacaaatactatgttatttctttgtaaaatacttgaagtttggttgaaatcctgtggttgattgtgtctgaggatttttgttcagc

SEQ ID NO: 308515 - DNA, 120 bp, Artificial Sequence
  ENSG00000134146_67 (sequence is synthesized)
aagcagcttgcacttgaaactctaaatagctttttaaagagcagatcgatccaatgactacagttggccctctgtatctgtgggttctgcatctgtggattcaaccgaggactgaaaata

SEQ ID NO: 308516 - DNA, 120 bp, Artificial Sequence
  ENSG00000134146_68 (sequence is synthesized)
ggattcaaccgaggactgaaaatatttgaaaaaaaatgttgtgtctgtaccaagcacgtacagactttattcttgtgattactcagtaaaaaaaatacagtataacaactatttacatag

SEQ ID NO: 308517 - DNA, 120 bp, Artificial Sequence
  ENSG00000134146_69 (sequence is synthesized)
aagtcatcgagagatgacttaaaacatacagggaggatgtgtgtatgccattttatatcagggacatgagcattctcagattttggtattcaagagagactctggaaccattcccccact

SEQ ID NO: 308518 - DNA, 120 bp, Artificial Sequence
  ENSG00000134146_70 (sequence is synthesized)
gacaccaagaaagaactgtatatccctttgcaatataaacttttctcctgctatgtggctttgctctaattgtagaaagttgggcacacagttgctgaaatggctctgggacaccagtct

SEQ ID NO: 308519 - DNA, 90 bp, Artificial Sequence
  ENSG00000134146_71 (sequence is synthesized)
tgggcacacagttgctgaaatggctctgggacaccagtctcaaagttaacggttagaaccatatttgaggctcacattaataaggacatt

SEQ ID NO: 308520 - DNA, 120 bp, Artificial Sequence
  ENSG00000134146_72 (sequence is synthesized)
agtaatccgtaatttgcaattgttagtagcccaactattctttaaaaggattttgtctttttttggttagaaaaaaactgcaaatgattagtatgcctttatattaaatgatatttaaaa

SEQ ID NO: 308521 - DNA, 120 bp, Artificial Sequence
  ENSG00000134146_73 (sequence is synthesized)
ctacgctttttagaattgcacttggaggacaagtgcctgacaactacagaacatctaattatatatataatttttgaaaagtgttttggaacattgttcattaaaccaccatttctatac

SEQ ID NO: 308522 - DNA, 120 bp, Artificial Sequence
  ENSG00000134152_0 (sequence is synthesized)
agctatcccggcgggccgcgcgcgcggccgcgtttgaatggccctgagtgggactcggcccagaagccgagggactctctaggctgccgggcgctggtcgtcagcgccgaggctgggctg

SEQ ID NO: 308523 - DNA, 120 bp, Artificial Sequence
  ENSG00000134152_1 (sequence is synthesized)
aggcgccgcggtaccatgaggcgccggtacttaagagattatggcatcagaaacccacaatgttaaaaaacggaacttttgtaataagattgaggatcatttcattgatcttcctagaaa

SEQ ID NO: 308524 - DNA, 120 bp, Artificial Sequence
  ENSG00000134152_2 (sequence is synthesized)
aaagatctctaatttcactaataagaacatgaaggaggttaagaaatctccaaaacagttggctgcttacataaatagaacagttggacaaactgtgaaaagcccagataaacttcgtaa

SEQ ID NO: 308525 - DNA, 120 bp, Artificial Sequence
  ENSG00000134152_3 (sequence is synthesized)
agtgatctatcgcagaaagaaagttcatcatccctttccaaatccttgttacagaaaaaaacagtcccctggaagtgggggctgtgacatggcaaataaagaaaatgaactggcttgtgc

SEQ ID NO: 308526 - DNA, 120 bp, Artificial Sequence
  ENSG00000134152_4 (sequence is synthesized)
aggccacctgcctgaaaaattacaccatgatagtcgaacatatttggttaactccagtgattctggttcttcacagacagaaagcccatcatcaaaatatagtgggtttttttctgaggt

SEQ ID NO: 308527 - DNA, 120 bp, Artificial Sequence
  ENSG00000134152_5 (sequence is synthesized)
ttctcaggaccatgaaacaatggcccaagttttgttcagcaggaatatgagattgaatgtagctttaactttctggagaaagagaagtataagtgaacttgtagcttatttgttgaggat

SEQ ID NO: 308528 - DNA, 120 bp, Artificial Sequence
  ENSG00000134152_6 (sequence is synthesized)
agaagatcttggcgttgtggtagattgccttcctgtgctcaccaattgtttacaggaagaaaaacaatatatctcacttggctgctgtgttgacttgttgcctctagtaaagtcactact

SEQ ID NO: 308529 - DNA, 120 bp, Artificial Sequence
  ENSG00000134152_7 (sequence is synthesized)
taaaagcaaatttgaagaatatgttatagttggtttaaactggcttcaagcagtcattaaaaggtggtggtcagaactatcatccaaaacagaaattataaatgatggaaatattcaaat

SEQ ID NO: 308530 - DNA, 120 bp, Artificial Sequence
  ENSG00000134152_8 (sequence is synthesized)
tttaaaacaacaattaagtggattatgggaacaggaaaaccatcttactttggttccaggatatactggtaatatagctaaggatgtagatgcttatttattacagttacattgagagat

SEQ ID NO: 308531 - DNA, 120 bp, Artificial Sequence
  ENSG00000134152_9 (sequence is synthesized)
ttcatctactaaagagcatttggtttttcaaaacatccctgaactgtataatttacaaaaaaaaaaagtctcgtctgagaactgtgaactgtggaagaaatcaaaactattttttctttt

SEQ ID NO: 308532 - DNA, 120 bp, Artificial Sequence
  ENSG00000134152_10 (sequence is synthesized)
aaaaagccacgtaatgaaaccactaatgaaatcccagcaatctgcttcacattgaagtggaaaaatatccaaaaggagcagcttcaatttcattgaggtgaaagtgcactatgaagattg

SEQ ID NO: 308533 - DNA, 120 bp, Artificial Sequence
  ENSG00000134152_11 (sequence is synthesized)
gaaaaaataagacaggacttaccactaggaaccaccaagaccaatcatcattaacttttttaagattgtgttttattaaaaaaaaaaaacacttaaatgtgtgcagctattttcttatgt

SEQ ID NO: 308534 - DNA, 120 bp, Artificial Sequence
  ENSG00000134152_12 (sequence is synthesized)
tgaaaagactgaaagtttaaaacatgaaaaaaatcaatattaaacattttttgttcacactgagatactgtgtatgtaaaatgccttaattattaataagccaatgtgttatgataccaa

SEQ ID NO: 308535 - DNA, 120 bp, Artificial Sequence
  ENSG00000134152_13 (sequence is synthesized)
tatctgttttaaaaaactaaaaccaaccatgcttctggcatgataaaatcatggaattaaatcaggggtttacattcttgtagagtgttcttgaaacactctctgcaccatttttaaaac

SEQ ID NO: 308536 - DNA, 120 bp, Artificial Sequence
  ENSG00000134152_14 (sequence is synthesized)
ttgagaatagttttagtatctctgatattttttgccagaatcatcatgtcatgtatgaatgtgttatccctatctaaggaaaaaggtgaatatgtttttgtatgaatgtttaactggaaa

SEQ ID NO: 308537 - DNA, 120 bp, Artificial Sequence
  ENSG00000134152_15 (sequence is synthesized)
tgtccatggacttggctaatttatatttactttttattgtacatagatttctaatatttttcattcctgtatcatttaaacttccttcatttgagtaaattcactaaatatttctatttt

SEQ ID NO: 308538 - DNA, 120 bp, Artificial Sequence
  ENSG00000134152_16 (sequence is synthesized)
ttgcttttttaaattctgattttatatgaattctaattctttttcactacatatgttttaaagagttacatacagtgatttagaatggtttacagttaatgctgatcttgtattttaaat

SEQ ID NO: 308539 - DNA, 120 bp, Artificial Sequence
  ENSG00000134152_17 (sequence is synthesized)
tccaacactttgtgtcactacctcctctaatggttagtatgatatgctagcagactgtatgaggtctttttttaaaataccacttttagtgtcagtgaaccaaattctggaatgtcttaa

SEQ ID NO: 308540 - DNA, 120 bp, Artificial Sequence
  ENSG00000134152_18 (sequence is synthesized)
cagctctaaatcttacttgtcttgaaaatgattggggtttaataccactgctggtggttcacacatcatcccatccttaatatgcctgacaggcatctgagcaaaggtttttagtaattg

SEQ ID NO: 308541 - DNA, 120 bp, Artificial Sequence
  ENSG00000134152_19 (sequence is synthesized)
aatttctctgcagtagtccttcaagcacttgaatgtaaacctttagcatttattcgtttaatgactactgatacgaatctcaagcagatttcttgctcttaaaagttatgtttcactgag

SEQ ID NO: 308542 - DNA, 120 bp, Artificial Sequence
  ENSG00000134152_20 (sequence is synthesized)
ttctggttttgtgtagctatattttatatagctagatattcctcacagtgaacatgaattgtaataattggttatttccttaagtctttagattataataatttcagattattgcacgtc

SEQ ID NO: 308543 - DNA, 120 bp, Artificial Sequence
  ENSG00000134152_21 (sequence is synthesized)
tgtgatttgagaggtgagttatttaagaggccagttttcaggacatgggaatttgaattgtaaacctgttatctctgtgaaacttttaacatgataaaatataacctttctttgtgctta

SEQ ID NO: 308544 - DNA, 120 bp, Artificial Sequence
  ENSG00000134152_22 (sequence is synthesized)
gaggcgccgtggttataaactgttttcaccttcaagattcttgagagataactacacataccctttgccatagtgggaatgactgtgtagtagtaactggaggagaaagtttctttgtac

SEQ ID NO: 308545 - DNA, 120 bp, Artificial Sequence
  ENSG00000134152_23 (sequence is synthesized)
atgctcttgcgaccactccaggcacgattggcacccttctgcagaagtaaattgccttgctgagaaagctttttgccggagtgctgattcttctttgcggcaccaagcatttgtttctaa

SEQ ID NO: 308546 - DNA, 120 bp, Artificial Sequence
  ENSG00000134152_24 (sequence is synthesized)
ttgaacatgtttcatgtacagcccctgaaatgctatgctagaggatatttacagagggttttaatcagagaaaagtatttgaaaaaattttgagaatccaataaggacagcatcagaaaa

SEQ ID NO: 308547 - DNA, 120 bp, Artificial Sequence
  ENSG00000134152_25 (sequence is synthesized)
caagacgaggaactcaggaaacaagggataagaaacataattaaatggttttggagattaagttttacttttgctaatgttatgctttttgagaaggtaaactatttaaatcacagtgaa

SEQ ID NO: 308548 - DNA, 120 bp, Artificial Sequence
  ENSG00000134152_26 (sequence is synthesized)
aacttgtagcttatttgttgaggtaagtgtgaccttttatcctctttgttcaatcactttttttctgagacaagttcttgctttgtcatccaagttggagtacagtggcacaatcatggc

SEQ ID NO: 308549 - DNA, 89 bp, Artificial Sequence
  ENSG00000134152_27 (sequence is synthesized)
ttcaagcagcgtacaggtgcacatcaccacacctggctattttttaaaaaaattttttggaagacatgaggtcttatgtttcccgggct

SEQ ID NO: 308550 - DNA, 120 bp, Artificial Sequence
  ENSG00000134152_28 (sequence is synthesized)
tgtgagtacatagtagattgggctccatgagacatgcaaggtttctgttttcaagaagctaatagtacaattaggaaaagaatatgaaatgactaaaggacaattataaaagcatctcta

SEQ ID NO: 308551 - DNA, 120 bp, Artificial Sequence
  ENSG00000134152_29 (sequence is synthesized)
aacaaattacatgaaatatacttttgtgtaatagatcatgaaggtaacaattttttaaaagggaagggaccaatgtgtgtgtgtgttttttgggagggaaagtatcatcttttataagaa

SEQ ID NO: 308552 - DNA, 120 bp, Artificial Sequence
  ENSG00000134152_30 (sequence is synthesized)
gggttcttagatgaaaacacttgaattttgtaacaaaatgtcatttcagatatgttatagttggtttaaactggcttcaagcagtcattaaaaggtggtggtcagaactatcatccaaaa

SEQ ID NO: 308553 - DNA, 120 bp, Artificial Sequence
  ENSG00000134152_31 (sequence is synthesized)
cagaaattataaatgatgggtgagtatacctttaaagataaactcatgctgaaattttcttcaggaaagcagcttgattaaactaggtaataattttatcccattatcatcagtgtatgg

SEQ ID NO: 308554 - DNA, 120 bp, Artificial Sequence
  ENSG00000134152_32 (sequence is synthesized)
tgttctttccgtcttcacaataaatcttgctgttgctcactgtttgggtccgcatcacctttaagagctggaacacttgccacgaaggtcctccggcttcattcttgaattcggccagac

SEQ ID NO: 308555 - DNA, 120 bp, Artificial Sequence
  ENSG00000134152_33 (sequence is synthesized)
caccggaaggaagaaactccggacacatcggaaggaacaaactctggaccacgaacccaccagagggaagaaactctggacacaccatttttgagagctgtaacagcgtgaaggtccacg

SEQ ID NO: 308556 - DNA, 120 bp, Artificial Sequence
  ENSG00000134152_34 (sequence is synthesized)
tctggcacaaccctacccttcattttagaagaaaaacacaatagtggtttaattctcatattcattatgagtaagggaggaaaaagagatgcccacagtgtaataaggaatggaggcacc

SEQ ID NO: 308557 - DNA, 120 bp, Artificial Sequence
  ENSG00000134152_35 (sequence is synthesized)
ctgcggggtcctttacctagacattaacctgagagtccggtgttgatgtttacagttctaaaaactgtattattactgccttgatgtgaaaattcgtgggtattctaccagagtatagcc

SEQ ID NO: 308558 - DNA, 120 bp, Artificial Sequence
  ENSG00000134152_36 (sequence is synthesized)
gtatagccagattatcatgaaaccacagaaaaatatctcccaacagtttccttaaagtccataattttgggccaggcacggtggctgatgcctgtctgtaatcccagcactttgggaggc

SEQ ID NO: 308559 - DNA, 78 bp, Artificial Sequence
  ENSG00000134152_37 (sequence is synthesized)
atcccagcactttgggaggccaagaagggcaaatcacttgagctcacaagtttgagacagcctgggcaacatgatgac

SEQ ID NO: 308560 - DNA, 120 bp, Artificial Sequence
  ENSG00000134152_38 (sequence is synthesized)
ttgacaactaaataacctttaattttctttttttttttaattgaaatcaagtaagaaattttattaattttggaattgaaaaaacatcctttgttgtttccaagaattaattaaatagga

SEQ ID NO: 308561 - DNA, 120 bp, Artificial Sequence
  ENSG00000134152_39 (sequence is synthesized)
ggcatttggcggtattatgtggataaacctttaattttcatgactgacatgtattattctaaaagttatttgatttttttttaatttctctccacgttcccaaatgttttatttcaaata

SEQ ID NO: 308562 - DNA, 120 bp, Artificial Sequence
  ENSG00000134152_40 (sequence is synthesized)
gcatcattttctcctgaaaaatacctgaaaaattttagaacagtttttattatgcatatttatgatgaaagtttgtatcttaatgtatttgctttctcatttttcttccttttttttctt

SEQ ID NO: 308563 - DNA, 120 bp, Artificial Sequence
  ENSG00000134152_41 (sequence is synthesized)
taccatgaggcgccggtaagtgactgccgagccggtgcgagccccgcgcccgcagctgccctgccctggcagggctactccagccgggcttggccgcgccctgggcccacctgcaggccc

SEQ ID NO: 308564 - DNA, 120 bp, Artificial Sequence
  ENSG00000134152_42 (sequence is synthesized)
cggggcggcaaggccggggcggagcccctctgccggtccctgcggggagagtcgggcagcgggcgctggggggctccaggggactgggccgggagaggcgtggaccgaacctgttgtcac

SEQ ID NO: 308565 - DNA, 120 bp, Artificial Sequence
  ENSG00000134152_43 (sequence is synthesized)
tgggccgggagaggcgtggaccgaacctgttgtcacttatttatcttcgggtggagtcgacagctgcacctggggaaggggaaggacagaacgagtgtggggcgagcatttttgaggaca

SEQ ID NO: 308566 - DNA, 120 bp, Artificial Sequence
  ENSG00000134152_44 (sequence is synthesized)
ggttttccgcagagcgcctaggcccggcccaggcatttccttattttccgacgggtcctcggattcctgacggatgagcttttgtttcgcaggacaaaaacttgacataactgcataaga

SEQ ID NO: 308567 - DNA, 120 bp, Artificial Sequence
  ENSG00000134152_45 (sequence is synthesized)
attgtcgattgcaactttaaaaaccttactgtattttctgaaaagttgttctgtaaagtatctaggcttttactacgctcttatattgcttaaatatggagataacaaagagttggtttg

SEQ ID NO: 308568 - DNA, 120 bp, Artificial Sequence
  ENSG00000134152_46 (sequence is synthesized)
cttgcgagaattatgagaaactagtccacctaatagcttaaatctgctgggttttttggagtttctttggatagccagcttcagacttgaattgaaacgtcatccattgaggcttttact

SEQ ID NO: 308569 - DNA, 120 bp, Artificial Sequence
  ENSG00000134152_47 (sequence is synthesized)
tggctaataactaatattagccaataataatattagccagtgtgatcataatgatgggcaatatttattttgtgctttctatgcgctgggcgtattaagagctttactttgggatatata

SEQ ID NO: 308570 - DNA, 120 bp, Artificial Sequence
  ENSG00000134152_48 (sequence is synthesized)
ctgttgtccccattttgacagtgaagaaactaaggcacaggaaattttagtattgtaacttttgtaccgtacagggttacacagctaatataattaacacccgagcaggctggctccacg

SEQ ID NO: 308571 - DNA, 120 bp, Artificial Sequence
  ENSG00000134152_49 (sequence is synthesized)
cttttaactctgttgctctactacctcctttatctgtggctctttttagtttacaaagccctttcatttcatttacttaaacttcggagacctgagtgtgcttttgtgtacacatacatt

SEQ ID NO: 308572 - DNA, 120 bp, Artificial Sequence
  ENSG00000134152_50 (sequence is synthesized)
cattcacacaccattcattcaagttttctgctcttgatgattatacttaaggtttgtgcctgagcaaaaaatccattgactattttaagataaatggagttcataagctttatgtgtgtt

SEQ ID NO: 308573 - DNA, 120 bp, Artificial Sequence
  ENSG00000134152_51 (sequence is synthesized)
ataatttatgttttcaattcctttatatcctttcctgaaagttttgaaagtgttagtcttagcaacttatgtattactttaaaataaaaaattacatgttaaatgttttcatccctaaaa

SEQ ID NO: 308574 - DNA, 120 bp, Artificial Sequence
  ENSG00000134152_52 (sequence is synthesized)
gccgggcgctggtcgtcagcgccgaggctgggctgaggcgccgcggtaccatgaggcgccgctcgccctctgtaggctgcatccactgtccagccagtcccagtgagatgaaccaggtac

SEQ ID NO: 308575 - DNA, 89 bp, Artificial Sequence
  ENSG00000134152_53 (sequence is synthesized)
tcaccataatggccatcttggaatggacttgccatctctacttcttgatgtccttggtacttaagagattatggcatcagaaacccaca

SEQ ID NO: 308576 - DNA, 120 bp, Artificial Sequence
  ENSG00000134153_0 (sequence is synthesized)
ggtctgagtgcagagctgctgtcatggcggccgctctgtggggcttctttcccgtcctgctgctgctgctgctatcgggggatgtccagagctcggaggtgcccggggctgctgctgagg

SEQ ID NO: 308577 - DNA, 120 bp, Artificial Sequence
  ENSG00000134153_1 (sequence is synthesized)
gatcgggagggagtggggtcggcataggagatcgcttcaagattgaggggcgtgcagttgttccaggggtgaagcctcaggactggatctcggcggcccgagtgctggtagacggagaag

SEQ ID NO: 308578 - DNA, 120 bp, Artificial Sequence
  ENSG00000134153_2 (sequence is synthesized)
agcacgtcggtttccttaagacagatgggagttttgtggttcatgatataccttctggatcttatgtagtggaagttgtatctccagcttacagatttgatcccgttcgagtggatatca

SEQ ID NO: 308579 - DNA, 120 bp, Artificial Sequence
  ENSG00000134153_3 (sequence is synthesized)
cttcgaaaggaaaaatgagagcaagatatgtgaattacatcaaaacatcagaggttgtcagactgccctatcctctccaaatgaaatcttcaggtccaccttcttactttattaaaaggg

SEQ ID NO: 308580 - DNA, 120 bp, Artificial Sequence
  ENSG00000134153_4 (sequence is synthesized)
catgagacgggaaatggagcagtcaatgaatatgctgaattccaaccatgagttgcctgatgtttctgagttcatgacaagactcttctcttcaaaatcatctggcaaatctagcagcgg

SEQ ID NO: 308581 - DNA, 120 bp, Artificial Sequence
  ENSG00000134153_5 (sequence is synthesized)
cagcagtaaaacaggcaaaagtggggctggcaaaaggaggtagtcaggccgtccagagctggcatttgcacaaacacggcaacactgggtggcatccaagtcttggaaaaccgtgtgaag

SEQ ID NO: 308582 - DNA, 120 bp, Artificial Sequence
  ENSG00000134153_6 (sequence is synthesized)
caactactataaacttgagtcatcccgacgttgatctcttacaactgtgtatgttaactttttagcacatgttttgtacttggtacacgagaaaacccagctttcatcttttgtctgtat

SEQ ID NO: 308583 - DNA, 120 bp, Artificial Sequence
  ENSG00000134153_7 (sequence is synthesized)
gaggtcaatattgatgtcactgaattaattacagtgtcctatagaaaatgccattaataaattatatgaactactatacattatgtatattaattaaaacatcttaatccagaaatcaaa

SEQ ID NO: 308584 - DNA, 120 bp, Artificial Sequence
  ENSG00000134153_8 (sequence is synthesized)
atatcacacttgtcatttatgtgagactagggttcctctacattgctttcttgcttctgtcctttcatgctattagtggaagtgggttttctgtctatattaaaagacaggatgaatttg

SEQ ID NO: 308585 - DNA, 120 bp, Artificial Sequence
  ENSG00000134153_9 (sequence is synthesized)
ttagcactagttttgcagcagcctgcttttgaaatgtctaggcacgcgtatgttgttttaaatctttccacccttacttggaggtgaaactgtaaactgaaagcaaataattaggaagta

SEQ ID NO: 308586 - DNA, 120 bp, Artificial Sequence
  ENSG00000134153_10 (sequence is synthesized)
tttcctttggtgggttcgtacaccagcaaatggtatctgaaaatcagacaacttaaatgtagacatttaaatccaaatctgatttacatatttgttcagatcatctaagtgcccttgagt

SEQ ID NO: 308587 - DNA, 120 bp, Artificial Sequence
  ENSG00000134160_0 (sequence is synthesized)
ggaggctgaaagagcctgagctgtgccctctccattccactgctgtggcagggtcagaaatcttggatagagaaaaccttttgcaaacgggaatgtatctttgtaattcctagcatgaaa

SEQ ID NO: 308588 - DNA, 120 bp, Artificial Sequence
  ENSG00000134160_1 (sequence is synthesized)
gactctaacaggtgttgctgtggccagttcaccaaccagcatatcccccctctgccaagtgcaacacccagcaaaaatgaagaggaaagcaaacaggtggagactcagcctgagaaatgg

SEQ ID NO: 308589 - DNA, 120 bp, Artificial Sequence
  ENSG00000134160_2 (sequence is synthesized)
tctgttgccaagcacacccagagctacccaacagattcctatggagttcttgaattccagggtggcggatattccaataaagccatgtatatccgtgtatcctatgacaccaagccagac

SEQ ID NO: 308590 - DNA, 120 bp, Artificial Sequence
  ENSG00000134160_3 (sequence is synthesized)
tcactgctccatctcatggtgaaagattggcagctggaactccccaagctcttaatatctgtgcatggaggcctccagaactttgagatgcagcccaagctgaaacaagtctttgggaaa

SEQ ID NO: 308591 - DNA, 120 bp, Artificial Sequence
  ENSG00000134160_4 (sequence is synthesized)
ggcctgatcaaggctgctatgaccaccggggcctggatcttcaccgggggtgtcagcacaggtgttatcagccacgtaggggatgccttgaaagaccactcctccaagtccagaggccgg

SEQ ID NO: 308592 - DNA, 120 bp, Artificial Sequence
  ENSG00000134160_5 (sequence is synthesized)
gtttgtgctataggaattgctccatggggcatcgtggagaataaggaagacctggttggaaaggatgtaacaagagtgtaccagaccatgtccaaccctctaagtaagctctctgtgctc

SEQ ID NO: 308593 - DNA, 120 bp, Artificial Sequence
  ENSG00000134160_6 (sequence is synthesized)
aacaactcccacacccacttcatcctggctgacaatggcaccctgggcaagtatggcgccgaggtgaagctgcgaaggctgctggaaaagcacatctccctgcagaagatcaacacaaga

SEQ ID NO: 308594 - DNA, 120 bp, Artificial Sequence
  ENSG00000134160_7 (sequence is synthesized)
ctggggcagggcgtgcccctcgtgggtctcgtggtggaggggggccctaacgtggtgtccatcgtcttggaatacctgcaagaagagcctcccatccctgtggtgatttgtgatggcagc

SEQ ID NO: 308595 - DNA, 120 bp, Artificial Sequence
  ENSG00000134160_8 (sequence is synthesized)
ggacgtgcctcggacatcctgtcctttgcgcacaagtactgtgaagaaggcggaataataaatgagtccctcagggagcagcttctagttaccattcagaaaacatttaattataataag

SEQ ID NO: 308596 - DNA, 120 bp, Artificial Sequence
  ENSG00000134160_9 (sequence is synthesized)
gcacaatcacatcagctgtttgcaattataatggagtgcatgaagaagaaagaactcgtcactgtgttcagaatgggttctgagggccagcaggacatcgagatggcaattttaactgcc

SEQ ID NO: 308597 - DNA, 120 bp, Artificial Sequence
  ENSG00000134160_10 (sequence is synthesized)
ctgctgaaaggaacaaacgtatctgctccagatcagctgagcttggcactggcttggaaccgcgtggacatagcacgaagccagatctttgtctttgggccccactggccgcccctggga

SEQ ID NO: 308598 - DNA, 120 bp, Artificial Sequence
  ENSG00000134160_11 (sequence is synthesized)
agcctggcacccccgacggacagcaaagccacggagaaggagaagaagccacccatggccaccaccaagggaggaagaggaaaagggaaaggcaagaagaaagggaaagtgaaagaggaa

SEQ ID NO: 308599 - DNA, 120 bp, Artificial Sequence
  ENSG00000134160_12 (sequence is synthesized)
gtggaggaagaaactgacccccggaagatagagctgctgaactgggtgaatgctttggagcaagcgatgctagatgctttagtcttagatcgtgtcgactttgtgaagctcctgattgaa

SEQ ID NO: 308600 - DNA, 120 bp, Artificial Sequence
  ENSG00000134160_13 (sequence is synthesized)
aacggagtgaacatgcaacactttctgaccattccgaggctggaggagctttataacacaagactgggtccaccaaacacacttcatctgctggtgagggatgtgaaaaagagcaacctt

SEQ ID NO: 308601 - DNA, 120 bp, Artificial Sequence
  ENSG00000134160_14 (sequence is synthesized)
ccgcctgattaccacatcagcctcatagacatcgggctcgtgctggagtacctcatgggaggagcctaccgctgcaactacactcggaaaaactttcggaccctttacaacaacttgttt

SEQ ID NO: 308602 - DNA, 120 bp, Artificial Sequence
  ENSG00000134160_15 (sequence is synthesized)
ggaccaaagaggcctaaagctcttaaacttctgggaatggaagatgatgagcctccagctaaagggaagaaaaagaaaaagaagaaaaaggaggaagagatcgacattgatgtggacgac

SEQ ID NO: 308603 - DNA, 120 bp, Artificial Sequence
  ENSG00000134160_16 (sequence is synthesized)
cctgccgtgagtcggttccagtatcccttccacgagctgatggtgtgggcagtgctgatgaaacgccagaaaatggcagtgttcctctggcagcgaggggaagagagcatggccaaggcc

SEQ ID NO: 308604 - DNA, 120 bp, Artificial Sequence
  ENSG00000134160_17 (sequence is synthesized)
ctggtggcctgcaagctctacaaggccatggcccacgagtcctccgagagtgatctggtggatgacatctcccaggacttggataacaattccaaagacttcggccagcttgctttggag

SEQ ID NO: 308605 - DNA, 120 bp, Artificial Sequence
  ENSG00000134160_18 (sequence is synthesized)
ttattagaccagtcctataagcatgacgagcagatcgctatgaaactcctgacctacgagctgaaaaactggagcaactcgacctgcctcaaactggccgtggcagccaaacaccgggac

SEQ ID NO: 308606 - DNA, 120 bp, Artificial Sequence
  ENSG00000134160_19 (sequence is synthesized)
ttcattgctcacacctgcagccagatgctgctgaccgatatgtggatgggaagactgcggatgcggaagaaccccggcctgaaggttatcatggggattcttctaccccccaccatcttg

SEQ ID NO: 308607 - DNA, 120 bp, Artificial Sequence
  ENSG00000134160_20 (sequence is synthesized)
tttttggaatttcgcacatatgatgatttctcgtatcaaacatccaaggaaaatgaggatggcaaagaaaaagaagaggaaaatacggatgcaaatgcagatgctggctcaagaaagggg

SEQ ID NO: 308608 - DNA, 120 bp, Artificial Sequence
  ENSG00000134160_21 (sequence is synthesized)
gatgaggagaacgagcacaaaaaacagagaagtattcccatcggaacaaagatctgtgaattctataacgcgcccattgtcaagttctggttttacacaatatcatacttgggctacctg

SEQ ID NO: 308609 - DNA, 120 bp, Artificial Sequence
  ENSG00000134160_22 (sequence is synthesized)
ctgctgtttaactacgtcatcctggtgcggatggatggctggccgtccctccaggagtggatcgtcatctcctacatcgtgagcctggcgttagagaagatacgagagatcctcatgtca

SEQ ID NO: 308610 - DNA, 120 bp, Artificial Sequence
  ENSG00000134160_23 (sequence is synthesized)
ctggaacatcacagatctcgtggccatttccacattcatgattggagcaattcttcgcctacagaaccagccctacatgggctatggccgggtgatctactgtgtggatatcatcttctg

SEQ ID NO: 308611 - DNA, 120 bp, Artificial Sequence
  ENSG00000134160_24 (sequence is synthesized)
gtacatccgtgtcctggacatctttggtgtcaacaagtatctggggccatacgtgatgatgattggaaagatgatgatcgacatgctgtactttgtggtcatcatgctggtcgtgctcat

SEQ ID NO: 308612 - DNA, 120 bp, Artificial Sequence
  ENSG00000134160_25 (sequence is synthesized)
gagtttcggagtagcccgtcaagccattctgcatccagaggagaagccctcttggaaactggcccgaaacatcttctacatgccctactggatgatctatggagaggtgtttgcagacca

SEQ ID NO: 308613 - DNA, 120 bp, Artificial Sequence
  ENSG00000134160_26 (sequence is synthesized)
gatagacctctacgccatggaaattaatcctccttgtggtgagaacctatatgatgaggagggcaagcggcttcctccctgtatccccggcgcctggctcactccagcactcatggcgtg

SEQ ID NO: 308614 - DNA, 120 bp, Artificial Sequence
  ENSG00000134160_27 (sequence is synthesized)
ctatctactggtcgccaacatcctgctggtgaacctgctgattgctgtgttcaacaataccttctttgaagtaaaatcaatatccaaccaggtgtggaagttccagcgatatcagctgat

SEQ ID NO: 308615 - DNA, 120 bp, Artificial Sequence
  ENSG00000134160_28 (sequence is synthesized)
tatgacatttcatgacaggccagtcctgcccccaccgatgatcattttaagccacatctacatcatcattatgcgtctcagcggccgctgcaggaaaaagagagaaggggaccaagagga

SEQ ID NO: 308616 - DNA, 120 bp, Artificial Sequence
  ENSG00000134160_29 (sequence is synthesized)
acgggatcgtggattgaagctcttccttagcgacgaggagctaaagaggctgcatgagttcgaggagcagtgcgtgcaggagcacttccgggagaaggaggatgagcagcagtcgtccag

SEQ ID NO: 308617 - DNA, 120 bp, Artificial Sequence
  ENSG00000134160_30 (sequence is synthesized)
cgacgagcgcatccgggtcacttctgaaagagttgaaaatatgtcaatgaggttggaagaaatcaatgaaagagaaacttttatgaaaacttccctgcagactgttgaccttcgacttgc

SEQ ID NO: 308618 - DNA, 120 bp, Artificial Sequence
  ENSG00000134160_31 (sequence is synthesized)
tcagctagaagaattatctaacagaatggtgaatgctcttgaaaatcttgcgggaatcgacaggtctgacctgatccaggcacggtcccgggcttcttctgaatgtgaggcaacgtatct

SEQ ID NO: 308619 - DNA, 120 bp, Artificial Sequence
  ENSG00000134160_32 (sequence is synthesized)
tctccggcaaagcagcatcaatagcgctgatggctacagcttgtatcgatatcattttaacggagaagagttattatttgaggatacatctctctccacgtcaccagggacaggagtcag

SEQ ID NO: 308620 - DNA, 120 bp, Artificial Sequence
  ENSG00000134160_33 (sequence is synthesized)
gaaaaaaacctgttccttccgtataaaggaagagaaggacgtgaaaacgcacctagtcccagaatgtcagaacagtcttcacctttcactgggcacaagcacatcagcaaccccagatgg

SEQ ID NO: 308621 - DNA, 120 bp, Artificial Sequence
  ENSG00000134160_34 (sequence is synthesized)
cagtcaccttgcagtagatgacttaaagaacgctgaagagtcaaaattaggtccagatattgggatttcaaaggaagatgatgaaagacagacagactctaaaaaagaagaaactatttc

SEQ ID NO: 308622 - DNA, 120 bp, Artificial Sequence
  ENSG00000134160_35 (sequence is synthesized)
cccaagtttaaataaaacagatgtgatacatggacaggacaaatcagatgttcaaaacactcagctaacagtggaaacgacaaatatagaaggcactatttcctatcccctggaagaaac

SEQ ID NO: 308623 - DNA, 120 bp, Artificial Sequence
  ENSG00000134160_36 (sequence is synthesized)
caaaattacacgctatttccccgatgaaacgatcaatgcttgtaaaacaatgaagtccagaagcttcgtctattcccggggaagaaagctggtcggtggggttaaccaggatgtagagta

SEQ ID NO: 308624 - DNA, 120 bp, Artificial Sequence
  ENSG00000134160_37 (sequence is synthesized)
cagttcaatcacggaccagcaattgacgacggaatggcaatgccaagttcaaaagatcacgcgctctcatagcacagatattccttacattgtgtcggaagctgcagtgcaagctgagca

SEQ ID NO: 308625 - DNA, 120 bp, Artificial Sequence
  ENSG00000134160_38 (sequence is synthesized)
taaagagcagtttgcagatatgcaagatgaacaccatgtcgctgaagcaattcctcgaatccctcgcttgtccctaaccattactgacagaaatgggatggaaaacttactgtctgtgaa

SEQ ID NO: 308626 - DNA, 120 bp, Artificial Sequence
  ENSG00000134160_39 (sequence is synthesized)
gccagatcaaactttgggattcccatctctcaggtcaaaaagtttacatggacatcctaggaatgtgaaatccattcagggaaagttagacagatctggacatgccagtagtgtaagcag

SEQ ID NO: 308627 - DNA, 120 bp, Artificial Sequence
  ENSG00000134160_40 (sequence is synthesized)
cttagtaattgtgtctggaatgacagcagaagaaaaaaaggttaagaaagagaaagcttccacagaaactgaatgctagtctgttttgtttctttaatttttttttttaacagtcagaac

SEQ ID NO: 308628 - DNA, 120 bp, Artificial Sequence
  ENSG00000134160_41 (sequence is synthesized)
cactaatgggtgtcatcttggccatctaaacatcatcaatttctaaaaacattttccttaaaaaattttggaaattcagacttgatttacaatttaatgcactaaaagtagtattttgtt

SEQ ID NO: 308629 - DNA, 120 bp, Artificial Sequence
  ENSG00000134160_42 (sequence is synthesized)
agcatatgttagtaggcttagttttttcagttgcagtagtatcaaatgaaagtgatgatactgtaacgaagataaattggctaatcagtatacaagattatacaatctctttattactga

SEQ ID NO: 308630 - DNA, 120 bp, Artificial Sequence
  ENSG00000134160_43 (sequence is synthesized)
tacaatctctttattactgagggccaccaaatagcctaggaagtgccctcgagcactgaagtcaccattaggtcacttaagaagtaagcaactagctgggcacagtggctcatgcctgta

SEQ ID NO: 308631 - DNA, 120 bp, Artificial Sequence
  ENSG00000134160_44 (sequence is synthesized)
tgagaccagcctgggcaacatagtgataccccatctcttaaaaaaaaaaaaaaaagtaagcaactgtgtaagaaagagaaactaaagagaaagcaaacatgaaaaaagggaggggtggaa

SEQ ID NO: 308632 - DNA, 120 bp, Artificial Sequence
  ENSG00000134160_45 (sequence is synthesized)
gaaagcaaacatgaaaaaagggaggggtggaaagaagaaaaataaaattgtgaggcacaataagtgggaaggagccacaaatatgtttttatggggtctttgttttctgttttaatgttt

SEQ ID NO: 308633 - DNA, 120 bp, Artificial Sequence
  ENSG00000134160_46 (sequence is synthesized)
tattttaaactacacaatgggaaaaaaagtacacaattatatcaaacatcatactctaataatttagggtgacctagagttttgttaatgtgcaaaaataaagtatccaatatgcatttt

SEQ ID NO: 308634 - DNA, 120 bp, Artificial Sequence
  ENSG00000134160_47 (sequence is synthesized)
gccctggccaaggaggaggctgaaagagcctgagctgtgccctctccattccactgctgtggcaggttctagaagatttctgaggactcagcagtaacttgcagtgctggactgaggcta

SEQ ID NO: 308635 - DNA, 120 bp, Artificial Sequence
  ENSG00000134160_48 (sequence is synthesized)
ctaaatctcttccctctaaaccttttggggatggagggattaagcctgattacagatgttgggggtggtagcaggagtcgggcaggaggggccaccaaaagccagcacatgctcctccta

SEQ ID NO: 308636 - DNA, 120 bp, Artificial Sequence
  ENSG00000134160_49 (sequence is synthesized)
ggctgaaccagcctccggccggcctcgccccaggatctcggccccctcgcccagtgcgtggggctgccgccgagtgtggggctgccgccgagtgtgtggctccgctcctgcccacccagg

SEQ ID NO: 308637 - DNA, 120 bp, Artificial Sequence
  ENSG00000134160_50 (sequence is synthesized)
gagggcagcccctgtgccactggcctggccacccgagggagtcagcagggtggctcacaggctcactgagagagatgagctccttcaagcggggctcgctcaagagctccacatcagggt

SEQ ID NO: 308638 - DNA, 120 bp, Artificial Sequence
  ENSG00000134160_51 (sequence is synthesized)
tcagacatggtgccactaggatcacagctttcattggcggccagtctcccagccccaaactgcagatacctggtcttcttcatggctgtggctcaatcttcctagatatttcattgaaaa

SEQ ID NO: 308639 - DNA, 120 bp, Artificial Sequence
  ENSG00000134160_52 (sequence is synthesized)
ttggaaactggacaccactgtaaagaacatctagtgtcccgtaaatccataccaaagctctgaatccacaaaccaggctctggcccaaccctgcaaacacactccattgctccatcttca

SEQ ID NO: 308640 - DNA, 120 bp, Artificial Sequence
  ENSG00000134160_53 (sequence is synthesized)
gtaaaggaagacaaattcatttttctaataactgtggacctgcagcccccttagatgtgttgagagtctttggaaatattttcctctgaggtctgtccacagcttccctgggcctgcgct

SEQ ID NO: 308641 - DNA, 120 bp, Artificial Sequence
  ENSG00000134160_54 (sequence is synthesized)
cagctggcccgagaaggaccaaggtccctcacatttgcatgtaaacagggagtgccctctgcccttccagtgagccctgccagcgtgggggaggcttcagctctgtgatccgttccagct

SEQ ID NO: 308642 - DNA, 120 bp, Artificial Sequence
  ENSG00000134160_55 (sequence is synthesized)
cactctgaattacactcctacatgcccagtcacagactttttgcaatttcattttatttcactggcccaacatcattgttaaaataaaatttagctgtgttccaaatgctgcaatataca

SEQ ID NO: 308643 - DNA, 120 bp, Artificial Sequence
  ENSG00000134160_56 (sequence is synthesized)
ttattgttccaagattctaagacaagacttctaatacggcatctcagtttattgttctttggggtttgttttcagatcctcatgtcagaaccaggcaaactcagccagaaaatcaaagtt

SEQ ID NO: 308644 - DNA, 120 bp, Artificial Sequence
  ENSG00000134160_57 (sequence is synthesized)
ttgcatggagtaggaaaaagccttcccagggatgggaagaaaggaagggaaagaggctttcttcgtcctaattaagcactcgtgaagtgcttaattggagacagcaatataatgagccag

SEQ ID NO: 308645 - DNA, 120 bp, Artificial Sequence
  ENSG00000134160_58 (sequence is synthesized)
cccttgtgacatggaattcaggaaattatgtggggtttctgatgatatgatatgtaatctattaggctcattagaagatgtcactgtttaacttcaaagaaccaacaagaagtaattcca

SEQ ID NO: 308646 - DNA, 120 bp, Artificial Sequence
  ENSG00000134160_59 (sequence is synthesized)
cattcaaaccagtactcctgaagaaattaatcaccaaatattttatcgttgctgatgaaagtgggtttttacctttttaaagaaaaagaagaagaaataaaatagcttattaaaatttaa

SEQ ID NO: 308647 - DNA, 120 bp, Artificial Sequence
  ENSG00000134183_0 (sequence is synthesized)
agtaggtctccagttgaagtagggagtctcagtcaatgtaggcagagtacaagaccctacagcctgctctctcacctgccatcgtacagaccagcttttaggggagccaagttgggatac

SEQ ID NO: 308648 - DNA, 120 bp, Artificial Sequence
  ENSG00000134183_1 (sequence is synthesized)
tcaatcccaacttttttccttctcttccatctcacatacaggaaaccttacgagagaggattaggggcctgaaaaagctgacaagacggcaaatatgggaagtggagccagtgctgagga

SEQ ID NO: 308649 - DNA, 120 bp, Artificial Sequence
  ENSG00000134183_2 (sequence is synthesized)
caaagaactggccaagaggtccaaggagctagaaaagaagctgcaggaggatgctgataaggaagccaagactgtcaagctgctactgctgggtgctggggagtcaggaaagagcaccat

SEQ ID NO: 308650 - DNA, 120 bp, Artificial Sequence
  ENSG00000134183_3 (sequence is synthesized)
cgtcaaacagatgaagatcattcaccaggatggctattcaccagaagaatgcctggagttcaaggctatcatctatggaaatgtgctgcagtccatcctggctatcatccgggccatgac

SEQ ID NO: 308651 - DNA, 120 bp, Artificial Sequence
  ENSG00000134183_4 (sequence is synthesized)
cacactgggcatcgattatgctgaaccaagctgtgcggatgacgggcgacagctcaacaacctggctgactccattgaggagggaaccatgcctcctgagctcgtggaggtcattaggag

SEQ ID NO: 308652 - DNA, 120 bp, Artificial Sequence
  ENSG00000134183_5 (sequence is synthesized)
atgactccgcatcttactacctgaaccaattagaacgaattacagaccctgagtacctccctagtgagcaagatgtgctccgatccagagtcaaaaccacgggcatcattgaaaccaagt

SEQ ID NO: 308653 - DNA, 120 bp, Artificial Sequence
  ENSG00000134183_6 (sequence is synthesized)
tttccgtcaaagacttgaatttcaggatgtttgatgtgggagggcagagatccgagagaaagaagtggatccactgcttcgagggagtcacctgcatcattttctgtgcagccctcagtg

SEQ ID NO: 308654 - DNA, 120 bp, Artificial Sequence
  ENSG00000134183_7 (sequence is synthesized)
cctatgatatggtgctggtggaagatgacgaagtgaatcgtatgcatgagtctttgcatctgttcaacagcatatgtaaccacaaattctttgcggctacttccattgtcctctttctca

SEQ ID NO: 308655 - DNA, 120 bp, Artificial Sequence
  ENSG00000134183_8 (sequence is synthesized)
acaagaaggacctctttgaggaaaaaatcaagaaagtccatctcagcatttgttttccagagtatgatggtaacaactcctatgatgatgcggggaattacataaagagccagttccttg

SEQ ID NO: 308656 - DNA, 120 bp, Artificial Sequence
  ENSG00000134183_9 (sequence is synthesized)
acctcaatatgcgaaaagatgtcaaagaaatctacagtcacatgacctgtgctacagatacacagaatgtcaaatttgtgtttgatgcagttacagatattatcatcaaagaaaacctca

SEQ ID NO: 308657 - DNA, 120 bp, Artificial Sequence
  ENSG00000134183_10 (sequence is synthesized)
aggactgcggcctcttctaatcctcaccattcctcaggtataagttctataaacaggcttggaatctgggtaattaaaaacagaaaattatagtcaatataccatgacatgaagaatgaa

SEQ ID NO: 308658 - DNA, 120 bp, Artificial Sequence
  ENSG00000134184_0 (sequence is synthesized)
atactctgagccctgctcggtttaggcctgtctgcggaatccgcaccaaccagcaccatgcccatgatactggggtactgggacatccgcgggctggcccacgccatccgcctgctcctg

SEQ ID NO: 308659 - DNA, 120 bp, Artificial Sequence
  ENSG00000134184_1 (sequence is synthesized)
gaatacacagactcaagctatgaggaaaagaagtacacgatgggggacgctcctgattatgacagaagccagtggctgaatgaaaaattcaagctgggcctggactttcccaatctgccc

SEQ ID NO: 308660 - DNA, 120 bp, Artificial Sequence
  ENSG00000134184_2 (sequence is synthesized)
tacttgattgatggggctcacaagatcacccagagcaacgccatcttgtgctacattgcccgcaagcacaacctgtgtggggagacagaagaggagaagattcgtgtggacattttggag

SEQ ID NO: 308661 - DNA, 120 bp, Artificial Sequence
  ENSG00000134184_3 (sequence is synthesized)
aaccagaccatggacaaccatatgcagctgggcatgatctgctacaatccagaatttgagaaactgaagccaaagtacttggaggaactccctgaaaagctaaagctctactcagagttt

SEQ ID NO: 308662 - DNA, 120 bp, Artificial Sequence
  ENSG00000134184_4 (sequence is synthesized)
tttgagcccaagtgcttggacgccttcccaaatctgaaggacttcatctcccgctttgagggcttggagaagatctctgcctacatgaagtccagccgcttcctcccaagacctgtgttc

SEQ ID NO: 308663 - DNA, 120 bp, Artificial Sequence
  ENSG00000134184_5 (sequence is synthesized)
tcaaagatggctgtctggggcaacaagtagggccttgaaggccaggaggtgggagtgaggagcccatactcagcctgctgcccaggctgtgcagcgcagctggactctgcatcccagcac

SEQ ID NO: 308664 - DNA, 120 bp, Artificial Sequence
  ENSG00000134184_6 (sequence is synthesized)
ctgcctcctcgttcctttctcctgtttattcccatctttactcccaagacttcattgtccctcttcactccccctaaacccctgtcccatgcaggccctttgaagcctcagctacccact

SEQ ID NO: 308665 - DNA, 120 bp, Artificial Sequence
  ENSG00000134184_7 (sequence is synthesized)
atccttcgtgaacatcccctcccatcattacccttccctgcactaaagccagcctgaccttccttcctgttagtggttgtgtctgctttaaagggcctgcctggcccctcgcctgtggag

SEQ ID NO: 308666 - DNA, 120 bp, Artificial Sequence
  ENSG00000134184_8 (sequence is synthesized)
ctcagccccgagctgtccccgtgttgcatgaaggagcagcattgactggtttacaggccctgctcctgcagcatggtccctgccttaggcctacctgatggaagtaaagcctcaaccaca

SEQ ID NO: 308667 - DNA, 120 bp, Artificial Sequence
  ENSG00000134184_9 (sequence is synthesized)
tgcagctgggcatgatctgctacaatccagaatttgaaaagtgtaatgttggttggagctcgagaaggaatctggatactgtgtgccggaccagccaaagaatcctgtgtcaaaaccgag

SEQ ID NO: 308668 - DNA, 70 bp, Artificial Sequence
  ENSG00000134184_10 (sequence is synthesized)
gtgtgccggaccagccaaagaatcctgtgtcaaaaccgagagaacgaataagccttcatcgggaccccga

SEQ ID NO: 308669 - DNA, 120 bp, Artificial Sequence
  ENSG00000134184_11 (sequence is synthesized)
cttatactctgagccctgctcggtttaggcctgtctgcggaatccgcaccaaccagcaccatgcccatgatactggggtactgggacatccgcgggctcctgattatgacagaagccagt

SEQ ID NO: 308670 - DNA, 88 bp, Artificial Sequence
  ENSG00000134184_12 (sequence is synthesized)
cacaatatgaaatcagtgcaccttgaagaagaacagaataacagtgatttttaggcaacaagagaagacaaccataaggtctgactgc

SEQ ID NO: 308671 - DNA, 120 bp, Artificial Sequence
  ENSG00000134184_13 (sequence is synthesized)
ttttaggcaacaagagaagacaaccataaggtctgactgcgtgcagggtcaggcaaaatagagccatatttttcttcttgcagggagcctataaatggacatggaagtagggaagatatt

SEQ ID NO: 308672 - DNA, 120 bp, Artificial Sequence
  ENSG00000134184_14 (sequence is synthesized)
atgggggacggtaatggcaccctcgtgttcgggctctgcccactcacgctaagttggcaccaagcaacccatggtggccacctgtggctgcctctgcaggcctcccctgctggagctgca

SEQ ID NO: 308673 - DNA, 120 bp, Artificial Sequence
  ENSG00000134184_15 (sequence is synthesized)
ggctgtctcttccctgagccccggtgagggagccctctggccttgcaaggcagaatgctggggtgggatgctgggccccctgtctaattgggacgggtgtccctcagggcttgcctaaac

SEQ ID NO: 308674 - DNA, 120 bp, Artificial Sequence
  ENSG00000134184_16 (sequence is synthesized)
ccctcagcgggattctttgtccctgaaccctgggatgtgggactgagtggtcagattctagatccacctgtctcagggatcttgccactggctccgtgggagggtccccgggaaggaggg

SEQ ID NO: 308675 - DNA, 120 bp, Artificial Sequence
  ENSG00000134184_17 (sequence is synthesized)
ctgggctctggggaggtttgttttcacttcttcttccccaccacagctcctgattatgacagaagccagtggctgaatgaaaaattcaagctgggcctggactttcccaatgtaggtgca

SEQ ID NO: 308676 - DNA, 120 bp, Artificial Sequence
  ENSG00000134184_18 (sequence is synthesized)
ggggaaggggcggttttgggggaaagtgcaacgtgtctctgactgcatctcctctccccagcttagaggtgttaagatcaggagtcttctgcccaattcctctcactcctggctgtctaa

SEQ ID NO: 308677 - DNA, 120 bp, Artificial Sequence
  ENSG00000134184_19 (sequence is synthesized)
acagtccttccatgatgttctgtgtccacctgcattcgttcatgtgacagtattcttatttcagtcctgccatgagcaggcacagtgagtgcccggtctcctctctgctcttgcttatgg

SEQ ID NO: 308678 - DNA, 120 bp, Artificial Sequence
  ENSG00000134184_20 (sequence is synthesized)
tgtctgcggaatccgcaccaaccagcaccatgcccatgatactggggtactgggacatccgcgggacaaagtcagggaccctccatctctgacgcgacctgcgggccatctctcccagct

SEQ ID NO: 308679 - DNA, 120 bp, Artificial Sequence
  ENSG00000134186_0 (sequence is synthesized)
ggcagttggcggaagagatcgagctccctggctgccggctcgccttctgcgtggagttctcgcggtctgggtttcgctgtctgctcttggcccggggtcattttgtcggcgtcgggtgcc

SEQ ID NO: 308680 - DNA, 120 bp, Artificial Sequence
  ENSG00000134186_1 (sequence is synthesized)
ctctcttgcccagctggggcacagcgaggcggccccttctcccgacgacgttcgatggagtagggtcccagaccgttgtcccgaagagcgagatcgagcttggccccctcccccccctcc

SEQ ID NO: 308681 - DNA, 120 bp, Artificial Sequence
  ENSG00000134186_2 (sequence is synthesized)
ttccctccctccttccttccgccgcaacatggctaacaacagccccgcgctgacaggcaactcgcagccgcagcaccaggcggctgcagctgcggctcagcaacagcagcagtgcggcgg

SEQ ID NO: 308682 - DNA, 120 bp, Artificial Sequence
  ENSG00000134186_3 (sequence is synthesized)
cggcggcgctaccaagccggcggtctccggcaagcagggcaatgtgctcccgctctggggcaacgagaagaccatgaacctcaaccccatgatcctgaccaacatcctgtcgtcgcctta

SEQ ID NO: 308683 - DNA, 120 bp, Artificial Sequence
  ENSG00000134186_4 (sequence is synthesized)
cttcaaagtacagctctacgagctcaagacctaccacgaggtggtggacgagatctactttaaggtcacgcacgttgaaccatgggagaaaggaagcaggaaaacagcgggccagacagg

SEQ ID NO: 308684 - DNA, 120 bp, Artificial Sequence
  ENSG00000134186_5 (sequence is synthesized)
gatgtgcggaggggttcgaggtgttggaacaggaggaattgtttctacagcattttgcctgttatacaaattatttaccctgaagttaactcgaaagcaagtgatgggtcttataacaca

SEQ ID NO: 308685 - DNA, 120 bp, Artificial Sequence
  ENSG00000134186_6 (sequence is synthesized)
tttatgtatataagatatacacagccccctacagatctgtgggactggtttgaatccttccttgatgatgaagagttcttcaccctctagcttcttccaaatatcagtattcccacttgc

SEQ ID NO: 308686 - DNA, 120 bp, Artificial Sequence
  ENSG00000134186_7 (sequence is synthesized)
atagaagtgcagaattgaagagttgggtgttacataaataggctaagtgtttggatgacttgttcaaggtgacaaaattttaattccagttttctgactcctagtacaccacacacacct

SEQ ID NO: 308687 - DNA, 120 bp, Artificial Sequence
  ENSG00000134186_8 (sequence is synthesized)
ttaaaaaagaaattttttaaattgtaattcgagtctccctaatttgaaatctgaaatactaagttagatttaaatcgtgtatgcattggctgggcgtggtggctcacattgtaatcccaa

SEQ ID NO: 308688 - DNA, 89 bp, Artificial Sequence
  ENSG00000134186_9 (sequence is synthesized)
tcatctctacaaaaaaaagtttaaaaattagctgagcatagaggtatgcatcttagtcccacctacttgggaggctggggtgggaggat

SEQ ID NO: 308689 - DNA, 120 bp, Artificial Sequence
  ENSG00000134186_10 (sequence is synthesized)
gggtgggaggatcacttgagcccaggagacagaatttgctgtgagccaagatcattgccactgcattccagcctgggtaacacagtaagaccctttctcaaaacaaaacaaaatatcata

SEQ ID NO: 308690 - DNA, 120 bp, Artificial Sequence
  ENSG00000134186_11 (sequence is synthesized)
tatgcattaatttacttgcatggtgaagtccaacatgtcaaaaatgaaatgatgagctgtattgtccctatgtctacccagtctactactttgtgttttaaggttcataagactttttga

SEQ ID NO: 308691 - DNA, 120 bp, Artificial Sequence
  ENSG00000134186_12 (sequence is synthesized)
gtgctatgtgtcagtagtctatttacagagttcatccaaagaatttattgaattaaaggatggttctaatggaaatctattgtgttttgttattacatgcacacctaaaaaaaaaaaaaa

SEQ ID NO: 308692 - DNA, 120 bp, Artificial Sequence
  ENSG00000134186_13 (sequence is synthesized)
tgggactggtttgaatccttccttgatgatgaagaggtatgtcaacaagggtaataatttgttttcttctgattactctcatatttttattatcttttatttattggtggtttaatgtct

SEQ ID NO: 308693 - DNA, 120 bp, Artificial Sequence
  ENSG00000134186_14 (sequence is synthesized)
agaacttcctgtagttaaatttatttcagtgagatacttttggaattaatgtccttttactgagacctgatggcttttatgtattttagggtaaatttctgaagttttattttcttgttt

SEQ ID NO: 308694 - DNA, 120 bp, Artificial Sequence
  ENSG00000134186_15 (sequence is synthesized)
taaaattgtttaaatgtgtttggtaactattggaaaattttctcttcttaattatgttctgtgtattgtattgatcctgaattgtatagttaatagtgacttttcaagatggggcatgct

SEQ ID NO: 308695 - DNA, 120 bp, Artificial Sequence
  ENSG00000134186_16 (sequence is synthesized)
caagatcgaacagataataaaagatatgcacatagaatactaattgtagcttttttttcttctggaacatttcagttcttcaccctctagcttcttccaaatatcagtattcccacttgc

SEQ ID NO: 308696 - DNA, 120 bp, Artificial Sequence
  ENSG00000134186_17 (sequence is synthesized)
acgagctcaagacctaccacgaggtggtggacgagatctactttaaggattgactcagtcttgcagcgaggctcggagcagcccagggtcgcaggtagaggtcacgcacgttgaaccatg

SEQ ID NO: 308697 - DNA, 120 bp, Artificial Sequence
  ENSG00000134186_18 (sequence is synthesized)
atccttccttgatgatgaagaggacctagatgtgaaggctggtggaggctgtgtaatgaccattggagaaatgctacgatcttttctcacaaaactggagtggttttctaccttgtttcc

SEQ ID NO: 308698 - DNA, 120 bp, Artificial Sequence
  ENSG00000134186_19 (sequence is synthesized)
aagaattccagttccagttcaaaagaatattgatcaacagattaaaacccgacctagaaaaatcaagaaagatgggaaggaaggtgctgaggaaatagacagacatgttgaacgcagacg

SEQ ID NO: 308699 - DNA, 120 bp, Artificial Sequence
  ENSG00000134186_20 (sequence is synthesized)
ttcaaggtctccaaggagatctctgagtccacggaggtccccaagaaggtcaagaagtagaagtcatcatcgggagggccatgggtcttctagttttgacagagaattagaaagagagaa

SEQ ID NO: 308700 - DNA, 120 bp, Artificial Sequence
  ENSG00000134186_21 (sequence is synthesized)
agaacgccagcgactagagcgtgaagccaaagaaagggagaaagaacggcgaagatcccgaagtattgaccgggggttagaacgcaggcgcagcagaagtagggaaaggcatagaagtcg

SEQ ID NO: 308701 - DNA, 120 bp, Artificial Sequence
  ENSG00000134186_22 (sequence is synthesized)
cagtcgaagtcgtgataggaaaggggatagaagggacagggatcgagaaagagagaaagaaaatgagagaggtagaagacgagatcgtgactatgataaggaaagaggaaatgaacgaga

SEQ ID NO: 308702 - DNA, 120 bp, Artificial Sequence
  ENSG00000134186_23 (sequence is synthesized)
aaaagagagagagcgatcaagagaaaggtccaaggaacagagaagtaggggagaggtagaagagaagaaacataaagaagacaaagatgataggcggcacagagatgacaaaagagattc

SEQ ID NO: 308703 - DNA, 120 bp, Artificial Sequence
  ENSG00000134186_24 (sequence is synthesized)
caagaaagagaaaaaacacagtagaagcagaagcagagaaaggaaacacagaagtaggagtcgaagtagaaatgcagggaaacgaagtagaagtagaagcaaagagaaatcaagtaaaca

SEQ ID NO: 308704 - DNA, 120 bp, Artificial Sequence
  ENSG00000134186_25 (sequence is synthesized)
taaaaatgaaagtaaagaaaaatcaaataaacgaagtcgaagtggcagtcaaggaagaactgacagtgttgaaaaatcaaaaaaacgggaacatagtcccagcaaagaaaaatctagaaa

SEQ ID NO: 308705 - DNA, 120 bp, Artificial Sequence
  ENSG00000134186_26 (sequence is synthesized)
gaagcaaagaacgttcccacaaacgagatcacagtgatagtaaggaccagtcagacaaacatgatcgtcgaaggagccaaagtatagaacaagagagccaagaaaaacagcataaaaaca

SEQ ID NO: 308706 - DNA, 120 bp, Artificial Sequence
  ENSG00000134186_27 (sequence is synthesized)
aagatgagactgtgtgaaaatattttgtaaaagtggatcacattgaatcctataaatgattaaatctgcttttttcccccacgttgagattgtgcagtagttcgcactcctcaagctctc

SEQ ID NO: 308707 - DNA, 120 bp, Artificial Sequence
  ENSG00000134186_28 (sequence is synthesized)
cctgtaggctgcattttcatttcctctttcgtgtagggaagtgcctttgtaattccatttattgcattggtgttttcacccaattgttaagtttgatacatgatgcacagattgttcttg

SEQ ID NO: 308708 - DNA, 120 bp, Artificial Sequence
  ENSG00000134186_29 (sequence is synthesized)
catttttattgtttgtttttgaaatgtacagtctgtacatatgtcctgaaaatgttttaattcctttggcatggttgccatgttggttaaatttgtataaggcaataaactgccactaat

SEQ ID NO: 308709 - DNA, 120 bp, Artificial Sequence
  ENSG00000134186_30 (sequence is synthesized)
ctatttttgttttgtaggtgtgggattatggtttgtgtactgaagttagcatggctgtgcttttcgtaatagaatgctaaagactttgagaatggatcttggatgtctattataggagaa

SEQ ID NO: 308710 - DNA, 120 bp, Artificial Sequence
  ENSG00000134186_31 (sequence is synthesized)
gtatgtgctgccaatgtacaagaaggcagcattgtaggattaacattcttgtctactgtatattatcttggaaggctcttgttaatatgttacacttaatattctccacagttaccttta

SEQ ID NO: 308711 - DNA, 120 bp, Artificial Sequence
  ENSG00000134186_32 (sequence is synthesized)
gagagaatttatgagaagttagtttctgatgcagaggtttttaggctgtgatttcatcaaaagtccttttagcattctacctcaaagggacacttagtatgcctaaaatttattcactta

SEQ ID NO: 308712 - DNA, 120 bp, Artificial Sequence
  ENSG00000134186_33 (sequence is synthesized)
gttttccttttttatttgaaaaaatacatgacatgtaatctttttttcttgaattctttctcagattttaaagtactatattaaagaaaaaaattaatgtctaaagcctagcattcttgc

SEQ ID NO: 308713 - DNA, 120 bp, Artificial Sequence
  ENSG00000134186_34 (sequence is synthesized)
agaaccctatactaacatgtaatggggagagggtggggcagatgagtagagaaacagattcaagcctcaagcttccaaagcatttttataaatggaaaatccttaaattatgaaacagct

SEQ ID NO: 308714 - DNA, 120 bp, Artificial Sequence
  ENSG00000134186_35 (sequence is synthesized)
tgatatagtgtcctttttttaaaattcagaactttttttattgataatggagattgctgtttgagtttttaaacttaatctagaacagaggagtattaaaagtaatgctgtgctgcatta

SEQ ID NO: 308715 - DNA, 120 bp, Artificial Sequence
  ENSG00000134186_36 (sequence is synthesized)
tttaagactatcagcaaattatttgatagattgttcttacaacttgtattctgattacagaaccatcatgagtgtggaataaatactggattaaatcctttatcctgggtcttggctttt

SEQ ID NO: 308716 - DNA, 120 bp, Artificial Sequence
  ENSG00000134186_37 (sequence is synthesized)
cccccatttgttaaatttttttagcatatttatattgtggaaattgatgaaacgtcagtagagtcacactttgtgtacagggatgtcttagtgcccagatgacaagtgaattttggagaa

SEQ ID NO: 308717 - DNA, 120 bp, Artificial Sequence
  ENSG00000134186_38 (sequence is synthesized)
atgcatagactgggattgggcatgtggtaatcaataatctttattagaatacttgataatggcagttccctttgtcagtggttgttacatgtgtcatttgattactttgttccatgtcaa

SEQ ID NO: 308718 - DNA, 120 bp, Artificial Sequence
  ENSG00000134186_39 (sequence is synthesized)
agacgtttattgggataccttttacttggacaatatgttagcattttttaaaatttggacttgaaattctttaagataattcacccaattctttttagaaaagaaaatagaggcccaaag

SEQ ID NO: 308719 - DNA, 120 bp, Artificial Sequence
  ENSG00000134186_40 (sequence is synthesized)
taatgatgtcagtgctagggctaaaactcagtattctgacagtgtagtgaacctggcacgcacattgaggtttgttttatctcactggttatactggccaactaatgcgcactcagaagc

SEQ ID NO: 308720 - DNA, 120 bp, Artificial Sequence
  ENSG00000134186_41 (sequence is synthesized)
caccttgcaaaaatgttaaatggagcaaacgagtacacttgcaagagtcctccatatgtgggcttaacatatgtaccactccattttagaaaaatctcattaaatgaattcttctaaaaa

SEQ ID NO: 308721 - DNA, 120 bp, Artificial Sequence
  ENSG00000134186_42 (sequence is synthesized)
taattggtgttgtattggttttgtttctggatgcctctattttatgttttttattgtgtttacaaatctgaggtcctctatttaagctaacttattgttttcttccttagatatctgcag

SEQ ID NO: 308722 - DNA, 120 bp, Artificial Sequence
  ENSG00000134186_43 (sequence is synthesized)
cgattatatttggaaatactgtatatctgaacacttaaatgtgtgtgagtgcaagcagttttacctttagctcttgttttcctgtttagataacaaatctcactttccttgtgtgcttgc

SEQ ID NO: 308723 - DNA, 120 bp, Artificial Sequence
  ENSG00000134186_44 (sequence is synthesized)
actataggtttgggactgacaatagctgactaacatgtcctgagctgtgagagggcatagcaagaaggccttcatgcggtaatgacccttttcagagacaatggtcatcatggattatgc

SEQ ID NO: 308724 - DNA, 120 bp, Artificial Sequence
  ENSG00000134186_45 (sequence is synthesized)
gtttccaattatttgttcatttatttattttctacataactaaattagaaacctcactgcttcatggcagttggtttgctattgcttccagttttattagggcttcattttatattagag

SEQ ID NO: 308725 - DNA, 120 bp, Artificial Sequence
  ENSG00000134186_46 (sequence is synthesized)
ctgttaaaagataacctttagacaggaattatctaaagtagatcatatgtagctaggttatggtgcaaggtatatgatgtgtgcaaatatgtccacagaaataaatacatagtaggtatg

SEQ ID NO: 308726 - DNA, 120 bp, Artificial Sequence
  ENSG00000134186_47 (sequence is synthesized)
agtttagaaatgtaaggggctttttcatattgttaactgagtgagatcagttccctttatgcctgtgaggctgcagggtttgttctcacttgcatgcacacactaagcccaaatatttct

SEQ ID NO: 308727 - DNA, 120 bp, Artificial Sequence
  ENSG00000134186_48 (sequence is synthesized)
gttcattcattgtcagatcaggatatgaaaataaaatttttctgttagttttttttgtattgagattccaaagatggtaatatttttataatattcatgtatatatggaaatactttttt

SEQ ID NO: 308728 - DNA, 120 bp, Artificial Sequence
  ENSG00000134186_49 (sequence is synthesized)
ttgagcatcaagtgaattagtgctatagacacccagaagttagaaaaacctattgtataatatgaaagccactaaatttgtcttgtgttgaaaatctacttttagcatacctaaattatg

SEQ ID NO: 308729 - DNA, 120 bp, Artificial Sequence
  ENSG00000134186_50 (sequence is synthesized)
gagctactactttggatatggttccatgtgaaatgttttatctgactattttaagtaaaatgtggaaagaatttaaattacttcacatggaggtgaaagaactatcacctcgattgacag

SEQ ID NO: 308730 - DNA, 120 bp, Artificial Sequence
  ENSG00000134186_51 (sequence is synthesized)
aagaactatcacctcgattgacagttcgatgatcgtcactacatttgatttcttgtgggtttttagtttgtttttgttttgagacgggcctggctctgtcacccagactggagtgcagtg

SEQ ID NO: 308731 - DNA, 120 bp, Artificial Sequence
  ENSG00000134186_52 (sequence is synthesized)
tccacttccctggctcaagtgatcctccgaacttggcctcctaagtagctgggaccacaggtgcatgctagcacacccggctaatttgtatttttggtagggttgggatttcgccatgtt

SEQ ID NO: 308732 - DNA, 120 bp, Artificial Sequence
  ENSG00000134186_53 (sequence is synthesized)
ccacccacctcagcctcccaaagcgctgtgattacaggtgtgagccaccactccagtcccttcttacgatttttaaatatgtttgcttttgaggaaaattatggtaggtgtgagaacatg

SEQ ID NO: 308733 - DNA, 120 bp, Artificial Sequence
  ENSG00000134186_54 (sequence is synthesized)
gcttttgaggaaaattatggtaggtgtgagaacatgtaaattgtgctagttattgctatatatatgcatgatttatttggagagtggcttcctaagaaactgggaaaacaagtggctatg

SEQ ID NO: 308734 - DNA, 120 bp, Artificial Sequence
  ENSG00000134186_55 (sequence is synthesized)
aaagacatctcacatttcttgaaacatgagaacatttggacacgaacatcacacgccggggcctgttgtggggtgggggactaggggagggataatattaggagaaatacctaatgtaga

SEQ ID NO: 308735 - DNA, 120 bp, Artificial Sequence
  ENSG00000134186_56 (sequence is synthesized)
tgacaggttgatgggtgcagctcaccaccaaggtacatgtatatctaggtaacaaaccggcacgttctgcacatgtatctgaacttaaagtataatttaaaaaaatttttaatacagctt

SEQ ID NO: 308736 - DNA, 120 bp, Artificial Sequence
  ENSG00000134186_57 (sequence is synthesized)
aataagcatcctccatccagtttttgtacttactggaatgatttcacctttccatgtattaaaatcttttgcctgtttttaatgttcaatttgcaattaaattctatacatgggcgagta

SEQ ID NO: 308737 - DNA, 120 bp, Artificial Sequence
  ENSG00000134193_0 (sequence is synthesized)
actggagacactgaagaaggcaggggcccttagagtcttggttgccaaacagatttgcagatcaaggagaacccaggagtttcaaagaagcgctagtaaggtctctgagatccttgcact

SEQ ID NO: 308738 - DNA, 120 bp, Artificial Sequence
  ENSG00000134193_1 (sequence is synthesized)
agctacatcctcagggtaggaggaagatggcttccagaagcatgcggctgctcctattgctgagctgcctggccaaaacaggagtcctgggtgatatcatcatgagacccagctgtgctc

SEQ ID NO: 308739 - DNA, 120 bp, Artificial Sequence
  ENSG00000134193_2 (sequence is synthesized)
ctggatggttttaccacaagtccaattgctatggttacttcaggaagctgaggaactggtctgatgccgagctcgagtgtcagtcttacggaaacggagcccacctggcatctatcctga

SEQ ID NO: 308740 - DNA, 120 bp, Artificial Sequence
  ENSG00000134193_3 (sequence is synthesized)
gtttaaaggaagccagcaccatagcagagtacataagtggctatcagagaagccagccgatatggattggcctgcacgacccacagaagaggcagcagtggcagtggattgatggggcca

SEQ ID NO: 308741 - DNA, 120 bp, Artificial Sequence
  ENSG00000134193_4 (sequence is synthesized)
tgtatctgtacagatcctggtctggcaagtccatgggtgggaacaagcactgtgctgagatgagctccaataacaactttttaacttggagcagcaacgaatgcaacaagcgccaacact

SEQ ID NO: 308742 - DNA, 120 bp, Artificial Sequence
  ENSG00000134193_5 (sequence is synthesized)
gcaagaatcaagattctgctaactcctgcacagccccgtcctcttcctttctgctagcctggctaaatctgctcattatttcagaggggaaacctagcaaactaagagtgataagggccc

SEQ ID NO: 308743 - DNA, 120 bp, Artificial Sequence
  ENSG00000134193_6 (sequence is synthesized)
tactacactggcttttttaggcttagagacagaaactttagcattggcccagtagtggcttctagctctaaatgtttgccccgccatccctttccacagtatccttcttccctcctcccc

SEQ ID NO: 308744 - DNA, 120 bp, Artificial Sequence
  ENSG00000134193_7 (sequence is synthesized)
tgtctctggctgtctcgagcagtctagaagagtgcatctccagcctatgaaacagctgggtctttggccataagaagtaaagatttgaagacagaaggaagaaactcaggagtaagcttc

SEQ ID NO: 308745 - DNA, 120 bp, Artificial Sequence
  ENSG00000134193_8 (sequence is synthesized)
tagaccccttcagcttctacacccttctgccctctctccattgcctgcaccccaccccagccactcaactcctgcttgtttttcctttggccatgggaaggtttaccagtagaatccttg

SEQ ID NO: 308746 - DNA, 120 bp, Artificial Sequence
  ENSG00000134193_9 (sequence is synthesized)
ctaggttgatgtgggccatacattcctttaataaaccattgtgtacataagaggttgctgtgttccagttcagtaatggtgaatgtggaaaagtgaaataagaccaagaaatacacccaa

SEQ ID NO: 308747 - DNA, 120 bp, Artificial Sequence
  ENSG00000134193_10 (sequence is synthesized)
ataagacttttatggatggattgtttttctcaaataatattatcgctttgtgactaaagtaaagattattaattcctgaggcaagaagatataaaagctccagaaacgttgactgggacc

SEQ ID NO: 308748 - DNA, 120 bp, Artificial Sequence
  ENSG00000134193_11 (sequence is synthesized)
actggagacactgaagaaggcaggggcccttagagtcttggttgccaaacagaatgcccatatccgtcttacctgtgaggaagcttgccttgggcgccctctgctggccctcctgaagct

SEQ ID NO: 308749 - DNA, 120 bp, Artificial Sequence
  ENSG00000134193_12 (sequence is synthesized)
aacaggggcgagtgctcggtggtttacaaattgcctccatgcagactatgaaactgttcagcctgctatagttagatctctggcactggcccaggaggtcttgcagatttgcagatcaag

SEQ ID NO: 308750 - DNA, 120 bp, Artificial Sequence
  ENSG00000134193_13 (sequence is synthesized)
agccagagccccagatctcatttgattcaggatcaagtgtccttcctgggcactatgaagagaagcccctttggctggtgaaatggagagaagagggttgtgtgttcaactcattcaatt

SEQ ID NO: 308751 - DNA, 120 bp, Artificial Sequence
  ENSG00000134193_14 (sequence is synthesized)
ctgtaagcattgctgaagcaggtgctgtatgccagaccctagatgggctacaagcacatacggatacataggaaagagcccctaccctcagcaagctcactgtcagtaaaggagacagaa

SEQ ID NO: 308752 - DNA, 120 bp, Artificial Sequence
  ENSG00000134193_15 (sequence is synthesized)
atacatcaatcaaaggaggaagagaagatgaggaattcacagaaaggataatggagtttctgtacaagatttaccagaaagagagtggtgtgtagacatgcctggagcagacaccttgga

SEQ ID NO: 308753 - DNA, 120 bp, Artificial Sequence
  ENSG00000134193_16 (sequence is synthesized)
gccgctgacagaaggtgaagcagtccaagaaaatgtggaaacttttccgctgctctacacagtccacaaacctgtccattttatttcgttgaagctttgtctgagagataaccaaataga

SEQ ID NO: 308754 - DNA, 120 bp, Artificial Sequence
  ENSG00000134193_17 (sequence is synthesized)
cagtcaaagtaagttatctcagccacatatggggagtggatgctgctgaattgtgattaattgggggagccatataggtacatttggcatgatctgggcctatgcggtcttacaatccct

SEQ ID NO: 308755 - DNA, 120 bp, Artificial Sequence
  ENSG00000134193_18 (sequence is synthesized)
aaaacaagaacgaagcacctaccacatgccagctactgaggctatgaaggtattctcccgccttagaaagcccaggattaatgcaggattgcgacatttaaacagaacatttccatacag

SEQ ID NO: 308756 - DNA, 120 bp, Artificial Sequence
  ENSG00000134193_19 (sequence is synthesized)
catgagtataaatgactttcccaagtttacactgagagtaactgacacagcaaccccagcaaagtctgagctgagtcctgaataattgtataaaaaggggagagaaacagagtgaagaaa

SEQ ID NO: 308757 - DNA, 120 bp, Artificial Sequence
  ENSG00000134193_20 (sequence is synthesized)
gggtttcccagactctgtcccaggaaagaaaatgagctcgtggagaggaatagactttctctatgaaaacagagggaacaaagaggaagatgtctgggaaccgaggagtaatagagacct

SEQ ID NO: 308758 - DNA, 120 bp, Artificial Sequence
  ENSG00000134193_21 (sequence is synthesized)
gagtttacatcactactctgccactccctaggtacctccctttacctgtttccctactggaaagtgggataatactttttacctcatggacttgtcaggaggattcattaaaacgactcg

SEQ ID NO: 308759 - DNA, 120 bp, Artificial Sequence
  ENSG00000134193_22 (sequence is synthesized)
cataaagcctatgccacatggtagatgccaattcagggtctcaagaaagaacagcccacaggattgacactgaaccttaacaaagttaacaggaccaaggtgcagagagggtgctaggac

SEQ ID NO: 308760 - DNA, 120 bp, Artificial Sequence
  ENSG00000134193_23 (sequence is synthesized)
agcgaagccaaagaggacccctcaaacccaacaagagctgtgcggctccctgattcctcgccagtgttgctaccgcccttggctcttcttgcatggctggctcttgagacccctggaagc

SEQ ID NO: 308761 - DNA, 120 bp, Artificial Sequence
  ENSG00000134193_24 (sequence is synthesized)
tgatggaggcaacgtgagaagcacatggacatccgaccttgagcttgagaggcagaggcctgagttctagttacagccccagcagtaccagttgtgtggactgggagggaggctatcacg

SEQ ID NO: 308762 - DNA, 120 bp, Artificial Sequence
  ENSG00000134193_25 (sequence is synthesized)
tacatacttcaagcctccaaacctgtttccccttctgacacaggatcttctgtggctggtatagagtgggcactcaataaatgctgtctggtcgtctggctggcatgcctcatgggcctg

SEQ ID NO: 308763 - DNA, 120 bp, Artificial Sequence
  ENSG00000134193_26 (sequence is synthesized)
agaattgaatagaattacagtgatagaagcatgctggtattgtaagtggtttgtaagtgtgaggactaaattattattaaatagtaatcacatctaatcttggataaattagtaaaagca

SEQ ID NO: 308764 - DNA, 120 bp, Artificial Sequence
  ENSG00000134193_27 (sequence is synthesized)
agaatgggagcagtaaaaacctaagcaacccgaactaaaattttattgaattaattcaatttcttgtcatgtaacacaaccccagaagagaataaaataaagtttatatacatacaccca

SEQ ID NO: 308765 - DNA, 120 bp, Artificial Sequence
  ENSG00000134198_0 (sequence is synthesized)
gccggagcctgccgctccccgcgctcgtagcgcgggcctggggactggggatcccgccgccgggccgcagcatggggcgcttccgcgggggcctgcggtgcatcaagtacctgctgcttg

SEQ ID NO: 308766 - DNA, 120 bp, Artificial Sequence
  ENSG00000134198_1 (sequence is synthesized)
gcttcaacctgctcttctggctggctggatcggccgtcattgcttttggactatggtttcggttcggaggtgccataaaggagttatcatcagaggacaagtccccagagtatttctatg

SEQ ID NO: 308767 - DNA, 120 bp, Artificial Sequence
  ENSG00000134198_2 (sequence is synthesized)
tggggctgtatgttctggttggagccggggccctgatgatggccgtggggttcttcgggtgctgcggagccatgcgggagtcgcaatgtgtgcttggatcattttttacctgcctcctgg

SEQ ID NO: 308768 - DNA, 120 bp, Artificial Sequence
  ENSG00000134198_3 (sequence is synthesized)
tgatatttgctgctgaagtaaccactggagtatttgcttttataggcaagggggtagctatccgacatgttcagaccatgtatgaagaggcttacaatgattaccttaaagacaggggaa

SEQ ID NO: 308769 - DNA, 120 bp, Artificial Sequence
  ENSG00000134198_4 (sequence is synthesized)
aaggcaatgggacactcatcaccttccactcaacatttcagtgctgtggaaaagaaagctccgaacaggtccaacctacatgcccaaaggagcttctaggacacaagaattgcatcgatg

SEQ ID NO: 308770 - DNA, 120 bp, Artificial Sequence
  ENSG00000134198_5 (sequence is synthesized)
aaattgagaccataatcagtgttaagctccagctcattggaattgtcggtattggaattgcaggtctgacgatctttggcatgatattcagcatggtcctctgctgtgcgatacgaaact

SEQ ID NO: 308771 - DNA, 120 bp, Artificial Sequence
  ENSG00000134198_6 (sequence is synthesized)
cacgagatgtgatatgaagctacttctacatgaaaattgcaatctaaagctttcataccaaatgtcacaggagctgtctcccagctcatttttaacactgaaatgacattaggatctaaa

SEQ ID NO: 308772 - DNA, 120 bp, Artificial Sequence
  ENSG00000134198_7 (sequence is synthesized)
ataatttgctgtcaattgtacatttgcatgagtacgtatgtttggctcattactggtttaccccttgagtgaatgcctgtttatgatgactgagagcatattcatgtgtgatctgcgtgt

SEQ ID NO: 308773 - DNA, 120 bp, Artificial Sequence
  ENSG00000134198_8 (sequence is synthesized)
ttctggaatatgctttatacgtaatgaaatctgtttgctgggaattcctgattcttgttatataagaagaacaacctatttcgctcccagaaaaaaaagatcaaagagctttcagaaact

SEQ ID NO: 308774 - DNA, 120 bp, Artificial Sequence
  ENSG00000134198_9 (sequence is synthesized)
ttgagaacttggctatttagaaaaagtgataatgggtcagtttctcagactgtagccattgaaaattagatgcagagaattcagagatttcttcttaatggaagtaataagctgtaagaa

SEQ ID NO: 308775 - DNA, 120 bp, Artificial Sequence
  ENSG00000134198_10 (sequence is synthesized)
ttgagagatcacaatggagtgttaaaactgactgtgtctaagttgggtgtaagggtttcctgggtttttttatatacatgctctccccagaatacagtaaaccacagttttagaactaaa

SEQ ID NO: 308776 - DNA, 120 bp, Artificial Sequence
  ENSG00000134198_11 (sequence is synthesized)
cacatctgtaaaactaaatatagcatggaaaatccaatttgaataagtcatgctttcctagaatttaaaaataaaaaagtcttcctctggaaagagaagtcacacagacaatcatgtgcc

SEQ ID NO: 308777 - DNA, 120 bp, Artificial Sequence
  ENSG00000134198_12 (sequence is synthesized)
ctataaaagtgagtgtttataggactaaaaaacttttaacaactttttaaggaaatatttttgttcttatacaaaaacatgtaaatattgctttattactttcattttctgaccctgctg

SEQ ID NO: 308778 - DNA, 120 bp, Artificial Sequence
  ENSG00000134198_13 (sequence is synthesized)
gcagttgaaaattgtgggaaagagaatttgtatgggcactgtatctatgaaatacctcataacttacgtttacatgttttcctaactttttgtatttttcttgtatagccacctagagaa

SEQ ID NO: 308779 - DNA, 120 bp, Artificial Sequence
  ENSG00000134198_14 (sequence is synthesized)
ttcttcatagattaagaactacagttttcaccacttaacataagtaaaacaaagtccttcataatttaaccattagcatctttggccaaaccaaaataaagaaaagcatcttctcctagt

SEQ ID NO: 308780 - DNA, 120 bp, Artificial Sequence
  ENSG00000134198_15 (sequence is synthesized)
tgtgtgtgggcaacagaaacaagttaaggaaacaaaaatacttatatatacacagaacaaaaataatgttctttttatgcaaatcccctgtgaaaataaaattttcaatgtttttttggt

SEQ ID NO: 308781 - DNA, 120 bp, Artificial Sequence
  ENSG00000134198_16 (sequence is synthesized)
cttaacgcttcattttaacttagtaaacccaaatttaggatttacattggcaaatttttcagtgatttttaacgtgttacatttagtaaaccatagattttttaaaaactacattttgta

SEQ ID NO: 308782 - DNA, 120 bp, Artificial Sequence
  ENSG00000134198_17 (sequence is synthesized)
aggccacacataagtgaaaatacggaaggctttggaaacccccagatgaacttctatacatgtgaaaacacaagtctttgagtgtgcactaaaagtgtcacactcccaaaaaactcacaa

SEQ ID NO: 308783 - DNA, 120 bp, Artificial Sequence
  ENSG00000134198_18 (sequence is synthesized)
aacattttgctaaaaagatatgactgcttgaaatagtctctctcccatggagaaccacatttctctttctgccatacttgctactgctactgattttggaggaaatttttctagaagaac

SEQ ID NO: 308784 - DNA, 120 bp, Artificial Sequence
  ENSG00000134198_19 (sequence is synthesized)
aaaggtcatatttgaggcaagctaaaaacttaattatacatggctactttactgtgtctgtagctaaagaaaaattattttacaaaaattacttcatgaaatatagtttgtaccccagta

SEQ ID NO: 308785 - DNA, 120 bp, Artificial Sequence
  ENSG00000134198_20 (sequence is synthesized)
gttgagaaatgtgaccttttaggcaaagaacaggcagtccatctctcttagctttagtttatctctctgcctgaagacaggaaacaggcccaagtgcatactcgggttctttccaactca

SEQ ID NO: 308786 - DNA, 120 bp, Artificial Sequence
  ENSG00000134198_21 (sequence is synthesized)
gaatcatctctgattccacaaaagtgagtttagtttcctatctgaattaacaactttaaaggagactataatagttaaaagtggaagaatagaaataaataaatttaaaatgaaattaat

SEQ ID NO: 308787 - DNA, 120 bp, Artificial Sequence
  ENSG00000134198_22 (sequence is synthesized)
taaagtagaagagaagggttctgttccatgtacgattaatgtgccccttttggagataagctttccaaaatatgcgtatgagtaaaattagagaattccaccactaagcaacaatagatt

SEQ ID NO: 308788 - DNA, 120 bp, Artificial Sequence
  ENSG00000134198_23 (sequence is synthesized)
tccaccactaagcaacaatagattttatatgtgtgtgtggatatatatacacacacacacagaaagatgaatatatatatatatatatctgtatagacacacatataatatatatagata

SEQ ID NO: 308789 - DNA, 120 bp, Artificial Sequence
  ENSG00000134198_24 (sequence is synthesized)
tataatttgaatatatacatgtatgtatatacagatgtgtgtgtatatatatatatacatacacatatacataaattttcagctatttctgttcccctgaactaatttgagattagaccc

SEQ ID NO: 308790 - DNA, 120 bp, Artificial Sequence
  ENSG00000134198_25 (sequence is synthesized)
actaatttgagattagacccaaacatgcttttaaatgtctcatgccaaggcactgaattaagacttcttaatgttgaaatattttaagtgatttcatattaaattttctatatactgaaa

SEQ ID NO: 308791 - DNA, 120 bp, Artificial Sequence
  ENSG00000134198_26 (sequence is synthesized)
atgaagggtcacaggagatggctacactcccttctggaacattcagtgggactgtgctgtccgtggagtgctcagagctacatgcagttaatcacagaaggcttacagaggagatgggcc

SEQ ID NO: 308792 - DNA, 120 bp, Artificial Sequence
  ENSG00000134200_0 (sequence is synthesized)
gggtcaccacagcatctgctcaccaatgcaaagtaagcatgactgctctctttctgatgtccatgctttttggccttacatgtgggcaagcgatgtctttttgtattccaactgagtata

SEQ ID NO: 308793 - DNA, 120 bp, Artificial Sequence
  ENSG00000134200_1 (sequence is synthesized)
caatgcacatcgaaaggagagagtgtgcttattgcctaaccatcaacaccaccatctgtgctggatattgtatgacacgggatatcaatggcaaactgtttcttcccaaatatgctctgt

SEQ ID NO: 308794 - DNA, 120 bp, Artificial Sequence
  ENSG00000134200_2 (sequence is synthesized)
gcccactccatgttgctccctatttttcctatcctgttgctttaagctgtaagtgtggcaagtgcaatactgactatagtgactgcatacatgaagccatcaagacaaactactgtacca

SEQ ID NO: 308795 - DNA, 120 bp, Artificial Sequence
  ENSG00000134200_3 (sequence is synthesized)
aacctcagaagtcttatctggtaggattttctgtctaatagtgatataatttgcaatttggttaaatgtgcttgcctgaaataaagctaataaaaatattatgtttcacattatcttctg

SEQ ID NO: 308796 - DNA, 120 bp, Artificial Sequence
  ENSG00000134201_0 (sequence is synthesized)
ctctcaaagtctgagccccgctccgctgatgcctgtctgcagaatccgcaccaaccagcaccatgcccatgactctggggtactgggacatccgtgggctggcccacgccatccgcttgc

SEQ ID NO: 308797 - DNA, 120 bp, Artificial Sequence
  ENSG00000134201_1 (sequence is synthesized)
tcctggaatacacagactcaagctatgtggaaaagaagtacacgctgggggacgctcctgactatgacagaagccagtggctgaatgaaaaattcaagctgggcctggactttcccaatc

SEQ ID NO: 308798 - DNA, 120 bp, Artificial Sequence
  ENSG00000134201_2 (sequence is synthesized)
tgccctacttgattgatggggctcacaagatcacccagagcaatgccatcctgcgctacattgcccgcaagcacaacctgtgtggggagacagaagaggagaagattcgtgtggacattt

SEQ ID NO: 308799 - DNA, 120 bp, Artificial Sequence
  ENSG00000134201_3 (sequence is synthesized)
tggagaaccaggttatggataaccacatggagctggtcagactgtgctatgacccagattttgagaaactgaagccaaaatacttggaggaactccctgaaaagctaaagctctactcag

SEQ ID NO: 308800 - DNA, 120 bp, Artificial Sequence
  ENSG00000134201_4 (sequence is synthesized)
agtttctggggaagcggccatggtttgcaggagacaagatcacctttgtggatttccttgcctatgatgtccttgacatgaagcgtatatttgagcccaagtgcttggacgccttcctaa

SEQ ID NO: 308801 - DNA, 120 bp, Artificial Sequence
  ENSG00000134201_5 (sequence is synthesized)
acttgaaggacttcatctcccgctttgagggtttgaagaagatctctgcctacatgaagtccagccaattcctccgaggtcttttgtttggaaagtcagctacatggaacagcaaatagg

SEQ ID NO: 308802 - DNA, 120 bp, Artificial Sequence
  ENSG00000134201_6 (sequence is synthesized)
cccagtgatgccagaagatgggagggaggagccaaccttgctgcctgcgaccctggaggacagcctgactccctggacctgccttcttcctttttccttctttctactctcttctcttcc

SEQ ID NO: 308803 - DNA, 120 bp, Artificial Sequence
  ENSG00000134201_7 (sequence is synthesized)
ccaaggcctcattggcttcctttcttctaacatcatccctccccgcatcgaggctctttaaagcttcagctccccactgtcctccatcaaagtccccctcctaacgtcttcctttccctg

SEQ ID NO: 308804 - DNA, 120 bp, Artificial Sequence
  ENSG00000134201_8 (sequence is synthesized)
cactaacgccaacctgactgcttttcctgtcagtgcttttctcttctttgagaagccagactgatctctgagctccctagcactgtcctcaaagaccatctgtatgccctgctccctttg

SEQ ID NO: 308805 - DNA, 120 bp, Artificial Sequence
  ENSG00000134201_9 (sequence is synthesized)
ctgggtccctaccccagctccgtgtgatgcccagtaaagcctgaaccatgcctgccatgtcttgtcttattccctgaggctcccttgactcaggactgtgctcgaattgtgggtggtttt

SEQ ID NO: 308806 - DNA, 120 bp, Artificial Sequence
  ENSG00000134201_10 (sequence is synthesized)
ttgtcttctgttgtccacagccagagcttagtggatgggtgtgtgtgtgtgtgtgttgggggtggtgatcaggcaggttcataaatttccttggtcatttctgccctctagccacatccc

SEQ ID NO: 308807 - DNA, 120 bp, Artificial Sequence
  ENSG00000134201_11 (sequence is synthesized)
tctgttcctcactgtggggattactacagaaaggtgctctgtgccaagttcctcactcattcgcgctcctgtaggccgtctagaactggcatggttcaaagaggggctaggctgatgggg

SEQ ID NO: 308808 - DNA, 120 bp, Artificial Sequence
  ENSG00000134201_12 (sequence is synthesized)
aagggggctgagcagctcccaggcagactgccttctttcaccctgtcctgatagacttccctgatctagatatccttcgtcatgacacttctcaataaaacgtatcccaccgtattgtaa

SEQ ID NO: 308809 - DNA, 120 bp, Artificial Sequence
  ENSG00000134201_13 (sequence is synthesized)
tctttgcatccttgattctgcccctgtctggatccagaggctgccaggtgctcgggcgctcatgcggctgacccagaggctattgggaggccagtgaggacagattcaggaagagcatct

SEQ ID NO: 308810 - DNA, 120 bp, Artificial Sequence
  ENSG00000134201_14 (sequence is synthesized)
cattctgatcacttcagatagggtctggcacccagtcagagtctaataaatgctgatgtatccaattgaagcctgggcactgccccggttttagttgtggggaagatggctgcttgcctg

SEQ ID NO: 308811 - DNA, 120 bp, Artificial Sequence
  ENSG00000134201_15 (sequence is synthesized)
tggccagcctgggccatctacagccctggggaggccacgtctgtgcagggagcttttgtctgagggtggtgacagctgttttctgcctcaggagaaactgaagccaaaatacttggagga

SEQ ID NO: 308812 - DNA, 120 bp, Artificial Sequence
  ENSG00000134201_16 (sequence is synthesized)
cccgctccgctgatgcctgtctgcagaatccgcaccaaccagcaccatgcccatgactctggggtactgggacatccgtgggtgaatagccatggagctcctaaaaagaatgggaccttt

SEQ ID NO: 308813 - DNA, 120 bp, Artificial Sequence
  ENSG00000134201_17 (sequence is synthesized)
tgtttgatgcctccagcaccctgtctctgcatcttgaatccagccacgtgaccatctcttgcccacctttggccaatgtccctgagacatttcaagtgcatcatgctgcagactggtgtt

SEQ ID NO: 308814 - DNA, 120 bp, Artificial Sequence
  ENSG00000134201_18 (sequence is synthesized)
gctgtctccacaataccgcgcttcccctgtgtccccatctcagtctttggtcccactatccacttcccacatgcagccattgagtcctctatttttcttccttaaatctccagaatctgc

SEQ ID NO: 308815 - DNA, 120 bp, Artificial Sequence
  ENSG00000134201_19 (sequence is synthesized)
gaatacacagactcaagctatgtggaaaagaagtacacgctgggggacggtaatggcaccctcgtgtccgggccctgcccactcacgctgagttggcaccaagcaacccatggtggccac

SEQ ID NO: 308816 - DNA, 120 bp, Artificial Sequence
  ENSG00000134201_20 (sequence is synthesized)
ctgtggctgcctctgcaggcctcccctgctggagctgcaggctgtcccttccctgagctcccgtgagtgagccctctggccttgcaaggcagaatgctggggcgggatgctggacaccct

SEQ ID NO: 308817 - DNA, 120 bp, Artificial Sequence
  ENSG00000134201_21 (sequence is synthesized)
gtctaattgggttgggtgtccctcagagcttccctaaaccctggaagccttagccgttgtggggtccagagccctcagtgggattctttctccctgaaccctgggatgtgggactgagtg

SEQ ID NO: 308818 - DNA, 120 bp, Artificial Sequence
  ENSG00000134201_22 (sequence is synthesized)
gtcagattctagatccacctgtctcagggatcttgccactggctccttgggagggtccccgggaaggagggctgggctctggggaggtttgttttcacttcttccccaccacagctcctg

SEQ ID NO: 308819 - DNA, 120 bp, Artificial Sequence
  ENSG00000134201_23 (sequence is synthesized)
actatgacagaagccagtggctgaatgaaaaattcaagctgggcctggactttcccaatgtaggtgcaggggaaggggcggttttgggggaaagtgcgacgtgtctctgactgcatctcc

SEQ ID NO: 308820 - DNA, 120 bp, Artificial Sequence
  ENSG00000134201_24 (sequence is synthesized)
tctccccaccttagaggtgttaagatcaggagtcttctgcccaattcctctcactcttggctgtctacacagcccttgcatgatgttctgtgtcccagctcatttattagtgtgacagta

SEQ ID NO: 308821 - DNA, 120 bp, Artificial Sequence
  ENSG00000134201_25 (sequence is synthesized)
tttctatctcaggcctgccatgagcaggccctggtctcctctctgcccttgcatatgggaaggggatgctggggagcctggtggcccaactgagcttccccggtttcccatctatccagc

SEQ ID NO: 308822 - DNA, 120 bp, Artificial Sequence
  ENSG00000134201_26 (sequence is synthesized)
acttgaaggacttcatctcccgctttgaggtgatgcccccatcctcctttctctttgatgccccttgttcctttctctcctttcagatgctttcccagtcctggagctacacaaagaata

SEQ ID NO: 308823 - DNA, 120 bp, Artificial Sequence
  ENSG00000134201_27 (sequence is synthesized)
actcgtatgtattgagtacgggcttcatgccaggaatcatgcccagcacattatacctatcgtgtagaatttgaaatttccaacattcctacagggtgacagaattatcttgcccatttt

SEQ ID NO: 308824 - DNA, 120 bp, Artificial Sequence
  ENSG00000134201_28 (sequence is synthesized)
agagataagaaaactgagaatgagagggtcagtcctttgctcagggtcccagagccagtggaggctgtgctgggctccctgtgagcctctggatctatgggtggcagtcagggctctccc

SEQ ID NO: 308825 - DNA, 120 bp, Artificial Sequence
  ENSG00000134201_29 (sequence is synthesized)
atttgtgacaaaaggagaagcctcaggcctcatccagcctgggtttcacagcccagaacactttgaaagaggcagagcacttcaggaccacggatgcagctggcaatagtaggactgaca

SEQ ID NO: 308826 - DNA, 120 bp, Artificial Sequence
  ENSG00000134201_30 (sequence is synthesized)
cacagtggcattgatgttgagtactaaacctgcaggcagtattcatagccacccccagaagctttgcatgatcggacccccatgtggaaaatcctgagatccggagctgtggctggagct

SEQ ID NO: 308827 - DNA, 120 bp, Artificial Sequence
  ENSG00000134201_31 (sequence is synthesized)
ggattagggtacatatgtgggtgcccctgttgaagcagtgtgtgttgaagtgctctgtgctggggcactctccttctttatctttcttcctctctttttttccctccaatgttccacgtc

SEQ ID NO: 308828 - DNA, 120 bp, Artificial Sequence
  ENSG00000134201_32 (sequence is synthesized)
ttccccctgtgagatgagtagcacactgattttactcctattcaccgaccttctcctctgcatgaggcagggtgtgaggcacagtgggagttgcatagatgactgccccatcctggaaat

SEQ ID NO: 308829 - DNA, 120 bp, Artificial Sequence
  ENSG00000134201_33 (sequence is synthesized)
accacctgggtaccgggcctggggcctgcccctcactcacggggaaccatccctcacctgtgttgaagttgtttgagagcagcaaatcctactttagtacagatttggggatttgaggca

SEQ ID NO: 308830 - DNA, 120 bp, Artificial Sequence
  ENSG00000134201_34 (sequence is synthesized)
ttagtccaacaggcttctgagcctagaatctgtttccctttcccactccccatcaagaaatctgcttgctcagctagttcccatcagctctggttctggtccagcctgagcagccttggg

SEQ ID NO: 308831 - DNA, 120 bp, Artificial Sequence
  ENSG00000134201_35 (sequence is synthesized)
gttatgtaagaggtggtgggaggggagcggtggggaacagccgagggctggggcatggagcctgcctgggcctggccctggccctttggggagagggagccctggatctctttgaattct

SEQ ID NO: 308832 - DNA, 120 bp, Artificial Sequence
  ENSG00000134201_36 (sequence is synthesized)
ttagaagttacatggtcattgaatcctggtaagattgtgtgcagcacacctgagtgtcatgtggcctggctagcagtagtagggctggagatgtgatgggggcacagggacatagggaga

SEQ ID NO: 308833 - DNA, 120 bp, Artificial Sequence
  ENSG00000134201_37 (sequence is synthesized)
tttagctcaggtaccaggtggagaagtttggactttatgctttaatgggaatgattagagcctggtctggccttcctttggtggttcacccttaccctattcagtttcatccaggttttg

SEQ ID NO: 308834 - DNA, 120 bp, Artificial Sequence
  ENSG00000134201_38 (sequence is synthesized)
ctaagtcattgggtgagatctgtgctctcttcttggctgcacaggtgtgttctgagcccctttgttctgctggaggtcctttctgtgtgtgcaatcctaggcaagccaagaacctccctg

SEQ ID NO: 308835 - DNA, 120 bp, Artificial Sequence
  ENSG00000134201_39 (sequence is synthesized)
tgaaaaaggagaatgtttgtgccgacaaggagtgacaggatctggcatggggtgtggctgggtggaagaggaggagaatttggcaaaaacatgctagaactgaagacagaaccaggctat

SEQ ID NO: 308836 - DNA, 120 bp, Artificial Sequence
  ENSG00000134201_40 (sequence is synthesized)
attccagccctgtcccacttactagctatttgagtgtgaggaagttgctgaacttctgttcttctatatgagaaacggtgataatagaactgaccatggagggtagtcgagtggattttc

SEQ ID NO: 308837 - DNA, 120 bp, Artificial Sequence
  ENSG00000134201_41 (sequence is synthesized)
taagcctgtgttgtaatttctgttggatataaagcacccagcacagtgtagatctttcgtaaatggtagctgttattatggtataacattacttaaaggaagttggaagagttaacttag

SEQ ID NO: 308838 - DNA, 120 bp, Artificial Sequence
  ENSG00000134201_42 (sequence is synthesized)
aagagctggggacctaagagaccgtgtgatgctccagcacttgagcccacatggaaaggctgtggccagggccctgacctgctgtgcctgcagcaaagctacttgagcccttctagacag

SEQ ID NO: 308839 - DNA, 120 bp, Artificial Sequence
  ENSG00000134201_43 (sequence is synthesized)
attgcccgcaagcacaacctgtgtgagtgtgggtggctgcaatgtgcggggggaaggtgacctcctccttggctgggctgtgatgctgagattgagtctgtgttttgtgggtggcaggtg

SEQ ID NO: 308840 - DNA, 120 bp, Artificial Sequence
  ENSG00000134201_44 (sequence is synthesized)
gggagacagaagaggagaagattcgtgtggacattttggagaaccaggttatggataaccacatggagctggtcagactgtgctatgacccagattttgtgagtcccacaccccactccc

SEQ ID NO: 308841 - DNA, 120 bp, Artificial Sequence
  ENSG00000134201_45 (sequence is synthesized)
agtcacccatttccctgccttttggcccagaccagggagggacttccaaagtcaggtctgtagcagactccggccagctgactggagacgtctataacctggttctccaaaatgtccaca

SEQ ID NO: 308842 - DNA, 120 bp, Artificial Sequence
  ENSG00000134201_46 (sequence is synthesized)
cgaatcttctcctcttctgaagattcttgtggacattttggagaaccagaccacggacaactggatgcaactggtcatgatctgctaccacccagagtttgtgagtctccccagtgagct

SEQ ID NO: 308843 - DNA, 120 bp, Artificial Sequence
  ENSG00000134201_47 (sequence is synthesized)
gcacctggcagagtttggatttggggccaggactcttgcattcctgcacgcactggtcttttcttaagtccttggtaccactcatcctccaagtgctttcccatactatcagcagttatt

SEQ ID NO: 308844 - DNA, 120 bp, Artificial Sequence
  ENSG00000134201_48 (sequence is synthesized)
ctcacgactccaatgtcatgtcaacaaaagcagaggcaattcccaccaatcttaggacacgatccaggcatcccacggtggaaattcaattcctagatggtaaaatttgtgttcagaatc

SEQ ID NO: 308845 - DNA, 120 bp, Artificial Sequence
  ENSG00000134201_49 (sequence is synthesized)
tccttcatctcctctggcctctggcctctgtcatgggtcatttctgtcagttgatttatatcacctacctgctcctagaatatacagactcaagtacaagaccaaggaatgtaatggcac

SEQ ID NO: 308846 - DNA, 120 bp, Artificial Sequence
  ENSG00000134201_50 (sequence is synthesized)
cctcaaattgcatcttctcctcaaagttttccaagtgctgtcattgacatgcaccgggatctgcgcattttcataacagacagctcagaggcagccagagggcctttattcctctccctc

SEQ ID NO: 308847 - DNA, 120 bp, Artificial Sequence
  ENSG00000134202_0 (sequence is synthesized)
tgcagcactcctgcccgggtcccgcctcggggtcgccaggccctgaaccccaacgccggcattagtcgcgcctgcgcacggccctgtggagccgcggaggcaagggacggagaacggggc

SEQ ID NO: 308848 - DNA, 120 bp, Artificial Sequence
  ENSG00000134202_1 (sequence is synthesized)
ggaggcggagtcagggcgcccgcgcgtgggccccgcccccttatgtcgggtataaagcccctcccgctcacagtttccctagtcctcgaaggctcggaagcccgtcaccatgtcgtgcga

SEQ ID NO: 308849 - DNA, 120 bp, Artificial Sequence
  ENSG00000134202_2 (sequence is synthesized)
gtcgtctatggttctcgggtactgggatattcgtgggctggcgcacgccatccgcctgctcctggagttcacggatacctcttatgaggagaaacggtacacgtgcggggaagctcctga

SEQ ID NO: 308850 - DNA, 120 bp, Artificial Sequence
  ENSG00000134202_3 (sequence is synthesized)
ctatgatcgaagccaatggctggatgtgaaattcaagctagacctggactttcctaatctgccctacctcctggatgggaagaacaagatcacccagagcaatgccatcttgcgctacat

SEQ ID NO: 308851 - DNA, 120 bp, Artificial Sequence
  ENSG00000134202_4 (sequence is synthesized)
cgctcgcaagcacaacatgtgtggtgagactgaagaagaaaagattcgagtggacatcatagagaaccaagtaatggatttccgcacacaactgataaggctctgttacagctctgacca

SEQ ID NO: 308852 - DNA, 120 bp, Artificial Sequence
  ENSG00000134202_5 (sequence is synthesized)
cgaaaaactgaagcctcagtacttggaagagctacctggacaactgaaacaattctccatgtttctggggaaattctcatggtttgccggggaaaagctcacctttgtggattttctcac

SEQ ID NO: 308853 - DNA, 120 bp, Artificial Sequence
  ENSG00000134202_6 (sequence is synthesized)
ctatgatatcttggatcagaaccgtatatttgaccccaagtgcctggatgagttcccaaacctgaaggctttcatgtgccgttttgaggctttggagaaaatcgctgcctacttacagtc

SEQ ID NO: 308854 - DNA, 120 bp, Artificial Sequence
  ENSG00000134202_7 (sequence is synthesized)
tgatcagttctgcaagatgcccatcaacaacaagatggcccagtggggcaacaagcctgtatgctgagcaggaggcagacttgcagagcttgttttgtttcatcctgtccgtaaggggtc

SEQ ID NO: 308855 - DNA, 120 bp, Artificial Sequence
  ENSG00000134202_8 (sequence is synthesized)
agcgctcttgctttgctcttttcaatgaatagcacttatgttactggtgtccagctgagtttctcttgggtataaaggctaaaagggaaaaaggatatgtggagaatcatcaagatatga

SEQ ID NO: 308856 - DNA, 120 bp, Artificial Sequence
  ENSG00000134202_9 (sequence is synthesized)
attgaatcgctgcgatactggcatttccctactccccaactgagttcaagggctgtaggttcatgcccaagccctgagagtgggtactagaaaaaacgagattgcacagttggagagagc

SEQ ID NO: 308857 - DNA, 120 bp, Artificial Sequence
  ENSG00000134202_10 (sequence is synthesized)
aggtgtgttaaatgggactggagtccctgtgaagactgggtgaggataacacaagtaaaactgtggtactgatggacttaaccggagttcggaaaccgtcctgtgtacacatgggagttt

SEQ ID NO: 308858 - DNA, 120 bp, Artificial Sequence
  ENSG00000134202_11 (sequence is synthesized)
agtgtgataaaggcagtatttcagactggtgggctagccaatagagttgggacaattgcttactcattaaaaataatagagccccacttgacactattcactaaaattaatctggaattt

SEQ ID NO: 308859 - DNA, 120 bp, Artificial Sequence
  ENSG00000134202_12 (sequence is synthesized)
aaggcccaacattaaacacaaagctgttgaaatattgatgaaaatgtaagaatttttgtgaccacggggtaggagaagtttctttaaagacgtaaaaagaaaaaaaccataggctgctct

SEQ ID NO: 308860 - DNA, 120 bp, Artificial Sequence
  ENSG00000134202_13 (sequence is synthesized)
gcctgtggagtagccattctttattcttttactttttaaaataataacaatcacaaaggaaagatttgccaattgaataggatcaaattctacaacttttcctaaggcacccacaaataa

SEQ ID NO: 308861 - DNA, 120 bp, Artificial Sequence
  ENSG00000134202_14 (sequence is synthesized)
atgacaagtgagacaaaaagcactagtataaagattatataaagacctataaatcattaagacaactgagtttttaaaaatggacaaaatccatgaacaatttataaaatagaaatatag

SEQ ID NO: 308862 - DNA, 120 bp, Artificial Sequence
  ENSG00000134202_15 (sequence is synthesized)
ccaaaaatgtctaaaagatgtttatgatgtaaggaattatcaattacaacagtgagaaaccatatttccttctatccgatgagtaaaaagtttctaaagtgttggcaaggcttaggaaag

SEQ ID NO: 308863 - DNA, 69 bp, Artificial Sequence
  ENSG00000134202_16 (sequence is synthesized)
ttggaggacaattgtaaaatttaaatcatatcctatgacccagcaattccatgctataaaaactcatcc

SEQ ID NO: 308864 - DNA, 61 bp, Artificial Sequence
  ENSG00000134202_17 (sequence is synthesized)
cagcctggcgacatatactaagatgttcactgtggcattgtctgtaatgacaaataagtgg

SEQ ID NO: 308865 - DNA, 120 bp, Artificial Sequence
  ENSG00000134202_18 (sequence is synthesized)
gatgttcactgtggcattgtctgtaatgacaaataagtggaaaccgtgtaaatacctgtcaatactatggagtaccatgtggcaacggaagaatgagactgaactgtgtgaactaacatg

SEQ ID NO: 308866 - DNA, 120 bp, Artificial Sequence
  ENSG00000134202_19 (sequence is synthesized)
tgaactaacatgcaaagatccccaaaacaggccaggtgtggttgctcacagctgtaataacaacaccttcagaggctgaggtgagaggatcagttgaggccaggagtttaagaccagcct

SEQ ID NO: 308867 - DNA, 70 bp, Artificial Sequence
  ENSG00000134202_20 (sequence is synthesized)
ccaaaaattttttttaattagctgtgcgcaattgctcatgcatagtcccagctacccaggaggctgaggt

SEQ ID NO: 308868 - DNA, 120 bp, Artificial Sequence
  ENSG00000134202_21 (sequence is synthesized)
gtgagctgtgttcttgccactgcactccaatctgggtgactgagcaagaccctgtctcttaaaaaaataaaaaagatctccaagcatagagaagagtctggagggaaacaccaaactcat

SEQ ID NO: 308869 - DNA, 120 bp, Artificial Sequence
  ENSG00000134202_22 (sequence is synthesized)
aacagtcttactgcaggcaagtgggataaaggcccagactccatggtggaagttaaagggcatttccaagttaaggctaagacttgcttttctaactaagagaatgtgctcatgcattgc

SEQ ID NO: 308870 - DNA, 120 bp, Artificial Sequence
  ENSG00000134202_23 (sequence is synthesized)
ttgtgtagtagaaactagtttttagaaaagaaagcaaacttaagaaacactgactcctgtggagatgacttggcaccactctcctttcacagagcagagtctgaatagtcttcagagata

SEQ ID NO: 308871 - DNA, 120 bp, Artificial Sequence
  ENSG00000134202_24 (sequence is synthesized)
ggcctgtgggccagattgccatcccctatggaccagaagccaaggatctctctagtgatggtcagagggcccaaatggcagggatacccagtgatgtcaggaggaatagtacagacagaa

SEQ ID NO: 308872 - DNA, 120 bp, Artificial Sequence
  ENSG00000134202_25 (sequence is synthesized)
ggtgctaagcagacaattcaactgccatgttttgccaccccctgtgagcagggattaggtgttcaggccagtatcttgggcatgggggagcctttggccagaagaggtataaagctcaga

SEQ ID NO: 308873 - DNA, 120 bp, Artificial Sequence
  ENSG00000134202_26 (sequence is synthesized)
agtttttcagtctgataactattgatataatttccatagtgtgagggagcggtatgctctacccttgtgtatttaaggcaggacagagaaattgaggatgcccctggggctagatcgatg

SEQ ID NO: 308874 - DNA, 120 bp, Artificial Sequence
  ENSG00000134202_27 (sequence is synthesized)
atatgaccagaaatcaaaaagggaatgcattatttattgctgtgtaacactgttaagagaggaggtagttaagggatggataggcacatagagagggaaggtctcaggagaagggataga

SEQ ID NO: 308875 - DNA, 120 bp, Artificial Sequence
  ENSG00000134202_28 (sequence is synthesized)
aaggaactatgttcacaagaacaacggcaagacagtgcctatactgcctctacagttaataggaaaaacggaagaagttacccttaagctaggatgttgctcagaagtgaccatcccaac

SEQ ID NO: 308876 - DNA, 120 bp, Artificial Sequence
  ENSG00000134202_29 (sequence is synthesized)
tttggtgcgggcacaataaatcagcctaaatgtccctaatttaacccagctcattataatgtcattaaacatgacattagcattgtggttttagcacccccatgggttttgcttaggcac

SEQ ID NO: 308877 - DNA, 120 bp, Artificial Sequence
  ENSG00000134202_30 (sequence is synthesized)
tcatgggtaataaccaagatggagtccctttggcaaaacttaggcatgcacagctgtagtaccccaagaagaaaatgttacttctctcatctgggcaaaacccacagaagacttcccagc

SEQ ID NO: 308878 - DNA, 120 bp, Artificial Sequence
  ENSG00000134202_31 (sequence is synthesized)
ttctgccacataaaagacacagaacacagacgccttactggcaacctgctttcaagacccctgtctttgctgagagctttcctttttcccaataaattctactctgccctactcactctc

SEQ ID NO: 308879 - DNA, 120 bp, Artificial Sequence
  ENSG00000134202_32 (sequence is synthesized)
ggaagcccgtcaccatgtcgtgcgagtcgtctatggttctcgggtactgggatattcgtggggtgagtgccgtctcaacggtagagccgctcggtcaaagagactgacgcggagagggcg

SEQ ID NO: 308880 - DNA, 120 bp, Artificial Sequence
  ENSG00000134202_33 (sequence is synthesized)
ggtctctgggtccgcgatctccagcaggagcagctctacgcgggagccttttcgagctgccgagccacggatgtcgacccctgcccagcctctgggatcgcgggccctgtggggaggggc

SEQ ID NO: 308881 - DNA, 120 bp, Artificial Sequence
  ENSG00000134202_34 (sequence is synthesized)
ggaggagaccacgccggagccgggcctaggggccgcttaaccaccgccccggcaggacgcagggactcggcagccccgggccggggaacgttagcgggcgggggttgggaatgggtggga

SEQ ID NO: 308882 - DNA, 120 bp, Artificial Sequence
  ENSG00000134202_35 (sequence is synthesized)
ctttcatgtgccgttttgaggtgacgtttcctgcacctttctcttataaaaacactcacaggctcccctgggacctgcaggatcccatagtggaggattcttccccggcttttgcctaat

SEQ ID NO: 308883 - DNA, 120 bp, Artificial Sequence
  ENSG00000134202_36 (sequence is synthesized)
tagacctttaagtcttgggaagagcctaacttctataccttggaggcactgtctacaaaaaaatggaggaggtagacgcaggcaacacgtgaatgttgctgttctggtatgcatctgttg

SEQ ID NO: 308884 - DNA, 120 bp, Artificial Sequence
  ENSG00000134207_0 (sequence is synthesized)
tggggccgtcgtgccccgccccagtgcggccggggcgcgggttcgagctgctgctcggcaagcctgggtgtctagggcatgagcggagtgtggggggccggcgggcctcggtgccaggag

SEQ ID NO: 308885 - DNA, 120 bp, Artificial Sequence
  ENSG00000134207_1 (sequence is synthesized)
gcgctcgcggtcctcgcctcgctgtgccgggcccggccgccccctctcgggctggacgtggagacttgtcggagcttcgagctgcagcccccagagcggagtcccagcgcggcaggcgca

SEQ ID NO: 308886 - DNA, 120 bp, Artificial Sequence
  ENSG00000134207_2 (sequence is synthesized)
gctgtgctggatgccctggaggaacaaggaggcctccagtccctcttctgctaatccccccttggaagccctccagagccccagcttcagaggcaacatggcggacaagctgaaggaccc

SEQ ID NO: 308887 - DNA, 120 bp, Artificial Sequence
  ENSG00000134207_3 (sequence is synthesized)
cagcaccctgggcttcctggaggcggccgtgaagatcagccacacgtccccagatatcccagctgaggtgcagatgtcggtcaaggagcacatcatgcgtcacacccggctgcagcggca

SEQ ID NO: 308888 - DNA, 120 bp, Artificial Sequence
  ENSG00000134207_4 (sequence is synthesized)
aactacagagccagcgtcatccaccaggcacacgtccttcaagcgccacctgccaaggcagatgcatgtctccagtgtagactatggcaatgagcttccaccagcagcagagcagcccac

SEQ ID NO: 308889 - DNA, 120 bp, Artificial Sequence
  ENSG00000134207_5 (sequence is synthesized)
cagcattggccgcatcaagcctgagctctacaagcagaagtcggtggatggggaggatgccaagtctgaggccaccaagagctgcgggaagatcaacttcagcctacgctacgattacga

SEQ ID NO: 308890 - DNA, 120 bp, Artificial Sequence
  ENSG00000134207_6 (sequence is synthesized)
gaccgagaccctgattgtgcgtatcctgaaggcttttgacctccctgccaaggacttttgtggaagctctgacccttatgtcaagatctacctcctgcctgaccgcaaatgcaagctgca

SEQ ID NO: 308891 - DNA, 120 bp, Artificial Sequence
  ENSG00000134207_7 (sequence is synthesized)
gacccgggtgcaccgcaagaccctgaaccccacctttgatgagaacttccacttccctgtgccctatgaggagctggctgaccgcaagctgcatctcagtgtcttcgactttgaccgctt

SEQ ID NO: 308892 - DNA, 120 bp, Artificial Sequence
  ENSG00000134207_8 (sequence is synthesized)
ctcccgccatgacatgattggcgaggtcatcctggacaacctctttgaggcctctgacctgtctcgggaaacctccatctggaaggatatccaatatgccacaagtgaaagcgtggactt

SEQ ID NO: 308893 - DNA, 120 bp, Artificial Sequence
  ENSG00000134207_9 (sequence is synthesized)
gggagagatcatgttctccctttgctacctgcccactgcaggcaggctcaccctcacagtgattaagtgtcggaacctcaaggcgatggacatcacaggctattcagatccctatgtgaa

SEQ ID NO: 308894 - DNA, 120 bp, Artificial Sequence
  ENSG00000134207_10 (sequence is synthesized)
agtgtccttgctctgtgatgggcggaggctgaagaagaagaaaacaaccataaagaaaaacactctcaatcctgtctacaatgaggccatcatctttgacattcccccggaaaacatgga

SEQ ID NO: 308895 - DNA, 120 bp, Artificial Sequence
  ENSG00000134207_11 (sequence is synthesized)
tcaagtcagcctgctcatctcagtcatggactatgatcgagtgggccacaatgagatcataggagtctgtcgtgtggggatcactgctgaaggcctgggcagggaccactggaacgagat

SEQ ID NO: 308896 - DNA, 120 bp, Artificial Sequence
  ENSG00000134207_12 (sequence is synthesized)
gctggcatacccccggaagcccatcgcacactggcactccttggtggaggtaaagaaatccttcaaagagggaaaccctcggttgtgatttcattcacgtggatgctgcaagcagagaga

SEQ ID NO: 308897 - DNA, 120 bp, Artificial Sequence
  ENSG00000134207_13 (sequence is synthesized)
ctgccacctggagttaggatggcagggccgagctgctagcttcgacagtgagagctcgtgcccatctccgaaaccacctccaacaccatgagatgtgcagccaaataacacaaatgggac

SEQ ID NO: 308898 - DNA, 120 bp, Artificial Sequence
  ENSG00000134207_14 (sequence is synthesized)
tcagcaatgttctctttgcacttgttcaaccgtctaaacagtgttgtgcagtcgcagtggcggcagcagcggcagccgtccgtcactccagagtcttacctgctcctgtgtaggtcaaag

SEQ ID NO: 308899 - DNA, 120 bp, Artificial Sequence
  ENSG00000134207_15 (sequence is synthesized)
ctgagacacttgtcatgtggtcagatctgtcttagtcttttgtgtctcccaaggtgatgtttttgtggtttttcactttttatgggtctgctggtaagaaaagggaaaaaaaaaaagagt

SEQ ID NO: 308900 - DNA, 120 bp, Artificial Sequence
  ENSG00000134207_16 (sequence is synthesized)
aggaaaagacaaagggtggaaagcccagaagttggttctagaaaatacaaggtacagttttttggaaagaggtggattgagtttctgaaatgctgcgtctccagcaagctccacaaccct

SEQ ID NO: 308901 - DNA, 120 bp, Artificial Sequence
  ENSG00000134207_17 (sequence is synthesized)
ggaaaaggaggaggcgtggtgggactgcggctgcattttcagtgccctgcaggaatggggtgaatccatggaagagcctttgtgaggtgaattactagtctttgaagctcttcgctggca

SEQ ID NO: 308902 - DNA, 120 bp, Artificial Sequence
  ENSG00000134207_18 (sequence is synthesized)
ctctgaggcgcttgtgagccttcagctgatgtgcagggttcctcgctccccttcctcgctggctttccccatgaattgaaaacgtcttgattcctcatgggaacttagtcactttcttta

SEQ ID NO: 308903 - DNA, 120 bp, Artificial Sequence
  ENSG00000134207_19 (sequence is synthesized)
ggaatgattcagttcagccgaaactaaacacgccatatgttttctgatgcgccacagttaatgatcacatttgtttgaaaacaggatctttgtcctcagaaataatcttgattgtaaagt

SEQ ID NO: 308904 - DNA, 120 bp, Artificial Sequence
  ENSG00000134207_20 (sequence is synthesized)
aagagagaaacatatgttctggaatgatttctgcattatacatagctttataattccatgaagtatcaagctgctgtttaaaatgcctaaacagattaaagaaaaacctagattaaatgt

SEQ ID NO: 308905 - DNA, 120 bp, Artificial Sequence
  ENSG00000134207_21 (sequence is synthesized)
tcttttccaaatggggagttttgaaatccaaatagcagtttgagtccatctttctatgaagagtatgtttttgattgaaaccgagtcagcgtaagcctatttcagcccctttggctcttt

SEQ ID NO: 308906 - DNA, 120 bp, Artificial Sequence
  ENSG00000134207_22 (sequence is synthesized)
gacaatattcatcttaaactttagttctataaattactaagtacttcagtgttgtttgtttcagtggttgtgagggtttcttgtttcctttagatctttaccttaggccaaactcagttt

SEQ ID NO: 308907 - DNA, 120 bp, Artificial Sequence
  ENSG00000134207_23 (sequence is synthesized)
aggaaaaaaaaaattgtttgaactattctgtgttgtaatagcacatttctgttgagttaatagtggtcttcccaccaacccctaaaaccaggttgatttgctcaatctcagtttgtataa

SEQ ID NO: 308908 - DNA, 120 bp, Artificial Sequence
  ENSG00000134207_24 (sequence is synthesized)
ccccagtaagcgcatggaggtgagtttctacttcgacttgtggcgacacagtgccagtttcctgagctgtgtgtactacttgcaagaggcaagtctgctgaagaaccccttcttttaaca

SEQ ID NO: 308909 - DNA, 120 bp, Artificial Sequence
  ENSG00000134207_25 (sequence is synthesized)
gtggaaaatcaagaacagaaaatctgttcacacacctgtgtcttattctttatatatgctacatggtagaggagcagcgaccaataaagtatccctcattttaaaccaagttgtcagatt

SEQ ID NO: 308910 - DNA, 120 bp, Artificial Sequence
  ENSG00000134207_26 (sequence is synthesized)
tctctgctgatagaacgctgcatagtatcttctagccctaaaaatgaccaggttgggcatgagttaacaggatattgtggcaaaaggaattttctgcttagaaaagtaaatgtagataaa

SEQ ID NO: 308911 - DNA, 120 bp, Artificial Sequence
  ENSG00000134207_27 (sequence is synthesized)
cctaaactccaccctgtactgagccttaggctagggactcatgtgtaaagatgacttttctccccagatatcttgtcattgacaggccttcctagtctggtagtcctacatttgggtgtt

SEQ ID NO: 308912 - DNA, 120 bp, Artificial Sequence
  ENSG00000134207_28 (sequence is synthesized)
ctcctgagagtgagaaaaaacccaaggtcatgacaagattcctggcaggtgacagacttcattatgattctgactctagactgaccccatcaagatagtcgtttccgtcagtgaacagat

SEQ ID NO: 308913 - DNA, 120 bp, Artificial Sequence
  ENSG00000134207_29 (sequence is synthesized)
gctgaaggccttgccattacaaaggagacaactgagttccctgggtcataaggagtccagaaattagtgtgagaaggtccttctggaagtgaactcaaaattcatgtccagctgtcatcg

SEQ ID NO: 308914 - DNA, 120 bp, Artificial Sequence
  ENSG00000134207_30 (sequence is synthesized)
ttaaacccttaggcaggtgagtataacccattctaacctcttggagaagggagtgtgatcaatgtgaatcacaatagtattgctcatctgagacattcctcttatatccaagcagctatc

SEQ ID NO: 308915 - DNA, 120 bp, Artificial Sequence
  ENSG00000134207_31 (sequence is synthesized)
tcccatgagtgaacatcccagtggtttcagaaaatcatgtcctgaacagattctagccagccccacaccaccctggccaactgcaaccgctgctgctctagcagtctgggtcaattccta

SEQ ID NO: 308916 - DNA, 120 bp, Artificial Sequence
  ENSG00000134207_32 (sequence is synthesized)
caggcttgggagcccaccccagggaggcttttatctcctgcagcctcatccccagcaccctcaaggtagactactcctcagcctgaatcatgaatgaaacctgaacatctgccaacttca

SEQ ID NO: 308917 - DNA, 120 bp, Artificial Sequence
  ENSG00000134207_33 (sequence is synthesized)
ttatctagcccagtatctcttccctcacagagaagaagaaaatgaaatacaaagttgatccatttgttggctttctctggccggagaaacctctcgggttgttgctgtgagctttgatga

SEQ ID NO: 308918 - DNA, 120 bp, Artificial Sequence
  ENSG00000134207_34 (sequence is synthesized)
agttgtgataaccagggccatttgcacataggtttttttaaaaaacatgaaaagttcccttctcctttatttagcagtgtttccgggctgaaagacgccctcctccccctctgcgcttac

SEQ ID NO: 308919 - DNA, 120 bp, Artificial Sequence
  ENSG00000134207_35 (sequence is synthesized)
ccaggacgttaattaattgcactgtcatttaaaatattatgttgttaattactcgtttgtgtcttcccacccgtgtcacagcctggagtttttattcaattaaatctctgtctcttgccc

SEQ ID NO: 308920 - DNA, 120 bp, Artificial Sequence
  ENSG00000134207_36 (sequence is synthesized)
aaggaccaggacgccggggttccaggagactctgcaggctccatccctccttattcccccaccccgaccccagtagcgctgggcctaggagcactcgggagttgctcagtggctctgcac

SEQ ID NO: 308921 - DNA, 120 bp, Artificial Sequence
  ENSG00000134207_37 (sequence is synthesized)
cggggccggtgcgcgactgagctggcgcctctagccgactttgccaagagggcgcctcctgcccgatccgcgctgaccctgcgcgggacgcagccccaggcggctgcctagccgaggcgg

SEQ ID NO: 308922 - DNA, 120 bp, Artificial Sequence
  ENSG00000134207_38 (sequence is synthesized)
gagcccgagctgagtcgagctcgccggagcgggtgagtcccgagcccgatccccgccgggctggaccctggcgcgcagctgcggcgtctccggggagtcgcggcagggggaatggcgtgt

SEQ ID NO: 308923 - DNA, 120 bp, Artificial Sequence
  ENSG00000134207_39 (sequence is synthesized)
ctggcggcgggagctgcgggagggtcggcgacgtggcggccggcccagggcacctctgtcagcctcctcgcagttgtagttattgtgtgtggcgtggccctggtggcagtttttctcttt

SEQ ID NO: 308924 - DNA, 80 bp, Artificial Sequence
  ENSG00000134215_0 (sequence is synthesized)
gccgggcgctggagtcggaagcctgtgcgcggcagccgccgccgagccggccggggcgcacggagagcgcgcgggactcg

SEQ ID NO: 308925 - DNA, 80 bp, Artificial Sequence
  ENSG00000134215_1 (sequence is synthesized)
gccgggaccggagccgagcctagcgcggcgcccgcgacccgtcagccgcggctcctgctccctcgatcccgcgcggggaa

SEQ ID NO: 308926 - DNA, 120 bp, Artificial Sequence
  ENSG00000134215_2 (sequence is synthesized)
gaaccgcggcggcggcggcggcggccgcatccttgccgcccgccccggcccagccgcgtcccggagccgtcgggcatggagccgtggaagcagtgcgcgcagtggctcatccattgcaag

SEQ ID NO: 308927 - DNA, 120 bp, Artificial Sequence
  ENSG00000134215_3 (sequence is synthesized)
tgcccaccaaccaccgggtgacctgggactcggctcaggtgttcgaccttgcgcagaccctccgcgatggagtcctgctctgccagctgcttaacaacctccgggcgcactccatcaacc

SEQ ID NO: 308928 - DNA, 120 bp, Artificial Sequence
  ENSG00000134215_4 (sequence is synthesized)
tgaaggagatcaacctgaggccgcagatgtcccagtttctctgtttgaagaacataaggacatttctcacggcctgttgtgagacgtttggaatgaggaaaagtgaacttttcgaggcat

SEQ ID NO: 308929 - DNA, 120 bp, Artificial Sequence
  ENSG00000134215_5 (sequence is synthesized)
ttgacttgtttgatgttcgtgactttggaaaggttatagaaacattatcacgactttctcgaacacctatagcattggccacaggaatcaggcccttcccaacagaagaaagcattaatg

SEQ ID NO: 308930 - DNA, 120 bp, Artificial Sequence
  ENSG00000134215_6 (sequence is synthesized)
atgaagacatctacaaaggccttcctgatttaatagatgaaacccttgtggaagatgaagaagatctctatgactgtgtttatggggaagatgaaggtggagaagtctatgaggacttaa

SEQ ID NO: 308931 - DNA, 120 bp, Artificial Sequence
  ENSG00000134215_7 (sequence is synthesized)
tgaaggcagaggaagcacatcagcccaaatgtccagaaaatgatatacgaagttgttgtctagcagaaattaagcagacagaagaaaaatatacagaaactttggagtcaatagaaaagt

SEQ ID NO: 308932 - DNA, 120 bp, Artificial Sequence
  ENSG00000134215_8 (sequence is synthesized)
atttcatggcaccactaaaaagatttctgacagcagcagaatttgattcagtattcatcaacattcctgaacttgtaaaacttcatcggaacctaatgcaagagattcatgattccattg

SEQ ID NO: 308933 - DNA, 120 bp, Artificial Sequence
  ENSG00000134215_9 (sequence is synthesized)
taaataaaaatgaccagaacttgtaccaagtttttattaactacaaggaaagattggttatttacgggcagtactgcagtggagtggagtcagccatctctagtttagactacatttcta

SEQ ID NO: 308934 - DNA, 120 bp, Artificial Sequence
  ENSG00000134215_10 (sequence is synthesized)
agacaaaagaagatgtcaaactgaaattagaggaatgttccaaaagagcaaataatgggaaatttactcttcgagacttgcttgtggttcctatgcaacgtgttttaaagtaccaccttc

SEQ ID NO: 308935 - DNA, 120 bp, Artificial Sequence
  ENSG00000134215_11 (sequence is synthesized)
tcctccaggaactggtcaaacataccactgatccgactgagaaggcaaatctgaaactggctcttgatgccatgaaggacttggcacaatatgtgaatgaagtgaaaagagataatgaga

SEQ ID NO: 308936 - DNA, 120 bp, Artificial Sequence
  ENSG00000134215_12 (sequence is synthesized)
cccttcgtgaaattaaacagtttcagctatctatagagaatttgaaccaaccagttttgctttttggacgacctcagggagatggtgaaattcgaataaccactctagacaagcatacca

SEQ ID NO: 308937 - DNA, 120 bp, Artificial Sequence
  ENSG00000134215_13 (sequence is synthesized)
aacaagaaaggcatatcttcttatttgatttggcagtgatcgtatgtaagagaaaaggtgataactatgaaatgaaggaaataatagatcttcagcagtacaagatagccaataatccta

SEQ ID NO: 308938 - DNA, 120 bp, Artificial Sequence
  ENSG00000134215_14 (sequence is synthesized)
caaccgataaagaaaacaaaaagtggtcttatggcttctacctcatccatacccaaggacaaaatgggttagaattttattgcaaaacaaaagatttaaagaagaaatggctagaacagt

SEQ ID NO: 308939 - DNA, 120 bp, Artificial Sequence
  ENSG00000134215_15 (sequence is synthesized)
ttgaaatggctttgtctaacataagaccagactatgcagactccaatttccacgacttcaagatgcataccttcactcgagtcacatcctgcaaagtctgccagatgctcctgaggggaa

SEQ ID NO: 308940 - DNA, 120 bp, Artificial Sequence
  ENSG00000134215_16 (sequence is synthesized)
cattttatcaaggctatttatgttttaagtgtggagcgagagcacacaaagaatgtttgggaagagtagacaattgtggcagagttaattctggtgaacaagggacactcaaactaccag

SEQ ID NO: 308941 - DNA, 120 bp, Artificial Sequence
  ENSG00000134215_17 (sequence is synthesized)
agaaacggaccaatggactgcgaagaactcctaaacaggtggatccaggtttaccaaagatgcaggtcattaggaactattctggaacaccacccccagctctgcatgaaggaccccctt

SEQ ID NO: 308942 - DNA, 120 bp, Artificial Sequence
  ENSG00000134215_18 (sequence is synthesized)
tacagctccaggccggggataccgttgaacttctgaaaggagatgcacacagtctgttttggcagggcagaaatttagcatctggagaggttggattttttccaagtgatgcagtcaagc

SEQ ID NO: 308943 - DNA, 120 bp, Artificial Sequence
  ENSG00000134215_19 (sequence is synthesized)
cttgcccatgtgtgcccaaaccagtagattattcttgccaaccctggtatgctggagcaatggaaagattgcaagcagagaccgaacttattaatagggtaaatagtacttaccttgtga

SEQ ID NO: 308944 - DNA, 120 bp, Artificial Sequence
  ENSG00000134215_20 (sequence is synthesized)
aaaatagaaaatttaaaagtttaatggaacttgtggagtactacaagcatcattctctcaaggaagggttcagaaccttagatacaactctgcagtttccatacaaggagccagaacatt

SEQ ID NO: 308945 - DNA, 120 bp, Artificial Sequence
  ENSG00000134215_21 (sequence is synthesized)
cagctggacagaggggtaatagagcaggcaacagcttgttaagtccaaaagtgctgggcattgccatcgctcggtatgacttctgtgcaagagatatgagagagttgtccttgttgaaag

SEQ ID NO: 308946 - DNA, 120 bp, Artificial Sequence
  ENSG00000134215_22 (sequence is synthesized)
gagatgtggtgaagatttacacaaagatgagtgcaaatggctggtggagaggagaagtaaatggcagggtgggctggtttccatccacatatgtggaagaggatgaataaattcaaatcc

SEQ ID NO: 308947 - DNA, 120 bp, Artificial Sequence
  ENSG00000134215_23 (sequence is synthesized)
cgtgttgcaccctgcaccaaaaatttcagagaagggataaatagaagcctgcacagcatcgtgaattaactgaagtgtttaaaaagctgcatttctggctgttcaacatcctccctcctt

SEQ ID NO: 308948 - DNA, 120 bp, Artificial Sequence
  ENSG00000134215_24 (sequence is synthesized)
agcccctcctaagtcttaatgctgagatttctaaagatgctggtactgacagattaatggcttgcctagagctgtgcaagaaacagcctgccagtctgtcattgtcagggaccagggcaa

SEQ ID NO: 308949 - DNA, 120 bp, Artificial Sequence
  ENSG00000134215_25 (sequence is synthesized)
aaccaagagctgttcttcccagaagagccctgcaaacacattggttcgtgcttccctttacttcttctggtcagataccatgaatgccagtcatcagtaaatcttaatacacttttgctt

SEQ ID NO: 308950 - DNA, 120 bp, Artificial Sequence
  ENSG00000134215_26 (sequence is synthesized)
tattctcacatgccattcaccagattatttgatggtacaaagaagcagaagtgtaattttccttttcccagcatgacgaaaaattggagttctgccatttgagcagcttactggaaagat

SEQ ID NO: 308951 - DNA, 120 bp, Artificial Sequence
  ENSG00000134215_27 (sequence is synthesized)
ccagccttacttgtcttaaattgtccaacaaggtgactcattgcccggcaaacacttttaccctcagatgttactcatgatattataaaatatgaggccagtgctcaggtttgcatcata

SEQ ID NO: 308952 - DNA, 120 bp, Artificial Sequence
  ENSG00000134215_28 (sequence is synthesized)
agtgagctatccctgaagggttttaattacttatttggtgtcctgattatatttgcaaacttctttataaaaggtgaaaaaagcacacaaaagagagggtgtcttcatattaaaccttca

SEQ ID NO: 308953 - DNA, 120 bp, Artificial Sequence
  ENSG00000134215_29 (sequence is synthesized)
caaccttcatgatttcataggattattttggaaatatagcacttgactttatgaaaggatctgggctaggtatattaagggtagttgccaataacctgaagaagctggcattgtttacag

SEQ ID NO: 308954 - DNA, 120 bp, Artificial Sequence
  ENSG00000134215_30 (sequence is synthesized)
aaacagatcaagggctataatttatgtcattttatagcagcagtatctattaatacatgccttttcctcccatccacctcccccgcacacacacaaagatgacctgggacatgatttttt

SEQ ID NO: 308955 - DNA, 120 bp, Artificial Sequence
  ENSG00000134215_31 (sequence is synthesized)
tattcccacattttcttggagcacaaacaactttgttgaggattttggaaggaaagcacaactgggtcctttattcatttctgggacagaaagagggtcagtggacttttgtgggcctcc

SEQ ID NO: 308956 - DNA, 120 bp, Artificial Sequence
  ENSG00000134215_32 (sequence is synthesized)
agcttctctcagagtctccccctctgcagcccatcctgggagtgtattaactggagggaagatgggtcttgcagtacatttgttttgcccagccatcactcttttttgtgaggagcctaa

SEQ ID NO: 308957 - DNA, 120 bp, Artificial Sequence
  ENSG00000134215_33 (sequence is synthesized)
atacattcttcctggggtccagagtccccattcaaggcagtcaagttaagacactaacttggccctttcctgatggaaatatttcctccatagcagaagttgtgttctgacaagactgag

SEQ ID NO: 308958 - DNA, 120 bp, Artificial Sequence
  ENSG00000134215_34 (sequence is synthesized)
agagttacatgttgggaaaaaaaagaagcattaacttagtagaactgaaccaggagcattaagttctgaaattttgaatcatctctgaaatgaagcaggtgtagcctgccctctcatcaa

SEQ ID NO: 308959 - DNA, 120 bp, Artificial Sequence
  ENSG00000134215_35 (sequence is synthesized)
tccgtctgggtgccagaactcaaggttcagtggacacatccccctgttagagaccctcatgggctaggacttttcatctaggatagattcaagacctttacctcagaattatgtaaactg

SEQ ID NO: 308960 - DNA, 120 bp, Artificial Sequence
  ENSG00000134215_36 (sequence is synthesized)
tgattgtgttttagaaaaattattatttgctaaaaccatttaagtctttgtatatgtgtaaatgatcacaaaaatgtattttataaaatgttctgtacaataaagttacacctcaaagtg

SEQ ID NO: 308961 - DNA, 120 bp, Artificial Sequence
  ENSG00000134215_37 (sequence is synthesized)
tactcttggaatggattctttcctgtaaagtcttatctgcgactctgtctcgggaatgttttgtctgttgccgtcagccgaactttgttatggagggagcagcctcacacaagcagaaac

SEQ ID NO: 308962 - DNA, 120 bp, Artificial Sequence
  ENSG00000134215_38 (sequence is synthesized)
actcctgtggatggtattgtagcatgtattgtttattttagtcaatagaccctctccttataaatggtgtttagtcttcctgttgcatttcatgggcctgggggtttcctagcagaggat

SEQ ID NO: 308963 - DNA, 120 bp, Artificial Sequence
  ENSG00000134215_39 (sequence is synthesized)
attggagcccctttttgtgacattaccaattacatctttgtccacgtttaatactttgttttggaaaatttaaatgctgcagatttgtgtagagttctaataccaaagacagaagtaaat

SEQ ID NO: 308964 - DNA, 120 bp, Artificial Sequence
  ENSG00000134215_40 (sequence is synthesized)
gttttccatatactttgtcttgcctgtatgcagccctcgtgtaatacggtgaattagagtggtatttcactttgtattattttgtaaatatgtcaatataataaatagtgactaaattga

SEQ ID NO: 308965 - DNA, 120 bp, Artificial Sequence
  ENSG00000134215_41 (sequence is synthesized)
atgtatttaaagttagagcacacacagtcatctgtgattcttggtgtcagtgtttcatcagggtcccctgcacttcagattctgcattccttgcctgtttgccttcaacctgctggtggg

SEQ ID NO: 308966 - DNA, 120 bp, Artificial Sequence
  ENSG00000134215_42 (sequence is synthesized)
atctacactagtgaacggagccatggaaggatgattgctaccaaattatttgttatcagatcccacagctgaaaagagagggtgctgaaggcaagggcccttcccaacagaagaaagcat

SEQ ID NO: 308967 - DNA, 120 bp, Artificial Sequence
  ENSG00000134215_43 (sequence is synthesized)
ggcccctgctactagaagcattgtaaaaagccaaaagaagaacaagaaattctgaggacatgggtgaaaatgcagccttgaggtttctgaaaataacaggagacagacaaggctggtgtc

SEQ ID NO: 308968 - DNA, 120 bp, Artificial Sequence
  ENSG00000134215_44 (sequence is synthesized)
cagcaacaatactgggtagctctttttgtccccacttacacagcgaaggataaagaagagatcctatggacacttagtaaggattacttcatgttttaattcaaagtactttggaaagaa

SEQ ID NO: 308969 - DNA, 120 bp, Artificial Sequence
  ENSG00000134215_45 (sequence is synthesized)
gactttgagcagagtggaatagcaggaggtttttgtaaggtgaaatagaatgaaagtgcagccaagaatttttctgtcttcaattttaaagaacaccggcataactcatttttctttttt

SEQ ID NO: 308970 - DNA, 120 bp, Artificial Sequence
  ENSG00000134215_46 (sequence is synthesized)
tcccctgtgttctttttgaccttcttagcagctcctgactttctcccttggggatttttctctgtatagtcagcgctgactcccttagaaatcctgaaccccacacccgtatcgcgaaag

SEQ ID NO: 308971 - DNA, 120 bp, Artificial Sequence
  ENSG00000134215_47 (sequence is synthesized)
agttgaagagaattcaaataaacacgttgagataagtagcttgtgaactaactgttacagcatgcctctgtaataagatactgccagctagaagctaaaataaagtgaaattccatttaa

SEQ ID NO: 308972 - DNA, 120 bp, Artificial Sequence
  ENSG00000134215_48 (sequence is synthesized)
aaagcagtggtgttttaccactctgcagagaaagctaaggttgctaaccaaacaaaataactttacactgacaatgccaatttttacatttctttcagaacaagggacactcaaactacc

SEQ ID NO: 308973 - DNA, 120 bp, Artificial Sequence
  ENSG00000134215_49 (sequence is synthesized)
tgcagccttgaactcctgggctgaagtgatcctccaaagtgctgggattacaggtatgctggagcaatggaaagattgcaagcagagaccgaacttattaatagggtaaatagtacttac

SEQ ID NO: 308974 - DNA, 120 bp, Artificial Sequence
  ENSG00000134215_50 (sequence is synthesized)
ctggtaagtattaaaaatgtttatgtagctaggttgaaataccatacccttagctccaggatgccttaaatgtgggggtagtaaaccatattccatttccatttgtctcggctaaaggtg

SEQ ID NO: 308975 - DNA, 120 bp, Artificial Sequence
  ENSG00000134215_51 (sequence is synthesized)
tcagaaaccaggatgcaacatctgtgccttgagcctctgctgctagatagcaacctaatgttgtaggggtgtgatgccgtggaccccttcttgaacccccaagctcgtcttgcatttggg

SEQ ID NO: 308976 - DNA, 120 bp, Artificial Sequence
  ENSG00000134215_52 (sequence is synthesized)
agctgtaactgagagctccaggggtggctactagatgtgtcctctcctcctttccgttctcttcctgctggggacaagggcctgtccagctccgtcctagacttttgagaatatagattg

SEQ ID NO: 308977 - DNA, 120 bp, Artificial Sequence
  ENSG00000134215_53 (sequence is synthesized)
gggaggggagtatacgcatagagatgacagaatgacaaatgaaatttgcactttaaaattgttcaaaatatgatctgctgaacatctccagaaacggaccaatggactgcgaagaactcc

SEQ ID NO: 308978 - DNA, 120 bp, Artificial Sequence
  ENSG00000134215_54 (sequence is synthesized)
aacagatttctgaaatgagcaccacagcctcttgctcgcatctttcttggttggaggaggatttatttctccccttcaaggctcattccgagttcacaaaggatcactacttctgttgtc

SEQ ID NO: 308979 - DNA, 120 bp, Artificial Sequence
  ENSG00000134215_55 (sequence is synthesized)
ttaaagaaacttgccccttattatacattaaaaaagtggtaagctcctattttttcttctaagtatatggattggaaagacttttaaaaatgggtgatcagagaaatgaaggttatagaa

SEQ ID NO: 308980 - DNA, 120 bp, Artificial Sequence
  ENSG00000134215_56 (sequence is synthesized)
taatagagcaggcaacagctccccctctttgttctgtggcttttcttttgtaactcctccagactacagctttgttcccccttcttccactcctttctggtcagtgttaagtccaaaagt

SEQ ID NO: 308981 - DNA, 120 bp, Artificial Sequence
  ENSG00000134216_0 (sequence is synthesized)
tctgggtcaaattgttctctatttagaagcctttgtgataaccacagaatcagaacatataaaaagctctgcgggactggtgctgactgcaaccatgacaaagcttattctcctcacagg

SEQ ID NO: 308982 - DNA, 120 bp, Artificial Sequence
  ENSG00000134216_1 (sequence is synthesized)
tcttgtccttatactgaatttgcagctcggctctgcctaccagctgacatgctacttcaccaactgggcccagtaccggccaggcctggggcgcttcatgcctgacaacatcgacccctg

SEQ ID NO: 308983 - DNA, 120 bp, Artificial Sequence
  ENSG00000134216_2 (sequence is synthesized)
cctctgtacccacctgatctacgcctttgctgggaggcagaacaacgagatcaccaccatcgaatggaatgatgtgactctctaccaagctttcaatggcctgaaaaataagaacagcca

SEQ ID NO: 308984 - DNA, 120 bp, Artificial Sequence
  ENSG00000134216_3 (sequence is synthesized)
gctgaaaactctcctggccattggaggctggaacttcgggactgcccctttcactgccatggtttctactcctgagaaccgccagactttcatcacctcagtcatcaaattcctgcgcca

SEQ ID NO: 308985 - DNA, 120 bp, Artificial Sequence
  ENSG00000134216_4 (sequence is synthesized)
gtatgagtttgacgggctggactttgactgggagtaccctggctctcgtgggagccctcctcaggacaagcatctcttcactgtcctggtgcaggaaatgcgtgaagcttttgagcagga

SEQ ID NO: 308986 - DNA, 120 bp, Artificial Sequence
  ENSG00000134216_5 (sequence is synthesized)
ggccaagcagatcaacaagcccaggctgatggtcactgctgcagtagctgctggcatctccaatatccagtctggctatgagatcccccaactgtcacagtacctggactacatccatgt

SEQ ID NO: 308987 - DNA, 120 bp, Artificial Sequence
  ENSG00000134216_6 (sequence is synthesized)
tacccgactgacaccggcagcaacgcctacctcaatgtggattatgtcatgaactactggaaggacaatggagcaccagctgagaagctcatcgttggattccctacctatggacacaac

SEQ ID NO: 308988 - DNA, 120 bp, Artificial Sequence
  ENSG00000134216_7 (sequence is synthesized)
ttcatcctgagcaacccctccaacactggaattggtgcccccacctctggtgctggtcctgctgggccctatgccaaggagtctgggatctgggcttactacgagatctgtaccttcctg

SEQ ID NO: 308989 - DNA, 120 bp, Artificial Sequence
  ENSG00000134216_8 (sequence is synthesized)
aaaaatggagccactcagggatgggatgcccctcaggaagtgccttatgcctatcagggcaatgtgtgggttggctatgacaacatcaagagcttcgatattaaggctcaatggcttaag

SEQ ID NO: 308990 - DNA, 120 bp, Artificial Sequence
  ENSG00000134216_9 (sequence is synthesized)
cacaacaaatttggaggcgccatggtctgggccattgatctggatgacttcactggcactttctgcaaccagggcaagtttcccctaatctccaccctgaagaaggccctcggcctgcag

SEQ ID NO: 308991 - DNA, 120 bp, Artificial Sequence
  ENSG00000134216_10 (sequence is synthesized)
agtgcaagttgcacggctccagctcagcccattgagccaataactgctgctcccagtggcagcgggaacgggagcgggagtagcagctctggaggcagctcgggaggcagtggattctgt

SEQ ID NO: 308992 - DNA, 120 bp, Artificial Sequence
  ENSG00000134216_11 (sequence is synthesized)
gctgtcagagccaacggcctctaccccgtggcaaataacagaaatgccttctggcactgcgtgaatggagtcacgtaccagcagaactgccaggccgggcttgtcttcgacaccagctgt

SEQ ID NO: 308993 - DNA, 120 bp, Artificial Sequence
  ENSG00000134216_12 (sequence is synthesized)
gattgctgcaactgggcataaacctgacctggtctatattccctagagttccagtctcttttgcttaggacatgttgcccctacctaaagtcctgcaataaaatcagcagtcaaaacatg

SEQ ID NO: 308994 - DNA, 90 bp, Artificial Sequence
  ENSG00000134216_13 (sequence is synthesized)
caaagcttcatgaaacctcctcgtctgtgcacgaacaggtggccgactctggagcccaggctgttgctttaagcctttgtgataaccaca

SEQ ID NO: 308995 - DNA, 120 bp, Artificial Sequence
  ENSG00000134216_14 (sequence is synthesized)
taagtcttctatggagagcatgttgttcgtttgctatggaaaacaagttagccccatgtgatcactgtccctttagacttcacaatctaagacagggtattgaggatgtacataaacaaa

SEQ ID NO: 308996 - DNA, 120 bp, Artificial Sequence
  ENSG00000134216_15 (sequence is synthesized)
tatatgaattaaatatattgctacaccagaacctcattattaagtggaacacaatttatttcatacatttaatttggtggacatttgggggccctatccacagaggtttacttactgagg

SEQ ID NO: 308997 - DNA, 120 bp, Artificial Sequence
  ENSG00000134216_16 (sequence is synthesized)
ttcccaaacaacctcttcttaaagtatttcaagagtacaaaccctgaggacagtgttataatgcttccctctatttatcttctggtggggggaggaatgagaaaatcacacaaataaaca

SEQ ID NO: 308998 - DNA, 120 bp, Artificial Sequence
  ENSG00000134216_17 (sequence is synthesized)
agaggacttcttggagggtacatgtttggggagggaacacagtgtgctgggtttgccaggtatccaaagaaacaagggcaacttgggagaaagagcagagttggggggataacagaataa

SEQ ID NO: 308999 - DNA, 120 bp, Artificial Sequence
  ENSG00000134216_18 (sequence is synthesized)
agggaatgttaagataccatggctgggaagagtagtgattacaaaggaaggagaggagaaaaccaagaacatgctttactctgggctgtgggtcctgatgaagggctctgaggcaggaat

SEQ ID NO: 309000 - DNA, 120 bp, Artificial Sequence
  ENSG00000134216_19 (sequence is synthesized)
tgagagcttgattttactccaaggtgttgggaccaccaaggtctcaccctgccttctttgggtctccctcagtttcactgccatggtttctactcctgagaaccgccagactttcatcac

SEQ ID NO: 309001 - DNA, 120 bp, Artificial Sequence
  ENSG00000134216_20 (sequence is synthesized)
ggggaaggaagtcccagtctttagcccaaaaagattcaaagtctttctttccgaggagaattgggtggctctagggtaaaacaaaacttgaatttaaactgatagaatattagcattgca

SEQ ID NO: 309002 - DNA, 120 bp, Artificial Sequence
  ENSG00000134216_21 (sequence is synthesized)
aagagtcttatatatcgtgcgttcattaaacaaacatttaatggcaacaacaaagcaacatgtgagctctgtgccaggcactgctctacatgttgttttaagaaccataactcatttcat

SEQ ID NO: 309003 - DNA, 120 bp, Artificial Sequence
  ENSG00000134216_22 (sequence is synthesized)
cttcatatttactctatggcatacatactataagtgttataatctttattttacagatgaggaaactaaagtacagagaggatttaagcaacttgcccaagatcacacaactagtaggaa

SEQ ID NO: 309004 - DNA, 120 bp, Artificial Sequence
  ENSG00000134216_23 (sequence is synthesized)
tcataacttcctctgcagtttggccacagagtccattgcttctaagcattacactaggctgcccgttattactgagtacatattctgtggcagacattgtcaggctaaatataagaataa

SEQ ID NO: 309005 - DNA, 120 bp, Artificial Sequence
  ENSG00000134216_24 (sequence is synthesized)
gacactatccttggctttgaagaacttcttctgaggtggaagactgaaagaatatgaacaatggcaatgcattgtgataaatgccatgttagaggtctgcagagtacaaaagtaacaagg

SEQ ID NO: 309006 - DNA, 120 bp, Artificial Sequence
  ENSG00000134216_25 (sequence is synthesized)
aaagagggtaactaattctgctctggggcaggatcagaaagtgtttcctagagaaagtgatgcttgggctcagtcttgaaagaaactggtgttaaccaattaagtgaggatgggaatggc

SEQ ID NO: 309007 - DNA, 120 bp, Artificial Sequence
  ENSG00000134216_26 (sequence is synthesized)
acaaatgatatacagataagtgtgagcaagtgggtgataatggctgtgaagttgcatgaagaaccagataatgtgagaacttttatattatgttcaggaatttgcactttacctttgaca

SEQ ID NO: 309008 - DNA, 120 bp, Artificial Sequence
  ENSG00000134216_27 (sequence is synthesized)
caatgggactgttttgaagaattttaaatagtagagagctggcttttaccatagaggataaattagaaggagatgagaagtcatggatagaattaggaggttattgcagtaaatcaagca

SEQ ID NO: 309009 - DNA, 120 bp, Artificial Sequence
  ENSG00000134216_28 (sequence is synthesized)
agaaatgatcagggccccaacaaaggctctaacactgagggaagaagaggatgtatataagagatatcaagaggatagaatcaataggatttggagatcaactggaaataggaaatggag

SEQ ID NO: 309010 - DNA, 120 bp, Artificial Sequence
  ENSG00000134216_29 (sequence is synthesized)
aactaagatggtaaatacaggaagaagtgtagatttgaaagaagaagaattgaccttgaacttgatgagtatgaggtatctgtagagcatcctaacagagtgcccagtaggcatcagata

SEQ ID NO: 309011 - DNA, 120 bp, Artificial Sequence
  ENSG00000134216_30 (sequence is synthesized)
aatatcaatctggagttcaggacaaaaaagcttgatatacttggtttttagacttactgtctcccaagacagattgtttgctattccattctatgtaacagatcgtcacccagcctctga

SEQ ID NO: 309012 - DNA, 120 bp, Artificial Sequence
  ENSG00000134216_31 (sequence is synthesized)
atagtttcaatgttaagtaataggtgaaaagtcaatttacttacttgttgaattgccctaatgatcataaaggaatatctctttcttggctggaacatgcctctagtcataatttataac

SEQ ID NO: 309013 - DNA, 120 bp, Artificial Sequence
  ENSG00000134216_32 (sequence is synthesized)
ttctggtcattgtttctagttcttcctgctgaagcaacagagaataagactgcatcttttgcaatatatgggcttaatgtcttaagacagctgtaaataccttgcctataatttctctta

SEQ ID NO: 309014 - DNA, 120 bp, Artificial Sequence
  ENSG00000134216_33 (sequence is synthesized)
ttccagttaaatatcttaatgccttcaatcaataaccgcatgacaattttcagagccagccttcactggaacatactctggcgcaccctaatagtgcaattataagaactaaacccagta

SEQ ID NO: 309015 - DNA, 120 bp, Artificial Sequence
  ENSG00000134216_34 (sequence is synthesized)
ctccaaatgagattacagtcgcacagatacaggtggattaatctctagtattgaatgggaacctatcatctagctgttaccaccttccttattggccaatacaccattttatttgatggg

SEQ ID NO: 309016 - DNA, 120 bp, Artificial Sequence
  ENSG00000134216_35 (sequence is synthesized)
atgtcagtcctataaagtagttcatctactttatgaaacaaatttctatactgctggatgtagggtatcactgcaactagagcttcaaagtatagagatacaatggagccctgatggtca

SEQ ID NO: 309017 - DNA, 120 bp, Artificial Sequence
  ENSG00000134216_36 (sequence is synthesized)
tctgggacctgggttttggtcatgacctacctactaactcagtgtgggactttggtgaagtgtcctaactcttatgcatattagatagccagaaaattcaataatattatctatccgatc

SEQ ID NO: 309018 - DNA, 120 bp, Artificial Sequence
  ENSG00000134216_37 (sequence is synthesized)
tactttatttggttgttgagagactaaagtaaaataaaatatgtgaaagcaatttaagagagagaagcattatacagacatatgtttattagtattatttaaggagctaaaatcagcatc

SEQ ID NO: 309019 - DNA, 120 bp, Artificial Sequence
  ENSG00000134216_38 (sequence is synthesized)
accatgacaaagcttattctcctcacaggtcttgtccttatactgaatttgcagctcggaacagccagctgaaaactctcctggccattggaggctggaacttcgggactgccccatgag

SEQ ID NO: 309020 - DNA, 120 bp, Artificial Sequence
  ENSG00000134222_0 (sequence is synthesized)
agaaagcctgttgcgtggaagataaggcggcgcgggaagtggacacaggctgcgagccttgggcagaatggatacctgaggaaaggtatggtttctctccagctcagatctaactggact

SEQ ID NO: 309021 - DNA, 120 bp, Artificial Sequence
  ENSG00000134222_1 (sequence is synthesized)
ctcgctcctgctggctggacatggaggatttggaggaagatgtaaggtttattgtggatgagaccttggactttggggggctgtcaccatctgacagccgtgaggaggaagacataacag

SEQ ID NO: 309022 - DNA, 120 bp, Artificial Sequence
  ENSG00000134222_2 (sequence is synthesized)
tgttggtgactccagagaaaccacttcgacggggcctctcccaccgaagtgacccaaatgcagtggcacctgccccccagggtgtgaggctcagcctaggccccctcagtccagagaagc

SEQ ID NO: 309023 - DNA, 120 bp, Artificial Sequence
  ENSG00000134222_3 (sequence is synthesized)
tggaggagatcctcgatgaggccaaccggctggccgctcagctggagcagtgtgccctgcaggatcgggagagcgcaggcgagggcctggggcctcgccgagtgaagcccagtcctcggc

SEQ ID NO: 309024 - DNA, 120 bp, Artificial Sequence
  ENSG00000134222_4 (sequence is synthesized)
gggagacctttgtgctgaaggatagtcctgtccgagacctgctgcccactgtgaactctttgacgcggagcaccccctccccaagcagcctgacgcctcgactccggagtaatgatagga

SEQ ID NO: 309025 - DNA, 120 bp, Artificial Sequence
  ENSG00000134222_5 (sequence is synthesized)
aggggtcagtcagggctctccgggctacatctggaaagaggccctccaacatgaagagggagtcacccacttgcaatctgttccctgcatccaaaagcccagcatcttctcctcttaccc

SEQ ID NO: 309026 - DNA, 120 bp, Artificial Sequence
  ENSG00000134222_6 (sequence is synthesized)
gatcgactcccccagtccgggggagagccgggcccagtgggagagcagcagccagcccacccacccccatcagatccgtcctggccccacagccttctaccagcaactctcaacgcctgc

SEQ ID NO: 309027 - DNA, 120 bp, Artificial Sequence
  ENSG00000134222_7 (sequence is synthesized)
ccagtcaactgcccattccctcggccatccccaggcctgccagccgaatgccactcaccagccggagtgtgccacctggcagaggtgccctacctccggattctctgtcaactcgaaaag

SEQ ID NO: 309028 - DNA, 120 bp, Artificial Sequence
  ENSG00000134222_8 (sequence is synthesized)
ggcttccaagaccaagcactgcaggacacagagtgcgggaaagtggacacaaggttcctgtttcccagcgactaaatcttcctgtcatgggtgccactcgcagcaatctgcagcccccca

SEQ ID NO: 309029 - DNA, 120 bp, Artificial Sequence
  ENSG00000134222_9 (sequence is synthesized)
ggaaagtggcagtcccaggacctaccaggtaaagagatcaggacagcaagcaagacttcagtagcaaaccactacagtcagtacctggactcgcctctacccagcagaccctgactccag

SEQ ID NO: 309030 - DNA, 120 bp, Artificial Sequence
  ENSG00000134222_10 (sequence is synthesized)
cagattctggcccagggacaggaggaagagatgccaccagggctggtctcccaggagtagagaccatgggaaatggggtggattaggattgagctggagaagacttaaactctctgggtt

SEQ ID NO: 309031 - DNA, 120 bp, Artificial Sequence
  ENSG00000134222_11 (sequence is synthesized)
gaaagaagattaggggaaaagaggtcaccttccagcagtgaaatgaacaaatagaagatgagaagtacaggcaagtggtttgtctttatccacccccactgttgtggtcagccccagaga

SEQ ID NO: 309032 - DNA, 120 bp, Artificial Sequence
  ENSG00000134222_12 (sequence is synthesized)
attttatcttcttccttggcattggttcactggacatttccacgtgagcggcctccgtagctaacctccctgccctctgaggagccatcttcctgaatcgcattctctactggactctgg

SEQ ID NO: 309033 - DNA, 120 bp, Artificial Sequence
  ENSG00000134222_13 (sequence is synthesized)
cctgcttggagaggtggcagcaggcacctggtcttcagaaattgtttcctgtgaattctgtgactcctaataggccagtttgtgataagcttactctatgagtcttcatttttctaaaat

SEQ ID NO: 309034 - DNA, 120 bp, Artificial Sequence
  ENSG00000134222_14 (sequence is synthesized)
aggagccccgccccctcggagctgattcccgggactaggttgcgggagaaagcctgttgcgtggaagataaggcggcgcgggaagtggacacagggtgggctggagctcagatctaactg

SEQ ID NO: 309035 - DNA, 120 bp, Artificial Sequence
  ENSG00000134222_15 (sequence is synthesized)
gggcctgagagattcgaaaggagccccgccccctcggagctgattcccgggactaggttgcgggagaaagcctgttgcgtggaagataaggcggcgcgggaagtggacacaggatctaac

SEQ ID NO: 309036 - DNA, 120 bp, Artificial Sequence
  ENSG00000134222_16 (sequence is synthesized)
ggatttggaggaaggtaaggaaaggagggagggaagaatgaaagggaggagtgagacccagcgatggagagctgcatcagggacccatgactggctttcattcttctttccccttcagat

SEQ ID NO: 309037 - DNA, 120 bp, Artificial Sequence
  ENSG00000134222_17 (sequence is synthesized)
agaaagcctgttgcgtggaagataaggcggcgcgggaagtggacacagggtgggctggaggtgtgcttcgcgtgtgatgccaggggagtggaaaggtggcttggggagtgcagaaccctg

SEQ ID NO: 309038 - DNA, 120 bp, Artificial Sequence
  ENSG00000134222_18 (sequence is synthesized)
aggatagtggcggggaggaagatggggcgtgcaggccgcccccagtgaggagaggccaggatgcagggcggctccagggcaatctgggcagttgggggagccctccgtatcgttcccgga

SEQ ID NO: 309039 - DNA, 120 bp, Artificial Sequence
  ENSG00000134222_19 (sequence is synthesized)
ggtagcaggagtagctgtgcgggaggtgccactcctgggcgcttgctttgcctccagcatgacccccgaccctggcttgcaccctgaatctagctgcgagccttgggcagaatggatacc

SEQ ID NO: 309040 - DNA, 120 bp, Artificial Sequence
  ENSG00000134222_20 (sequence is synthesized)
aaagaggccctccaacatgaagagggtgagttgagagagttgagttggaggtgtgccccagacatggtgtgtgccatgatgcagggagtggtttccttattggtaaaacagggatagcat

SEQ ID NO: 309041 - DNA, 120 bp, Artificial Sequence
  ENSG00000134222_21 (sequence is synthesized)
ttctacatctagaattgttggaattaaatgagaaccatgaaaaaagagaaccaaaactcttaccacagtgtctgagtatatgtctatgataaactcaataaatggtattggcaatagtga

SEQ ID NO: 309042 - DNA, 120 bp, Artificial Sequence
  ENSG00000134222_22 (sequence is synthesized)
ggtttggcgcacttggggctgctgggcggctggctgactcgggcctctatgacactattggtagcggggagagaagggagaagctggagttagatttcagggtgttaagaagaaggataa

SEQ ID NO: 309043 - DNA, 120 bp, Artificial Sequence
  ENSG00000134222_23 (sequence is synthesized)
gtggatttgctgcatctccatcctggcatcatttctgatgtccgtaaatgctaaaggcctattaggccccatagaaccaggtatctcatcgcccagaggccacatctcacagccagcatg

SEQ ID NO: 309044 - DNA, 120 bp, Artificial Sequence
  ENSG00000134222_24 (sequence is synthesized)
ggcatcggggcctagggtcatgtccctggctctgttgtggggcttttatgcagtctcccttgcataatctcctgttcccttttgcatgggcatgatgcctggtttgtttcctgtctcagc

SEQ ID NO: 309045 - DNA, 120 bp, Artificial Sequence
  ENSG00000134240_0 (sequence is synthesized)
ggtttctgctgggtttctgaactgctgggtttctgcttgctcctctggagatgcagcgtctgttgactccagtgaagcgcattctgcaactgacaagagcggtgcaggaaacctccctca

SEQ ID NO: 309046 - DNA, 120 bp, Artificial Sequence
  ENSG00000134240_1 (sequence is synthesized)
cacctgctcgcctgctcccagtagcccaccaaaggttttctacagcctctgctgtccccctggccaaaacagatacttggccaaaggacgtgggcatcctggccctggaggtctacttcc

SEQ ID NO: 309047 - DNA, 120 bp, Artificial Sequence
  ENSG00000134240_2 (sequence is synthesized)
cagcccaatatgtggaccaaactgacctggagaagtataacaatgtggaagcaggaaagtatacagtgggcttgggccagacccgtatgggcttctgctcagtccaagaggacatcaact

SEQ ID NO: 309048 - DNA, 120 bp, Artificial Sequence
  ENSG00000134240_3 (sequence is synthesized)
ccctgtgcctgacggtggtgcaacggctgatggagcgcatacagctcccatgggactctgtgggcaggctggaagtaggcactgagaccatcattgacaagtccaaagctgtcaaaacag

SEQ ID NO: 309049 - DNA, 120 bp, Artificial Sequence
  ENSG00000134240_4 (sequence is synthesized)
tgctcatggaactcttccaggattcaggcaatactgatattgagggcatagataccaccaatgcctgctacggtggtactgcctccctcttcaatgctgccaactggatggagtccagtt

SEQ ID NO: 309050 - DNA, 120 bp, Artificial Sequence
  ENSG00000134240_5 (sequence is synthesized)
cctgggatggtcgttatgccatggtggtctgtggagacattgccgtctatcccagtggtaatgctcgtcccacaggtggggccggagctgtggctatgctgattgggcccaaggcccctc

SEQ ID NO: 309051 - DNA, 120 bp, Artificial Sequence
  ENSG00000134240_6 (sequence is synthesized)
tggccctggagcgagggctgaggggaacccatatggagaatgtgtatgacttctacaaaccaaatttggcctcggagtacccaatagtggatgggaagctttccatccagtgctacttgc

SEQ ID NO: 309052 - DNA, 120 bp, Artificial Sequence
  ENSG00000134240_7 (sequence is synthesized)
gggccttggatcgatgttacacatcataccgtaaaaaaatccagaatcagtggaagcaagctggcagcgatcgacccttcacccttgacgatttacagtacatgatctttcatacaccct

SEQ ID NO: 309053 - DNA, 120 bp, Artificial Sequence
  ENSG00000134240_8 (sequence is synthesized)
tttgcaagatggtccagaagtctctggctcgcctgatgttcaatgacttcctgtcagccagcagtgacacacaaaccagcttatataaggggctggaggctttcggggggctaaagctgg

SEQ ID NO: 309054 - DNA, 120 bp, Artificial Sequence
  ENSG00000134240_9 (sequence is synthesized)
aagacacctacaccaacaaggacctggataaagcacttctaaaggcctctcaggacatgttcgacaagaaaaccaaggcttccctttacctctccactcacaatgggaacatgtacacct

SEQ ID NO: 309055 - DNA, 120 bp, Artificial Sequence
  ENSG00000134240_10 (sequence is synthesized)
tctgtcccaccactctgcccaagaactggctggctccaggattggtgccttctcttatggctctggtttagcagcaagtttcttttcatttcgagtatcccaggatgctgctccaggctc

SEQ ID NO: 309056 - DNA, 120 bp, Artificial Sequence
  ENSG00000134240_11 (sequence is synthesized)
tcccctggacaagttggtgtccagcacatcagacctgccaaaacgcctagcctcccgaaagtgtgtgtctcctgaggagttcacagaaataatgaaccaaagagagcaattctaccataa

SEQ ID NO: 309057 - DNA, 120 bp, Artificial Sequence
  ENSG00000134240_12 (sequence is synthesized)
ggtgaatttctccccacctggtgacacaaacagccttttcccaggtacttggtacctggagcgagtggacgagcagcatcgccgaaagtatgcccggcgtcccgtctaaaggtgttctgc

SEQ ID NO: 309058 - DNA, 120 bp, Artificial Sequence
  ENSG00000134240_13 (sequence is synthesized)
agatccatggaaagcttcctgggaaacgtatgctagcagagcttctccccgtgaatcatatttttaagatcccactcttagctggtaaatgaatttgaatcgacatagtagccccataag

SEQ ID NO: 309059 - DNA, 120 bp, Artificial Sequence
  ENSG00000134240_14 (sequence is synthesized)
catcagccctgtagagtgaggagccatctctagcgggcccttcattcctctccatgctgcaatcactgtcctgggcttatggtgctatggactaggggtcctttgtgaaagagcaagatg

SEQ ID NO: 309060 - DNA, 120 bp, Artificial Sequence
  ENSG00000134240_15 (sequence is synthesized)
gagcaatggagagaagacctcttcctgaatcactggactccagaaatgtgcatgcagatcagctgttgccttcaagatccagataaactttcctgtcatgtgttagaactttattattat

SEQ ID NO: 309061 - DNA, 120 bp, Artificial Sequence
  ENSG00000134240_16 (sequence is synthesized)
taatattgttaaacttctgtgctgttcctgtgaatctccaaattttgtaccttgttctaagctaatatatagcaattaaaaagagagaaagaggaaatgattcctgcgtttcttggaacc

SEQ ID NO: 309062 - DNA, 120 bp, Artificial Sequence
  ENSG00000134240_17 (sequence is synthesized)
cagaatacaaacccagcctaacatgcagcaagcctgctagaccttgtgggtcagagggctgggtccttgcctcacaggctgcctctgtccccttgcaattccattctatttctgccacat

SEQ ID NO: 309063 - DNA, 120 bp, Artificial Sequence
  ENSG00000134240_18 (sequence is synthesized)
gccaagtgctatgacaggtacaaggcaaataagaacggtagaacacagcttcccccagcccacttccctgttctaaagacaccacatagacagagagcagcagacaggggccagcaggag

SEQ ID NO: 309064 - DNA, 120 bp, Artificial Sequence
  ENSG00000134240_19 (sequence is synthesized)
ctgtagttcagatcttcttggtcattccttgccgctgttatttgaacaaataaacacagcgcaaaggttaacaagtttttgccttctatagccaaaaataaaaaaataaataaattttga

SEQ ID NO: 309065 - DNA, 120 bp, Artificial Sequence
  ENSG00000134240_20 (sequence is synthesized)
gttgaatgggcttgaacttgggcatgggacacagataatgaccagaaacctcctttatatggttctctcatcttttgtgctcaaggtaggctgcattgtgtagtctctgaaacactttgt

SEQ ID NO: 309066 - DNA, 120 bp, Artificial Sequence
  ENSG00000134242_0 (sequence is synthesized)
agtggctttttggaggtgtctcggccatgacacacatttgacatgccctccctcaacctacttatagactatttttcttgctctgcagcatggaccaaagagaaattctgcagaagttcc

SEQ ID NO: 309067 - DNA, 120 bp, Artificial Sequence
  ENSG00000134242_1 (sequence is synthesized)
tggatgaggcccaaagcaagaaaattactaaagaggagtttgccaatgaatttctgaagctgaaaaggcaatctaccaagtacaaggcagacaaaacctatcctacaactgtggctgaga

SEQ ID NO: 309068 - DNA, 120 bp, Artificial Sequence
  ENSG00000134242_2 (sequence is synthesized)
agcccaagaatatcaagaaaaacagatataaggatattttgccctatgattatagccgggtagaactatccctgataacctctgatgaggattccagctacatcaatgccaacttcatta

SEQ ID NO: 309069 - DNA, 120 bp, Artificial Sequence
  ENSG00000134242_3 (sequence is synthesized)
agggagtttatggacccaaggcttatattgccacccagggtcctttatctacaaccctcctggacttctggaggatgatttgggaatatagtgtccttatcattgttatggcatgcatgg

SEQ ID NO: 309070 - DNA, 120 bp, Artificial Sequence
  ENSG00000134242_4 (sequence is synthesized)
agtatgaaatgggaaagaaaaagtgtgagcgctactgggctgagccaggagagatgcagctggaatttggccctttctctgtatcctgtgaagctgaaaaaaggaaatctgattatataa

SEQ ID NO: 309071 - DNA, 120 bp, Artificial Sequence
  ENSG00000134242_5 (sequence is synthesized)
tcaggactctaaaagttaagttcaatagtgaaactcgaactatctaccagtttcattacaagaattggccagaccatgatgtaccttcatctatagaccctattcttgagctcatctggg

SEQ ID NO: 309072 - DNA, 120 bp, Artificial Sequence
  ENSG00000134242_6 (sequence is synthesized)
atgtacgttgttaccaagaggatgacagtgttcccatatgcattcactgcagtgctggctgtggaaggactggtgttatttgtgctattgattatacatggatgttgctaaaagatggga

SEQ ID NO: 309073 - DNA, 120 bp, Artificial Sequence
  ENSG00000134242_7 (sequence is synthesized)
taattcctgagaacttcagtgttttcagtttgatccgggaaatgcggacacagaggccttcattagttcaaacgcaggaacaatatgaactggtctacaatgctgtattagaactattta

SEQ ID NO: 309074 - DNA, 120 bp, Artificial Sequence
  ENSG00000134242_8 (sequence is synthesized)
agagacagatggatgttatcagagataaacattctggaacagagagtcaagcaaagcattgtattcctgagaaaaatcacactctccaagcagactcttattctcctaatttaccaaaaa

SEQ ID NO: 309075 - DNA, 120 bp, Artificial Sequence
  ENSG00000134242_9 (sequence is synthesized)
gtaccacaaaagcagcaaaaatgatgaaccaacaaaggacaaaaatggaaatcaaagaatcttcttcctttgactttaggacttctgaaataagtgcaaaagaagagctagttttgcacc

SEQ ID NO: 309076 - DNA, 120 bp, Artificial Sequence
  ENSG00000134242_10 (sequence is synthesized)
ctgctaaatcaagcacttcttttgactttctggagctaaattacagttttgacaaaaatgctgacacaaccatgaaatggcagacaaaggcatttccaatagttggggagcctcttcaga

SEQ ID NO: 309077 - DNA, 120 bp, Artificial Sequence
  ENSG00000134242_11 (sequence is synthesized)
agcatcaaagtttggatttgggctctcttttgtttgagggatgttctaattctaaacctgtaaatgcagcaggaagatattttaattcaaaggtgccaataacacggaccaaatcaactc

SEQ ID NO: 309078 - DNA, 120 bp, Artificial Sequence
  ENSG00000134242_12 (sequence is synthesized)
cttttgaattgatacagcagagagaaaccaaggaggtggacagcaaggaaaacttttcttatttggaatctcaaccacatgattcttgttttgtagagatgcaggctcaaaaagtaatgc

SEQ ID NO: 309079 - DNA, 120 bp, Artificial Sequence
  ENSG00000134242_13 (sequence is synthesized)
atgtttcttcagcagaactgaattattcactgccatatgactctaaacaccaaatacgtaatgcctctaatgtaaagcaccatgactctagtgctcttggtgtatattcttacatacctt

SEQ ID NO: 309080 - DNA, 120 bp, Artificial Sequence
  ENSG00000134242_14 (sequence is synthesized)
tagtggaaaatccttatttttcatcatggcctccaagtggtaccagttctaagatgtctcttgatttacctgagaagcaagatggaactgtttttccttcttctctgttgccaacatcct

SEQ ID NO: 309081 - DNA, 120 bp, Artificial Sequence
  ENSG00000134242_15 (sequence is synthesized)
cctcttctcttattacaattcacatgattctttatcactgaattctccaaccaatatttcctcactattgaaccaggagtcagctgtactagcaactgctccaaggatagatgatgaaat

SEQ ID NO: 309082 - DNA, 120 bp, Artificial Sequence
  ENSG00000134242_16 (sequence is synthesized)
cccccctccacttcctgtatggacacctgaatcatttattgtggttgaggaagctggagaattctcaccaaatgttcccaaatccttatcctcagctgtgaaggtaaaaattggaacatc

SEQ ID NO: 309083 - DNA, 120 bp, Artificial Sequence
  ENSG00000134242_17 (sequence is synthesized)
actggaatggggtggaacatctgaaccaaagaaatttgatgactctgtgatacttagaccaagcaagagtgtaaaactccgaagtcctaaatcagaactacatcaagatcgttcttctcc

SEQ ID NO: 309084 - DNA, 120 bp, Artificial Sequence
  ENSG00000134242_18 (sequence is synthesized)
cccacctcctctcccagaaagaactctagagtccttctttcttgccgatgaagattgtatgcaggcccaatctatagaaacatattctactagctatcctgacaccatggaaaattcaac

SEQ ID NO: 309085 - DNA, 120 bp, Artificial Sequence
  ENSG00000134242_19 (sequence is synthesized)
atcttcaaaacagacactgaagactcctggaaaaagtttcacaaggagtaagagtttgaaaattttgcgaaacatgaaaaagagtatctgtaattcttgcccaccaaacaagcctgcaga

SEQ ID NO: 309086 - DNA, 120 bp, Artificial Sequence
  ENSG00000134242_20 (sequence is synthesized)
atctgttcagtcaaataactccagctcatttctgaattttggttttgcaaaccgtttttcaaaacccaaaggaccaaggaatccaccaccaacttggaatatttaataaaactccagatt

SEQ ID NO: 309087 - DNA, 120 bp, Artificial Sequence
  ENSG00000134242_21 (sequence is synthesized)
tataataatatgggctgcaagtacacctgcaaataaaactactagaatactgctagttaaaataagtgctctatatgcataatatcaaatatgaagatatgctaatgtgttaatagcttt

SEQ ID NO: 309088 - DNA, 120 bp, Artificial Sequence
  ENSG00000134242_22 (sequence is synthesized)
taaaagaaaagcaaaatgccaataagtgccagttttgcattttcatatcatttgcattgagttgaaaactgcaaataaaagtttgtcacttgagcttatgtacagaatgctatatgagaa

SEQ ID NO: 309089 - DNA, 120 bp, Artificial Sequence
  ENSG00000134242_23 (sequence is synthesized)
acacttttagaatggatttatttttcatttttgccagttatttttattttcttttacttttctacataaacataaacttcaaaaggtttgtaagatttggatctcaactaatttctacat

SEQ ID NO: 309090 - DNA, 120 bp, Artificial Sequence
  ENSG00000134242_24 (sequence is synthesized)
tgccagaatatactataaaaagttaaaaaaaaaacttactttgtgggttgcaatacaaactgctcttgacaatgactattccctgacagttatttttgcctaaatggagtataccttgta

SEQ ID NO: 309091 - DNA, 120 bp, Artificial Sequence
  ENSG00000134242_25 (sequence is synthesized)
aatcttcccaaatgttgtggaaaactggaatattaagaaaatgagaaattatatttattagaataaaatgtgcaaataatgacaattatttgaatgtaacaaggaattcaactgaaatcc

SEQ ID NO: 309092 - DNA, 120 bp, Artificial Sequence
  ENSG00000134242_26 (sequence is synthesized)
tgataagttttaaccaaagtcattaaattaccaattctagaaaagtaatcaatgaaatataatagctatcttttggtagcaaaagatataaattgtatatgtttatacaggatctttcag

SEQ ID NO: 309093 - DNA, 120 bp, Artificial Sequence
  ENSG00000134242_27 (sequence is synthesized)
atcatgtgcaatttttatctaaccaatcagaaatactagtttaaaatgaatttctatatgaatatggatctgccataagaaaatctagttcaactctaattttatgtagtaaataaattg

SEQ ID NO: 309094 - DNA, 120 bp, Artificial Sequence
  ENSG00000134242_28 (sequence is synthesized)
gcaggtaattgtttttacaaagaatccacctgacttcccctaatgcattaaaaatatttttatttaaataactttatttataacttttagaaacatgtagtattgtttaaacatcatttg

SEQ ID NO: 309095 - DNA, 120 bp, Artificial Sequence
  ENSG00000134242_29 (sequence is synthesized)
ttcttcagtatttttcatttggaagtccaatagggcaaattgaatgaagtattattatctgtctcttgtagtacaatgtatccaacagacactcaataaactttttggttgttaaactga

SEQ ID NO: 309096 - DNA, 120 bp, Artificial Sequence
  ENSG00000134242_30 (sequence is synthesized)
ctaaattactcatttacagtataactgattcaactttaaatatgattttaggttgcatgtataggtccttatgtttatattcttttccatgcaatttatctttttatttttaaccttaac

SEQ ID NO: 309097 - DNA, 120 bp, Artificial Sequence
  ENSG00000134242_31 (sequence is synthesized)
tacctcttaacatctcacacagaactaaattatctagtatatgtggaaaataaagctaggtaaccaaattattgtgttggcatgtagtaaataaatatgactatccaaatggagaaattg

SEQ ID NO: 309098 - DNA, 120 bp, Artificial Sequence
  ENSG00000134242_32 (sequence is synthesized)
tcagcctcccaaagtgctgagattacaaccatgagccaccacacctggccagagaaagctttctggacctctttgaatagatcaaatcttctattaagctgaaaaggcaatctaccaagt

SEQ ID NO: 309099 - DNA, 120 bp, Artificial Sequence
  ENSG00000134242_33 (sequence is synthesized)
ggaagaatggttcgttaagtttagagtaattcacttcaggaagttacttggttcccataatagcttccagtattcattgatttatttctggctttcccagactagaaattttgtaaagag

SEQ ID NO: 309100 - DNA, 120 bp, Artificial Sequence
  ENSG00000134242_34 (sequence is synthesized)
tacaaatgagaatattatagtgtcaacccatttgtaagcacctacattttgttaacatttgacagtgatatgtttatttgggattattaattactcttaacaattatatgtgatctgatc

SEQ ID NO: 309101 - DNA, 120 bp, Artificial Sequence
  ENSG00000134243_0 (sequence is synthesized)
gtcggcgtcggcggcattcggcggcgatggagcggccctggggagctgcggacggcctctcgcgctggccccatggcctcggcctcctcctcctcctgcagctgctgccgccgtcgaccc

SEQ ID NO: 309102 - DNA, 80 bp, Artificial Sequence
  ENSG00000134243_1 (sequence is synthesized)
tcagccaggaccggctggacgcgccgccgccgcccgctgcgccgctgccgcgctggtctggccccatcggggtgagctgg

SEQ ID NO: 309103 - DNA, 120 bp, Artificial Sequence
  ENSG00000134243_2 (sequence is synthesized)
gcggccgttggcgtcgcagcgcgccgggcgaggacgaggagtgcggccgggtccgggacttcgtcgccaagctggccaacaacacgcaccagcatgtgtttgatgatctcagaggctcag

SEQ ID NO: 309104 - DNA, 120 bp, Artificial Sequence
  ENSG00000134243_3 (sequence is synthesized)
tatccttgtcctgggttggagatagcactggggtcattctagtcttgactaccttccatgtaccactggtaattatgacttttggacagtccaagctatatcgaagtgaggattatggga

SEQ ID NO: 309105 - DNA, 120 bp, Artificial Sequence
  ENSG00000134243_4 (sequence is synthesized)
agaactttaaggatattacagatctcatcaataacacctttattcggactgaatttggcatggctattggtcctgagaactctggaaaggtggtgttaacagcagaggtgtctggaggaa

SEQ ID NO: 309106 - DNA, 120 bp, Artificial Sequence
  ENSG00000134243_5 (sequence is synthesized)
gtcgtggaggaagaatctttagatcatcagattttgcgaagaattttgtgcaaacagatctcccttttcatcctctcactcagatgatgtatagccctcagaattctgattatcttttag

SEQ ID NO: 309107 - DNA, 120 bp, Artificial Sequence
  ENSG00000134243_6 (sequence is synthesized)
ctctcagcactgaaaatggcctgtgggtgtccaagaattttgggggaaaatgggaagaaatccacaaagcagtatgtttggccaaatggggatcagacaacaccatcttctttacaacct

SEQ ID NO: 309108 - DNA, 120 bp, Artificial Sequence
  ENSG00000134243_7 (sequence is synthesized)
atgcaaatggctcctgcaaagctgaccttggggctctggaattatggagaacttcagacttgggaaaaagcttcaaaactattggtgtgaaaatctactcatttggtcttgggggacgtt

SEQ ID NO: 309109 - DNA, 120 bp, Artificial Sequence
  ENSG00000134243_8 (sequence is synthesized)
tcctttttgcctctgtgatggctgataaggatacaacaagaaggatccacgtttcaacagatcaaggggacacatggagcatggcccagctcccctccgtgggacaggaacagttctatt

SEQ ID NO: 309110 - DNA, 120 bp, Artificial Sequence
  ENSG00000134243_9 (sequence is synthesized)
ctattctggcagcaaatgatgacatggtattcatgcatgtagatgaacctggagacactgggtttggcacaatctttacctcagatgatcgaggcattgtctattccaagtctttggacc

SEQ ID NO: 309111 - DNA, 120 bp, Artificial Sequence
  ENSG00000134243_10 (sequence is synthesized)
gacatctctacactaccacaggcggagagacggactttaccaacgtgacctccctccgcggcgtctacataacaagcgtgctctccgaagataattctatccagaccatgatcacttttg

SEQ ID NO: 309112 - DNA, 120 bp, Artificial Sequence
  ENSG00000134243_11 (sequence is synthesized)
accaaggaggaaggtggacgcacctgaggaagcctgaaaacagtgaatgtgatgctacagcaaaaaacaagaatgagtgcagccttcatattcatgcttcctacagcatctcccagaaac

SEQ ID NO: 309113 - DNA, 120 bp, Artificial Sequence
  ENSG00000134243_12 (sequence is synthesized)
tgaatgttccaatggccccactctcagagccgaatgccgtaggcattgtcattgctcatggtagcgtgggggatgccatctcagtgatggttccagatgtgtacatctcagatgatgggg

SEQ ID NO: 309114 - DNA, 120 bp, Artificial Sequence
  ENSG00000134243_13 (sequence is synthesized)
gttactcctggacaaagatgctggaaggaccccactattacaccatcctggattctggaggcatcattgtggccattgagcacagcagccgtcctatcaatgtgattaagttctccacag

SEQ ID NO: 309115 - DNA, 120 bp, Artificial Sequence
  ENSG00000134243_14 (sequence is synthesized)
acgaaggtcaatgctggcaaacctacacgttcaccagggaccccatctatttcactggcctagcttcagaacctggagctaggtccatgaatatcagcatttggggcttcacagaatctt

SEQ ID NO: 309116 - DNA, 120 bp, Artificial Sequence
  ENSG00000134243_15 (sequence is synthesized)
tcctgaccagccagtgggtctcctacaccattgattttaaagatatccttgaaaggaactgtgaagagaaggactataccatatggctggcacactccacagaccctgaagattatgaag

SEQ ID NO: 309117 - DNA, 120 bp, Artificial Sequence
  ENSG00000134243_16 (sequence is synthesized)
atggctgcattttgggctacaaagaacagtttctgcggctacgcaagtcatccgtgtgtcagaatggtcgagactatgttgtgaccaagcagccctccatctgcctctgttccctggagg

SEQ ID NO: 309118 - DNA, 120 bp, Artificial Sequence
  ENSG00000134243_17 (sequence is synthesized)
actttctctgtgattttggctactaccgtccagaaaatgactccaagtgtgtggaacagccagaactgaagggccacgacctggagttttgtctgtacggaagagaagaacacctaacaa

SEQ ID NO: 309119 - DNA, 120 bp, Artificial Sequence
  ENSG00000134243_18 (sequence is synthesized)
caaatgggtaccggaaaattccaggggacaaatgccagggtggggtaaatccagttcgagaagtaaaagacttgaaaaagaaatgcacaagcaactttttgagtccggaaaaacagaatt

SEQ ID NO: 309120 - DNA, 120 bp, Artificial Sequence
  ENSG00000134243_19 (sequence is synthesized)
ccaagtcaaattctgttccaattatcctggccatcgtgggattgatgctggtcacagtcgtagcaggagtgctcattgtgaagaaatatgtctgtgggggaaggttcctggtgcatcgat

SEQ ID NO: 309121 - DNA, 120 bp, Artificial Sequence
  ENSG00000134243_20 (sequence is synthesized)
actctgtgctgcagcagcatgcagaggccaatggtgtggatggtgtggatgctttggacacagcctcccacactaataaaagtggttatcatgatgactcagatgaggacctcttggaat

SEQ ID NO: 309122 - DNA, 120 bp, Artificial Sequence
  ENSG00000134243_21 (sequence is synthesized)
agctcttcagaggagctggacccagcatggatggtggaaccacagtacctcttacactccctgtggctccaacttcaggaaataaatttcccattgcgagggacccagctctgtttctgc

SEQ ID NO: 309123 - DNA, 120 bp, Artificial Sequence
  ENSG00000134243_22 (sequence is synthesized)
tgcttccatcaaagccaaaaggacctacactaaagaaatgcagggtgggggtggggaaccctgagcacttttttacaattggctctgagaaaaagggagacattttaaattctttaactt

SEQ ID NO: 309124 - DNA, 120 bp, Artificial Sequence
  ENSG00000134243_23 (sequence is synthesized)
cttatttctcgtcctgtctctttgcaaagtatgggcttttttgtttttgttttttaagggaaacgaaatggaattcgaagggaccttttcactaaccccacttctgtgtgttctgcatgg

SEQ ID NO: 309125 - DNA, 120 bp, Artificial Sequence
  ENSG00000134243_24 (sequence is synthesized)
cgcctgccccagggcatctgccaactccagtatcagctctcacagtgtacttggtaccatccctgggctctgctggcgagacgaaacagctgtagagatgaaaacaggctgcagaggctg

SEQ ID NO: 309126 - DNA, 120 bp, Artificial Sequence
  ENSG00000134243_25 (sequence is synthesized)
gcacagcctggccggcttttctccatctggggacagtcctactccaagaacactgcacaccagctcctcacacagatcccacttactctttttttttttttcagagaccacagaccacag

SEQ ID NO: 309127 - DNA, 120 bp, Artificial Sequence
  ENSG00000134243_26 (sequence is synthesized)
tgatttttcttttcccttgtttaattaggcaatacccttgttaattgccctttggcaactaacttaaccatgtgcttcccacacagtacatcaggaaaacttacagggcaatatttttaa

SEQ ID NO: 309128 - DNA, 120 bp, Artificial Sequence
  ENSG00000134243_27 (sequence is synthesized)
cttggggcaggaagaagggagcagcagagaattgactagatatagcacctattaaaagagaactcttgcttcttctgagatttttcaagctgtgctttgtgtgtgtgccagtagacttac

SEQ ID NO: 309129 - DNA, 120 bp, Artificial Sequence
  ENSG00000134243_28 (sequence is synthesized)
gcaaggacagggtacaaacttagctggaagtctgcccaggctgaatgatctcttccctagagttgattgtcgggtacacagtgtgaacccccgaagacggaacctcacagtcttccatgt

SEQ ID NO: 309130 - DNA, 120 bp, Artificial Sequence
  ENSG00000134243_29 (sequence is synthesized)
taaatcatgacaatggctgcctatctgctgcttcttaggttgctgttgtacatggaaccaggactagagattttttcagatttatagacttaaaaaattagaattttattaccaggcttt

SEQ ID NO: 309131 - DNA, 120 bp, Artificial Sequence
  ENSG00000134243_30 (sequence is synthesized)
ccttctcaccccttttttctgactttgccaagtaatttgttgacacgaaaattttggaggaaccaattgaaaacacacttccagtctagatgatgctttgtgtgatacattaagttctta

SEQ ID NO: 309132 - DNA, 120 bp, Artificial Sequence
  ENSG00000134243_31 (sequence is synthesized)
ttttggattaaaagaagttttccatttgatacctctctaaattaaataaattatagaatgtagttgggtggattttggggtggccatatagtaatggaaagctgcaataattagttttaa

SEQ ID NO: 309133 - DNA, 120 bp, Artificial Sequence
  ENSG00000134243_32 (sequence is synthesized)
tacagcttgaatatttgctatatagaaatatagtatggaaagtttttggtcttaatgtagctactgtgcgggtcacagtttctcccaatgattatgactgggacattctttggtagatac

SEQ ID NO: 309134 - DNA, 120 bp, Artificial Sequence
  ENSG00000134243_33 (sequence is synthesized)
catttgctactagtttattttgtggctagaaagtcagttttgtgtgtttttttttttttttatttgaagtgccaaattaactttagtcagaatgtgagcagatggctaagttctctcctc

SEQ ID NO: 309135 - DNA, 120 bp, Artificial Sequence
  ENSG00000134243_34 (sequence is synthesized)
cccagaatggattaacagctgcgtggaaagtgggggagagagtggatggagacttttagagatgttaaaactgcagtagaatgaaatgagtcagggagcttcagttagaaaataaagttg

SEQ ID NO: 309136 - DNA, 120 bp, Artificial Sequence
  ENSG00000134243_35 (sequence is synthesized)
aggcagtttttgtgaagataatatggttagggctggagtgcactagtctttttgcttattcattttgcatggttttaaaattaaaaataattccgaagatacaccagctcacaaatgaaa

SEQ ID NO: 309137 - DNA, 120 bp, Artificial Sequence
  ENSG00000134243_36 (sequence is synthesized)
acgtcagcctctgccccaccctccctcctgcccaaagtgaatttggtactcagaaaagaactgtttataccactcacctttctcccagcatgtactcactgtgggcagatgcaccaatac

SEQ ID NO: 309138 - DNA, 120 bp, Artificial Sequence
  ENSG00000134243_37 (sequence is synthesized)
atggtaatcctcttactcattttaagacgtaggaaactcaatattcttctctaaccatatacgatagggctcttcgcttttaatgatatctgggatttctgtggaacttggcaaattttc

SEQ ID NO: 309139 - DNA, 120 bp, Artificial Sequence
  ENSG00000134243_38 (sequence is synthesized)
agagcaccttcactcacataatgtcatttgaacctcacaatgttcttgggatggagtcagttgttcagggtccccgtgtgtgtgataagcagtgctggctggctgtcttcagaactcttg

SEQ ID NO: 309140 - DNA, 120 bp, Artificial Sequence
  ENSG00000134243_39 (sequence is synthesized)
gaaatctttacacatgcgagtgctaaccactttgagcaaggctgccttcttgtagatgacttgctgttctttatgacagggatcagtggcatttgtttcctagcagtatttagcaccttt

SEQ ID NO: 309141 - DNA, 120 bp, Artificial Sequence
  ENSG00000134243_40 (sequence is synthesized)
ttgccaccttggtgaacagaaaattgtattttcctgtctttcatggctgaaaacaaaagtaatgggaattttaaatacgtttgcagaaactgcccctcccctcattgagggtcactgctc

SEQ ID NO: 309142 - DNA, 120 bp, Artificial Sequence
  ENSG00000134243_41 (sequence is synthesized)
aagagtgcaggagtggactctccactgatgggtctccctccccatcctggtttccaccccgggctggctagctctgttggtttgaagactgacagccagcctggctcattctcattattg

SEQ ID NO: 309143 - DNA, 120 bp, Artificial Sequence
  ENSG00000134243_42 (sequence is synthesized)
gctagttagctttctttatcaacctgctcactcacaaatgtgtgccctcagccagagagtaagaaagcccaaatctgttacagcttctaaaaaaatagatttctaatttgtcctactcat

SEQ ID NO: 309144 - DNA, 120 bp, Artificial Sequence
  ENSG00000134243_43 (sequence is synthesized)
gttaggagcattatctttgaaggtaaaacatagtgtatcattgtgtaaactcccaggcttgatgtagcagaagagatcatttctggaggcttcagcaatggaatttagcattataagaga

SEQ ID NO: 309145 - DNA, 120 bp, Artificial Sequence
  ENSG00000134243_44 (sequence is synthesized)
gattggacaaaccagtccaaagtggtccgagttcttaaatccaggtagggaactcactcttctttcttctctggacctaattgggcattgggctttagtgagaccacagaccaggcccgt

SEQ ID NO: 309146 - DNA, 120 bp, Artificial Sequence
  ENSG00000134243_45 (sequence is synthesized)
ctctcctgtaggcttttaattcaatggcaactctatttcaaagaataaaagcctttggagagttgcggcagttctgggggcgggctcaggagagtccatagatcagccgtaactggaacg

SEQ ID NO: 309147 - DNA, 120 bp, Artificial Sequence
  ENSG00000134243_46 (sequence is synthesized)
tagaatctacgtctgcctctgaatggacttcccacctcctctctcttgctctgatgcttgcctctgggcctctccatgcccaaggtggtctttcatccttgacaggctggtaatgtgctg

SEQ ID NO: 309148 - DNA, 120 bp, Artificial Sequence
  ENSG00000134243_47 (sequence is synthesized)
gccacctccagctcctgcatcgagtctgtaaaccagagctggttctcatggccttcgtcacgataccaggatacggaggggagcccagggccatccatacccaccccagggtaacggggc

SEQ ID NO: 309149 - DNA, 120 bp, Artificial Sequence
  ENSG00000134243_48 (sequence is synthesized)
tggcctggcattagtcattatttagtttccaggccaaccatccagatagagattccctctttcctttgagcagtgctctcaagagctccgtgcctgtccacaatgacctagagtgcatcc

SEQ ID NO: 309150 - DNA, 120 bp, Artificial Sequence
  ENSG00000134243_49 (sequence is synthesized)
tgctcattgtcagtgtagcccctcgcccctatattcatccaggatacttggaagtgctaaaataggaagggattcggctttcaactttgctaccatcttccctgaagcaggaaaatgaac

SEQ ID NO: 309151 - DNA, 120 bp, Artificial Sequence
  ENSG00000134243_50 (sequence is synthesized)
atggacttaaatgttctttgaaaaaaccaaagttttaagatttgctgtgtgatgaagtgacagggagggccggagtcagcaggtgccagactttctgttctgtctgccatgggtttgtcc

SEQ ID NO: 309152 - DNA, 120 bp, Artificial Sequence
  ENSG00000134243_51 (sequence is synthesized)
agctcaggtagctctaggagcaccatcctgccctagcagagcccaggccttgccctcatgaagcatcattgaaatagcaggagcatgttgatttcttggttaggttgcattataataaca

SEQ ID NO: 309153 - DNA, 120 bp, Artificial Sequence
  ENSG00000134243_52 (sequence is synthesized)
agagtcagaacattaattcgaaacaacttgcagtatgcatttcttcacaccagtacattcttaagtgtacttgtttataaggaataacataaactaatctgtacctttatatatatgtgt

SEQ ID NO: 309154 - DNA, 120 bp, Artificial Sequence
  ENSG00000134243_53 (sequence is synthesized)
gtgtacatatatacatatataaactgtatagtgtacatggtaatgatttattgctatgccccagatccttaatgtagttctcatcctccgcatgccctcagccacaagcgggtgactgac

SEQ ID NO: 309155 - DNA, 120 bp, Artificial Sequence
  ENSG00000134243_54 (sequence is synthesized)
tgttccctgatgatttggcccacctcctgtgtttggacctctagggaggagggttttggtcatactctccttatcctcgtgcacagaaatgctcagggtccccatgtgcctgttgttcag

SEQ ID NO: 309156 - DNA, 120 bp, Artificial Sequence
  ENSG00000134243_55 (sequence is synthesized)
ccctctctcttgttccctttctgagcatgtggtccttccccaggctgtgggacagctgccttcccacgaaagtgtaaagcagtattaagatcattactgcatgtgccctaaaaacccaag

SEQ ID NO: 309157 - DNA, 120 bp, Artificial Sequence
  ENSG00000134243_56 (sequence is synthesized)
ttttctattcccttaggacagaaaattgcatgtgaggtgggataatcgagtttcagtgacccacgtcagttacacattaaagccagaccccatgataaaattccacaaaatggaaataaa

SEQ ID NO: 309158 - DNA, 120 bp, Artificial Sequence
  ENSG00000134243_57 (sequence is synthesized)
actcaaatttctttagcattgtgtaaataaatctgaatgtgtttaactttgtactggtaattttctgtatatttggaatatttgggttaaaaataaaacagactggactttgttacctga

SEQ ID NO: 309159 - DNA, 120 bp, Artificial Sequence
  ENSG00000134243_58 (sequence is synthesized)
aagctatatcgaaggtgagatcaataacacgcgttggagcatttcactaagtaacattgagaatatagattctcccttttctagacatgatggcacgtaacagttgatgtaaaagatctt

SEQ ID NO: 309160 - DNA, 120 bp, Artificial Sequence
  ENSG00000134243_59 (sequence is synthesized)
gtaacagttgatgtaaaagatcttctagccatcctaagttttcaccagactgtcacactcagcacatgtttttgttgttgttgttgttgttgttttttgagacagggtctcactcttgtc

SEQ ID NO: 309161 - DNA, 61 bp, Artificial Sequence
  ENSG00000134243_60 (sequence is synthesized)
ggcacacgtaggcttgtattgagctcctgggttcgaatgatccacctgcctccaaaagtgc

SEQ ID NO: 309162 - DNA, 120 bp, Artificial Sequence
  ENSG00000134243_61 (sequence is synthesized)
agctcctgggttcgaatgatccacctgcctccaaaagtgctgggattataggcgggagccactgcacccggcccttagcacactttttaacgtctactctttttttttttttgagcaggg

SEQ ID NO: 309163 - DNA, 120 bp, Artificial Sequence
  ENSG00000134243_62 (sequence is synthesized)
tctagctctgtcactcaggctggagagcagtggcgcaaacacagctcattgcaacctctccctcccaggctcaagccatccaccatcttcccacctcagcctcccaagtggctggcatta

SEQ ID NO: 309164 - DNA, 120 bp, Artificial Sequence
  ENSG00000134243_63 (sequence is synthesized)
catgtgtttgatgatctcagaggctcagtatccttgtcctgggttggagatagcactggggtgtgttgagggactgtggtgcccatgggctcatggttgttcatctgttggtccctgccc

SEQ ID NO: 309165 - DNA, 120 bp, Artificial Sequence
  ENSG00000134243_64 (sequence is synthesized)
ggaatggaaggaggatcagtcagctccttatccctcctgatatacagctgggctcccactaggaggacacgctgaggatacattggcccctggtcttaaatcaggacttgttgcctggct

SEQ ID NO: 309166 - DNA, 120 bp, Artificial Sequence
  ENSG00000134243_65 (sequence is synthesized)
gtcttattatcctgcttgaacaagagcaggggcaacatctcctgccccctggtattccataatgcatgtgtcatagcattgaggcacatgatagttatattagaagcctaaagaaataaa

SEQ ID NO: 309167 - DNA, 120 bp, Artificial Sequence
  ENSG00000134243_66 (sequence is synthesized)
agacatgaggctagagctggaggaaccagaggtagaaatggggagccaagaagagttcccctttcagaggccggccattgctttggtcttggatgtgaaggtcccagaggaaagcagaac

SEQ ID NO: 309168 - DNA, 120 bp, Artificial Sequence
  ENSG00000134243_67 (sequence is synthesized)
aaacttatgatgaataaagccaggaactcttgcttattttctgtcctccctctgctcctgtcactaactacttctgtaaacataacttcccaacttctactccaactttaaagcatctgg

SEQ ID NO: 309169 - DNA, 120 bp, Artificial Sequence
  ENSG00000134243_68 (sequence is synthesized)
ttccttaaataaacaggccctgtagagaggccgtgttgtatggggtgtcagctctgggaagaatgcgtgtgtttgtttgctggctctggcagggttgagtccaagctgacaggactgagt

SEQ ID NO: 309170 - DNA, 120 bp, Artificial Sequence
  ENSG00000134243_69 (sequence is synthesized)
tattggggggatgttacagactataattcaaatttttgcatttgacagaactatagataagattctagaaaggattgcttttaattggcaactcagattaaatggcattgttttttcttc

SEQ ID NO: 309171 - DNA, 120 bp, Artificial Sequence
  ENSG00000134243_70 (sequence is synthesized)
aaggtgaaggagtaattaactcttgagcgcttgcagaagttgggctgcgcagaagcaaagcatgtgtttgatgatctcagaggctcagtatccttgtcctgggttggagatagcactggg

SEQ ID NO: 309172 - DNA, 120 bp, Artificial Sequence
  ENSG00000134243_71 (sequence is synthesized)
atttcttccaatacttggcctctcttcatcctaccttccctagcacccccagccgtctagcttatttaatagtctcttgagttctgtttcttccattcagctttggatcaaggagtagga

SEQ ID NO: 309173 - DNA, 120 bp, Artificial Sequence
  ENSG00000134243_72 (sequence is synthesized)
actctgtaggatctccttcttggtcctggttgagcagagtgagcgaaaccttcatgaagagtcttctctcatgcaatgtatagtcagacctttagcccctagagggatgttaaaatgact

SEQ ID NO: 309174 - DNA, 120 bp, Artificial Sequence
  ENSG00000134245_0 (sequence is synthesized)
gcacactaggcccgcagctcccttcagcgccgcagaccccctgacaccgcacccggtcctcaggcagcgcgccccagaccccgggttcggcacgccgtcgtcggcttccggacatcgcaa

SEQ ID NO: 309175 - DNA, 120 bp, Artificial Sequence
  ENSG00000134245_1 (sequence is synthesized)
cttgcgcccctctcggggatcctcctcccgggctctggaccccaggtgatcctaggtccccagccgccggcgaacaccatggccccccaggggggtgaggtaggagcagcctgagtaccc

SEQ ID NO: 309176 - DNA, 120 bp, Artificial Sequence
  ENSG00000134245_2 (sequence is synthesized)
ccagaaggtgccccgtccacgcccctccgggctgcgcggcgggagtcttcggggagctatgctgagaccgggtggtgcggaggaagctgcgcagctcccgcttcggcgcgccagcgcccc

SEQ ID NO: 309177 - DNA, 120 bp, Artificial Sequence
  ENSG00000134245_3 (sequence is synthesized)
ggtccctgtgccgtcgcccgcggcccccgacggctcccgggcttcggcccgcctaggtcttgcctgccttctgctcctgctgctgctgacgctgccggcccgcgtagacacgtcctggtg

SEQ ID NO: 309178 - DNA, 120 bp, Artificial Sequence
  ENSG00000134245_4 (sequence is synthesized)
gtacattggggcactgggggcacgagtgatctgtgacaatatccctggtttggtgagccggcagcggcagctgtgccagcgttacccagacatcatgcgttcagtgggcgagggtgcccg

SEQ ID NO: 309179 - DNA, 120 bp, Artificial Sequence
  ENSG00000134245_5 (sequence is synthesized)
agaatggatccgagagtgtcagcaccaattccgccaccaccgctggaactgtaccaccctggaccgggaccacaccgtctttggccgtgtcatgctcagaagtagccgagaggcagcttt

SEQ ID NO: 309180 - DNA, 120 bp, Artificial Sequence
  ENSG00000134245_6 (sequence is synthesized)
tgtatatgccatctcatcagcaggggtagtccacgctattactcgcgcctgtagccagggtgaactgagtgtgtgcagctgtgacccctacacccgtggccgacaccatgaccagcgtgg

SEQ ID NO: 309181 - DNA, 120 bp, Artificial Sequence
  ENSG00000134245_7 (sequence is synthesized)
ggactttgactggggtggctgcagtgacaacatccactacggtgtccgttttgccaaggccttcgtggatgccaaggagaagaggcttaaggatgcccgggccctcatgaacttacataa

SEQ ID NO: 309182 - DNA, 120 bp, Artificial Sequence
  ENSG00000134245_8 (sequence is synthesized)
taaccgctgtggtcgcacggctgtgcggcggtttctgaagctggagtgtaagtgccatggcgtgagtggttcctgtactctgcgcacctgctggcgtgcactctcagatttccgccgcac

SEQ ID NO: 309183 - DNA, 120 bp, Artificial Sequence
  ENSG00000134245_9 (sequence is synthesized)
aggtgattacctgcggcgacgctatgatggggctgtgcaggtgatggccacccaagatggtgccaacttcaccgcagcccgccaaggctatcgccgtgccacccggactgatcttgtcta

SEQ ID NO: 309184 - DNA, 120 bp, Artificial Sequence
  ENSG00000134245_10 (sequence is synthesized)
ctttgacaactctccagattactgtgtcttggacaaggctgcaggttccctaggcactgcaggccgtgtctgcagcaagacatcaaaaggaacagacggttgtgaaatcatgtgctgtgg

SEQ ID NO: 309185 - DNA, 120 bp, Artificial Sequence
  ENSG00000134245_11 (sequence is synthesized)
ccgagggtacgacacaactcgagtcacccgtgttacccagtgtgagtgcaaattccactggtgctgtgctgtacggtgcaaggaatgcagaaatactgtggacgtccatacttgcaaagc

SEQ ID NO: 309186 - DNA, 120 bp, Artificial Sequence
  ENSG00000134245_12 (sequence is synthesized)
ccccaagaaggcagagtggctggaccaaacctgaacacacagatacctcactcatccctccaattcaagcctctcaactcaaaagcacaagatccttgcatgcacaccttcctccaccct

SEQ ID NO: 309187 - DNA, 120 bp, Artificial Sequence
  ENSG00000134245_13 (sequence is synthesized)
ccaccctgggctgctaccgcttctatttaaggatgtagagagtaatccatagggaccatggtgtcctggctggttccttagccctgggaaggagttgtcaggggatataagaaactgagc

SEQ ID NO: 309188 - DNA, 120 bp, Artificial Sequence
  ENSG00000134245_14 (sequence is synthesized)
aagctccctgatttcccgctctggagatttgaagggagagtagaagagatagggggtctttagagtgaaatgagttgcactaaagtacgtagttgaggctccttttttctttcctttgca

SEQ ID NO: 309189 - DNA, 120 bp, Artificial Sequence
  ENSG00000134245_15 (sequence is synthesized)
ccagcttcccgatacttcttggtgtgcaagaggaagggtacctgtagagagcttctttttgtttctacctggccaaagttagatgggacaaagatgaatggcatgtcccttctctgaagt

SEQ ID NO: 309190 - DNA, 120 bp, Artificial Sequence
  ENSG00000134245_16 (sequence is synthesized)
ccgtttgagcagaactacctggtaccccgaaagaaaatcttaggctaccacattctattattgagagcctgagatgttagccatagtggacaaggttccattcacatgctcatatgttta

SEQ ID NO: 309191 - DNA, 120 bp, Artificial Sequence
  ENSG00000134245_17 (sequence is synthesized)
taaactgtgttttgtagaagaaaaagaatcataacaatacaaacacacattcattctctctttttctctctaccattctcaacctgtattggacagcactgcctcttttgcttacttgct

SEQ ID NO: 309192 - DNA, 120 bp, Artificial Sequence
  ENSG00000134245_18 (sequence is synthesized)
gcctgttcaaactgaggtggaatgcagtggttcccatgcttaacaaatcattaaaacaccctagaacactcctaggatagattaatgtagtaagtctggctaggccttgtgttgcctttt

SEQ ID NO: 309193 - DNA, 120 bp, Artificial Sequence
  ENSG00000134245_19 (sequence is synthesized)
ttttttttcttttcttttcttctcttcccatgcactattctggaggtttgccaggtttggggagacatggagtaaaagaaagataggcaactcatggatggtgggagagcaggtaagcag

SEQ ID NO: 309194 - DNA, 120 bp, Artificial Sequence
  ENSG00000134245_20 (sequence is synthesized)
gtaagcaggtctgatctcaagggcccacatgaggcatcagtatatattaggcaggtagggatctctggctttggtaattctttatgagaggatcctagcctttgaagctgggagcaggag

SEQ ID NO: 309195 - DNA, 120 bp, Artificial Sequence
  ENSG00000134245_21 (sequence is synthesized)
tcagtggctacagtgggaaggagtactgcaggttggggccaaagtgatacacagcttagaaggcagccttcctccacttactcaacaaatctttatttagtgactctccaagtcctagtg

SEQ ID NO: 309196 - DNA, 120 bp, Artificial Sequence
  ENSG00000134245_22 (sequence is synthesized)
attattattattgttcactccacatttggcttaatgggtaatgctattacccattgcctaactaggtttgcagtagtggaatctccagagatagcaggcttagtaagctggaggtaggac

SEQ ID NO: 309197 - DNA, 120 bp, Artificial Sequence
  ENSG00000134245_23 (sequence is synthesized)
atgaagtcccccaaaacttgatgtcctatttttatgtgagttggacagtggttatcttttgcctgttgatatcttaaagcagcagagtggtatagaaatttgcggttatgacagacccgg

SEQ ID NO: 309198 - DNA, 120 bp, Artificial Sequence
  ENSG00000134245_24 (sequence is synthesized)
gttaaaaatcacagctgtgccatttgctttgatattttgagcaaggtagctaaattttctgagcttctattttctcatctgtaaaatgaggatacgtacctgttcttttttttctttctt

SEQ ID NO: 309199 - DNA, 120 bp, Artificial Sequence
  ENSG00000134245_25 (sequence is synthesized)
gcaatcctcccacctcagcctccccattagctgggactacagggccatgccatcatgcccagctaatttaaacatagttttcagagatggagctcactatgttgcccaggctggtcttga

SEQ ID NO: 309200 - DNA, 120 bp, Artificial Sequence
  ENSG00000134245_26 (sequence is synthesized)
cactgcagccttccaaagtgctgggcgtacaagcgcaagccactgtgcccagctgtcagacgctgagttttaattatgcaccaaactccagcccgcagatcctcttcaccaaagcccctg

SEQ ID NO: 309201 - DNA, 120 bp, Artificial Sequence
  ENSG00000134245_27 (sequence is synthesized)
gctggtctagcccatcatgacttctctaggaacagtccttctttaggactataaagtattaacaaaagtctgtagattaaggagcctgcataaagaattctggatacaggcccctgtctt

SEQ ID NO: 309202 - DNA, 120 bp, Artificial Sequence
  ENSG00000134245_28 (sequence is synthesized)
tccaaagttcctctccaatatcccttggggtcctcatgtttttgaagcagcttcactctgcacaggcagcaggaggttgggggagccatagctctgggccacgggggcagatttatttgg

SEQ ID NO: 309203 - DNA, 120 bp, Artificial Sequence
  ENSG00000134245_29 (sequence is synthesized)
atgataggactaatatttgtgtaacctgctgagacctgtgtgggagagtttagggtggtttttcttttggtgaggggatttgctctggtttcacatccattaacacaaaacatgagctag

SEQ ID NO: 309204 - DNA, 120 bp, Artificial Sequence
  ENSG00000134245_30 (sequence is synthesized)
tcagggcccttgtggtctgcggtaaggggatgcctgtggagaaatgggcctgagtgagtcaggccaagagaatgtcttccttcagaatggagtcaactggataactgatgagccaatggt

SEQ ID NO: 309205 - DNA, 120 bp, Artificial Sequence
  ENSG00000134245_31 (sequence is synthesized)
gggattaaggagggggaaatgggaggggaagagaacagctgacatcttgaggaaagctttggggtagtggagaggtaagggggtcatggtcagtctgaactcaacaatagggctgaatga

SEQ ID NO: 309206 - DNA, 120 bp, Artificial Sequence
  ENSG00000134245_32 (sequence is synthesized)
atttaccaaaggaagctgccttatattatatgccaggctgctggggaaagcctcaggtcctggccagcccctgttctcacaagaacatgcaggttaccacataaataatggcatatgcct

SEQ ID NO: 309207 - DNA, 120 bp, Artificial Sequence
  ENSG00000134245_33 (sequence is synthesized)
tccataggacgtcaacctgacttaaatctacctataccctactctctattctttggtttttggttctcatccctgtggaaggaaatgggcctcttctggcatctcatgctactctgtgct

SEQ ID NO: 309208 - DNA, 120 bp, Artificial Sequence
  ENSG00000134245_34 (sequence is synthesized)
tttccttgggctccaaattctagctcataaagatgcaagttttgcaatttcctataaatggttaagaaaagagcaagctgtccagagagtgagaagtttgaaaagagaggtgcataagag

SEQ ID NO: 309209 - DNA, 120 bp, Artificial Sequence
  ENSG00000134245_35 (sequence is synthesized)
agaaatgatgtccatttgagccccaccacggaggttatgtggtcccaaaaggaatgatggccaagcaattaatttttcctcctagttcttagcttgcttctgcattgattggctttacac

SEQ ID NO: 309210 - DNA, 120 bp, Artificial Sequence
  ENSG00000134245_36 (sequence is synthesized)
aactggcatttagtctgcattacacaaatagacactaatttatttggaacaagcagcaaaatgagaactttatttggtgcagtcagggctccatttagttccctcactctgcttctaatc

SEQ ID NO: 309211 - DNA, 120 bp, Artificial Sequence
  ENSG00000134245_37 (sequence is synthesized)
accccttctcccagccctcttctatttgatagaggtctgtccctcagatcagcaatgtcttagcccctctcctctcttccattccttcctgttggtactcatttcttctaacttttaata

SEQ ID NO: 309212 - DNA, 120 bp, Artificial Sequence
  ENSG00000134245_38 (sequence is synthesized)
aacatttaggtataatacattacagtaagtgctatttagatacaaacttaaaacatactatatattttaaggatctaagaatcctttagagaaggcacatgactgaagtacctcagctgc

SEQ ID NO: 309213 - DNA, 120 bp, Artificial Sequence
  ENSG00000134245_39 (sequence is synthesized)
gcagcctgtagccagtttttttaatgtaaaagtaagaatgccagccttaacctagccctgcagataaaagctaacttttattaataccagccctgaataatggcactaatccacactctt

SEQ ID NO: 309214 - DNA, 80 bp, Artificial Sequence
  ENSG00000134245_40 (sequence is synthesized)
ttgcctggccctgagggtctgtttgcaaaacttcttgtagatctaatttctgaacactcactgcttcatttctattcctc

SEQ ID NO: 309215 - DNA, 120 bp, Artificial Sequence
  ENSG00000134245_41 (sequence is synthesized)
atctaatttctgaacactcactgcttcatttctattcctcctgttgcagggagtaatttcttctcctttgtctcacttcccttatcaagaacaccaaccagtaagtctttgccaaattct

SEQ ID NO: 309216 - DNA, 120 bp, Artificial Sequence
  ENSG00000134245_42 (sequence is synthesized)
cagacccactcaggacacgagtctctacatggcttaacagaagagagataattaggatttttttttcctcagtctttctgaggtttttatttaaatgcactcagtggtcatagggcagaa

SEQ ID NO: 309217 - DNA, 120 bp, Artificial Sequence
  ENSG00000134245_43 (sequence is synthesized)
gctcaagctagctggggcgaagggaggacgccagggagagtatgtttctcatccctgggaggcattcagcctagctcctgcagccaaattacagcaccagagaacaatgtgatgcattcc

SEQ ID NO: 309218 - DNA, 120 bp, Artificial Sequence
  ENSG00000134245_44 (sequence is synthesized)
tgggcaggtcggtgggaccctgggcgcctgggccttgtggagagaggtgccagacacagagttctccgtaagcaatcctgcagagccgccccctgggtgcagaaatgaaatacgggagag

SEQ ID NO: 309219 - DNA, 120 bp, Artificial Sequence
  ENSG00000134245_45 (sequence is synthesized)
tgctactacgggggttgggcatctttgaagcaatgttggataacaagaaagagatgcttccttttcactctttgccctccctgtcagcctgagcacaaccatgaggttacacacacacac

SEQ ID NO: 309220 - DNA, 120 bp, Artificial Sequence
  ENSG00000134245_46 (sequence is synthesized)
acagaggtgtacatatacagacacatagagaacttctctcaggctgcataggagttctgctcatcctcctctccccaacaattaaaaaaaaaagcaattagatttcgatccagtacttca

SEQ ID NO: 309221 - DNA, 120 bp, Artificial Sequence
  ENSG00000134245_47 (sequence is synthesized)
aaaaggataccaatagggtctggctttaatcaaggaatatctacaaagtcacattaccaacctgcaggcaactctttggtttggggaccagaactcctctggtgggtggttgggggaagg

SEQ ID NO: 309222 - DNA, 120 bp, Artificial Sequence
  ENSG00000134245_48 (sequence is synthesized)
atgcaggaagggcatggtgaggagagatcagtggtgaagaattaccatcaaagcagagtggctgagactgtataagttcgcaaggctggttcatgccagagatagtgagatgtgcaccct

SEQ ID NO: 309223 - DNA, 120 bp, Artificial Sequence
  ENSG00000134245_49 (sequence is synthesized)
atgtgctgagaatgatggagcagtctcctatgactgcatggggtataactgccaagcctactgctcatgacctgtggttgtttttaactcttaactgggttagaaaactggagagctttg

SEQ ID NO: 309224 - DNA, 120 bp, Artificial Sequence
  ENSG00000134245_50 (sequence is synthesized)
gattccagggatgatctccataagagagaagcactggaaaagaccaagtggtggctttattagggtaaatatatcacagttgctacagtgaattgagctttctcagaagctattattttc

SEQ ID NO: 309225 - DNA, 120 bp, Artificial Sequence
  ENSG00000134245_51 (sequence is synthesized)
tttgggtgattggcaggtatagggcaatagccagtggggtgtcagtaatatgccctgtccctgacctcaaaggtaaagggatagaaaagagagggcgttgacaaactcattttcccactt

SEQ ID NO: 309226 - DNA, 120 bp, Artificial Sequence
  ENSG00000134245_52 (sequence is synthesized)
cccactcatggcttatattatctctgagcatctcggtggctattcctcatttacttaagatgttttagtcattctggatgtgcaaatgcaaggcaagcattctcccactggccccctaac

SEQ ID NO: 309227 - DNA, 120 bp, Artificial Sequence
  ENSG00000134245_53 (sequence is synthesized)
ggttaactatcctggcttaaaattttcctttgctcacttccattctatgagtatatcgatggagcagctggacattagagttctttctctttgaccaaaggagccaaaatgcggtgactt

SEQ ID NO: 309228 - DNA, 120 bp, Artificial Sequence
  ENSG00000134245_54 (sequence is synthesized)
gacttcaaccccaacagcccctgtaagtagccctggccaaacagaaaggctaagctgaatgaagaaaaaaggaagacaatttcatctacagttgtcctttttgacagcttccaagggggg

SEQ ID NO: 309229 - DNA, 120 bp, Artificial Sequence
  ENSG00000134245_55 (sequence is synthesized)
tttgcctaggaataacaatattcataagaagctttttcatatgcaaaatgctttagcatatatgtaatcctcacaacaaccctgtgaggtaggggttactgtcactttacagatgctgtt

SEQ ID NO: 309230 - DNA, 120 bp, Artificial Sequence
  ENSG00000134245_56 (sequence is synthesized)
cagaaaaatttggtgatttgtccaaggtcacatgaacagtgcgtggctcagccagaactcaaacctaggtcttctgacttcaaatcctgtgtattctcctcaaagcctgaggatgcccag

SEQ ID NO: 309231 - DNA, 120 bp, Artificial Sequence
  ENSG00000134245_57 (sequence is synthesized)
ggttgggggcaccagagtcccagcaccttcaaaacagaaattgatacaaaatgttcaagccctgtaggagtcccaggacagccaagagagtatatctgagcacagtttacaaaggaacag

SEQ ID NO: 309232 - DNA, 120 bp, Artificial Sequence
  ENSG00000134245_58 (sequence is synthesized)
cctaggccctcctgaaccttatcaaccaatggctcttttgccatttctgccactattaccaccagtaccatgtgaccactatacaacatattccacatttaaacaactctggctcctaat

SEQ ID NO: 309233 - DNA, 120 bp, Artificial Sequence
  ENSG00000134245_59 (sequence is synthesized)
tctactccttttttccccttcagattaacattaaaaattttatctagtccttttgaaattatgctaaatgtatagacacagtagaagtagtcatgacagaaaattattaaggctttgaaa

SEQ ID NO: 309234 - DNA, 120 bp, Artificial Sequence
  ENSG00000134245_60 (sequence is synthesized)
cgagactccgtcacaaaaaaaaaaaaaaagaaggtatgtattagaattttctttgagatttcactccttttaaaaatgacgtcaactcctgggttaggaaagcaagatgagggaataagt

SEQ ID NO: 309235 - DNA, 120 bp, Artificial Sequence
  ENSG00000134245_61 (sequence is synthesized)
gtcaactcctgggttaggaaagcaagatgagggaataagtgtcctaagaaactcccatcccaagccagacagatgcctacccgtggcctggcaaaggtcctgggatctcaagctgatgca

SEQ ID NO: 309236 - DNA, 120 bp, Artificial Sequence
  ENSG00000134245_62 (sequence is synthesized)
agcaatttgtgtacaccaaggcaaggggtctcaatcctgcagagaaacccatgagatgaggcagacagcagattttcacttgatcaaacacttgctgctctcaacccctctttgttttcc

SEQ ID NO: 309237 - DNA, 120 bp, Artificial Sequence
  ENSG00000134245_63 (sequence is synthesized)
catccaaaatctggacctctgtttaggcgcaagacagtgagtaagagcagctccaaaagatgacgtatgcaaggggaactcttctgttcaatcctgtaatgttttctgttagagacagca

SEQ ID NO: 309238 - DNA, 120 bp, Artificial Sequence
  ENSG00000134245_64 (sequence is synthesized)
taggctacctatcctaatcctgcaccccaactgttaagacagaagggaaaagtacaatgttcatcaatcatagctctgggatgctgcagctccctgacctgggcccctacttgagctagg

SEQ ID NO: 309239 - DNA, 120 bp, Artificial Sequence
  ENSG00000134245_65 (sequence is synthesized)
agaagaacacctcatgaaaacagtctacctatagtcaggacttccccaaggcagactttattttttggtccatcgatcttggctctcactgttctccctgcttcccacccccaactgcct

SEQ ID NO: 309240 - DNA, 120 bp, Artificial Sequence
  ENSG00000134245_66 (sequence is synthesized)
ctgcatgtgggctcagaagtcatcatctaaagaattccattgctcacctcctgcatagcagcacagccccatgaggccacacaccagatggaggggataaaagtacgaggtcatggcttc

SEQ ID NO: 309241 - DNA, 120 bp, Artificial Sequence
  ENSG00000134245_67 (sequence is synthesized)
ttgcaagaggctttttcttaaactaaccctgactcctggaaaagaggcagagcaggagagtgttgaatgagctgctgatgacagcagcttcataggtcttgtgtataaaggaaggaaaaa

SEQ ID NO: 309242 - DNA, 120 bp, Artificial Sequence
  ENSG00000134245_68 (sequence is synthesized)
gctaacttggctttccgtggaaatttacctactcccattttcaggtctactcctggtctcacatctacttcttgaaggtgtctaagtagaatgcagagattgtcaagctagagggttaac

SEQ ID NO: 309243 - DNA, 120 bp, Artificial Sequence
  ENSG00000134245_69 (sequence is synthesized)
tccttcccaattgtagggatctattcagcaggctgccacacacatgctgaggtggaggccaaccctgaacacatgcgctgcttctttaggaatgtaactatgaagtaaaaggaaacagta

SEQ ID NO: 309244 - DNA, 120 bp, Artificial Sequence
  ENSG00000134245_70 (sequence is synthesized)
aggaaggtgaactggaactctggggaaactgaaaaggtcatcaataggccttcaaaatatttgtgtgtaataagtagacacaagaggctggaggaagatgatcattcctagaataattat

SEQ ID NO: 309245 - DNA, 120 bp, Artificial Sequence
  ENSG00000134245_71 (sequence is synthesized)
gcttactgggtgacaatatacagaagcaacaattacaataaaatgaaacagtttaatggactaggaagcagaagtctgagaataaaggaattaggttaatgagattaagcagagatggca

SEQ ID NO: 309246 - DNA, 120 bp, Artificial Sequence
  ENSG00000134245_72 (sequence is synthesized)
ttccacaggaggtgacttttgagttgaatttttaaaagatagctttatgtgttttatgaactgactgagggcagtcagaagaaggcattctaaatagagggaactggtatgtgctgaaac

SEQ ID NO: 309247 - DNA, 120 bp, Artificial Sequence
  ENSG00000134245_73 (sequence is synthesized)
ttagaagcaggaatgtacaagcaatatataaggaatttcaagcaagtacacattatatacactggggaatacagagaaattagaatgctgagatcagggcttaaataatgtgaggtgact

SEQ ID NO: 309248 - DNA, 120 bp, Artificial Sequence
  ENSG00000134245_74 (sequence is synthesized)
gtgtgcacctagactgtcaaatggttcagcatcccctatagagccacatagtatcttgatttatgtcagtaaacatcagggcacctatggaaaagcacaaggatgagtccatttgttaca

SEQ ID NO: 309249 - DNA, 120 bp, Artificial Sequence
  ENSG00000134245_75 (sequence is synthesized)
gacccagggactaacagagatctacactgtaaagttcaacaaaatgctacatatcattaactacagctccttatcatttgagattctgggctaagtaagagatatcaaatatcctatcca

SEQ ID NO: 309250 - DNA, 120 bp, Artificial Sequence
  ENSG00000134245_76 (sequence is synthesized)
gtactgtgatacattaatgtaggcttacaggcccagaacctggcataaatcaagccaaacccttaagaaattagaatgtgaaaagaaaataatttaaaatagaaaatacatgctgctttt

SEQ ID NO: 309251 - DNA, 120 bp, Artificial Sequence
  ENSG00000134245_77 (sequence is synthesized)
cctcactcccaaacttaaaacttgactggtcctacatattctacttggtatattgaatttttgcagctagcagatttatcgtatctgaggccatagtgaatagaagagctgcaaaagagc

SEQ ID NO: 309252 - DNA, 120 bp, Artificial Sequence
  ENSG00000134245_78 (sequence is synthesized)
tttagagactgcaaaaccagctcactaataaatgaggaactttattctaatttactaccaggggctgaagtagcagccaaagaaggagacaaattctaacttcatgatctctagttaggt

SEQ ID NO: 309253 - DNA, 120 bp, Artificial Sequence
  ENSG00000134245_79 (sequence is synthesized)
gtctattttcctgcatttgctaaaggtaaaaatcgctacttatggggcttttgtcatacttcttaaccaaacttccctaacttctgaggataaaaaccataagggcaatcttattcttcc

SEQ ID NO: 309254 - DNA, 120 bp, Artificial Sequence
  ENSG00000134245_80 (sequence is synthesized)
aaagcagttccctggtgccactttcagaaacagagtattgaactatgggtctgacccagtgtggcactgagtgtgtgtgtgtttgtgtgtttgtgtgtgtgtgtacactgaataagccaa

SEQ ID NO: 309255 - DNA, 120 bp, Artificial Sequence
  ENSG00000134245_81 (sequence is synthesized)
aacgtgtgccatattctaggtttctgctttacttaactggcaaaatttggtgctgtaagggaggcagccacaaaaccagtgatagcatttgttagtatcatcttagttctcttccctccc

SEQ ID NO: 309256 - DNA, 120 bp, Artificial Sequence
  ENSG00000134245_82 (sequence is synthesized)
ctaggtagtttataaagggtgatttctgaaacccttcacaaaagaaaagctcaagggtttacattcaactgtgacagcactatgaattcattaagaagcatgtttcaggttgcactgtaa

SEQ ID NO: 309257 - DNA, 120 bp, Artificial Sequence
  ENSG00000134245_83 (sequence is synthesized)
tttccctatgtaatacaaacccatggaatctgacataagctgattgctcatgctggttgttttatttacatttctgaatggaaaggatttcaatactcataaaatatctaactggcttat

SEQ ID NO: 309258 - DNA, 120 bp, Artificial Sequence
  ENSG00000134245_84 (sequence is synthesized)
ttttcatctgttctcccagagaagctattataagataggcatagagacagaagtctcaacttgtataactggttaagcaaccagggaaatgttattgctcaaaatgcaattttaaaaaat

SEQ ID NO: 309259 - DNA, 120 bp, Artificial Sequence
  ENSG00000134245_85 (sequence is synthesized)
ccagggaaatgttattgctcaaaatgcaattttaaaaaattcaatatggaacttgaggccaaaaaaacagaaggttactctcaatgccatccaaaagataaaagttaaaaaaaaaaaaaa

SEQ ID NO: 309260 - DNA, 120 bp, Artificial Sequence
  ENSG00000134245_86 (sequence is synthesized)
atggaggtggtaccttcacaggagctcagtggaactggggtttacttacatcttttttctgggaacctaatgttagcagacacagttgctagtttgaacaggaatgcagatgaatggatg

SEQ ID NO: 309261 - DNA, 120 bp, Artificial Sequence
  ENSG00000134245_87 (sequence is synthesized)
aaagtgggctccctaccacccagaaatatgaatgtgcctccttaccaatatgctacaaatcagacctctgaattagaagatgccatcatgcaactaacttactatctggagatgtgtatt

SEQ ID NO: 309262 - DNA, 120 bp, Artificial Sequence
  ENSG00000134245_88 (sequence is synthesized)
ttgttaacctaggcaaagaataacaatttctgcttattccagtaggtgtgacaagctcagagaagtgagcgacaagctagagaagtaataattaccaataaagtaaattccaaagccgaa

SEQ ID NO: 309263 - DNA, 120 bp, Artificial Sequence
  ENSG00000134245_89 (sequence is synthesized)
tgggttagggagaggggacagaatctcttcaaggtctggatgctaaacgtaccccttccttattccctcccaatgcagaaaaaggtctgggatgttctgacagggccatctctgccttgc

SEQ ID NO: 309264 - DNA, 120 bp, Artificial Sequence
  ENSG00000134245_90 (sequence is synthesized)
aacagagaacagaaaccacctcacagcattgttgtgagccttaaatgagcaaatttaagacttaaaactggtcattgacataagccttcaaaaagtgatagctattagtattatgtagct

SEQ ID NO: 309265 - DNA, 120 bp, Artificial Sequence
  ENSG00000134245_91 (sequence is synthesized)
cctagaacagtggctgacatatagtagatgctcataactgttaaaaaggggccaggaggattctatctatttatgcattcatccatttaattatgcttcagaaatgtcttgctcttttta

SEQ ID NO: 309266 - DNA, 120 bp, Artificial Sequence
  ENSG00000134245_92 (sequence is synthesized)
tactgtcgatgctgtaaaatacaaaacccataataagccaagtaagcaagcaagagccagcactctgggaggaaaacaaagagattttcttcattgaaatatccatgccacagttcctac

SEQ ID NO: 309267 - DNA, 120 bp, Artificial Sequence
  ENSG00000134245_93 (sequence is synthesized)
taggtgccaggcactgtgataggcactaggatagagaaataagttacaggcctttagggattttaggtgctggtgggagagacaaacatgaaacgcagtgttatgtggattataataaat

SEQ ID NO: 309268 - DNA, 120 bp, Artificial Sequence
  ENSG00000134245_94 (sequence is synthesized)
agagcaacaagctgtggctgcacagttaacccccagtggagtcaggaaaggtctcacagaggaagggacacttgtcttggtcttgaaggagaggtagatgctcccaggtgaagaagagaa

SEQ ID NO: 309269 - DNA, 120 bp, Artificial Sequence
  ENSG00000134245_95 (sequence is synthesized)
tgaagggcattccaaggaatgaggatagcatatacagtgcaccaagttgccagcaggcaccgtgtttctggtgagaagcctgggatggaagtctagatcaggagaagtaagcaggaactc

SEQ ID NO: 309270 - DNA, 120 bp, Artificial Sequence
  ENSG00000134245_96 (sequence is synthesized)
gacaggaaagggcatggtctgcccaggcaaagaatttgtgcccttatttggtgggccactggaagcctgaattgaggagcatcatgagcacaggcacatttaccaagaagctaatgaggt

SEQ ID NO: 309271 - DNA, 120 bp, Artificial Sequence
  ENSG00000134245_97 (sequence is synthesized)
ttaagcttcgaggcccatcactggcatggccccttccaaaccctgaagagcccaagcaatgtggttgtaaaatttgcaaaataagattaaatcttaactgcaatctgttaacactgctgt

SEQ ID NO: 309272 - DNA, 120 bp, Artificial Sequence
  ENSG00000134247_0 (sequence is synthesized)
cccttctgctttcgggaagcggtcggggctgcacactcggatcggcggggccggctcccgggcccggccggctggaggagggagggaaggaggcgggagggagcgagcggagccaggggc

SEQ ID NO: 309273 - DNA, 120 bp, Artificial Sequence
  ENSG00000134247_1 (sequence is synthesized)
gcacgtacgccccagcgctgggatttatcggctcgcgaggagagcggagcaggcgcgcggcccaggcggaggagcgccgactctggagcagccggagctggaagaggaggaggaggagag

SEQ ID NO: 309274 - DNA, 120 bp, Artificial Sequence
  ENSG00000134247_2 (sequence is synthesized)
gcggcggggaaggaggaggagggggagagtcgctcccgccgggcgagcatggggcgcctggcctcgaggccgctgctgctggcgctcctgtcgttggctctttgccgagggcgtgtggtg

SEQ ID NO: 309275 - DNA, 120 bp, Artificial Sequence
  ENSG00000134247_3 (sequence is synthesized)
agagtccccacagcgaccctggttcgagtggtgggcactgagctggtcatcccctgcaacgtcagtgactatgatggccccagcgagcaaaactttgactggagcttctcatctttgggg

SEQ ID NO: 309276 - DNA, 120 bp, Artificial Sequence
  ENSG00000134247_4 (sequence is synthesized)
agcagctttgtggagcttgcaagcacctgggaggtggggttcccagcccagctgtaccaggagcggctgcagaggggcgagatcctgttaaggcggactgccaacgacgccgtggagctc

SEQ ID NO: 309277 - DNA, 120 bp, Artificial Sequence
  ENSG00000134247_5 (sequence is synthesized)
cacataaagaacgtccagccttcagaccaaggccactacaaatgttcaacccccagcacagatgccactgtccagggaaactatgaggacacagtgcaggttaaagtgctggccgactcc

SEQ ID NO: 309278 - DNA, 120 bp, Artificial Sequence
  ENSG00000134247_6 (sequence is synthesized)
ttaaagtgctggccgactccctgcacgtgggccccagcgcgcggcccccgccgagcctgagcctgcgggagggggagcccttcgagctgcgctgcaccgccgcctccgcctcgccgctgc

SEQ ID NO: 309279 - DNA, 120 bp, Artificial Sequence
  ENSG00000134247_7 (sequence is synthesized)
tgggaggtgcaccgcggcccggccaggcggagcgtcctcgccctgacccacgagggcaggttccacccgggcctggggtacgagcagcgctaccacagtggggacgtgcgcctcgacacc

SEQ ID NO: 309280 - DNA, 120 bp, Artificial Sequence
  ENSG00000134247_8 (sequence is synthesized)
gtgggcagcgacgcctaccgcctctcagtgtcccgggctctgtctgccgaccagggctcctacaggtgtatcgtcagcgagtggatcgccgagcagggcaactggcaggaaatccaagaa

SEQ ID NO: 309281 - DNA, 120 bp, Artificial Sequence
  ENSG00000134247_9 (sequence is synthesized)
aaggccgtggaagttgccaccgtggtgatccagccatcagttctgcgagcagctgtgcccaagaatgtgtctgtggctgaaggaaaggaactggacctgacctgtaacatcacaacagac

SEQ ID NO: 309282 - DNA, 120 bp, Artificial Sequence
  ENSG00000134247_10 (sequence is synthesized)
cgagccgatgacgtccggcccgaggtgacgtggtccttcagcaggatgcctgacagcaccctacctggctcccgcgtgttggcgcggcttgaccgtgattccctggtgcacagctcgcct

SEQ ID NO: 309283 - DNA, 120 bp, Artificial Sequence
  ENSG00000134247_11 (sequence is synthesized)
catgttgctttgagtcatgtggatgcacgctcctaccatttactggttcgggatgttagcaaagaaaactctggctactattactgccacgtgtccctgtgggcacccggacacaacagg

SEQ ID NO: 309284 - DNA, 120 bp, Artificial Sequence
  ENSG00000134247_12 (sequence is synthesized)
agctggcacaaagtggcagaggccgtgtcttccccagctggtgtgggtgtgacctggctagaaccagactaccaggtgtacctgaatgcttccaaggtccccgggtttgcggatgacccc

SEQ ID NO: 309285 - DNA, 120 bp, Artificial Sequence
  ENSG00000134247_13 (sequence is synthesized)
acagagctggcatgccgggtggtggacacgaagagtggggaggcgaatgtccgattcacggtttcgtggtactacaggatgaaccggcgcagcgacaatgtggtgaccagcgagctgctt

SEQ ID NO: 309286 - DNA, 120 bp, Artificial Sequence
  ENSG00000134247_14 (sequence is synthesized)
gcagtcatggacggggactggacgctaaaatatggagagaggagcaagcagcgggcccaggatggagactttattttttctaaggaacatacagacacgttcaatttccggatccaaagg

SEQ ID NO: 309287 - DNA, 120 bp, Artificial Sequence
  ENSG00000134247_15 (sequence is synthesized)
actacagaggaagacagaggcaattattactgtgttgtgtctgcctggaccaaacagcggaacaacagctgggtgaaaagcaaggatgtcttctccaagcctgttaacatattttgggca

SEQ ID NO: 309288 - DNA, 120 bp, Artificial Sequence
  ENSG00000134247_16 (sequence is synthesized)
ttagaagattccgtgcttgtggtgaaggcgaggcagccaaagcctttctttgctgccggaaatacatttgagatgacttgcaaagtatcttccaagaatattaagtcgccacgctactct

SEQ ID NO: 309289 - DNA, 120 bp, Artificial Sequence
  ENSG00000134247_17 (sequence is synthesized)
gttctcatcatggctgagaagcctgtcggcgacctctccagtcccaatgaaacgaagtacatcatctctctggaccaggattctgtggtgaagctggagaattggacagatgcatcacgg

SEQ ID NO: 309290 - DNA, 120 bp, Artificial Sequence
  ENSG00000134247_18 (sequence is synthesized)
gtggatggcgttgttttagaaaaagtgcaggaggatgagttccgctatcgaatgtaccagactcaggtctcagacgcagggctgtaccgctgcatggtgacagcctggtctcctgtcagg

SEQ ID NO: 309291 - DNA, 120 bp, Artificial Sequence
  ENSG00000134247_19 (sequence is synthesized)
ggcagcctttggcgagaagcagcaaccagtctctccaatcctattgagatagacttccaaacctcaggtcctatatttaatgcttctgtgcattcagacacaccatcagtaattcgggga

SEQ ID NO: 309292 - DNA, 120 bp, Artificial Sequence
  ENSG00000134247_20 (sequence is synthesized)
gatctgatcaaattgttctgtatcatcactgtcgagggagcagcactggatccagatgacatggcctttgatgtgtcctggtttgcggtgcactcttttggcctggacaaggctcctgtg

SEQ ID NO: 309293 - DNA, 120 bp, Artificial Sequence
  ENSG00000134247_21 (sequence is synthesized)
ctcctgtcttccctggatcggaagggcatcgtgaccacctcccggagggactggaagagcgacctcagcctggagcgcgtgagtgtgctggaattcttgctgcaagtgcatggctccgag

SEQ ID NO: 309294 - DNA, 120 bp, Artificial Sequence
  ENSG00000134247_22 (sequence is synthesized)
gaccaggactttggcaactactactgttccgtgactccatgggtgaagtcaccaacaggttcctggcagaaggaggcagagatccactccaagcccgtttttataactgtgaagatggat

SEQ ID NO: 309295 - DNA, 120 bp, Artificial Sequence
  ENSG00000134247_23 (sequence is synthesized)
gtgctgaacgccttcaagtatcccttgctgatcggcgtcggtctgtccacggtcatcgggctcctgtcctgtctcatcgggtactgcagctcccactggtgttgtaagaaggaggttcag

SEQ ID NO: 309296 - DNA, 120 bp, Artificial Sequence
  ENSG00000134247_24 (sequence is synthesized)
gagacacggcgcgagcgccgcaggctcatgtcgatggagatggactaggctggcccgggaggggagtgacagagggacgttctaggagcaattggggcaagaagaggacagtgatatttt

SEQ ID NO: 309297 - DNA, 120 bp, Artificial Sequence
  ENSG00000134247_25 (sequence is synthesized)
aaaacaaagtgtgttacactaaaaaccagtcctctctaatctcaggtgggacttggcgctctctcttttctgcatgtcaagttctgagcgcggacatgtttaccagcacacggctcttct

SEQ ID NO: 309298 - DNA, 120 bp, Artificial Sequence
  ENSG00000134247_26 (sequence is synthesized)
ctaattttttttctcccactggtttatagatcctctgacttgtgtgtgtttatagcttttgtttcgcggggttgtggtgaggaaggggtgatggcatgcggagttctttatcttcagtga

SEQ ID NO: 309299 - DNA, 120 bp, Artificial Sequence
  ENSG00000134247_27 (sequence is synthesized)
gaatgtgcctgcccgcctgagagccagcttccgcgttggaggcacgtgttcagagagctgctgagcgccaccctctacccggctgacagacaacacagacctgtgccgaaggctaatttg

SEQ ID NO: 309300 - DNA, 120 bp, Artificial Sequence
  ENSG00000134247_28 (sequence is synthesized)
tggcttttacgaccctaccccaccccctgttttcaggggtttagactacatttgaaatccaaacttggagtatataacttcttattgagcccaactgctttttttttttttttttttgct

SEQ ID NO: 309301 - DNA, 120 bp, Artificial Sequence
  ENSG00000134247_29 (sequence is synthesized)
tctctgccccttttccatttcttttgtatttgttttctgtgagagcactgaaatggcagccctggaatctacaatttggctctccactgagcaccttatcttgccaccttagccttaaga

SEQ ID NO: 309302 - DNA, 120 bp, Artificial Sequence
  ENSG00000134247_30 (sequence is synthesized)
atgaatatgaagaaaaatacacagccacctctgtccagggcagtaagaagggctgcaaggaaggggaggatggggacaaggaaaggatcagatacctgctccagtagttgtgaggccact

SEQ ID NO: 309303 - DNA, 120 bp, Artificial Sequence
  ENSG00000134247_31 (sequence is synthesized)
gtgtctcaggggactccaggaggagcagaagagggatcccacgaagttattcttacgcagctggggccaggagggtcagagtggtgccaggtgcaagttaggctaaagaagccaccacta

SEQ ID NO: 309304 - DNA, 120 bp, Artificial Sequence
  ENSG00000134247_32 (sequence is synthesized)
ttcctctctcttgcccattgtggggggcaaaggcattggtcaccaagagtcttgcagggggacccacagatatgccatgtccttcacacgtgcttgggctccttaacctgaaggcaaatt

SEQ ID NO: 309305 - DNA, 120 bp, Artificial Sequence
  ENSG00000134247_33 (sequence is synthesized)
gctacttgcaagactgactgacttcaaggaatcagaaattacctagaagcaccatgttttttctatgaccttttcagtccttcaggtcattttaaggtccactgcagggggttagtgaga

SEQ ID NO: 309306 - DNA, 120 bp, Artificial Sequence
  ENSG00000134247_34 (sequence is synthesized)
aagggtatactttgtggtatgttttgctttcctaatagggacatgaaggaaacccagcaatttgctgttatgtgaatggcctgtagagcagagtcaagagcggtgtgctttgcccgactg

SEQ ID NO: 309307 - DNA, 120 bp, Artificial Sequence
  ENSG00000134247_35 (sequence is synthesized)
ctcccatcaggaataggagagtagacagagatcttccacatcccaggcttctgctgctgctttaaaagctctgtccttggagcctcccgctccctgaagtgtctcgccccctgcacagca

SEQ ID NO: 309308 - DNA, 120 bp, Artificial Sequence
  ENSG00000134247_36 (sequence is synthesized)
ctggcctttcggaagcatcccagtagggttttctgaggctcgctggtgactcatgccctaattgcaatcctctgcttttatcttgactttgaaggatctaacactgctctctcttccaaa

SEQ ID NO: 309309 - DNA, 120 bp, Artificial Sequence
  ENSG00000134247_37 (sequence is synthesized)
ggggaaaaaaagattcatttgttttgagcaataaactaatacaaaatgatggccattcatgtgcagctctttgtcaccatgggccggatgagttgtgctcctcctggctcaccatttccc

SEQ ID NO: 309310 - DNA, 120 bp, Artificial Sequence
  ENSG00000134247_38 (sequence is synthesized)
cctgctcccccacagccggttctgcacttatcaccgagtcgcccctggaagcagattcccattgagttttccccaccaaggggaccatgcacatggtagaaacattagattctgcattga

SEQ ID NO: 309311 - DNA, 120 bp, Artificial Sequence
  ENSG00000134247_39 (sequence is synthesized)
cagtagcctttccttggcccgggcctgtggtgggaagacgggcaacaagtataccccaccagggcctgagtgactagaggaagaggacgaggccttgttggcactagatttgggtatttt

SEQ ID NO: 309312 - DNA, 120 bp, Artificial Sequence
  ENSG00000134247_40 (sequence is synthesized)
ctgcatgtcataacatatcctaactgctatttcagaagaggcagcttgtaggtgattgtacaagtgagaattaaagagagaacagatatttaaacaggtgctgtattagtaacagccagt

SEQ ID NO: 309313 - DNA, 120 bp, Artificial Sequence
  ENSG00000134247_41 (sequence is synthesized)
gccctttcagcccttgcatctattaaaaggagattcaggattttattggcacaggcccttcttagtaggaagaaagggtgcttagctttggacctgaccgggtgtgtgtaaaaccatgga

SEQ ID NO: 309314 - DNA, 120 bp, Artificial Sequence
  ENSG00000134247_42 (sequence is synthesized)
ctgagtcacagcagacactcgatggtggtaaatgtgatgggtgcttacacactgtaccttttcctttcatactgatgctgcagttcagggctggagttgttaaggcattgacctccaccc

SEQ ID NO: 309315 - DNA, 120 bp, Artificial Sequence
  ENSG00000134247_43 (sequence is synthesized)
acctgccccatgtccactgggctgcccaagctgcatgtcacctgagggctggcaggaaggggcgagaaatcccagggcattgtaccaaggacctagttccttctagggatataaatttcc

SEQ ID NO: 309316 - DNA, 120 bp, Artificial Sequence
  ENSG00000134247_44 (sequence is synthesized)
aggaatgtgtatttttaatgtggtgagatgcactcttttgttgtaccaaatagggctccccaccccacccctgcgacaagtgctcttctagaacaggttcctaccagcagcactggtgtg

SEQ ID NO: 309317 - DNA, 120 bp, Artificial Sequence
  ENSG00000134247_45 (sequence is synthesized)
aatgaaagagagacccagccgcgtctcacacaggtggaattgcacttcttaacaaaaaggaactttataaaagtttgggattttttttcctaatcataaaaatagccccagaaagagcct

SEQ ID NO: 309318 - DNA, 120 bp, Artificial Sequence
  ENSG00000134247_46 (sequence is synthesized)
aagctatgttcagatagaagcctcgaaattcctgtaaattgtttactttatgatgtttacatacacgtttcactttgaaaaaaaatgcaaatcgactttttaacaactgttgagatgttt

SEQ ID NO: 309319 - DNA, 120 bp, Artificial Sequence
  ENSG00000134247_47 (sequence is synthesized)
catgggacagtagaactctgactcaccaactgggctaaattttaatttaaaaatgtatttatttgagtgtctttccccccctcaccctcaccatctgaggggctccctgagatcttggta

SEQ ID NO: 309320 - DNA, 120 bp, Artificial Sequence
  ENSG00000134247_48 (sequence is synthesized)
gaggaggcccctcctgcccagaccttcgtttgtttccccggtggcccttgcttcttgctttgcagactgcctgcagccatgattttgtcactgacatctgtgagccaaagactgagcctt

SEQ ID NO: 309321 - DNA, 120 bp, Artificial Sequence
  ENSG00000134247_49 (sequence is synthesized)
tttggcaggaataataagcaatactacacaacttgctactttcagaaaacttttttttagcttcaccgatgacaacagaggaagaagggaactgggatttgggtaagttctcctccactg

SEQ ID NO: 309322 - DNA, 120 bp, Artificial Sequence
  ENSG00000134247_50 (sequence is synthesized)
tttgaccaaattctcagtgataaatatgtgtgcagatccctagaagagaaaacgctgactttctttttaagtgtggcacataaggatctgcagaattttccgtagacaaagaaaggatct

SEQ ID NO: 309323 - DNA, 120 bp, Artificial Sequence
  ENSG00000134247_51 (sequence is synthesized)
tgtgtatttttgtccatatccaatgttatatgaactaattgtattgttttatactgtgaccacaaatattatgcaatgcaccatttgttttttatttcattaaaggaagtttaatttaaa

SEQ ID NO: 309324 - DNA, 120 bp, Artificial Sequence
  ENSG00000134247_52 (sequence is synthesized)
atatcatccgcactgtgttacacagatgtgggttagggataggattatctatttatcccctaactgcctggcccagtactttgtactcattaagtgtttaataaatacatgttgagtgga

SEQ ID NO: 309325 - DNA, 120 bp, Artificial Sequence
  ENSG00000134248_0 (sequence is synthesized)
gccacgaactgaagcactgaggcccggctgcagacctctcccgagaggggaataatccgtgccggccggttccgccatggagccaggtgcaggtcacctcgacggtcaccgcgcggggag

SEQ ID NO: 309326 - DNA, 120 bp, Artificial Sequence
  ENSG00000134248_1 (sequence is synthesized)
cccaagccttcgtcaggctctgtgcgacggaagcgcagtgatgttttccagtaaagaacgcggacgttgcaccgtgatcaattttgtccctttggaggcgccgttacggtccacgccccg

SEQ ID NO: 309327 - DNA, 120 bp, Artificial Sequence
  ENSG00000134248_2 (sequence is synthesized)
ctcgcgtcaagtgactgaggcctgtggtggagaaggacgtgccgtgccgctgggttctgagccggagtggtcggtgggtgggatggaggcgaccttggagcagcacttggaagacacaat

SEQ ID NO: 309328 - DNA, 120 bp, Artificial Sequence
  ENSG00000134248_3 (sequence is synthesized)
tgcacagattcacaaggacttaatctgggttgccgcgggaccctgtcagatgagcatgctggagtgatatctgttctagcccagcaagcagctaagctaacctctgaccccactgatatt

SEQ ID NO: 309329 - DNA, 120 bp, Artificial Sequence
  ENSG00000134248_4 (sequence is synthesized)
cctgtggtgtgtctagaatcagataatgggaacattatgatccagaaacacgatggcatcacggtggcagtgcacaaaatggcctcttgatgctcatatctgttcttcagcagcctgtca

SEQ ID NO: 309330 - DNA, 120 bp, Artificial Sequence
  ENSG00000134248_5 (sequence is synthesized)
taggaactggatcctacctatgttaattaccttatagaactactaaagttccagtagttaggccattcatttaatgtgcattaggcacttttctgtttatttaagagtcaattgctttct

SEQ ID NO: 309331 - DNA, 120 bp, Artificial Sequence
  ENSG00000134248_6 (sequence is synthesized)
aatgctctatggaccgactatcaagatattagtaagaaaggatcatgttttgaagcagcaggtccaggtcactttgtatatagaattttgctgtattcaataaatctgtttggaggaaaa

SEQ ID NO: 309332 - DNA, 120 bp, Artificial Sequence
  ENSG00000134248_7 (sequence is synthesized)
gaaggacgtgccgtgccgctgggttctgagccggagtggtcggtgggtgggatggaggcgaccttggagcagcacttggaagacacgtgagtagtgcgcgcctcttcggcctgtcctgag

SEQ ID NO: 309333 - DNA, 120 bp, Artificial Sequence
  ENSG00000134248_8 (sequence is synthesized)
gtcgcggcggaggaacttgagcggaacgaaaggcgcgagctgcgagtaccggccagggcgtctcggggacgtcgcgcgacccccgggacacgggatgagggggctaaactctacccaagg

SEQ ID NO: 309334 - DNA, 120 bp, Artificial Sequence
  ENSG00000134248_9 (sequence is synthesized)
ccgcagggcggggcgggtgacccggaattaaaatcctgccgggcaccgcacattccctcttgagcgagtctcccgggcccaggccacgggccaaaactgcctatctcgttgttgaaatcg

SEQ ID NO: 309335 - DNA, 120 bp, Artificial Sequence
  ENSG00000134248_10 (sequence is synthesized)
tctttacggtcagggtggttctgcggaagttttagaaaacgggttgacttttgggaagattgtgccagttgtgcagtgtcgagccctgcagtgtaaacaaacacgtatctcctgtgtgta

SEQ ID NO: 309336 - DNA, 120 bp, Artificial Sequence
  ENSG00000134248_11 (sequence is synthesized)
ggacgtgccgtgccgctgggttctgagccggagtggtcggtgggtgggatggaggcgaccttggagcagcacttggaagacactatctatgtaaaattcaaaactggaaaagtgtaaagg

SEQ ID NO: 309337 - DNA, 120 bp, Artificial Sequence
  ENSG00000134248_12 (sequence is synthesized)
agggtacagagagacacctgcctcccaccgatgtccctcagcttccacttaccctccaggaggtaacttgagtttttcaacagttgttttaaatgagttagtactaaaacatgcgttttt

SEQ ID NO: 309338 - DNA, 120 bp, Artificial Sequence
  ENSG00000134248_13 (sequence is synthesized)
aacaagagtgaaaacatcctagatgtttttcacgcagtgtttgtggccctccagaactcagcagtacttagcacatttttttctctcatcagagagaaactggtttatttcaattaatta

SEQ ID NO: 309339 - DNA, 62 bp, Artificial Sequence
  ENSG00000134248_14 (sequence is synthesized)
caattaattaactagaacttaaattttttgtgttctttttttgagacggaatttcgctcgtc

SEQ ID NO: 309340 - DNA, 120 bp, Artificial Sequence
  ENSG00000134248_15 (sequence is synthesized)
acaggcgtgagcaaccgcgcccggccctagaacttaatttttttcttagggtgtgacaatgaaaaaagattgagaaatattgatttaaagcacttaatgcctggtacatagaacacctgt

SEQ ID NO: 309341 - DNA, 120 bp, Artificial Sequence
  ENSG00000134248_16 (sequence is synthesized)
cctgtgttcatcagtgattccttattcagactactttgggaaaagttcttaatcttttgaatcacaggaacagacaagttgatccctaaagctaatgtgctctcaggccacaatgctatt

SEQ ID NO: 309342 - DNA, 120 bp, Artificial Sequence
  ENSG00000134248_17 (sequence is synthesized)
taaatgaagaataagaattggcagaagctatcagtttaccaacaaaaagaaagtaacaaatagcacaaaggaaaactaatcagagaataaaaattactttttttttttttctttttgagg

SEQ ID NO: 309343 - DNA, 120 bp, Artificial Sequence
  ENSG00000134249_0 (sequence is synthesized)
gcgcattgcggacgccagctagaccgagccctgggaggctacgggctcccccggaaaccctgccaggggagccgggttttgagctcaggcgcctctagcggcggcccccagaaatctgac

SEQ ID NO: 309344 - DNA, 120 bp, Artificial Sequence
  ENSG00000134249_1 (sequence is synthesized)
tcgcgaggccagagttgcagggactgaatagcaaactgaggctgagtagggaacagaccatgaggtcagtgcagatcttcctctcccaatgccgtttgctccttctactagttccgacaa

SEQ ID NO: 309345 - DNA, 120 bp, Artificial Sequence
  ENSG00000134249_2 (sequence is synthesized)
tgctccttaagtctcttggcgaagatgtaatttttcaccctgaaggggagtttgactcgtatgaagtcaccattcctgagaagctgagcttccggggagaggtgcagggtgtggtcagtc

SEQ ID NO: 309346 - DNA, 120 bp, Artificial Sequence
  ENSG00000134249_3 (sequence is synthesized)
ccgtgtcctacctactgcagttaaaaggcaagaagcacgtcctccatttgtggcccaagagacttctgttgccccgacatctgcgcgttttctccttcacagaacatggggaactgctgg

SEQ ID NO: 309347 - DNA, 120 bp, Artificial Sequence
  ENSG00000134249_4 (sequence is synthesized)
aggatcatccttacataccaaaggactgcaactacatgggctccgtgaaagagtctctggactctaaagctactataagcacatgcatggggggtctccgaggtgtatttaacattgatg

SEQ ID NO: 309348 - DNA, 120 bp, Artificial Sequence
  ENSG00000134249_5 (sequence is synthesized)
ccaaacattaccaaattgagcccctcaaggcctctcccagttttgaacatgtcgtctatctcctgaagaaagagcagtttgggaatcaggtttgtggcttaagtgatgatgaaatagaat

SEQ ID NO: 309349 - DNA, 120 bp, Artificial Sequence
  ENSG00000134249_6 (sequence is synthesized)
ggcagatggccccttatgagaataaggcgaggctaagggactttcctggatcctataaacacccaaagtacttggaattgatcctactctttgatcaaagtaggtataggtttgtgaaca

SEQ ID NO: 309350 - DNA, 120 bp, Artificial Sequence
  ENSG00000134249_7 (sequence is synthesized)
acaatctttctcaagtcatacatgatgccattcttttgactgggattatggacacctactttcaagatgttcgtatgaggatacacttaaaggctcttgaagtatggacagattttaaca

SEQ ID NO: 309351 - DNA, 120 bp, Artificial Sequence
  ENSG00000134249_8 (sequence is synthesized)
aaatacgcgttggatatccagagttagctgaagttttaggcagatttgtaatatataaaaaaagtgtattaaatgctcgcctgtcatcagattgggcacatttatatcttcaaagaaaat

SEQ ID NO: 309352 - DNA, 120 bp, Artificial Sequence
  ENSG00000134249_9 (sequence is synthesized)
ataatgatgctcttgcatggtcgtttggaaaagtgtgttctctagaatatgctggatcagtgagtactttactagatacaaatatccttgcccctgctacctggtctgctcatgagctgg

SEQ ID NO: 309353 - DNA, 120 bp, Artificial Sequence
  ENSG00000134249_10 (sequence is synthesized)
gtcatgctgtaggaatgtcacatgatgaacaatactgccaatgtaggggtaggcttaattgcatcatgggctcaggacgcactgggtttagcaattgcagttatatctctttttttaaac

SEQ ID NO: 309354 - DNA, 120 bp, Artificial Sequence
  ENSG00000134249_11 (sequence is synthesized)
atatctcttcgggagcaacatgtctaaataatatcccaggactaggttatgtgcttaagagatgtggaaacaaaattgtggaggacaatgaggaatgtgactgtggttccacagaggagt

SEQ ID NO: 309355 - DNA, 120 bp, Artificial Sequence
  ENSG00000134249_12 (sequence is synthesized)
cgtgtgtaggcaggaaggaaatgaatgtgaccttgcagagtactgcgacgggaattcaagttcctgcccaaatgacgtttataagcaggatggaaccccttgcaagtatgaaggccgttg

SEQ ID NO: 309356 - DNA, 120 bp, Artificial Sequence
  ENSG00000134249_13 (sequence is synthesized)
tttcaggaaggggtgcagatccagatatatgcagtgccaaagcatttttggacctgatgccatggaggctcctagtgagtgctatgatgcagttaacttaataggtgatcaatttggtaa

SEQ ID NO: 309357 - DNA, 120 bp, Artificial Sequence
  ENSG00000134249_14 (sequence is synthesized)
ctgtgagattacaggaattcgaaattttaaaaagtgtgaaagtgcaaattcaatatgtggcaggctacagtgtataaatgttgaaaccatccctgatttgccagagcatacgactataat

SEQ ID NO: 309358 - DNA, 120 bp, Artificial Sequence
  ENSG00000134249_15 (sequence is synthesized)
ttctactcatttacaggcagaaaatctcatgtgctggggcacaggctatcatctatccatgaaacccatgggaatacctgacctaggtatgataaatgatggcacctcctgtggagaagg

SEQ ID NO: 309359 - DNA, 120 bp, Artificial Sequence
  ENSG00000134249_16 (sequence is synthesized)
ccgggtatgttttaaaaaaaattgcgtcaatagctcagtcctgcagtttgactgtttgcctgagaaatgcaatacccggggtgtttgcaacaacagaaaaaactgccactgcatgtatgg

SEQ ID NO: 309360 - DNA, 120 bp, Artificial Sequence
  ENSG00000134249_17 (sequence is synthesized)
gtgggcacctccattctgtgaggaagtggggtatggaggaagcattgacagtgggcctccaggactgctcagaggggcgattccctcgtcaatttgggttgtgtccatcataatgtttcg

SEQ ID NO: 309361 - DNA, 120 bp, Artificial Sequence
  ENSG00000134249_18 (sequence is synthesized)
ccttattttattaatcctttcagtggtttttgtgtttttccggcaagtgataggaaaccacttaaaacccaaacaggaaaaaatgccactatccaaagcaaaaactgaacaggaagaatc

SEQ ID NO: 309362 - DNA, 120 bp, Artificial Sequence
  ENSG00000134249_19 (sequence is synthesized)
taaaacaaaaactgtacaggaagaatctaaaacaaaaactggacaggaagaatctgaagcaaaaactggacaggaagaatctaaagcaaaaactggacaggaagaatctaaagcaaacat

SEQ ID NO: 309363 - DNA, 120 bp, Artificial Sequence
  ENSG00000134249_20 (sequence is synthesized)
tgaaagtaaacgacccaaagcaaagagtgtcaagaaacaaaaaaagtaaccgggcaatccatactcattcagtaacacaggctcatttatttaaccagctaatcatttatccaaaggctt

SEQ ID NO: 309364 - DNA, 120 bp, Artificial Sequence
  ENSG00000134249_21 (sequence is synthesized)
tccattcttctcccaatatttttttactttaatttttcccacaagttttgatcagcaaataaacagcattcttgttttggaaacaaaccagtgcattctacttctcgagtgttcacttgc

SEQ ID NO: 309365 - DNA, 120 bp, Artificial Sequence
  ENSG00000134249_22 (sequence is synthesized)
ccctcagtttgtgaccaagttgtgggtattctgagaatcatgctctaatggcttttccatacactaaagctctgaaagtagtgagtttcctagaattaccatgctattcaaggtatagtc

SEQ ID NO: 309366 - DNA, 120 bp, Artificial Sequence
  ENSG00000134249_23 (sequence is synthesized)
ttgtttctcagaatcccagggaacaaagcaattgtctgcctctccctctgcctccctcaacttgatccatgtgaacatccgcacctgcacccatgctgatcaataaatgccgacaacaca

SEQ ID NO: 309367 - DNA, 120 bp, Artificial Sequence
  ENSG00000134250_0 (sequence is synthesized)
aggctgcttcgttgcacacccgagaaagtttcagccaaacttcgggcggcggctgaggcggcggccgaggagcggcggactcggggcgcggggagtcgaggcatttgcgcctgggcttcg

SEQ ID NO: 309368 - DNA, 120 bp, Artificial Sequence
  ENSG00000134250_1 (sequence is synthesized)
gagcgtagcgccagggcctgagcctttgaagcaggaggaggggaggagagagtggggctcctctatcgggaccccctccccatgtggatctgcccaggcggcggcggcggcggcggagga

SEQ ID NO: 309369 - DNA, 120 bp, Artificial Sequence
  ENSG00000134250_2 (sequence is synthesized)
ggaggcgaccgagaagatgcccgccctgcgccccgctctgctgtgggcgctgctggcgctctggctgtgctgcgcggcccccgcgcatgcattgcagtgtcgagatggctatgaaccctg

SEQ ID NO: 309370 - DNA, 120 bp, Artificial Sequence
  ENSG00000134250_3 (sequence is synthesized)
tgtaaatgaaggaatgtgtgttacctaccacaatggcacaggatactgcaaatgtccagaaggcttcttgggggaatattgtcaacatcgagacccctgtgagaagaaccgctgccagaa

SEQ ID NO: 309371 - DNA, 120 bp, Artificial Sequence
  ENSG00000134250_4 (sequence is synthesized)
tggtgggacttgtgtggcccaggccatgctggggaaagccacgtgccgatgtgcctcagggtttacaggagaggactgccagtactcaacatctcatccatgctttgtgtctcgaccctg

SEQ ID NO: 309372 - DNA, 120 bp, Artificial Sequence
  ENSG00000134250_5 (sequence is synthesized)
cctgaatggcggcacatgccatatgctcagccgggatacctatgagtgcacctgtcaagtcgggtttacaggtaaggagtgccaatggacggatgcctgcctgtctcatccctgtgcaaa

SEQ ID NO: 309373 - DNA, 120 bp, Artificial Sequence
  ENSG00000134250_6 (sequence is synthesized)
tggaagtacctgtaccactgtggccaaccagttctcctgcaaatgcctcacaggcttcacagggcagaaatgtgagactgatgtcaatgagtgtgacattccaggacactgccagcatgg

SEQ ID NO: 309374 - DNA, 120 bp, Artificial Sequence
  ENSG00000134250_7 (sequence is synthesized)
tggcacctgcctcaacctgcctggttcctaccagtgccagtgccctcagggcttcacaggccagtactgtgacagcctgtatgtgccctgtgcaccctcaccttgtgtcaatggaggcac

SEQ ID NO: 309375 - DNA, 120 bp, Artificial Sequence
  ENSG00000134250_8 (sequence is synthesized)
ctgtcggcagactggtgacttcacttttgagtgcaactgccttccaggttttgaagggagcacctgtgagaggaatattgatgactgccctaaccacaggtgtcagaatggaggggtttg

SEQ ID NO: 309376 - DNA, 120 bp, Artificial Sequence
  ENSG00000134250_9 (sequence is synthesized)
tgtggatggggtcaacacttacaactgccgctgtcccccacaatggacaggacagttctgcacagaggatgtggatgaatgcctgctgcagcccaatgcctgtcaaaatgggggcacctg

SEQ ID NO: 309377 - DNA, 120 bp, Artificial Sequence
  ENSG00000134250_10 (sequence is synthesized)
tgccaaccgcaatggaggctatggctgtgtatgtgtcaacggctggagtggagatgactgcagtgagaacattgatgattgtgccttcgcctcctgtactccaggctccacctgcatcga

SEQ ID NO: 309378 - DNA, 120 bp, Artificial Sequence
  ENSG00000134250_11 (sequence is synthesized)
ccgtgtggcctccttctcttgcatgtgcccagaggggaaggcaggtctcctgtgtcatctggatgatgcatgcatcagcaatccttgccacaagggggcactgtgtgacaccaaccccct

SEQ ID NO: 309379 - DNA, 120 bp, Artificial Sequence
  ENSG00000134250_12 (sequence is synthesized)
aaatgggcaatatatttgcacctgcccacaaggctacaaaggggctgactgcacagaagatgtggatgaatgtgccatggccaatagcaatccttgtgagcatgcaggaaaatgtgtgaa

SEQ ID NO: 309380 - DNA, 120 bp, Artificial Sequence
  ENSG00000134250_13 (sequence is synthesized)
cacggatggcgccttccactgtgagtgtctgaagggttatgcaggacctcgttgtgagatggacatcaatgagtgccattcagacccctgccagaatgatgctacctgtctggataagat

SEQ ID NO: 309381 - DNA, 120 bp, Artificial Sequence
  ENSG00000134250_14 (sequence is synthesized)
tggaggcttcacatgtctgtgcatgccaggtttcaaaggtgtgcattgtgaattagaaataaatgaatgtcagagcaacccttgtgtgaacaatgggcagtgtgtggataaagtcaatcg

SEQ ID NO: 309382 - DNA, 120 bp, Artificial Sequence
  ENSG00000134250_15 (sequence is synthesized)
tttccagtgcctgtgtcctcctggtttcactgggccagtttgccagattgatattgatgactgttccagtactccgtgtctgaatggggcaaagtgtatcgatcacccgaatggctatga

SEQ ID NO: 309383 - DNA, 120 bp, Artificial Sequence
  ENSG00000134250_16 (sequence is synthesized)
atgccagtgtgccacaggtttcactggtgtgttgtgtgaggagaacattgacaactgtgaccccgatccttgccaccatggtcagtgtcaggatggtattgattcctacacctgcatctg

SEQ ID NO: 309384 - DNA, 120 bp, Artificial Sequence
  ENSG00000134250_17 (sequence is synthesized)
caatcccgggtacatgggcgccatctgcagtgaccagattgatgaatgttacagcagcccttgcctgaacgatggtcgctgcattgacctggtcaatggctaccagtgcaactgccagcc

SEQ ID NO: 309385 - DNA, 120 bp, Artificial Sequence
  ENSG00000134250_18 (sequence is synthesized)
aggcacgtcaggggttaattgtgaaattaattttgatgactgtgcaagtaacccttgtatccatggaatctgtatggatggcattaatcgctacagttgtgtctgctcaccaggattcac

SEQ ID NO: 309386 - DNA, 120 bp, Artificial Sequence
  ENSG00000134250_19 (sequence is synthesized)
agggcagagatgtaacattgacattgatgagtgtgcctccaatccctgtcgcaagggtgcaacatgtatcaacggtgtgaatggtttccgctgtatatgccccgagggaccccatcaccc

SEQ ID NO: 309387 - DNA, 120 bp, Artificial Sequence
  ENSG00000134250_20 (sequence is synthesized)
cagctgctactcacaggtgaacgaatgcctgagcaatccctgcatccatggaaactgtactggaggtctcagtggatataagtgtctctgtgatgcaggctgggttggcatcaactgtga

SEQ ID NO: 309388 - DNA, 120 bp, Artificial Sequence
  ENSG00000134250_21 (sequence is synthesized)
agtggacaaaaatgaatgcctttcgaatccatgccagaatggaggaacttgtgacaatctggtgaatggatacaggtgtacttgcaagaagggctttaaaggctataactgccaggtgaa

SEQ ID NO: 309389 - DNA, 120 bp, Artificial Sequence
  ENSG00000134250_22 (sequence is synthesized)
tattgatgaatgtgcctcaaatccatgcctgaaccaaggaacctgctttgatgacataagtggctacacttgccactgtgtgctgccatacacaggcaagaattgtcagacagtattggc

SEQ ID NO: 309390 - DNA, 120 bp, Artificial Sequence
  ENSG00000134250_23 (sequence is synthesized)
tccctgttccccaaacccttgtgagaatgctgctgtttgcaaagagtcaccaaattttgagagttatacttgcttgtgtgctcctggctggcaaggtcagcggtgtaccattgacattga

SEQ ID NO: 309391 - DNA, 120 bp, Artificial Sequence
  ENSG00000134250_24 (sequence is synthesized)
cgagtgtatctccaagccctgcatgaaccatggtctctgccataacacccagggcagctacatgtgtgaatgtccaccaggcttcagtggtatggactgtgaggaggacattgatgactg

SEQ ID NO: 309392 - DNA, 120 bp, Artificial Sequence
  ENSG00000134250_25 (sequence is synthesized)
ccttgccaatccttgccagaatggaggttcctgtatggatggagtgaatactttctcctgcctctgccttccgggtttcactggggataagtgccagacagacatgaatgagtgtctgag

SEQ ID NO: 309393 - DNA, 120 bp, Artificial Sequence
  ENSG00000134250_26 (sequence is synthesized)
tgaaccctgtaagaatggagggacctgctctgactacgtcaacagttacacttgcaagtgccaggcaggatttgatggagtccattgtgagaacaacatcaatgagtgcactgagagctc

SEQ ID NO: 309394 - DNA, 120 bp, Artificial Sequence
  ENSG00000134250_27 (sequence is synthesized)
ctgtttcaatggtggcacatgtgttgatgggattaactccttctcttgcttgtgccctgtgggtttcactggatccttctgcctccatgagatcaatgaatgcagctctcatccatgcct

SEQ ID NO: 309395 - DNA, 120 bp, Artificial Sequence
  ENSG00000134250_28 (sequence is synthesized)
gaatgagggaacgtgtgttgatggcctgggtacctaccgctgcagctgccccctgggctacactgggaaaaactgtcagaccctggtgaatctctgcagtcggtctccatgtaaaaacaa

SEQ ID NO: 309396 - DNA, 120 bp, Artificial Sequence
  ENSG00000134250_29 (sequence is synthesized)
aggtacttgcgttcagaaaaaagcagagtcccagtgcctatgtccatctggatgggctggtgcctattgtgacgtgcccaatgtctcttgtgacatagcagcctccaggagaggtgtgct

SEQ ID NO: 309397 - DNA, 120 bp, Artificial Sequence
  ENSG00000134250_30 (sequence is synthesized)
tgttgaacacttgtgccagcactcaggtgtctgcatcaatgctggcaacacgcattactgtcagtgccccctgggctatactgggagctactgtgaggagcaactcgatgagtgtgcgtc

SEQ ID NO: 309398 - DNA, 120 bp, Artificial Sequence
  ENSG00000134250_31 (sequence is synthesized)
caacccctgccagcacggggcaacatgcagtgacttcattggtggatacagatgcgagtgtgtcccaggctatcagggtgtcaactgtgagtatgaagtggatgagtgccagaatcagcc

SEQ ID NO: 309399 - DNA, 120 bp, Artificial Sequence
  ENSG00000134250_32 (sequence is synthesized)
ctgccagaatggaggcacctgtattgaccttgtgaaccatttcaagtgctcttgcccaccaggcactcggggcctactctgtgaagagaacattgatgactgtgcccggggtccccattg

SEQ ID NO: 309400 - DNA, 120 bp, Artificial Sequence
  ENSG00000134250_33 (sequence is synthesized)
ccttaatggtggtcagtgcatggataggattggaggctacagttgtcgctgcttgcctggctttgctggggagcgttgtgagggagacatcaacgagtgcctctccaacccctgcagctc

SEQ ID NO: 309401 - DNA, 120 bp, Artificial Sequence
  ENSG00000134250_34 (sequence is synthesized)
tgagggcagcctggactgtatacagctcaccaatgactacctgtgtgtttgccgtagtgcctttactggccggcactgtgaaaccttcgtcgatgtgtgtccccagatgccctgcctgaa

SEQ ID NO: 309402 - DNA, 120 bp, Artificial Sequence
  ENSG00000134250_35 (sequence is synthesized)
tggagggacttgtgctgtggccagtaacatgcctgatggtttcatttgccgttgtcccccgggattttccggggcaaggtgccagagcagctgtggacaagtgaaatgtaggaaggggga

SEQ ID NO: 309403 - DNA, 120 bp, Artificial Sequence
  ENSG00000134250_36 (sequence is synthesized)
gcagtgtgtgcacaccgcctctggaccccgctgcttctgccccagtccccgggactgcgagtcaggctgtgccagtagcccctgccagcacgggggcagctgccaccctcagcgccagcc

SEQ ID NO: 309404 - DNA, 120 bp, Artificial Sequence
  ENSG00000134250_37 (sequence is synthesized)
tccttattactcctgccagtgtgccccaccattctcgggtagccgctgtgaactctacacggcaccccccagcacccctcctgccacctgtctgagccagtattgtgccgacaaagctcg

SEQ ID NO: 309405 - DNA, 120 bp, Artificial Sequence
  ENSG00000134250_38 (sequence is synthesized)
ggatggcgtctgtgatgaggcctgcaacagccatgcctgccagtgggatgggggtgactgttctctcaccatggagaacccctgggccaactgctcctccccacttccctgctgggatta

SEQ ID NO: 309406 - DNA, 120 bp, Artificial Sequence
  ENSG00000134250_39 (sequence is synthesized)
tatcaacaaccagtgtgatgagctgtgcaacacggtcgagtgcctgtttgacaactttgaatgccaggggaacagcaagacatgcaagtatgacaaatactgtgcagaccacttcaaaga

SEQ ID NO: 309407 - DNA, 120 bp, Artificial Sequence
  ENSG00000134250_40 (sequence is synthesized)
caaccactgtgaccaggggtgcaacagtgaggagtgtggttgggatgggctggactgtgctgctgaccaacctgagaacctggcagaaggtaccctggttattgtggtattgatgccacc

SEQ ID NO: 309408 - DNA, 120 bp, Artificial Sequence
  ENSG00000134250_41 (sequence is synthesized)
tgaacaactgctccaggatgctcgcagcttcttgcgggcactgggtaccctgctccacaccaacctgcgcattaagcgggactcccagggggaactcatggtgtacccctattatggtga

SEQ ID NO: 309409 - DNA, 120 bp, Artificial Sequence
  ENSG00000134250_42 (sequence is synthesized)
gaagtcagctgctatgaagaaacagaggatgacacgcagatcccttcctggtgaacaagaacaggaggtggctggctctaaagtctttctggaaattgacaaccgccagtgtgttcaaga

SEQ ID NO: 309410 - DNA, 120 bp, Artificial Sequence
  ENSG00000134250_43 (sequence is synthesized)
ctcagaccactgcttcaagaacacggatgcagcagcagctctcctggcctctcacgccatacaggggaccctgtcataccctcttgtgtctgtcgtcagtgaatccctgactccagaacg

SEQ ID NO: 309411 - DNA, 120 bp, Artificial Sequence
  ENSG00000134250_44 (sequence is synthesized)
cactcagctcctctatctccttgctgttgctgttgtcatcattctgtttattattctgctgggggtaatcatggcaaaacgaaagcgtaagcatggctctctctggctgcctgaaggttt

SEQ ID NO: 309412 - DNA, 120 bp, Artificial Sequence
  ENSG00000134250_45 (sequence is synthesized)
cactcttcgccgagatgcaagcaatcacaagcgtcgtgagccagtgggacaggatgctgtggggctgaaaaatctctcagtgcaagtctcagaagctaacctaattggtactggaacaag

SEQ ID NO: 309413 - DNA, 120 bp, Artificial Sequence
  ENSG00000134250_46 (sequence is synthesized)
tgaacactgggtcgatgatgaagggccccagccaaagaaagtaaaggctgaagatgaggccttactctcagaagaagatgaccccattgatcgacggccatggacacagcagcaccttga

SEQ ID NO: 309414 - DNA, 120 bp, Artificial Sequence
  ENSG00000134250_47 (sequence is synthesized)
tcgctggctctcacccctcctcaggcagagcaggaggtggatgtgttagatgtgaatgtccgtggcccagatggctgcaccccattgatgttggcttctctccgaggaggcagctcagat

SEQ ID NO: 309415 - DNA, 120 bp, Artificial Sequence
  ENSG00000134250_48 (sequence is synthesized)
ttgagtgatgaagatgaagatgcagaggactcttctgctaacatcatcacagacttggtctaccagggtgccagcctccaggcccagacagaccggactggtgagatggccctgcacctt

SEQ ID NO: 309416 - DNA, 120 bp, Artificial Sequence
  ENSG00000134250_49 (sequence is synthesized)
gcagcccgctactcacgggctgatgctgccaagcgtctcctggatgcaggtgcagatgccaatgcccaggacaacatgggccgctgtccactccatgctgcagtggcagctgatgcccaa

SEQ ID NO: 309417 - DNA, 120 bp, Artificial Sequence
  ENSG00000134250_50 (sequence is synthesized)
ggtgtcttccagattctgattcgcaaccgagtaactgatctagatgccaggatgaatgatggtactacacccctgatcctggctgcccgcctggctgtggagggaatggtggcagaactg

SEQ ID NO: 309418 - DNA, 120 bp, Artificial Sequence
  ENSG00000134250_51 (sequence is synthesized)
atcaactgccaagcggatgtgaatgcagtggatgaccatggaaaatctgctcttcactgggcagctgctgtcaataatgtggaggcaactcttttgttgttgaaaaatggggccaaccga

SEQ ID NO: 309419 - DNA, 120 bp, Artificial Sequence
  ENSG00000134250_52 (sequence is synthesized)
gacatgcaggacaacaaggaagagacacctctgtttcttgctgcccgggaggggagctatgaagcagccaagatcctgttagaccattttgccaatcgagacatcacagaccatatggat

SEQ ID NO: 309420 - DNA, 120 bp, Artificial Sequence
  ENSG00000134250_53 (sequence is synthesized)
cgtcttccccgggatgtggctcgggatcgcatgcaccatgacattgtgcgccttctggatgaatacaatgtgaccccaagccctccaggcaccgtgttgacttctgctctctcacctgtc

SEQ ID NO: 309421 - DNA, 120 bp, Artificial Sequence
  ENSG00000134250_54 (sequence is synthesized)
atctgtgggcccaacagatctttcctcagcctgaagcacaccccaatgggcaagaagtctagacggcccagtgccaagagtaccatgcctactagcctccctaaccttgccaaggaggca

SEQ ID NO: 309422 - DNA, 120 bp, Artificial Sequence
  ENSG00000134250_55 (sequence is synthesized)
aaggatgccaagggtagtaggaggaagaagtctctgagtgagaaggtccaactgtctgagagttcagtaactttatcccctgttgattccctagaatctcctcacacgtatgtttccgac

SEQ ID NO: 309423 - DNA, 120 bp, Artificial Sequence
  ENSG00000134250_56 (sequence is synthesized)
accacatcctctccaatgattacatcccctgggatcttacaggcctcacccaaccctatgttggccactgccgcccctcctgccccagtccatgcccagcatgcactatctttttctaac

SEQ ID NO: 309424 - DNA, 120 bp, Artificial Sequence
  ENSG00000134250_57 (sequence is synthesized)
cttcatgaaatgcagcctttggcacatggggccagcactgtgcttccctcagtgagccagttgctatcccaccaccacattgtgtctccaggcagtggcagtgctggaagcttgagtagg

SEQ ID NO: 309425 - DNA, 120 bp, Artificial Sequence
  ENSG00000134250_58 (sequence is synthesized)
ctccatccagtcccagtcccagcagattggatgaaccgcatggaggtgaatgagacccagtacaatgagatgtttggtatggtcctggctccagctgagggcacccatcctggcatagct

SEQ ID NO: 309426 - DNA, 120 bp, Artificial Sequence
  ENSG00000134250_59 (sequence is synthesized)
ccccagagcaggccacctgaagggaagcacataaccacccctcgggagcccttgccccccattgtgactttccagctcatccctaaaggcagtattgcccaaccagcgggggctccccag

SEQ ID NO: 309427 - DNA, 120 bp, Artificial Sequence
  ENSG00000134250_60 (sequence is synthesized)
cctcagtccacctgccctccagctgttgcgggccccctgcccaccatgtaccagattccagaaatggcccgtttgcccagtgtggctttccccactgccatgatgccccagcaggacggg

SEQ ID NO: 309428 - DNA, 120 bp, Artificial Sequence
  ENSG00000134250_61 (sequence is synthesized)
caggtagctcagaccattctcccagcctatcatcctttcccagcctctgtgggcaagtaccccacacccccttcacagcacagttatgcttcctcaaatgctgctgagcgaacacccagt

SEQ ID NO: 309429 - DNA, 120 bp, Artificial Sequence
  ENSG00000134250_62 (sequence is synthesized)
cacagtggtcacctccagggtgagcatccctacctgacaccatccccagagtctcctgaccagtggtcaagttcatcaccccactctgcttctgactggtcagatgtgaccaccagccct

SEQ ID NO: 309430 - DNA, 120 bp, Artificial Sequence
  ENSG00000134250_63 (sequence is synthesized)
acccctgggggtgctggaggaggtcagcggggacctgggacacacatgtctgagccaccacacaacaacatgcaggtttatgcgtgagagagtccacctccagtgtagagacataactga

SEQ ID NO: 309431 - DNA, 120 bp, Artificial Sequence
  ENSG00000134250_64 (sequence is synthesized)
cttttgtaaatgctgctgaggaacaaatgaaggtcatccgggagagaaatgaagaaatctctggagccagcttctagaggtaggaaagagaagatgttcttattcagataatgcaagaga

SEQ ID NO: 309432 - DNA, 120 bp, Artificial Sequence
  ENSG00000134250_65 (sequence is synthesized)
agcaattcgtcagtttcactgggtatctgcaaggcttattgattattctaatctaataagacaagtttgtggaaatgcaagatgaatacaagccttgggtccatgtttactctcttctat

SEQ ID NO: 309433 - DNA, 120 bp, Artificial Sequence
  ENSG00000134250_66 (sequence is synthesized)
ttggagaataagatggatgcttattgaagcccagacattcttgcagcttggactgcattttaagccctgcaggcttctgccatatccatgagaagattctacactagcgtcctgttggga

SEQ ID NO: 309434 - DNA, 120 bp, Artificial Sequence
  ENSG00000134250_67 (sequence is synthesized)
attatgccctggaattctgcctgaattgacctacgcatctcctcctccttggacattcttttgtcttcatttggtgcttttggttttgcacctctccgtgattgtagccctaccagcatg

SEQ ID NO: 309435 - DNA, 120 bp, Artificial Sequence
  ENSG00000134250_68 (sequence is synthesized)
ttatagggcaagacctttgtgcttttgatcattctggcccatgaaagcaactttggtctcctttcccctcctgtcttcccggtatcccttggagtctcacaaggtttactttggtatggt

SEQ ID NO: 309436 - DNA, 120 bp, Artificial Sequence
  ENSG00000134250_69 (sequence is synthesized)
tctcagcacaaacctttcaagtatgttgtttctttggaaaatggacatactgtattgtgttctcctgcatatatcattcctggagagagaaggggagaagaatacttttcttcaacaaat

SEQ ID NO: 309437 - DNA, 120 bp, Artificial Sequence
  ENSG00000134250_70 (sequence is synthesized)
tttgggggcaggagatcccttcaagaggctgcaccttaatttttcttgtctgtgtgcaggtcttcatataaactttaccaggaagaagggtgtgagtttgttgtttttctgtgtatgggc

SEQ ID NO: 309438 - DNA, 120 bp, Artificial Sequence
  ENSG00000134250_71 (sequence is synthesized)
ctggtcagtgtaaagttttatccttgatagtctagttactatgaccctccccacttttttaaaaccagaaaaaggtttggaatgttggaatgaccaagagacaagttaactcgtgcaaga

SEQ ID NO: 309439 - DNA, 120 bp, Artificial Sequence
  ENSG00000134250_72 (sequence is synthesized)
gccagttacccacccacaggtccccctacttcctgccaagcattccattgactgcctgtatggaacacatttgtcccagatctgagcattctaggcctgtttcactcactcacccagcat

SEQ ID NO: 309440 - DNA, 120 bp, Artificial Sequence
  ENSG00000134250_73 (sequence is synthesized)
atgaaactagtcttaactgttgagcctttcctttcatatccacagaagacactgtctcaaatgttgtacccttgccatttaggactgaactttccttagcccaagggacccagtgacagt

SEQ ID NO: 309441 - DNA, 120 bp, Artificial Sequence
  ENSG00000134250_74 (sequence is synthesized)
tgtcttccgtttgtcagatgatcagtctctactgattatcttgctgcttaaaggcctgctcaccaatctttctttcacaccgtgtggtccgtgttactggtatacccagtatgttctcac

SEQ ID NO: 309442 - DNA, 120 bp, Artificial Sequence
  ENSG00000134250_75 (sequence is synthesized)
tgaagacatggactttatatgttcaagtgcaggaattggaaagttggacttgttttctatgatccaaaacagccctataagaaggttggaaaaggaggaactatatagcagcctttgcta

SEQ ID NO: 309443 - DNA, 120 bp, Artificial Sequence
  ENSG00000134250_76 (sequence is synthesized)
ttttctgctaccatttcttttcctctgaagcggccatgacattccctttggcaactaacgtagaaactcaacagaacattttcctttcctagagtcaccttttagatgataatggacaac

SEQ ID NO: 309444 - DNA, 120 bp, Artificial Sequence
  ENSG00000134250_77 (sequence is synthesized)
tatagacttgctcattgttcagactgattgcccctcacctgaatccactctctgtattcatgctcttggcaatttctttgactttcttttaagggcagaagcattttagttaattgtaga

SEQ ID NO: 309445 - DNA, 120 bp, Artificial Sequence
  ENSG00000134250_78 (sequence is synthesized)
taaagaatagttttcttcctcttctccttgggccagttaataattggtccatggctacactgcaacttccgtccagtgctgtgatgcccatgacacctgcaaaataagttctgcctgggc

SEQ ID NO: 309446 - DNA, 120 bp, Artificial Sequence
  ENSG00000134250_79 (sequence is synthesized)
attttgtagatattaacaggtgaattcccgactcttttggtttgaatgacagttctcattccttctatggctgcaagtatgcatcagtgcttcccacttacctgatttgtctgtcggtgg

SEQ ID NO: 309447 - DNA, 120 bp, Artificial Sequence
  ENSG00000134250_80 (sequence is synthesized)
ccccatatggaaaccctgcgtgtctgttggcataatagtttacaaatggttttttcagtcctatccaaatttattgaaccaacaaaaataattacttctgccctgagataagcagattaa

SEQ ID NO: 309448 - DNA, 120 bp, Artificial Sequence
  ENSG00000134250_81 (sequence is synthesized)
gtttgttcattctctgctttattctctccatgtggcaacattctgtcagcctctttcatagtgtgcaaacattttatcattctaaatggtgactctctgcccttggacccatttattatt

SEQ ID NO: 309449 - DNA, 120 bp, Artificial Sequence
  ENSG00000134250_82 (sequence is synthesized)
cacagatggggagaacctatctgcatggacctctgtggaccacagcgtacctgcccctttctgccctcctgctccagccccacttctgaaagtatcagctactgatccagccactggata

SEQ ID NO: 309450 - DNA, 120 bp, Artificial Sequence
  ENSG00000134250_83 (sequence is synthesized)
ttttatatcctcccttttccttaagcacaatgtcagaccaaattgcttgtttctttttcttggactactttaatttggatcctttgggtttggagaaagggaatgtgaaagctgtcatta

SEQ ID NO: 309451 - DNA, 120 bp, Artificial Sequence
  ENSG00000134250_84 (sequence is synthesized)
cagacaacaggtttcagtgatgaggaggacaacactgcctttcaaactttttactgatctcttagattttaagaactcttgaattgtgtggtatctaataaaagggaaggtaagatggat

SEQ ID NO: 309452 - DNA, 120 bp, Artificial Sequence
  ENSG00000134250_85 (sequence is synthesized)
aatcactttctcatttgggttctgaattggagactcagtttttatgagacacatcttttatgccatgtatagatcctcccctgctatttttggtttatttttattgttataaatgctttc

SEQ ID NO: 309453 - DNA, 120 bp, Artificial Sequence
  ENSG00000134250_86 (sequence is synthesized)
tttctttgactcctcttctgcctgcctttggggataggtttttttgtttgtttatttgcttcctctgttttgttttaagcatcattttcttatgtgaggtggggaagggaaaggtatgag

SEQ ID NO: 309454 - DNA, 120 bp, Artificial Sequence
  ENSG00000134250_87 (sequence is synthesized)
ggaaagagagtctgagaattaaaatattttagtataagcaattggctgtgatgctcaaatccattgcatcctcttattgaatttgccaatttgtaatttttgcataataaagaaccaaag

SEQ ID NO: 309455 - DNA, 120 bp, Artificial Sequence
  ENSG00000134250_88 (sequence is synthesized)
gtgtaatgttttgttgagaggtggtttagggattttggccctaaccaatacattgaatgtatgatgactatttgggaggacacatttatgtacccagaggcccccactaataagtggtac

SEQ ID NO: 309456 - DNA, 120 bp, Artificial Sequence
  ENSG00000134250_89 (sequence is synthesized)
tatggttacttccttgtgtacatttctcttaaaagtgatattatatctgtttgtatgagaaacccagtaaccaataaaatgaccgcatattcctgactaaacgtagtaaggaaaatgcac

SEQ ID NO: 309457 - DNA, 120 bp, Artificial Sequence
  ENSG00000134250_90 (sequence is synthesized)
actttgtttttacttttccgtttcattctaaaggtagttaagatgaaatttatatgaaagcatttttatcacaaaataaaaaaggtttgccaagctcagtggtgttgtattttttatttt

SEQ ID NO: 309458 - DNA, 120 bp, Artificial Sequence
  ENSG00000134250_91 (sequence is synthesized)
ccaatactgcatccatggcctggcagtgttacctcatgatgtcataatttgctgagagagcaaattttcttttctttctgaatcccacaaagcctagcaccaaacttctttttttcttcc

SEQ ID NO: 309459 - DNA, 120 bp, Artificial Sequence
  ENSG00000134250_92 (sequence is synthesized)
tttaattagatcataaataaatgatcctggggaaaaagcatctgtcaaataggaaacatcacaaaactgagcactcttctgtgcactagccatagctggtgacaaacagatggttgctca

SEQ ID NO: 309460 - DNA, 120 bp, Artificial Sequence
  ENSG00000134250_93 (sequence is synthesized)
gggacaaggtgccttccaatggaaatgcgaagtagttgctatagcaagaattgggaactgggatataagtcataatattaattatgctgttatgtaaatgattggtttgtaacattcctt

SEQ ID NO: 309461 - DNA, 120 bp, Artificial Sequence
  ENSG00000134250_94 (sequence is synthesized)
tgctgttatgtaaatgattggtttgtaacattccttaagtgaaatttgtgtagaacttaatatacaggattataaaataatattttgtgtataaatttgttataagttcacattcataca

SEQ ID NO: 309462 - DNA, 120 bp, Artificial Sequence
  ENSG00000134250_95 (sequence is synthesized)
tcaacaaaatgccaagtggatcattttgactctcacagcaatccaactggacatttgaccatgccccgtggtcagtggagagcttcttctctgaaggccacttttatctagcacatcaag

SEQ ID NO: 309463 - DNA, 120 bp, Artificial Sequence
  ENSG00000134250_96 (sequence is synthesized)
gctatacacctctttcactaagaagaatttggcacttttatgttgtgagagctgagattcaccattctccaccatcctgagaagagctttgatagaagggctactcctgaggcattgcag

SEQ ID NO: 309464 - DNA, 120 bp, Artificial Sequence
  ENSG00000134250_97 (sequence is synthesized)
aggtctgtggggctgtaatgctcctccgagggctcactcctcagttgtccttcctgcctttactgactggatcttgagctttgaggaaacattgtggcctcctaagatgcaagtggtgga

SEQ ID NO: 309465 - DNA, 120 bp, Artificial Sequence
  ENSG00000134250_98 (sequence is synthesized)
cagtcatttgcctacattgtactttagtatttgaaagaaatttttttttaattgtatgtggctggaaccaggcacatagatgatggttgtctatcatttgaatgtttccaggacattagc

SEQ ID NO: 309466 - DNA, 120 bp, Artificial Sequence
  ENSG00000134250_99 (sequence is synthesized)
ccatttcaagtgctcttgcccaccaggcactcggggtatgaaatcatccttatccattttccatccagggcattgtcttaagttataaatccattcttagtgttcaggggattttataaa

SEQ ID NO: 309467 - DNA, 120 bp, Artificial Sequence
  ENSG00000134250_100 (sequence is synthesized)
attaaagataggaagactagcttcattccaagcatttagttctacatcctagtaattcaagccattttattctcccatctcttgctagctctgatgttgtggtttatgttgtcagtttta

SEQ ID NO: 309468 - DNA, 120 bp, Artificial Sequence
  ENSG00000134250_101 (sequence is synthesized)
gcactgtgttgacatatccagtataggagtgccctgggagcccatctctcatttctgaaagagatagcattgtagatctggacgtttcatcacatattcccaggaaggcccagccaaatg

SEQ ID NO: 309469 - DNA, 120 bp, Artificial Sequence
  ENSG00000134250_102 (sequence is synthesized)
cagctgctcaggagaaccaaggatatttgcttacatttataccacccttacaaggtccatactctaatatggccactttacaggcactgtgccagacattgggctaggtgctgggaattg

SEQ ID NO: 309470 - DNA, 120 bp, Artificial Sequence
  ENSG00000134250_103 (sequence is synthesized)
aaataataaactatttcctgatttctcttctctcttctggagaaagaattggattagaacaaggggacttagatatgatctgcacctagatggtaagaagattttccatattttgaagta

SEQ ID NO: 309471 - DNA, 120 bp, Artificial Sequence
  ENSG00000134250_104 (sequence is synthesized)
gaaactttctgtatgcctgaatcttgctgtcaagaatgtcttggctaatcatgaaggaagaatataagaatgtgagtaaaaacaattcaacagtccctgagaacaacgtcaataaatatt

SEQ ID NO: 309472 - DNA, 120 bp, Artificial Sequence
  ENSG00000134250_105 (sequence is synthesized)
caaaattgcataaccattttagtgactaaagcactgagactcatccaataatactgtggtttgataattacacagttgtgaatttatgatactgttaaattggggagacatcttgatgca

SEQ ID NO: 309473 - DNA, 120 bp, Artificial Sequence
  ENSG00000134250_106 (sequence is synthesized)
tacaggtcaaccctttcatacatcattatatacaaaaagtacacacctacttaggaattgaagtgtaatacctcctagcataaaatgcttaaaagaagattttaagggagtgatacagtg

SEQ ID NO: 309474 - DNA, 120 bp, Artificial Sequence
  ENSG00000134250_107 (sequence is synthesized)
aagaagattttaagggagtgatacagtgagcattcctatatgaattttcctgcttatctgaagcatagcagaagatgtgaaatttctaggtaagtttttttttttttttttttgacaggg

SEQ ID NO: 309475 - DNA, 81 bp, Artificial Sequence
  ENSG00000134250_108 (sequence is synthesized)
tttttgacagggtcttgctctgtcacccgagctgaaatgcagcagtggtaacatggttcactgcagcctcaacctcctggg

SEQ ID NO: 309476 - DNA, 90 bp, Artificial Sequence
  ENSG00000134250_109 (sequence is synthesized)
gtcttgaactcctgggctcaagccatccttctgccttgggccactgtgtccttccttaacatcaataaaattgagataatcacattcata

SEQ ID NO: 309477 - DNA, 120 bp, Artificial Sequence
  ENSG00000134250_110 (sequence is synthesized)
tgtccttccttaacatcaataaaattgagataatcacattcataaaagggcaaaactatgtcaacaagcccactgtattagtctgtcttcacagtgctgtaaagaactgcccaagactgg

SEQ ID NO: 309478 - DNA, 87 bp, Artificial Sequence
  ENSG00000134250_111 (sequence is synthesized)
ctgggtaatttataaaggaaacaggttaactgactcacagtttagcatggctgggaaggcctcaggaaacttataccttcttcataa

SEQ ID NO: 309479 - DNA, 120 bp, Artificial Sequence
  ENSG00000134250_112 (sequence is synthesized)
gaaggaaaattaatgcaggaggaactgccaaacacataaaaccatcagatctcatgaactcactcattatcaggagaacagcatgggagaaaccgcccccatgattcaattacctccacc

SEQ ID NO: 309480 - DNA, 120 bp, Artificial Sequence
  ENSG00000134250_113 (sequence is synthesized)
ataagatattgggtggggacacaggcaaactatatcgcccatattacaattacttacattactgattcccttaattagagcagaggtaattaattgggtctaggctcagtggaagggtct

SEQ ID NO: 309481 - DNA, 120 bp, Artificial Sequence
  ENSG00000134250_114 (sequence is synthesized)
ggctggttcttaattctcagagctagtttgaatcttgaggttaacttcttgccttctagaacttgtcctgtgtttggctgaactctgtgaacctttcagaaagtaggtctttattgagca

SEQ ID NO: 309482 - DNA, 120 bp, Artificial Sequence
  ENSG00000134250_115 (sequence is synthesized)
catactctgtgcaaggcaaagaaccaactactgtggagtttacaaacatgaataaggggtaagaaatgactcttgtcacatggcttacagtccagctgtgtgggccaccacagttcatat

SEQ ID NO: 309483 - DNA, 120 bp, Artificial Sequence
  ENSG00000134250_116 (sequence is synthesized)
ctttcaggatggggactggatgagaggaaagtggactcaaaattaatcccagtgctctctactttcccatatccctgtgctttatctctgttgtagttatgttatttgtatgttggcctg

SEQ ID NO: 309484 - DNA, 120 bp, Artificial Sequence
  ENSG00000134250_117 (sequence is synthesized)
cctcactgctctgtgatctccaaagaacagggactgggttttatttatttctgcattgccgcagagcctagtatgtgctttgtagagaacaggctctcaaaaaaattttaaattaaaaga

SEQ ID NO: 309485 - DNA, 120 bp, Artificial Sequence
  ENSG00000134250_118 (sequence is synthesized)
atttattcacttgtttatgtttcctagttacagtgggtcagcttgttctgtgctaacatggaagtgacaagaagctggtgtccctctacacagaggtccccacactaaatatcatcttgg

SEQ ID NO: 309486 - DNA, 120 bp, Artificial Sequence
  ENSG00000134250_119 (sequence is synthesized)
atgtgcttcacattgttgcacaaaggtacagtggagtgagactgagtaagaggacagaaatagtggggggtttgtctcagctcactaattacttatttaaccttgggcaagatacttaaa

SEQ ID NO: 309487 - DNA, 120 bp, Artificial Sequence
  ENSG00000134250_120 (sequence is synthesized)
gctctatctcagtttcttcatctgcaaaatgggtataataatgactggggtgcctatttcccacgattgttttgaggatcaaatgagataatataattaaaagtgtttttggaaggtcta

SEQ ID NO: 309488 - DNA, 120 bp, Artificial Sequence
  ENSG00000134250_121 (sequence is synthesized)
aatcactgcgcaactgcaaggcattattaaaagaaatcttccttttaattcctgcttccacaaacatctcatcacatatccttgggttcctgggttacatggagagattcgtggtgtagc

SEQ ID NO: 309489 - DNA, 120 bp, Artificial Sequence
  ENSG00000134250_122 (sequence is synthesized)
tcaatctatgtgtcatagctatcccacaatctcttcttcaacttctccaacacaccaagacattcttccagtcttgcattgttccccagtttatatagatatatatgttcctcattcagc

SEQ ID NO: 309490 - DNA, 120 bp, Artificial Sequence
  ENSG00000134250_123 (sequence is synthesized)
atttatgtaaaacatatattattgagcacttatgtgatagaaaccgaggcaaaacagaaaataaaacagagttttattttgagagttttttttacagcttatcggctctgagaggacaga

SEQ ID NO: 309491 - DNA, 120 bp, Artificial Sequence
  ENSG00000134250_124 (sequence is synthesized)
catgagaacaaataagtgcccaattctgcatttattttggaaggcagttttatgtgagtttaaatcagtaaagacatagatgtatatttttagttttgattaaaactaaaacaattggta

SEQ ID NO: 309492 - DNA, 120 bp, Artificial Sequence
  ENSG00000134250_125 (sequence is synthesized)
gatgactgccctaaccacaggtgtcagaatggaggggtttgtgtggatggggtcaacacttacaactgccgctgtcccccacaatggacagcttgacagttctgcacagaggatgtggat

SEQ ID NO: 309493 - DNA, 120 bp, Artificial Sequence
  ENSG00000134250_126 (sequence is synthesized)
tatgtgccagacactttttgtactttggattatttaatgtattcctcaataattctacaatgtagaagttcctattgccattttacacatgaggaggctgaggcaaagggagcttgcttg

SEQ ID NO: 309494 - DNA, 120 bp, Artificial Sequence
  ENSG00000134250_127 (sequence is synthesized)
ctcaaggtcatataggtaagtagtacatctaggatttacctgtaggtctctttgaatctgaagcttttcctcttaatggcctttttacttcccacattcagtaccgctacatctcactca

SEQ ID NO: 309495 - DNA, 120 bp, Artificial Sequence
  ENSG00000134250_128 (sequence is synthesized)
aagtctggaatggaaaagaacacgatgagaattagacactggaaaatatgtatgtgtggttaataaagtgctttaaactgaattgacattaacagtaggtgatcaactttcctatgtgct

SEQ ID NO: 309496 - DNA, 120 bp, Artificial Sequence
  ENSG00000134250_129 (sequence is synthesized)
tgtgcttttgcttttgatggagtaattcattgttttcttatccacctaaatgcacccagctgcccttgattttctctgggctactggccttcacaaccctctcccatgtaccctctctga

SEQ ID NO: 309497 - DNA, 120 bp, Artificial Sequence
  ENSG00000134250_130 (sequence is synthesized)
ctttggggtaaccctcccctaacttaaagctagagaattctgaaactgaggaggggatcctctgttaatcagtgagcactttttgatgagctgatagatgatatatgagagactatgcgt

SEQ ID NO: 309498 - DNA, 120 bp, Artificial Sequence
  ENSG00000134250_131 (sequence is synthesized)
ggcacaatactttgttacactcttcactgatacaagtgttctagagtgcacacacaacccaaagatagaaacaaaaagaggagcagtgtcggggagcttggggcctggtgttccatggag

SEQ ID NO: 309499 - DNA, 120 bp, Artificial Sequence
  ENSG00000134250_132 (sequence is synthesized)
agggagaaaggaacaagcctggccaattcattcaactccttataaaaatgatgaggaggctgaaaaccaagaattttgattgggaacagaatacaagcagctggagcagatgaattacta

SEQ ID NO: 309500 - DNA, 120 bp, Artificial Sequence
  ENSG00000134250_133 (sequence is synthesized)
agcaacaaagatcctgtttttatacaaatatccttagtacaaaaacaaaagaaggaaaactgtaggggggagtaatgtgctaagtaagcagaattgcctcaaaaagaagttgttctagtt

SEQ ID NO: 309501 - DNA, 120 bp, Artificial Sequence
  ENSG00000134250_134 (sequence is synthesized)
actctttcagagtgggaatcttagattctggtattgtggatatggttcacatataatgggattgtgtgttttattttggagagattaaaggtcataggttggtcctcagtataaaatcaa

SEQ ID NO: 309502 - DNA, 120 bp, Artificial Sequence
  ENSG00000134250_135 (sequence is synthesized)
agacatgtgggttctttcaaacatactggacttcctccttaggttttagttgtgttagttaatagttgaatgttgaaggagaggatgccaagggatattaaagaagttgtccagtgtaca

SEQ ID NO: 309503 - DNA, 120 bp, Artificial Sequence
  ENSG00000134250_136 (sequence is synthesized)
tggaatacagctatacaaagcattgtcacataattgaaatgaaaactttatattatttaagtcacaagaacaagctatttaattatattacttttagtttctcttttaataaagaataga

SEQ ID NO: 309504 - DNA, 120 bp, Artificial Sequence
  ENSG00000134250_137 (sequence is synthesized)
gctatcattctagatactaaataagtgttttcttaacataatattactattcactttatcttgtagaagaaataactaaaatacgtctgtcttcactcctgcatttgtttgcattttaag

SEQ ID NO: 309505 - DNA, 120 bp, Artificial Sequence
  ENSG00000134250_138 (sequence is synthesized)
ggttaaagacagaaatagaaatgtaaacaactttattttgaaaatatttcaatattgcaaatatctctgggtctgatattctagtaatctaattggctagtaattgatgttagtgtgatt

SEQ ID NO: 309506 - DNA, 120 bp, Artificial Sequence
  ENSG00000134250_139 (sequence is synthesized)
tattgttgaaggctaaatgtgtttttcagtttcaagaaaattgcttttaataattgcctagaacaagaggttgatttggcagcaagatgttgacgggaagttagagaagtcaataaagga

SEQ ID NO: 309507 - DNA, 120 bp, Artificial Sequence
  ENSG00000134250_140 (sequence is synthesized)
gtttttagctgagagagagtgattattcactcccatagcctctgcattgttatccattagccacgataagaaccttagggaattctgagagtgtgtccaggaaaggatctgtcaaactag

SEQ ID NO: 309508 - DNA, 120 bp, Artificial Sequence
  ENSG00000134250_141 (sequence is synthesized)
aatagtatctcctccttgagaaaggaaataaccaaggattccgcagctgagaggctgccagggctagtgaaatagagtaaggaaatcttggctgtctcttattctctggttgtagtttaa

SEQ ID NO: 309509 - DNA, 120 bp, Artificial Sequence
  ENSG00000134250_142 (sequence is synthesized)
cgcaagacacttatttactcactgatggtgtgtgtgtatgtgggaggggagattagcatgaggggtgggaatggggagatttgatgaagagaaaactaacatttttttggtgactcagga

SEQ ID NO: 309510 - DNA, 120 bp, Artificial Sequence
  ENSG00000134250_143 (sequence is synthesized)
actgtgccaggtacttccatgcttattagctcaattacacaaaaatcttgggaccaggtattatttttcaagtcttcccacatgaagtaactgaagtttggagatgttaagtgattcacc

SEQ ID NO: 309511 - DNA, 120 bp, Artificial Sequence
  ENSG00000134250_144 (sequence is synthesized)
caaagttgtacagctaatatgtggttaggctgggtcctgaaaccgaggcagtttattttcaaagcctttgctttgtgcatcttactgcgccacattgcactgcacatctgcttcctgaaa

SEQ ID NO: 309512 - DNA, 120 bp, Artificial Sequence
  ENSG00000134250_145 (sequence is synthesized)
gcactttgtaggtgtgtaaaacttttcgttaaatgctttaagctgtttgggttaaaaatatatgttcatgttataagaaaaccaagacactcctaattataatcaaatagtacttgttac

SEQ ID NO: 309513 - DNA, 120 bp, Artificial Sequence
  ENSG00000134250_146 (sequence is synthesized)
gtgtgtgtgtgtgtgtatatatatatggcattgtgcagatgtttaaaagtagttacatagactagttcttgcttttcagggtcccataatctaaaccagatgacttcagctttggataaa

SEQ ID NO: 309514 - DNA, 120 bp, Artificial Sequence
  ENSG00000134250_147 (sequence is synthesized)
cataatctaaaccagatgacttcagctttggataaatatatagaaggaaatttaaagagaattcaaaacaatagatgatgcagtgacactgtgaataaatgttatttatacagtttgtaa

SEQ ID NO: 309515 - DNA, 120 bp, Artificial Sequence
  ENSG00000134250_148 (sequence is synthesized)
gatttcatgctcattgttcgtatgtcccaggtggagttcagaaaatattcacttcatttccacaaagggaaatagtgcctagagatggttttcttttaaaaagtccttttcataatgcag

SEQ ID NO: 309516 - DNA, 120 bp, Artificial Sequence
  ENSG00000134250_149 (sequence is synthesized)
tgcccttccttccattgcccttcattccattgcttcccatgcttgtcaagagactaaaatgttacttatagtaatagtcactatctcaatgtaaatagcacccttatttgatgagaatta

SEQ ID NO: 309517 - DNA, 120 bp, Artificial Sequence
  ENSG00000134250_150 (sequence is synthesized)
ttatttcagttctaaaaatggggaaacaaagtcagcaggaggcaaagtagcttgttaaagtattctgcaactttcaaatggttgcttccactgcatttcacgtcttggcacttctaattg

SEQ ID NO: 309518 - DNA, 120 bp, Artificial Sequence
  ENSG00000134250_151 (sequence is synthesized)
agggttactctaaccaccctatttaaaattgtaactgtcccccacccccttaattactaaccctggtctactttttgttttctttttctgtaactcttatcttcttactatataatttat

SEQ ID NO: 309519 - DNA, 120 bp, Artificial Sequence
  ENSG00000134250_152 (sequence is synthesized)
actatataatttacttcattatgtctattgtttattgtctgtcttttccaaattctactgcctcttaccctctccagaatgaaaactagtatctttgtttttgtttactgatgtaaccca

SEQ ID NO: 309520 - DNA, 120 bp, Artificial Sequence
  ENSG00000134250_153 (sequence is synthesized)
aacacctacaaacagtgcccagtatatactaggcccgcaaatatatattggctgactgactgtatggtttagtatcatgtcatagtattgagactgtaactttggtcttctcattttctt

SEQ ID NO: 309521 - DNA, 120 bp, Artificial Sequence
  ENSG00000134250_154 (sequence is synthesized)
ctttgtattgtgcgtcctagacttagtttggcctctccttttgtccttgtatactctaatactggataagaattttggagtctttttcaactctgagtcagtgaatgccacataacttag

SEQ ID NO: 309522 - DNA, 120 bp, Artificial Sequence
  ENSG00000134250_155 (sequence is synthesized)
tgactatatttaaatggttaatttacaattttttccctgcaaaggatactgtagtcactgtgagtattttagtattattgtaggactcaagagggaattaaaactacaaaaatgactcgt

SEQ ID NO: 309523 - DNA, 120 bp, Artificial Sequence
  ENSG00000134250_156 (sequence is synthesized)
cttgtatgacacagaaagaaatgtttcttcacagagggaggagaaaaatatcttcaagagagaactaattgaatcaaatcaatgaaccatgtctcatctttttggataagtaactgttag

SEQ ID NO: 309524 - DNA, 120 bp, Artificial Sequence
  ENSG00000134250_157 (sequence is synthesized)
taatccagacacttcatgagctttcattatgtaaagtctttagcagaagctaaaggaggggcaccaaccacagtaattttaacttaagaacaaaatggagcatgaaaataaattattaaa

SEQ ID NO: 309525 - DNA, 120 bp, Artificial Sequence
  ENSG00000134250_158 (sequence is synthesized)
tcatttactcccactatttttgggttagggccaataatggggagagaaagaggtagactagttttgtgtttgtggctattttaatagagtagcacaagtaatcaaaaaacagtaggctgt

SEQ ID NO: 309526 - DNA, 120 bp, Artificial Sequence
  ENSG00000134250_159 (sequence is synthesized)
tttgaatttactggctgtcccttatgagttcacagttagattggactgtcctcaatgtactttcttttttttctttctttcccacatctctttatttctctgattttgtttaaacttcat

SEQ ID NO: 309527 - DNA, 120 bp, Artificial Sequence
  ENSG00000134250_160 (sequence is synthesized)
aaagagctctctgatctttcctttccaaacaatgaaggtttatcctttgtaaactacctctgtactccacaggctgatgatatatgatatccctatatcattaaagtaaagcctaagcac

SEQ ID NO: 309528 - DNA, 120 bp, Artificial Sequence
  ENSG00000134250_161 (sequence is synthesized)
gcacctgtcaagtcgggtttacaggtaactaatgagaccaaagccagtggtttcctaccttcagcagatacctttatttagcatcttttagatcatggtgtctggctcttaaatgtcccc

SEQ ID NO: 309529 - DNA, 120 bp, Artificial Sequence
  ENSG00000134250_162 (sequence is synthesized)
acatattcccaggaaggcccagccaaatgcagctggtaagttgctgaatgtggaattcctcttggccttccaactccttgcactcttccttctgggactactttggtttttcagtttatt

SEQ ID NO: 309530 - DNA, 120 bp, Artificial Sequence
  ENSG00000134250_163 (sequence is synthesized)
gggaaaggtggcgggggaagagtgtcaattgggggaacaattttcattatgtagccctctattttttcaggactgttgaggtcaaagttgccctctaaatgaatctaatgctgacattga

SEQ ID NO: 309531 - DNA, 120 bp, Artificial Sequence
  ENSG00000134253_0 (sequence is synthesized)
gccagagcccgcgggcgtcccgggccgaggcgcgggagaggcggtggacaccgagaagcccgccggcggcttgcaattccctcacccggcgcgcgcctttcgcagagggaaggagcaaga

SEQ ID NO: 309532 - DNA, 120 bp, Artificial Sequence
  ENSG00000134253_1 (sequence is synthesized)
gggcccctacctcatcgtgcgcgggtggggtcggcgcttgtcgcgtgtggcgcgcagtggggcgggcggcgggaggggggtggcagtggagggagcgagaggtgcaggggtgactttgtt

SEQ ID NO: 309533 - DNA, 120 bp, Artificial Sequence
  ENSG00000134253_2 (sequence is synthesized)
ggcagcaggactagctggagagctagacctggaagcgcatccggggaggacttgcggggcagaggagggcgtgggcgtgtctggtgtgggatgcagtggaaaggagggggccctcctgag

SEQ ID NO: 309534 - DNA, 120 bp, Artificial Sequence
  ENSG00000134253_3 (sequence is synthesized)
tagatctgtgggtgattccttcgaggacgcctcgtcttcccgtctgcccttttatttgtcagcgagggagtccccatggtctctgttcaagttctggagactttctctttgggtgggctt

SEQ ID NO: 309535 - DNA, 120 bp, Artificial Sequence
  ENSG00000134253_4 (sequence is synthesized)
aatcacctgctactaaatcgtagaactgcccagggccctttctaatattggtcacaaacgtgaggagtatgtcagaaaacagaaaaccgctgctgggctttgtaagcaaactcactagtg

SEQ ID NO: 309536 - DNA, 120 bp, Artificial Sequence
  ENSG00000134253_5 (sequence is synthesized)
ggactgcacttgggaactcaggcaagactcactgccccctgtgcttggggcttttcaaagcccccaggctcttgccttgtttgcatacagtttgcaccacgtgtctggagcagctggagc

SEQ ID NO: 309537 - DNA, 120 bp, Artificial Sequence
  ENSG00000134253_6 (sequence is synthesized)
ccttctcagtagtggacatccgagggggagactctgacacaagctctgaggggtcaatattccaggaactcaagccacgaagtctgcagtcgcagatcggcatcctttgtcctgtatgtg

SEQ ID NO: 309538 - DNA, 120 bp, Artificial Sequence
  ENSG00000134253_7 (sequence is synthesized)
atgctcaggtggacctgcccatgggtggagtgaaggctttaaccatagaccacctggccgtgaatgatgtgatgctggagagcctacgtggggaaggccagggcctggtgtgtgacctgt

SEQ ID NO: 309539 - DNA, 120 bp, Artificial Sequence
  ENSG00000134253_8 (sequence is synthesized)
gcaacgacagggaagtagagaagaggtgtcagacctgcaaagccaacctctgccacttctgctgccaggctcataggcggcagaagaaaacgacttaccacaccatggtggacctaaaag

SEQ ID NO: 309540 - DNA, 120 bp, Artificial Sequence
  ENSG00000134253_9 (sequence is synthesized)
acttgaaaggctacagccggattgggaagcccatcctgtgtcctgttcaccctgcagaggaactgaggctgttctgtgagttctgtgaccggcccgtgtgccaggattgtgtggtggggg

SEQ ID NO: 309541 - DNA, 120 bp, Artificial Sequence
  ENSG00000134253_10 (sequence is synthesized)
agcatcgggaacacccctgtgacttcaccagcaatgtcatccacaagcatggggactctgtgtgggagctcctcaaaggtactcagccccacgtggaggccctggaggaagccctggctc

SEQ ID NO: 309542 - DNA, 120 bp, Artificial Sequence
  ENSG00000134253_11 (sequence is synthesized)
agatccacataataaacagtgccctccagaagcgagtggaggcagtggcagctgatgtccggacattctcggagggctacattaaggccattgaggagcatcgggacaagctgctgaagc

SEQ ID NO: 309543 - DNA, 120 bp, Artificial Sequence
  ENSG00000134253_12 (sequence is synthesized)
agctggaagacatacgggcccagaaggaaaattccctgcagctgcagaaggcccagctggaacagttactggcagacatgcggactggagtggagttcaccgagcacttgctgaccagcg

SEQ ID NO: 309544 - DNA, 120 bp, Artificial Sequence
  ENSG00000134253_13 (sequence is synthesized)
gctcagacttggagatcctcatcaccaagagggtggtggtagaacggctcaggaagctgaacaaagttcaatatagcacccgtcctggagtaaatgataagatacgcttctgtcctcagg

SEQ ID NO: 309545 - DNA, 120 bp, Artificial Sequence
  ENSG00000134253_14 (sequence is synthesized)
gttgatccagccaaatgtgtcctacaaggagaagacctccacagagcccgggagaaacagacggcctctttcaccctgctttgtaaggatgccgcaggagaaatcatgggcaggggagga

SEQ ID NO: 309546 - DNA, 120 bp, Artificial Sequence
  ENSG00000134253_15 (sequence is synthesized)
gacaacgttcaagttgccgttgtccctaaagataagaaagacagcccagtcagaacaatggtccaggataacaaggatgggacatactacatttcctacacccccaaggaacctggcgtc

SEQ ID NO: 309547 - DNA, 120 bp, Artificial Sequence
  ENSG00000134253_16 (sequence is synthesized)
tatactgtgtgggtctgcatcaaagaacagcatgtgcagggctcgccattcactgtgatggtgaggagaaagcaccgcccacactcaggcgtgtttcactgctgcaccttctgctccagc

SEQ ID NO: 309548 - DNA, 120 bp, Artificial Sequence
  ENSG00000134253_17 (sequence is synthesized)
gggggccagaaaaccgctcgctgcgcctgtggaggcaccatgccaggtgggtacctaggctgtggccatggacacaaaggccacccaggtcatccccactggtcatgctgtggaaaattt

SEQ ID NO: 309549 - DNA, 120 bp, Artificial Sequence
  ENSG00000134253_18 (sequence is synthesized)
aatgagaaatctgaatgcacatggacaggtgggcagagcgcaccgaggagtctacttaggactgtggctctctgatgggtttgtgctcagccttttaaagctgcaggcagcaccacttga

SEQ ID NO: 309550 - DNA, 120 bp, Artificial Sequence
  ENSG00000134253_19 (sequence is synthesized)
gatttccagaggacccagaccttcgttcattctaaagagactgatagaattaaaaacaaagtgccttatcttgcactggagttcaagtgctcttttgttagttattcactgattgtactt

SEQ ID NO: 309551 - DNA, 120 bp, Artificial Sequence
  ENSG00000134253_20 (sequence is synthesized)
gtggatggttgagcacaaaaaaccacctctacatttctcttaaaggtaggttggcaacgttctttttctaccacaggatactccttttcattttgtacagtatggaggtatctattccat

SEQ ID NO: 309552 - DNA, 86 bp, Artificial Sequence
  ENSG00000134253_21 (sequence is synthesized)
ctccttttcattttgtacagtatggaggtatctattccattggcactgaagggtctaggtagtttagttcctttctgatataacag

SEQ ID NO: 309553 - DNA, 86 bp, Artificial Sequence
  ENSG00000134253_22 (sequence is synthesized)
cactgcaacctctgcctcccggttcaaatgattctcgtgccttggtgtcccgagtagctgggattacaggttcccccccaccttcc

SEQ ID NO: 309554 - DNA, 62 bp, Artificial Sequence
  ENSG00000134253_23 (sequence is synthesized)
gcatgagccaccacacctggcctattatgacctttttcatttttctctgagctacacattat

SEQ ID NO: 309555 - DNA, 120 bp, Artificial Sequence
  ENSG00000134253_24 (sequence is synthesized)
tattatgacctttttcatttttctctgagctacacattatttagatatttcccctagagattagaaacctcctttcatcctgtccactttttgttagcatactttcattggatttactgg

SEQ ID NO: 309556 - DNA, 120 bp, Artificial Sequence
  ENSG00000134253_25 (sequence is synthesized)
tacatgttttgtgatcatgataatgtgatcttgttttggtggtgtccccctactccgtctctatgccatgacagccttctgccccaaagcctggaagattactctttggtcaagggcata

SEQ ID NO: 309557 - DNA, 120 bp, Artificial Sequence
  ENSG00000134253_26 (sequence is synthesized)
caaatagaaagttaataaaggggaatggtgttgaaatagaacctcatacatttattacagttctacttatacagaaaatctagacaccttcatccttctcacagctctgttttttagtag

SEQ ID NO: 309558 - DNA, 120 bp, Artificial Sequence
  ENSG00000134253_27 (sequence is synthesized)
agtagtctttagagtagtcttcactgttatctatatacctagaaagttaactgggagctttgactcttactgtgccttcactcatagtgtgccttcttagctgctggagaatttggggag

SEQ ID NO: 309559 - DNA, 120 bp, Artificial Sequence
  ENSG00000134253_28 (sequence is synthesized)
aggatgtacacagcactggtgcctcagccctgccaaggtcttcactgtatatattttgtgtgttcttctgaaactcttgatttcttatatggcaataaactcagcatgtattaaatataa

SEQ ID NO: 309560 - DNA, 120 bp, Artificial Sequence
  ENSG00000134253_29 (sequence is synthesized)
gttacacaggactgtggaatcccgggtgacattcaactccttaggtcatctgcactccccccggaccggaaaacaaagccttcccgagcccgacaaggagggtggcgctccctggcccgg

SEQ ID NO: 309561 - DNA, 120 bp, Artificial Sequence
  ENSG00000134253_30 (sequence is synthesized)
ccgaagtaagccctccattcgacacctcggctccacggtctcccgaaccggtccccgtaacgcgagcctgagatgccctcacccccgaaaaatacccaaagtcggggagccgcgggagtg

SEQ ID NO: 309562 - DNA, 120 bp, Artificial Sequence
  ENSG00000134253_31 (sequence is synthesized)
cttgtacccagcacgctaggcctgagggacctgtgagctacagtaagcgcctgaggacagaggggagcctcgcagcctcaaacccgcgtggaggagaaacgtctggcgcccccgagcggc

SEQ ID NO: 309563 - DNA, 120 bp, Artificial Sequence
  ENSG00000134253_32 (sequence is synthesized)
cgagacctcgggagcccgaaaaacgtctcccactcccagcgcagagccaactgacagtgccatccaccaatgggagaacccagtctgcgttcgtgggacgagtccgagggcagaaagaag

SEQ ID NO: 309564 - DNA, 120 bp, Artificial Sequence
  ENSG00000134253_33 (sequence is synthesized)
gccgtcccggcgccaaatcagcgtggctttttaagaggtcctgaggcctctctggtcaccacagagagagggacagtccctgtgaaacggtgacgctgactacactatgccgctcgctcc

SEQ ID NO: 309565 - DNA, 120 bp, Artificial Sequence
  ENSG00000134253_34 (sequence is synthesized)
gagccttggccttttcctcccgccgcactctaagcccttcggccgccccgcccacggccttgtcaggtcccgccccccgcgtgagtggactggcgaagatgtggaatttccaaaacttat

SEQ ID NO: 309566 - DNA, 120 bp, Artificial Sequence
  ENSG00000134253_35 (sequence is synthesized)
tggatgcttagtggcgtcactctggagggcggcggggcccggagcggcgagggccgccgctctcggacggaactcaagccacgaagtctgcagtcgcagatcggcatcctttgtcctgta

SEQ ID NO: 309567 - DNA, 120 bp, Artificial Sequence
  ENSG00000134255_0 (sequence is synthesized)
gtcgtgaacgtgctgccgccgatcagtcacccagtcggctggagtcggaggcgatatttctaggggtgtacttgttggggtcagggtaagcaccagccacaaaaacctacaaaagaaggg

SEQ ID NO: 309568 - DNA, 120 bp, Artificial Sequence
  ENSG00000134255_1 (sequence is synthesized)
aaattactgtctttaaatattaaaaaaaaacaagatccatgagtgggcatcgatcaacaaggaaaagatgtggagattctcacccggagtccccagtgggcttcgggcatatgagtacta

SEQ ID NO: 309569 - DNA, 120 bp, Artificial Sequence
  ENSG00000134255_2 (sequence is synthesized)
caggatgtgtattaaataaattgtttcagttaccaacaccaccattgtcaagacaccaactaaagcggctagaagaacacagatatcaaagtgctggacggtccctgcttgagcccttaa

SEQ ID NO: 309570 - DNA, 120 bp, Artificial Sequence
  ENSG00000134255_3 (sequence is synthesized)
tgcaagggtattgggaatggctcgttagaagagttccctcctggattgccccaaatctcatcaccatcattggactgtcaataaacatctgtacaactattttattagtcttctactgcc

SEQ ID NO: 309571 - DNA, 120 bp, Artificial Sequence
  ENSG00000134255_4 (sequence is synthesized)
ctacagctacagagcaggcacctctgtgggcatatattgcttgtgcctgtggccttttcatttaccagtctttggatgctattgatgggaaacaggcaagaagaaccaatagtagttctc

SEQ ID NO: 309572 - DNA, 120 bp, Artificial Sequence
  ENSG00000134255_5 (sequence is synthesized)
ctctgggagaactttttgatcatggctgtgattcactatcaacagtttttgtggttcttggaacttgtattgcagtgcagctggggacaaaccctgattggatgtttttttgttgttttg

SEQ ID NO: 309573 - DNA, 120 bp, Artificial Sequence
  ENSG00000134255_6 (sequence is synthesized)
cggggacatttatgttctattgtgcgcactggcaaacgtatgtttctggaacattgcgatttggaataattgatgtgactgaagtgcaaatcttcataataatcatgcatttgctggcag

SEQ ID NO: 309574 - DNA, 120 bp, Artificial Sequence
  ENSG00000134255_7 (sequence is synthesized)
tgattggaggaccacctttttggcaatctatgattccagtgctgaatattcaaatgaaaatttttcctgcactttgtactgtagcagggaccatattttcctgtacaaattacttccgtg

SEQ ID NO: 309575 - DNA, 120 bp, Artificial Sequence
  ENSG00000134255_8 (sequence is synthesized)
taatcttcacaggtggtgttggcaaaaatggatcaacaatagcaggaacaagtgtcctttctccttttctccatattggatcagtgattacattagctgcaatgatctacaagaaatctg

SEQ ID NO: 309576 - DNA, 120 bp, Artificial Sequence
  ENSG00000134255_9 (sequence is synthesized)
atttggttttgtgtctgctaaaatcactaataagcttgtggttgcacacatgacgaaaagtgaaatgcatttgcatgacacagcattcataggtccggcacttttgtttctggaccagta

SEQ ID NO: 309577 - DNA, 120 bp, Artificial Sequence
  ENSG00000134255_10 (sequence is synthesized)
ttttaacagctttattgatgaatatattgtactttggattgccctggttttctctttctttgatttgatccgctactgtgtcagtgtttgcaatcagattgcgtctcacctgcacataca

SEQ ID NO: 309578 - DNA, 120 bp, Artificial Sequence
  ENSG00000134255_11 (sequence is synthesized)
tgtcttcagaatcaaggtctctacagctcattctaatcatcattaatgatgtaattggtatataggaacatcatgttttctgcaggaaagaaagtaacatattaaggagaatgggggtgg

SEQ ID NO: 309579 - DNA, 120 bp, Artificial Sequence
  ENSG00000134255_12 (sequence is synthesized)
ataagaacaaatataatttataataatcaatgttgtataacttttattctttattattggtaacacgccctaactatcctgtgtgagaatgggaatttcaagtcccatcttgtaaattgt

SEQ ID NO: 309580 - DNA, 120 bp, Artificial Sequence
  ENSG00000134255_13 (sequence is synthesized)
atatgttgtcatgcagggtttgggccaagaaagcatgcagaaaaaaatgccatgtgattgtaattatcctggattcagaataatactgtgatggggagccagatccgcagtggtggagag

SEQ ID NO: 309581 - DNA, 120 bp, Artificial Sequence
  ENSG00000134255_14 (sequence is synthesized)
ttctaatgttgactgtttgcaggccaaaagatgattgctttataattttaacaaatcattgtcttttagtaacatccttgtttagtgtcttctcaagctttctttactgaggaattcagc

SEQ ID NO: 309582 - DNA, 120 bp, Artificial Sequence
  ENSG00000134255_15 (sequence is synthesized)
ttgtgacacagatacatcccactagcttgtgaggtggaactagtaataaagaccttgaatttggattgaaaagtttcctatctttacattgttgaggaagtccttttttttttttttttt

SEQ ID NO: 309583 - DNA, 120 bp, Artificial Sequence
  ENSG00000134255_16 (sequence is synthesized)
tttttaattgctcaagaaatgattctctcacaggcttgggaaatcctgttagcatgcagaataatgtggtaactttgtcaatttcccattttatttttttaaataaatatatgatctaaa

SEQ ID NO: 309584 - DNA, 120 bp, Artificial Sequence
  ENSG00000134255_17 (sequence is synthesized)
agccaactttttctcagttttactcagtggaaagataaactaagttttaatgttatttttttaaatttaagcaaaatttatttctgttctttaataaataagaaaatgtggtccactgca

SEQ ID NO: 309585 - DNA, 120 bp, Artificial Sequence
  ENSG00000134255_18 (sequence is synthesized)
cgaagcactaggccgtttgaggatctccgctccgctttgcctgggaccaggaaaagacgcgagagacggaactcggcatcaggcactgcttggggcaggaggagagtaggggaaaccaag

SEQ ID NO: 309586 - DNA, 120 bp, Artificial Sequence
  ENSG00000134255_19 (sequence is synthesized)
gttctaagatgtctaccctcctccacccaagacagaatcgatcatctttgacacctacctgcttagtctcctgaatctgctactgagtgtaattccccttattggcaacaccactcacca

SEQ ID NO: 309587 - DNA, 120 bp, Artificial Sequence
  ENSG00000134255_20 (sequence is synthesized)
aggggaaaccaaggaagagaacagaaaggtagggcacggggagctgagcccagctgcactcatccccgcccccggaaacccccgcagctcccgccccaaccagcccccctctggcgcctg

SEQ ID NO: 309588 - DNA, 120 bp, Artificial Sequence
  ENSG00000134255_21 (sequence is synthesized)
ggaaattgccttccaaatcctcattaagttagaaggcttttactgacatttagaaagcaagtttatggtcagaacaaataaaaacagtgcagatgtcttcataaggctgattccagaaga

SEQ ID NO: 309589 - DNA, 120 bp, Artificial Sequence
  ENSG00000134255_22 (sequence is synthesized)
tcagctgttttgtaaaggtaagtgatttgcatctattacatatggattacccattctttcccaaattttttccccaaagagatgaatttttaccaaagattatagttattgttgttgttg

SEQ ID NO: 309590 - DNA, 120 bp, Artificial Sequence
  ENSG00000134255_23 (sequence is synthesized)
tggttttccttttttttttttccaaaggaaagcagttgtcttcatgcataaaagtcagtgcttgttttatacattgcaagaaacaaaaagcatattttttgtttgttgcttccccaaaag

SEQ ID NO: 309591 - DNA, 120 bp, Artificial Sequence
  ENSG00000134255_24 (sequence is synthesized)
acattccttttagaatgccttggaactatgttctatcatatcactctttaaaaaaaacaaagaagaatatattcttatttggaagagacttaatataatcaactcatggttacttttact

SEQ ID NO: 309592 - DNA, 120 bp, Artificial Sequence
  ENSG00000134255_25 (sequence is synthesized)
gatgcttgagtcttttaaatgtagtaattgatcaaattgtattaagccataagggactttctggaattcagttaaggcaactaggtgagtgttactactgcaggtgaggtttcaggattc

SEQ ID NO: 309593 - DNA, 120 bp, Artificial Sequence
  ENSG00000134255_26 (sequence is synthesized)
atttggtcagactgaagacgttctatgtagtataaattgattatatctcattcttgaactacaagactttaaaatgcctttacacttaaataattctgatagggtgattttcctttgtag

SEQ ID NO: 309594 - DNA, 120 bp, Artificial Sequence
  ENSG00000134255_27 (sequence is synthesized)
acactgtaattatgttaacatttgctgtattttggtggaattcatttacattaaaatgatttacaaacaggcattcccacattctttggaggaaagtgtctaatctcaaaatggtacttt

SEQ ID NO: 309595 - DNA, 120 bp, Artificial Sequence
  ENSG00000134255_28 (sequence is synthesized)
ttatttctgctctgatgtacaaagcctgtaaggacattttatcatgcttataagaaaactagtcaaaatttactaactgatattagtctgcattaatacaaactattgaaccaaaaaaca

SEQ ID NO: 309596 - DNA, 120 bp, Artificial Sequence
  ENSG00000134255_29 (sequence is synthesized)
tgacctttgtaatctggtaaagatactgataatttaagattttctttttctatgtctaacctttttaaaagtgaatttcattacattgttattatttggatgcataccttcatggtatga

SEQ ID NO: 309597 - DNA, 120 bp, Artificial Sequence
  ENSG00000134255_30 (sequence is synthesized)
gtctggagagttttcacctggctgtaggacagacaccatggtccaaaggaattcttactcttcccaactcttaaagacttgaaacttcaagcagacctgacataaagatgtctttggtat

SEQ ID NO: 309598 - DNA, 120 bp, Artificial Sequence
  ENSG00000134255_31 (sequence is synthesized)
agctctttggctatttctaaagagtggatgcactttggccacctttgataagttccaagatgatgacagaaagaaaaagattgggaaagacagaatgtgcctgttctttttgacttgagg

SEQ ID NO: 309599 - DNA, 120 bp, Artificial Sequence
  ENSG00000134255_32 (sequence is synthesized)
gagagagagaatgtgccaccctccttgatcttaagcgtggggtgagaatggcaacactttgtgttttttataagtagtgccaatttttaaaggatcacctggtgagacttgggattcctt

SEQ ID NO: 309600 - DNA, 120 bp, Artificial Sequence
  ENSG00000134255_33 (sequence is synthesized)
tgactcgagcttttccttcactttgcctcatattttcttggtagctcactttctttttcattgctaatgtgggggctagatgtttcttcatactctcccaaaacaggagttctacataga

SEQ ID NO: 309601 - DNA, 120 bp, Artificial Sequence
  ENSG00000134255_34 (sequence is synthesized)
aaggaagagaaagggagattttaatcttcatttaacaaatgtgtattgagccacctacaataaccagggctctagagagtgtacaaaatcaattcaaacaaaatccaacactcaggagct

SEQ ID NO: 309602 - DNA, 120 bp, Artificial Sequence
  ENSG00000134255_35 (sequence is synthesized)
tatgttttggtgtatatagctaacatatatgacaaaagtgatgaaaaccttaagaatctatgatactttgcgcctaggtcaatagcttgcttccttactttgtggtccaagccatgtact

SEQ ID NO: 309603 - DNA, 120 bp, Artificial Sequence
  ENSG00000134255_36 (sequence is synthesized)
aattttcctggcttttctaatgtttgtgtttattcttctttcaaagggcaacaatttttatgatcccaaagcaatttcaccaaattttaaatacagttatgactctcattcagttcattt

SEQ ID NO: 309604 - DNA, 120 bp, Artificial Sequence
  ENSG00000134255_37 (sequence is synthesized)
atgacacagatgactattatacagagatggtactcatttagtaccctggccctaatacagggctgtccctgtaatagaataatgctttgcttcttttggaatctgagggaagtatagtat

SEQ ID NO: 309605 - DNA, 120 bp, Artificial Sequence
  ENSG00000134255_38 (sequence is synthesized)
tttcccttttgccagagagatcttttgtctctatggagtcaaaagtgggaggggtgggaagagaggttgggaaccaggaaactagccacagtattgagtttcagccaggtgcatcagatt

SEQ ID NO: 309606 - DNA, 120 bp, Artificial Sequence
  ENSG00000134255_39 (sequence is synthesized)
gagaatgtaatgtccctagtttattgaacaagagcagaaaaatctcttggagttcaaagcaaccatggtgttgattttctcctttcttgaaaacaagttttgaacttagactgtagaggt

SEQ ID NO: 309607 - DNA, 120 bp, Artificial Sequence
  ENSG00000134255_40 (sequence is synthesized)
tggagatttagggggagaagataaccatttaggataatccataaagtttaggacttgacttagttgacctagttaattttagaactaggttgacctagttaattttagaaaatttaacac

SEQ ID NO: 309608 - DNA, 120 bp, Artificial Sequence
  ENSG00000134255_41 (sequence is synthesized)
tgctacagtacaatttaaacttgaacatttgatttcaattttttttagagctgcatttttgcaagaggtaacagagttatctcaacaaagtgagttcttgagagttttgaagaaataaag

SEQ ID NO: 309609 - DNA, 120 bp, Artificial Sequence
  ENSG00000134255_42 (sequence is synthesized)
tatccaaccattaagatttatgtcttccagtcttaactgaggttttctatatagtaggaagtgccacatttgctatttgattttaaaagtgtagatagatgttagccatacaaagtgtaa

SEQ ID NO: 309610 - DNA, 87 bp, Artificial Sequence
  ENSG00000134255_43 (sequence is synthesized)
catgctagaatcacttcaacccgggaagcgggggttgcagtaaaccaggatcacaccgctgtactccagcctgggtgacagagcaag

SEQ ID NO: 309611 - DNA, 120 bp, Artificial Sequence
  ENSG00000134255_44 (sequence is synthesized)
caagactctgtctcaattaaaaaaaaaattttttttttcattgtaagaactcatggcttattaaaccactgggggcttttggaatcttgtttctataatcatttgtttctattactagac

SEQ ID NO: 309612 - DNA, 120 bp, Artificial Sequence
  ENSG00000134255_45 (sequence is synthesized)
tcttgtttctataatcatttgtttctattactagactacgtcatttattttactgttgctttcttttcaatccatattggacaaaatttgagaccaaaatttaaagggaggggtgcgaaa

SEQ ID NO: 309613 - DNA, 120 bp, Artificial Sequence
  ENSG00000134255_46 (sequence is synthesized)
aagaagagactcttaaatgatttttaaaattcagtacaagtgtatttcattttaaatgatagatattgtgtttgcaaaaatgcatgacatcaatccactctgtcccccatacttcaggta

SEQ ID NO: 309614 - DNA, 120 bp, Artificial Sequence
  ENSG00000134255_47 (sequence is synthesized)
aataaacacattttcagtatactttatgaatatattattcacttttctgaaaagtacatttaaacttcaaaattttgtatgcacaatagtagaatctgtttgaatgtacttgacctgttt

SEQ ID NO: 309615 - DNA, 120 bp, Artificial Sequence
  ENSG00000134255_48 (sequence is synthesized)
tttcttctgcattgtgaatgccttcttaattgccttctgcttttactagctgcctgtatcctaacaatttggagttgggaactcttctgaatagaaattttatcttccattctctatact

SEQ ID NO: 309616 - DNA, 120 bp, Artificial Sequence
  ENSG00000134255_49 (sequence is synthesized)
ctgcagatttttatatctagtcgcaacatttctattatgattcatacttcctcacaacaattatgaatgttctacagatttagaggtagaattcaaaaacatatacaaggaaaaaggcag

SEQ ID NO: 309617 - DNA, 120 bp, Artificial Sequence
  ENSG00000134255_50 (sequence is synthesized)
ggtgcactccttttattaaaaggccagaacacatcctggttcactgttgcaagaccactgggatgcattaggtgaatctaacttagcttgtgacacaagttaataaagttgaatctggtt

SEQ ID NO: 309618 - DNA, 120 bp, Artificial Sequence
  ENSG00000134255_51 (sequence is synthesized)
tttttgttttttttaaggttgatggctgaagtgagattaatttctaaatagtctcaactcttgagacttgctatattgcttataatgaagaggaaaaggacactttcattactttacgta

SEQ ID NO: 309619 - DNA, 120 bp, Artificial Sequence
  ENSG00000134255_52 (sequence is synthesized)
tttatgtaattggagggaatggaaagtttttgggaatatgaatcaaatattagactgttttcttattttagtttgtatatgttttaattgttttctctctctacccattaaagattccag

SEQ ID NO: 309620 - DNA, 120 bp, Artificial Sequence
  ENSG00000134255_53 (sequence is synthesized)
cttattcacatgttttttaaagtatgagctgctttgtaaaaataagcctggtctcttaagtgaaatcctcagtttgtgcctaatgaatttatgctgctacttttcattagctcttctagt

SEQ ID NO: 309621 - DNA, 120 bp, Artificial Sequence
  ENSG00000134255_54 (sequence is synthesized)
ttgtgatttatagaaattgctgcctatcaggcaccatgaggttcctgaaagtttgagttgaactgtgaactgttctgcagcagatccatgtagtatctgatgagtactgaatactattaa

SEQ ID NO: 309622 - DNA, 120 bp, Artificial Sequence
  ENSG00000134255_55 (sequence is synthesized)
gctaagcagtgttagaatacatgtttagtcatgagaataagtaattttgtattaaattttagtatttctcaaaagactatgaacctagttaatatttgttcattattggtagtgttagga

SEQ ID NO: 309623 - DNA, 120 bp, Artificial Sequence
  ENSG00000134255_56 (sequence is synthesized)
aatttagaaattactttctgcttgttatttttagccccaaatattgttttggcatcttttgtttttaaaagcttggggcataattgtcaccatcaaaactcttatgaactaaatgagagt

SEQ ID NO: 309624 - DNA, 120 bp, Artificial Sequence
  ENSG00000134255_57 (sequence is synthesized)
gaattatgttaatggacttggattataactacgtcataagaagctcagagaaagactatgacaaattaggagtatcgttaatattgcattgtgtactggaaatttgctaagagagtacat

SEQ ID NO: 309625 - DNA, 120 bp, Artificial Sequence
  ENSG00000134255_58 (sequence is synthesized)
tttagatgcttttaccacaggagaaaaaaggtaactatgggacatgatggataggttaatttgcttaactatagtaatcatttatatatatggcatgttttacacctcatatacaatttt

SEQ ID NO: 309626 - DNA, 120 bp, Artificial Sequence
  ENSG00000134255_59 (sequence is synthesized)
taaaagaaacactaaagtgctagcaataactgagttactctgtttggattataagtgatatctctttatttgcactgttttgcaagtttttaaaatagtagtttattatgtttttagaga

SEQ ID NO: 309627 - DNA, 120 bp, Artificial Sequence
  ENSG00000134255_60 (sequence is synthesized)
ggaaaaagacacttaaaatctaaatgacagtttttcagctagtctttctgacaggaactcatccctcccctcttttatttttgttttatttagtttctcaattattttcttgtttgacat

SEQ ID NO: 309628 - DNA, 120 bp, Artificial Sequence
  ENSG00000134255_61 (sequence is synthesized)
ggcacttaaaatatttaaaaagaaactaacaaaaaccccttatagttttacctcctgaatccacatttacaggtataggtgcatatcaaaatcattgcttcattgtatcccaacagcagc

SEQ ID NO: 309629 - DNA, 120 bp, Artificial Sequence
  ENSG00000134255_62 (sequence is synthesized)
ttatttagtagaggaggagaagcaactaaggtcatataattttttaagagtcaaatcaagaaatactcaaaacttctgttgaataaatggtagttggctgtcttgaaaggcaacaaccag

SEQ ID NO: 309630 - DNA, 120 bp, Artificial Sequence
  ENSG00000134255_63 (sequence is synthesized)
ctgactgcaggatggcaggatggcaggcttcctattatttattttaaattgcagtcatttttgcgttgtagtttgaggtctagacttttataggaagtctttttctatgtatgtcaccca

SEQ ID NO: 309631 - DNA, 120 bp, Artificial Sequence
  ENSG00000134255_64 (sequence is synthesized)
taacaatatctgtttaaaaaaaaaaagacagttatcaatctgaagcaagtaagtcggtccgtctggggattatatagcccctttgtttttcttttttggctgtctgccttgtaatgattt

SEQ ID NO: 309632 - DNA, 120 bp, Artificial Sequence
  ENSG00000134255_65 (sequence is synthesized)
gctgatcattagtactagtgtctctaagtcaggaaaatactcgaagaaatgttgaagtattttagttgccttcaagaactttgcttccactaagtgatttggtaaaaaaaaaaaaaaaaa

SEQ ID NO: 309633 - DNA, 120 bp, Artificial Sequence
  ENSG00000134256_0 (sequence is synthesized)
agcatttgtcactcaacctctgaatgttagtgacactattgggacgaaaaaggactgtgctggcccaaatggcaggcatctcatatgtggcatctttctttctccttctgactaagctca

SEQ ID NO: 309634 - DNA, 120 bp, Artificial Sequence
  ENSG00000134256_1 (sequence is synthesized)
gcattggccagagagaagtaacagttcagaaaggaccactgtttagagctgaaggttacccagtcagcattggctgcaatgtaactggccaccagggaccttctgagcagcatttccagt

SEQ ID NO: 309635 - DNA, 120 bp, Artificial Sequence
  ENSG00000134256_2 (sequence is synthesized)
ggtctgtttacctgccgacaaacccgacccaggaagtccagatcattagcaccaaggatgctgccttctcttacgcagtatatacgcagcgggtgcgaagcggagacgtctacgtggaga

SEQ ID NO: 309636 - DNA, 120 bp, Artificial Sequence
  ENSG00000134256_3 (sequence is synthesized)
gggtccagggcaactcagtcttgttgcacatctcaaaactccagatgaaggatgctggcgagtatgagtgtcacacaccaaacactgatgagaaatactatggaagttacagtgcaaaga

SEQ ID NO: 309637 - DNA, 120 bp, Artificial Sequence
  ENSG00000134256_4 (sequence is synthesized)
ctaatctaattgttattccagataccctctctgccaccatgagttctcagactctcggtaaggaggaaggtgagccattagccctcacctgtgaggcatccaaagccacagcccaacata

SEQ ID NO: 309638 - DNA, 120 bp, Artificial Sequence
  ENSG00000134256_5 (sequence is synthesized)
ctcacctctctgtcacctggtacctaacacaggatggaggaggaagccaagccactgagattatttctctctccaaagattttatattggtccctgggcccttgtatacagagcggtttg

SEQ ID NO: 309639 - DNA, 120 bp, Artificial Sequence
  ENSG00000134256_6 (sequence is synthesized)
cagccagtgacgtacagctcaacaaactgggacccactacattcaggctgtccatagagaggctccagtcctcagatcagggtcagctgttctgtgaggcaacggaatggattcaggatc

SEQ ID NO: 309640 - DNA, 120 bp, Artificial Sequence
  ENSG00000134256_7 (sequence is synthesized)
cagatgaaacttggatgttcatcaccaaaaagcagaccgatcaaaccactctgaggatccagccagcagtgaaagattttcaagtcaacattacagctgacagcttgtttgctgaaggga

SEQ ID NO: 309641 - DNA, 120 bp, Artificial Sequence
  ENSG00000134256_8 (sequence is synthesized)
aacccttagaactggtttgcctggttgtaagcagtggccgtgacccacagcttcaaggcatttggttcttcaatgggactgaaattgctcacattgatgctggtggagtcctgggcctga

SEQ ID NO: 309642 - DNA, 120 bp, Artificial Sequence
  ENSG00000134256_9 (sequence is synthesized)
agaatgactacaaagagagagcaagtcaaggagagctccaggtttcaaagttaggccccaaggctttctctctcaagatcttctctctgggcccagaggatgaaggcgcctacagatgtg

SEQ ID NO: 309643 - DNA, 120 bp, Artificial Sequence
  ENSG00000134256_10 (sequence is synthesized)
tggtagcagaggtcatgaaaacacgcacaggttcctggcaggtgcttcagagaaagcagtcaccagacagccacgtgcacctgaggaagccagcagcaagaagtgtggtcatgtctacca

SEQ ID NO: 309644 - DNA, 120 bp, Artificial Sequence
  ENSG00000134256_11 (sequence is synthesized)
agaacaagcagcaagttgtgtgggaaggagagacactcgcctttctctgtaaggctggtggagctgaaagtcccctgtctgtgagctggtggcacatcccacgggaccagacacagcccg

SEQ ID NO: 309645 - DNA, 120 bp, Artificial Sequence
  ENSG00000134256_12 (sequence is synthesized)
agtttgtggctggcatggggcaggatggcattgtgcagctgggtgcctcctatggggtacccagttaccatggcaacacaaggctggagaaaatggactgggccaccttccagctggaga

SEQ ID NO: 309646 - DNA, 120 bp, Artificial Sequence
  ENSG00000134256_13 (sequence is synthesized)
agtatctgagaagtctcggaaccaggccagagatctgagctggactcagaagatttcagttactgtaaagtctctggagtcaagtttacaagttagtctgatgagccgtcagccgcaagt

SEQ ID NO: 309647 - DNA, 120 bp, Artificial Sequence
  ENSG00000134256_14 (sequence is synthesized)
gatgttaaccaacacctttgacctgtcctgtgtcgtgagggccggttactctgacctcaaggtgccactcactgtgacgtggcagttccagccagctagctctcacatcttccaccagct

SEQ ID NO: 309648 - DNA, 120 bp, Artificial Sequence
  ENSG00000134256_15 (sequence is synthesized)
tattcgaatcacccacaatggcactattgaatgggggaatttcctatcccggttccaaaagaagacgaaagtgtcgcagtctttatttcgttcacaactcctagtccatgatgccactga

SEQ ID NO: 309649 - DNA, 120 bp, Artificial Sequence
  ENSG00000134256_16 (sequence is synthesized)
ggaagagacaggagtgtatcagtgtgaagtagaagtttatgacagaaattccctatacaacaaccgccccccgagggcttctgccatctctcacccactgaggatagccgtcactttacc

SEQ ID NO: 309650 - DNA, 120 bp, Artificial Sequence
  ENSG00000134256_17 (sequence is synthesized)
agagagcaagctaaaagtgaattcaaggagtcaagtccaagagctctccatcaactccaacactgatatagaatgtagcatcttgtcccggtccaatggaaaccttcagttagccattat

SEQ ID NO: 309651 - DNA, 120 bp, Artificial Sequence
  ENSG00000134256_18 (sequence is synthesized)
ttggtatttttctcctgtttccactaatgcctcttggctaaagatcctggagatggaccaaaccaatgttataaaaactggggatgagtttcacaccccacagagaaaacaaaaatttca

SEQ ID NO: 309652 - DNA, 120 bp, Artificial Sequence
  ENSG00000134256_19 (sequence is synthesized)
tactgagaaggtttcccaagacttatttcagctgcacattctgaatgtggaagacagcgatcggggcaaatatcactgtgctgtggaggaatggctcctgtctacaaatggcacttggca

SEQ ID NO: 309653 - DNA, 120 bp, Artificial Sequence
  ENSG00000134256_20 (sequence is synthesized)
caagcttggagaaaagaagtcaggactaacagaattgaaactcaagcccacaggaagtaaggtacgtgtctccaaagtgtactggaccgaaaatgtgactgagcacagagaagtggccat

SEQ ID NO: 309654 - DNA, 120 bp, Artificial Sequence
  ENSG00000134256_21 (sequence is synthesized)
ccgctgcagcctggagagtgtaggcagctcagccactctgtactctgtgatgtggtactggaacagagaaaactctggaagtaaattgctggtgcacttgcaacatgatggcttgctgga

SEQ ID NO: 309655 - DNA, 120 bp, Artificial Sequence
  ENSG00000134256_22 (sequence is synthesized)
gtatggggaagaggggctcaggaggcacctgcactgttaccgttcatcctctacagactttgtcctgaagcttcatcaggtggagatggaggatgcaggaatgtactggtgtagggtggc

SEQ ID NO: 309656 - DNA, 120 bp, Artificial Sequence
  ENSG00000134256_23 (sequence is synthesized)
agagtggcagctccatggacacccaagcaagtggattaatcaagcatccgatgagtcacagcggatggtgctcacggtgctgccttcagagcccacgcttccttccaggatctgctcctc

SEQ ID NO: 309657 - DNA, 120 bp, Artificial Sequence
  ENSG00000134256_24 (sequence is synthesized)
ggcccctttactctatttcctgttcatctgtcccttcgtcctgctcctccttctgctcatctccctcctctgcttatactggaaggccaggaagttgtcaacactgcgttccaacacacg

SEQ ID NO: 309658 - DNA, 120 bp, Artificial Sequence
  ENSG00000134256_25 (sequence is synthesized)
gaaagaaaaagctctctgggtggacttgaaagaggctggaggtgtgaccacaaataggagggaagacgaggaggaagatgaaggcaactgaatcccaagaggcacctgcagccaggaagg

SEQ ID NO: 309659 - DNA, 120 bp, Artificial Sequence
  ENSG00000134256_26 (sequence is synthesized)
aaaggtgggggctttttaattgggctaaccagggtgtgaatgaatcctggttctgtcctcaactatgtctgcggccttgggcaagttacctaggaatcagagggagcattcactgagtgc

SEQ ID NO: 309660 - DNA, 120 bp, Artificial Sequence
  ENSG00000134256_27 (sequence is synthesized)
tgaagtcactaccccagggggagctatagcttcatgaccgtaacatgtgacctgtgtgctggcaggacgactcactgcggctgcgccactgggacccctcccctacatgcaccaatgcac

SEQ ID NO: 309661 - DNA, 120 bp, Artificial Sequence
  ENSG00000134256_28 (sequence is synthesized)
tggaggtgtgaccacaaataggagggaagacgaggaggaagatgaaggcaactgaatcccaagaggcacctgcagccaggaaggaaagcttgttttacagcttcctgccttgctgcctgt

SEQ ID NO: 309662 - DNA, 120 bp, Artificial Sequence
  ENSG00000134256_29 (sequence is synthesized)
atcttttgcccatgtggttgcagtcaatccaatttaattcagatcagcaaaagttactgagcacatgtgctaggcactgtaggggatatagaaacaaatggcactatcagacatactcaa

SEQ ID NO: 309663 - DNA, 120 bp, Artificial Sequence
  ENSG00000134256_30 (sequence is synthesized)
gtaactatagtgaacaaaggagacgagtaaaagggaattaaagaggcctaaacaaagggctgagtgagaacgggatggaagagaagaactgtgcctgcagcaagagcccacgcttccttc

SEQ ID NO: 309664 - DNA, 120 bp, Artificial Sequence
  ENSG00000134258_0 (sequence is synthesized)
gtgagtcaccaaggaaggcagcggcagctccactcagccagtacccagatacgctgggaaccttccccagccatggcttccctggggcagatcctcttctggagcataattagcatcatc

SEQ ID NO: 309665 - DNA, 120 bp, Artificial Sequence
  ENSG00000134258_1 (sequence is synthesized)
attattctggctggagcaattgcactcatcattggctttggtatttcagggagacactccatcacagtcactactgtcgcctcagctgggaacattggggaggatggaatcctgagctgc

SEQ ID NO: 309666 - DNA, 120 bp, Artificial Sequence
  ENSG00000134258_2 (sequence is synthesized)
acttttgaacctgacatcaaactttctgatatcgtgatacaatggctgaaggaaggtgttttaggcttggtccatgagttcaaagaaggcaaagatgagctgtcggagcaggatgaaatg

SEQ ID NO: 309667 - DNA, 120 bp, Artificial Sequence
  ENSG00000134258_3 (sequence is synthesized)
ttcagaggccggacagcagtgtttgctgatcaagtgatagttggcaatgcctctttgcggctgaaaaacgtgcaactcacagatgctggcacctacaaatgttatatcatcacttctaaa

SEQ ID NO: 309668 - DNA, 120 bp, Artificial Sequence
  ENSG00000134258_4 (sequence is synthesized)
ggcaaggggaatgctaaccttgagtataaaactggagccttcagcatgccggaagtgaatgtggactataatgccagctcagagaccttgcggtgtgaggctccccgatggttcccccag

SEQ ID NO: 309669 - DNA, 120 bp, Artificial Sequence
  ENSG00000134258_5 (sequence is synthesized)
cccacagtggtctgggcatcccaagttgaccagggagccaacttctcggaagtctccaataccagctttgagctgaactctgagaatgtgaccatgaaggttgtgtctgtgctctacaat

SEQ ID NO: 309670 - DNA, 120 bp, Artificial Sequence
  ENSG00000134258_6 (sequence is synthesized)
gttacgatcaacaacacatactcctgtatgattgaaaatgacattgccaaagcaacaggggatatcaaagtgacagaatcggagatcaaaaggcggagtcacctacagctgctaaactca

SEQ ID NO: 309671 - DNA, 120 bp, Artificial Sequence
  ENSG00000134258_7 (sequence is synthesized)
aaggcttctctgtgtgtctcttctttctttgccatcagctgggcacttctgcctctcagcccttacctgatgctaaaataatgtgcctcggccacaaaaaagcatgcaaagtcattgtta

SEQ ID NO: 309672 - DNA, 120 bp, Artificial Sequence
  ENSG00000134258_8 (sequence is synthesized)
caacagggatctacagaactatttcaccaccagatatgacctagttttatatttctgggaggaaatgaattcatatctagaagtctggagtgagcaaacaagagcaagaaacaaaaagaa

SEQ ID NO: 309673 - DNA, 120 bp, Artificial Sequence
  ENSG00000134258_9 (sequence is synthesized)
gccaaaagcagaaggctccaatatgaacaagataaatctatcttcaaagacatattagaagttgggaaaataattcatgtgaactagacaagtgtgttaagagtgataagtaaaatgcac

SEQ ID NO: 309674 - DNA, 120 bp, Artificial Sequence
  ENSG00000134258_10 (sequence is synthesized)
tgtctctgaatttttagttatatgtgctgtaatgttgctctgaggaagcccctggaaagtctatcccaacatatccacatcttatattccacaaattaagctgtagtatgtaccctaaga

SEQ ID NO: 309675 - DNA, 120 bp, Artificial Sequence
  ENSG00000134258_11 (sequence is synthesized)
cgctgctaattgactgccacttcgcaactcaggggcggctgcattttagtaatgggtcaaatgattcactttttatgatgcttccaaaggtgccttggcttctcttcccaactgacaaat

SEQ ID NO: 309676 - DNA, 120 bp, Artificial Sequence
  ENSG00000134258_12 (sequence is synthesized)
gccaaagttgagaaaaatgatcataattttagcataaacagagcagtcggcgacaccgattttataaataaactgagcaccttctttttaaacaaacaaatgcgggtttatttctcagat

SEQ ID NO: 309677 - DNA, 120 bp, Artificial Sequence
  ENSG00000134258_13 (sequence is synthesized)
gatgttcatccgtgaatggtccagggaaggacctttcaccttgtctatatggcattatgtcatcacaagctctgaggcttctcctttccatcctgcgtggacagctaagacctcagtttt

SEQ ID NO: 309678 - DNA, 120 bp, Artificial Sequence
  ENSG00000134258_14 (sequence is synthesized)
caatagcatctagagcagtgggactcagctggggtgatttcgccccccatctccgggggaatgtctgaagacaattttggttacctcaatgagggagtggaggaggatacagtgctacta

SEQ ID NO: 309679 - DNA, 120 bp, Artificial Sequence
  ENSG00000134258_15 (sequence is synthesized)
ccaactagtggatagaggccagggatgctgctcaacctcctaccatgtacaggacgtctccccattacaactacccaatccgaagtgtcaactgtgtcagggctaagaaaccctggtttt

SEQ ID NO: 309680 - DNA, 120 bp, Artificial Sequence
  ENSG00000134258_16 (sequence is synthesized)
gagtagaaaagggcctggaaagaggggagccaacaaatctgtctgcttcctcacattagtcattggcaaataagcattctgtctctttggctgctgcctcagcacagagagccagaactc

SEQ ID NO: 309681 - DNA, 120 bp, Artificial Sequence
  ENSG00000134258_17 (sequence is synthesized)
tatcgggcaccaggataacatctctcagtgaacagagttgacaaggcctatgggaaatgcctgatgggattatcttcagcttgttgagcttctaagtttctttcccttcattctaccctg

SEQ ID NO: 309682 - DNA, 120 bp, Artificial Sequence
  ENSG00000134258_18 (sequence is synthesized)
caagccaagttctgtaagagaaatgcctgagttctagctcaggttttcttactctgaatttagatctccagaccctgcctggccacaattcaaattaaggcaacaaacatataccttcca

SEQ ID NO: 309683 - DNA, 120 bp, Artificial Sequence
  ENSG00000134258_19 (sequence is synthesized)
tgaagcacacacagacttttgaaagcaaggacaatgactgcttgaattgaggccttgaggaatgaagctttgaaggaaaagaatactttgtttccagcccccttcccacactcttcatgt

SEQ ID NO: 309684 - DNA, 120 bp, Artificial Sequence
  ENSG00000134258_20 (sequence is synthesized)
gttaaccactgccttcctggaccttggagccacggtgactgtattacatgttgttatagaaaactgattttagagttctgatcgttcaagagaatgattaaatatacatttcctacacca

SEQ ID NO: 309685 - DNA, 120 bp, Artificial Sequence
  ENSG00000134258_21 (sequence is synthesized)
ctggtaatctgtggcgtaacaagacctccaggtgattctctgtattagcagccgctctgtgctccctgattcctccagaaaagcacaaggatttaatccagatagatataaatttcacct

SEQ ID NO: 309686 - DNA, 120 bp, Artificial Sequence
  ENSG00000134258_22 (sequence is synthesized)
attattctggctggagcaattgcactcatcattggctttggtatttcagaagtctctgtctggctttcagcaatgaagggtttgtgtagaagttccaaggcttcccttagcattgatctt

SEQ ID NO: 309687 - DNA, 120 bp, Artificial Sequence
  ENSG00000134259_0 (sequence is synthesized)
agagagcgctgggagccggaggggagcgcagcgagttttggccagtggtcgtgcagtccaaggggctggatggcatgctggacccaagctcagctcagcgtccggacccaataacagttt

SEQ ID NO: 309688 - DNA, 120 bp, Artificial Sequence
  ENSG00000134259_1 (sequence is synthesized)
taccaagggagcagctttctatcctggccacactgaggtgcatagcgtaatgtccatgttgttctacactctgatcacagcttttctgatcggcatacaggcggaaccacactcagagag

SEQ ID NO: 309689 - DNA, 120 bp, Artificial Sequence
  ENSG00000134259_2 (sequence is synthesized)
caatgtccctgcaggacacaccatcccccaagcccactggactaaacttcagcattcccttgacactgcccttcgcagagcccgcagcgccccggcagcggcgatagctgcacgcgtggc

SEQ ID NO: 309690 - DNA, 120 bp, Artificial Sequence
  ENSG00000134259_3 (sequence is synthesized)
ggggcagacccgcaacattactgtggaccccaggctgtttaaaaagcggcgactccgttcaccccgtgtgctgtttagcacccagcctccccgtgaagctgcagacactcaggatctgga

SEQ ID NO: 309691 - DNA, 120 bp, Artificial Sequence
  ENSG00000134259_4 (sequence is synthesized)
ctcggtgtgtgacagtgtcagcgtgtgggttggggataagaccaccgccacagacatcaagggcaaggaggtgatggtgttgggagaggtgaacattaacaacagtgtattcaaacagta

SEQ ID NO: 309692 - DNA, 120 bp, Artificial Sequence
  ENSG00000134259_5 (sequence is synthesized)
cttttttgagaccaagtgccgggacccaaatcccgttgacagcgggtgccggggcattgactcaaagcactggaactcatattgtaccacgactcacacctttgtcaaggcgctgaccat

SEQ ID NO: 309693 - DNA, 120 bp, Artificial Sequence
  ENSG00000134259_6 (sequence is synthesized)
ggatggcaagcaggctgcctggcggtttatccggatagatacggcctgtgtgtgtgtgctcagcaggaaggctgtgagaagagcctgacctgccgacacgctccctccccctgccccttc

SEQ ID NO: 309694 - DNA, 120 bp, Artificial Sequence
  ENSG00000134259_7 (sequence is synthesized)
tacactctcctgggcccctccctacctcaacctgtaaattattttaaattataaggactgcatggtaatttatagtttatacagttttaaagaatcattatttattaaatttttggaagc

SEQ ID NO: 309695 - DNA, 120 bp, Artificial Sequence
  ENSG00000134262_0 (sequence is synthesized)
ggggaattaaggctggaactggagagggaggggtctgcggtcagtcggacgcggcgctggaaatccggcggaggacctagaagtagcgggagcgatctgtgggcggggcgaacggcctgc

SEQ ID NO: 309696 - DNA, 120 bp, Artificial Sequence
  ENSG00000134262_1 (sequence is synthesized)
cggccgacggctcccacatcaggacgagaaggagccctcgagttaccgtgggagctgtgggagctgccctgtgactcttaggaagatgccgtaccttggctccgaggacgtggtgaagga

SEQ ID NO: 309697 - DNA, 120 bp, Artificial Sequence
  ENSG00000134262_2 (sequence is synthesized)
gctgaagaaggctctgtgcaatcctcacattcaagctgataggctgcgctaccggaatgtcatccagcgagtgattaggtacatgactcaaggcttggacatgtctggtgtttttatgga

SEQ ID NO: 309698 - DNA, 120 bp, Artificial Sequence
  ENSG00000134262_3 (sequence is synthesized)
aatggtgaaggccagtgccactgtagatattgtccagaagaagttggtttatctgtacatgtgcacatatgctcccctgaaaccagatctggctctcctggccatcaatacgctgtgcaa

SEQ ID NO: 309699 - DNA, 120 bp, Artificial Sequence
  ENSG00000134262_4 (sequence is synthesized)
agactgctcagaccccaatccaatggtgcgagggctggcgttacggagcatgtgtagcctcaggatgcctggtgtgcaggagtatatacaacagcctattctcaatggtctgcgggataa

SEQ ID NO: 309700 - DNA, 120 bp, Artificial Sequence
  ENSG00000134262_5 (sequence is synthesized)
ggcttcatatgtcaggagagtggcagtccttggatgtgccaagatgcataatcttcatggagactctgaagtagatggtgccctggtaaatgaattatacagtttgctgcgtgaccagga

SEQ ID NO: 309701 - DNA, 120 bp, Artificial Sequence
  ENSG00000134262_6 (sequence is synthesized)
tccaattgtagttgtgaactgcttgaggtctctagaggaaattctgaaacaggaaggaggcgttgtcatcaataagcccattgctcaccatctcttaaatcgaatgtcaaaactggacca

SEQ ID NO: 309702 - DNA, 120 bp, Artificial Sequence
  ENSG00000134262_7 (sequence is synthesized)
atggggccaggctgaagtattgaactttctgctacgctaccaaccccgcagtgaggaagaactatttgacattctcaatctgttggatagtttcctcaagagcagtagcccaggtgtggt

SEQ ID NO: 309703 - DNA, 120 bp, Artificial Sequence
  ENSG00000134262_8 (sequence is synthesized)
gatgggagctaccaaactttttctgatcttggcaaaaatgtttccccacgtacaaactgatgtccttgtgcgggtcaagggacctttgctagctgcctgttcttcagagagccgtgagct

SEQ ID NO: 309704 - DNA, 120 bp, Artificial Sequence
  ENSG00000134262_9 (sequence is synthesized)
ctgttttgttgctctttgtcatgtacgccagatcttgcatagtttaccaggtcactttagcagccactacaaaaagtttttttgctcctactcggagccccactacatcaaactacagaa

SEQ ID NO: 309705 - DNA, 120 bp, Artificial Sequence
  ENSG00000134262_10 (sequence is synthesized)
agtggaggtgctgtgtgaactggtgaacgatgagaatgtgcagcaggtgctagaggagcttcgagggtactgcacggatgtgtctgcggactttgcacaggctgccatctttgccatagg

SEQ ID NO: 309706 - DNA, 120 bp, Artificial Sequence
  ENSG00000134262_11 (sequence is synthesized)
agacctggtttggttgtgtcctcagtgtactgaagctgtatgtcaggccctgcccggctgtgaagagaacattcaagatagtgaggggaagcaagcacttatttggctacttggtgtcca

SEQ ID NO: 309707 - DNA, 120 bp, Artificial Sequence
  ENSG00000134262_12 (sequence is synthesized)
tggggaaagaattcctaatgctccttatgtgttagaggactttgttgagaatgtgaagtcggaaacatttccagctgttaagatggagctgctcactgctttgctgcgccttttcctctc

SEQ ID NO: 309708 - DNA, 120 bp, Artificial Sequence
  ENSG00000134262_13 (sequence is synthesized)
ccgacctgctgagtgccaggacatgctaggacgtttgttgtattactgcatagaggaagaaaaagatatggctgtacgggaccgaggtctcttctattatcgcctcctcttagttggcat

SEQ ID NO: 309709 - DNA, 120 bp, Artificial Sequence
  ENSG00000134262_14 (sequence is synthesized)
tgatgaagttaagcggattctgtgtagccctaaatctgaccctactcttggacttttggaggatccggcagaaagacctgtgaatagctgggcctcagacttcaacacactggtgccagt

SEQ ID NO: 309710 - DNA, 120 bp, Artificial Sequence
  ENSG00000134262_15 (sequence is synthesized)
gtatggcaaagcccactgggcaactatctctaaatgccagggggcagagcgttgtgacccagagcttcctaaaacttcatcctttgccgcatcaggacccttgattcctgaagagaacaa

SEQ ID NO: 309711 - DNA, 120 bp, Artificial Sequence
  ENSG00000134262_16 (sequence is synthesized)
ggagagggtacaagaactccctgattctggagccctcatgctagtccccaatcgccagcttactgctgattattttgagaaaacttggcttagccttaaagttgctcatcagcaagtgtt

SEQ ID NO: 309712 - DNA, 120 bp, Artificial Sequence
  ENSG00000134262_17 (sequence is synthesized)
gccttggcggggagaattccatcctgacaccctccagatggctcttcaagtagtgaacatccagaccatcgcaatgagtagggctgggtctcggccatggaaagcatacctcagtgctca

SEQ ID NO: 309713 - DNA, 120 bp, Artificial Sequence
  ENSG00000134262_18 (sequence is synthesized)
ggatgatactggctgtctgttcttaacagaactgctattggagcctggaaactcagaaatgcagatctctgtgaaacaaaatgaagcaagaacggagacgctgaatagttttatttctgt

SEQ ID NO: 309714 - DNA, 120 bp, Artificial Sequence
  ENSG00000134262_19 (sequence is synthesized)
attagaaactgtgattggaacaattgaagaaataaaatcataacagagtcttgttgcttgtctagagtaagatgaataactattacactttcttagtctttcctattagagctgccagta

SEQ ID NO: 309715 - DNA, 120 bp, Artificial Sequence
  ENSG00000134262_20 (sequence is synthesized)
agtccagataatatcagatacaaaggagagtggaaaatctagaaatcaggattcttaagtttttggccaaagaacattgattcattcctttcattcctattggcaattgaccccattttt

SEQ ID NO: 309716 - DNA, 120 bp, Artificial Sequence
  ENSG00000134262_21 (sequence is synthesized)
cagtgatgatgttgtagaggttaatgttggtaaggagatgcgttgaggatgggatttggattatttcctaatcaattttaggaattgtgttagtaattaaagatggctgatgtgtggaaa

SEQ ID NO: 309717 - DNA, 120 bp, Artificial Sequence
  ENSG00000134262_22 (sequence is synthesized)
tatttccaatcatgcttttaggccagattccaaagtccttaatgtcatctaaagtacctctttggtgtcaagtcttgccactcccaaaatgacttcttttctggcagaagcaaaccattt

SEQ ID NO: 309718 - DNA, 120 bp, Artificial Sequence
  ENSG00000134262_23 (sequence is synthesized)
gcattgcagttccctttatacacctgcttctttcacctctgtgttaacttaaacctgcttttatttattgcctggaacattttctcaccctcatatcttcttgaattaacacctcgtcta

SEQ ID NO: 309719 - DNA, 120 bp, Artificial Sequence
  ENSG00000134262_24 (sequence is synthesized)
tctttcagtgttcagctcactcataagctccttcaggaagtttcctttaaccctcactgccttcattaggggcctccctcaagctatcaaagtagccagagcatacctctagcagtagta

SEQ ID NO: 309720 - DNA, 120 bp, Artificial Sequence
  ENSG00000134262_25 (sequence is synthesized)
ttgtaattgttttcttgttgcttgtcctcaatttttattctgttcttatctgaccacattttgtacattgaagcaacttatggcaagaacaaatctaataaaatgatggtaaaatataaa

SEQ ID NO: 309721 - DNA, 120 bp, Artificial Sequence
  ENSG00000134262_26 (sequence is synthesized)
ggagtcgggactacgcttagcgctcgctcgcggggagaccggcagcggtcttctgtttggtctcttgacaagggggcgggacttccgcagaaagcaagattgggcctatccgcgatgaga

SEQ ID NO: 309722 - DNA, 120 bp, Artificial Sequence
  ENSG00000134262_27 (sequence is synthesized)
taggacgtttgttgtattactgcataggtgggtttttcagaaggaaatagtatttgccatgacccatagtaaaaattcttaatagctttcattgtttggtgagtcacgtctgggacccga

SEQ ID NO: 309723 - DNA, 120 bp, Artificial Sequence
  ENSG00000134262_28 (sequence is synthesized)
gaagaaaatgtgaatgcttcctaggttttcctctctccttcatttttttctcctattatggttggcacaagagtaggaggaaagtggttttgtttttaatgaagtcaatctgttgtctta

SEQ ID NO: 309724 - DNA, 120 bp, Artificial Sequence
  ENSG00000134262_29 (sequence is synthesized)
gtgaactggtgaacgatgagaatgtgcagcaggtgctagaggagcttcgagggtactgcacggatgtgtctgcggactttgcacaggctgccatctttgccatagactttttcatagtac

SEQ ID NO: 309725 - DNA, 120 bp, Artificial Sequence
  ENSG00000134262_30 (sequence is synthesized)
gcaaccctcatatttggaataaagcatggttattttaggggcagagaagagggagcaaagaggagacaagaaatccttaggagactgctgtcaagtgtcccccacaaaaatactccattg

SEQ ID NO: 309726 - DNA, 120 bp, Artificial Sequence
  ENSG00000134262_31 (sequence is synthesized)
tcatcctttgccgcatcaggtaaaaacagtccttaccttaaatcttgtcatgataaatctttaccttttcaatgattggtggaaagtagagtatcttagcactaaacctcagactgttgc

SEQ ID NO: 309727 - DNA, 120 bp, Artificial Sequence
  ENSG00000134262_32 (sequence is synthesized)
ctgaatttgaagcatttgtgagcaagaaagaggttcgtcactggttatttcagccatttgtccaaaaataaaagtcacattgtgtacatttgggaatttggataaaaaacttagctccta

SEQ ID NO: 309728 - DNA, 120 bp, Artificial Sequence
  ENSG00000134262_33 (sequence is synthesized)
tctgcggtcagtcggacgcggcgctggaaatccggcggaggacctagaagtagcgggagcgatctgtgggcggggcgaacggcctgccggccgacggtagggcctgaagagcctagggct

SEQ ID NO: 309729 - DNA, 120 bp, Artificial Sequence
  ENSG00000134262_34 (sequence is synthesized)
agcagtgagctatgatcgggccactgggtgacaaagtgagaccccatcttgaaaaaaacaagaaaaaaacagaaaagtcaaattatggctttttaagcttgatagaggctttctgcaatt

SEQ ID NO: 309730 - DNA, 120 bp, Artificial Sequence
  ENSG00000134262_35 (sequence is synthesized)
cttcatgatctgatgggtgcagcatctactaaaccatctgttaggtgaacaggggctgaggtatgtcaaaattagtatttcagaatctggctaactccaggatgtgttgcttaggatgcc

SEQ ID NO: 309731 - DNA, 120 bp, Artificial Sequence
  ENSG00000134262_36 (sequence is synthesized)
ggtgcagactttccgagacctggtttggttgtgtcctcagtgtactgaagctgtatgtcaggccctgcccggctgtgaagagaacattcaagatagtgaggtagactgtaattctccttt

SEQ ID NO: 309732 - DNA, 120 bp, Artificial Sequence
  ENSG00000134262_37 (sequence is synthesized)
acttctaggtagggggagaatgcttgaaaccctgccctttgaaatggaatctaattattctctctaccctgtgtttgaagtgggcactcttcgaattgattgccaccttagattctcttt

SEQ ID NO: 309733 - DNA, 120 bp, Artificial Sequence
  ENSG00000134262_38 (sequence is synthesized)
tggatatagatggcatataaattataaaaacaagatttatccgacgggttttattacaaaactgtgataccattgttctcttgaacagttctgttttgttttgttttgctttgcttgaga

SEQ ID NO: 309734 - DNA, 70 bp, Artificial Sequence
  ENSG00000134262_39 (sequence is synthesized)
ttgaacagttctgttttgttttgttttgctttgcttgagatagaacctcccaaactcaagtgattctctt

SEQ ID NO: 309735 - DNA, 120 bp, Artificial Sequence
  ENSG00000134262_40 (sequence is synthesized)
ctaatttttgtatttttagtagagagggttttgctatgttgtctaggctggtctagaattcctagcctcaagtgatcacccacctcagcatcccagagagctaggattacaggcataagc

SEQ ID NO: 309736 - DNA, 120 bp, Artificial Sequence
  ENSG00000134262_41 (sequence is synthesized)
gattacaggcataagccactgtgccccgcttctcttgaacagttttgagtcagagatttagaccatggagtttttagctagaatgaaaattataatcatttgtgaaatttttacaaagat

SEQ ID NO: 309737 - DNA, 120 bp, Artificial Sequence
  ENSG00000134262_42 (sequence is synthesized)
ttttacaaagatttggacgtaatcacaggtctactgacttaaatattcaggggtgttggacctagacagataactttttttttttttttgaaacagagtctagctctgttgcccaggctg

SEQ ID NO: 309738 - DNA, 68 bp, Artificial Sequence
  ENSG00000134262_43 (sequence is synthesized)
tagctctgttgcccaggctggagtgcagtaatgccatcttagctcactgcaactaactacaggtgtgc

SEQ ID NO: 309739 - DNA, 120 bp, Artificial Sequence
  ENSG00000134262_44 (sequence is synthesized)
cagatacatttttaagaagcttcacagatgactctgatgtgcactctaggttagtaaccatttttgtgaaaaatttagagaaattctttgagcagcttccactgaaacactaaaacccaa

SEQ ID NO: 309740 - DNA, 120 bp, Artificial Sequence
  ENSG00000134262_45 (sequence is synthesized)
tagggccaaaggccccaaacctgaggaaaccttatttattgcttaatccaacataggctatgaaagttttgagtttcctcttgtgtattagaatttcattcctatttgttgtagagagta

SEQ ID NO: 309741 - DNA, 120 bp, Artificial Sequence
  ENSG00000134262_46 (sequence is synthesized)
taaatgaagtaaactaaagattacaccttttctgctggcactaagcgaaaagcaaaaccagtggctgtctattatctcctgtgttttagacagtcaagtgttgagcacttgctcttattc

SEQ ID NO: 309742 - DNA, 120 bp, Artificial Sequence
  ENSG00000134265_0 (sequence is synthesized)
ctatttgggcggattcttggcgccggaggaagaggcagggtcaccctctctccacgtcagagacctgactgtggagatggcggctcagaagataaacgaggggctggaacacctcgccaa

SEQ ID NO: 309743 - DNA, 120 bp, Artificial Sequence
  ENSG00000134265_1 (sequence is synthesized)
agcagagaaatacctgaaaactggttttttaaaatggaagccagattatgacagtgccgcttctgaatatggaaaagcagctgttgcttttaaaaatgccaaacagtttgagcaagcaaa

SEQ ID NO: 309744 - DNA, 120 bp, Artificial Sequence
  ENSG00000134265_2 (sequence is synthesized)
agatgcctgcctgagggaagctgttgcccatgaaaataatagggctctttttcatgctgccaaagcttatgagcaagctggaatgatgttgaaggagatgcagaaactaccagaggccgt

SEQ ID NO: 309745 - DNA, 120 bp, Artificial Sequence
  ENSG00000134265_3 (sequence is synthesized)
tcagctaattgagaaggccagcatgatgtatctagaaaacggcaccccagacacagcagccatggctttggagcgagctggaaagcttatagaaaatgttgatccagagaaggctgtaca

SEQ ID NO: 309746 - DNA, 120 bp, Artificial Sequence
  ENSG00000134265_4 (sequence is synthesized)
gttatatcaacagacagctaatgtgtttgaaaatgaagaacgcttacgacaggcagttgaattactaggaaaagcctccagactactagtacgaggacgtaggtttgatgaggcggcact

SEQ ID NO: 309747 - DNA, 120 bp, Artificial Sequence
  ENSG00000134265_5 (sequence is synthesized)
ctctattcagaaagaaaaaaatatttataaggaaattgagaattatccaacttgttataagaaaacaattgctcaagtcttagttcatctacacagaaatgactatgtagctgcagaaag

SEQ ID NO: 309748 - DNA, 120 bp, Artificial Sequence
  ENSG00000134265_6 (sequence is synthesized)
atgtgtccgggagagctatagcatccctgggttcaatggcagtgaagactgtgctgccctggaacagcttcttgaaggttatgaccagcaagaccaagatcaggtgtcagatgtctgcaa

SEQ ID NO: 309749 - DNA, 120 bp, Artificial Sequence
  ENSG00000134265_7 (sequence is synthesized)
ctcaccgcttttcaagtacatggacaatgattatgctaagctgggcctgagtttggtggttccaggagggggaatcaagaagaaatcacctgcaacaccacaggccaagcctgatggtgt

SEQ ID NO: 309750 - DNA, 120 bp, Artificial Sequence
  ENSG00000134265_8 (sequence is synthesized)
cactgccacggctgctgatgaagaggaagatgaatactcaggaggactatgctagtattttgcttgctgaaaagaaaagggaaacaaaggtaaaatcctgacatgccatttcaaggactt

SEQ ID NO: 309751 - DNA, 120 bp, Artificial Sequence
  ENSG00000134265_9 (sequence is synthesized)
gggaatagattagggatatccgtacttcattacagtcatgattttggatcctaataaagactagtttttagttaccatcttcccaaatcactcattgtatccattacctgtgaagcatat

SEQ ID NO: 309752 - DNA, 120 bp, Artificial Sequence
  ENSG00000134265_10 (sequence is synthesized)
ctttttctttccataagagcttttctaagacaccagcaggaattaacagaaaatgtactgtcatgttttaatacattgattaaaaaatttgcaagccaaattatacataaattatgttct

SEQ ID NO: 309753 - DNA, 120 bp, Artificial Sequence
  ENSG00000134265_11 (sequence is synthesized)
aaacaaaaggggtaataagcataggtattctctcttggacacttgtaagttactgttagtgaattgttttttacgtttcatttaataattgctgctaaaggtgatgtttactgataaatc

SEQ ID NO: 309754 - DNA, 120 bp, Artificial Sequence
  ENSG00000134265_12 (sequence is synthesized)
attttaaaatttttttgttttgaaaagtaaatttatcccccatgatgttagatacatttaaattattaagtcttttcagagatgagatggggacaggaagttattttgagccttacaata

SEQ ID NO: 309755 - DNA, 120 bp, Artificial Sequence
  ENSG00000134265_13 (sequence is synthesized)
ttatttagcccaataaaagatgcattgaagctcttatatattatgagtttgaaaaattttgaaggtagcatattgaagtgatctataaatatcttcagtcctctctgaagtgtgggtatt

SEQ ID NO: 309756 - DNA, 84 bp, Artificial Sequence
  ENSG00000134265_14 (sequence is synthesized)
tctacttggttcttgaccaaataggagctaatgggtaatgaatacctttttgtttgagggtctcactcttttgcccaggctgga

SEQ ID NO: 309757 - DNA, 120 bp, Artificial Sequence
  ENSG00000134265_15 (sequence is synthesized)
ctaatgtttttatttttaatttgtaattttttttttattttttttgttgagatggagttgctccatgttgcacaggctgttctcaaactcctaagctcaagccatctgcctgccttggcc

SEQ ID NO: 309758 - DNA, 120 bp, Artificial Sequence
  ENSG00000134265_16 (sequence is synthesized)
gggattgtagacataagccacctcacccagcctatgaatatctttctaacattgtaagaatgaggtaatgtttccatcagtctaatacagatatatttcttccctccaaaacagtttatt

SEQ ID NO: 309759 - DNA, 120 bp, Artificial Sequence
  ENSG00000134265_17 (sequence is synthesized)
ttgattgtttattttattttgattgtaactccgtcataacttgacatggaaaatgctatatactatgaaaacttagctgaaagggaagaattgttttagaaagacaatatttaaaacacc

SEQ ID NO: 309760 - DNA, 120 bp, Artificial Sequence
  ENSG00000134265_18 (sequence is synthesized)
gcactgccaatatattgatcctttatagttatttcctaaaatgctgttttcgaaacattcctttttcaccctgttgtgtggcttagacccatctcgtaatctgttaattggaaagaggct

SEQ ID NO: 309761 - DNA, 120 bp, Artificial Sequence
  ENSG00000134265_19 (sequence is synthesized)
acagacaccagcagtgtgcgttctgcaggtacacgctgccaaagtaattcctgctcatccatgccctgtctctgtctcttttagagtcataccttatttgagtataggttgcttaatttt

SEQ ID NO: 309762 - DNA, 120 bp, Artificial Sequence
  ENSG00000134265_20 (sequence is synthesized)
gctagacttcctgaaaacactaaggtggagtatcagaagtgattttagtcacagttctgcgggagagcttagaataacatcctcctttgggaggtggtctcgggtgcgtggatgttggta

SEQ ID NO: 309763 - DNA, 120 bp, Artificial Sequence
  ENSG00000134265_21 (sequence is synthesized)
tacagtctttattgtaagtctgatacaaaatgctaataaatttaatgtttttcttccttaatttattggcatagttcttcaggtagcacctcatttttattaatgatattgggattaact

SEQ ID NO: 309764 - DNA, 120 bp, Artificial Sequence
  ENSG00000134265_22 (sequence is synthesized)
atgaacaagctatatgtagacatttgcatttaaggacattgcagtgtttcaaagatcccatcattgcagcttgtatcctttagatccaatcggaaacttctggagtcttacattaatgct

SEQ ID NO: 309765 - DNA, 120 bp, Artificial Sequence
  ENSG00000134265_23 (sequence is synthesized)
catttgagctaattagtaatctgtttaaacagatttggcaatactttaaagatactgtagactatttatgtatagatagatcatattacccattaaagtctgggggaaaaaattttttaa

SEQ ID NO: 309766 - DNA, 120 bp, Artificial Sequence
  ENSG00000134265_24 (sequence is synthesized)
ttttactcttcttatgtactgaaaactttttttaaaaaaggtgatgatgaagtgcattctgtagcagcagcgcagctatgctttaaaccacacaaaaggctgtgtccaggtgcagcctcc

SEQ ID NO: 309767 - DNA, 120 bp, Artificial Sequence
  ENSG00000134265_25 (sequence is synthesized)
ttcacccttcctgcccacggtgaggattgaataaccaggacttggggatattgtttgttgtcagggttattctgtgtggtaaggaatatttgtttcacatttatacattttctttttcca

SEQ ID NO: 309768 - DNA, 120 bp, Artificial Sequence
  ENSG00000134265_26 (sequence is synthesized)
ctcacgtaagtttctatcttgagagcatagtccaaagtgcaaaacttggtgtttacaaggaaaattgtcttccagaactccactgtcatcactttcaccaaagtggaagtttgcatgaat

SEQ ID NO: 309769 - DNA, 120 bp, Artificial Sequence
  ENSG00000134265_27 (sequence is synthesized)
atgctcagaatctaatattcaatgttctgttacattgtaagtgaagtccagctacaaaatagatttaatatattgaatttatttgtacatatgcagagtacggtatttctgtatggaatc

SEQ ID NO: 309770 - DNA, 120 bp, Artificial Sequence
  ENSG00000134265_28 (sequence is synthesized)
tgctttattcctatttttcccaactctgatgagtagaatattaaatgtgttgttatggaaatacagattattgcttctataggaagataattatgaaaataaaacctgaaactatataaa

SEQ ID NO: 309771 - DNA, 120 bp, Artificial Sequence
  ENSG00000134265_29 (sequence is synthesized)
aattagatgattttgacaagctgttttctcttgctgtaaatttactttactacctgtgaagtaaaatgtttttaaattagaaaatgattagaaaaattctgtatttttaaactatgaagg

SEQ ID NO: 309772 - DNA, 120 bp, Artificial Sequence
  ENSG00000134265_30 (sequence is synthesized)
ataaggtccacactggttcgcagagctacaatacttactttctattgtttgtgattttacttgatgatggttttacttgggatgaagtaaagtaaatctgtagacatgtgctgaagaatg

SEQ ID NO: 309773 - DNA, 120 bp, Artificial Sequence
  ENSG00000134265_31 (sequence is synthesized)
aagaagtagcacaggtattgaaaacacgtgaactactgtatcaatttttttaaatacagttttccttaggtatttgaaataaaaattataagtagtttaaaacagtacattttcttgagg

SEQ ID NO: 309774 - DNA, 120 bp, Artificial Sequence
  ENSG00000134265_32 (sequence is synthesized)
tgtttgcaaacttatcaataaaaaatgtttctcttatttgcaaactgtagtcataataactttgtacttcagtaaaacttcagattattgcgtaatagaaatagtttaaaatctgtgcag

SEQ ID NO: 309775 - DNA, 120 bp, Artificial Sequence
  ENSG00000134265_33 (sequence is synthesized)
gctgtgtgtttaactatactttgaatccacatttggaactggaaagtaatttgggggatagcttgttaattttttggtataagctgtagacacaccaggccacacaatagaatattaaca

SEQ ID NO: 309776 - DNA, 120 bp, Artificial Sequence
  ENSG00000134265_34 (sequence is synthesized)
tttactagacagtaggcacactgaattagatattaaaagatctgctgttttttgaaagtgtaatgcccaaatttatcatgcactgtgcttttattggttgaaccctggctcagcaacatg

SEQ ID NO: 309777 - DNA, 120 bp, Artificial Sequence
  ENSG00000134265_35 (sequence is synthesized)
aaagggaacagtttccttcatctgttacttggttggattataatatctctctcaaggaaaaataagaatattaggataaatgacaaagatgcataaacactcacccatgaaaactgacag

SEQ ID NO: 309778 - DNA, 120 bp, Artificial Sequence
  ENSG00000134265_36 (sequence is synthesized)
atttgacccagcaatcccattactgggcatatgcccaaaggaacataaatcattctatagaaacgtatgtttatacagtaaacacgtatgtttattgtagcaccatttacaatagcaaag

SEQ ID NO: 309779 - DNA, 63 bp, Artificial Sequence
  ENSG00000134265_37 (sequence is synthesized)
tggatgaagctggaagccatcattcttggcaaactaacacacaaggacacatggacacaggga

SEQ ID NO: 309780 - DNA, 120 bp, Artificial Sequence
  ENSG00000134265_38 (sequence is synthesized)
cattctgcacatgtgtcccagaacttaaaataaaaaataattgcatttcagattgttaactctgtttttctttaattgatgcatttgctgacctgtctactgtatcctttgcccaaagga

SEQ ID NO: 309781 - DNA, 120 bp, Artificial Sequence
  ENSG00000134265_39 (sequence is synthesized)
ctctttgcggggcgcaccggcaggctcccagccccgcttcgtcgcagcggcttgggccctccggccctccgtagccgctcgactgtcgcgctgcaccagcttcctcctcggcgttcccac

SEQ ID NO: 309782 - DNA, 120 bp, Artificial Sequence
  ENSG00000134265_40 (sequence is synthesized)
ggactcggcgcagtgctgcggggcgagggcttctctacttgggcgctctgctcctgaagattgtggtgggggctgtctgtgcatcggaggctcgttagcagcatccttggcctctacctg

SEQ ID NO: 309783 - DNA, 120 bp, Artificial Sequence
  ENSG00000134265_41 (sequence is synthesized)
ctgggtgccggtcgcatctcttccccatttgtggcaacccaaaatgtcatctggggaacaacatcgctctgttgagaaccaccgccctagaagagccccctgtgtggaggggaccatagg

SEQ ID NO: 309784 - DNA, 80 bp, Artificial Sequence
  ENSG00000134278_0 (sequence is synthesized)
cggcgcgcgcggccgcgttgggcggcggcggttccggggatggtgaggcggcggcgcgcgacgacgatgctccggagctg

SEQ ID NO: 309785 - DNA, 120 bp, Artificial Sequence
  ENSG00000134278_1 (sequence is synthesized)
gggatggtgaggcggcggcgcgcgacgacgatgctccggagctgaggagacgccggcacacggcgcgactgccgagcgcagcgcccacccgcgggatggctcaggcggctggcccggcgg

SEQ ID NO: 309786 - DNA, 120 bp, Artificial Sequence
  ENSG00000134278_2 (sequence is synthesized)
ggcgaggggccgcgggagcccggggcagccggcggcgcggccgggggctcccgggacgcgctgagcctggaggagatcctgcggctgtacaaccagcccatcaacgaggagcaggcgtgg

SEQ ID NO: 309787 - DNA, 120 bp, Artificial Sequence
  ENSG00000134278_3 (sequence is synthesized)
cgaggagcaggcgtgggccgtgtgctaccagtgctgcggttccctgcgcgccgccgcccgccgccgccagccccgccaccgtgtgcgctcggccgcgcagatccgcgtctggagggacgg

SEQ ID NO: 309788 - DNA, 120 bp, Artificial Sequence
  ENSG00000134278_4 (sequence is synthesized)
cggccgacgacgcgggagagccgcccccagttgcgggtaaattgggatattcacaatgtatggaaacagaggtcattgaatctttgggaattattatttataaagcactggactatggtt

SEQ ID NO: 309789 - DNA, 120 bp, Artificial Sequence
  ENSG00000134278_5 (sequence is synthesized)
tgaaggagaatgaagaaagggaattaagccctcccctagagcagcttatcgatcacatggccaacacggtggaagctgacggtagcaatgatgagggctatgaggctgcagaagaaggcc

SEQ ID NO: 309790 - DNA, 120 bp, Artificial Sequence
  ENSG00000134278_6 (sequence is synthesized)
tgggagatgaagatgaaaagagaaaaatctcagctattcggtcatatagagatgtcatgaagttgtgtgctgctcatctccctactgaatcagatgcaccaaatcattatcaggcagtat

SEQ ID NO: 309791 - DNA, 120 bp, Artificial Sequence
  ENSG00000134278_7 (sequence is synthesized)
gtcgtgcactgtttgcagaaacaatggagctccatacatttctgaccaaaattaagagtgcgaaagagaatcttaagaagattcaagaaatggaaaagagcgatgaatctagcacagact

SEQ ID NO: 309792 - DNA, 120 bp, Artificial Sequence
  ENSG00000134278_8 (sequence is synthesized)
tggaagagctgaaaaacgctgactgggcacgattctgggtacaggtgatgagggatttgaggaatggggtaaaacttaagaaggtccaagagcggcagtacaaccctttgcccattgaat

SEQ ID NO: 309793 - DNA, 120 bp, Artificial Sequence
  ENSG00000134278_9 (sequence is synthesized)
atcagctcaccccttatgagatgttaatggatgacattcgctgcaaaagatacaccttgcgaaaagtgatggtgaatggtgatattccccctcggttaaaaaagagtgctcatgaaatca

SEQ ID NO: 309794 - DNA, 120 bp, Artificial Sequence
  ENSG00000134278_10 (sequence is synthesized)
tcctcgacttcatcagatccagacctcctttaaatccagtctcagccagaaaactgaaaccaactccaccacggccacggagcctccatgaaagaatattagaagaaattaaagcagaaa

SEQ ID NO: 309795 - DNA, 120 bp, Artificial Sequence
  ENSG00000134278_11 (sequence is synthesized)
gaaagctgcggcctgtatcaccagaggagattagacgtagcagattagatgtgactacccctgaatctacaaagaatcttgtggagtcatctatggtgaatggaggtttgacatcacaaa

SEQ ID NO: 309796 - DNA, 120 bp, Artificial Sequence
  ENSG00000134278_12 (sequence is synthesized)
caaaagaaaacgggttaagtacctcacagcaggtgcctgcacagcggaagaagctcctcagagccccaactctggccgaactggacagctctgagtctgaggaagaaacgctgcacaagt

SEQ ID NO: 309797 - DNA, 120 bp, Artificial Sequence
  ENSG00000134278_13 (sequence is synthesized)
cgaccagcagcagcagcgtgtctccctctttccctgaagagccagtcctggaggccgtgtccacaaggaagaagcctccaaaattcctgcccatatcatcaacaccccagccagagagac

SEQ ID NO: 309798 - DNA, 120 bp, Artificial Sequence
  ENSG00000134278_14 (sequence is synthesized)
ggcagccaccccagagacgacattccattgaaaaggaaacgcctactaacgtgaggcagttcctgccgccttccaggcagagttcccgctctcttgaggaattctgctacccagtggaat

SEQ ID NO: 309799 - DNA, 120 bp, Artificial Sequence
  ENSG00000134278_15 (sequence is synthesized)
gcctcgctcttactgtggaagaagtgatgcatattcgccaggtcctggtgaaggcagagctggaaaaataccaacagtataaagacatctacaccgccttgaaaaaaggaaagctctgct

SEQ ID NO: 309800 - DNA, 120 bp, Artificial Sequence
  ENSG00000134278_16 (sequence is synthesized)
tttgttgccgaaccaggaggttttccttcttcacttggtcttatacctgtcagttctgtaagaggccggtgtgctcacagtgttgcaaaaagatgcggctgccctccaaaccatactcca

SEQ ID NO: 309801 - DNA, 120 bp, Artificial Sequence
  ENSG00000134278_17 (sequence is synthesized)
ctcttcctatcttttcattgggaccttctgctctgcaaagaggggaaagtagtatgaggtcagaaaaaccctccactgcccatcatcggccacttcggagcattgccaggttctcctcaa

SEQ ID NO: 309802 - DNA, 120 bp, Artificial Sequence
  ENSG00000134278_18 (sequence is synthesized)
aatctaagtctatggacaaatcagatgaagaactccagtttcccaaagagttgatggaggactggagcaccatggaggtgtgtgtggactgcaagaagttcatttcggaaatcatcagtt

SEQ ID NO: 309803 - DNA, 120 bp, Artificial Sequence
  ENSG00000134278_19 (sequence is synthesized)
caagccggcgcagtctggtgttggccaacaaaagggcccgattgaaaaggaaaacgcagtctttctacatgtcctcgccaggcccctcggagtactgcccttcagagaggacgatcagtg

SEQ ID NO: 309804 - DNA, 120 bp, Artificial Sequence
  ENSG00000134278_20 (sequence is synthesized)
agatctgagcctcgtgcctttcagctgcttttgtgctacgagtcagcgtccgtgcgcgaggacactgagccgggctggctctcctttctgtggttttatttaatgggcttgaatttgcat

SEQ ID NO: 309805 - DNA, 120 bp, Artificial Sequence
  ENSG00000134278_21 (sequence is synthesized)
tagatcagatttttgccgcatcacattgttccacagactgaatgctgtgttcgtatcgattgatgaaacgtgacaggtccgccaattgctcgtttgcactgagagaggacaacagtttga

SEQ ID NO: 309806 - DNA, 120 bp, Artificial Sequence
  ENSG00000134278_22 (sequence is synthesized)
aacttacttttgtgtgtgtgtggctttggaagccagtagctacttccttagttcagttctttactgttcctcgaataatctcctgactaaggcaaaaaaaaaaagcttctcctacgagaa

SEQ ID NO: 309807 - DNA, 120 bp, Artificial Sequence
  ENSG00000134278_23 (sequence is synthesized)
gatgccgatgtcagcacagccctaagcagtaagtcatattggcatttccacgtgactgtgtttctatcccgtgtacagagagatccagagccctacactccacgacctgggggctcacag

SEQ ID NO: 309808 - DNA, 120 bp, Artificial Sequence
  ENSG00000134278_24 (sequence is synthesized)
cacagaacctagaagcacctgctgacactcttcaactgatttttaaatgttgttgcttggagataaaaattacataagggactttttgcctgcattctagtgcaaaacatctgaagagct

SEQ ID NO: 309809 - DNA, 120 bp, Artificial Sequence
  ENSG00000134278_25 (sequence is synthesized)
gtacacccacaagggtgactatttcccctgagtggccgtgttgtcccagtgccctggttcagtgtctcctgagtggatgacaggtcttcattctctatcttgaatgtattatggttacta

SEQ ID NO: 309810 - DNA, 120 bp, Artificial Sequence
  ENSG00000134278_26 (sequence is synthesized)
atagttttataatggaggtctaagaattaaagttgtgtgggagtttcaggacaaaggaaggctaaaagtttgtcaagacgttgagcgtattttggttacctatgagaagggttgtgacag

SEQ ID NO: 309811 - DNA, 120 bp, Artificial Sequence
  ENSG00000134278_27 (sequence is synthesized)
tgtacagtggcagctgttggccacgctgcagaaatgagctggagctcatgggttttcagctacatttttcataactttgtagtacatccatcttgagtaaattaagccacaatttggtac

SEQ ID NO: 309812 - DNA, 120 bp, Artificial Sequence
  ENSG00000134278_28 (sequence is synthesized)
ctagggtctcaaactaaaatttatttttataaatgaattttaaaagaaaaaatatctacttcttttaaagttagaagaaaattaacctgctgacaggcaacatttttggggtgctttctg

SEQ ID NO: 309813 - DNA, 120 bp, Artificial Sequence
  ENSG00000134278_29 (sequence is synthesized)
cactagttttccttgtaaatgatttgagtgagtaggtttggtttctgacgaaagtagactggagggtagcattgtatgcctcaaatgtctcagtgtgtttggctcatacgtgggctatac

SEQ ID NO: 309814 - DNA, 120 bp, Artificial Sequence
  ENSG00000134278_30 (sequence is synthesized)
tgtattattttggtatgcttacaaatgactaaccaatcaaattgtcattaatgtttggaaaatctgttaatgcacatgcacaataatttcctgaaagccataggacatgtctgtagtcag

SEQ ID NO: 309815 - DNA, 120 bp, Artificial Sequence
  ENSG00000134278_31 (sequence is synthesized)
caccacgatagcaccgtttcatgaaaggcatggcggctgcatttcataccacatcaaaatacagtaacatttctatactaaattaacagtaatacctcaaaactgctccggtagtagttt

SEQ ID NO: 309816 - DNA, 120 bp, Artificial Sequence
  ENSG00000134278_32 (sequence is synthesized)
ttaatggattgaaatttacagtttagtaaaaggcttaaaattacttatacttatgaaataaactttaccagttgactaaaataatgcatgttaacagttggtctgtatttgcatgtaaaa

SEQ ID NO: 309817 - DNA, 120 bp, Artificial Sequence
  ENSG00000134278_33 (sequence is synthesized)
gtgggccaccagagaacccttattgattacttaagtgtttacattattttaaagactcctgtttaagagctttcagaattgtactgggtgaatctcatttataaaacttcctaagagact

SEQ ID NO: 309818 - DNA, 120 bp, Artificial Sequence
  ENSG00000134278_34 (sequence is synthesized)
atctgaactctatactccagacagttaggtgggagtataaatctaccccttttgatgaccccaggcttgagtttttaaaatgactacccagaagggcacaagggggaaggaaatggtatt

SEQ ID NO: 309819 - DNA, 120 bp, Artificial Sequence
  ENSG00000134278_35 (sequence is synthesized)
tgtatatgtatataaatatgcacctaggagaatgtgctttttaaaataatgactactgtttttattaaaacataagaaactacacccccaaaataagactttcattcacattcacaaagc

SEQ ID NO: 309820 - DNA, 120 bp, Artificial Sequence
  ENSG00000134278_36 (sequence is synthesized)
aaacatctagtacatgtctttcacttcactttatgatagtgtattggatgatttgggcattacgatcacctcttaccacagcacagaacatacattcttcaacagcattaacggagtttg

SEQ ID NO: 309821 - DNA, 120 bp, Artificial Sequence
  ENSG00000134278_37 (sequence is synthesized)
ccaagtgcattaaagaggtcacgtggagggtacgttcatatgaaacaatctgcagaaagtggggtaagaaagggcacatggcacagttaaagttgtagaaatcaaattactatcattttt

SEQ ID NO: 309822 - DNA, 120 bp, Artificial Sequence
  ENSG00000134278_38 (sequence is synthesized)
tgttgccaaaacaaagtcttacatttaacccccctttctaccacccccctccacacttcacgtcagctacatagtttccacagggtaattcactaagagcttgtggagcttggttttaaa

SEQ ID NO: 309823 - DNA, 120 bp, Artificial Sequence
  ENSG00000134278_39 (sequence is synthesized)
atccttagcctggtctgactttaggcatagcttccagttcttccttccgtgtcctggtttcttgttcagttttacttctaatccaacaacaaaagaaatgtctggctggtctcagctaga

SEQ ID NO: 309824 - DNA, 120 bp, Artificial Sequence
  ENSG00000134278_40 (sequence is synthesized)
gtctgatgtgtcttagagcatgtgtgcgtatctgaaccatcatccctgctctcatctcagctccctccaggcctgagcaccggttccttttgtcccatacgtcatgaagtcacactattg

SEQ ID NO: 309825 - DNA, 120 bp, Artificial Sequence
  ENSG00000134278_41 (sequence is synthesized)
ggaaacctgtgcttccctctccatggcttaactccctgtcagtgtcggagtgtataagaatgcttgtaaatactgtaatatatttattaatatttgaaaggcattcattcagtggacagt

SEQ ID NO: 309826 - DNA, 120 bp, Artificial Sequence
  ENSG00000134278_42 (sequence is synthesized)
gggaattaactctcccaaggcaagtgaaaatgaatgattgacgtacgttgatttaacaatcttactagattttaattcttaaggatttcaaatgaaaccagaaggtggttatgtaagagg

SEQ ID NO: 309827 - DNA, 120 bp, Artificial Sequence
  ENSG00000134278_43 (sequence is synthesized)
cttaaaatgatcttatgtttaaagagattctgttattagcaccatgaactcgtactatgaaatttttaagccttttatttttctaactatattactgtaggactggatattaggtgtcat

SEQ ID NO: 309828 - DNA, 120 bp, Artificial Sequence
  ENSG00000134278_44 (sequence is synthesized)
ataggaaacacaaaagtttattgctgtttgctaaagcaaaatagcagaaaattttgtatatgcaaaactgttgaaggaccatagagaaatgtgtactactgacggggcttttactaggct

SEQ ID NO: 309829 - DNA, 120 bp, Artificial Sequence
  ENSG00000134278_45 (sequence is synthesized)
tcctgcgtgtgtaaaagtcgaggtattgctggcattcagggtgacatgatggtactaaatgttttccattaaagtcttctattttaaaatttagagaaaaataaaatggctttccatcag

SEQ ID NO: 309830 - DNA, 120 bp, Artificial Sequence
  ENSG00000134278_46 (sequence is synthesized)
agatgctcattgaagaggaggaggaggttgagaaaaggtttctcccatcagtttttatctaattcattcttttgagaggattggggcataagtgaggataatatatgtcaagtggcaaga

SEQ ID NO: 309831 - DNA, 120 bp, Artificial Sequence
  ENSG00000134278_47 (sequence is synthesized)
attgaagaggaggaggaggttgagaaaaggtttctcccatcagtttttatctaattcattcttttgagaggcaagtctattaaaaacatagaaaaacaatctaccctcacttttagaaag

SEQ ID NO: 309832 - DNA, 120 bp, Artificial Sequence
  ENSG00000134278_48 (sequence is synthesized)
gtgggctaggtgtgagggtaaattgggatattcacaatgtatggaaacagagcctatttaatagcagtaaataacatatgaaagccactattaactgtcattgaatctttgggaattatt

SEQ ID NO: 309833 - DNA, 120 bp, Artificial Sequence
  ENSG00000134278_49 (sequence is synthesized)
actcagatgctcattgaagaggaggaggaggttgagaaaaggtttctcccatcagtttttatctaattcattcttttgagaggtaaattgggatattcacaatgtatggaaacagagttg

SEQ ID NO: 309834 - DNA, 120 bp, Artificial Sequence
  ENSG00000134278_50 (sequence is synthesized)
ctcttgttcctaggataaccagtgtatggccaaggacgccttttcgaccacttttttctaccatacaaacagcttctctgctcagctctcatccttttgaagcagccatgtttggggtag

SEQ ID NO: 309835 - DNA, 120 bp, Artificial Sequence
  ENSG00000134278_51 (sequence is synthesized)
gtttactcagatgctcattgaagaggaggaggaggttgagaaaaggtttctcccatcagtttttatctaattcattcttttgagaggtaaattgggatattcacaatgtatggaaacaga

SEQ ID NO: 309836 - DNA, 120 bp, Artificial Sequence
  ENSG00000134278_52 (sequence is synthesized)
aaaccgtatgggatgcatttctcaacagaaggatctttatcagaggaaggagcagggaggctttcttgaaaaattaatgctgtccactgaagacttgctcgtctagtgcaagttaaaata

SEQ ID NO: 309837 - DNA, 120 bp, Artificial Sequence
  ENSG00000134278_53 (sequence is synthesized)
atcccagttgagaaccactgctctagcaggtggtgcccaggattgtgttcagggtagagaagtggattctggctgtaatcctcaagtaaattgggatattcacaatgtatggaaacagag

SEQ ID NO: 309838 - DNA, 120 bp, Artificial Sequence
  ENSG00000134278_54 (sequence is synthesized)
tattgtggaaacttacaactgtactgccataggcttctctaactcccagttgcgtcccctggtatcatgccaaataacatttatgattttgtttacaggccggtgtgctcacagtgttgc

SEQ ID NO: 309839 - DNA, 120 bp, Artificial Sequence
  ENSG00000134283_0 (sequence is synthesized)
acctgggataacggcggcgagcggacggctgcatttacggggtctcccggagggccagagtcgtggcttacagaagagacgaaatgtggtctgagggacgatatgaatatgaaagaattc

SEQ ID NO: 309840 - DNA, 120 bp, Artificial Sequence
  ENSG00000134283_1 (sequence is synthesized)
cgagagaacgagcacctcctcgaagtcatcccagtgatggctacaatagactagttaatattgtgccaaagaaaccaccactgctagacagacctggtgaaggaagctacaatagatatt

SEQ ID NO: 309841 - DNA, 120 bp, Artificial Sequence
  ENSG00000134283_2 (sequence is synthesized)
acagtcatgttgattaccgagactatgacgagggccgcagtttttctcatgatcgaagaagtggtccacctcacagaggagatgaatctggttatagatggacaagagacgatcattctg

SEQ ID NO: 309842 - DNA, 120 bp, Artificial Sequence
  ENSG00000134283_3 (sequence is synthesized)
caagcaggcaacctgaatacagggacatgagagatggctttagaagaaaaagtttctactcttcccattatgcgagagagcggtctccttataaaagggacaatacttttttcagagaat

SEQ ID NO: 309843 - DNA, 120 bp, Artificial Sequence
  ENSG00000134283_4 (sequence is synthesized)
cacctgttggccgaaaggattctccacacagcagatctggttccagtgtcagtagcagaagctactctccagaaaggagcaaatcatactctttccatcagtctcaacatagaaagtccg

SEQ ID NO: 309844 - DNA, 120 bp, Artificial Sequence
  ENSG00000134283_5 (sequence is synthesized)
tgcgtcctggtgcctcctacaaacggcagaatgaaggaaatcctgaaagagataaagagaggcctgtccagtctttgaaaacatcaagagatacttcaccctcaagtggttcagcagttt

SEQ ID NO: 309845 - DNA, 120 bp, Artificial Sequence
  ENSG00000134283_6 (sequence is synthesized)
cttcatcaaaggtgttagacaaacccagtaggctaactgaaaaggaacttgctgaggctgcaagcaagtgggctgctgaaaagctagagaaatcagatgaaagtaacttgcctgaaattt

SEQ ID NO: 309846 - DNA, 120 bp, Artificial Sequence
  ENSG00000134283_7 (sequence is synthesized)
tcaaacacaacacatgggatagaattatttgaagatagtcagctaaccactcgctctaaagcaatagcatcaaaaaccaaagagattgaacaggtttaccgacaagactgtgaaactttc

SEQ ID NO: 309847 - DNA, 120 bp, Artificial Sequence
  ENSG00000134283_8 (sequence is synthesized)
gggatggtggtgaaaatgctgattgaaaaagatccttcattagaaaagtctatacagtttgcattgaggcagaatttacatgaaataggtgagcggtgtgttgaagaactcaagcatttc

SEQ ID NO: 309848 - DNA, 120 bp, Artificial Sequence
  ENSG00000134283_9 (sequence is synthesized)
attgcagagtatgatacttccactcaagattttggagagcctttttagatttttctgctcaggctaaaaaaaaaaaaaaacagtttctaaaaattttttttcctggattgtgtaaatcct

SEQ ID NO: 309849 - DNA, 120 bp, Artificial Sequence
  ENSG00000134283_10 (sequence is synthesized)
taatatatggaatttttgtgatgcagagaaatactttatgatagttgacaacatttcagtattaaataaacatctaaaatagtctgtttaaaatgtttgattcaaatttttgtatttttt

SEQ ID NO: 309850 - DNA, 120 bp, Artificial Sequence
  ENSG00000134283_11 (sequence is synthesized)
acacatataccatctgaaaatgttagaattctgagttgtgattttattgacttgttgcttgctttttcttaggctttgtaacttgtaatatgttaaagtgtactatcctaataaactgaa

SEQ ID NO: 309851 - DNA, 120 bp, Artificial Sequence
  ENSG00000134283_12 (sequence is synthesized)
tactttggtatcttagagaatatttgctttgagagtaattctcattcaatgataaaatagagcacttaaatctctgagagatacctcagaaaaaaatccgtttttccaagtaatgaactc

SEQ ID NO: 309852 - DNA, 120 bp, Artificial Sequence
  ENSG00000134283_13 (sequence is synthesized)
agtgtcttctattacaataatcctgaaactcctgactctctcactgatgtatgagtcttaaataatatcatatacaagactaataaatagaagatgcagtttgaggtggaaggtgaggga

SEQ ID NO: 309853 - DNA, 120 bp, Artificial Sequence
  ENSG00000134283_14 (sequence is synthesized)
attgcgcgcgccggaagtacctacctgggataacggcggcgagcggacggctgcatttacggggtctcccggagggccagagtcggaaattgttgaaaacgttaaatttgattcctaaaa

SEQ ID NO: 309854 - DNA, 120 bp, Artificial Sequence
  ENSG00000134283_15 (sequence is synthesized)
agcaggtaccccctgtgaggaacactgaaatggatcacgacggaacccccgaaaacgaaggcgaagagactgcgcagtcaaaccttgaaacagccctcattaagtctactctcgagccgg

SEQ ID NO: 309855 - DNA, 120 bp, Artificial Sequence
  ENSG00000134283_16 (sequence is synthesized)
ccctgtgtgccttttttctttgacttcagtaattgctaaatcaatgtacacattctatttttatcacacatatttgagcccacagctcactgcctgacccactggcttatggcaatgatc

SEQ ID NO: 309856 - DNA, 79 bp, Artificial Sequence
  ENSG00000134283_17 (sequence is synthesized)
cacagctcactgcctgacccactggcttatggcaatgatcaagcagacctgcaggttatgatgtcactgcttgagaaac

SEQ ID NO: 309857 - DNA, 120 bp, Artificial Sequence
  ENSG00000134283_18 (sequence is synthesized)
aacttttctggagtaccatcgaaactgcactgatatgaggagatgtagtgatgatgtggcaggaaattgttgaaaacgttaaatttgattcctaaaaggactcaatggcttacagaagag

SEQ ID NO: 309858 - DNA, 120 bp, Artificial Sequence
  ENSG00000134283_19 (sequence is synthesized)
cgagcacctcctcgaagtcatcccagtgatgaatctggttatagatggacaagagacgatcattctgcaagcaggcaacctgaatacagataaagagaggcctgtccagtctttgaaaac

SEQ ID NO: 309859 - DNA, 120 bp, Artificial Sequence
  ENSG00000134283_20 (sequence is synthesized)
ccccgcagcccccgcaggccccgcagcccctgcagccccggaagaaacgggttcgtcggacgacacagcttcgtcggacgacaggagccccagacattacctgggggatgctgaagaaga

SEQ ID NO: 309860 - DNA, 120 bp, Artificial Sequence
  ENSG00000134283_21 (sequence is synthesized)
caactcaggaggctgagaggatcctgctccgaacacagacaccattcactccagaaaatttgttccttgctatgctctctgttgtacattgcaactcacgcaaggatgtaaagccagaaa

SEQ ID NO: 309861 - DNA, 120 bp, Artificial Sequence
  ENSG00000134283_22 (sequence is synthesized)
acaagcagtaactgctatgcctgacaaaactgttgctgcacacatctgtactcgtcaatcaacaaaacctgatgcaaaaaacagaaaaggggtgatgtaggagatggtcaggttggtagg

SEQ ID NO: 309862 - DNA, 120 bp, Artificial Sequence
  ENSG00000134283_23 (sequence is synthesized)
agaagctataaggaaagacgcaattggaaggtcgggaggttttccaaagcttcaggagagaataaagctgaaggcagctttattaattaattctcttaccctgaggctgagggcgaacag

SEQ ID NO: 309863 - DNA, 120 bp, Artificial Sequence
  ENSG00000134283_24 (sequence is synthesized)
taggtagcaagggagtgtaaaggaatttatctagataagtttgtttacttatgccctccggaaatcatgcaagactgctccctgcaaaggggggcgacaatgttcattactcacaaattg

SEQ ID NO: 309864 - DNA, 120 bp, Artificial Sequence
  ENSG00000134283_25 (sequence is synthesized)
tgttggcttcaggcctttggtattctgtctctactgaataaatacaaatggttccagcctatcaggactgcactctcttctcggctgcactaaagctggcactcccccagccgttctcat

SEQ ID NO: 309865 - DNA, 120 bp, Artificial Sequence
  ENSG00000134283_26 (sequence is synthesized)
gcaaaatacctgtgtcagaatactcctttcatccatcactcagccagagtcttcaggacagactccgcatgggacttgtccaaaaaaactctaatcaaaagaggaaaattttggaatatg

SEQ ID NO: 309866 - DNA, 120 bp, Artificial Sequence
  ENSG00000134283_27 (sequence is synthesized)
ccaggaatagtggaattttattttttaaatttttttataggcccatatgctctatctcaagaaacaagatgattgtaacatgtccatgattaaactattggcagattattgctgtgttaa

SEQ ID NO: 309867 - DNA, 120 bp, Artificial Sequence
  ENSG00000134283_28 (sequence is synthesized)
taggcagttagcacagcacagctaccccttaccaagcagtctatggaaacaacccctcatccaaatcatgggttagttaagaatctaactggggcaattaagatgaattccactcacttc

SEQ ID NO: 309868 - DNA, 120 bp, Artificial Sequence
  ENSG00000134283_29 (sequence is synthesized)
ctggtcacttcagcagcccagcggcattgagccaaaatatacaattctgtgttattagtgaggaaactttaaaactcatgtttgttattacttactacccaatttcattatcctcccttc

SEQ ID NO: 309869 - DNA, 120 bp, Artificial Sequence
  ENSG00000134283_30 (sequence is synthesized)
ctctttccatttctattctctctcacttgaattctggcattatttttagtggcctctactgataatacctaccctagagtacataaaaattatattaaaagaggaagtagcagtatgcat

SEQ ID NO: 309870 - DNA, 120 bp, Artificial Sequence
  ENSG00000134283_31 (sequence is synthesized)
aattttaacagattctataatgggtgcctcaaaatatgtattgtgccattccgcaaatttaaaagctaattgaggacaatttttttttaatttcctaaatgagaccaccttggattttta

SEQ ID NO: 309871 - DNA, 120 bp, Artificial Sequence
  ENSG00000134283_32 (sequence is synthesized)
tttttgccatttagatgtttatacttatttagcttttataaaacataagccaagctaaatcccacataacaactctggtattcttccctcatatgagcagtgattttatttgttacccac

SEQ ID NO: 309872 - DNA, 120 bp, Artificial Sequence
  ENSG00000134283_33 (sequence is synthesized)
cttagatagactaagaaagttctagtcttgtttctccttctccccgcttccctggggtttttccttaccataagtattctggtccgagggttcagttcctttagtcaagatgtcacaagt

SEQ ID NO: 309873 - DNA, 120 bp, Artificial Sequence
  ENSG00000134283_34 (sequence is synthesized)
ttaaaaacaaaacttgagaaactaccaaaggctcaggagttgtccactttgttgaaatccattaaattagagaagtctcactaacagatgtatttaaatataggtacaacaaataatttc

SEQ ID NO: 309874 - DNA, 120 bp, Artificial Sequence
  ENSG00000134283_35 (sequence is synthesized)
tttttctccccttccccaaattacagtcagcatttaaagctgtttatggcttgccatcagcattattctggtaggcttgttagtgttaaaatctatttgattttttttttttttttttgc

SEQ ID NO: 309875 - DNA, 120 bp, Artificial Sequence
  ENSG00000134283_36 (sequence is synthesized)
ctcttaaagtctaattttaggatggatgaattcagatgtttaccagagtgtgtattttacataatgttcttgattaaaaagacttgtttgtaaattatccgttgtttttgcatatgccca

SEQ ID NO: 309876 - DNA, 120 bp, Artificial Sequence
  ENSG00000134283_37 (sequence is synthesized)
gttgatgtgataaaattttcattgtcttgccatataaagccttggttatcaacaggtggaatgtagatattgtaaagctttttgtgaattaaaagtgcaaaataaagcaaccacatttaa

SEQ ID NO: 309877 - DNA, 120 bp, Artificial Sequence
  ENSG00000134283_38 (sequence is synthesized)
ggacagacttggcagcaggtaccccctgtgaggaacactgaaatggatcacgacggaacccccgaaaacgaaggcgaagagactgcgcagtcagtaagtcattggtgcccgctcgggatt

SEQ ID NO: 309878 - DNA, 120 bp, Artificial Sequence
  ENSG00000134283_39 (sequence is synthesized)
tccaagttcaggggaattctcaagctagggtttcatcatgggacaacagctatccacacaacagaaacagtatataaaagtattgaaacaactgcttaaagctagcagagcctcggtttc

SEQ ID NO: 309879 - DNA, 120 bp, Artificial Sequence
  ENSG00000134283_40 (sequence is synthesized)
gcaggctcaattaagggacccagtgcaaactgttgtttcccataacccatggtccccagaagaaggcacgctggacctagagctttgggaaaaagtggggagaaatcttaaacgatatca

SEQ ID NO: 309880 - DNA, 120 bp, Artificial Sequence
  ENSG00000134283_41 (sequence is synthesized)
tgcacaagggcaatgggtcccagtaaaatctttaacgttatgggccttagttaaggctactttggccttgctctacacagaagagcctaagaagggaaaggaggaggaaccatcacctta

SEQ ID NO: 309881 - DNA, 120 bp, Artificial Sequence
  ENSG00000134283_42 (sequence is synthesized)
tcgcctcctcttcctccctcagtcctgccgttaccagataaagataccaaagaggaaacggaggttttccctgagccccctcccccaataaattggaaaaaagacaacagatacactaca

SEQ ID NO: 309882 - DNA, 120 bp, Artificial Sequence
  ENSG00000134283_43 (sequence is synthesized)
gctatgggaccctgttttaggcaagcggcattagaaggggacctcttggcctgcccagtgatacaaaattgacaaggcaatcaagtatatgaacccattactttttatgcttataaagag

SEQ ID NO: 309883 - DNA, 120 bp, Artificial Sequence
  ENSG00000134283_44 (sequence is synthesized)
ataagaaaaagcattagagaaaatggagctgctagtagcccatttacgaaaggattaattaaggccatagcagacaacttccatataaccctataggactggtcagtgctagctaaaaca

SEQ ID NO: 309884 - DNA, 120 bp, Artificial Sequence
  ENSG00000134283_45 (sequence is synthesized)
attttagaggccagtcagtacctcccctggaggacagaatttgatgaattatataaacagcaaacctctttctagtagtagaacactggcctttaaagggagagaaattacaactgagcc

SEQ ID NO: 309885 - DNA, 120 bp, Artificial Sequence
  ENSG00000134283_46 (sequence is synthesized)
agtaaattagttgagcaattaaaagccggccatatagaaccatcaaacagcccttggaatttgcccattttcgtcattcccaaaaggtctggcaaatggagacttttgcatggcttacaa

SEQ ID NO: 309886 - DNA, 120 bp, Artificial Sequence
  ENSG00000134283_47 (sequence is synthesized)
gctatcaatgctaatttgcaatctatggggccccttcaacaggctcccttcccccgcagcagtttctcaagattggcctatagttgttactgacttaaaagactgcttttatactattcc

SEQ ID NO: 309887 - DNA, 120 bp, Artificial Sequence
  ENSG00000134283_48 (sequence is synthesized)
ccttgcagaacaggacagagaaaaatttgcatttacaataccagctatcaacaatgaaaggctagctcacctattttattagaaagtactttctcaagcaatgctgaacagtcctaccat

SEQ ID NO: 309888 - DNA, 120 bp, Artificial Sequence
  ENSG00000134283_49 (sequence is synthesized)
agtactttctcaagcaatgctgaacagtcctaccatgtgtcagtattatgtaaatcaggctttgctccccaggagaaaagaatatcctagttgcaagattattcattttatggatgatat

SEQ ID NO: 309889 - DNA, 120 bp, Artificial Sequence
  ENSG00000134283_50 (sequence is synthesized)
tttatatgcctctgtcataaggaatacacagttaagaggtttaatcatagcacctgaaaaagtacagatgtcctcaccttagaaatatctttacatactaacttcctggtcaataagacc

SEQ ID NO: 309890 - DNA, 120 bp, Artificial Sequence
  ENSG00000134283_51 (sequence is synthesized)
tcaaaaggttaaattaaatactagcaactaacataccttaaataattatcaaaaattgctaggcgatattaactatctttgccccaccttgggcataactactgataaattacagaacct

SEQ ID NO: 309891 - DNA, 120 bp, Artificial Sequence
  ENSG00000134283_52 (sequence is synthesized)
gttttctatcctaaaaggcagtatagccctagactctcctaggtatttaacccccacagcaaaaagagaaattgaggaaatcaagctatttctcagaggcaactagatcacatagaccca

SEQ ID NO: 309892 - DNA, 120 bp, Artificial Sequence
  ENSG00000134283_53 (sequence is synthesized)
caatactcagtccaattgtttgttcttcctattaaacatttcccctacaggattaataggacagatggccccagggctgcacttcctagaataggttttttgctcacataccaggactaa

SEQ ID NO: 309893 - DNA, 120 bp, Artificial Sequence
  ENSG00000134283_54 (sequence is synthesized)
aacactatctccctatatccagctagttagtaaagtcatctatacagacagcggatgatgccatcagttgctaggttatgaccctgatgtcataagaattcccttgagtaaaaaacaatt

SEQ ID NO: 309894 - DNA, 120 bp, Artificial Sequence
  ENSG00000134283_55 (sequence is synthesized)
tgaagcagtcttgcccctatctctagaccttcagatagcactctctgattatgcaggccatataaaacatgcccttcctgctgacaaactacttcagttcttatctagtacttctgtagt

SEQ ID NO: 309895 - DNA, 120 bp, Artificial Sequence
  ENSG00000134283_56 (sequence is synthesized)
tattcctacaaaggtagtttcctcccccatacctaacgctgtaatgctttttaccgatggctctcgtaaaaatggaaaagcggctatctggtggaaaccacataactccctcactccatc

SEQ ID NO: 309896 - DNA, 120 bp, Artificial Sequence
  ENSG00000134283_57 (sequence is synthesized)
gagatttactagtactcagagagctgaggttggagccctaatattggccctagaaactttttctgttcagcccatcaatattgttagtgactctgcttactctgtttatttattgcagaa

SEQ ID NO: 309897 - DNA, 120 bp, Artificial Sequence
  ENSG00000134283_58 (sequence is synthesized)
cagttatggcaaacagatgttacacatgtccctgaatttggaaaactaagatatatacatgtatccgttgacacctattctcacctaattagcgcacatgctcttcctggaaagtccacc

SEQ ID NO: 309898 - DNA, 120 bp, Artificial Sequence
  ENSG00000134283_59 (sequence is synthesized)
ctcaacaattttgtcacacttggagcgtccaacattccacaggcatcccgtacaacccccaaggacaggccgtagtagaacgtgcccacttcacccttaaaaatatgctcagaaaacaat

SEQ ID NO: 309899 - DNA, 120 bp, Artificial Sequence
  ENSG00000134283_60 (sequence is synthesized)
ggagaatatgagtaaagaccctgcaacactactagcacaagccttacttacccttaatttctgaaatttagatgataaatttcagtcagctatagaaaagcactttgctaaaacctctcc

SEQ ID NO: 309900 - DNA, 120 bp, Artificial Sequence
  ENSG00000134283_61 (sequence is synthesized)
agacataaaactgcagttttatggaaagatgtaaatagtaatatatggcatggtccaaatgttttgctaacatggggaagaggatatgcttgtgttcacatcccctcaggccctctttgg

SEQ ID NO: 309901 - DNA, 120 bp, Artificial Sequence
  ENSG00000134283_62 (sequence is synthesized)
ctattaagcccattttctaaatctgccttttttcagccctattcccttcccagcgtctagcagtgtgactttttagctaggagggactaacatacccccagtggggttcctcagtaacag

SEQ ID NO: 309902 - DNA, 120 bp, Artificial Sequence
  ENSG00000134283_63 (sequence is synthesized)
ccatatggaaggatatgcaaaaaaaaatctctcctagaaagacccccactcctgggggtcgcttcttagttagaaaagaatattactaattatactcatgtttgtctcttgttgtttact

SEQ ID NO: 309903 - DNA, 120 bp, Artificial Sequence
  ENSG00000134283_64 (sequence is synthesized)
ttattttgaaaaatttcaaacttacagaaaagatggtagaatagtataacaaacaccatacacacacatttttttcaaactatttgaagtggcattctgcatgacacttacctttaattt

SEQ ID NO: 309904 - DNA, 120 bp, Artificial Sequence
  ENSG00000134283_65 (sequence is synthesized)
ctaactttatgtttaaaactgtctaaacatttcaggaatatctgctaaagttcctatgtagatcctcttgagctaccccttgattaactagttctcctcggtatctatataataactacc

SEQ ID NO: 309905 - DNA, 120 bp, Artificial Sequence
  ENSG00000134283_66 (sequence is synthesized)
tttgtatttttattgtgatatatcaaaaattagcatttaggagcatggaagaagtagcattcatggttttaaaatatgttttgcctttcttgaagtctctgtggctccatgtttacttac

SEQ ID NO: 309906 - DNA, 120 bp, Artificial Sequence
  ENSG00000134283_67 (sequence is synthesized)
ctgagaggtagttttagatattaacctatttaatgtaataatgtaatgaaaagttttagtactaaaataagtgtatgacccccacattaattccattacaaaattactttatcaaaaaca

SEQ ID NO: 309907 - DNA, 120 bp, Artificial Sequence
  ENSG00000134283_68 (sequence is synthesized)
aatatttcttgtggtatctaatatgtcaaatgctcttctagtctctgggaatataaagcctctgtcttcatgtagcctacattttaatatgaattatacatatttaacaaataacaaaac

SEQ ID NO: 309908 - DNA, 120 bp, Artificial Sequence
  ENSG00000134283_69 (sequence is synthesized)
ataatttttacaaagaaaaagcagggaatagagagtatttgtactgtccacacctgcttgtgtcttcacttgacgtctgagttatcttcaataatgtctcaggttttatgctatcacagt

SEQ ID NO: 309909 - DNA, 120 bp, Artificial Sequence
  ENSG00000134283_70 (sequence is synthesized)
agctatagcttttactgcctggcatctatctggcttctgtaagctgttctctgtatcaggtgggctcattgacgatttcctacttgaaagactttgtgaacagaaaatagctgttgttgt

SEQ ID NO: 309910 - DNA, 61 bp, Artificial Sequence
  ENSG00000134283_71 (sequence is synthesized)
acctgggataacggcggcgagcggacggctgcatttacggggtctcccggagggccagagt

SEQ ID NO: 309911 - DNA, 120 bp, Artificial Sequence
  ENSG00000134283_72 (sequence is synthesized)
gacgttggaatgactcagaaacaccaatatttcattcaagaatcagatggctacaatagactagttaatattgtgccaaagaaaccaccactgctagacagacctggtgaaggaagctac

SEQ ID NO: 309912 - DNA, 120 bp, Artificial Sequence
  ENSG00000134283_73 (sequence is synthesized)
tttactgggattttaaattttgaaagcaacaagcattatattctttttgtgactatgtagtataatagcactgataactagtgttccacatctcttggcattttgtaactcataaaaaaa

SEQ ID NO: 309913 - DNA, 120 bp, Artificial Sequence
  ENSG00000134283_74 (sequence is synthesized)
aaaatatttaaaaatatttgggcctggtgcggtggctcacactgttaatctccgtgctttgggaggccaaggcgggcaaatcacttgaggttaggagtttgataccagcctggccaacat

SEQ ID NO: 309914 - DNA, 120 bp, Artificial Sequence
  ENSG00000134283_75 (sequence is synthesized)
aatatgcttcatttctttttccacctgtaactctaaaactacaacttaaaaaattataaaaattgtttgagttgacttcacagtcagtttgatcagtatggtcccccacctggattgttt

SEQ ID NO: 309915 - DNA, 120 bp, Artificial Sequence
  ENSG00000134283_76 (sequence is synthesized)
atttttaaataaaaaacagacttcttttttacagaatattaatattctagttagtatgaagcaattaaaaattattaaagttaatagggatgggatggaagaaatgttcaatgtagcaaa

SEQ ID NO: 309916 - DNA, 120 bp, Artificial Sequence
  ENSG00000134283_77 (sequence is synthesized)
atgttagcaaatgttatttttgaatattgggattacagatgtttcttatgttttttcattatactttaaggtagtttccaaatattaaaggaaaaataaaggatactatttaagtctagt

SEQ ID NO: 309917 - DNA, 120 bp, Artificial Sequence
  ENSG00000134283_78 (sequence is synthesized)
aaagggttttataaaatgtaacattttgtacaggtgcttattgatgttgttactctctagtgcgttgaataaatgtaattacattgataataatattctaaaacctattggaaattaaga

SEQ ID NO: 309918 - DNA, 120 bp, Artificial Sequence
  ENSG00000134283_79 (sequence is synthesized)
acaaagtgaaaacttttctctaggtgctgtccgatttctacatcaattaaatccgtttccttttgttggatagggaatggtctcaaatcctagatgtgaccgtgtagcttatgttaatgt

SEQ ID NO: 309919 - DNA, 120 bp, Artificial Sequence
  ENSG00000134283_80 (sequence is synthesized)
cacactaatgtgaaaagataagaaccagaataggaaatttgtcatgcaaaccattggagtttcaaaatgaaggtggtgagcagtatcagatgcttagaggaatataaggaaaatggagac

SEQ ID NO: 309920 - DNA, 120 bp, Artificial Sequence
  ENSG00000134283_81 (sequence is synthesized)
tgagaaaattctgtttaatttggtgattgggaggcagttggtacctttcaagataccaattaaatgagagcataagtaaaaggtttgctcagtatatctatctttaacacaaagatgaat

SEQ ID NO: 309921 - DNA, 120 bp, Artificial Sequence
  ENSG00000134283_82 (sequence is synthesized)
gtctttattttatataaaattactgtccttttttttcttgacatgtttttatttccttttctccccttaccataatggatgctctgtgaaaacaagggctttgttttatcttgttttatt

SEQ ID NO: 309922 - DNA, 120 bp, Artificial Sequence
  ENSG00000134283_83 (sequence is synthesized)
tgtgaaaacaagggctttgttttatcttgttttatttactgctacatctgccatcaccgagaacagtatgtgtagcaggcttacaagaaatacttgtggccgggcgcggtggctcacgcc

SEQ ID NO: 309923 - DNA, 120 bp, Artificial Sequence
  ENSG00000134283_84 (sequence is synthesized)
gtgttagctaggtcatcgtgacaggcatgcctcacaccaagacggactatcaagacctgagccgacctgacttacataaatgacaaacactagtgctttacaaaggtggctggagttctc

SEQ ID NO: 309924 - DNA, 120 bp, Artificial Sequence
  ENSG00000134283_85 (sequence is synthesized)
catcttctaaaatcaacatccaatccccttcagtcagcatcttcagtattcccttgaggactggaaaaccaaagcagctacgtccatctgtaacgcacccgcaccggacaggcacgagat

SEQ ID NO: 309925 - DNA, 120 bp, Artificial Sequence
  ENSG00000134283_86 (sequence is synthesized)
gtcacgtccacctggcaccatccaaagagggtaaattggagaaatcacacctttcaaatgttaatctgacactgtaaacagcagttgagttctcatttacatgggcaaagaaagcacttt

SEQ ID NO: 309926 - DNA, 120 bp, Artificial Sequence
  ENSG00000134283_87 (sequence is synthesized)
ggtggccgcggctgcctcgggcgccggcgccgcctctccgcgctgttcccccgttgcccccttggtacccccggctgccggggactgcctcgcgctccagagcccctctgaggaggaaaa

SEQ ID NO: 309927 - DNA, 120 bp, Artificial Sequence
  ENSG00000134283_88 (sequence is synthesized)
ctgcctcgcgctccagagcccctctgaggaggaaaacgtctgtcccaccgactggcaggggatgctccgtcatcccgtgcgaagcctggtccaagtggcttacagaagagacgaaatgtg

SEQ ID NO: 309928 - DNA, 120 bp, Artificial Sequence
  ENSG00000134283_89 (sequence is synthesized)
tcccagacggggtggtggccgggcagagacctgtaaagccaatctcctccctccattactgctggaaaaatagcaaaatgtttccttttgatcattctggctcaatatcatcattagctg

SEQ ID NO: 309929 - DNA, 78 bp, Artificial Sequence
  ENSG00000134283_90 (sequence is synthesized)
acatgagagatggctttagaagaaaaagtttctactcttcccattatgcgagagagcggtctccttataaaagggaca

SEQ ID NO: 309930 - DNA, 120 bp, Artificial Sequence
  ENSG00000134285_0 (sequence is synthesized)
gtcctggctgccgccacccgaacagcctgtcctggtgccccggctccctgccccgcgcccagtcatgaccctgcgcccctcactcctcccgctccatctgctgctgctgctgctgctcag

SEQ ID NO: 309931 - DNA, 120 bp, Artificial Sequence
  ENSG00000134285_1 (sequence is synthesized)
tgcggcggtgtgccgggctgaggctgggctcgaaaccgaaagtcccgtccggaccctccaagtggagaccctggtggagcccccagaaccatgtgccgagcccgctgcttttggagacac

SEQ ID NO: 309932 - DNA, 120 bp, Artificial Sequence
  ENSG00000134285_2 (sequence is synthesized)
aagcaggtgattccaggtctggagcagagtcttctcgacatgtgtgtgggagagaagcgaagggcaatcattccttctcacttggcctatggaaaacggggatttccaccatctgtccca

SEQ ID NO: 309933 - DNA, 120 bp, Artificial Sequence
  ENSG00000134285_3 (sequence is synthesized)
gcggatgcagtggtgcagtatgacgtggagctgattgcactaatccgagccaactactggctaaagctggtgaagggcattttgcctctggtagggatggccatggtgccagccctcctg

SEQ ID NO: 309934 - DNA, 120 bp, Artificial Sequence
  ENSG00000134285_4 (sequence is synthesized)
ggcctcattgggtatcacctatacagaaaggccaatagacccaaagtctccaaaaagaagctcaaggaagagaaacgaaacaagagcaaaaagaaataataaataataaattttaaaaaa

SEQ ID NO: 309935 - DNA, 120 bp, Artificial Sequence
  ENSG00000134285_5 (sequence is synthesized)
gggactaaagacaacctgatgaggccacctggcatgacctccagcagccagtaacttgttagggaagagacctgcttgggccacatgggtctgctgcctgtgccaccacctttcccagaa

SEQ ID NO: 309936 - DNA, 120 bp, Artificial Sequence
  ENSG00000134285_6 (sequence is synthesized)
cactggacttctttcctgcccttttctacaactctacgctgtgtcagctgtacagccaccccccaccccttcctttcagcctccatcagggaagagacagtaaaaataatcacagtcaag

SEQ ID NO: 309937 - DNA, 120 bp, Artificial Sequence
  ENSG00000134285_7 (sequence is synthesized)
tgattcaaaacaaaacaaaaagcaactgttaaagccaagtctgccccataactttaaaagccatcattggtcactgccgatgtctatttttgaagggttgagatggacagatttcccaag

SEQ ID NO: 309938 - DNA, 120 bp, Artificial Sequence
  ENSG00000134285_8 (sequence is synthesized)
agatttcccaagatgcatatcttttgctttcagttctaacaaatgttctattagctaaaatgtgttgtactccacagagtattgggctcgtaattctttttttttttttgagatggagtt

SEQ ID NO: 309939 - DNA, 120 bp, Artificial Sequence
  ENSG00000134285_9 (sequence is synthesized)
acaggcatgagccaccgcgcctggctgggctcgttaattcttatcctagttccagcttagaggaaggcctggaaggagggtagggggaccaaggagaaacttttacccaaagccctatta

SEQ ID NO: 309940 - DNA, 120 bp, Artificial Sequence
  ENSG00000134285_10 (sequence is synthesized)
ccaaggagaaacttttacccaaagccctattacctccccattcccagtgctgcttatttgtacctcttctgcccactcatttctgttccacctgcccctttacttcttaagcagcatcct

SEQ ID NO: 309941 - DNA, 120 bp, Artificial Sequence
  ENSG00000134285_11 (sequence is synthesized)
catccttcttcctcttcagctcttatgttgaaactcctgttatctcataatcacgttgaatgtgctcattggttggttgattttttaaagtctagtttaaatccatttaatttcagccct

SEQ ID NO: 309942 - DNA, 120 bp, Artificial Sequence
  ENSG00000134285_12 (sequence is synthesized)
cgcttcacatacactacacggtgaggggtctggggggccggggcggggcctgggagggggcggcgccctgctgaaacacgtcagctttggcttggacacgtggcaagcggttcgggagaa

SEQ ID NO: 309943 - DNA, 120 bp, Artificial Sequence
  ENSG00000134285_13 (sequence is synthesized)
gaaactcggggctctggggtcgtcgagcacgtggcgaggggagagacgttgctcttccgtgcctcttttccctccttgcttttctgccagttcctacctggcacggagaagtgcagggtg

SEQ ID NO: 309944 - DNA, 120 bp, Artificial Sequence
  ENSG00000134285_14 (sequence is synthesized)
tccaggtctggagcagagtcttctcgacatgtgtgtggggtgagtatctcggcaggggtgggcctgggtaccccctttgcatgggtagaggctttctcggccatcctcactccttaagca

SEQ ID NO: 309945 - DNA, 120 bp, Artificial Sequence
  ENSG00000134285_15 (sequence is synthesized)
ggagaatgtggaataaaggaccctgcttcccactggacaggtccaggtcagtgggacctctgagggcattcaaagcctctgtgcctcttgcgctgttgcttttgtcgggggagttgaggc

SEQ ID NO: 309946 - DNA, 120 bp, Artificial Sequence
  ENSG00000134285_16 (sequence is synthesized)
acatggggagatggacacctttgctggccagcctgtttggtgttcaggtggaaaaattcgtgttttgggtgtgaagattcagggggttttgctgaaggagcttcagctggactgaggctg

SEQ ID NO: 309947 - DNA, 120 bp, Artificial Sequence
  ENSG00000134285_17 (sequence is synthesized)
gtaatctgactaggactctctctcaggccatcaaaatacccagtccctaagagctataaggagctatatactttgtttgatgcttgagaagatccagaccaagtttgtttagacagatag

SEQ ID NO: 309948 - DNA, 120 bp, Artificial Sequence
  ENSG00000134285_18 (sequence is synthesized)
agactctatccgtgtggttatttggaaatacgataaattagtagttagtatagagggttctcccacttacaaatggagaagagcctgtacatttcatattcacagaaagttttcctgcat

SEQ ID NO: 309949 - DNA, 120 bp, Artificial Sequence
  ENSG00000134285_19 (sequence is synthesized)
tcaaagacttgtcactggacccaagccacatgtgtagttggggtcaacatgattatcactggactctgctcgtaaatcctcctctactcttgtctaaaggaattcaagcccacatttaaa

SEQ ID NO: 309950 - DNA, 120 bp, Artificial Sequence
  ENSG00000134285_20 (sequence is synthesized)
aaaaaaaaaagtgaagtctttacataaatggattacgtgtgctgccctttgagaagtttgttgatgaaaggagaaaggaaatagtagcaccagaggaaaagatcagggatttaccctgtt

SEQ ID NO: 309951 - DNA, 120 bp, Artificial Sequence
  ENSG00000134285_21 (sequence is synthesized)
cttacaggataacagctccttgctcttttcagctagcttttcaaaggacagggataggacagccccctgccttatttcggatacttggatctataacctccagaaattcaagctgaagta

SEQ ID NO: 309952 - DNA, 120 bp, Artificial Sequence
  ENSG00000134285_22 (sequence is synthesized)
gctggaggtcggagaggaatgagaactgcctgggtggggtctgccagccagacactgccaggatagccacaaggagacgacttggaagaacagacagcaaccacgttggactcaggcagt

SEQ ID NO: 309953 - DNA, 120 bp, Artificial Sequence
  ENSG00000134285_23 (sequence is synthesized)
cctgggtttgaatcctgtctctgtcaccacctagcctgatgaccttgggcacatcctgagcaccctgtgccttatctgtaaaatggaaacaatcatgccgacctttcagggtggttttga

SEQ ID NO: 309954 - DNA, 120 bp, Artificial Sequence
  ENSG00000134285_24 (sequence is synthesized)
ggattagagactagctcctgacacacagtaggtaatcgtaaatgggtgctattgtttggcccgacccacgttataggacagaacgtctaacggatgcgtcagaacctgcgccctccggat

SEQ ID NO: 309955 - DNA, 120 bp, Artificial Sequence
  ENSG00000134285_25 (sequence is synthesized)
cttggagggtacagagggcgcccctcggcctcctccctttcggaggtggggacaaggtggaggaagggctgcaggaggaggagctctagcatcgcgacccgccccgtcccgtccagtctg

SEQ ID NO: 309956 - DNA, 120 bp, Artificial Sequence
  ENSG00000134285_26 (sequence is synthesized)
cccccgtgggccgagccttgttgggtggtaatactggggtctcagcgaacctgggagccgggaggagaggaagtgcgggaactgagttgggggtggtgccgggtctaggggcgagaacgg

SEQ ID NO: 309957 - DNA, 120 bp, Artificial Sequence
  ENSG00000134285_27 (sequence is synthesized)
ggcttcctgttccttacagcggtaaggggaacgctaggctgccgcactaagggggctgccgccgcccagcggtccaggtgtgtgttgcgcgcctgctgggagggagagggtgctagatgt

SEQ ID NO: 309958 - DNA, 120 bp, Artificial Sequence
  ENSG00000134285_28 (sequence is synthesized)
gacctgtgcctcccattccacctcttcccaacctaagccctttcttagcctcttcggctccaaagctgccctggaaatcccccctgaaatgagtaagaccctagggctctacgagttacc

SEQ ID NO: 309959 - DNA, 120 bp, Artificial Sequence
  ENSG00000134285_29 (sequence is synthesized)
tcctgaggttcaaacctcacttctagtactccacttgtcccatatcctattggaagccagagatttaagaagtgagggaaaggtcaattgaggatggaggaggaagactttgatcttcat

SEQ ID NO: 309960 - DNA, 120 bp, Artificial Sequence
  ENSG00000134285_30 (sequence is synthesized)
aattgcatcttgcctggcatgggggtggttgtaggccctggatcacctcttcccctggcctcctcttgctgtcctaactgactttaaggacctggtcttgagtcttcccataggatctct

SEQ ID NO: 309961 - DNA, 120 bp, Artificial Sequence
  ENSG00000134285_31 (sequence is synthesized)
aggtccttaaggtatgggttttggctctcatggtgccctgattctgaggagggatgcttaattgagcagtgagcctcctggtagttgcctagctgttctctctgttccctgggaccacag

SEQ ID NO: 309962 - DNA, 120 bp, Artificial Sequence
  ENSG00000134285_32 (sequence is synthesized)
tgttcctagtgtcctcaaagagaactgctctgtccaatatggaaaagatataaagagctcataaactccatggaaatttttaatagcaacatccctacatttctcaaaaaaaaaaaaaaa

SEQ ID NO: 309963 - DNA, 120 bp, Artificial Sequence
  ENSG00000134285_33 (sequence is synthesized)
tccctgaccagagaccctctggttatagaacttggccaaaagcaggtgattccaggtctggagcagagtcttctcgacatgtgtgtggggtggaaaaattcgtgttttgggtgtgaagat

SEQ ID NO: 309964 - DNA, 120 bp, Artificial Sequence
  ENSG00000134287_0 (sequence is synthesized)
gcacagctccagtcgccgtcgcggcttccggtgctaggtggagggaaggaaggagggagccggggagtgggccagggcagcagccgggctgaagtcggcttggggagccagagggagcgg

SEQ ID NO: 309965 - DNA, 120 bp, Artificial Sequence
  ENSG00000134287_1 (sequence is synthesized)
agcggaacctgcggggcagaggcggcggccgcagcggcgcagctgatagcaggaacaggatcaagtcttccataccagggaccaggccaaaaccagactgccactgcccctacttgggcc

SEQ ID NO: 309966 - DNA, 120 bp, Artificial Sequence
  ENSG00000134287_2 (sequence is synthesized)
ccactgtccccagaaagcagctgctgtgatcatgggcaatatctttggaaaccttctcaagagcctgattgggaagaaggagatgcgcatcctgatggtgggcctggatgccgcaggaaa

SEQ ID NO: 309967 - DNA, 120 bp, Artificial Sequence
  ENSG00000134287_3 (sequence is synthesized)
gaccaccatcctatacaagctgaaactcggggagatcgtcaccaccatccctaccattgggttcaatgtggagacagtggagtataagaacatcagctttacagtgtgggatgtgggtgg

SEQ ID NO: 309968 - DNA, 120 bp, Artificial Sequence
  ENSG00000134287_4 (sequence is synthesized)
ccaggacaagattcgacccctctggagacactacttccagaacacccaagggttgatatttgtggtcgacagcaatgatcgggagcgagtaaatgaggcccgggaagagctgatgagaat

SEQ ID NO: 309969 - DNA, 120 bp, Artificial Sequence
  ENSG00000134287_5 (sequence is synthesized)
gctggcggaggacgagctccgggatgctgtactccttgtctttgcaaacaaacaggatctgcctaatgctatgaacgctgctgagatcacagacaagctgggcctgcattcccttcgtca

SEQ ID NO: 309970 - DNA, 120 bp, Artificial Sequence
  ENSG00000134287_6 (sequence is synthesized)
ccgtaactggtacattcaggccacctgtgccaccagcggggacgggctgtacgaaggcctggactggctggccaatcagctcaaaaacaagaagtgaaagccagacagccctaacaaagc

SEQ ID NO: 309971 - DNA, 120 bp, Artificial Sequence
  ENSG00000134287_7 (sequence is synthesized)
accccacccacccctgacatacctactgtcaccctgccccagtcctaccccttcctctccatgcaagtgtggccagggccctgggtatcatgtccacatgcccagcaagagccttgcctc

SEQ ID NO: 309972 - DNA, 120 bp, Artificial Sequence
  ENSG00000134287_8 (sequence is synthesized)
ccctgcctcccctcctttttcctgtccacctatatgaccaatccctaattgctgtcctgatgatgagtcattccaatttactggatttaaaacaaaaagttgttacggtttcatggggtg

SEQ ID NO: 309973 - DNA, 120 bp, Artificial Sequence
  ENSG00000134287_9 (sequence is synthesized)
gcccctctctctctcaccctctgggtttcgggaggtcgagtggggtattctctttgtttggcagtggttgctgtcctcttggcatctgagtcctttccctgtccccacaagcccttctac

SEQ ID NO: 309974 - DNA, 120 bp, Artificial Sequence
  ENSG00000134287_10 (sequence is synthesized)
tccctgtttgcctttcctttgccaccctctccctgttttacatggaaattgcacgggcctctctgtgtttgcgtgcatgtgtgcgcctgtatatacatgtatagagagatatatttgtgg

SEQ ID NO: 309975 - DNA, 120 bp, Artificial Sequence
  ENSG00000134287_11 (sequence is synthesized)
gggccggggggagcggggagggggtggagtgaagctcagggcttgcagccaggacactgcccactggagcctgtcatctgccccttccgtgttggtgagattaagggaagaaggtgggag

SEQ ID NO: 309976 - DNA, 120 bp, Artificial Sequence
  ENSG00000134287_12 (sequence is synthesized)
ggcattagtcaagccggactgccccagtctttgactggttaccctcctctctgcaggtaggtttttctggatgataggacagatgatggattcttcaccaccattttccttgtactcttc

SEQ ID NO: 309977 - DNA, 120 bp, Artificial Sequence
  ENSG00000134287_13 (sequence is synthesized)
tctccacccttcttagggctggaggatggcatttatctctagatgactgttcccaaggagatgccactctgctctgccttactgttgggaaggagagaggaacccactcactcttatcag

SEQ ID NO: 309978 - DNA, 120 bp, Artificial Sequence
  ENSG00000134287_14 (sequence is synthesized)
cttagagtgttcaactgatccttccccaccatcttcagatctgttcctctggagcttgactggggggtggggatggcaagtccatggtgtgtgttagggacccagggcattgggggaagg

SEQ ID NO: 309979 - DNA, 120 bp, Artificial Sequence
  ENSG00000134287_15 (sequence is synthesized)
gaggcgaaggcctgaggttttccatcttcattctcttttgttattaggagaaggtgaggcatgggccaatcccattcctgccttccagtgccccaccacccttctgatcttaggggttgg

SEQ ID NO: 309980 - DNA, 120 bp, Artificial Sequence
  ENSG00000134287_16 (sequence is synthesized)
aggagctgggaagtggggtgacatagctgaccttagtatcaacccccctcttctccaactcttgttttctagtccaggatatgctaaaggacgaagattttctattgtttccaggccctc

SEQ ID NO: 309981 - DNA, 120 bp, Artificial Sequence
  ENSG00000134287_17 (sequence is synthesized)
agaccatccttgctgtcccttcaccctccatgcccctgccatcctcactcacttctcataaatggatctgggggttagagtggaggaaataaaatcctgaagtggttgtcagtgcttgtg

SEQ ID NO: 309982 - DNA, 120 bp, Artificial Sequence
  ENSG00000134287_18 (sequence is synthesized)
ggatgcagtggtcttcaggattctccccgcattattatgtagttgttcagaagctgttgctactgcgtctctctgtctgcagggggcacttgttcctgaggtcctcgcctgggtcctgac

SEQ ID NO: 309983 - DNA, 120 bp, Artificial Sequence
  ENSG00000134287_19 (sequence is synthesized)
ttctgtagtttctgtgaagacgtggctgtcctgtgggctcctgtgtgtgctggctgcgccctgagctccgagacagctgcccataacctgctaaggtcagggcccagggccccccacagc

SEQ ID NO: 309984 - DNA, 120 bp, Artificial Sequence
  ENSG00000134287_20 (sequence is synthesized)
atggctgagggaccccttcccagtagggctgtcccaagccccactccatggggccaggtttcctggccacttttgttgatagcagatggatcaatattagtaaccccatccaagattgaa

SEQ ID NO: 309985 - DNA, 120 bp, Artificial Sequence
  ENSG00000134287_21 (sequence is synthesized)
ctgtgaaagagaggttccaggggtatctccctcagtgccagttacttagtgatgtgttacccaggatgcagcaggtgtgtgcaggtatcttgctctctaggcctgtgtgtgtgtgtgagt

SEQ ID NO: 309986 - DNA, 120 bp, Artificial Sequence
  ENSG00000134287_22 (sequence is synthesized)
gtgtgtgtatatgggtgtgggtgtgtttgtgtgtggtggttgtggggggggtgttggaggttctatttcatttaaaaatgtattcatttccctggccccacagatgcttccctccatact

SEQ ID NO: 309987 - DNA, 120 bp, Artificial Sequence
  ENSG00000134287_23 (sequence is synthesized)
ttttatttgctctgtttcctcagatttattttgtcttgccccattgcctctccttccttgaactctttccttttcaatctcaactcattcactgctgttgctcatttgcccttttccatg

SEQ ID NO: 309988 - DNA, 120 bp, Artificial Sequence
  ENSG00000134287_24 (sequence is synthesized)
tattttttcctacttaggattttccactctatctttgtggttcatgaggactttgcctcttctcctgcctcattccctgactttctctagttagatgtcagtcctaaataggttttcctc

SEQ ID NO: 309989 - DNA, 120 bp, Artificial Sequence
  ENSG00000134287_25 (sequence is synthesized)
acttcaggcctcacccctcaccttgtttttttgggggctccagggaccaatctggggctggaaatgttaggaggttgccttggtgctgccccagatctgtccagcagggggcagtaagtg

SEQ ID NO: 309990 - DNA, 120 bp, Artificial Sequence
  ENSG00000134287_26 (sequence is synthesized)
atcttggtagtatccctggctgctaagcccttggcaggggtggtcctttctacattcccattcacttaacagctcttttgggattgggtgtttcattccatttctgcccactccctctcc

SEQ ID NO: 309991 - DNA, 120 bp, Artificial Sequence
  ENSG00000134287_27 (sequence is synthesized)
tctcctctctggtaggtttaattttatgctttccctgattccagctttctgcttcctgaggactcccgctccccccaccccaaagtttgtctgtggtgttatagtggtaactgcagttcc

SEQ ID NO: 309992 - DNA, 120 bp, Artificial Sequence
  ENSG00000134287_28 (sequence is synthesized)
tcctctggaatgtagactgtatatgtttaataactcaccttctctatccttgctcaaaatgtgggataacgcgatgactgtgaccctggttggaaattaaacttgttttatgcagctttg

SEQ ID NO: 309993 - DNA, 120 bp, Artificial Sequence
  ENSG00000134287_29 (sequence is synthesized)
gagccgaccttcatctttgctgtgcagcagccgtgggacagtagtttcatggtgaggggagtcctgtttctggtccctctctccatagtgctccttctttcagcaaaggggtaaaaggca

SEQ ID NO: 309994 - DNA, 120 bp, Artificial Sequence
  ENSG00000134287_30 (sequence is synthesized)
cacttgattgatagagagtaaggttatggaggaacttagtgccactccacactggttatttcttcccatcataccccgcggcgggggagcccaaatgaattgggcatcagagtgtgaggg

SEQ ID NO: 309995 - DNA, 120 bp, Artificial Sequence
  ENSG00000134287_31 (sequence is synthesized)
cttcgtgactttcctcctctagttctaaagggtttaaacctgaaatcagctgtatttctcacctgttggtagactgtatggacttcactggctgaagggccctgaacttggagggcccca

SEQ ID NO: 309996 - DNA, 120 bp, Artificial Sequence
  ENSG00000134287_32 (sequence is synthesized)
tgtgcctctactctcagatctcctcagccttgcacatgaggtgcttctagtttgaacagagaccccctcactagtctagttctggactttggcagtgaataaacatgaaggataaacgtc

SEQ ID NO: 309997 - DNA, 120 bp, Artificial Sequence
  ENSG00000134287_33 (sequence is synthesized)
gctcaagggggcgacctgggctgcagttaggttgtcgcctgcaggaggtgtgctgttgagggagaggaaaaccgtccgaggagaggatcaagtcttccataccagggaccaggccaaaac

SEQ ID NO: 309998 - DNA, 120 bp, Artificial Sequence
  ENSG00000134287_34 (sequence is synthesized)
gcgtggggcggtgggattcttcccacccgagagctcagagagggtgcgtcgggccagcttcacgcctgcccccgcatttgaaggacgcagagctggggtgggggtggggggcgcacacgg

SEQ ID NO: 309999 - DNA, 120 bp, Artificial Sequence
  ENSG00000134287_35 (sequence is synthesized)
atttgtcctccgcctcgctcaagggggcgacctgggctgcagttaggttgtcgcctgcaggaggtgtgctgttgagggagaggaaaaccgtccgaggagaggccaggaggaatgtggtgg

SEQ ID NO: 310000 - DNA, 120 bp, Artificial Sequence
  ENSG00000134287_36 (sequence is synthesized)
tctgctgttgttggattgggtcacccctggtctatggcatgaaagttttattgggaggagatctgctgcaagagtctgattgcttgggtcagtgcaacaggacagaatctagtcgctgca

SEQ ID NO: 310001 - DNA, 120 bp, Artificial Sequence
  ENSG00000134287_37 (sequence is synthesized)
cggccgcagcggcgcagctgatagcaggaacaggaagtaccaggattcccggaacagaaaatggagccattgcttacgcgaatcgtttgagggaaggggcgggagttggggaggtggagt

SEQ ID NO: 310002 - DNA, 120 bp, Artificial Sequence
  ENSG00000134287_38 (sequence is synthesized)
tcccgtcttgattgcattaaggcgggtctccatctttccaggccaggaggaatgtggtggtggaggtggaggattgtggtatgtggtcaggagtgagaagaaatagtaaggccgtcccgg

SEQ ID NO: 310003 - DNA, 120 bp, Artificial Sequence
  ENSG00000134287_39 (sequence is synthesized)
agagggagcggagcggaacctgcggggcagaggcggcggccgcagcggcgcagctgatagcaggaacagttttattgggaggagatctgctgcaagagtctgattgcttgggtcagtgca

SEQ ID NO: 310004 - DNA, 120 bp, Artificial Sequence
  ENSG00000134287_40 (sequence is synthesized)
acaggacagaatctagtcgctgcatacctccttccctgtcctcaatcagaacctgtgggctctgaggacatggaaaccatttcttcagtttgtcagatacagggaaaaggatcagagacc

SEQ ID NO: 310005 - DNA, 120 bp, Artificial Sequence
  ENSG00000134287_41 (sequence is synthesized)
ttttcgactgcaggaactggatttcgtctcctcttccacaatgcccatgcaaacagatcaagtcttccataccagggaccaggccaaaaccagactgccactgcccctacttgggcccca

SEQ ID NO: 310006 - DNA, 120 bp, Artificial Sequence
  ENSG00000134291_0 (sequence is synthesized)
gcgctgagtgcgtgccgctccgccgaccgaagaggctggtaagtcctcaagctggcaggtggtcgggggagcggccggagaggagctgccgggagttcgtgccctgcaggacatgacacc

SEQ ID NO: 310007 - DNA, 120 bp, Artificial Sequence
  ENSG00000134291_1 (sequence is synthesized)
agtggcatatcacggccatggggtctcagcattccgctgctgctcgcccctcctcctgcaggcgaaagcaagaagatgacagggacggtttgctggctgaacgagagcaggaagaagcca

SEQ ID NO: 310008 - DNA, 120 bp, Artificial Sequence
  ENSG00000134291_2 (sequence is synthesized)
ttgctcagttcccatatgtggaattcaccgggagagatagcatcacctgtctcacgtgccaggggacaggctacattccaacagagcaagtaaatgagttggtggctttgatcccacaca

SEQ ID NO: 310009 - DNA, 120 bp, Artificial Sequence
  ENSG00000134291_3 (sequence is synthesized)
gtgatcagagattgcgccctcagcgaactaagcaatatgtcctcctgtccatcctgctttgtctcctggcatctggtttggtggttttcttcctgtttccgcattcagtccttgtggatg

SEQ ID NO: 310010 - DNA, 120 bp, Artificial Sequence
  ENSG00000134291_4 (sequence is synthesized)
atgacggcatcaaagtggtgaaagtcacatttaataagcaagactcccttgtaattctcaccatcatggccaccctgaaaatcaggaactccaacttctacacggtggcagtgaccagcc

SEQ ID NO: 310011 - DNA, 120 bp, Artificial Sequence
  ENSG00000134291_5 (sequence is synthesized)
tgtccagccagattcagtacatgaacacagtggtcagtacatatgtgactactaacgtctcccttattccacctcggagtgagcaactggtgaattttaccgggaaggccgagatgggag

SEQ ID NO: 310012 - DNA, 120 bp, Artificial Sequence
  ENSG00000134291_6 (sequence is synthesized)
gcctcatgacccagagctccttggagacacatcactatgtggattgtggaggaaattccacagctatttaacaactgctattggttcttccacacagcgcctgtagaagagagcacagca

SEQ ID NO: 310013 - DNA, 120 bp, Artificial Sequence
  ENSG00000134291_7 (sequence is synthesized)
tatgttcccaaggcctgagttctggacctacccccacgtggtgtaagcagaggaggaattggttcacttaactcccagcaaacatcctcctgccacttaggaggaaacacctccctatgg

SEQ ID NO: 310014 - DNA, 120 bp, Artificial Sequence
  ENSG00000134291_8 (sequence is synthesized)
taccatttatgtttctcagaaccagcagaatcagtgcctagcctgtgcccagcaaatagttggcactcaataaagatttgcagaatttaatacagatcttttcagctgttcttagggcat

SEQ ID NO: 310015 - DNA, 120 bp, Artificial Sequence
  ENSG00000134291_9 (sequence is synthesized)
tataaatggaaatcataacgtggttctaggttatcaaaccatggagtgatgtggagctaggattgtgagtgacctgcaggccattatcagtgcctcatctgtgcagaagtggcagcagag

SEQ ID NO: 310016 - DNA, 120 bp, Artificial Sequence
  ENSG00000134291_10 (sequence is synthesized)
agggaccatccaaatacctaagagaaaacagacctagtcaggatatgaatttgtttcagctgttcccaaaggcctgggagctttttgaaaagaaagaaaaaagtgtgttggctttttttt

SEQ ID NO: 310017 - DNA, 120 bp, Artificial Sequence
  ENSG00000134291_11 (sequence is synthesized)
tttttagaaagttagaattgtttttaccaagagtctatgtggggcttgattcacccttcatccattggctggaacatggattggggatttgatagaaaaataaaccctgcttttgattca

SEQ ID NO: 310018 - DNA, 120 bp, Artificial Sequence
  ENSG00000134291_12 (sequence is synthesized)
ttgaaaactacacatgttcttataagttccccattttccttataactgtttgcccaagcaagatatctctgcccccatcacaatctggggaaagaaacttgaagctggaaatgctttgaa

SEQ ID NO: 310019 - DNA, 120 bp, Artificial Sequence
  ENSG00000134291_13 (sequence is synthesized)
ggtcaaggaatggaatcagaagaaactgggaaagtggagtgttctgggaggtgtgggactgtctctgtccacatagctcctttcttcagcttttcttcccagagtgcaaacagtgtttaa

SEQ ID NO: 310020 - DNA, 120 bp, Artificial Sequence
  ENSG00000134291_14 (sequence is synthesized)
acctcggagtgagcaactggtatgctgttcttttaggaatcttgccccacaggcctaagagaagagtagggggctgtaggaatgccatagctgtgtcactttcctttttgtctcctcatt

SEQ ID NO: 310021 - DNA, 120 bp, Artificial Sequence
  ENSG00000134291_15 (sequence is synthesized)
tctacttgtaggaactggtgatgaggaagacctgttgggccctgtaattataaataattgtgagaaaaaacagctatcatttaagcatttggggagcagaataatttgtaagagacaaag

SEQ ID NO: 310022 - DNA, 120 bp, Artificial Sequence
  ENSG00000134291_16 (sequence is synthesized)
tttgacttataggttccctggctttggatgtcttgagatttatttgaagaatgtattattattatgtgtgtatttgaagaatgtattatttgatatgtgacagaagtgctggaatttcta

SEQ ID NO: 310023 - DNA, 120 bp, Artificial Sequence
  ENSG00000134291_17 (sequence is synthesized)
aaagagaacattaagccactaaaaacgttaccaagctccagcacttatgtgatgggtttgaaaaaacagaaagtggtatgacgctgtgggaggatgaaaatgacagtggcagggactgag

SEQ ID NO: 310024 - DNA, 120 bp, Artificial Sequence
  ENSG00000134291_18 (sequence is synthesized)
agctgacaagccttggcagcacttaggtcggaagggggaggggggcaccccaaacaggacagtgtaactctgcactcttctactgaggctttaaaaaaaaaaaaactgactatttccata

SEQ ID NO: 310025 - DNA, 120 bp, Artificial Sequence
  ENSG00000134291_19 (sequence is synthesized)
ggacaatctcagggaagtattttgcatgtgatggaagaatgacccaaggtctttggattgctaataataatactgttctgtgtcaagcctgcttggccacagaccaactctggtatctta

SEQ ID NO: 310026 - DNA, 120 bp, Artificial Sequence
  ENSG00000134291_20 (sequence is synthesized)
tcattccctgggttgtgcacctgccaggctgggacccaggacacttacacttgtttcctgacttgccctgatgtaggccaccctgaaaatcaggaactccaacttctacacggtggcagt

SEQ ID NO: 310027 - DNA, 120 bp, Artificial Sequence
  ENSG00000134291_21 (sequence is synthesized)
ttgttgctcgaggaggggcatagagcttacaaatagtgaagaggaaggggcgaggctggaccaggtgggagcgggggtgccccaagtcccagggcggtgaggatcgaggcaggacatgac

SEQ ID NO: 310028 - DNA, 120 bp, Artificial Sequence
  ENSG00000134291_22 (sequence is synthesized)
agacagtgccctggacaggagccagctcaactgacttaatacacttgggcagttctgcaacttctcttcctctccttatttttccaaccctttcttttctttaccgccactcttgttctt

SEQ ID NO: 310029 - DNA, 120 bp, Artificial Sequence
  ENSG00000134291_23 (sequence is synthesized)
ttcctgaggtttggaacattcagttcgctctgtgttgtgggatttgttgacaggcacatttctttatcgctgtcacaaggattgggacagctttgcgggggaaccatcttggaagctgct

SEQ ID NO: 310030 - DNA, 120 bp, Artificial Sequence
  ENSG00000134294_0 (sequence is synthesized)
acagccgcgcgacgccgccgccttagaacgcctttccagtactgctagcagcagcccgaccacgcgttaccgcacgctcgcgcctttcccttgacacggcggacgccggaggattggggc

SEQ ID NO: 310031 - DNA, 120 bp, Artificial Sequence
  ENSG00000134294_1 (sequence is synthesized)
ggcaatttgtcttttccttttttattaaaattatttttcctgcctgttgttggatttggggaaattttttgtttgttttttatgatttgtatttgactgagagaaacccactgaagacgt

SEQ ID NO: 310032 - DNA, 120 bp, Artificial Sequence
  ENSG00000134294_2 (sequence is synthesized)
ctgcgtgagaatagagaccaccgaggccgactcgcgggccgctgcacccaccgccaaggacaaaaggagcccagcgctactagctgcacccgattcctcccagtgcttagcatgaagaag

SEQ ID NO: 310033 - DNA, 120 bp, Artificial Sequence
  ENSG00000134294_3 (sequence is synthesized)
gccgaaatgggacgattcagtatttccccggatgaagacagcagcagctacagttccaacagcgacttcaactactcctaccccaccaagcaagctgctctgaaaagccattatgcagat

SEQ ID NO: 310034 - DNA, 120 bp, Artificial Sequence
  ENSG00000134294_4 (sequence is synthesized)
gtagatcctgaaaaccagaactttttacttgaatcgaatttggggaagaagaagtatgaaacagaatttcatccaggtactacttcctttggaatgtcagtatttaatctgagcaatgcg

SEQ ID NO: 310035 - DNA, 120 bp, Artificial Sequence
  ENSG00000134294_5 (sequence is synthesized)
attgtgggcagtggaatccttgggctttcttatgccatggctaatactggaattgctctttttataattctcttgacatttgtgtcaatattttccctgtattctgttcatctccttttg

SEQ ID NO: 310036 - DNA, 120 bp, Artificial Sequence
  ENSG00000134294_6 (sequence is synthesized)
aagactgccaatgaaggagggtctttattatatgaacaattgggatataaggcatttggattagttggaaagcttgcagcatctggatcaattacaatgcagaacattggagctatgtca

SEQ ID NO: 310037 - DNA, 120 bp, Artificial Sequence
  ENSG00000134294_7 (sequence is synthesized)
agctacctcttcatagtgaaatatgagttgcctttggtgatccaggcattaacgaacattgaagataaaactggattgtggtatctgaacgggaactatttggttctgttggtgtcattg

SEQ ID NO: 310038 - DNA, 120 bp, Artificial Sequence
  ENSG00000134294_8 (sequence is synthesized)
gtggtcattcttcctttgtcgctgtttagaaatttaggatatttgggatataccagtggcctttccttgttgtgtatggtgttctttctgattgtggtcatttgcaagaaatttcaggtt

SEQ ID NO: 310039 - DNA, 120 bp, Artificial Sequence
  ENSG00000134294_9 (sequence is synthesized)
ccgtgtcctgtggaagctgctttgataattaacgaaacaataaacaccaccttaacacagccaacagctcttgtacctgctttgtcacataacgtgactgaaaatgactcttgcagacct

SEQ ID NO: 310040 - DNA, 120 bp, Artificial Sequence
  ENSG00000134294_10 (sequence is synthesized)
cactattttattttcaactcacagactgtctatgctgtgccaattctgatcttttcatttgtctgtcatcctgctgttcttcccatctatgaagaactgaaagaccgcagccgtagaaga

SEQ ID NO: 310041 - DNA, 120 bp, Artificial Sequence
  ENSG00000134294_11 (sequence is synthesized)
atgatgaatgtgtccaagatttcattttttgctatgtttctcatgtatctgcttgccgccctctttggatacctaacattttacgaacatgttgagtcagaattgcttcatacctactct

SEQ ID NO: 310042 - DNA, 120 bp, Artificial Sequence
  ENSG00000134294_12 (sequence is synthesized)
tctatcttgggaactgatattcttcttctcattgtccgtctggctgtgttaatggctgtgaccctgacagtaccagtagttattttcccaatccggagttctgtaactcacttgttgtgt

SEQ ID NO: 310043 - DNA, 120 bp, Artificial Sequence
  ENSG00000134294_13 (sequence is synthesized)
gcatcaaaagatttcagttggtggcgtcatagtctcattacagtgtctatcttggcatttaccaatttacttgtcatctttgtcccaactattagggatatctttggttttattggtgca

SEQ ID NO: 310044 - DNA, 120 bp, Artificial Sequence
  ENSG00000134294_14 (sequence is synthesized)
tctgcagcttctatgttgatttttattcttccttctgccttctatatcaagttggtgaagaaagaacctatgaaatctgtacaaaagattggggctttgttcttcctgttaagtggtgta

SEQ ID NO: 310045 - DNA, 120 bp, Artificial Sequence
  ENSG00000134294_15 (sequence is synthesized)
ctggtgatgaccggaagcatggccttgattgttttggattgggtacacaatgcacctggaggtggccattaattggcaccactcaaactcaaactcagtccatctgatgccagtgttgag

SEQ ID NO: 310046 - DNA, 120 bp, Artificial Sequence
  ENSG00000134294_16 (sequence is synthesized)
taaactcaactactatgaaatttcacctaatgttttcagtttcacttccttttgaagtgcagattcctcgctggttcttctgagtgcagaataagtgaacttttttgttttgttttgttt

SEQ ID NO: 310047 - DNA, 120 bp, Artificial Sequence
  ENSG00000134294_17 (sequence is synthesized)
ttttaagaaacttatctgtatgttagaaatggatatgaacaacaaaaccacgagtctcgggttaagggaagtgacaattttattccattccagagaatggacaaactcttaacttttatc

SEQ ID NO: 310048 - DNA, 120 bp, Artificial Sequence
  ENSG00000134294_18 (sequence is synthesized)
aagccacatgcttggctgtgtcattgtttaacttggatattttatgattttacttgaatgtgcctaatggaaccatttgatgtgagaaacaattctttttaatttacagcaaaatattga

SEQ ID NO: 310049 - DNA, 120 bp, Artificial Sequence
  ENSG00000134294_19 (sequence is synthesized)
aataaattccataaaataatgtcattggtatttaaaaatgaatattaatataatgaaatggtttgcctttttgtaggcataataagccaaatacttttttacccaaaataatttttagag

SEQ ID NO: 310050 - DNA, 120 bp, Artificial Sequence
  ENSG00000134294_20 (sequence is synthesized)
aaaatgatgtaatgaaaaattgtaccatgaattaggagcatagttttttccatttaaacgtcaccattacttaaaagatgattgattattgctataccaaatcagatgaactctgttcat

SEQ ID NO: 310051 - DNA, 120 bp, Artificial Sequence
  ENSG00000134294_21 (sequence is synthesized)
cacttttcttctctgtccccaaacaatttggttcattcagactgaaatgtttgtgtcttcaacttattagaatggaagataatgcagatatttctgtgggaaataaaataactaattttg

SEQ ID NO: 310052 - DNA, 120 bp, Artificial Sequence
  ENSG00000134294_22 (sequence is synthesized)
aggtaccaaatagtgcaattgggtaaaacagggtttattcagttgcatctgtctccagtgttgtattgacagctctgggtctttttttgggccagcccttttttgacattgcttccagca

SEQ ID NO: 310053 - DNA, 120 bp, Artificial Sequence
  ENSG00000134294_23 (sequence is synthesized)
gtggaaaatgggcatttgatggcaataggccaaaattattgtgtccagagagtacactttttcaaaatgctcacctactggaagtgtgaattacttgacaatgtatggcttagttgtgtt

SEQ ID NO: 310054 - DNA, 120 bp, Artificial Sequence
  ENSG00000134294_24 (sequence is synthesized)
catgttttgtctacagtagaggtctaatccacaggttacacctatgtttgatatgatataagttctctttgcgtaggccactgggtttctcatgcagtaagctttataaaaactcatttg

SEQ ID NO: 310055 - DNA, 120 bp, Artificial Sequence
  ENSG00000134294_25 (sequence is synthesized)
cactggactgtcatctcattcttgtacaacgtagaattacttgtttacatccaacaaatggttagctagggaaaacagtgcaaactgagtgttagtagtcattttggtccaactgcatgt

SEQ ID NO: 310056 - DNA, 120 bp, Artificial Sequence
  ENSG00000134294_26 (sequence is synthesized)
caacccttccatttcaatcccagttagaaatgaaaataattactttgaaacttggctttaagagcacatttatcgtacgtcacagtgtatggtgaatatattattaaataatgtggtact

SEQ ID NO: 310057 - DNA, 120 bp, Artificial Sequence
  ENSG00000134294_27 (sequence is synthesized)
tcgctcatcaggcataatgtctaaaatctaatatacataattccattaagtggttgaaggaagcaaataatggaattgtcaattggtcatctggctgtaaggtttgcccttgaactaaaa

SEQ ID NO: 310058 - DNA, 120 bp, Artificial Sequence
  ENSG00000134294_28 (sequence is synthesized)
atgttgtttggggcaagggccagaaatgtggagacatggtttttgttacgcattcttgtattatatgtgactaaatttacaaacaagatacatgtgtaattaaagacccttatggaactg

SEQ ID NO: 310059 - DNA, 120 bp, Artificial Sequence
  ENSG00000134294_29 (sequence is synthesized)
gaagacgtcttgtagtgctacattgggtgaaaccgttggtccatttttgtctgtttctatgaagataaaataattgggggccatctagaaatagaaaggcagtgggaagacagattctac

SEQ ID NO: 310060 - DNA, 120 bp, Artificial Sequence
  ENSG00000134294_30 (sequence is synthesized)
ggcactgctttcatttaattgggctttaggcactccattcgaatgcagaacctcacctctagttgagaccaagaattggcaaatttgcatgagctcctggaaagagttgctgactttgta

SEQ ID NO: 310061 - DNA, 120 bp, Artificial Sequence
  ENSG00000134294_31 (sequence is synthesized)
tctaagacctgccagggaataccaagagttgtttctacagacttttttttttttttttgtatgggagaagatactgtggcaaccaggaaggaatggaaaaaaaattcttttctctacagc

SEQ ID NO: 310062 - DNA, 120 bp, Artificial Sequence
  ENSG00000134294_32 (sequence is synthesized)
aaattaatgtgaggaagctcctccaatcctctggctatttaaggttcaaaatcaagtgcctagggaaaattccaatggatgattttctgggagctatcttgtctaccttgaggttcctga

SEQ ID NO: 310063 - DNA, 120 bp, Artificial Sequence
  ENSG00000134294_33 (sequence is synthesized)
acaatgaattcccattaatgagcagtcttcagtattaaaaccactgtcttgtcacctcattttgcattactgtcttccgtggatgtttcagttacaactgtaatgttatttatagaacaa

SEQ ID NO: 310064 - DNA, 120 bp, Artificial Sequence
  ENSG00000134294_34 (sequence is synthesized)
cattaatccattaaagctaacctatttttcaatatttatgataatctatgtacatatattgtctgtccatatgtatttgtaaataggttgtatataatgtcaggtttgggtcttgggttc

SEQ ID NO: 310065 - DNA, 120 bp, Artificial Sequence
  ENSG00000134294_35 (sequence is synthesized)
aagtgtatatattcctgtaagtttcttaactgcattttgatgaattcacattatgtaactataagaattgtcccaaaagtacctgtacagaaaattgaatattgaaaaattgacaaattg

SEQ ID NO: 310066 - DNA, 120 bp, Artificial Sequence
  ENSG00000134294_36 (sequence is synthesized)
tgtacaaacactaaaaaaaacttgtttaaattgtatttgcaataaacaacatcaaattttttcatgaaatcttggtacaaattcagatctcttatttaaaatttaaataaggaatacatt

SEQ ID NO: 310067 - DNA, 120 bp, Artificial Sequence
  ENSG00000134294_37 (sequence is synthesized)
ttcaaaatgcagtaatcaaaatgtgatctagtgtaatgaaataaaatgtgatctagtgtaatggaagacctttgagaacctgggtgtattaactttgtgtatatagtgtaaatatcccca

SEQ ID NO: 310068 - DNA, 120 bp, Artificial Sequence
  ENSG00000134294_38 (sequence is synthesized)
ctgtactgttagaggccaacaattctagtatggcttgttggcaaagagtgctacaccgtttcaatgaaacaatgtatgtttgttttaactgaactaaaataaatacatgcttaatcctga

SEQ ID NO: 310069 - DNA, 120 bp, Artificial Sequence
  ENSG00000134294_39 (sequence is synthesized)
atgtcttttttgtgtgtttgttttcatggtattcctatgaaatgagtcctgttagaagatgtgtatatttttcagaggatatttgtgactgttttgaccttgtttctgttttctttagat

SEQ ID NO: 310070 - DNA, 120 bp, Artificial Sequence
  ENSG00000134294_40 (sequence is synthesized)
ttttgaaaaaacggcttgcatgggttgggttcagggagttacctaggactctgcttccattgctttaatttgctatagcatttagagaaggtgcgtaatctctgaaagagtatccgatta

SEQ ID NO: 310071 - DNA, 120 bp, Artificial Sequence
  ENSG00000134294_41 (sequence is synthesized)
tcttgttgtaatgacaagatagctggtgtgaaagtcaactcctagttaatatttatacattaagtaaagatgttgtatcagagctatgctgttggagggtattttatgttaaagcagtct

SEQ ID NO: 310072 - DNA, 120 bp, Artificial Sequence
  ENSG00000134294_42 (sequence is synthesized)
tgtgtgtaatgatagatatttcaatccagtttacaattatatatgtctatattttttgcagccattatgcagatgtagatcctgaaaaccagaactttttacttgaatcgaatttgggga

SEQ ID NO: 310073 - DNA, 120 bp, Artificial Sequence
  ENSG00000134294_43 (sequence is synthesized)
tcattaaactaatactgattcctgccacccctccttataggatatttgggatataccagtggcctttccttgttgtgtatggtgttctttctgattgtggtgggtatgatttttttttta

SEQ ID NO: 310074 - DNA, 120 bp, Artificial Sequence
  ENSG00000134294_44 (sequence is synthesized)
tttagtgctatacacatactttagtgcctaaagtcttcccagcagaattgagttattcagtgggaaaaagatatttgccttaaatctgtttcattaaactaatactgattcctgccaccc

SEQ ID NO: 310075 - DNA, 120 bp, Artificial Sequence
  ENSG00000134294_45 (sequence is synthesized)
tccagaaagagttgtctttaaatatagccatgcttatttataaccctatgccttttccttctctcaccagaattctcttgacatttgtgtcaatattttccctgtattctgttcatctcc

SEQ ID NO: 310076 - DNA, 120 bp, Artificial Sequence
  ENSG00000134294_46 (sequence is synthesized)
acacttaaattaattgcaataaagttattagatactttggagataggaatagggatgaagactagatgagatactcagctttcaacatttgttcaaccagttttcactggactgcctact

SEQ ID NO: 310077 - DNA, 120 bp, Artificial Sequence
  ENSG00000134294_47 (sequence is synthesized)
gtgtgacaggcacttaaatgggcattgaatatataaaagagaaggaagggctgtttagttgaatgagactgaccatcttcagagcgaagctctcagggaggccgtctcttcatggtgttt

SEQ ID NO: 310078 - DNA, 120 bp, Artificial Sequence
  ENSG00000134294_48 (sequence is synthesized)
tatcttggcatttaccaatttacttgtcatctttgtcccaactattagggatatctttggttttattggtaagttttagaaagtatccaagtggattcaaacatcagggattttaagatt

SEQ ID NO: 310079 - DNA, 120 bp, Artificial Sequence
  ENSG00000134294_49 (sequence is synthesized)
gtggttttgaaggggctttttaaaaatacagtgtatattttcaaaataccctggggacatttttttcaccataagatataaaatgatctttaagtgttcagatgttcaggaaacagcaga

SEQ ID NO: 310080 - DNA, 120 bp, Artificial Sequence
  ENSG00000134294_50 (sequence is synthesized)
gaaagaggcacagttttatttagaaatagttactattttggatagattccttgttacttgggcattcttttcattcattgaagctggatttttaaattttatattgctgctatttttaaa

SEQ ID NO: 310081 - DNA, 120 bp, Artificial Sequence
  ENSG00000134294_51 (sequence is synthesized)
gcgcgggaaggcggccgcggggtccgtttcctttcgaggcgggcgttgtcggttgggctggccagccttccaccctggcccgccgcgcgggtgtcgcgcccgcgacgtgggccgactcgc

SEQ ID NO: 310082 - DNA, 120 bp, Artificial Sequence
  ENSG00000134308_0 (sequence is synthesized)
aaagccaaaagcagatcaaagtggtgggactcgcgtcgcggccgcggagacgtgaagctctcgaggctcctcccgctgcgggtcggcgctcgccctcgctctcctcgccctccgccccgg

SEQ ID NO: 310083 - DNA, 120 bp, Artificial Sequence
  ENSG00000134308_1 (sequence is synthesized)
ccccggccccgcgcccgccatggagaagactgagctgatccagaaggccaagctggccgagcaggccgagcgctacgacgacatggccacctgcatgaaggcagtgaccgagcagggcgc

SEQ ID NO: 310084 - DNA, 120 bp, Artificial Sequence
  ENSG00000134308_2 (sequence is synthesized)
cgagctgtccaacgaggagcgcaacctgctctccgtggcctacaagaacgtggtcgggggccgcaggtccgcctggagggtcatctctagcatcgagcagaagaccgacacctccgacaa

SEQ ID NO: 310085 - DNA, 120 bp, Artificial Sequence
  ENSG00000134308_3 (sequence is synthesized)
gaagttgcagctgattaaggactatcgggagaaagtggagtccgagctgagatccatctgcaccacggtgctggaattgttggataaatatttaatagccaatgcaactaatccagagag

SEQ ID NO: 310086 - DNA, 120 bp, Artificial Sequence
  ENSG00000134308_4 (sequence is synthesized)
taaggtcttctatctgaaaatgaagggtgattacttccggtaccttgctgaagttgcgtgtggtgatgatcgaaaacaaacgatagataattcccaaggagcttaccaagaggcatttga

SEQ ID NO: 310087 - DNA, 120 bp, Artificial Sequence
  ENSG00000134308_5 (sequence is synthesized)
tataagcaagaaagagatgcaacccacacacccaatccgcctggggcttgctcttaacttttctgtattttactatgagattcttaataacccagagcttgcctgcacgctggctaaaac

SEQ ID NO: 310088 - DNA, 120 bp, Artificial Sequence
  ENSG00000134308_6 (sequence is synthesized)
ggcttttgatgaggccattgctgaacttgatacactgaatgaagactcatacaaagacagcaccctcatcatgcagttgcttagagacaacctaacactttggacatcagacagtgcagg

SEQ ID NO: 310089 - DNA, 120 bp, Artificial Sequence
  ENSG00000134308_7 (sequence is synthesized)
agaagaatgtgatgcggcagaaggggctgaaaactaaatccatacagggtgtcatccttctttccttcaagaaacctttttacacatctccattccttattccacttggatttcctatag

SEQ ID NO: 310090 - DNA, 120 bp, Artificial Sequence
  ENSG00000134308_8 (sequence is synthesized)
caaagaaacccattcatgtgtatggaatcaactgtttatagtcttttcacactgcagctttgggaaaacttcattccttgatttgtgtttgtcttggccttcctggtgtgcagtactgct

SEQ ID NO: 310091 - DNA, 120 bp, Artificial Sequence
  ENSG00000134308_9 (sequence is synthesized)
taagtaactcccaaacacttatgtagaggactaaaaatgtatctggtatttaagtaatctgaaccagttctgcaagtgactgtgttttgtattactgtgaaaataagaaaatgtagttaa

SEQ ID NO: 310092 - DNA, 120 bp, Artificial Sequence
  ENSG00000134308_10 (sequence is synthesized)
ttacaatttaaagagtattccacataacttcttaatttctacattccctcccttactcttcgggggtttcctttcagtaagcaacttttccatgctcttaatgtattcctttttagtagg

SEQ ID NO: 310093 - DNA, 120 bp, Artificial Sequence
  ENSG00000134308_11 (sequence is synthesized)
aatccggaagtattagattgaatggaaaagcacttgccatctctgtctaggggtcacaaattgaaatggctcctgtatcacatacggaggtcttgtgtatctgtggcaacagggagtttc

SEQ ID NO: 310094 - DNA, 120 bp, Artificial Sequence
  ENSG00000134308_12 (sequence is synthesized)
cttattcactctttatttgctgctgtttaagttgccaacctcccctcccaataaaaattcacttacacctcctgcctttgtagttctggtattcactttactatgtgatagaagtagcat

SEQ ID NO: 310095 - DNA, 120 bp, Artificial Sequence
  ENSG00000134308_13 (sequence is synthesized)
gttgctgccagaatacaagcattgcttttggcaaattaaagtgcatgtcatttcttaatacactagaaaggggaaataaattaaagtacacaagtccaagtctaaaactttagtactttt

SEQ ID NO: 310096 - DNA, 120 bp, Artificial Sequence
  ENSG00000134308_14 (sequence is synthesized)
ccatgcagatttgtgcacatgtgagagggtgtccagtttgtctagtgattgttatttagagagttggaccactattgtgtgttgctaatcattgactgtagtcccaaaaaagccttgtga

SEQ ID NO: 310097 - DNA, 120 bp, Artificial Sequence
  ENSG00000134308_15 (sequence is synthesized)
aaatgttatgccctatgtaacagcagagtaacataaaataaaagtacattttataaaccatttactatggctttgtaacaattgcatacccatattttaagggacaggtgaatttactac

SEQ ID NO: 310098 - DNA, 120 bp, Artificial Sequence
  ENSG00000134308_16 (sequence is synthesized)
tttctaaagtttattgatacttcccttttatgtaaaatgtagtagtgatacctatatttccacattgtgcattgtgacacacttgtctagggatgcctggaagtgtataaaattggactg

SEQ ID NO: 310099 - DNA, 120 bp, Artificial Sequence
  ENSG00000134308_17 (sequence is synthesized)
catttcttagagtgttttactatagatcagtctcatgggccatctcttcctcagatgtaaatgatatctggttaagtgttatatggaataaagtggacattttaaaactagcaaagttaa

SEQ ID NO: 310100 - DNA, 120 bp, Artificial Sequence
  ENSG00000134308_18 (sequence is synthesized)
aaaagcgggcggcgggccgcattgtctgacggcgctccctctctgctttttgttctcgcctcgccgccccgcccctccgcagctctcgaggctcctcccgctgcgggtcggcgctcgccc

SEQ ID NO: 310101 - DNA, 120 bp, Artificial Sequence
  ENSG00000134308_19 (sequence is synthesized)
gtgaaggtgagcgcctgggtcggcccgcgggcttcctccggccgcgctcggattgagggccgggcggaggtgccgcccttgagagcagccggttgtcgatgccgctcccctcagggacgg

SEQ ID NO: 310102 - DNA, 120 bp, Artificial Sequence
  ENSG00000134308_20 (sequence is synthesized)
tctctagcatcgagcagaagaccgacacctccgacaagaagttgcagctgattaaggactatcgggagaaagtggagtccgagctgagatccatctgcaccacggtgctggcgatccgga

SEQ ID NO: 310103 - DNA, 120 bp, Artificial Sequence
  ENSG00000134308_21 (sequence is synthesized)
aaacttcgttgtattcttccgtgtgctcttagcttccagtccctgcttggcattgaagaagcacttgtaaaagctttttggactgaattgctcgtattaaaaaattttgccaacttgaaa

SEQ ID NO: 310104 - DNA, 120 bp, Artificial Sequence
  ENSG00000134313_0 (sequence is synthesized)
acgtgatctgtcagttcgcggagagggaagaatatggccgccgggtgtggtgagggcgacgcgcttgcagtcgccgtctcttgcttccccgtcctctgacatcgcctgcagccgagcggg

SEQ ID NO: 310105 - DNA, 120 bp, Artificial Sequence
  ENSG00000134313_1 (sequence is synthesized)
cccgttccgccggagctgaggaccaggtattcaaataaagttaattgcagctttctgtgaaaatgtcagttttgatatcacagagcgtcataaattatgtagaggaagaaaacattcctg

SEQ ID NO: 310106 - DNA, 120 bp, Artificial Sequence
  ENSG00000134313_2 (sequence is synthesized)
ctctgaaagctcttcttgaaaaatgcaaagatgtagatgagagaaatgagtgtggccagactccactgatgatagctgccgaacaaggcaatctggaaatagtgaaggaattaattaaga

SEQ ID NO: 310107 - DNA, 120 bp, Artificial Sequence
  ENSG00000134313_3 (sequence is synthesized)
atggagctaactgcaatctggaagatttggataattggacagcacttatatctgcatcgaaagaagggcatgtgcacatcgtagaggaactactgaaatgtggggttaacttggagcacc

SEQ ID NO: 310108 - DNA, 120 bp, Artificial Sequence
  ENSG00000134313_4 (sequence is synthesized)
gtgatatgggaggatggacagctcttatgtgggcatgttacaaaggccgtactgacgtagtagagttgcttctttctcatggtgccaatccaagtgtcactggtctgtacagtgtttacc

SEQ ID NO: 310109 - DNA, 120 bp, Artificial Sequence
  ENSG00000134313_5 (sequence is synthesized)
caatcatttgggcagcagggagaggccatgcagatatagttcatcttttactgcaaaatggtgctaaagtcaactgctctgataagtatggaaccacccctttagtttgggctgcacgaa

SEQ ID NO: 310110 - DNA, 120 bp, Artificial Sequence
  ENSG00000134313_6 (sequence is synthesized)
agggtcatttggaatgtgtgaaacatttattggccatgggagctgatgtggatcaagaaggagctaattcaatgactgcacttattgtggcagtgaaaggaggttacacacagtcagtaa

SEQ ID NO: 310111 - DNA, 120 bp, Artificial Sequence
  ENSG00000134313_7 (sequence is synthesized)
aagaaattttgaagaggaatccaaatgtaaacttaacagataaagatggaaatacagctttgatgattgcatcaaaggagggacatacggagattgtgcaggatctgctcgacgctggaa

SEQ ID NO: 310112 - DNA, 120 bp, Artificial Sequence
  ENSG00000134313_8 (sequence is synthesized)
catatgtgaacatacctgacaggagtggggatactgtgttgattggcgctgtcagaggtggtcatgttgaaattgttcgagcgcttctccaaaaatatgctgatatagacattagaggac

SEQ ID NO: 310113 - DNA, 120 bp, Artificial Sequence
  ENSG00000134313_9 (sequence is synthesized)
aggataataaaactgctttgtattgggctgttgagaaaggaaatgcaacaatggtgagagatatcttacagtgcaatcctgacactgaaatatgcacaaaggatggtgaaacgccactta

SEQ ID NO: 310114 - DNA, 120 bp, Artificial Sequence
  ENSG00000134313_10 (sequence is synthesized)
taaaggctaccaagatgagaaacattgaagtggtggagctgctgctagataaaggtgctaaagtgtctgctgtagataagaaaggagatactcccttgcatattgctattcgtggaagga

SEQ ID NO: 310115 - DNA, 120 bp, Artificial Sequence
  ENSG00000134313_11 (sequence is synthesized)
gccggaaactggcagaactgcttttaagaaatcccaaagatgggcgattactttataggcccaacaaagcaggcgagactccttataatattgactgtagccatcagaagagtattttaa

SEQ ID NO: 310116 - DNA, 120 bp, Artificial Sequence
  ENSG00000134313_12 (sequence is synthesized)
ctcaaatatttggagccagacacttgtctcctactgaaacagacggtgacatgcttggatatgatttatatagcagtgccctggcagatattctcagtgagcctaccatgcagccaccca

SEQ ID NO: 310117 - DNA, 120 bp, Artificial Sequence
  ENSG00000134313_13 (sequence is synthesized)
tttgtgtggggttatatgcacagtggggaagtgggaaatctttcttactcaagaaactagaagacgaaatgaaaaccttcgccggacaacagattgagcctctctttcagttctcatggc

SEQ ID NO: 310118 - DNA, 120 bp, Artificial Sequence
  ENSG00000134313_14 (sequence is synthesized)
tcatagtgtttcttaccctgctactttgtggagggcttggtttattgtttgccttcacggtccacccaaatcttggaatagcagtgtcactgagcttcttggctctcttatatatattct

SEQ ID NO: 310119 - DNA, 120 bp, Artificial Sequence
  ENSG00000134313_15 (sequence is synthesized)
ttattgtcatttactttggtggacgaagagaaggagagagttggaattgggcctgggtcctcagcactagattggcaagacatattggatatttggaactcctccttaaattgatgtttg

SEQ ID NO: 310120 - DNA, 120 bp, Artificial Sequence
  ENSG00000134313_16 (sequence is synthesized)
tgaatccacctgagttgccagagcagactactaaagctttacctgtgaggtttttgtttacagattacaatagactgtccagtgtaggtggagaaacttctctggctgaaatgattgcaa

SEQ ID NO: 310121 - DNA, 120 bp, Artificial Sequence
  ENSG00000134313_17 (sequence is synthesized)
ccctctcggatgcttgtgaaagagagtttggctttttggcaaccaggctttttcgagtattcaagactgaagatactcagggtaaaaagaaatggaaaaaaacatgttgtctcccatctt

SEQ ID NO: 310122 - DNA, 120 bp, Artificial Sequence
  ENSG00000134313_18 (sequence is synthesized)
ttgtcatcttcctttttatcattggctgcattatatctggaattactcttctggctatatttagagttgacccaaagcatctgactgtaaatgctgtcctcatatcaatcgcatctgtag

SEQ ID NO: 310123 - DNA, 120 bp, Artificial Sequence
  ENSG00000134313_19 (sequence is synthesized)
tgggattggcctttgtgttgaactgtcgtacatggtggcaagtgctggactcgctcctgaattcccaaagaaaacgcctccataatgcagcctccaaactgcacaaattgaaaagtgaag

SEQ ID NO: 310124 - DNA, 120 bp, Artificial Sequence
  ENSG00000134313_20 (sequence is synthesized)
gattcatgaaagttcttaaatgtgaagtggaattgatggccaggatggcaaaaaccattgacagcttcactcagaatcagacaaggctggtggtcatcatcgatggattagatgcctgtg

SEQ ID NO: 310125 - DNA, 120 bp, Artificial Sequence
  ENSG00000134313_21 (sequence is synthesized)
agcaggacaaagtccttcagatgctggacactgtccgagttctgttttcaaaaggcccgttcattgccatttttgcaagtgatccacatattatcataaaggcaattaaccagaacctca

SEQ ID NO: 310126 - DNA, 120 bp, Artificial Sequence
  ENSG00000134313_22 (sequence is synthesized)
atagtgtgcttcgggattcaaatataaatggccatgactacatgcgcaacatagtccacttgcctgtgttccttaatagtcgtggactaagcaatgcaagaaaatttctcgtaacttcag

SEQ ID NO: 310127 - DNA, 120 bp, Artificial Sequence
  ENSG00000134313_23 (sequence is synthesized)
caacaaatggagacgttccatgctcagatactacagggatacaggaagatgctgacagaagagtttcacagaacagccttggggagatgacaaaacttggtagcaagacagccctcaata

SEQ ID NO: 310128 - DNA, 120 bp, Artificial Sequence
  ENSG00000134313_24 (sequence is synthesized)
gacgggacacttaccgaagaaggcagatgcagaggaccatcactcgccagatgtcctttgatcttacaaaactgctggttaccgaggactggttcagtgacatcagtccccagaccatga

SEQ ID NO: 310129 - DNA, 120 bp, Artificial Sequence
  ENSG00000134313_25 (sequence is synthesized)
gaagattacttaatattgtttctgtgacaggacgattactgagagccaatcagattagtttcaactgggacaggcttgctagctggatcaaccttactgagcagtggccataccggactt

SEQ ID NO: 310130 - DNA, 120 bp, Artificial Sequence
  ENSG00000134313_26 (sequence is synthesized)
catggctcatattatatttggaagagactgaaggtattccagatcaaatgacattaaaaaccatctacgaaagaatatcaaagaatattccaacaactaaggatgttgagccacttcttg

SEQ ID NO: 310131 - DNA, 120 bp, Artificial Sequence
  ENSG00000134313_27 (sequence is synthesized)
aaattgatggagatataagaaattttgaagtgtttttgtcttcaaggaccccagttcttgtggctcgagatgtaaaagtctttttgccatgcactgtaaacctagatcccaaactacggg

SEQ ID NO: 310132 - DNA, 120 bp, Artificial Sequence
  ENSG00000134313_28 (sequence is synthesized)
aaattattgcagatgttcgtgctgccagagagcagatcagtattggaggactggcgtaccccccgctccctctacatgagggtcctcctagggcgccatcagggtacagccagcccccat

SEQ ID NO: 310133 - DNA, 120 bp, Artificial Sequence
  ENSG00000134313_29 (sequence is synthesized)
ccgtgtgctcttccacgtccttcaatgggcccttcgcaggtggagtggtgtcaccacagcctcacagcagctattacagcggcatgacgggccctcagcatcccttctacaacaggccat

SEQ ID NO: 310134 - DNA, 120 bp, Artificial Sequence
  ENSG00000134313_30 (sequence is synthesized)
ggctcccaacatctcatctcacgtccatcagtaaaaacgagtttgcccagagatcagaacaatggcctagaagttatcaaggaggatgctgctgaggggctttcttcacccacagactcc

SEQ ID NO: 310135 - DNA, 120 bp, Artificial Sequence
  ENSG00000134313_31 (sequence is synthesized)
tcgagggggtcaggcccagccccaggcccagtggtattactgaattcactgaatgtggatgcagtatgtgagaagctgaaacaaatagaagggctggaccagagtatgctgcctcagtat

SEQ ID NO: 310136 - DNA, 120 bp, Artificial Sequence
  ENSG00000134313_32 (sequence is synthesized)
tgtaccacgatcaaaaaggcaaacataaatggccgtgtgttagctcagtgtaacattgatgagctgaagaaagagatgaatatgaattttggagactggcaccttttcagaagcacagta

SEQ ID NO: 310137 - DNA, 120 bp, Artificial Sequence
  ENSG00000134313_33 (sequence is synthesized)
ctagaaatgagaaacgcagaaagccacgtggtccctgaagacccacgtttcctcagtgagagcagcagtggcccagccccgcacggtgagcctgctcgccgcgcttcccacaacgagctg

SEQ ID NO: 310138 - DNA, 120 bp, Artificial Sequence
  ENSG00000134313_34 (sequence is synthesized)
cctcacaccgagctctccagccagacgccctacacactcaacttcagcttcgaagagctgaacacgcttggcctggatgaaggtgcccctcgtcacagtaatctaagttggcagtcacaa

SEQ ID NO: 310139 - DNA, 120 bp, Artificial Sequence
  ENSG00000134313_35 (sequence is synthesized)
actcgcagaaccccaagtctttcgagtctcaattcccaggattccagtattgaaatttcaaagcttactgataaggtgcaggccgagtatagagatgcctatagagaatacattgctcag

SEQ ID NO: 310140 - DNA, 120 bp, Artificial Sequence
  ENSG00000134313_36 (sequence is synthesized)
atgtcccagttagaagggggccccgggtctacaaccattagtggcagatcttctccacatagcacatattacatgggtcagagttcatcagggggctctattcattcaaacctagagcaa

SEQ ID NO: 310141 - DNA, 120 bp, Artificial Sequence
  ENSG00000134313_37 (sequence is synthesized)
gaaaaggggaaggatagtgaaccaaagcccgatgatgggaggaagtcctttctaatgaagaggggagatgttatcgattattcatcatcaggggtttccaccaacgatgcttcccccctg

SEQ ID NO: 310142 - DNA, 120 bp, Artificial Sequence
  ENSG00000134313_38 (sequence is synthesized)
gatcctatcactgaagaagatgaaaaatcagatcagtcaggcagtaagcttctcccaggcaagaaatcttccgaaaggtcaagcctcttccagacagatttgaagcttaagggaagtggg

SEQ ID NO: 310143 - DNA, 120 bp, Artificial Sequence
  ENSG00000134313_39 (sequence is synthesized)
ctgcgctatcaaaaactcccaagtgacgaggatgaatctggcacagaagaatcagataacactccactgctcaaagatgacaaagacagaaaagccgaagggaaagtagagagagtgccg

SEQ ID NO: 310144 - DNA, 120 bp, Artificial Sequence
  ENSG00000134313_40 (sequence is synthesized)
aagtctccagaacacagtgctgagccgatcagaaccttcattaaagccaaagagtatttatcggatgcgctccttgacaaaaaggattcatcggattcaggagtgagatccagtgaaagt

SEQ ID NO: 310145 - DNA, 120 bp, Artificial Sequence
  ENSG00000134313_41 (sequence is synthesized)
tctcccaatcactctctgcacaatgaagtggcggatgactcccagcttgaaaaggcaaatctcatagagctggaagatgacagtcacagcggaaagcggggaatcccacatagcctgagt

SEQ ID NO: 310146 - DNA, 120 bp, Artificial Sequence
  ENSG00000134313_42 (sequence is synthesized)
ggcctgcaagatccaattatagctcggatgtccatttgttcagaagacaagaaaagcccttccgaatgcagcttgatagccagcagccctgaagaaaactggcctgcatgccagaaagcc

SEQ ID NO: 310147 - DNA, 120 bp, Artificial Sequence
  ENSG00000134313_43 (sequence is synthesized)
tacaacctgaaccgaactcccagcaccgtgactctgaacaacaatagtgctccagccaacagagccaatcaaaatttcgatgagatggagggaattagggagacttctcaagtcattttg

SEQ ID NO: 310148 - DNA, 120 bp, Artificial Sequence
  ENSG00000134313_44 (sequence is synthesized)
aggcctagttccagtcccaacccaaccactattcagaatgagaatctaaaaagcatgacacataagcgaagccaacgttcaagttacacaaggctctccaaagatcctccggagctccat

SEQ ID NO: 310149 - DNA, 120 bp, Artificial Sequence
  ENSG00000134313_45 (sequence is synthesized)
gcagcagcctcttctgagagcacaggctttggagaagaaagagaaagcattctttgagaaaaacaagcaaaggagaagagtgttactgtacctttatgacagaattgtcctggattttga

SEQ ID NO: 310150 - DNA, 120 bp, Artificial Sequence
  ENSG00000134313_46 (sequence is synthesized)
ctccatccacgcccatcacctttctacattttgctgacagataactaaccgatgatgaggccgaggtaaaagagacatctgcagtgtgacagaagggagcatgagaagcatggctcacca

SEQ ID NO: 310151 - DNA, 120 bp, Artificial Sequence
  ENSG00000134313_47 (sequence is synthesized)
gccagcctctgtggtctttgtaattagaagcttcagaactcactaatactactgtacctttcattggcgcattaccccataaaactttttgagacgaggtgagatctgagtataaagata

SEQ ID NO: 310152 - DNA, 120 bp, Artificial Sequence
  ENSG00000134313_48 (sequence is synthesized)
ggtcagaagtattttaaagggcttaatgtgccaaaaagaaaaaaagctagagaccctttttgcaaacatttggtgaccacacatttgagggaagacgtggcgttaggtgaagcagaagca

SEQ ID NO: 310153 - DNA, 120 bp, Artificial Sequence
  ENSG00000134313_49 (sequence is synthesized)
aaccctgctcttaggggctcacctaggtgagtgcacagcctgtgacgctacagggagaggctgagtaaaccgagatccagcgttctgtatggcaggggtattgcttatcacagaggttct

SEQ ID NO: 310154 - DNA, 120 bp, Artificial Sequence
  ENSG00000134313_50 (sequence is synthesized)
gaagagtaggaagtacataatgaagagggctttaaaaattgccaacaaagtgagtcaccagggctggcagtagtgtgacggggctgtcctgagctgttaggagagtagatgcggggaggg

SEQ ID NO: 310155 - DNA, 120 bp, Artificial Sequence
  ENSG00000134313_51 (sequence is synthesized)
ctggtgacctccgtgggtttatatgtcggaaactcttctctccaaatcccaggcctggcttccagcaccatccagctgtgcccaagaagccaccctggtctgttctccaactcttttaaa

SEQ ID NO: 310156 - DNA, 120 bp, Artificial Sequence
  ENSG00000134313_52 (sequence is synthesized)
tggtgcccaacttttctaagtgagcttagcaatgagaagaaaaaaaaacatgaattctttttctggaaaatcagggagacatgggtaataataggtactaataaatatttatagatgagt

SEQ ID NO: 310157 - DNA, 120 bp, Artificial Sequence
  ENSG00000134313_53 (sequence is synthesized)
gaatgaggaaataattacatcaaaaaggtcagtgacaattgataaatgacaaggaaatatttaattaggtaaaactaaatcattgctctctatactaggatagactttatctacttcatc

SEQ ID NO: 310158 - DNA, 120 bp, Artificial Sequence
  ENSG00000134313_54 (sequence is synthesized)
tgttcctaagtcagcatgttagttctggggaaggatcataagaaaggaaatactttttaaaaaaaaatttggaaacatgtaacaaagcaagggtaaaatatatatatatatctatataag

SEQ ID NO: 310159 - DNA, 120 bp, Artificial Sequence
  ENSG00000134313_55 (sequence is synthesized)
tgctgtgactgtaaaagtgtactttccattaattattagccgagttaagagaatggtcacattgaagtactgtgtggactagaaatgtaccctgtcatcatgcaatgaaatattgttatc

SEQ ID NO: 310160 - DNA, 120 bp, Artificial Sequence
  ENSG00000134313_56 (sequence is synthesized)
gttttaacatagctcatttatgtagaatgaattctggtggtttaccccaagtcacagttaggacggtagatggtgagatcgcagatgcgctattatctagattcagtgttacattttcga

SEQ ID NO: 310161 - DNA, 120 bp, Artificial Sequence
  ENSG00000134313_57 (sequence is synthesized)
tgtttatcactcagtgggtttttattaatatgctgattaagttatttactgggccagtcattgtgctaaatagttgctcttttgtgtttcattgccttgatgtttgagtgtaatctagca

SEQ ID NO: 310162 - DNA, 120 bp, Artificial Sequence
  ENSG00000134313_58 (sequence is synthesized)
ttttaatacagtgtttattttgcatgatctttaacaaatgttttaagcaattttaaaaaggcaggatgttattgacattatacactgaagtcttaacattttaacatttatagtgcttat

SEQ ID NO: 310163 - DNA, 120 bp, Artificial Sequence
  ENSG00000134313_59 (sequence is synthesized)
ttgcaaaattgtataattaggaattatttcagagacaatgttttctttttcaggtgagtagttgccgcgtaatatcattggagtacattctttatactgtttgtgaaattaatactagca

SEQ ID NO: 310164 - DNA, 120 bp, Artificial Sequence
  ENSG00000134313_60 (sequence is synthesized)
tattaagtgtacaaatagatttagaaaacaataaaaaattgcatgctattctgactcatgaatttttattcactatgatgattcacattttgattaaaaataaaagtagtttgtgtgttt

SEQ ID NO: 310165 - DNA, 120 bp, Artificial Sequence
  ENSG00000134313_61 (sequence is synthesized)
gatactaatgaagtggacccatggcctaggaggagctgcagggagaaagcctgttgcttctcctctttcactgagttaagaaaaggggaaaagaatgaccttcattctagagggctgtgg

SEQ ID NO: 310166 - DNA, 120 bp, Artificial Sequence
  ENSG00000134313_62 (sequence is synthesized)
gagaaacagtatctgagcaaagctggatgaggagctacagaaggatattatggggaagatagagataaaaattcatattatatatgtgctttatatgaaaaataagaaaagttcagattt

SEQ ID NO: 310167 - DNA, 120 bp, Artificial Sequence
  ENSG00000134313_63 (sequence is synthesized)
tgttattttacagaaacatgaaaattgttactgtctgcatactatatataaagataagaaagttcaagtttcgtactattattttacagaaaggagatactcccttgcatattgctattc

SEQ ID NO: 310168 - DNA, 79 bp, Artificial Sequence
  ENSG00000134313_64 (sequence is synthesized)
aaacattcctgctctgaaagctcttcttgaaaaatgcaaagatgtagatgagagaaatctgacctcatgatccacccac

SEQ ID NO: 310169 - DNA, 120 bp, Artificial Sequence
  ENSG00000134313_65 (sequence is synthesized)
cgcgtccggcaagccaagctattattatttggcaggacattttaggtgctaatacagttttgtataaatatttgtggccagactccactgatgatagctgccgaacaaggcaatctggaa

SEQ ID NO: 310170 - DNA, 120 bp, Artificial Sequence
  ENSG00000134313_66 (sequence is synthesized)
taggcagtaaacatttgagaagttgacctaggctttgttcatgaaatgttctgttttcttagaaaaaatggttttgaccaggctgtatcagctgtaataaaagctactcattaggttata

SEQ ID NO: 310171 - DNA, 120 bp, Artificial Sequence
  ENSG00000134313_67 (sequence is synthesized)
acagtaactaaatctgttccctaatggtatttccttaccatgctaaacatatttgtttttttttactttacttcatggtataacttaatgagtttttctctgtcacatgacctcattata

SEQ ID NO: 310172 - DNA, 120 bp, Artificial Sequence
  ENSG00000134313_68 (sequence is synthesized)
tgactgcctgctatgtataggatagaagtgtgtaagaaataggtagttctaacccttagtaatactgcactgtacttatgatagaatgtcttatagttaaaagtacttcaaatttcatgt

SEQ ID NO: 310173 - DNA, 120 bp, Artificial Sequence
  ENSG00000134313_69 (sequence is synthesized)
ttttggagtacattttaacttatataaatgactgttgaatttagatttattgttttttttcccctgatggaataattaatattcaggaagcttgattactgaaatcaagtacttctgtga

SEQ ID NO: 310174 - DNA, 120 bp, Artificial Sequence
  ENSG00000134313_70 (sequence is synthesized)
tcttcccactttcctatggagataaacttgtaaaccctagtacatttaacagacgtatattattactaagtttcactgccattattgtaaaatttctatattaatgtcgagttaaatgta

SEQ ID NO: 310175 - DNA, 120 bp, Artificial Sequence
  ENSG00000134313_71 (sequence is synthesized)
tgttctcttaagccattctttgccccatacctttacacgccaaggtattaccctggcggctcccaacatctcatctcacgtccatcagtaaaaacgagtttgcccagagatcagaacaat

SEQ ID NO: 310176 - DNA, 120 bp, Artificial Sequence
  ENSG00000134313_72 (sequence is synthesized)
ggcctagtaagtatataaaagggtaacgcaaatattaatttaataataaacatagatagcatttgaggtttggttatttcctttacatagtaaaagagtgcaactgattttatacatagt

SEQ ID NO: 310177 - DNA, 120 bp, Artificial Sequence
  ENSG00000134313_73 (sequence is synthesized)
tttaagaaacaacctattactaacataaaatgtatttattttcatttctggtaaatatctatggaaggaaaatgactagcagtctcagcgaagaaatgttgacttgtttatagccagaaa

SEQ ID NO: 310178 - DNA, 120 bp, Artificial Sequence
  ENSG00000134313_74 (sequence is synthesized)
tttctggcttgtaatatagtgtttgctaccaaaacttttaaaactaagcctttacatttggtaatttctaatatcttcttaaagaacatgtgtatacagtacctttatagtatgtaaata

SEQ ID NO: 310179 - DNA, 120 bp, Artificial Sequence
  ENSG00000134313_75 (sequence is synthesized)
acatttgtgcccaaaatattagaggttcctgatgataaaagtaatagtttaaaaaaagaaactctctattaatatgtttttataaatcaggaggcaaaaacataaactgttgagtttcag

SEQ ID NO: 310180 - DNA, 120 bp, Artificial Sequence
  ENSG00000134313_76 (sequence is synthesized)
tgttgtatattattttaccatcatgttcatttgtcttcacagtttggctccccccttccccttttcacccacactctcctgttttgtgttgttaggaagttatcaaggaggatgctgctg

SEQ ID NO: 310181 - DNA, 120 bp, Artificial Sequence
  ENSG00000134313_77 (sequence is synthesized)
aggggctttcttcacccacagactcctcgagggtaatggagtagtcctgtggtgtggatcgctggcatctcattgcttctgcctcagtaatgactgtcttaattgtgatgatagcagctc

SEQ ID NO: 310182 - DNA, 120 bp, Artificial Sequence
  ENSG00000134313_78 (sequence is synthesized)
actaactctgcgtttgtggtgtgatgagcagctagtgtagagtagctgaatgctaataattatggttcctgaattaattaaaaagcggatgtttaacttcacccattatttcctcctgct

SEQ ID NO: 310183 - DNA, 120 bp, Artificial Sequence
  ENSG00000134313_79 (sequence is synthesized)
tttcccctttttcaatacatgggatggggtttttttttattcttcaataaggaagggctttttctatcagctgtcaggggtgttccgttggtagtatttgctcctcagtgtgagctctag

SEQ ID NO: 310184 - DNA, 120 bp, Artificial Sequence
  ENSG00000134313_80 (sequence is synthesized)
ctttgcctttgactgtttttgttaagcctgtggttgctattacacatgtggaatattttagaaaagtatccagtatcacccttgagactacaaaaagacacataagctagatggtgtaga

SEQ ID NO: 310185 - DNA, 120 bp, Artificial Sequence
  ENSG00000134313_81 (sequence is synthesized)
ctaaaaatgcatctttaataactcaatctaggtgtctacatttagttaagtcttagtctgagttttagtgcagtgttataatacttttctttgtctatatatttgttaaaataaattttc

SEQ ID NO: 310186 - DNA, 120 bp, Artificial Sequence
  ENSG00000134313_82 (sequence is synthesized)
aaattttccagataaacagaagatcgttcagcatgtaaaagaaattatttatttatttatttattttttgccaacaccttaaggtaggtttctttaaaaaaaaaaaacaaaaagaaaaaa

SEQ ID NO: 310187 - DNA, 120 bp, Artificial Sequence
  ENSG00000134313_83 (sequence is synthesized)
gcgcacgccgacactgggcggaagggaagaaaccagtggggatactgttcttttgcgggggcagcatgagcagactcaggaagaaaatgctggccttgagatagatagctcttcagagga

SEQ ID NO: 310188 - DNA, 120 bp, Artificial Sequence
  ENSG00000134313_84 (sequence is synthesized)
tccagattaaactaagttcgagtcacttctcacagttgacttcctcaccaaataataagggggtgaagaagactcggcctacctactactcagtaatcctgctgtccagtcgactggaga

SEQ ID NO: 310189 - DNA, 120 bp, Artificial Sequence
  ENSG00000134313_85 (sequence is synthesized)
ataaaagccatttagtgtatatttagtatagcaagaagcatgtgaataagctccatataacctgacattgcgcatcttacagcatcctcttggtcagatgtctaataaaaagattgttat

SEQ ID NO: 310190 - DNA, 120 bp, Artificial Sequence
  ENSG00000134313_86 (sequence is synthesized)
tttcaaatttatcatagttcctgcaacttgcactttttaaagctgtgtttgtgagaatttatagactgcatatcgctatacttgatggaaattaaactatttttattttgaaagaagtta

SEQ ID NO: 310191 - DNA, 120 bp, Artificial Sequence
  ENSG00000134313_87 (sequence is synthesized)
atttatattttaagttctgtatgtttttctccttttacctgagttcttttcagtcattttgtgttgttaagttttttttaggttgtcatatatttttcttttttaggttaccatcctagt

SEQ ID NO: 310192 - DNA, 120 bp, Artificial Sequence
  ENSG00000134313_88 (sequence is synthesized)
ttactgtaaaacatttcttagagcaatagattgggaaagagcctcgagatatcttttagaccaaatcctagatctcagaaagccagtggacattcagtaaatacttgttggccaggtgcc

SEQ ID NO: 310193 - DNA, 88 bp, Artificial Sequence
  ENSG00000134313_89 (sequence is synthesized)
gtgggaggatgtaacataatgggattccatctctacaaaaataaaaataaaaaaattagccaggaatggtggtgtgcacctgtagtcc

SEQ ID NO: 310194 - DNA, 120 bp, Artificial Sequence
  ENSG00000134313_90 (sequence is synthesized)
gtcccagctattcgggaggctgaggtaggaggattccctgagcctgagaggttgaggatgcagtgagtggtgatcacactactgcactccagcctgggttacagggtgaggccctgtctc

SEQ ID NO: 310195 - DNA, 120 bp, Artificial Sequence
  ENSG00000134313_91 (sequence is synthesized)
cactccagcctgggttacagggtgaggccctgtctcaaataaataaataattaaaacttgttaagtgaatgaataaactaggggggcaactctgagagtgtctgcccacaaatcctacac

SEQ ID NO: 310196 - DNA, 69 bp, Artificial Sequence
  ENSG00000134313_92 (sequence is synthesized)
ggggggcaactctgagagtgtctgcccacaaatcctacacagtgccttcaaatatgggcagatcatctg

SEQ ID NO: 310197 - DNA, 89 bp, Artificial Sequence
  ENSG00000134313_93 (sequence is synthesized)
ccccgtctctactaaaatacaaaaattaggcgggcgtggtggcaggtgtctatggcgcacttgaacgtgggagacggaggttgcagtga

SEQ ID NO: 310198 - DNA, 120 bp, Artificial Sequence
  ENSG00000134313_94 (sequence is synthesized)
tgggcgacagagtgagactccgtctcataaaatactgaatgtaaatcccttaacattgtgctgttgtgccacagctccttacaggtcccaccttccctctcactttctgcccaccctgtc

SEQ ID NO: 310199 - DNA, 120 bp, Artificial Sequence
  ENSG00000134313_95 (sequence is synthesized)
ttccctctcactttctgcccaccctgtcacctgcctggcccctgtaagcttttctgctgtgcttttggaaatctttcaaccacaatagcatgctttgttgcaaactcttagggacctaag

SEQ ID NO: 310200 - DNA, 120 bp, Artificial Sequence
  ENSG00000134313_96 (sequence is synthesized)
ggaaaaaaatgggggaaaaaaccctcccagggacagatatccacagccagtcttgataagctccatcattttaaagtgcaaggcggtgcctcccatgtggatgattatttaatcctcttg

SEQ ID NO: 310201 - DNA, 120 bp, Artificial Sequence
  ENSG00000134313_97 (sequence is synthesized)
tactttgtttagtcctttgtggaaatgcccatcttataaattaatagaattctagaatctaattaaaatggttcaactctacattttactttaggataatatcaggaccatcacagaatg

SEQ ID NO: 310202 - DNA, 120 bp, Artificial Sequence
  ENSG00000134313_98 (sequence is synthesized)
tctgagatgtggatttaccctatctgtagctcacttcttcaaccattcttttagcaaggctagttatcttcagtgacaaccccttgctgccctctactatctcctccctcagatggacta

SEQ ID NO: 310203 - DNA, 120 bp, Artificial Sequence
  ENSG00000134313_99 (sequence is synthesized)
ctctgattaagcttgagctagaataagcatgttatcccgggatttcatatggaatattttatacatgagtgagccattatgagttgtttgaaaatttattatgttgagggagggtaaccg

SEQ ID NO: 310204 - DNA, 120 bp, Artificial Sequence
  ENSG00000134313_100 (sequence is synthesized)
ctgtaacaaccatcaccaaatctaatcgactgaatacatttgacgtttatttcttgttcacctgacagttcagtgttacctaaatttacatgaagacccagaggcccacgctccttcatt

SEQ ID NO: 310205 - DNA, 120 bp, Artificial Sequence
  ENSG00000134313_101 (sequence is synthesized)
ttgggctccaccgacctccaaggtttcagggccctctgccccgccttctgcacccacaggggaagagagtggaggatgcacacgcccaggcctggaagtgacgcatgtggcttccccgtc

SEQ ID NO: 310206 - DNA, 120 bp, Artificial Sequence
  ENSG00000134313_102 (sequence is synthesized)
cacagacttcacccacagtccattggccttcttaagtcatggactcctgctgagctgccagggtgcatgggaaatccatgtgactgtgtgccctggaggaaggggagcgtttcggtgagc

SEQ ID NO: 310207 - DNA, 120 bp, Artificial Sequence
  ENSG00000134313_103 (sequence is synthesized)
acacaggagtctttgccactagacgctgatgaggattccccacaggcgatgaagcatggagactcatcttgtaacaaacagatgagttgttgacatctcttaagtttactttgtgtgcag

SEQ ID NO: 310208 - DNA, 120 bp, Artificial Sequence
  ENSG00000134313_104 (sequence is synthesized)
tttttattcagataggaaaggctgttaaaatcttaacacctaactggaagaagggttttagagaagtgtggttttcagtaagccagttctttccacaatccaagaaacgaaataaatttc

SEQ ID NO: 310209 - DNA, 120 bp, Artificial Sequence
  ENSG00000134313_105 (sequence is synthesized)
cagcatggagcagttggcaggtaaggtttttgttgtggtctcgcccaggcttgagtgtaaccggtgtggtcatagctcactacattctcaaactcctggccttaagtcatcctcctgcct

SEQ ID NO: 310210 - DNA, 120 bp, Artificial Sequence
  ENSG00000134313_106 (sequence is synthesized)
cagcctcccaaaggcaagtaaggttaagaataggggaaaggtgaagtttcacagcttttctagaattctttttattcaagggactctcagatcatcaaacccacccagaatctgctcaat

SEQ ID NO: 310211 - DNA, 120 bp, Artificial Sequence
  ENSG00000134313_107 (sequence is synthesized)
tttcaagatttgcttataaatatttataatataaacactcaattgctatctgttttttaggttctcctctctctcccagaacagtggtaacaggaactcttgggggcttctccctgttct

SEQ ID NO: 310212 - DNA, 120 bp, Artificial Sequence
  ENSG00000134313_108 (sequence is synthesized)
tgcagatgtggcaggatgtgttcctggggggctcccatgccagtccacaccctctgtggtgtaagcagggattggtaattaatgagatgctaaaccctccagaagtgagcgctcatgtcc

SEQ ID NO: 310213 - DNA, 120 bp, Artificial Sequence
  ENSG00000134313_109 (sequence is synthesized)
cagaaacacatcttccacctcagcagccagtgggaaaactagactttgtgtctgcatatttgttcttaaacacactcttctgcagtctaactctgctgaccactttccagtttgctcata

SEQ ID NO: 310214 - DNA, 120 bp, Artificial Sequence
  ENSG00000134313_110 (sequence is synthesized)
tcagaatttcttcggttctaagatgcatattttctttttgtattctgacttgttagaaattagaatatgtcttgcagtcaataaaatctatgacaacatttttttttcttaatggttcct

SEQ ID NO: 310215 - DNA, 120 bp, Artificial Sequence
  ENSG00000134313_111 (sequence is synthesized)
aaaactcctgtagttgatggtgtcttgcttaggtttaatgaaagagattttaatatatggcgtggttatgtggagttgtatctctatcagtattaatgggctcgggatgatttatattca

SEQ ID NO: 310216 - DNA, 120 bp, Artificial Sequence
  ENSG00000134313_112 (sequence is synthesized)
actgaacccccaaattcaacattttgtgttgaatatttattttatcagttattctttatcctgtactcattttggatacttactaaagtattgtatgtatttgttataataaaatggctt

SEQ ID NO: 310217 - DNA, 120 bp, Artificial Sequence
  ENSG00000134313_113 (sequence is synthesized)
gccgtgtttgaacacactgtgtatctgacaatgttctaagacctaatttgatcttcatgacaactgcataaaatagttactattattctcaattcacaaatgagaaagtgagacacagag

SEQ ID NO: 310218 - DNA, 120 bp, Artificial Sequence
  ENSG00000134313_114 (sequence is synthesized)
atgctaaggaattgcccaaagtcacacagctactgagtggcagagccagggtctgggcccagccagtgtggctccaggtgccgcccactcttgacgtgatacttaccgtcaatgctcctt

SEQ ID NO: 310219 - DNA, 120 bp, Artificial Sequence
  ENSG00000134313_115 (sequence is synthesized)
accagttagggatgagctgattctcatatttttccaagatacattttaattttagctttatttgctgtatcatcatcatcagtatcatcatcatcatcagttttcttgttttaaaatagg

SEQ ID NO: 310220 - DNA, 120 bp, Artificial Sequence
  ENSG00000134313_116 (sequence is synthesized)
gtttggagtctcttcaaggctttctgttttggaaaagtaaaacttaaaaatctatagccatgtgaattatacttatggagaaaaagagtcttgttttattaacatcagacatctttgttc

SEQ ID NO: 310221 - DNA, 120 bp, Artificial Sequence
  ENSG00000134313_117 (sequence is synthesized)
ctactaattattttggagtaatgttcagtatcgggctaatgatcgatggatatcactcatccaattatgatgcatggattagaccacggccttaaactttgtacatagtgttgaataaat

SEQ ID NO: 310222 - DNA, 120 bp, Artificial Sequence
  ENSG00000134313_118 (sequence is synthesized)
tcatcttatttgcagtcttattgtcatctagctttgatacacttgccctttcatatgtctcttgtcactattctgtgtaagattataatcccaaataccactatatgtatttttcttcat

SEQ ID NO: 310223 - DNA, 120 bp, Artificial Sequence
  ENSG00000134313_119 (sequence is synthesized)
cgaaagatgctgtggagcagacagttgtgaccgagaccgaattggcatttccaagtcagtgttagttgccatgttgatggagagctgagaaaagccattttaatggcatttgcaaataag

SEQ ID NO: 310224 - DNA, 120 bp, Artificial Sequence
  ENSG00000134313_120 (sequence is synthesized)
caggacatggaacaggccatgactccctcagagatgcacattcacttgggttatctgcctcgaaggactgaaaatggcaaatattcaaaacttcagcaaccagaggtactggccttcatg

SEQ ID NO: 310225 - DNA, 120 bp, Artificial Sequence
  ENSG00000134313_121 (sequence is synthesized)
agacaacggaatgggtagttgaaacattaaagagcaaacaacagtacagtcacttctgctcctctgaaatgaagacggcctcacatatccctttggaaacaatcaagtgtgcttctcatg

SEQ ID NO: 310226 - DNA, 120 bp, Artificial Sequence
  ENSG00000134313_122 (sequence is synthesized)
actaaaggttaaagctgtaagactgttggcatttactgaactgactgtgacattagtaataaatataaaaaatagatatttagttgaaagggtaattcatcttgattgagccaattgtgt

SEQ ID NO: 310227 - DNA, 120 bp, Artificial Sequence
  ENSG00000134313_123 (sequence is synthesized)
tctatgttgtaggacatgctgcttccctgctttcttaatgttaagtacacattccatttgtatgggatttttattcaaatagtcctattaaagtatgcacttttgttgggaaaaaacaaa

SEQ ID NO: 310228 - DNA, 120 bp, Artificial Sequence
  ENSG00000134317_0 (sequence is synthesized)
agagcgagaaaagcaaacccaacccgtcggggccgccgctccggacccgcagccgccgccgccgcctcctccccccggatcgggtgtactgtcccaacccgaaagtccagttctgcggcc

SEQ ID NO: 310229 - DNA, 120 bp, Artificial Sequence
  ENSG00000134317_1 (sequence is synthesized)
cggcagcggcgagcgggcgcgatgacacaggagtacgacaacaaacggccagtgttggttcttcagaatgaagcactttatccacagcggcggtcctacactagtgaggatgaggcctgg

SEQ ID NO: 310230 - DNA, 120 bp, Artificial Sequence
  ENSG00000134317_2 (sequence is synthesized)
aaatccttcctggaaaaccctctcactgcagcgaccaaagcgatgatgagcatcaatggagatgaagacagcgccgctgcgctgggcctgctctatgactactacaaggttccaagagag

SEQ ID NO: 310231 - DNA, 120 bp, Artificial Sequence
  ENSG00000134317_3 (sequence is synthesized)
agaaggtcatcaacagcaaagccagaggtggagcaccctgagccagatcacagcaaaagaaacagcataccaattgtgacagagcagcccctcatctctgctggagaaaacagagtgcaa

SEQ ID NO: 310232 - DNA, 120 bp, Artificial Sequence
  ENSG00000134317_4 (sequence is synthesized)
gtactgaaaaatgtgccatttaacattgtccttccccatggcaaccagctgggcattgataagagaggccatctgacagctccagatacgacagtcactgtctccatagcaacgatgcct

SEQ ID NO: 310233 - DNA, 120 bp, Artificial Sequence
  ENSG00000134317_5 (sequence is synthesized)
acccactccatcaagacagaaacccagccacatggcttcgctgtgggaatccccccagcagtgtatcatcctgagcccactgagcgggtggtggttttcgatcggaatctcaatactgac

SEQ ID NO: 310234 - DNA, 120 bp, Artificial Sequence
  ENSG00000134317_6 (sequence is synthesized)
cagttcagctctggtgctcaagccccaaatgctcaaaggcgaactccagactcgaccttctcagagaccttcaaggaaggcgttcaggaggttttcttcccctcggatctcagtctgcgg

SEQ ID NO: 310235 - DNA, 120 bp, Artificial Sequence
  ENSG00000134317_7 (sequence is synthesized)
atgcctggcatgaattcagaggactatgtttttgacagtgtttctgggaacaactttgaatataccctagaagcttcaaaatcacttcgacagaagccaggagacagtaccatgacgtac

SEQ ID NO: 310236 - DNA, 120 bp, Artificial Sequence
  ENSG00000134317_8 (sequence is synthesized)
ctgaacaaaggccagttctatcccatcaccttgaaggaggtgagcagcagtgaaggaatccatcatcccatcagcaaagttcgaagtgtgatcatggtggtttttgctgaagacaaaagc

SEQ ID NO: 310237 - DNA, 120 bp, Artificial Sequence
  ENSG00000134317_9 (sequence is synthesized)
agagaagatcagttaaggcattggaagtactggcactcccggcagcacaccgctaaacaaagatgcattgacatagctgactataaagaaagcttcaacactatcagtaacatcgaggag

SEQ ID NO: 310238 - DNA, 120 bp, Artificial Sequence
  ENSG00000134317_10 (sequence is synthesized)
attgcgtataacgccatttccttcacatgggacatcaacgatgaagcaaaggttttcatctctgtgaactgcttaagcacagatttctcttcccagaagggagtgaaggggttgcctctt

SEQ ID NO: 310239 - DNA, 120 bp, Artificial Sequence
  ENSG00000134317_11 (sequence is synthesized)
aacattcaagttgatacctatagttacaacaaccgcagcaacaagcctgtgcaccgggcctactgccagatcaaggtcttctgtgacaagggagctgagcggaaaatcagggatgaagaa

SEQ ID NO: 310240 - DNA, 120 bp, Artificial Sequence
  ENSG00000134317_12 (sequence is synthesized)
cgaaagcaaagcaaaagaaaagtttctgatgttaaagtgccactgcttccctctcacaagcgaatggatatcacagttttcaaacccttcattgatctcgatactcagcctgtcctcttc

SEQ ID NO: 310241 - DNA, 120 bp, Artificial Sequence
  ENSG00000134317_13 (sequence is synthesized)
attcctgacgtgcactttgccaacttgcagcggggcactcatgtccttcccattgcctctgaagaattggagggtgaaggctctgtcttgaaaagggggccgtacggcacagaagatgac

SEQ ID NO: 310242 - DNA, 120 bp, Artificial Sequence
  ENSG00000134317_14 (sequence is synthesized)
ttgatgccctgatgctcaaaaccccatctttgaagggcttgatggaagctatctcagacaaatacgatgttccccatgacaagattgggaaaatattcaagaagtgtaaaaaggggatcc

SEQ ID NO: 310243 - DNA, 120 bp, Artificial Sequence
  ENSG00000134317_15 (sequence is synthesized)
tggtgaacatggacgacaacattgtgaagcattactccaatgaggacaccttccagctgcagattgaagaagccggggggtcttacaagctcaccctgacggagatctaaaggcctgcgg

SEQ ID NO: 310244 - DNA, 120 bp, Artificial Sequence
  ENSG00000134317_16 (sequence is synthesized)
gccacagctccccaggagttcagtgcaggtgtttctagatcttacggtttggcaactgcaggtaaccccagtcagccatgtcgccagcacaggtctatgtcgagggaatgggttccttgc

SEQ ID NO: 310245 - DNA, 120 bp, Artificial Sequence
  ENSG00000134317_17 (sequence is synthesized)
aggttggaggcggggctgcatctggcttggtggtagcatttaatctattgcattggtgtttttcagatgaaagagaaatccatataccattatgtttgaatttcctgatatatacaggat

SEQ ID NO: 310246 - DNA, 120 bp, Artificial Sequence
  ENSG00000134317_18 (sequence is synthesized)
ttaaagtgaaaactttattccaagagttaacagagtctctgggaagctttaggacatctgctacgttatttatcaaaatattgggatctctgccttgtgcctacagtgtcgtgggcctgc

SEQ ID NO: 310247 - DNA, 120 bp, Artificial Sequence
  ENSG00000134317_19 (sequence is synthesized)
tcgctagcagaagtcagaaaaggcgataggcttggctttaaggatttcgtgcccttgcctgaattcagtacaactccactgcctcacgttagcgggagcgcacctgaagagtacgggggg

SEQ ID NO: 310248 - DNA, 120 bp, Artificial Sequence
  ENSG00000134317_20 (sequence is synthesized)
agccctctctcccttaccctctcactctccaccagatgtttactaaacagggcatgttactgaaatcttcctttgcgactttctcggacatatcaactgcctttctcatgaagaatttta

SEQ ID NO: 310249 - DNA, 120 bp, Artificial Sequence
  ENSG00000134317_21 (sequence is synthesized)
atgggttacagtatgaaatcagttaagataaagctgcattgtatataagtgcaatatatttttgaaggtctgtaaatgtgtacatacatgtcttatataaatatataatatataaatatg

SEQ ID NO: 310250 - DNA, 120 bp, Artificial Sequence
  ENSG00000134317_22 (sequence is synthesized)
gtgtctgtgtacatatagtgaagatatgcagtaagagctaccttaaagactttccctagacaaaggttaagttattttttgatcgtgtataccaagcagatagaatactgtgcttagtgg

SEQ ID NO: 310251 - DNA, 120 bp, Artificial Sequence
  ENSG00000134317_23 (sequence is synthesized)
aacccgctaaaaacctttttctctgtttttccaaacacaggcattctgtagcatagcaaaaccttctcaaatgacagagattctgtttgctgttgagaatgttgttatttggatttctgc

SEQ ID NO: 310252 - DNA, 120 bp, Artificial Sequence
  ENSG00000134317_24 (sequence is synthesized)
actgtttaacaaatgaagtaaaagaaaaacactactgcaatcacgtcttttgttatgctagtatcagtcagatgcacttagagtgaagaaacactgtaattacagcacacagattgcaag

SEQ ID NO: 310253 - DNA, 120 bp, Artificial Sequence
  ENSG00000134317_25 (sequence is synthesized)
tattgcgtaccaagtgatacaactcgaaatgcagttctcatcttcctgttttgagaaatgattattttatcacgcatcagagccttcgtgctttgattatcttgtatgttaacaattcta

SEQ ID NO: 310254 - DNA, 120 bp, Artificial Sequence
  ENSG00000134317_26 (sequence is synthesized)
gaaaacattcatgaattcacaaaaatatgttactatggcaggggaacattttgtacacatttaagtatataaaaatactaaaatatgtaattttataacaaagtcacgggtatctttagg

SEQ ID NO: 310255 - DNA, 120 bp, Artificial Sequence
  ENSG00000134317_27 (sequence is synthesized)
ttcagggaactagactaggtcattcgtgtaaatggactggtagttacagtcttaggttaaagtattctaatgaagtatgggaactaaattgctggttttctaagataagatatgggatat

SEQ ID NO: 310256 - DNA, 120 bp, Artificial Sequence
  ENSG00000134317_28 (sequence is synthesized)
gggtcatataacttttgtattttttatgaagttgattttgtcttgcgtgttatttttaattgtatcattgaagatgtattttaaaccaaaggaattaaattttatatgtctatttcgtaa

SEQ ID NO: 310257 - DNA, 120 bp, Artificial Sequence
  ENSG00000134317_29 (sequence is synthesized)
cagcccaatgccattaggaaaataaaaattgtcaaagaactacatcagcatcgcgtttgaaagcagttttcttttcttaaagaaacagcataccaattgtgacagagcagcccctcatct

SEQ ID NO: 310258 - DNA, 120 bp, Artificial Sequence
  ENSG00000134317_30 (sequence is synthesized)
ataattccagcactttgggaggccaagctctgtcttgaaaagggggccgtacggcacagaagatgactttgctgtccctccttctaccaagctggcccggatagaagaaccaaagagagt

SEQ ID NO: 310259 - DNA, 120 bp, Artificial Sequence
  ENSG00000134317_31 (sequence is synthesized)
agaaggtcatcaacagcaaagccagaggtggagcaccctgagccagatcacagcaaaaggtaacattcagtgcctaacagcataaagagtgcagggggaaatgccacgtttctgtaacag

SEQ ID NO: 310260 - DNA, 120 bp, Artificial Sequence
  ENSG00000134317_32 (sequence is synthesized)
caaaatgggagtttgtttaaatgaacaaccactagtgaaagagataggtaagttggactcttactatctaaattcagatttcatcactgatttgcctctgttgctctgaaatttcctttt

SEQ ID NO: 310261 - DNA, 120 bp, Artificial Sequence
  ENSG00000134317_33 (sequence is synthesized)
ttctttgggcgtagtagttgccttttctaggatgaaagcactaacattctcctcctccaaagggatagttttagtaataacttcagtatttgcttatttgtttttgaggttttctttaga

SEQ ID NO: 310262 - DNA, 120 bp, Artificial Sequence
  ENSG00000134317_34 (sequence is synthesized)
aggatgtgtggcagtggtctattaaaaaaattaagcaccagtgactcttgaacaactgcctgagtaaaattgaataaagcaagttaaattgtattcaaattcctgttgaaattatttgtg

SEQ ID NO: 310263 - DNA, 120 bp, Artificial Sequence
  ENSG00000134317_35 (sequence is synthesized)
aaatattttagattaaaactttcagaaaatttaattaacgtttggctagccatgaaaaactttaaaaagacaccttttaaattgtcttgtgttttattatcaatcaaggaatgaaacata

SEQ ID NO: 310264 - DNA, 120 bp, Artificial Sequence
  ENSG00000134317_36 (sequence is synthesized)
tttaaaggaagaatgatcatcacccagtatcccattatcgtgatgattgctttattcattgttttgatgtgtatgcaaattttatgtagcgtagttgtgttcacagataggatttggtag

SEQ ID NO: 310265 - DNA, 120 bp, Artificial Sequence
  ENSG00000134317_37 (sequence is synthesized)
tgtactttcttctacttagtttgtttcataaacattttctctgtattttaatcttcataattatcctttggaagaggacttgtggcttttatcttttacttttcattatgggcattttca

SEQ ID NO: 310266 - DNA, 120 bp, Artificial Sequence
  ENSG00000134317_38 (sequence is synthesized)
aacataataaaaatagaaaaacagtataagcccacatgtatccatgaccagcctcaacagttatcaacacaattcctcttgtttgatttgttcttccctcttcttcaactttgagattaa

SEQ ID NO: 310267 - DNA, 120 bp, Artificial Sequence
  ENSG00000134317_39 (sequence is synthesized)
ttcatgtttttattttatttatttttgctggaacattctgaagcaaactgtaaatatccttacaattgctgctatatctagttttcactattaagaagtcttaaggaacaactttctaga

SEQ ID NO: 310268 - DNA, 120 bp, Artificial Sequence
  ENSG00000134317_40 (sequence is synthesized)
ctttttccgttttaggataaattcctgggagtgaatttatggttcagggttcaaacagttttattgatcttgaaatgtacagaattctcaatttgcctgtttcttgaagcttcagcctat

SEQ ID NO: 310269 - DNA, 120 bp, Artificial Sequence
  ENSG00000134317_41 (sequence is synthesized)
atgatttctgggggctttgaaaattcattcattttacccactggaaatcatcttgtattgctcaaattatttatcaaaccaaaatttaattttataaaaagcagatgtgtctactgatgc

SEQ ID NO: 310270 - DNA, 90 bp, Artificial Sequence
  ENSG00000134317_42 (sequence is synthesized)
aaaatttaattttataaaaagcagatgtgtctactgatgcaatgtaacaataggttttcttgggtgaaagagaaagccagcagcgctttg

SEQ ID NO: 310271 - DNA, 73 bp, Artificial Sequence
  ENSG00000134317_43 (sequence is synthesized)
gcagtgagcctagatcacgccattgcacaccagcctgggccataagggaaagccaaatggcataggtggtagg

SEQ ID NO: 310272 - DNA, 120 bp, Artificial Sequence
  ENSG00000134317_44 (sequence is synthesized)
caaatggcataggtggtaggaaaagtggtgaccaagtaataatagctcatacttcttgaagactgtgtgtcaggcattattatacaccttttagtgtatcatctcatctcaacctgatga

SEQ ID NO: 310273 - DNA, 120 bp, Artificial Sequence
  ENSG00000134317_45 (sequence is synthesized)
gaatggatgccattattgtccccattttgcagatgaggattcagttactaagagatgaagtaacttgctcaggtgacacagaacttgaacccaggcaatttgaccctggcgtctatgctg

SEQ ID NO: 310274 - DNA, 120 bp, Artificial Sequence
  ENSG00000134317_46 (sequence is synthesized)
taaccccagttgatcagatcgcatagcttcaggtttctagtaaaacacagtaattgtttttaggattatggaaagtaaagcttgttagaggagagctctgagcccttagtatttcgaatg

SEQ ID NO: 310275 - DNA, 120 bp, Artificial Sequence
  ENSG00000134317_47 (sequence is synthesized)
aaattttacttaataggtttggattttatttgaccgataaccagaaagcctttttccctttatctagtaatgggtagttttgatgttttctgtttattctgtcaagtgttattgcacagg

SEQ ID NO: 310276 - DNA, 120 bp, Artificial Sequence
  ENSG00000134317_48 (sequence is synthesized)
gcccgcttttattcccagaggtgcagccatccagttttctaaatccaattatttttggcagtgatcagcttcctgccgaaagcatttgaatttttatgccagctactgatctgttccaaa

SEQ ID NO: 310277 - DNA, 120 bp, Artificial Sequence
  ENSG00000134317_49 (sequence is synthesized)
cactgtcctcggcctcctggaaccagtgctctcaccattgctcccatgcagtaatgggacatgtgcccacgtggtggctttccacaggacactagggccagaagccatgtagctggctaa

SEQ ID NO: 310278 - DNA, 120 bp, Artificial Sequence
  ENSG00000134317_50 (sequence is synthesized)
cctgagaatgtccccactgttcagtctgcaattgctttaaggggtaatatcttctttaaaagattctgattattatttggagatgatggaggtagagaaaaaaacaagtaaaagaaagat

SEQ ID NO: 310279 - DNA, 120 bp, Artificial Sequence
  ENSG00000134317_51 (sequence is synthesized)
attgctgctgtgcagttgcctaacagtcttccctagtcacgtgctaaaccgtgtaactaacctctctgtgggctgtagtggcaaacctgtgcaaatctgtatttactgaagtagcgttac

SEQ ID NO: 310280 - DNA, 120 bp, Artificial Sequence
  ENSG00000134317_52 (sequence is synthesized)
acagacctctgttcttgccatgtatgtaattttcatgtaaaaccattgtctgtatcacagatggctgtttaatattagtgttactttttttctttaccttttgtaatgctcttgtttcct

SEQ ID NO: 310281 - DNA, 120 bp, Artificial Sequence
  ENSG00000134317_53 (sequence is synthesized)
tttcaggagaatgagaactcagttctaatcttggttctacagagtagttttgtgaccttgggactgttatttaaactttttagacttaaatttcctaattgtgacataatgagattgaat

SEQ ID NO: 310282 - DNA, 120 bp, Artificial Sequence
  ENSG00000134317_54 (sequence is synthesized)
taaatatgtctaagcttgcctctattacaaaaactctgtgattctttttcttcgtattttgaacttcttctaatcgaacaaaatgttaatttaaattgtccagaggtgataatgctaaaa

SEQ ID NO: 310283 - DNA, 120 bp, Artificial Sequence
  ENSG00000134317_55 (sequence is synthesized)
actagatcttattttgaactgctgggatcccatgttgaaactaagactcatgagttttcattttctcttccaccgcttcctgtagctgactataaagaaagcttcaacactatcagtaac

SEQ ID NO: 310284 - DNA, 120 bp, Artificial Sequence
  ENSG00000134317_56 (sequence is synthesized)
atcgaggagattgcgtataacgccatttccttcacatgggacatcaacgatgaagcaaaggtgggtggtgaggtctgggcgccttatgtccagccatttgagaaatgggaggagtttaat

SEQ ID NO: 310285 - DNA, 120 bp, Artificial Sequence
  ENSG00000134317_57 (sequence is synthesized)
gatttgacaactgatttttttttttttcacagttttatgtgtttcattctcaggtgttatgaaactatcctcttccctttttattctcccctcctccaaaacagatcatttttgttgcca

SEQ ID NO: 310286 - DNA, 120 bp, Artificial Sequence
  ENSG00000134317_58 (sequence is synthesized)
tcctttgcacagagtccagtgtgtgaaacattgagattaagttgcactctgccactcctgcctgttcagccttgagtctgactcctcatttgctttgcctcatttcctcatttgcacagt

SEQ ID NO: 310287 - DNA, 120 bp, Artificial Sequence
  ENSG00000134317_59 (sequence is synthesized)
ggaggtgatatctgtctcctccctctattgaaggaggtgtaaggagtaatgaaacaatgcccatcaaactgttggagtggctttgagaaaggctcttaaatataagtgattattagtagt

SEQ ID NO: 310288 - DNA, 120 bp, Artificial Sequence
  ENSG00000134317_60 (sequence is synthesized)
actctgtttcatatcatcaccttgtaaatatgactctgtgttaagattcttctgtcttgggcttttcccattgaagagttgcctccagttcagttggagtaactctaattggctagagtt

SEQ ID NO: 310289 - DNA, 120 bp, Artificial Sequence
  ENSG00000134317_61 (sequence is synthesized)
actccttgtgggcgactctaatgggaatttttgtgcccttgaagaaaaattcagcatattcctaagtcctttctgccttgcccctgccttcttccctgtgagtgtgatccttctccactc

SEQ ID NO: 310290 - DNA, 120 bp, Artificial Sequence
  ENSG00000134317_62 (sequence is synthesized)
ccttctccactcaattattagagttcctgtatttctttctttctttggattactttaaaaactgggagctcaagaaactgaatagaggccagaagtggtggctcacacttgtaatcccag

SEQ ID NO: 310291 - DNA, 120 bp, Artificial Sequence
  ENSG00000134317_63 (sequence is synthesized)
cggcagcggcgagcgggcgcgatgacacaggagtacgacaaaatatgcagttaaattattgcctgaaacatatttcagaagtctgagagatcgcagacgcggagtttaaggctcacctga

SEQ ID NO: 310292 - DNA, 80 bp, Artificial Sequence
  ENSG00000134318_0 (sequence is synthesized)
agacgggcggccgcgcgggagtgtgtgcgccgggagctggctgagggactgcaaggcggccggcggcgaccatggcagcg

SEQ ID NO: 310293 - DNA, 120 bp, Artificial Sequence
  ENSG00000134318_1 (sequence is synthesized)
gccccagagggcggggcggtccgggccgcggcggtggcggcgccacttccctgctcccgcccgaggactcctgcgggcactcgctgaggaccagcggaccggcggcgcgaatctgactga

SEQ ID NO: 310294 - DNA, 80 bp, Artificial Sequence
  ENSG00000134318_2 (sequence is synthesized)
gaatctgactgaggggcggggacgccgtctgttccccgccgctcccggcagggccgggccgggctgggccgggctgggcc

SEQ ID NO: 310295 - DNA, 120 bp, Artificial Sequence
  ENSG00000134318_3 (sequence is synthesized)
agacccgaagccggagctagaggcaggcggtgggcccgggtggagtcccggccggagctggtggttcgggggcggtgctaggccccgaggctgcgggacctgagcgcgaggagcctgagt

SEQ ID NO: 310296 - DNA, 120 bp, Artificial Sequence
  ENSG00000134318_4 (sequence is synthesized)
gtggcggcatgagccggcccccgccgacggggaaaatgcccggcgcccccgagaccgcgccgggggacggggcaggcgcgagccgccagaggaagctggaggcgctgatccgagaccctc

SEQ ID NO: 310297 - DNA, 120 bp, Artificial Sequence
  ENSG00000134318_5 (sequence is synthesized)
tccgagaccctcgctcccccatcaacgtggagagcttgctggatggcttaaattccttggtccttgatttagattttcctgctttgaggaaaaacaagaacatagataatttcttaaata

SEQ ID NO: 310298 - DNA, 120 bp, Artificial Sequence
  ENSG00000134318_6 (sequence is synthesized)
gatatgagaaaattgtgaaaaaaatcagaggtctacagatgaaggcagaagactatgatgttgtaaaagttattggaagaggtgcttttggtgaagtgcagttggttcgtcacaaggcat

SEQ ID NO: 310299 - DNA, 120 bp, Artificial Sequence
  ENSG00000134318_7 (sequence is synthesized)
cgcagaaggtttatgctatgaagcttcttagtaagtttgaaatgataaaaagatcagattctgcctttttttgggaagaaagagatattatggcctttgccaatagcccctgggtggttc

SEQ ID NO: 310300 - DNA, 120 bp, Artificial Sequence
  ENSG00000134318_8 (sequence is synthesized)
agcttttttatgcctttcaagatgataggtatctgtacatggtaatggagtacatgcctggtggagaccttgtaaaccttatgagtaattatgatgtgcctgaaaaatgggccaaatttt

SEQ ID NO: 310301 - DNA, 120 bp, Artificial Sequence
  ENSG00000134318_9 (sequence is synthesized)
acactgctgaagttgttcttgctctggatgcaatacactccatgggtttaatacacagagatgtgaagcctgacaacatgctcttggataaacatggacatctaaaattagcagattttg

SEQ ID NO: 310302 - DNA, 120 bp, Artificial Sequence
  ENSG00000134318_10 (sequence is synthesized)
gcacgtgtatgaagatggatgaaacaggcatggtacattgtgatacagcagttggaacaccggattatatatcacctgaggttctgaaatcacaagggggtgatggtttctatgggcgag

SEQ ID NO: 310303 - DNA, 120 bp, Artificial Sequence
  ENSG00000134318_11 (sequence is synthesized)
aatgtgattggtggtctgtaggtgttttcctttatgagatgctagtgggggatactccattttatgcggattcacttgtaggaacatatagcaaaattatggatcataagaattcactgt

SEQ ID NO: 310304 - DNA, 120 bp, Artificial Sequence
  ENSG00000134318_12 (sequence is synthesized)
gtttccctgaagatgcagaaatttccaaacatgcaaagaatctcatctgtgctttcttaacagatagggaggtacgacttgggagaaatggggtggaagaaatcagacagcatcctttct

SEQ ID NO: 310305 - DNA, 120 bp, Artificial Sequence
  ENSG00000134318_13 (sequence is synthesized)
ttaagaatgatcagtggcattgggataacataagagaaacggcagctcctgtagtacctgaactcagcagtgacatagacagcagcaatttcgatgacattgaagatgacaaaggagatg

SEQ ID NO: 310306 - DNA, 120 bp, Artificial Sequence
  ENSG00000134318_14 (sequence is synthesized)
tagaaaccttcccaattcctaaagcttttgttggaaatcagctgcctttcatcggatttacctactatagagaaaatttattattaagtgactctccatcttgtagagaaactgattcca

SEQ ID NO: 310307 - DNA, 120 bp, Artificial Sequence
  ENSG00000134318_15 (sequence is synthesized)
tacaatcaaggaaaaatgaagaaagtcaagagattcagaaaaaactgtatacattagaagaacatcttagcaatgagatgcaagccaaagaggaactggaacagaagtgcaaatctgtta

SEQ ID NO: 310308 - DNA, 120 bp, Artificial Sequence
  ENSG00000134318_16 (sequence is synthesized)
atactcgcctagaaaaaacagcaaaggagctagaagaggagattaccttacggaaaagtgtggaatcagcattaagacagttagaaagagaaaaggcgcttcttcagcacaaaaatgcag

SEQ ID NO: 310309 - DNA, 120 bp, Artificial Sequence
  ENSG00000134318_17 (sequence is synthesized)
aatatcagaggaaagctgatcatgaagcagacaaaaaacgaaatttggaaaatgatgttaacagcttaaaagatcaacttgaagatttgaaaaaaagaaatcaaaactctcaaatatcca

SEQ ID NO: 310310 - DNA, 120 bp, Artificial Sequence
  ENSG00000134318_18 (sequence is synthesized)
ctgagaaagtgaatcaactccagagacaactggatgaaaccaatgctttactgcgaacagagtctgatactgcagcccggttaaggaaaacccaggcagaaagttcaaaacagattcagc

SEQ ID NO: 310311 - DNA, 120 bp, Artificial Sequence
  ENSG00000134318_19 (sequence is synthesized)
agctggaatctaacaatagagatctacaagataaaaactgcctgctggagactgccaagttaaaacttgaaaaggaatttatcaatcttcagtcagctctagaatctgaaaggagggatc

SEQ ID NO: 310312 - DNA, 120 bp, Artificial Sequence
  ENSG00000134318_20 (sequence is synthesized)
gaacccatggatcagagataattaatgatttacaaggtagaatatgtggcctagaagaagatttaaagaacggcaaaatcttactagcgaaagtagaactggagaagagacaacttcagg

SEQ ID NO: 310313 - DNA, 120 bp, Artificial Sequence
  ENSG00000134318_21 (sequence is synthesized)
agagatttactgatttggaaaaggaaaaaagcaacatggaaatagatatgacataccaactaaaagttatacagcagagcctagaacaagaagaagctgaacataaggccacaaaggcac

SEQ ID NO: 310314 - DNA, 120 bp, Artificial Sequence
  ENSG00000134318_22 (sequence is synthesized)
gactagcagataaaaataagatctatgagtccatcgaagaagccaaatcagaagccatgaaagaaatggagaagaagctcttggaggaaagaactttaaaacagaaagtggagaacctat

SEQ ID NO: 310315 - DNA, 120 bp, Artificial Sequence
  ENSG00000134318_23 (sequence is synthesized)
tgctagaagctgagaaaagatgttctctattagactgtgacctcaaacagtcacagcagaaaataaatgagctccttaaacagaaagatgtgctaaatgaggatgttagaaacctgacat

SEQ ID NO: 310316 - DNA, 120 bp, Artificial Sequence
  ENSG00000134318_24 (sequence is synthesized)
taaaaatagagcaagaaactcagaagcgctgccttacacaaaatgacctgaagatgcaaacacaacaggttaacacactaaaaatgtcagaaaagcagttaaagcaagaaaataaccatc

SEQ ID NO: 310317 - DNA, 120 bp, Artificial Sequence
  ENSG00000134318_25 (sequence is synthesized)
tcatggaaatgaaaatgaacttggaaaaacaaaatgctgaacttcgaaaagaacgtcaggatgcagatgggcaaatgaaagagctccaggatcagctcgaagcagaacagtatttctcaa

SEQ ID NO: 310318 - DNA, 120 bp, Artificial Sequence
  ENSG00000134318_26 (sequence is synthesized)
ccctttataaaacacaagttagggagcttaaagaagaatgtgaagaaaagaccaaacttggtaaagaattgcagcagaagaaacaggaattacaggatgaacgggactctttggctgccc

SEQ ID NO: 310319 - DNA, 120 bp, Artificial Sequence
  ENSG00000134318_27 (sequence is synthesized)
aactggagatcaccttgaccaaagcagattctgagcaactggctcgttcaattgctgaagaacaatattctgatttggaaaaagagaagatcatgaaagagctggagatcaaagagatga

SEQ ID NO: 310320 - DNA, 120 bp, Artificial Sequence
  ENSG00000134318_28 (sequence is synthesized)
tggctagacacaaacaggaacttacggaaaaagatgctacaattgcttctcttgaggaaactaataggacactaactagtgatgttgccaatcttgcaaatgagaaagaagaattaaata

SEQ ID NO: 310321 - DNA, 120 bp, Artificial Sequence
  ENSG00000134318_29 (sequence is synthesized)
acaaattgaaagatgttcaagagcaactgtcaagattgaaagatgaagaaataagcgcagcagctattaaagcacagtttgagaagcagctattaacagaaagaacactcaaaactcaag

SEQ ID NO: 310322 - DNA, 120 bp, Artificial Sequence
  ENSG00000134318_30 (sequence is synthesized)
ctgtgaataagttggctgagatcatgaatcgaaaagaacctgtcaagcgtggtaatgacacagatgtgcggagaaaagagaaggagaatagaaagctacatatggagcttaaatctgaac

SEQ ID NO: 310323 - DNA, 120 bp, Artificial Sequence
  ENSG00000134318_31 (sequence is synthesized)
gtgagaaattgacccagcagatgatcaagtatcagaaagaactgaatgaaatgcaggcacaaatagctgaagagagccagattcgaattgaactgcagatgacattggacagtaaagaca

SEQ ID NO: 310324 - DNA, 120 bp, Artificial Sequence
  ENSG00000134318_32 (sequence is synthesized)
gtgacattgagcagctgcggtcacaactccaagccttgcatattggtctggatagttccagtataggcagtggaccaggggatgctgaggcagatgatgggtttccagaatcaagattag

SEQ ID NO: 310325 - DNA, 120 bp, Artificial Sequence
  ENSG00000134318_33 (sequence is synthesized)
aaggatggctttcattgcctgtacgaaacaacactaagaaatttggatgggttaaaaagtatgtgattgtaagcagtaagaagattcttttctatgacagtgaacaagataaagaacaat

SEQ ID NO: 310326 - DNA, 120 bp, Artificial Sequence
  ENSG00000134318_34 (sequence is synthesized)
gtgtatagagcagatgctaaagaaattccaaggatattccagattctgtatgccaatgaaggagaaagtaagaaggaacaagaatttccagtggagccagttggagaaaaatctaattat

SEQ ID NO: 310327 - DNA, 120 bp, Artificial Sequence
  ENSG00000134318_35 (sequence is synthesized)
atttgccacaagggacatgagtttattcctactctttatcatttcccaaccaactgtgaggcttgtatgaagcccctgtggcacatgtttaagcctcctcctgctttggagtgccgccgt

SEQ ID NO: 310328 - DNA, 120 bp, Artificial Sequence
  ENSG00000134318_36 (sequence is synthesized)
tgccatattaagtgtcataaagatcatatggacaaaaaggaggagattatagcaccttgcaaagtatattatgatatttcaacggcaaagaatctgttattactagcaaattctacagaa

SEQ ID NO: 310329 - DNA, 120 bp, Artificial Sequence
  ENSG00000134318_37 (sequence is synthesized)
gagcagcagaagtgggttagtcggttggtgaaaaagatacctaaaaagcccccagctccagacccttttgcccgatcatctcctagaacttcaatgaagatacagcaaaaccagtctatt

SEQ ID NO: 310330 - DNA, 120 bp, Artificial Sequence
  ENSG00000134318_38 (sequence is synthesized)
agacggccaagtcgacagcttgccccaaacaaacctagctaactgccttctatgaaagcagtcattattcaaggtgatcgtattcttccagtgaaaacaagactgaaatatgatggccca

SEQ ID NO: 310331 - DNA, 120 bp, Artificial Sequence
  ENSG00000134318_39 (sequence is synthesized)
aaatttattaaaaagctatattttcctgagagactgatacatacactcatacatatatgtgttccccttttccctgtaatataaattacaaatctgggctcctttgaagcaacaggttga

SEQ ID NO: 310332 - DNA, 120 bp, Artificial Sequence
  ENSG00000134318_40 (sequence is synthesized)
accaacaatgattggttgatagactaaggatatatgcaactcttccagacttttccataaagctctctcggcagtcgctcacactacaatgcacacaaggattgagaagagttaaaggct

SEQ ID NO: 310333 - DNA, 120 bp, Artificial Sequence
  ENSG00000134318_41 (sequence is synthesized)
aaagaaaacatcttttctagcttcaacagagaggtttcaccagcacatttaccagaagaatctgggaatggattccactacagtgatattgactgcatctttaagaagtgaccattatac

SEQ ID NO: 310334 - DNA, 120 bp, Artificial Sequence
  ENSG00000134318_42 (sequence is synthesized)
tatatataaacacacacacatatatatatatatatatagtactctaatactgcaagaaggttttttaaacttcccactttattttttatacacattaatcagatatcattacttgctgca

SEQ ID NO: 310335 - DNA, 120 bp, Artificial Sequence
  ENSG00000134318_43 (sequence is synthesized)
ttgctgcagttgcaactatgcacttgtataaagccataatgttggagtttatatcactcattcctgtgtacctgatggaagttgcatgttcatgtttaagcagttactgtaacaagaagt

SEQ ID NO: 310336 - DNA, 120 bp, Artificial Sequence
  ENSG00000134318_44 (sequence is synthesized)
ttaaagttaattatatcagtttcctaatgcttcatgataggcaactttacccattttgaatgccttaatttaatttttttcaaagtctcagccctgtctgtattaaaaaacaaaaaaagc

SEQ ID NO: 310337 - DNA, 120 bp, Artificial Sequence
  ENSG00000134318_45 (sequence is synthesized)
gtttaccagctcttaggatgtaaactagctttgtggaagataaatcgtgcactatttttacacataaatagttatatcaatgtcagcctattttgattaacaaatgtttttaaagtatta

SEQ ID NO: 310338 - DNA, 120 bp, Artificial Sequence
  ENSG00000134318_46 (sequence is synthesized)
ttggttatagaaacaataatggatggtgttggaactaatatatccttgatgtctgtctattattcattcaactctttttacagacctcagtattagtctgtgactacaaaatattttatt

SEQ ID NO: 310339 - DNA, 120 bp, Artificial Sequence
  ENSG00000134318_47 (sequence is synthesized)
tgctttaaatttgctggctaccctagatgtgtttttattcctggtaaagacatttgtgattacattttcacacttaagattcaaaatttttcccaaatataaagaaaactaagacagact

SEQ ID NO: 310340 - DNA, 120 bp, Artificial Sequence
  ENSG00000134318_48 (sequence is synthesized)
gtagatgcattttaaatatttaaatatgatcctcagacatgcagctgtgtgtggcagtattttagtaccgggttaagaaaactggcaactgggaagaagtggcctcaaaggcacttaatt

SEQ ID NO: 310341 - DNA, 120 bp, Artificial Sequence
  ENSG00000134318_49 (sequence is synthesized)
tgatttttattttttaaatgctgtcaaagttacagtttacgcaggacattcttgccgtattctcatgatcccagataagtgtgtgttttatactgcaacaatatgcagcaatggtaagcg

SEQ ID NO: 310342 - DNA, 120 bp, Artificial Sequence
  ENSG00000134318_50 (sequence is synthesized)
tttgtttttgtttttttttatattatgaagtcttttaacagtctctctttatataaatacacagagtttggtatgatatttaaatacatcatctggccaggcatggtggcttacgcctgt

SEQ ID NO: 310343 - DNA, 82 bp, Artificial Sequence
  ENSG00000134318_51 (sequence is synthesized)
cccaacatagtgaaactccgtctctaccaatatacaaaaattagccgggcatgatggtggtggcctgtaatcccagctactt

SEQ ID NO: 310344 - DNA, 120 bp, Artificial Sequence
  ENSG00000134318_52 (sequence is synthesized)
ccgtctcaaaaaaaaaaaaaaaaaaaagtcatctaatatttcgatgaaggaaatagacatttttcattgattccctctgatgtcagttagagatatttaaaaagttagatccccataata

SEQ ID NO: 310345 - DNA, 120 bp, Artificial Sequence
  ENSG00000134318_53 (sequence is synthesized)
aaagttagatccccataatagatactattgtggaaactgaagagtagctactggcctactgatagactgaaactggttttgttattcttaacgttctccagtctgcactctgctgtgctg

SEQ ID NO: 310346 - DNA, 120 bp, Artificial Sequence
  ENSG00000134318_54 (sequence is synthesized)
tctgtgctcagactagacgtgcatgccgtttcctttgcaggtgtgttctgcagctctggttttgggggatagctcttttttaagtaagattaaaaaatgaaaaatatataaatttatata

SEQ ID NO: 310347 - DNA, 120 bp, Artificial Sequence
  ENSG00000134318_55 (sequence is synthesized)
gaataaatatttccattcattagagttgttaaaaggagactgaattaatattttatataaagattttgttacattatgggaggttctatcctattctgaattggagagtatatatatata

SEQ ID NO: 310348 - DNA, 120 bp, Artificial Sequence
  ENSG00000134318_56 (sequence is synthesized)
tttttaataaactttattaaggtgaaataatttcaagtttacatatgagtaactgaaatatttgagtaaaaaaggcaaaagtttaaatttggaatgctgtatatattagagaatatgggg

SEQ ID NO: 310349 - DNA, 120 bp, Artificial Sequence
  ENSG00000134318_57 (sequence is synthesized)
attagagaatatggggaatcatggtgtgaccaactgtacaaggaagattcatatgaaggtcttaggggaaaaagataattctgaagggtgaaaaaaaaatctctcccatggagattcttc

SEQ ID NO: 310350 - DNA, 120 bp, Artificial Sequence
  ENSG00000134318_58 (sequence is synthesized)
acattatatggtttgacataagggtttataaggttgtttgtccaactaatgaaaatgcgcttaataaaaaattctgaccttgggtaagaattcgctttttaccgcattgccgctttcatg

SEQ ID NO: 310351 - DNA, 120 bp, Artificial Sequence
  ENSG00000134318_59 (sequence is synthesized)
tacatacatgagtgcatgcacctatcaatgtgttttcttcccaacacttattaaatataaaacaacctgattttgtgctcgtttctcgtttttcttgaggccctgaagcttccaagataa

SEQ ID NO: 310352 - DNA, 120 bp, Artificial Sequence
  ENSG00000134318_60 (sequence is synthesized)
atataagactaaaatttgcttgttccttcacacctgatttctcctagaaccataaatacctcctatggggaactaagaaatcatgaatactgggattttcttattggattttttactttt

SEQ ID NO: 310353 - DNA, 120 bp, Artificial Sequence
  ENSG00000134318_61 (sequence is synthesized)
gttttgtggggataacgagacagaagtgaaaggaaaactggtgccggtattactgttgaaattaatgtacagtgaatgtttttaaagtattaattttaaaaaaccatgttctctagaaac

SEQ ID NO: 310354 - DNA, 120 bp, Artificial Sequence
  ENSG00000134318_62 (sequence is synthesized)
aagttttaaaaatctatatgaaagttttaaaatgttccagctaactaatggataagcataccagtaaagccaaagtaaaggttagtgcctttaaaactaacctgtgttagagttacatga

SEQ ID NO: 310355 - DNA, 120 bp, Artificial Sequence
  ENSG00000134318_63 (sequence is synthesized)
atctggctctaaagtatctattttgcatccatttatatatagatcttaaacagaaatactctaggttgccacaccacagttttaagaagttatgctgctgctgttactctcttctaggat

SEQ ID NO: 310356 - DNA, 120 bp, Artificial Sequence
  ENSG00000134318_64 (sequence is synthesized)
tctggtggtaaagtagagaaactcggacactatattaaccttactgaaacatgctttaaatcgtgtctaaaatctgatttgagcaagtcactgccgagcttctgagtctgcattgacact

SEQ ID NO: 310357 - DNA, 120 bp, Artificial Sequence
  ENSG00000134318_65 (sequence is synthesized)
gctactgactcacctctccttccctggaataaggcttcagcttccctatgctgtgaagacaccatttgtaagcactttgaacataagcactgtgtgacagcgctggatatcatgcttggg

SEQ ID NO: 310358 - DNA, 120 bp, Artificial Sequence
  ENSG00000134318_66 (sequence is synthesized)
ggggggcctctccctgactcccatccccataataatgagttttgtttggaattgtaataagtaatgaactgcatggtttagaaaattataaatatttgatcagctgtcctctctgaaaaa

SEQ ID NO: 310359 - DNA, 120 bp, Artificial Sequence
  ENSG00000134318_67 (sequence is synthesized)
aattgcacccctttttcttttttaaaattttgttgcatcttcgtagtaatgtaattgtattttatgcctgcttttttataaaaaaataaaataaaataaatggagacataagcattttca

SEQ ID NO: 310360 - DNA, 120 bp, Artificial Sequence
  ENSG00000134318_68 (sequence is synthesized)
gatgagctgagctgagaatattaggaaactgccatttcctcataacctgttgcaattccagtattctgtgtgacctaaaaactgggttggaaatcctccttaacacagatacagaaccca

SEQ ID NO: 310361 - DNA, 120 bp, Artificial Sequence
  ENSG00000134318_69 (sequence is synthesized)
gaaaaatgaagaaagtcaagaggtatgttgatgttgtcagatatattgaaaaactgagaaaagctcatcactctcgcaaagtttaaatatagtcatatcctacctagcatttggagtact

SEQ ID NO: 310362 - DNA, 120 bp, Artificial Sequence
  ENSG00000134318_70 (sequence is synthesized)
atgggccatttttgtctatcttaatctatccagctagaacttaatatccctatatatttttggtctttttgatagagtctgttatattctgcaacccttaatcaatgtttaataggtgga

SEQ ID NO: 310363 - DNA, 120 bp, Artificial Sequence
  ENSG00000134318_71 (sequence is synthesized)
gttttttattgtacccaaagctccctcttgtggtatttggtataatatagtgtgaaatgattaacagtgcaaattatctttaatgaaaatgaagtatgaaataatttcctaatagaatgc

SEQ ID NO: 310364 - DNA, 120 bp, Artificial Sequence
  ENSG00000134318_72 (sequence is synthesized)
taaacttatgtctgctatacataagagaagatgtttttgtgttgtacttccatgaatgtattgcgattttcattaaaccaaaaacttttggcactagggtacagacaaataaatcatacc

SEQ ID NO: 310365 - DNA, 120 bp, Artificial Sequence
  ENSG00000134318_73 (sequence is synthesized)
acatatttttagggaagataagggtggttaaggagagcaaggtgtagagaagaagaatatggggaacgggatagaatatggtacctacagaataattgtataagcatacaggcatggtac

SEQ ID NO: 310366 - DNA, 120 bp, Artificial Sequence
  ENSG00000134318_74 (sequence is synthesized)
tttatttatcaaggacatataactggcagcaaaaatttctgattagcatataataactggtgtgctcaaattattgtaatgcagtagtagccaaaagcaattaaacttgactagttcatt

SEQ ID NO: 310367 - DNA, 120 bp, Artificial Sequence
  ENSG00000134318_75 (sequence is synthesized)
agcctgtatatttttattaagggaaaacagagttttgcttaagatagatgcagtatttaaaaccatggagaacctgatcactagaaggaataatggaaagtacattgccatgggagtcta

SEQ ID NO: 310368 - DNA, 120 bp, Artificial Sequence
  ENSG00000134318_76 (sequence is synthesized)
atagacctgcattgatttttgccactgcgacttattagctatgccatcttggcctgattatttaccttttttgaatttcattttctgtatcaagtagatacaatgctaccatctttgtag

SEQ ID NO: 310369 - DNA, 120 bp, Artificial Sequence
  ENSG00000134318_77 (sequence is synthesized)
gatttttgttaatattaacaagacaacatttgtaaagtgcctgatattttaccaaaggcaccacaggagctcaaaaagttaaatcctttaaaaagtaaataatgttccaaaaatggatta

SEQ ID NO: 310370 - DNA, 80 bp, Artificial Sequence
  ENSG00000134318_78 (sequence is synthesized)
ttttgcattgcataactttttactactgatcctgtactattactgtatcctagatgatgtatagtgataaattctaaagg

SEQ ID NO: 310371 - DNA, 120 bp, Artificial Sequence
  ENSG00000134318_79 (sequence is synthesized)
cattttcctgtgatttgcttcatacagatgaaagtctgggatacagggttagttaaaacatctttatttcatgggcctttgatacattattttttgaaactaattagaaaatttctgaca

SEQ ID NO: 310372 - DNA, 120 bp, Artificial Sequence
  ENSG00000134318_80 (sequence is synthesized)
tagaggtttctaaaaatcttaattaattatagaattaatagaacaaaatattctgagttcctaacatgggtcaaagtagtcagtgtttaacgtctgatgtaagtatagaataattaatat

SEQ ID NO: 310373 - DNA, 120 bp, Artificial Sequence
  ENSG00000134321_0 (sequence is synthesized)
gctctgctccaggcatctgccacaatgtgggtgcttacacctgctgcttttgctgggaagctcttgagtgtgttcaggcaacctctgagctctctgtggaggagcctggtcccgctgttc

SEQ ID NO: 310374 - DNA, 120 bp, Artificial Sequence
  ENSG00000134321_1 (sequence is synthesized)
tgctggctgagggcaaccttctggctgctagctaccaagaggagaaagcagcagctggtcctgagagggccagatgagaccaaagaggaggaagaggaccctcctctgcccaccacccca

SEQ ID NO: 310375 - DNA, 120 bp, Artificial Sequence
  ENSG00000134321_2 (sequence is synthesized)
accagcgtcaactatcacttcactcgccagtgcaactacaaatgcggcttctgtttccacacagccaaaacatcctttgtgctgccccttgaggaagcaaagagaggattgcttttgctt

SEQ ID NO: 310376 - DNA, 120 bp, Artificial Sequence
  ENSG00000134321_3 (sequence is synthesized)
aaggaagctggtatggagaagatcaacttttcaggtggagagccatttcttcaagaccggggagaatacctgggcaagttggtgaggttctgcaaagtagagttgcggctgcccagcgtg

SEQ ID NO: 310377 - DNA, 120 bp, Artificial Sequence
  ENSG00000134321_4 (sequence is synthesized)
agcatcgtgagcaatggaagcctgatccgggagaggtggttccagaattatggtgagtatttggacattctcgctatctcctgtgacagctttgacgaggaagtcaatgtccttattggc

SEQ ID NO: 310378 - DNA, 120 bp, Artificial Sequence
  ENSG00000134321_5 (sequence is synthesized)
cgtggccaaggaaagaagaaccatgtggaaaaccttcaaaagctgaggaggtggtgtagggattatagagtcgctttcaagataaattctgtcattaatcgtttcaacgtggaagaggac

SEQ ID NO: 310379 - DNA, 120 bp, Artificial Sequence
  ENSG00000134321_6 (sequence is synthesized)
atgacggaacagatcaaagcactaaaccctgtccgctggaaagtgttccagtgcctcttaattgagggtgagaattgtggagaagatgctctaagagaagcagaaagatttgttattggt

SEQ ID NO: 310380 - DNA, 120 bp, Artificial Sequence
  ENSG00000134321_7 (sequence is synthesized)
gatgaagaatttgaaagattcttggagcgccacaaagaagtgtcctgcttggtgcctgaatctaaccagaagatgaaagactcctaccttattctggatgaatatatgcgctttctgaac

SEQ ID NO: 310381 - DNA, 120 bp, Artificial Sequence
  ENSG00000134321_8 (sequence is synthesized)
tgtagaaagggacggaaggacccttccaagtccatcctggatgttggtgtagaagaagctataaaattcagtggatttgatgaaaagatgtttctgaagcgaggaggaaaatacatatgg

SEQ ID NO: 310382 - DNA, 120 bp, Artificial Sequence
  ENSG00000134321_9 (sequence is synthesized)
agtaaggctgatctgaagctggattggtagagcggaaagtggaacgagacttcaacacaccagtgggaaaactcctagagtaactgccattgtctgcaatactatcccgttggtatttcc

SEQ ID NO: 310383 - DNA, 120 bp, Artificial Sequence
  ENSG00000134321_10 (sequence is synthesized)
cagtggctgaaaacctgattttctgctgcacgtggcatctgattacctgtggtcactgaacacacgaataacttggatagcaaatcctgagacaatggaaaaccattaactttacttcat

SEQ ID NO: 310384 - DNA, 120 bp, Artificial Sequence
  ENSG00000134321_11 (sequence is synthesized)
tggcttataaccttgttgttattgaaacagcacttctgtttttgagtttgttttagctaaaaagaaggaatacacacaggaataatgaccccaaaaatgcttagataaggcccctataca

SEQ ID NO: 310385 - DNA, 120 bp, Artificial Sequence
  ENSG00000134321_12 (sequence is synthesized)
caggacctgacatttagctcaatgatgcgtttgtaagaaataagctctagtgatatctgtgggggcaaaatttaatttggatttgattttttaaaacaatgtttactgcgatttctatat

SEQ ID NO: 310386 - DNA, 120 bp, Artificial Sequence
  ENSG00000134321_13 (sequence is synthesized)
ttccattttgaaactatttcttgttccaggtttgttcatttgacagagtcagtattttttgccaaatatccagataaccagttttcacatctgagacattacaaagtatctgcctcaatt

SEQ ID NO: 310387 - DNA, 120 bp, Artificial Sequence
  ENSG00000134321_14 (sequence is synthesized)
cagtcttgtactttttactgtgatgtacagaaatagtcaacagatgtttccaagaacatatgatatgataatcctaccaattttcaagaagtctctagaaagagataacacatggaaaga

SEQ ID NO: 310388 - DNA, 120 bp, Artificial Sequence
  ENSG00000134321_15 (sequence is synthesized)
cggtgtggtgcagcccagcccacggtggctgttccatgaatgctggctacctatgtgtgtggtacctgttgtgtccctttctcttcaaagatcctgagcaaaacaaagatacgctttcca

SEQ ID NO: 310389 - DNA, 120 bp, Artificial Sequence
  ENSG00000134321_16 (sequence is synthesized)
tttgatgatggagttgacatggaggcagtgcttgcattgctttgttcgcctatcatctggccacatgaggctgtcaagcaaaagaataggagtgtagttgagtagctggttggccctaca

SEQ ID NO: 310390 - DNA, 120 bp, Artificial Sequence
  ENSG00000134321_17 (sequence is synthesized)
tctctgagaagtgacggcacactgggttggcataagatatcctaaaatcacgctggaaccttgggcaaggaagaatgtgagcaagagtagagagagtgcctggatttcatgtcagtgaag

SEQ ID NO: 310391 - DNA, 120 bp, Artificial Sequence
  ENSG00000134321_18 (sequence is synthesized)
ccaagtcaccatatcatatttttgaatgaactctgagtcagttgaaatagggtaccatctaggtcagtttaagaagagtcagctcagagaaagcaagcataagggaaaatgtcacgtaaa

SEQ ID NO: 310392 - DNA, 120 bp, Artificial Sequence
  ENSG00000134321_19 (sequence is synthesized)
ctagatcagggaacaaaatcctctccttgtggaaatatcccatgcagtttgttgatacaacttagtatcttattgcctaaaaaaaaatttcttatcattgtttcaaaaaagcaaaatcat

SEQ ID NO: 310393 - DNA, 120 bp, Artificial Sequence
  ENSG00000134321_20 (sequence is synthesized)
ggaaaatttttgttgtccaggcaaataaaaggtcattttaatttagctgcaatttcagtgttcctcactaggtggcatttaaatgtcgcctgatgtcattaagcaccatccaaaaagtct

SEQ ID NO: 310394 - DNA, 120 bp, Artificial Sequence
  ENSG00000134321_21 (sequence is synthesized)
gcttcataatctattttcaagacttggtgattctgaaagttttggtttttgtgactttgtttctcaggaaaaaaaatattcctacttaaattttaagtctataattcaatttaaatatgt

SEQ ID NO: 310395 - DNA, 120 bp, Artificial Sequence
  ENSG00000134321_22 (sequence is synthesized)
gtgtgtctcatccaggataggataggttgtcttctattttccattttacctatttactttttttgtaagaaaagagaaaaatgaattctaaagatgttccccatgggttttgattgtgtc

SEQ ID NO: 310396 - DNA, 120 bp, Artificial Sequence
  ENSG00000134321_23 (sequence is synthesized)
tttgattgtgtctaagctatgatgaccttcatataatcagcataaacataaaacaaattttttacttaacatgagtgcactttactaatcctcatggcacagtggctcacgcctgtaatc

SEQ ID NO: 310397 - DNA, 69 bp, Artificial Sequence
  ENSG00000134321_24 (sequence is synthesized)
ttagccaggcatggtggcgtacactaaggcagaggttacagagccaagatagcgccactgcactccagc

SEQ ID NO: 310398 - DNA, 120 bp, Artificial Sequence
  ENSG00000134321_25 (sequence is synthesized)
aaaaaaaaaaaaaaagcaagagagttcaactaagaaaggtcacatatgtgaaagcccaaggacactgtttgatatacagcaggtattcaatcagtgttatttgaaaccaaatctgaattt

SEQ ID NO: 310399 - DNA, 120 bp, Artificial Sequence
  ENSG00000134321_26 (sequence is synthesized)
gaagtttgaatcttctgagttggaatgaatttttttctagctgagggaaactgtatttttctttccccaaagaggaatgtaatgtaaagtgaaataaaactataagctatgttaaataca

SEQ ID NO: 310400 - DNA, 120 bp, Artificial Sequence
  ENSG00000134321_27 (sequence is synthesized)
gtccttgtcttcctgtctttcctagagtaccttctcaactagtaacttcagcaacatctctagcttctttccctccttgtttaactttttaacaaaagcatagcatacatgcaccagatt

SEQ ID NO: 310401 - DNA, 120 bp, Artificial Sequence
  ENSG00000134321_28 (sequence is synthesized)
acacatattctggatgtgcaccctgatgaatttcacaaagcaatcacagccaggtaaatagcctgcagattcagagagaaagcatcaccagcgccagaagtgcatgctgcactccagcca

SEQ ID NO: 310402 - DNA, 120 bp, Artificial Sequence
  ENSG00000134321_29 (sequence is synthesized)
acgaaagccggaggcccaggcggggcaggagccctggggctggggcgcccttccggcctctcctcctcgccgcgagatgtgcgcgataaacggccggcgctcgggagcagacgcttggcc

SEQ ID NO: 310403 - DNA, 120 bp, Artificial Sequence
  ENSG00000134321_30 (sequence is synthesized)
tatatttccttccctcctgggccttcagccaggcctgctgaggaactggaagggaggaaaaactaatcttgcttactctaattgcttttcaagctgtgcacggcattatggcagttttag

SEQ ID NO: 310404 - DNA, 120 bp, Artificial Sequence
  ENSG00000134321_31 (sequence is synthesized)
ttccttagggctctcagtaaacaagtttggcaagttagataatagaccttttactgagatgactatcttgtacattgcaatttagcaaatacaagatctatggccttagtttagacacta

SEQ ID NO: 310405 - DNA, 120 bp, Artificial Sequence
  ENSG00000134321_32 (sequence is synthesized)
aatatgacagtatcagaataacaggagctaaccctaactgaacacttaaagtttgccaggcactattctgaattcttcacaaaaattagcagttttactctgcacaaaaatcgcctgaga

SEQ ID NO: 310406 - DNA, 120 bp, Artificial Sequence
  ENSG00000134321_33 (sequence is synthesized)
ttactcagtcacccagctacatgatttgtggctctggaagttcagctactaggactcttccaacttcctacaggtgtcacgaaagcacaagaccacacacttacacacagttctgatgaa

SEQ ID NO: 310407 - DNA, 120 bp, Artificial Sequence
  ENSG00000134321_34 (sequence is synthesized)
agagggctaaaaggaagatttcagtaaaaaggtcaacaaggctttctaaaaaaactgtaaaggtaaataaatgatgtgtcgcagtaattctcaccaattaggaagcatcttagaaaagca

SEQ ID NO: 310408 - DNA, 120 bp, Artificial Sequence
  ENSG00000134321_35 (sequence is synthesized)
ttggatttcctctagttaaaaacatctataaaaagtgatatcaaaatataggaagatgtaaatatctaaattttaacactgtcaccttgcataaattaggctgaatagctgatggaataa

SEQ ID NO: 310409 - DNA, 120 bp, Artificial Sequence
  ENSG00000134323_0 (sequence is synthesized)
aggctgtgacagtcatctgtctggacgcgctgggtggatgcggggggctcctgggaactgtgttggagccgagcaagcgctagccaggcgcaagcgcgcacagactgtagccatccgagg

SEQ ID NO: 310410 - DNA, 120 bp, Artificial Sequence
  ENSG00000134323_1 (sequence is synthesized)
gcccccccggcccacccggagacacccgcgcagaatcgcctccggatcccctgcagtcggcgggagtgttggaggtcggcgccggcccccgccttccgcgccccccacgggaaggaagca

SEQ ID NO: 310411 - DNA, 120 bp, Artificial Sequence
  ENSG00000134323_2 (sequence is synthesized)
aggaagcacccccggtattaaaacgaacggggcggaaagaagccctcagtcgccggccgggaggcgagccgatgccgagctgctccacgtccaccatgccgggcatgatctgcaagaacc

SEQ ID NO: 310412 - DNA, 120 bp, Artificial Sequence
  ENSG00000134323_3 (sequence is synthesized)
cagacctcgagtttgactcgctacagccctgcttctacccggacgaagatgacttctacttcggcggccccgactcgacccccccgggggaggacatctggaagaagtttgagctgctgc

SEQ ID NO: 310413 - DNA, 120 bp, Artificial Sequence
  ENSG00000134323_4 (sequence is synthesized)
ccacgcccccgctgtcgcccagccgtggcttcgcggagcacagctccgagcccccgagctgggtcacggagatgctgcttgagaacgagctgtggggcagcccggccgaggaggacgcgt

SEQ ID NO: 310414 - DNA, 120 bp, Artificial Sequence
  ENSG00000134323_5 (sequence is synthesized)
tcggcctggggggactgggtggcctcacccccaacccggtcatcctccaggactgcatgtggagcggcttctccgcccgcgagaagctggagcgcgccgtgagcgagaagctgcagcacg

SEQ ID NO: 310415 - DNA, 80 bp, Artificial Sequence
  ENSG00000134323_6 (sequence is synthesized)
gagaagctgcagcacggccgcgggccgccaaccgccggttccaccgcccagtccccgggagccggcgccgccagccctgc

SEQ ID NO: 310416 - DNA, 120 bp, Artificial Sequence
  ENSG00000134323_7 (sequence is synthesized)
cctgcccgccgagctcgcccacccggccgccgagtgcgtggatcccgccgtggtcttcccctttcccgtgaacaagcgcgagccagcgcccgtgcccgcagccccggccagtgccccggc

SEQ ID NO: 310417 - DNA, 120 bp, Artificial Sequence
  ENSG00000134323_8 (sequence is synthesized)
ggtattgccgccccagccggggccccgggggtcgcccctccgcgcccaggcggccgccagaccagcggcggcgaccacaaggccctcagtacctccggagaggacaccctgagcgattca

SEQ ID NO: 310418 - DNA, 120 bp, Artificial Sequence
  ENSG00000134323_9 (sequence is synthesized)
aggacaccctgagcgattcagatgatgaagatgatgaagaggaagatgaagaggaagaaatcgacgtggtcactgtggagaagcggcgttcctcctccaacaccaaggctgtcaccacat

SEQ ID NO: 310419 - DNA, 120 bp, Artificial Sequence
  ENSG00000134323_10 (sequence is synthesized)
agcagcacaactatgccgccccctctccctacgtggagagtgaggatgcacccccacagaagaagataaagagcgaggcgtccccacgtccgctcaagagtgtcatccccccaaaggcta

SEQ ID NO: 310420 - DNA, 120 bp, Artificial Sequence
  ENSG00000134323_11 (sequence is synthesized)
agagcttgagcccccgaaactctgactcggaggacagtgagcgtcgcagaaaccacaacatcctggagcgccagcgccgcaacgaccttcggtccagctttctcacgctcagggaccacg

SEQ ID NO: 310421 - DNA, 120 bp, Artificial Sequence
  ENSG00000134323_12 (sequence is synthesized)
tgccggagttggtaaagaatgagaaggccgccaaggtggtcattttgaaaaaggccactgagtatgtccactccctccaggccgaggagcaccagcttttgctggaaaaggaaaaattgc

SEQ ID NO: 310422 - DNA, 120 bp, Artificial Sequence
  ENSG00000134323_13 (sequence is synthesized)
aggcaagacagcagcagttgctaaagaaaattgaacacgctcggacttgctagacgcttctcaaaactggacagtcactgccactttgcacattttgattttttttttaaacaaacattg

SEQ ID NO: 310423 - DNA, 120 bp, Artificial Sequence
  ENSG00000134323_14 (sequence is synthesized)
tgttgacattaagaatgttggtttactttcaaatcggtcccctgtcgagttcggctctgggtgggcagtaggaccaccagtgtggggttctgctgggaccttggagagcctgcatcccag

SEQ ID NO: 310424 - DNA, 120 bp, Artificial Sequence
  ENSG00000134323_15 (sequence is synthesized)
gatgctgggtggccctgcagcctcctccacctcacctccatgacagcgctaaacgttggtgacggttgggagcctctggggctgttgaagtcaccttgtgtgttccaagtttccaaacaa

SEQ ID NO: 310425 - DNA, 120 bp, Artificial Sequence
  ENSG00000134323_16 (sequence is synthesized)
cagaaagtcattccttctttttaaaatggtgcttaagttccagcagatgccacataaggggtttgccatttgatacccctggggaacatttctgtaaataccattgacacatccgccttt

SEQ ID NO: 310426 - DNA, 120 bp, Artificial Sequence
  ENSG00000134323_17 (sequence is synthesized)
tgtatacatcctgggtaatgagaggtggcttttgcggccagtattagactggaagttcatacctaagtactgtaataatacctcaatgtttgaggagcatgttttgtatacaaatatatt

SEQ ID NO: 310427 - DNA, 120 bp, Artificial Sequence
  ENSG00000134323_18 (sequence is synthesized)
gttaatctctgttatgtactgtactaattcttacactgcctgtatactttagtatgacgctgatacataactaaatttgatacttatattttcgtatgaaaatgagttgtgaaagttttg

SEQ ID NO: 310428 - DNA, 120 bp, Artificial Sequence
  ENSG00000134323_19 (sequence is synthesized)
agtagatattactttatcactttttgaactaagaaacttttgtaaagaaatttactatatatatatgcctttttcctagcctgtttcttcctgttaatgtatttgttcatgtttggtgca

SEQ ID NO: 310429 - DNA, 120 bp, Artificial Sequence
  ENSG00000134323_20 (sequence is synthesized)
tagaactgggtaaatgcaaagttctgtgtttaatttcttcaaaatgtatatatttagtgctgcatcttatagcactttgaaatacctcatgtttatgaaaataaatagcttaaaattaaa

SEQ ID NO: 310430 - DNA, 120 bp, Artificial Sequence
  ENSG00000134324_0 (sequence is synthesized)
ccgcccccgaaggcgagctgcgctgacagccggcggcgggctgggtgtttgcaatacaaaggcggccacgcgcggcgccgctcggtgcagaccatgaattacgtggggcagttagccggc

SEQ ID NO: 310431 - DNA, 120 bp, Artificial Sequence
  ENSG00000134324_1 (sequence is synthesized)
caggtgtttgtcaccgtgaaggagctctacaaggggctgaatcccgccacactctcagggtgcattgacatcattgtcatccgccagcccaatggaaacctccaatgctcccctttccac

SEQ ID NO: 310432 - DNA, 120 bp, Artificial Sequence
  ENSG00000134324_2 (sequence is synthesized)
gtccgctttgggaagatgggggtcctgcgctcccgagagaaagtggttgacatagaaatcaatggggaatctgtggatttgcatatgaaattgggagataatggagaagcattttttgtt

SEQ ID NO: 310433 - DNA, 120 bp, Artificial Sequence
  ENSG00000134324_3 (sequence is synthesized)
caagaaacagataatgatcaggaagttatccctatgcacctggccacctcccccatcctgtcagaaggagcttcgagaatggaatgccagctgaaaaggggctctgtggacaggatgaga

SEQ ID NO: 310434 - DNA, 120 bp, Artificial Sequence
  ENSG00000134324_4 (sequence is synthesized)
ggcctggaccccagcacgccagcccaagtgatcgctcccagcgagacgccgtcaagcagctctgtagtaaagaagagaagaaaaaggaggagaaagtcacagctggacagcctgaagaga

SEQ ID NO: 310435 - DNA, 120 bp, Artificial Sequence
  ENSG00000134324_5 (sequence is synthesized)
gatgacaacatgaacacatctgaggatgaggacatgttccccatcgagatgagctcggatgaggccatggagctgctggagagcagcagaactcttcctaatgatatacctccattccaa

SEQ ID NO: 310436 - DNA, 120 bp, Artificial Sequence
  ENSG00000134324_6 (sequence is synthesized)
gatgatattcctgaggaaaacctctccctggctgtgatttaccctcagtcagcctcataccctaattcggatagagagtggtcacccactcccagtccttccggttcccgaccttcaaca

SEQ ID NO: 310437 - DNA, 120 bp, Artificial Sequence
  ENSG00000134324_7 (sequence is synthesized)
cctaaaagtgattcagaattggtcagcaagtccacggaaaggacagggcagaagaacccagaaatgctttggctgtggggagagctgccgcaggctgctaagtcttcttctccacacaag

SEQ ID NO: 310438 - DNA, 120 bp, Artificial Sequence
  ENSG00000134324_8 (sequence is synthesized)
atgaaagagtccagcccattgagcagtagaaaaatttgtgataaaagtcactttcaggccattcacagcgaatcttcagacacttttagtgaccaatcgccaactctggtcggtggggca

SEQ ID NO: 310439 - DNA, 120 bp, Artificial Sequence
  ENSG00000134324_9 (sequence is synthesized)
cttttggaccagaacaagcctcagacagaaatgcagtttgtgaatgaagaagacctggagaccttaggagcagcagcgccactcttgcccatgatcgaggagctcaaacccccctctgcc

SEQ ID NO: 310440 - DNA, 120 bp, Artificial Sequence
  ENSG00000134324_10 (sequence is synthesized)
agtgtagtccagacagcaaacaagacggattctccttccaggaaaagagataaacgaagccgacatcttggtgctgacggcgtctacttggatgacctcacagacatggatcctgaagtg

SEQ ID NO: 310441 - DNA, 120 bp, Artificial Sequence
  ENSG00000134324_11 (sequence is synthesized)
gcggccctgtattttcccaaaaacggagatccttccggactcgcaaaacatgcaagcgacaacggagcccggtcagccaaccagtccccgcagtcggtgggcagctcgggcgtggacagt

SEQ ID NO: 310442 - DNA, 120 bp, Artificial Sequence
  ENSG00000134324_12 (sequence is synthesized)
ggcgtggagagcacctcggacgggctgagggacctcccttccatcgccatctccctctgcgggggcctcagcgaccaccgggagatcacgaaagatgcattcctggagcaagctgtgtca

SEQ ID NO: 310443 - DNA, 120 bp, Artificial Sequence
  ENSG00000134324_13 (sequence is synthesized)
tatcaacagtttgtggacaaccccgctattatcgatgaccccaatctcgtggtaaagattgggagtaaatattataactggacaacagcagcacccctcctcctggcaatgcaggccttc

SEQ ID NO: 310444 - DNA, 120 bp, Artificial Sequence
  ENSG00000134324_14 (sequence is synthesized)
cagaaacctttgccaaaggccactgtggaatctatcatgagggataaaatgcccaaaaagggaggaagatggtggttttcatggaggggaagaaacaccacaatcaaggaggaaagtaag

SEQ ID NO: 310445 - DNA, 120 bp, Artificial Sequence
  ENSG00000134324_15 (sequence is synthesized)
ccagagcagtgcttggctggcaaggcccatagcaccggagagcaaccgccgcagctcagcttggccaccagggtaaagcatgaatcatcctccagtgatgaggagcgcgcagctgccaag

SEQ ID NO: 310446 - DNA, 120 bp, Artificial Sequence
  ENSG00000134324_16 (sequence is synthesized)
ccatcaaacgcaggccacctccctcttctgcctaatgtcagctacaagaagactctccggctgacttccgagcagcttaaaagcttgaagttgaagaatggccccaacgacgtggttttc

SEQ ID NO: 310447 - DNA, 120 bp, Artificial Sequence
  ENSG00000134324_17 (sequence is synthesized)
agtgtcaccacgcagtaccaaggcacgtgccgctgtgagggcaccatctatctgtggaactgggatgataaagtcatcatttctgatattgatgggacaattaccagatcagatactctt

SEQ ID NO: 310448 - DNA, 120 bp, Artificial Sequence
  ENSG00000134324_18 (sequence is synthesized)
ggccacattttgcccacccttgggaaggattggacccatcagggcatcgctaagctgtaccataaagtgagccagaatggatataaatttctctactgttctgcccgtgccatcgggatg

SEQ ID NO: 310449 - DNA, 120 bp, Artificial Sequence
  ENSG00000134324_19 (sequence is synthesized)
gcggacatgacgcggggctacctgcactgggtcaacgagaggggcacggtgctgccccaggggcccctgctgctgagtcccagcagcctcttctctgccctgcacagagaagtgattgaa

SEQ ID NO: 310450 - DNA, 120 bp, Artificial Sequence
  ENSG00000134324_20 (sequence is synthesized)
aagaagccagaaaagtttaaagtccagtgtttgacagacatcaaaaacctgtttttccccaacacagaacccttttatgctgcttttggaaaccgaccagctgatgtgtattcatacaag

SEQ ID NO: 310451 - DNA, 120 bp, Artificial Sequence
  ENSG00000134324_21 (sequence is synthesized)
caagtaggagtgtctttgaatagaatatttaccgtcaaccctaaaggagagctggtacaggaacatgcaaagaccaacatctcttcgtatgtgagactctgtgaagtagtcgaccacgtt

SEQ ID NO: 310452 - DNA, 120 bp, Artificial Sequence
  ENSG00000134324_22 (sequence is synthesized)
cattcattctgcctcagcgtaaaatgtcccaagcagcctcttgccagcagtgcagagcctggttgtcacccattaaaggataggtctccccggagtgcacagctccacctgggagcctgg

SEQ ID NO: 310453 - DNA, 120 bp, Artificial Sequence
  ENSG00000134324_23 (sequence is synthesized)
cgcgtcatcattggcctgacagcagagagaattgagaagcatttctcccctgccccaccccggggctgacatttctaagcaagataggaagggagcactttctaggctaggagttgggtg

SEQ ID NO: 310454 - DNA, 120 bp, Artificial Sequence
  ENSG00000134324_24 (sequence is synthesized)
catttgtaccgtgaaaagcattcctcagttgtggcttaatgccagttacgacgctgcctttccggcctgctccagcaagtagctactggttcacgtgcagtttggggctgtgaaacctag

SEQ ID NO: 310455 - DNA, 120 bp, Artificial Sequence
  ENSG00000134324_25 (sequence is synthesized)
gcagaaggcggctgtctgagggctgtccccgcctaggacagggtcaatcgaggaatgccagatgtgcacggtttttggcaaagtagggggcacatttccattatagcaatgttagtgcca

SEQ ID NO: 310456 - DNA, 120 bp, Artificial Sequence
  ENSG00000134324_26 (sequence is synthesized)
ccaccttctgaacacagtggggagggctgtgaaggctcatgtgacctggatctgaggtctctgatagaaatctggacgccaccgggtccaggcctggcctcagacttggccttgtggatg

SEQ ID NO: 310457 - DNA, 120 bp, Artificial Sequence
  ENSG00000134324_27 (sequence is synthesized)
ggccccttacagtatttgctgactagtctcatttttaggtgataaatttttctttaattcctttggttaaagatagtctatttcattggcatatctccccccagtttttgtggctcaagg

SEQ ID NO: 310458 - DNA, 120 bp, Artificial Sequence
  ENSG00000134324_28 (sequence is synthesized)
ctggaatatttatgccttaatatatctatggcagacatttaagaatgcgctttatctagctcatggtaactttgcaacgccttagattaaaatgacagtaaatattactaaggcagtatt

SEQ ID NO: 310459 - DNA, 120 bp, Artificial Sequence
  ENSG00000134324_29 (sequence is synthesized)
ttgaatgagtttgacactgccggcttccttccatccagcgaggtggtgctgacagtgtggacttgagcacacttatgccaaatgataatgatactgacttctgttgggagctctccaaag

SEQ ID NO: 310460 - DNA, 120 bp, Artificial Sequence
  ENSG00000134324_30 (sequence is synthesized)
aaactggttggttttaagaaaatagtttcaagaagttcaactatattcttttagatattatgtattgttttactctgattaggttactgtgataggcatttattcatattctttctatac

SEQ ID NO: 310461 - DNA, 120 bp, Artificial Sequence
  ENSG00000134324_31 (sequence is synthesized)
cactgtcattaatatattaaaaagatgtatgtgttagactatcgaaagggccttattctctctttctcatagactgaccttcttttggaatttctgagtcatttattttccttagctttt

SEQ ID NO: 310462 - DNA, 120 bp, Artificial Sequence
  ENSG00000134324_32 (sequence is synthesized)
tccactcaaattaagggcaagcgaaaaagtaataatttggcattctttaagcctacagaatgtgattctttcacttgtttattacactggctcgtggacagaacaatttgaaaagtgaaa

SEQ ID NO: 310463 - DNA, 120 bp, Artificial Sequence
  ENSG00000134324_33 (sequence is synthesized)
gaattattttggtaaaagattttgctttacttttcgaagcattatttttttaaagagtgttttactccaacgattgaaacattttcctatttaaatttcattgttagaatcacaggaggc

SEQ ID NO: 310464 - DNA, 120 bp, Artificial Sequence
  ENSG00000134324_34 (sequence is synthesized)
aaaaaatggaacggttgaatgaaattttactctttctgtgaaagaaaatccacagagttgttgcctccgttgtagttggtgggccccgttagcattggatgcctttgccaaatggttcat

SEQ ID NO: 310465 - DNA, 120 bp, Artificial Sequence
  ENSG00000134324_35 (sequence is synthesized)
gtggacacacaaaggcaaacagatctgccatcgatcgcagatttctgtagaaacacggatgtgcatgtgcagattcccttttgcaggtattaaaaataattaaaaatagtcctgcctgag

SEQ ID NO: 310466 - DNA, 83 bp, Artificial Sequence
  ENSG00000134324_36 (sequence is synthesized)
ggtgacagagtatcctgccttaactaactcctctgcgcttgttcactagtaacctaaagaggctatattcattctttatgcaa

SEQ ID NO: 310467 - DNA, 120 bp, Artificial Sequence
  ENSG00000134324_37 (sequence is synthesized)
cactagtaacctaaagaggctatattcattctttatgcaatgagggtatttttgagtgaattttaactgctctgaactaagtataagctcatgggcctgcaaaggttcagacggtttctc

SEQ ID NO: 310468 - DNA, 120 bp, Artificial Sequence
  ENSG00000134324_38 (sequence is synthesized)
ctttgcacccaggaggaactttggctgcgagaatggggggatgtatccctcatgcagttggcatccaggcagccctctgcagcagcacaccctgcaggcggagttttcagaggatgcaat

SEQ ID NO: 310469 - DNA, 120 bp, Artificial Sequence
  ENSG00000134324_39 (sequence is synthesized)
tttggatcccgaattttgatgtaccttaaacttccacatcactgcaccctgaaacagagcatgctttccagaaagtcacactctcagatctgtgtcaagttcaatgtgagccctggcaag

SEQ ID NO: 310470 - DNA, 120 bp, Artificial Sequence
  ENSG00000134324_40 (sequence is synthesized)
gctggcatattaacacctgccttctggcttctgaaagtgagatttgtatatgggctgcactcacgcatatacgagttggtttatctttgtgtacatgactataacccagtgatgctgagg

SEQ ID NO: 310471 - DNA, 120 bp, Artificial Sequence
  ENSG00000134324_41 (sequence is synthesized)
tcatgtgctggaatgctgtatttggaccacacatttcaaagttgccctatggaaatgaatcctacttagtgacaagtcatcaaatgtttgtcacatgtgatgaagacaaatatgtatacc

SEQ ID NO: 310472 - DNA, 120 bp, Artificial Sequence
  ENSG00000134324_42 (sequence is synthesized)
tggcatagagaaaaatatatacctggtacattggagaaaaataattacactttcaaagagaattccctttgcaattttatgtttggatcaccactgtaagcacactttatttgcatttga

SEQ ID NO: 310473 - DNA, 120 bp, Artificial Sequence
  ENSG00000134324_43 (sequence is synthesized)
tctgtatttgtatatgctgatgcaatgataaaaatcactgtaatacttcattgtgttgtactggatgcaaagctagaaaatattgcaataaatgagaccgatgaaagacttctctgaaaa

SEQ ID NO: 310474 - DNA, 120 bp, Artificial Sequence
  ENSG00000134324_44 (sequence is synthesized)
gcgcagggcatggatgaaagcaagctggagagggagagaggatgggaggcgaggaggcagcctgagggaaggaacaggagggaagagagatgaagggcaagaccggggccagccatgcct

SEQ ID NO: 310475 - DNA, 120 bp, Artificial Sequence
  ENSG00000134324_45 (sequence is synthesized)
gtcctaacagcagccacccagcagtggcccagcctgctgagaactagaaaatcagaagaaaaaggagaatccaccaggagacccaggtaactctgaagcgtgagctgccagaattcaagg

SEQ ID NO: 310476 - DNA, 120 bp, Artificial Sequence
  ENSG00000134324_46 (sequence is synthesized)
atttctctcctgatgctgggtgaggaggcagacagcaccatacagggcgggccatgggggaacaggacggcattcgcagctccagctgggagacctcgcagggcaagagctccccagact

SEQ ID NO: 310477 - DNA, 120 bp, Artificial Sequence
  ENSG00000134324_47 (sequence is synthesized)
gcaatacaaaggcggccacgcgcggcgccgctcgtatttgcaaccacgtggcttcacgagtccgccaaaccatcaggtgaataaacgggagaggagaagagagtctaggactcagccctg

SEQ ID NO: 310478 - DNA, 120 bp, Artificial Sequence
  ENSG00000134324_48 (sequence is synthesized)
ggttgatggcatgaccccatgaagcccagcaaggagtggagagaggagggctggaggactcccgcctgccatgacccagtccagggataagattggcacgatctcagctcactgcagcct

SEQ ID NO: 310479 - DNA, 88 bp, Artificial Sequence
  ENSG00000134324_49 (sequence is synthesized)
gaccatgaattacgtggggcagttagccggccaggtgtttgtcaccgtgaaggagctctacaaggggctgaatcccgccacactctca

SEQ ID NO: 310480 - DNA, 120 bp, Artificial Sequence
  ENSG00000134324_50 (sequence is synthesized)
cagggaggggcagtgggggtcaggggtagcagtggagtccagagtgaaagtgaatcccagcaactccaaatttgaattcaataccaagaaacaaggggcgaagtataggggaattgatta

SEQ ID NO: 310481 - DNA, 120 bp, Artificial Sequence
  ENSG00000134324_51 (sequence is synthesized)
ctaggagaacacagatggtggcagcattaggggtgagactgaggtttagttcatcccgagggatggcagaggtagccagttgaagaaataggagcttatatgttatatatgccaagtgat

SEQ ID NO: 310482 - DNA, 120 bp, Artificial Sequence
  ENSG00000134324_52 (sequence is synthesized)
ctcatccatgagcagaagtttcagttcaaatatgacaccctcccattgatggaaatcatttcaccaccagacgttatgtggctcattgtttatccgctgcctgcctcccggctggagagg

SEQ ID NO: 310483 - DNA, 120 bp, Artificial Sequence
  ENSG00000134324_53 (sequence is synthesized)
cgcagggagctgcctgtccctcctgttcagagccaccgttccgcacctggaccaccgcttggcagaggcgggagtggaggctgtcaccatcaggatgaaggacaggggtggcccggcgtg

SEQ ID NO: 310484 - DNA, 120 bp, Artificial Sequence
  ENSG00000134324_54 (sequence is synthesized)
tttcctttagctctgtaggtaccttttccatcacggcgttgttttgtgtaagcagtagcttttttcctgtagtaaaagatgtcaaattgagacatgcacattctaggggagaaaagtcag

SEQ ID NO: 310485 - DNA, 120 bp, Artificial Sequence
  ENSG00000134324_55 (sequence is synthesized)
gcacaacctagtgtatttcaagtcctcagagctatcataacagcactgatctcaatagaaatcctgatattttagtgaaattgtgtccctaagctatgctgacaatttgcaacaagccat

SEQ ID NO: 310486 - DNA, 120 bp, Artificial Sequence
  ENSG00000134324_56 (sequence is synthesized)
tcatcagcctgtgttaagtagtaaggctttgctaggccaagcaaaaagtccacatcgttactccgacatcctaacactaactatgcatttaaagtgatccttttcatttccttatttaaa

SEQ ID NO: 310487 - DNA, 120 bp, Artificial Sequence
  ENSG00000134324_57 (sequence is synthesized)
tatcattgtccaaggtgtattgctttttccctgggaggaattattttaaaaaccctaaatctcatagttgatatgtcctcttggaaggccaaggtgctccagtggcagatggccaccggc

SEQ ID NO: 310488 - DNA, 120 bp, Artificial Sequence
  ENSG00000134324_58 (sequence is synthesized)
ctggtccttcctagggctgccatcaagccagagccgttccatgtgctagctgtcctgtggagttctctagaattgctagcgaaggctgccctaacacaaatgaccttccttttttttttt

SEQ ID NO: 310489 - DNA, 74 bp, Artificial Sequence
  ENSG00000134324_59 (sequence is synthesized)
aacatgcaggtttcccgtcatccaggttttaagcccagcatgcattagttatttgtcctaatgctctccctccc

SEQ ID NO: 310490 - DNA, 120 bp, Artificial Sequence
  ENSG00000134324_60 (sequence is synthesized)
gcacccatcagcccgtcatccaggttttaagcccagcatgcattagttatttgtcctaatgctctccctccccttcccccccaaccccctgactggccctggtgtgtgatgttcccctcc

SEQ ID NO: 310491 - DNA, 120 bp, Artificial Sequence
  ENSG00000134324_61 (sequence is synthesized)
attccgtggtgtatatgtgccacattttccttatgcagtcttatcattgacgggcacacaaatgaccttccttagcacaactctttaactgggtgcagttctgattttactgctaggttt

SEQ ID NO: 310492 - DNA, 120 bp, Artificial Sequence
  ENSG00000134324_62 (sequence is synthesized)
ctaggttttgaattaggatgaaggaggggaaggtagtgggtggatatgcgtgtggtgcagttggcaaaaacaagccctcagcacaggatggtgatcacttagcctttgtcaggagtgctg

SEQ ID NO: 310493 - DNA, 120 bp, Artificial Sequence
  ENSG00000134324_63 (sequence is synthesized)
cgaatgtcttttcccagttcatagcttttaatgaaaataaacttagttttatgtcattgaatgtattgtttcctctgtagttgtgctttttgtgtattaccaaagtcttctctgacctgt

SEQ ID NO: 310494 - DNA, 120 bp, Artificial Sequence
  ENSG00000134324_64 (sequence is synthesized)
gggcatgaagacagtcctcctggattttatctgaaggtgttgctttcacatttaggtctatagtccactaagaatggatttatttaggtagaatgaagtaggggtgcagtttaatttttt

SEQ ID NO: 310495 - DNA, 90 bp, Artificial Sequence
  ENSG00000134324_65 (sequence is synthesized)
tatttaggtagaatgaagtaggggtgcagtttaattttttttttcctatatggatattcatttgtccccacaccatgtgctaaaaagact

SEQ ID NO: 310496 - DNA, 60 bp, Artificial Sequence
  ENSG00000134324_66 (sequence is synthesized)
tacgcgggaggctgaggcaggagaatttggcaaccagcaagactctgtctcaaaaaaaaa

SEQ ID NO: 310497 - DNA, 120 bp, Artificial Sequence
  ENSG00000134324_67 (sequence is synthesized)
aaaaaaaagactgccctgcccttgctgctccgagatgccattgtggtcataaagcaagtatctgtgaacgtgtggttctgttttggggctttctgttttgttccactggcaaaggcctgg

SEQ ID NO: 310498 - DNA, 120 bp, Artificial Sequence
  ENSG00000134324_68 (sequence is synthesized)
acgaattggccaaggccatagtgtcccagctcccacagctgcagaagctcctcaccttcccagcatcggaagtgctaggcctggctttctgctcgttttcgtagcttctagactcaaatt

SEQ ID NO: 310499 - DNA, 120 bp, Artificial Sequence
  ENSG00000134324_69 (sequence is synthesized)
tcatcaaaacacccaagactctgttatgagtttgattgaaattgcagtgaatctgtagagcaatttaggaagaattaatatctcaaaattatattggatcttccaattcaagagtatagt

SEQ ID NO: 310500 - DNA, 120 bp, Artificial Sequence
  ENSG00000134324_70 (sequence is synthesized)
ctattcttcatttgtttaggtctttcctaatatatttcagtaaagttttataattttagctgtaaaggtctggcacatcttctgttagatttatttctagacattttatattttaaaatt

SEQ ID NO: 310501 - DNA, 120 bp, Artificial Sequence
  ENSG00000134324_71 (sequence is synthesized)
tgatttaaaataccatttacacaattaccttttctgcttgtttctaatgcatgaaaatgatgcgattaatttttgtactttttttttttggtacattgacttgttaaccttattagagtc

SEQ ID NO: 310502 - DNA, 120 bp, Artificial Sequence
  ENSG00000134324_72 (sequence is synthesized)
tttttaattctggtaattcatgtgtaggttcatcttcttaatgtgcatatttgttttttgtgatgacaattttttcccctaattctttctagtatgtataacttttatttatttttctta

SEQ ID NO: 310503 - DNA, 120 bp, Artificial Sequence
  ENSG00000134324_73 (sequence is synthesized)
cattattgcatttgataggacaggcaatacagcagtgaattgccatgatgatacagaccacccttatttcactgttaataagatgttcactgtaggtttttttagtattcccttctattc

SEQ ID NO: 310504 - DNA, 120 bp, Artificial Sequence
  ENSG00000134324_74 (sequence is synthesized)
aattgtatcaaatcctctttttaaatttaagtattttaaaaaatgaattttaatttgggaggtaactggtatcaaataccctttttgtatctattgagatgatcatgtttttctctttta

SEQ ID NO: 310505 - DNA, 120 bp, Artificial Sequence
  ENSG00000134324_75 (sequence is synthesized)
tttaacctgataatgtgttatattgattttaaatattaaattactatttcattcctggaataaacccagcttttatacattgctacaatttgtatacacacatacacacacacacacaca

SEQ ID NO: 310506 - DNA, 120 bp, Artificial Sequence
  ENSG00000134324_76 (sequence is synthesized)
cacacgtgtatatatatattttagaatttttgcacgtatattcacaaatgagattggtccacactttgcccatactttctttttttaggttttgtttttaaggttatgctagcctcatcg

SEQ ID NO: 310507 - DNA, 120 bp, Artificial Sequence
  ENSG00000134324_77 (sequence is synthesized)
aattaatttggagatgttcttttttgtttttatgctctgtcattctttgttccctggatgaccaggataacccttggtgaaatggctcatccttggtgttttcttttgtagaaagacttg

SEQ ID NO: 310508 - DNA, 120 bp, Artificial Sequence
  ENSG00000134324_78 (sequence is synthesized)
aaagtacgggtttactttccatctcgtgcttttctgggatgtctcagctgcctgacacacactaaacttttgaagatttgagttttctcagtgttgcggcagctttgtcagctaaaaaca

SEQ ID NO: 310509 - DNA, 120 bp, Artificial Sequence
  ENSG00000134324_79 (sequence is synthesized)
ctttttggtctgtctgaattccctcagtgacggtcggcagaaagcgcatctgtgtttgtgcacgagacctttggagaagggttgctgtggcctgaacgggcagcatttatggtggtggcc

SEQ ID NO: 310510 - DNA, 120 bp, Artificial Sequence
  ENSG00000134324_80 (sequence is synthesized)
tgtttgctgttggggagggacttgcagcagactttctcgtagggctgggctccttatgcgtgagttgcacgcctgagtgcctctatgggttttgtggctcgtggcttttatgaagggacc

SEQ ID NO: 310511 - DNA, 120 bp, Artificial Sequence
  ENSG00000134324_81 (sequence is synthesized)
ctttccttgtcgtggtgctttaataaacatctgtgctgagatgcagccgtctgcggctctgagggtggccgcgtgccagagcatcactggatggtgatgtaggaccctgaactgggacag

SEQ ID NO: 310512 - DNA, 120 bp, Artificial Sequence
  ENSG00000134324_82 (sequence is synthesized)
agtgctgagtttccatgagccagctctgccatgaagtagggcgagtgctcgtggaacgtggggaaggtggggaggaaggtcaggagccagcagcataggtgtcacctcctggctctgtaa

SEQ ID NO: 310513 - DNA, 120 bp, Artificial Sequence
  ENSG00000134324_83 (sequence is synthesized)
ctgttgggagactgtggtccagtcactccctcatggtaagatttcgtcatctataaaagaagggattcagcctgggaattcagtttcttaagaaattaaatatcttccttctgcttgtgg

SEQ ID NO: 310514 - DNA, 120 bp, Artificial Sequence
  ENSG00000134324_84 (sequence is synthesized)
atcgatgaccccaatctcgtggtaaagattgggagtaaatattataactggacaacagcagcacccctcctcctggcaatgcaggccttccagaaacctttgccaaagtcttcatgctta

SEQ ID NO: 310515 - DNA, 120 bp, Artificial Sequence
  ENSG00000134324_85 (sequence is synthesized)
aacagaagacaactagaaacctcatccatgagcagactgctgagatggggatggttacctctgtttaacagctgaggacgctgaggttcagacagcactcagccacgtggctgagctgga

SEQ ID NO: 310516 - DNA, 120 bp, Artificial Sequence
  ENSG00000134324_86 (sequence is synthesized)
cttgaatttgagcctgttggattctgaaccctagacttcgtgcacctgaccaggtgcagaccatgaattacgtggggcagttagccggccaggtgtttgtcaccgtgaaggagctctaca

SEQ ID NO: 310517 - DNA, 120 bp, Artificial Sequence
  ENSG00000134324_87 (sequence is synthesized)
attcagaactgggacagtcatctgaaatgtcttcagaggctggggccacacagcgggagcagctcagttctttttccctttcgtttgcgagtgtctgtatgtgagactctgtgaagtagt

SEQ ID NO: 310518 - DNA, 120 bp, Artificial Sequence
  ENSG00000134324_88 (sequence is synthesized)
gagagtggtcacccactcccagtagcctggtagattgcaaaaggactgcccctcatcttgcagttgcggccgagggaggtctgtctagttcttgccctccacagtcttccctgttccatc

SEQ ID NO: 310519 - DNA, 120 bp, Artificial Sequence
  ENSG00000134324_89 (sequence is synthesized)
aaattcctgttaattcctcacatcatttcctataatctgaatatcattctgtgtgagaccagtttccccttatgtttgattagaaagtgtgcaagacagctgggcgcggtggctcacgcc

SEQ ID NO: 310520 - DNA, 69 bp, Artificial Sequence
  ENSG00000134324_90 (sequence is synthesized)
tcctcgttctactgaaaataccaaaattggctgcacgtgctggcatgcacctgtaatcccagctactcg

SEQ ID NO: 310521 - DNA, 120 bp, Artificial Sequence
  ENSG00000134324_91 (sequence is synthesized)
agcgtgagctgccagaattcaaggccacctgcttaacagaagacaactagaaacctcatccatgagcagaacgttatgtggctcattgtttatccgctgcctgcctcccggctggagagg

SEQ ID NO: 310522 - DNA, 120 bp, Artificial Sequence
  ENSG00000134326_0 (sequence is synthesized)
ggctcctgcgcgggccactgtcggggccgctgctcgggcggcgcggggtctgcgctggggccatggctccgccgcgccgcttcgtcctggagcttcccgactgcaccctggctcacttcg

SEQ ID NO: 310523 - DNA, 120 bp, Artificial Sequence
  ENSG00000134326_1 (sequence is synthesized)
ccgactgcaccctggctcacttcgccctaggcgccgacgcccccggcgacgcagacgcccccgacccccgcctggcggcgctgctggggcccccggagcgcagctactcgctgtgcgtgc

SEQ ID NO: 310524 - DNA, 120 bp, Artificial Sequence
  ENSG00000134326_2 (sequence is synthesized)
ggcgcggctgcaccagcgcctgctgcaccagctgcgccgcggccccttccagcggtgccagctgctcaggctgctctgctactgcccgggcggccaggccggcggcgcacagcaaggctt

SEQ ID NO: 310525 - DNA, 120 bp, Artificial Sequence
  ENSG00000134326_3 (sequence is synthesized)
ggcggccaggccggcggcgcacagcaaggcttcctgctgcgcgaccccctggatgaccctgacacccggcaagcgctgctcgagctgctgggcgcctgtcaggaggcaccacgcccgcac

SEQ ID NO: 310526 - DNA, 120 bp, Artificial Sequence
  ENSG00000134326_4 (sequence is synthesized)
ttgggcgagttcgaggccgacccgcgcggccagctgtggcagcgcctctgggaggtgcaagacggcaggcggctgcaggtgggctgcgcacaggtcgtgcccgtcccggagcccccgctg

SEQ ID NO: 310527 - DNA, 120 bp, Artificial Sequence
  ENSG00000134326_5 (sequence is synthesized)
cacccggtggtgccagacttgcccagttccgtggtcttcccggaccgggaagccgcccgggccgttttggaggagtgtacctcctttattcctgaagcccgggcagtgcttgacctggtc

SEQ ID NO: 310528 - DNA, 120 bp, Artificial Sequence
  ENSG00000134326_6 (sequence is synthesized)
gaccagtgcccaaaacagatccagaaaggaaagttccaggttgttgccatcgaaggactggatgccacgggtaaaaccacggtgacccagtcagtggcagattcacttaaggctgtcctc

SEQ ID NO: 310529 - DNA, 120 bp, Artificial Sequence
  ENSG00000134326_7 (sequence is synthesized)
ttaaagtcaccaccctcttgcattggccagtggaggaagatctttgatgatgaaccaactatcattagaagagctttttactctttgggcaattatattgtggcctccgaaatagctaaa

SEQ ID NO: 310530 - DNA, 120 bp, Artificial Sequence
  ENSG00000134326_8 (sequence is synthesized)
gaatctgccaaatctcctgtgattgtagacaggtactggcacagcacggccacctatgccatagccactgaggtgagtgggggtctccagcacctgcccccagcccatcaccctgtgtac

SEQ ID NO: 310531 - DNA, 120 bp, Artificial Sequence
  ENSG00000134326_9 (sequence is synthesized)
cagtggccagaggacctgctcaaacctgaccttatcctgctgctcactgtgagtcctgaggagaggttgcagaggctgcagggccggggcatggagaagaccagggaagaagcagaactt

SEQ ID NO: 310532 - DNA, 120 bp, Artificial Sequence
  ENSG00000134326_10 (sequence is synthesized)
gaggccaacagtgtgtttcgtcaaaaggtagaaatgtcctaccagcggatggagaatcctggctgccatgtggttgatgccagcccctccagagaaaaggtcctgcagacggtattaagc

SEQ ID NO: 310533 - DNA, 120 bp, Artificial Sequence
  ENSG00000134326_11 (sequence is synthesized)
ctaatccagaatagttttagtgaaccgtagttactctggccaggtgccacgtctaactagattagatgttgtttgaaacatctacatccaccatttgttatgcagtgttcccaaatttct

SEQ ID NO: 310534 - DNA, 120 bp, Artificial Sequence
  ENSG00000134326_12 (sequence is synthesized)
tacaagcatgttgtgtggcagaaaactggagaccaggcatcttaattttacttcagccatcgtaccctcttctgactgatggacccgtcatcacaaaggtccctctcatcatgttccagt

SEQ ID NO: 310535 - DNA, 120 bp, Artificial Sequence
  ENSG00000134326_13 (sequence is synthesized)
gagaggccagcgattgctttcttcctggcatagtaaacattttcttggaacatatgtttcacttaatcactaccaaatatctggaagacctgtcttactcagacagcaccaggtgtacag

SEQ ID NO: 310536 - DNA, 120 bp, Artificial Sequence
  ENSG00000134326_14 (sequence is synthesized)
aagcagcagacaagatcttccagatcagcagggagaccccggagcctctgcttctcctacactggcatgctgatgagatcgtgacatgcccacattggcttcttccacatctggttgcac

SEQ ID NO: 310537 - DNA, 120 bp, Artificial Sequence
  ENSG00000134326_15 (sequence is synthesized)
tcgtcatgatgggctcgctgcatctccctcagtcccaaattctagagccaagtgttcctgcagaggctgtctatgtgtcctggctgcccaaggacactcctgcagagccatttttgggta

SEQ ID NO: 310538 - DNA, 120 bp, Artificial Sequence
  ENSG00000134326_16 (sequence is synthesized)
aggaacacttacaaagaaggcattgatcttgtgtctgaggctcagagcccttttgataggcttctgagtcatatataaagacattcaagccaagatgctccaactgcaaatataccaacc

SEQ ID NO: 310539 - DNA, 120 bp, Artificial Sequence
  ENSG00000134326_17 (sequence is synthesized)
ttctctgaattatattttgcttatttatatttcttttctttttttctaaagtatggctctgaatagaatgcacattttccattgaactggatgcatttcatttagccaatccagtaattt

SEQ ID NO: 310540 - DNA, 120 bp, Artificial Sequence
  ENSG00000134326_18 (sequence is synthesized)
atttatattaatctatacataatatgtttcctcagcataggagctatgattcattaattaaaagtggagtcaaaacgctaaatgcaatgtttgttgtgtattttcattacacaaacttaa

SEQ ID NO: 310541 - DNA, 120 bp, Artificial Sequence
  ENSG00000134326_19 (sequence is synthesized)
tttgtcttgttaaataagtacagtggatcttggagtgggatttcttggtaaattatcttgcacttgaatgtctcatgattacatatgaaatcgctttgacatatctttagacagaaaaaa

SEQ ID NO: 310542 - DNA, 120 bp, Artificial Sequence
  ENSG00000134326_20 (sequence is synthesized)
gtagctgagtgagggggaaattatagagctgtgtgactttagggagtaggttgaaccaggtgattacctaaaattccttccagttcaaaggcagataaatctgtaaattattttatccta

SEQ ID NO: 310543 - DNA, 120 bp, Artificial Sequence
  ENSG00000134326_21 (sequence is synthesized)
tctaccatttcttaagaagacattactccaaaataattaaatttaaggctttatcaggtctgcatatagaatcttaaattctaataaagtttcatgttaatgtcataggatttttaaaag

SEQ ID NO: 310544 - DNA, 120 bp, Artificial Sequence
  ENSG00000134326_22 (sequence is synthesized)
agctataggtaatttctatataatatgtgtatattaaaatgtaattgatttcagttgaaagtattttaaagctgataaatagcattagggttctttgcaatgtggtatctagctgtatta

SEQ ID NO: 310545 - DNA, 120 bp, Artificial Sequence
  ENSG00000134326_23 (sequence is synthesized)
ttggttttatttactttaaacattttgaaaagcttatactggcagcctagaaaaacaaacaattaatgtatctttatgtccctggcacatgaataaactttgctgtggtttactaatcta

SEQ ID NO: 310546 - DNA, 120 bp, Artificial Sequence
  ENSG00000134326_24 (sequence is synthesized)
tgaggaagtgatattgtttccagttttcaaacacaagagacaacatcctctaagttacttcagccccttccaatgggcttgtcaccacagggctgcagcattgttatcttaaagcaaagg

SEQ ID NO: 310547 - DNA, 120 bp, Artificial Sequence
  ENSG00000134326_25 (sequence is synthesized)
tcatcggactagggatcagaccctgccactgatcctggctgtgctaggagcagctgcacctgggtaagacagtaagtgtctctgtgcctcagtttccccagtcatagtataatcacacag

SEQ ID NO: 310548 - DNA, 120 bp, Artificial Sequence
  ENSG00000134326_26 (sequence is synthesized)
agcactagataacgagctcatagtaacatctacctattagatgcttcccgtgtgtcaggcattttactgatgttatgtcatccttgtgaggaaaacattagccgtattttacagtttaca

SEQ ID NO: 310549 - DNA, 120 bp, Artificial Sequence
  ENSG00000134326_27 (sequence is synthesized)
actttaaggctcaaaggattaagtgatttgtctaaatgtacataactattcactagtaaaaccgggattaaaatctttctgattttgcagccagtgtttttgttttaattagaaagttat

SEQ ID NO: 310550 - DNA, 120 bp, Artificial Sequence
  ENSG00000134326_28 (sequence is synthesized)
aaacacgactgcagaagagagtctggccaggcctcctgcctcatgactgagtatgaatcagttctacaccactgcctttaaaaactgaagcagaaatattttctctaactgaacaatgat

SEQ ID NO: 310551 - DNA, 120 bp, Artificial Sequence
  ENSG00000134326_29 (sequence is synthesized)
agccctgttatcataacatagtaatgttataaataatggtagctgctgtgggtaaagatattatgttaagcaatttacttgtattaattccattaaacttcagtgaacatttgcaaggaa

SEQ ID NO: 310552 - DNA, 120 bp, Artificial Sequence
  ENSG00000134326_30 (sequence is synthesized)
ggtgccaatctgggcgacacttcccagttggagagtcagcaaaagggagagggcaattccaagaagagggaaaagcttgtgcacaggtgagtgtgtgcaaagtgtacctcctttattcct

SEQ ID NO: 310553 - DNA, 120 bp, Artificial Sequence
  ENSG00000134326_31 (sequence is synthesized)
aggcagttacactgttaggcagcaacagtgctgatgctggactgtggcaggcagagggtgctatcctgacacacttcaccttagtgcaggaaacttcaatttggtggaagaaaggcgatt

SEQ ID NO: 310554 - DNA, 120 bp, Artificial Sequence
  ENSG00000134326_32 (sequence is synthesized)
tcgaggtgccaatctgggcgacacttcccagttggagagtcagcaaaagggagagggcaattccaagaagagggaaaagcttgtgcacagtgtacctcctttattcctgaagcccgggca

SEQ ID NO: 310555 - DNA, 120 bp, Artificial Sequence
  ENSG00000134326_33 (sequence is synthesized)
aacgcttcgctttcgtttcccgctggcgcctggctccctccgggtttcgtttcccgccggcgcctggctcccgccaggtttcgtttccgaggcggggccgagggcggcgtcgctgaggcg

SEQ ID NO: 310556 - DNA, 120 bp, Artificial Sequence
  ENSG00000134326_34 (sequence is synthesized)
attgtagacaggtcccagctgggaggaaccttataccatccttctctccacctgctcggcagtgaagtttgtgggactggaatcttggattcatcacactcgagtcaaggcctggaatga

SEQ ID NO: 310557 - DNA, 120 bp, Artificial Sequence
  ENSG00000134330_0 (sequence is synthesized)
cccgcccggctgctccatggcgctgtgcgaggccgcgggctgcgggagtgccctgctctggcctcgcttgttgctcttcggggactccatcacccagttttccttccagcagggtggatg

SEQ ID NO: 310558 - DNA, 120 bp, Artificial Sequence
  ENSG00000134330_1 (sequence is synthesized)
gggagcatcgctggctgacaggctggtcagaaaatgtgatgttctgaatcgtggattttcaggttacaataccaggtgggccaaaattatccttccaagattaatcaggaaaggaaacag

SEQ ID NO: 310559 - DNA, 120 bp, Artificial Sequence
  ENSG00000134330_2 (sequence is synthesized)
tttggacatcccagtagcagttacaattttctttggggccaatgacagtgcactaaaagatgagaatcccaagcagcacattcccctggaggagtacgctgcgaacctaaagagcatggt

SEQ ID NO: 310560 - DNA, 120 bp, Artificial Sequence
  ENSG00000134330_3 (sequence is synthesized)
gcagtacctgaagtccgtggacatccctgagaatcgagtcattctcatcacgccgaccccactttgtgaaacagcctgggaagaacagtgcatcatacaaggttgcaaactaaatcgcct

SEQ ID NO: 310561 - DNA, 120 bp, Artificial Sequence
  ENSG00000134330_4 (sequence is synthesized)
gaactctgttgttggtgaatatgccaatgcgtgtttacaagtggcccaagactgtgggactgacgtacttgacctgtggaccctgatgcaggacagccaggacttctcatcttatttatc

SEQ ID NO: 310562 - DNA, 120 bp, Artificial Sequence
  ENSG00000134330_5 (sequence is synthesized)
agatggactacatttgtctccaaaggggaatgaatttttgttctcgcatctctggcctttgatagagaaaaaggtctcttctctacctttgctgcttccttactggcgggatgtagcaga

SEQ ID NO: 310563 - DNA, 120 bp, Artificial Sequence
  ENSG00000134330_6 (sequence is synthesized)
agcaaaacctgaattaagtctgctgggagatggagaccattagccaatcacaggagacccaaatctgcttgttatctacagaactcaaagttgtcaatacgtagaggtacgcttttttcc

SEQ ID NO: 310564 - DNA, 120 bp, Artificial Sequence
  ENSG00000134330_7 (sequence is synthesized)
tcaggcttaaacctttgccactgatattaataataaaagtattagatgatttttcagggaagttttatacttaggtccattgtgtttcgacagtatttattaatgcagatatcagtgcta

SEQ ID NO: 310565 - DNA, 120 bp, Artificial Sequence
  ENSG00000134330_8 (sequence is synthesized)
cagctataaaatataccctgagcagcttgttaattctataaatgacaaagactatgtttttaaaaagtcacaattttataaaaatggtttttcttacattcttttgagaactgtttcact

SEQ ID NO: 310566 - DNA, 120 bp, Artificial Sequence
  ENSG00000134330_9 (sequence is synthesized)
caccccactcaaccttgtatcaaattccaaaagtgtaactaaagtataagaatatcatgactagttaaaagatagcaaataccataaggtacaagttcaagtattagtataacaagtatc

SEQ ID NO: 310567 - DNA, 120 bp, Artificial Sequence
  ENSG00000134330_10 (sequence is synthesized)
tgagtaacaaatgtccttggaaatggggggtaggaggagatatgattagtcacaggtttggttaactgccctcaaaatttacaagttaaaatgttttggctggtgagcacatttcagttc

SEQ ID NO: 310568 - DNA, 120 bp, Artificial Sequence
  ENSG00000134330_11 (sequence is synthesized)
ttaggggaaaaaaagcttttaatggcaatttatagaaatcagaatccaggctaatgatttttatccttcacacagtaaatgcagcccatccagaatcctggagcaataaagtaagaagta

SEQ ID NO: 310569 - DNA, 120 bp, Artificial Sequence
  ENSG00000134330_12 (sequence is synthesized)
attcaaatatctgcttgtgggtcaataaaaagggtttctgaagtatcaagtcttgtggggacagcccccaaccctaagggcaggtagtattctatctcctggctggctcatcacattcaa

SEQ ID NO: 310570 - DNA, 120 bp, Artificial Sequence
  ENSG00000134330_13 (sequence is synthesized)
aacaacctgttttttttgttgttgttgttgttaagaaatatctcaccctcttattcaatagtgtttgaaaacaggcaatctttgtattttaaatattctaggtttgtagatagtgaattt

SEQ ID NO: 310571 - DNA, 76 bp, Artificial Sequence
  ENSG00000134330_14 (sequence is synthesized)
tcacccaggctggagtgtagtggcgcaacctcagcctctagtgaattttctaagagcatgtatccctatcagtaac

SEQ ID NO: 310572 - DNA, 120 bp, Artificial Sequence
  ENSG00000134330_15 (sequence is synthesized)
aatagtgaattttctaagagcatgtatccctatcagtaacagggatacatgaagatacttataaaatacagaaaaactgcccagcaaatcagggccctaaacagttggtagattccataa

SEQ ID NO: 310573 - DNA, 120 bp, Artificial Sequence
  ENSG00000134330_16 (sequence is synthesized)
attcaactggctaccatgtatagccctcactgtaaggtaggtggttaggtttctagagagcattagtcttagaattatgaagagccatattaacccaaatgatttctaaatttagatata

SEQ ID NO: 310574 - DNA, 120 bp, Artificial Sequence
  ENSG00000134330_17 (sequence is synthesized)
tattttccctgctacataaaaactctgggtaataactagaaatagacccacaatttagagacaatgtatactagatttatctcctttgtttttagttgaaggcaaaaaaaaaaaaaaaaa

SEQ ID NO: 310575 - DNA, 120 bp, Artificial Sequence
  ENSG00000134330_18 (sequence is synthesized)
aaggtccctgcagcacaccttgcaggagttgtcagtttctggaacagagaacacgcattgacagctggattgttctgagacctgcctctcctcctgcctcctctttcctccctgaccatg

SEQ ID NO: 310576 - DNA, 77 bp, Artificial Sequence
  ENSG00000134330_19 (sequence is synthesized)
cctgcctctcctcctgcctcctctttcctccctgaccatgctcccaaagagagacagcgttttgccatgttgaccaa

SEQ ID NO: 310577 - DNA, 120 bp, Artificial Sequence
  ENSG00000134330_20 (sequence is synthesized)
ctggctctctgtctattttgaaagcaagagaactccctcatcgactcccatggtttaagtggggtgggaagcagagtccagccagtccctgaccagtccatgaggatgccctcaaaccca

SEQ ID NO: 310578 - DNA, 120 bp, Artificial Sequence
  ENSG00000134330_21 (sequence is synthesized)
gaatgagggccctaggttggatcttagttgtaaagctcccccaggtgatccaagcgagcttgggacgagcaacctaaagaaagtcatgctctacgcccatcgccccgccccagggagcgg

SEQ ID NO: 310579 - DNA, 120 bp, Artificial Sequence
  ENSG00000134330_22 (sequence is synthesized)
ggtcggcctctgcgccggcgcccctggcccttctgttactcatctacagctccgtgatttcaaggcatccttcccacccgttcgtttttagctcggctgccgaacttcattgcacagttg

SEQ ID NO: 310580 - DNA, 72 bp, Artificial Sequence
  ENSG00000134330_23 (sequence is synthesized)
tggtctcgaactcgagacctgtttagcttttgatagagaaaaatccccctctgctaaagtgctgccaggtgt

SEQ ID NO: 310581 - DNA, 120 bp, Artificial Sequence
  ENSG00000134330_24 (sequence is synthesized)
atagagaaaaatccccctctgctaaagtgctgccaggtgtacttacctgtaatccccaaaatgacctcctggagtgaagcaatcaaagccaagaagggagcgccgagaaaacagaagttg

SEQ ID NO: 310582 - DNA, 120 bp, Artificial Sequence
  ENSG00000134330_25 (sequence is synthesized)
agaggcgccaggagctctctcgccccattccctgcgggcacaggtggggccgttaggggttgaccttggaagtaaaacgccttcaggaattaggtagaaaaggaccatccgttcatccaa

SEQ ID NO: 310583 - DNA, 120 bp, Artificial Sequence
  ENSG00000134330_26 (sequence is synthesized)
cggccccgccccgccccgcccggctgctccatggcgctgtgcgaggccgcgggctgcgggagtgccctgctctggcctcgcttgttgctcttcggggactccatcacccagaaaatgtga

SEQ ID NO: 310584 - DNA, 120 bp, Artificial Sequence
  ENSG00000134330_27 (sequence is synthesized)
gccctgcttagctaagacagtcatccctttagccaatgaaaacaaacaggcttgggggaggggaggaatggaggttccaggatggctcacaagcccagcagcttaattcagccaggctcc

SEQ ID NO: 310585 - DNA, 120 bp, Artificial Sequence
  ENSG00000134330_28 (sequence is synthesized)
ttggctaggagttagtgcgcagtgacatcaatgagcaacacatggctcatatttatgaacgtccaggccaagttcttctttcatacagagaatggcagaaagctaaaacttgttaatagg

SEQ ID NO: 310586 - DNA, 120 bp, Artificial Sequence
  ENSG00000134330_29 (sequence is synthesized)
taaaacaatgaatttaaatacagtattggctaataaaactgtttgagatatgtagttctaattaagttactttgttttaaagcctgaaagcacaaatataaaaggtaaaaagcaggtccc

SEQ ID NO: 310587 - DNA, 120 bp, Artificial Sequence
  ENSG00000134330_30 (sequence is synthesized)
atggaatggtgcactgactcaggagacagctggtttctgacgcagtcacacatacacttagggaggacctggcagtccactcctgggttatctgccctagagaaatgaaaactatgttca

SEQ ID NO: 310588 - DNA, 120 bp, Artificial Sequence
  ENSG00000134330_31 (sequence is synthesized)
cacagaacctgggtgtaactgttgacagcagcattattcctacctgctggaaacacgccagtgtccttctgtgatgaatagggaaactggtgtgtccgtggaatgggatactactcggca

SEQ ID NO: 310589 - DNA, 120 bp, Artificial Sequence
  ENSG00000134330_32 (sequence is synthesized)
ataaagaggaggaactgacaagcgcagcaacgtgggtgactctcgaggcgcttcactgagggaaggaagctggtctctgaaggctacttactacatgagtccatctgttttggtgtctca

SEQ ID NO: 310590 - DNA, 88 bp, Artificial Sequence
  ENSG00000134330_33 (sequence is synthesized)
aggctgaggtgacaccactgcactccggtctggaggatacagggagactgtctcaccctccccagcccaccccccaaaaaaaggcaag

SEQ ID NO: 310591 - DNA, 120 bp, Artificial Sequence
  ENSG00000134330_34 (sequence is synthesized)
tgtctcaccctccccagcccaccccccaaaaaaaggcaagactgcagtaacagaacaggtccatggtggccagaggttagggcaaggaaaggtatggctaaattcaggttccacacagat

SEQ ID NO: 310592 - DNA, 120 bp, Artificial Sequence
  ENSG00000134330_35 (sequence is synthesized)
actggtgaagaggggcagacaggcactggtcttttttaatttttctgtgaccttgtgctactcttttgtaaagagcttgttcagtagggcacattaaaggctacttcattgctatgctgg

SEQ ID NO: 310593 - DNA, 120 bp, Artificial Sequence
  ENSG00000134330_36 (sequence is synthesized)
gatccagagagaaagcttggacgggactgatgatatttgaagtactcaagggaaggaaggatccagtgtgcgggaagctctttggacaaacgggaagactcacagcctcaccggtttcct

SEQ ID NO: 310594 - DNA, 120 bp, Artificial Sequence
  ENSG00000134330_37 (sequence is synthesized)
ctattcctagctgttaggtttaggctacttggacaaagcaacatagaaaacagccaagaaactaacccaagtgccaactttttcctctcccctaaatattaatccataccaatcgttcca

SEQ ID NO: 310595 - DNA, 120 bp, Artificial Sequence
  ENSG00000134330_38 (sequence is synthesized)
atgacctacacatttattatccatctgtaatagggaaaatggtcaccagtgggaaagtcatactaccacgtggatgccgagtcaccagtcacctttggaggccctgagagcctaagcaga

SEQ ID NO: 310596 - DNA, 120 bp, Artificial Sequence
  ENSG00000134330_39 (sequence is synthesized)
tctggaccctaggcctctagtcttcctctgaaaccctggagtactggaaccttccagaattccagattaggaggggccttggcagcttgagtgccaaaagggtcgacatctagagttctg

SEQ ID NO: 310597 - DNA, 120 bp, Artificial Sequence
  ENSG00000134330_40 (sequence is synthesized)
ttgtctaggaaaggaaactgcaaactattgggctagttttgctcacatgtctttttcaatttaatacaaaactgagagggtcgtccttagagatcatctcatctcaaactgcctagatga

SEQ ID NO: 310598 - DNA, 120 bp, Artificial Sequence
  ENSG00000134330_41 (sequence is synthesized)
gaaaaccaaggccgaagaagaagtgctactattatatgatagcatctaaatttctggtctattaaaagtcacataaggccgggcgcggtggctcatgcctatcatcccaacatttcggga

SEQ ID NO: 310599 - DNA, 61 bp, Artificial Sequence
  ENSG00000134330_42 (sequence is synthesized)
aattaggccgagactgtgccatcgttctctagcctgggcaacaagagtgagactctagctc

SEQ ID NO: 310600 - DNA, 120 bp, Artificial Sequence
  ENSG00000134330_43 (sequence is synthesized)
gccccgccccgccccgcccggctgctccatggcgctgtgcgaggccgcgggctgcgggagtgccctgctctggcctcgcttgttgctcttcggggactccatcacccaggttacaatacc

SEQ ID NO: 310601 - DNA, 80 bp, Artificial Sequence
  ENSG00000134330_44 (sequence is synthesized)
gagagcccgggctccaggcacagacgcgaggggacccggccgcgctgcccgccccgcgccgcctcccacccgggtcgaga

SEQ ID NO: 310602 - DNA, 120 bp, Artificial Sequence
  ENSG00000134330_45 (sequence is synthesized)
cctggaatgaggtcccagctcacttaatggacttctcatcttatttatcagatggactacatttgtctccaaaggggaatgaatttttgttctcgcatctctggcctttgatagagaaaa

SEQ ID NO: 310603 - DNA, 120 bp, Artificial Sequence
  ENSG00000134333_0 (sequence is synthesized)
taaaagccgggcgttcggaggacccagcaattagtctgatttccgcccacctttccgagcgggaaggagagccacaaagcgcgcatgcgcgcggatcaccgcaggctcctgtgccttggg

SEQ ID NO: 310604 - DNA, 120 bp, Artificial Sequence
  ENSG00000134333_1 (sequence is synthesized)
cttgagctttgtggcagttaatggcttttctgcacgtatctctggtgtttacttgagaagcctggctgtgtccttgctgtaggagccggagtagctcagagtgatcttgtctgaggaaag

SEQ ID NO: 310605 - DNA, 120 bp, Artificial Sequence
  ENSG00000134333_2 (sequence is synthesized)
gccagccccacttggggttaataaaccgcgatgggtgaaccctcaggaggctatacttacacccaaacgtcgatattccttttccacgctaagattccttttggttccaagtccaatatg

SEQ ID NO: 310606 - DNA, 120 bp, Artificial Sequence
  ENSG00000134333_3 (sequence is synthesized)
gcaactctaaaggatcagctgatttataatcttctaaaggaagaacagaccccccagaataagattacagttgttggggttggtgctgttggcatggcctgtgccatcagtatcttaatg

SEQ ID NO: 310607 - DNA, 120 bp, Artificial Sequence
  ENSG00000134333_4 (sequence is synthesized)
aaggacttggcagatgaacttgctcttgttgatgtcatcgaagacaaattgaagggagagatgatggatctccaacatggcagccttttccttagaacaccaaagattgtctctggcaaa

SEQ ID NO: 310608 - DNA, 120 bp, Artificial Sequence
  ENSG00000134333_5 (sequence is synthesized)
gactataatgtaactgcaaactccaagctggtcattatcacggctggggcacgtcagcaagagggagaaagccgtcttaatttggtccagcgtaacgtgaacatctttaaattcatcatt

SEQ ID NO: 310609 - DNA, 120 bp, Artificial Sequence
  ENSG00000134333_6 (sequence is synthesized)
cctaatgttgtaaaatacagcccgaactgcaagttgcttattgtttcaaatccagtggatatcttgacctacgtggcttggaagataagtggttttcccaaaaaccgtgttattggaagc

SEQ ID NO: 310610 - DNA, 120 bp, Artificial Sequence
  ENSG00000134333_7 (sequence is synthesized)
ggttgcaatctggattcagcccgattccgttacctaatgggggaaaggctgggagttcacccattaagctgtcatgggtgggtccttggggaacatggagattccagtgtgcctgtatgg

SEQ ID NO: 310611 - DNA, 120 bp, Artificial Sequence
  ENSG00000134333_8 (sequence is synthesized)
tggaatgaatgttgctggtgtctctctgaagactctgcacccagatttagggactgataaagataaggaacagtggaaagaggttcacaagcaggtggttgagagtgcttatgaggtgat

SEQ ID NO: 310612 - DNA, 120 bp, Artificial Sequence
  ENSG00000134333_9 (sequence is synthesized)
caaactcaaaggctacacatcctgggctattggactctctgtagcagatttggcagagagtataatgaagaatcttaggcgggtgcacccagtttccaccatgattaagggtctttacgg

SEQ ID NO: 310613 - DNA, 120 bp, Artificial Sequence
  ENSG00000134333_10 (sequence is synthesized)
aataaaggatgatgtcttccttagtgttccttgcattttgggacagaatggaatctcagaccttgtgaaggtgactctgacttctgaggaagaggcccgtttgaagaagagtgcagatac

SEQ ID NO: 310614 - DNA, 120 bp, Artificial Sequence
  ENSG00000134333_11 (sequence is synthesized)
actttgggggatccaaaaggagctgcaattttaaagtcttctgatgtcatatcatttcactgtctaggctacaacaggattctaggtggaggttgtgcatgttgtcctttttatctgatc

SEQ ID NO: 310615 - DNA, 120 bp, Artificial Sequence
  ENSG00000134333_12 (sequence is synthesized)
tgtgattaaagcagtaatattttaagatggactgggaaaaacatcaactcctgaagttagaaataagaatggtttgtaaaatccacagctatatcctgatgctggatggtattaatcttg

SEQ ID NO: 310616 - DNA, 120 bp, Artificial Sequence
  ENSG00000134333_13 (sequence is synthesized)
tgtagtcttcaactggttagtgtgaaatagttctgccacctctgacgcaccactgccaatgctgtacgtactgcatttgccccttgagccaggtggatgtttaccgtgtgttatataact

SEQ ID NO: 310617 - DNA, 120 bp, Artificial Sequence
  ENSG00000134333_14 (sequence is synthesized)
tcctggctccttcactgaacatgcctagtccaacattttttcccagtgagtcacatcctgggatccagtgtataaatccaatatcatgtcttgtgcataattcttccaaaggatcttatt

SEQ ID NO: 310618 - DNA, 120 bp, Artificial Sequence
  ENSG00000134333_15 (sequence is synthesized)
ttgtgaactatatcagtagtgtacattaccatataatgtaaaaagatctacatacaaacaatgcaaccaactatccaagtgttataccaactaaaacccccaataaaccttgaacagtga

SEQ ID NO: 310619 - DNA, 120 bp, Artificial Sequence
  ENSG00000134333_16 (sequence is synthesized)
acgattttttctaacagggatattattgactaatagcagaggatgtaatagtcaactgagttgtattggtaccacttccattgtaagtcccaaagtattatatatttgataataatgcta

SEQ ID NO: 310620 - DNA, 120 bp, Artificial Sequence
  ENSG00000134333_17 (sequence is synthesized)
atcataattggaaagtaacattctatatgtaaatgtaaaatttatttgccaactgaatataggcaatgatagtgtgtcactatagggaacacagatttttgagatcttgtcctctggaag

SEQ ID NO: 310621 - DNA, 86 bp, Artificial Sequence
  ENSG00000134333_18 (sequence is synthesized)
caggtgggctgatcactggaggccaggaattggggaccagcctggccaacacaacaaaaccccatctgttaaaaaaacaaaacaaa

SEQ ID NO: 310622 - DNA, 90 bp, Artificial Sequence
  ENSG00000134333_19 (sequence is synthesized)
caacacaacaaaaccccatctgttgtaaccttggtggatgtctactcaagttttctgcacatttttctgaaaatacaactgtgaccctta

SEQ ID NO: 310623 - DNA, 120 bp, Artificial Sequence
  ENSG00000134333_20 (sequence is synthesized)
gaaccctcaggaggctatacttacacccaaacgtcgatattccttttccacgctaaggtatgggccttcactcttcacagaccctgtcattaggcctttcaactctcttttggcaaccat

SEQ ID NO: 310624 - DNA, 120 bp, Artificial Sequence
  ENSG00000134333_21 (sequence is synthesized)
taggttttttcccctccctttttagtcatctctagtgatttatagtggcaaatacccccaaaggaagtaaaatagcttaaaaaaatctcttggttaataaacattaaagaagctgtagtg

SEQ ID NO: 310625 - DNA, 120 bp, Artificial Sequence
  ENSG00000134333_22 (sequence is synthesized)
actgggactatagggtatgctaccatgcccggctaatttttttactttttgtagagatggggacccactgtgttgcccaggcctgtcttgaaccactgggctcaagtgatcctccctcct

SEQ ID NO: 310626 - DNA, 120 bp, Artificial Sequence
  ENSG00000134333_23 (sequence is synthesized)
tagccttccgaagtactgggattgcaggtgtgaaccactgtgcccggctttagacttaaatgttttatcaggcttgaaatcctagctctttaaagattttgttttaaatgccgggtgcaa

SEQ ID NO: 310627 - DNA, 120 bp, Artificial Sequence
  ENSG00000134333_24 (sequence is synthesized)
gagcctgggaacaatttcacttaggtgcctgtgaatatcaaagtttcaatttctggcaaatggtttaaaatagaaatccaatttgtccatgctatgcaaaccatctgaattagaatgtaa

SEQ ID NO: 310628 - DNA, 120 bp, Artificial Sequence
  ENSG00000134333_25 (sequence is synthesized)
tgagtaaagcttaaaccttaggtctgtatttaaccacattgtgttacttacttgcccccacatcctttcacacacgaagttgagaatagggtaaataaatgagcctgttcagctaatact

SEQ ID NO: 310629 - DNA, 120 bp, Artificial Sequence
  ENSG00000134333_26 (sequence is synthesized)
cttggcttgaccctttcacacttaacagcaccagccaagaaacctgaatgtgagcccaaatagtgtctattttgatacctgaaaatcactggccaccttgctgatgggcaactcccttca

SEQ ID NO: 310630 - DNA, 120 bp, Artificial Sequence
  ENSG00000134333_27 (sequence is synthesized)
tcactggtttaactctcttgtgccatagggtatctagaagcaaaatatgtttgttaagtgtaaagctgtctctgcttaaaaacaagtccccctaccaccaccaccacacacacacacaca

SEQ ID NO: 310631 - DNA, 120 bp, Artificial Sequence
  ENSG00000134333_28 (sequence is synthesized)
cacacacacacacacacacacgaaattgcctgttcctgggctgataggacaccagttaagtagaaacaggagtatggaagagtgtgaacgttgagcttggggatcaaaaatttgaggata

SEQ ID NO: 310632 - DNA, 120 bp, Artificial Sequence
  ENSG00000134333_29 (sequence is synthesized)
caaaaatttgaggatatgtaagaaattaataggagaatcaaataataaacttgatttcctccagctctccctaattgtagttacataaagttacaacttgactaaaactacaaggaagat

SEQ ID NO: 310633 - DNA, 120 bp, Artificial Sequence
  ENSG00000134333_30 (sequence is synthesized)
gttgacatgctcttcctccatttaagaagccataatgataaaactctaagaacaagaaaggtttgtggagcatttatggaacaaatttttgctgcctaggtaaaatttattctaaaggcc

SEQ ID NO: 310634 - DNA, 120 bp, Artificial Sequence
  ENSG00000134333_31 (sequence is synthesized)
gacgaccgcccgacgtgcattcccggtacggtagggccctgcgcgcacggcgccagagggatgggcgggtagagccaactgcctctggttctgctggcctccgctgctcgcgaagggatt

SEQ ID NO: 310635 - DNA, 120 bp, Artificial Sequence
  ENSG00000134333_32 (sequence is synthesized)
cctgctcccgggaggtgtaggagccgctttccagaagcacagcccagagacgtctgggcggcggcccacacaacgcatgtgttcggagctcgccgcgctctgcttttgctctaagcggga

SEQ ID NO: 310636 - DNA, 120 bp, Artificial Sequence
  ENSG00000134333_33 (sequence is synthesized)
gtgctgcagccgctgccgccgattccggatctcattgccacgcgcccccgacgaccgcccgacgtgcattcccggtgggctccgtgagggcagctgctgcctgcagattatagggagccc

SEQ ID NO: 310637 - DNA, 120 bp, Artificial Sequence
  ENSG00000134333_34 (sequence is synthesized)
taaaactctaagaacaagaaagactataatgtaactgcaaactccaagctggtcattatcacggctggggcacgtcagcaagagggagaaagccgtcttaatttggtccagcgtaacgtg

SEQ ID NO: 310638 - DNA, 120 bp, Artificial Sequence
  ENSG00000134333_35 (sequence is synthesized)
aactgtattattacatttcatgtaacagtatttagatttatgcactcattcggataactttctgtgaaacaaacttttgaaatatgataatacaccaaaagtgtatctgaaattaaaaag

SEQ ID NO: 310639 - DNA, 120 bp, Artificial Sequence
  ENSG00000134333_36 (sequence is synthesized)
aatcaaaggttgtcaggctggagacccagttcctaaaattcattattctgtattaacatgcatggattgactaccaatgaaaaggaagggtccatgattttaaatgagccaaaattcttt

SEQ ID NO: 310640 - DNA, 120 bp, Artificial Sequence
  ENSG00000134333_37 (sequence is synthesized)
taaagtgatttttgaattgaaaatgacaattcaaaaattgtcatttattggtaaaattatatgggaaatcataagttctcccactcaaatctcattgcccctgtgccttggatagcaatt

SEQ ID NO: 310641 - DNA, 120 bp, Artificial Sequence
  ENSG00000134333_38 (sequence is synthesized)
tgagtcactatgcccggccagaacatttcttactaatttcaagtcttgatgctggtcaatatcacctagttaaatgaataacaacctaaaattggtgtgtaggatggaatttgagagagt

SEQ ID NO: 310642 - DNA, 120 bp, Artificial Sequence
  ENSG00000134333_39 (sequence is synthesized)
agacagagcagttttatataattggaagttattctagcaactgccagtccagtgttctgcttccacatctgcagtggtggaactcctatagagctcgcttcagtggggagacagggctgg

SEQ ID NO: 310643 - DNA, 120 bp, Artificial Sequence
  ENSG00000134333_40 (sequence is synthesized)
agagagggtcagtgctatctatgtagggtgtaatctgtaagtcagcttttgaaatggggtgccctctactttgaatatctcgatactgtactaataaagtaacagaactctcctatgcca

SEQ ID NO: 310644 - DNA, 120 bp, Artificial Sequence
  ENSG00000134333_41 (sequence is synthesized)
ccacctcagcctcccaaagtgttgggataacaggtgtgagttgtcatgcccagccaaaactactttttgaataattaatggacttgatatacatagtgtagaggcttaaaaatattaaca

SEQ ID NO: 310645 - DNA, 120 bp, Artificial Sequence
  ENSG00000134333_42 (sequence is synthesized)
tattaacaaaattattggttagccatgatcaatatcaagatcctgaaaagccatatatctggagtagcctattattatctaatgatcacctagtatctggttaagtgttttcttcatagt

SEQ ID NO: 310646 - DNA, 120 bp, Artificial Sequence
  ENSG00000134333_43 (sequence is synthesized)
atattataatccatgcttgacttaaattctttttccagatggtctccatttgttgcttagggtagagtgcagttgcacaattatggctcaccacagcctcgaaccctgggctcaagcaat

SEQ ID NO: 310647 - DNA, 120 bp, Artificial Sequence
  ENSG00000134339_0 (sequence is synthesized)
tggcagacagggacccgcagctcagctacagcacagatcagcaccatgaagcttctcacgggcctggttttctgctccttggtcctgagtgtcagcagccgaagcttcttttcgttcctt

SEQ ID NO: 310648 - DNA, 120 bp, Artificial Sequence
  ENSG00000134339_1 (sequence is synthesized)
ggcgaggcttttgatggggctcgggacatgtggagagcctactctgacatgagagaagccaattacatcggctcagacaaatacttccatgctcgggggaactatgatgctgccaaaagg

SEQ ID NO: 310649 - DNA, 120 bp, Artificial Sequence
  ENSG00000134339_2 (sequence is synthesized)
ctcgctggccgatcaggctgccaataaatggggcaggagtggcagagaccccaatcacttccgacctgctggcctgcctgagaaatactgagcttcctcttcactctgctctcaggagac

SEQ ID NO: 310650 - DNA, 120 bp, Artificial Sequence
  ENSG00000134339_3 (sequence is synthesized)
ctggctatgaggccctcggggcagggatacaaagttagtgaggtctatgtccagagaagctgagatatggcatataataggcatctaataaatgcttaagaggtggaatttgttgaaaca

SEQ ID NO: 310651 - DNA, 120 bp, Artificial Sequence
  ENSG00000134339_4 (sequence is synthesized)
agggacccgcagctcagctacagcacagatcaggtgaggagcacaccaaggagtgatttttaaaacttactctgttttctctttcccaacaagattatcatttcctttaaaaaaaatagt

SEQ ID NO: 310652 - DNA, 120 bp, Artificial Sequence
  ENSG00000134339_5 (sequence is synthesized)
agacagggacccgcagctcagctacagcacagatcagttatcctggggcatacagccataccattctgaaggtgtcttatctcctctgatctagagagcaccatgaagcttctcacgggc

SEQ ID NO: 310653 - DNA, 120 bp, Artificial Sequence
  ENSG00000134339_6 (sequence is synthesized)
ggacctgggggtgcctgggctgcagaagtgatcagtttattttcagctgaactgtagagagtgaaggaagaagccttttttcttcactcctacatgacccaggcattgatccaggcaatg

SEQ ID NO: 310654 - DNA, 120 bp, Artificial Sequence
  ENSG00000134339_7 (sequence is synthesized)
aagattcagtgtaaataaccaccactaacaagaccatggcctttggaacctgtgctaagaggcatggatgagctccctcagcatgtggatggagactgaagagaggtctgaaggctcagt

SEQ ID NO: 310655 - DNA, 120 bp, Artificial Sequence
  ENSG00000134339_8 (sequence is synthesized)
aggagcagctgttgggaaaggaggaaaactaggaaagcatggtgttccagaatccctgatggagatattgattagtagtatcagattctgcttagcagttgaggagttcacctttggctt

SEQ ID NO: 310656 - DNA, 120 bp, Artificial Sequence
  ENSG00000134339_9 (sequence is synthesized)
aagcaacatggagtcattgactatctcgtgaaggtggttgcaggagaaggtctggagaactaaatggagcagtgataagagagaatgggagatggtatgataggactcctggacacccca

SEQ ID NO: 310657 - DNA, 120 bp, Artificial Sequence
  ENSG00000134339_10 (sequence is synthesized)
gacatcaatcaaaacaccacagacaagaaggtgtggatacaaaaactagcagttagaagaaataatagaaaatgaactccaactacttctgaaaaaaaagtaatgagggcaattaataca

SEQ ID NO: 310658 - DNA, 120 bp, Artificial Sequence
  ENSG00000134339_11 (sequence is synthesized)
ttgaagaaagcctcaataagtacaacagtgtagtactgacttatatatagaaaaaacctgatcagtggaaccaaatcctcagaattagacataagtgcatatgagaattttgtatgtgat

SEQ ID NO: 310659 - DNA, 120 bp, Artificial Sequence
  ENSG00000134339_12 (sequence is synthesized)
gggtgcctgggctgcagaagtgatcaggctgaagtgccatggcatgatcatggctcactgcaacctcgacctcccggggctcaagagatcctcccacttcagcctcttgaataactggga

SEQ ID NO: 310660 - DNA, 120 bp, Artificial Sequence
  ENSG00000134339_13 (sequence is synthesized)
ggattacaggcatgagtcactgagcccagcctactgttatatttatttttgtgtcggtttgaggctgcccagattcacattgtttctggggtcgtctgtgagggtgtttccagaggagat

SEQ ID NO: 310661 - DNA, 120 bp, Artificial Sequence
  ENSG00000134339_14 (sequence is synthesized)
tgtgagggtgtttccagaggagattaacatttgaattggacttaataaagtagattgctattctcaatgcaactgggcatcacccaatctgttgaaggcttgaatagaacaaaaatagag

SEQ ID NO: 310662 - DNA, 120 bp, Artificial Sequence
  ENSG00000134339_15 (sequence is synthesized)
gaaggacagatttgcctcccttttcccctgcctcactgcttgagttggacatctcctctcatcttctcttgccctcaaattggatttacgtgatcagttgctctggttctcaggcctttg

SEQ ID NO: 310663 - DNA, 120 bp, Artificial Sequence
  ENSG00000134339_16 (sequence is synthesized)
aactcagactgaattacactttcctgagtttctagcttgcagagggcagatcgtgggacttctcagccccaattatcttgtgagccaattccttacaataaataaatacatacatacata

SEQ ID NO: 310664 - DNA, 120 bp, Artificial Sequence
  ENSG00000134339_17 (sequence is synthesized)
ggacctgggggtgcctgggctgcagaagtgatcagagaagatgactgaggaatacaaccacaactggatggactttttcaaaagatgacacctgcttatttgcctcattcaaatttcaag

SEQ ID NO: 310665 - DNA, 120 bp, Artificial Sequence
  ENSG00000134343_0 (sequence is synthesized)
ggagagcgaagtgccggctacagcaggtgtcggattgcagtgcgctcgctgaggctccggaccttggagcgtctagagtctggctactgttcctccgcctccctctcgggcagctcccta

SEQ ID NO: 310666 - DNA, 120 bp, Artificial Sequence
  ENSG00000134343_1 (sequence is synthesized)
agccggctgggacgcgcagagtgaaaatggtccaccattcaggctccattcagtcctttaaacagcaaaaaggtatgaatataagcaagagtgagataacaaaagaaacttcgttaaaac

SEQ ID NO: 310667 - DNA, 120 bp, Artificial Sequence
  ENSG00000134343_2 (sequence is synthesized)
cgtctcggagatccctgccttgcctcgcccagagctacgcttactcaaagagcttgagccagtctacttccctcttccagtcaaccgagagtgaatctcaggctcccacatctataacct

SEQ ID NO: 310668 - DNA, 120 bp, Artificial Sequence
  ENSG00000134343_3 (sequence is synthesized)
taatctccactgacaaagcagagcaagttaatactgaggagaataaaaacgactctgtgctgagatgttcatttgctgacctcagcgatttttgtttggccctaggaaaagataaggatt

SEQ ID NO: 310669 - DNA, 120 bp, Artificial Sequence
  ENSG00000134343_4 (sequence is synthesized)
acacggatgaatcagaacacgctacttatgaccgatctcgtctcattaatgactttgttatcaaagataaatctgaattcaagacaaaattatctaagaatgacatgaattacatagcat

SEQ ID NO: 310670 - DNA, 120 bp, Artificial Sequence
  ENSG00000134343_5 (sequence is synthesized)
ccagtggacctctgttcaaagatggcaaaaagagaattgattacatcttggtttatagaaagacaaatatacaatatgataaaagaaacacatttgaaaagaacctcagagcagaaggct

SEQ ID NO: 310671 - DNA, 120 bp, Artificial Sequence
  ENSG00000134343_6 (sequence is synthesized)
tgatgttggagaaggagccagctattgcaagccccgatatcatgtttattaaaattcacattccatgggacacgctgtgcaagtatgcagagaggctgaatatcaggatgcccttcagga

SEQ ID NO: 310672 - DNA, 120 bp, Artificial Sequence
  ENSG00000134343_7 (sequence is synthesized)
aaaaatgctattacactgacgggaggagcaaatcaatgggcaggatgcaaacttattttagaagaatcaaaaactggatggcccaaaacccaatggttcttgacaagtcagcttttccag

SEQ ID NO: 310673 - DNA, 120 bp, Artificial Sequence
  ENSG00000134343_8 (sequence is synthesized)
acctagaggagtcagactgctatactggccccttcagccgtgcacggattcaccacttcataataaataataaagacaccttcttcagcaatgctactcgaagcagaatagtctatcaca

SEQ ID NO: 310674 - DNA, 120 bp, Artificial Sequence
  ENSG00000134343_9 (sequence is synthesized)
tgctggaacgcaccaaatatgaaaatggaatatcaaaagtgggtatccgtaaacttataaacaatggctcatacatagcagcgtttccaccacatgagggagcctacaaaagtagccagc

SEQ ID NO: 310675 - DNA, 120 bp, Artificial Sequence
  ENSG00000134343_10 (sequence is synthesized)
ccattaaaacccatggacctcagaataacagacatctattatatgagcgctgggcacgctggggaatgtggtataagcatcagcctctggatttaatcaggctatactttggtgagaaga

SEQ ID NO: 310676 - DNA, 120 bp, Artificial Sequence
  ENSG00000134343_11 (sequence is synthesized)
ttggactatactttgcttggctgggatggtatactggaatgttgattcctgcagcaattgttggtttgtgcgttttcttctatggattatttacaatgaataatagtcaagtaagccaag

SEQ ID NO: 310677 - DNA, 120 bp, Artificial Sequence
  ENSG00000134343_12 (sequence is synthesized)
aaatttgtaaagccactgaagtctttatgtgccctctctgtgacaagaactgctccctgcagagactcaacgacagctgtatctatgccaaggtgacatatttgttcgataatggaggga

SEQ ID NO: 310678 - DNA, 120 bp, Artificial Sequence
  ENSG00000134343_13 (sequence is synthesized)
cagtcttctttgctatttttatggcaatatgggccacagtcttcctggagttttggaaaaggagaaggagtatactgacctatacttgggaccttatcgaatgggaagaagaggaggaaa

SEQ ID NO: 310679 - DNA, 120 bp, Artificial Sequence
  ENSG00000134343_14 (sequence is synthesized)
cacttcgtccccagtttgaagccaagtattacaagatggagattgtaaatcccatcacgggaaaacctgaaccacatcagccttcctcagacaaagtcactcgtcttcttgtttctgtct

SEQ ID NO: 310680 - DNA, 120 bp, Artificial Sequence
  ENSG00000134343_15 (sequence is synthesized)
caggaatattcttcatgatatccttggtgatcactgcagtgtttggagttgtggtgtaccgcctggttgtcatggaacagtttgcatcattcaagtggaatttcatcaaacaatactggc

SEQ ID NO: 310681 - DNA, 120 bp, Artificial Sequence
  ENSG00000134343_16 (sequence is synthesized)
agtttgcaacatctgctgctgctgtctgtatcaatttcataatcattatgttgctgaatcttgcttatgaaaaaattgcttacctcctcaccaatttagaatatcctcgaacagaatcag

SEQ ID NO: 310682 - DNA, 120 bp, Artificial Sequence
  ENSG00000134343_17 (sequence is synthesized)
agtgggaaaacagcttcgccctgaagatgttcctcttccagtttgtcaatttaaacagttccatcttctatatcgctttctttttgggaagattcgtaggccacccaggaaaatacaata

SEQ ID NO: 310683 - DNA, 120 bp, Artificial Sequence
  ENSG00000134343_18 (sequence is synthesized)
aactttttgaccggtggagactggaggaatgtcatcctagtggctgtttgatagacctctgcctccagatgggtgtcatcatgtttttgaagcaaatatggaacaacttcatggaactag

SEQ ID NO: 310684 - DNA, 120 bp, Artificial Sequence
  ENSG00000134343_19 (sequence is synthesized)
gatacccgttgatccagaactggtggtcacgacataaaatcaagcggggaatacatgatgcttccatacctcagtgggaaaatgattggaatctgcagcccatgaaccttcatggactga

SEQ ID NO: 310685 - DNA, 120 bp, Artificial Sequence
  ENSG00000134343_20 (sequence is synthesized)
tggatgagtacttagaaatggttttgcaatttggttttaccaccatctttgttgcggcttttcctctagcccctcttttggctttgttaaacaatatcattgaaatcaggctggatgcat

SEQ ID NO: 310686 - DNA, 120 bp, Artificial Sequence
  ENSG00000134343_21 (sequence is synthesized)
acaaatttgtcactcaatggcggaggcctttgccagcccgagcaactgacataggtatctggcttggaattctcgaaggaatcggtatattggctgtgatcaccaatgcatttgtaattg

SEQ ID NO: 310687 - DNA, 120 bp, Artificial Sequence
  ENSG00000134343_22 (sequence is synthesized)
ctattacttctgattacatcccacgttttgtttatgaatacaaatatggcccctgtgcaaatcatgtagaaccaagtgaaaattgcttgaagggatatgtcaacaatagcctatccttct

SEQ ID NO: 310688 - DNA, 120 bp, Artificial Sequence
  ENSG00000134343_23 (sequence is synthesized)
ttgacctgagtgagcttggtatgggaaaatctggttattgcaggtacagagactacagaggcccgccctggagttccaaaccctatgagtttactttacaatactggcatatccttgctg

SEQ ID NO: 310689 - DNA, 120 bp, Artificial Sequence
  ENSG00000134343_24 (sequence is synthesized)
tcgcatacctgattccagacgtaccaaagggtctacatgaccgaatacgacgagagaagtacttagttcaagaaatgatgtatgaggctgaactggaacatttgcaacaacaacggagaa

SEQ ID NO: 310690 - DNA, 120 bp, Artificial Sequence
  ENSG00000134343_25 (sequence is synthesized)
aaagtggtcagcctgttcaccatgaatggccttagttgacacctgttacccattaggggtgataacattaatgggaagaaatgatggcaactttgaatgctaggtgaaatctaggaggaa

SEQ ID NO: 310691 - DNA, 120 bp, Artificial Sequence
  ENSG00000134343_26 (sequence is synthesized)
ggcatacttggcaaaccacatgtataatatgctacttggaaatgtatcacagccatctctgggatttgaaatatccagacttgtagggaagaaaacaatgacttgacgaccttaaaaagg

SEQ ID NO: 310692 - DNA, 120 bp, Artificial Sequence
  ENSG00000134343_27 (sequence is synthesized)
gttagattgacattgcaggaagccaggatgtaattctcagaaccagtctcagggagatatatgcttggagaactctgccttccatcaactgcagtgtaatgggaaagagggtggtgaggt

SEQ ID NO: 310693 - DNA, 120 bp, Artificial Sequence
  ENSG00000134343_28 (sequence is synthesized)
tttgaaagacagatttccatgtaaatgtgcacaagccaggcatggcttaaaatatcatgcagtcttcactcacatactaatttgactttggaaagtatggttgagttcagatacttataa

SEQ ID NO: 310694 - DNA, 120 bp, Artificial Sequence
  ENSG00000134343_29 (sequence is synthesized)
gaaatgacttaaacaaatccttgccttggctgccagaactctacatcccttcagtttacaggttggtaggaattgcccatgtctcttgctgagattatggatctgtgccacaggggattt

SEQ ID NO: 310695 - DNA, 120 bp, Artificial Sequence
  ENSG00000134343_30 (sequence is synthesized)
atgctgctttacattgactatgcagttgaagagttgcacatcacctttagtagtcaaaccaaaaatctaagattccaaaaagaacagcattcattgaaataatattccattgcattggct

SEQ ID NO: 310696 - DNA, 120 bp, Artificial Sequence
  ENSG00000134343_31 (sequence is synthesized)
acttcaagtctcttttacccctggcagagccagttgcagtgcaattttttgtactaaatgccaataaagccacatacttataaactatgaatggctattcttatatagtttagaacacaa

SEQ ID NO: 310697 - DNA, 120 bp, Artificial Sequence
  ENSG00000134343_32 (sequence is synthesized)
ctaatccatactttattgtggaaggctgttttatagtttatttaattttttctctatgatttattacaactctcacggaatattaacttgaaatgctgtaaatacgttggttttccttgt

SEQ ID NO: 310698 - DNA, 120 bp, Artificial Sequence
  ENSG00000134343_33 (sequence is synthesized)
ccctttgcaccttgacagtacgtagtatacattgtggtttatgcagctctgacaccagtttttgctattgtaatatgtttattcgggaaaactgaggccagatgctctgcaacacttacg

SEQ ID NO: 310699 - DNA, 120 bp, Artificial Sequence
  ENSG00000134343_34 (sequence is synthesized)
ctttttcaacaatgtgcactcttactcatgaactaatgaaaataatgcatgaatataaatctatattatttgctaaaaaaagaaaaaacatttgtgttttagtttcttttttcatgactg

SEQ ID NO: 310700 - DNA, 120 bp, Artificial Sequence
  ENSG00000134343_35 (sequence is synthesized)
aagggagttttatgttattatttcttccatagttttgttttggtttatttttaacaacgctctagaaacaaagtcaaattaatcacaaaagacataattttgctttgttgtggaatttct

SEQ ID NO: 310701 - DNA, 120 bp, Artificial Sequence
  ENSG00000134343_36 (sequence is synthesized)
atttcaacgtcaactctgtatctatgagtatgtctgttccacagacagatgaggcaggagtgatggggcactcaagaaagttcagaggaggcataagctatggaggttggaaaggaagaa

SEQ ID NO: 310702 - DNA, 120 bp, Artificial Sequence
  ENSG00000134343_37 (sequence is synthesized)
agagaagagctgaagtaaatgtatggtagaaattaagacgtttctttgcaaaacaaggaaatcacacatatgcacacatacatatttatggttactatgattgttattatttgtccaatc

SEQ ID NO: 310703 - DNA, 120 bp, Artificial Sequence
  ENSG00000134343_38 (sequence is synthesized)
aagcaaagcaccattatttctaacatataaaagaccagatcaaacacaatggaaataaagctactacatatatatgccagtatttctctagtaagattatgtttctcttactagaaaact

SEQ ID NO: 310704 - DNA, 120 bp, Artificial Sequence
  ENSG00000134343_39 (sequence is synthesized)
attttctaaatattaacactgaaaatgttttgttagcttttccttctttctctccagaagaaacatggatagatgatagctgtttcattgtttgtttttgtcaagcatattcactttcct

SEQ ID NO: 310705 - DNA, 120 bp, Artificial Sequence
  ENSG00000134343_40 (sequence is synthesized)
ccttgtcctctgattctgagcaaagggcctcagactctgaacttccctcaagtgccgttgttatgtgaaactcttccattcagattccagagaggttctcatgctcccccccctccttat

SEQ ID NO: 310706 - DNA, 120 bp, Artificial Sequence
  ENSG00000134343_41 (sequence is synthesized)
ttgtagcaatcgtagcaactaattccactaagtacaagggagttttttacactcctccatttttatagcatctgcatttctttttctttgttaggtacatgtatacacctgcctgagtat

SEQ ID NO: 310707 - DNA, 120 bp, Artificial Sequence
  ENSG00000134343_42 (sequence is synthesized)
aaatactctctctacctaataataacatcaaccaacatcttttccaaattagggccacagaacagcaacatttgtctgacagtagtataaagaataatgatagctctatccttaagaagt

SEQ ID NO: 310708 - DNA, 120 bp, Artificial Sequence
  ENSG00000134343_43 (sequence is synthesized)
atttcctttcctttttatatagtcccgttagggtttaaaaccatattgatcaactagaaagaaaaatatgaaaagagaaaaatattttaatttaaaaattgtaatacattgatttataaa

SEQ ID NO: 310709 - DNA, 120 bp, Artificial Sequence
  ENSG00000134343_44 (sequence is synthesized)
atgccttctctgatacttttgaaacagatgtgaaaaacagaaaaagaaaaaattgtctgaaatgtttattttgcaaaacagtgcaatagaatctagttatgccttcatcactgttgacag

SEQ ID NO: 310710 - DNA, 120 bp, Artificial Sequence
  ENSG00000134343_45 (sequence is synthesized)
taaatactgacagccccttgcagtgtgttagttttagatcactctgttttagttgagagaaatgttttatatcatggtttttatatgaatacaaattatttctcaaagatttatagcaca

SEQ ID NO: 310711 - DNA, 120 bp, Artificial Sequence
  ENSG00000134343_46 (sequence is synthesized)
cactattctcaggaattctgtattacatgaatgctgcttatatattttcatattctaacttgtcttttcaagcaaataactaatatatatgtgcatgcagtctgccttgacaagttgttc

SEQ ID NO: 310712 - DNA, 120 bp, Artificial Sequence
  ENSG00000134343_47 (sequence is synthesized)
caagctgaagagctttcactgtacaatgtgtggaaaatcaccatagatcatggctgaaatagtttgtaattgtctgagtctgtgcacgtacttttagataaaatgctgctgagtgactgc

SEQ ID NO: 310713 - DNA, 120 bp, Artificial Sequence
  ENSG00000134343_48 (sequence is synthesized)
atgatgagatacaacttctgaatgctgcacattcttccaaaatgatccttagcacaatctattgtatgatggaatgaatagaaaactttttcactcaataaattattatttgatatggta

SEQ ID NO: 310714 - DNA, 120 bp, Artificial Sequence
  ENSG00000134343_49 (sequence is synthesized)
aaatgattattcaaactctggcatttagagagtaggctaaaaaccctccagtcaaatgctttgtgtagcactcagtatgtaacattctagttaatggaaaaagcaggcggtgaaagggag

SEQ ID NO: 310715 - DNA, 120 bp, Artificial Sequence
  ENSG00000134343_50 (sequence is synthesized)
aactttcagttgtcacactgaagagtgctttaaagaagattgtcatttgagactgttgtcagcaatgaaggattccaaatgcagctgaactcagaattctgactgtgaatgacatgaatt

SEQ ID NO: 310716 - DNA, 120 bp, Artificial Sequence
  ENSG00000134343_51 (sequence is synthesized)
gttggaacagatataatcacttatggtttagaaagaaaaatatgtatcacatgactttataaaatacatagtttttttctaacaaatgttaaataaatacatgcacatagccctattaaa

SEQ ID NO: 310717 - DNA, 120 bp, Artificial Sequence
  ENSG00000134343_52 (sequence is synthesized)
tatgtattcactttttaatctatataattctgtacaatttaagtattttcaaagggcatgactatttttgcaattttaaaaactgaataaggaatgattatagttatgtcaagtagaaaa

SEQ ID NO: 310718 - DNA, 120 bp, Artificial Sequence
  ENSG00000134343_53 (sequence is synthesized)
ctttatgaaaaggaaaataacattttgaaagaaaagaatttgccaaacgattaatgtctgttttttagtgctggaactatgagtggttttcttcccaaatctttttcttttgtgagtttt

SEQ ID NO: 310719 - DNA, 120 bp, Artificial Sequence
  ENSG00000134343_54 (sequence is synthesized)
taaaaaaatgttcttggaagaatttattttttgtagtgaaacaataaaagtagcaagactcactagaaaaaaaatagaaagaaggaaaagcgtatcctccataatcctagtatcagagaa

SEQ ID NO: 310720 - DNA, 120 bp, Artificial Sequence
  ENSG00000134343_55 (sequence is synthesized)
ttttacctggttcatttctgtcgtcataaagtcgccgatgggaaaatgaatccgttttcctttttccacacaacaagtagcccacaagagtaagcaatgagacacccagaatagcaccta

SEQ ID NO: 310721 - DNA, 120 bp, Artificial Sequence
  ENSG00000134343_56 (sequence is synthesized)
gagtttctgagcaatttttatttttctcttttgttctctctcacaggtctgcaaaagttgtgcttttctcatcgtgagcttgagaagagtgtgtgggctgccaaaggcaaatataatgaa

SEQ ID NO: 310722 - DNA, 120 bp, Artificial Sequence
  ENSG00000134343_57 (sequence is synthesized)
taaagaattcaatagtgtgaactttactttacatagttatatgggaattttgcaatgtcagttttaaaatttgaactggataatttttctcctgaaggcttcagacatgagcacgcttcc

SEQ ID NO: 310723 - DNA, 120 bp, Artificial Sequence
  ENSG00000134343_58 (sequence is synthesized)
aactcatgttttgctttaccctgtttgactgaactctctggtgattctagtcaactggaacttcagcactccagttctgtcccgactgatgacccttcttgctgtgtcctcacatgatgg

SEQ ID NO: 310724 - DNA, 120 bp, Artificial Sequence
  ENSG00000134343_59 (sequence is synthesized)
ctataaaagcaattagtctattcgtgagatctctgcccccatgacctaatcacatgccaaagcccccacctccagacactatcacctcgggggttaggatttcaatataagaattgggag

SEQ ID NO: 310725 - DNA, 120 bp, Artificial Sequence
  ENSG00000134343_60 (sequence is synthesized)
atgtcttcacttagcccattttacttttcactgcagcctctctgagatgggataggtgctgctgtggtttaaaggcaaaatatatcttcaagaaaaaagactctaaaattcatccatcct

SEQ ID NO: 310726 - DNA, 120 bp, Artificial Sequence
  ENSG00000134343_61 (sequence is synthesized)
attgaagttaattgtctaggaaaggcattaacacagaaaacctcttagagtcagctctgcatgttttatttcctttggatttccaagtgaaaataattacaggaaagcctatagttatga

SEQ ID NO: 310727 - DNA, 120 bp, Artificial Sequence
  ENSG00000134352_0 (sequence is synthesized)
tattacatgtgtctgttgcagaaatatccgcgcaagatgttgacgttgcagacttggctagtgcaagccttgtttattttcctcaccactgaatctacaggtgaacttctagatccatgt

SEQ ID NO: 310728 - DNA, 120 bp, Artificial Sequence
  ENSG00000134352_1 (sequence is synthesized)
ggttatatcagtcctgaatctccagttgtacaacttcattctaatttcactgcagtttgtgtgctaaaggaaaaatgtatggattattttcatgtaaatgctaattacattgtctggaaa

SEQ ID NO: 310729 - DNA, 120 bp, Artificial Sequence
  ENSG00000134352_2 (sequence is synthesized)
acaaaccattttactattcctaaggagcaatatactatcataaacagaacagcatccagtgtcacctttacagatatagcttcattaaatattcagctcacttgcaacattcttacattc

SEQ ID NO: 310730 - DNA, 120 bp, Artificial Sequence
  ENSG00000134352_3 (sequence is synthesized)
ggacagcttgaacagaatgtttatggaatcacaataatttcaggcttgcctccagaaaaacctaaaaatttgagttgcattgtgaacgaggggaagaaaatgaggtgtgagtgggatggt

SEQ ID NO: 310731 - DNA, 120 bp, Artificial Sequence
  ENSG00000134352_4 (sequence is synthesized)
ggaagggaaacacacttggagacaaacttcactttaaaatctgaatgggcaacacacaagtttgctgattgcaaagcaaaacgtgacacccccacctcatgcactgttgattattctact

SEQ ID NO: 310732 - DNA, 120 bp, Artificial Sequence
  ENSG00000134352_5 (sequence is synthesized)
gtgtattttgtcaacattgaagtctgggtagaagcagagaatgcccttgggaaggttacatcagatcatatcaattttgatcctgtatataaagtgaagcccaatccgccacataattta

SEQ ID NO: 310733 - DNA, 120 bp, Artificial Sequence
  ENSG00000134352_6 (sequence is synthesized)
tcagtgatcaactcagaggaactgtctagtatcttaaaattgacatggaccaacccaagtattaagagtgttataatactaaaatataacattcaatataggaccaaagatgcctcaact

SEQ ID NO: 310734 - DNA, 120 bp, Artificial Sequence
  ENSG00000134352_7 (sequence is synthesized)
tggagccagattcctcctgaagacacagcatccacccgatcttcattcactgtccaagaccttaaaccttttacagaatatgtgtttaggattcgctgtatgaaggaagatggtaaggga

SEQ ID NO: 310735 - DNA, 120 bp, Artificial Sequence
  ENSG00000134352_8 (sequence is synthesized)
tactggagtgactggagtgaagaagcaagtgggatcacctatgaagatagaccatctaaagcaccaagtttctggtataaaatagatccatcccatactcaaggctacagaactgtacaa

SEQ ID NO: 310736 - DNA, 120 bp, Artificial Sequence
  ENSG00000134352_9 (sequence is synthesized)
ctcgtgtggaagacattgcctccttttgaagccaatggaaaaatcttggattatgaagtgactctcacaagatggaaatcacatttacaaaattacacagttaatgccacaaaactgaca

SEQ ID NO: 310737 - DNA, 120 bp, Artificial Sequence
  ENSG00000134352_10 (sequence is synthesized)
gtaaatctcacaaatgatcgctatctagcaaccctaacagtaagaaatcttgttggcaaatcagatgcagctgttttaactatccctgcctgtgactttcaagctactcaccctgtaatg

SEQ ID NO: 310738 - DNA, 120 bp, Artificial Sequence
  ENSG00000134352_11 (sequence is synthesized)
gatcttaaagcattccccaaagataacatgctttgggtggaatggactactccaagggaatctgtaaagaaatatatacttgagtggtgtgtgttatcagataaagcaccctgtatcaca

SEQ ID NO: 310739 - DNA, 120 bp, Artificial Sequence
  ENSG00000134352_12 (sequence is synthesized)
gactggcaacaagaagatggtaccgtgcatcgcacctatttaagagggaacttagcagagagcaaatgctatttgataacagttactccagtatatgctgatggaccaggaagccctgaa

SEQ ID NO: 310740 - DNA, 120 bp, Artificial Sequence
  ENSG00000134352_13 (sequence is synthesized)
tccataaaggcataccttaaacaagctccaccttccaaaggacctactgttcggacaaaaaaagtagggaaaaacgaagctgtcttagagtgggaccaacttcctgttgatgttcagaat

SEQ ID NO: 310741 - DNA, 120 bp, Artificial Sequence
  ENSG00000134352_14 (sequence is synthesized)
ggatttatcagaaattatactatattttatagaaccatcattggaaatgaaactgctgtgaatgtggattcttcccacacagaatatacattgtcctctttgactagtgacacattgtac

SEQ ID NO: 310742 - DNA, 120 bp, Artificial Sequence
  ENSG00000134352_15 (sequence is synthesized)
atggtacgaatggcagcatacacagatgaaggtgggaaggatggtccagaattcacttttactaccccaaagtttgctcaaggagaaattgaagccatagtcgtgcctgtttgcttagca

SEQ ID NO: 310743 - DNA, 120 bp, Artificial Sequence
  ENSG00000134352_16 (sequence is synthesized)
ttcctattgacaactcttctgggagtgctgttctgctttaataagcgagacctaattaaaaaacacatctggcctaatgttccagatccttcaaagagtcatattgcccagtggtcacct

SEQ ID NO: 310744 - DNA, 120 bp, Artificial Sequence
  ENSG00000134352_17 (sequence is synthesized)
cacactcctccaaggcacaattttaattcaaaagatcaaatgtattcagatggcaatttcactgatgtaagtgttgtggaaatagaagcaaatgacaaaaagccttttccagaagatctg

SEQ ID NO: 310745 - DNA, 120 bp, Artificial Sequence
  ENSG00000134352_18 (sequence is synthesized)
aaatcattggacctgttcaaaaaggaaaaaattaatactgaaggacacagcagtggtattggggggtcttcatgcatgtcatcttctaggccaagcatttctagcagtgatgaaaatgaa

SEQ ID NO: 310746 - DNA, 120 bp, Artificial Sequence
  ENSG00000134352_19 (sequence is synthesized)
tcttcacaaaacacttcgagcactgtccagtattctaccgtggtacacagtggctacagacaccaagttccgtcagtccaagtcttctcaagatccgagtctacccagcccttgttagat

SEQ ID NO: 310747 - DNA, 120 bp, Artificial Sequence
  ENSG00000134352_20 (sequence is synthesized)
tcagaggagcggccagaagatctacaattagtagatcatgtagatggcggtgatggtattttgcccaggcaacagtacttcaaacagaactgcagtcagcatgaatccagtccagatatt

SEQ ID NO: 310748 - DNA, 120 bp, Artificial Sequence
  ENSG00000134352_21 (sequence is synthesized)
tcacattttgaaaggtcaaagcaagtttcatcagtcaatgaggaagattttgttagacttaaacagcagatttcagatcatatttcacaatcctgtggatctgggcaaatgaaaatgttt

SEQ ID NO: 310749 - DNA, 120 bp, Artificial Sequence
  ENSG00000134352_22 (sequence is synthesized)
caggaagtttctgcagcagatgcttttggtccaggtactgagggacaagtagaaagatttgaaacagttggcatggaggctgcgactgatgaaggcatgcctaaaagttacttaccacag

SEQ ID NO: 310750 - DNA, 120 bp, Artificial Sequence
  ENSG00000134352_23 (sequence is synthesized)
actgtacggcaaggcggctacatgcctcagtgaaggactagtagttcctgctacaacttcagcagtacctataaagtaaagctaaaatgattttatctgtgaattcagattttaaaaagt

SEQ ID NO: 310751 - DNA, 120 bp, Artificial Sequence
  ENSG00000134352_24 (sequence is synthesized)
cttcactctctgaagatgatcatttgcccttaaggacaaaaatgaactgaagtttcacatgagctatttccattccagaatatctgggattctactttaagcactacataaactgacttt

SEQ ID NO: 310752 - DNA, 120 bp, Artificial Sequence
  ENSG00000134352_25 (sequence is synthesized)
atcctcagactagctgaatgattttgtgctgtttcaggatgtttgcactgaagaaaaacagaaagcttatctgaaatttataaaactttttgttttgctacatagaaaacagaaggtatt

SEQ ID NO: 310753 - DNA, 120 bp, Artificial Sequence
  ENSG00000134352_26 (sequence is synthesized)
tgaataataagcagtgatatgcttagtgagcacagctatactgattttgattagaatagtcatcagagtggcttagggacagttaatataaaagaggagcaaggtgtagaccatcatcta

SEQ ID NO: 310754 - DNA, 120 bp, Artificial Sequence
  ENSG00000134352_27 (sequence is synthesized)
cttctgctaaaataacttaaaaagaggtccataggccataactacatgagcccagcttttgtaatctgacaaaaaaatgaggagcagcttcgtgtatatcagtgtacacggtattcctta

SEQ ID NO: 310755 - DNA, 120 bp, Artificial Sequence
  ENSG00000134352_28 (sequence is synthesized)
ggtcccttccattggtagtgatgctgcgagttattactggagaaaaggaattctagagctttaacttggcagattaaaagtactcattttttattcatcaataattagtaatctcactag

SEQ ID NO: 310756 - DNA, 120 bp, Artificial Sequence
  ENSG00000134352_29 (sequence is synthesized)
ttttcaaaaatttgcatattattgacaacctctttgaagatgcatttcacaaactcaacagagtgccatgataagagctagggatcccccaaactatctcaagcatctaaaaaattgcca

SEQ ID NO: 310757 - DNA, 120 bp, Artificial Sequence
  ENSG00000134352_30 (sequence is synthesized)
tttttaaaggcttaaattgtagtagtaaaggggaaaacaggaagtagtagtaaaggggaaaaaaaaccaataaagcatctaaaaaattggcatgttaaaaggcttaaattgctaatgtgt

SEQ ID NO: 310758 - DNA, 120 bp, Artificial Sequence
  ENSG00000134352_31 (sequence is synthesized)
atatatatatatatatacacacacatatcattgacttttcttaagacttcagagtactgggtagatgaacactttatacagtatatatcttcagcttaaatttgttttgagtattttttt

SEQ ID NO: 310759 - DNA, 120 bp, Artificial Sequence
  ENSG00000134352_32 (sequence is synthesized)
tttttatttttaaataagtaggcaaagatttaaatttttttatttttagtaaatgtttgaggcacactaagacaacttgggcaatatttgccaaaacaaaacagaaccccaaaaaatgta

SEQ ID NO: 310760 - DNA, 120 bp, Artificial Sequence
  ENSG00000134352_33 (sequence is synthesized)
catcttgttcttagcaaatatcattattgtagagacacttaataaagagatggtattttaatgtctgcagttctgaggtagggtggaacttagttctacattgtgatttaggaattttta

SEQ ID NO: 310761 - DNA, 120 bp, Artificial Sequence
  ENSG00000134352_34 (sequence is synthesized)
aaaccttttttcttcaagggagaagtgacccaggcctcgagtttagtgctaaagccgctagtgtacttatgctgtcccctaaccaccacgtgcgatatggaagcagatgctaaatatagg

SEQ ID NO: 310762 - DNA, 120 bp, Artificial Sequence
  ENSG00000134352_35 (sequence is synthesized)
ggttttcttagaaagtaagaggaaattagcaagcgttattagtgattgactactgctatcaagtgaattcaaaggaaacaggtttttatgccatatttaagttacagaaaccaggcatgc

SEQ ID NO: 310763 - DNA, 120 bp, Artificial Sequence
  ENSG00000134352_36 (sequence is synthesized)
aggttattggagaatagaaagctaagaaaacttggtatacatttacaatggaaatataattacactttttactctcagaatattgttcacattagacttcctgtttatcttttatattct

SEQ ID NO: 310764 - DNA, 120 bp, Artificial Sequence
  ENSG00000134352_37 (sequence is synthesized)
tgcatttatataatgcctcatcctttcaaagttctttcacatattatatgatcttctttatgaaaaaaatagatgtttcattctgatatattcagtttcccactttaggcaaaagtagat

SEQ ID NO: 310765 - DNA, 120 bp, Artificial Sequence
  ENSG00000134352_38 (sequence is synthesized)
taatagaatgacgaattcaaagtagatgaggaaaatcaggcacagagaagtaaaggtagggatagacccaaatttacacaacaagataatgacatctccagcttttaagttgatcatcaa

SEQ ID NO: 310766 - DNA, 120 bp, Artificial Sequence
  ENSG00000134352_39 (sequence is synthesized)
aggctgggctggatttgtcttgctgtatgtgtcaggaaatttatacctattacattttccattttctcaaaatttaagtcacatgactaatatttagctgcaactttcctcataacaaat

SEQ ID NO: 310767 - DNA, 120 bp, Artificial Sequence
  ENSG00000134352_40 (sequence is synthesized)
agtgtcatgaagaatgttgtagtgtgaagtttgtacatttcagggtcagatatacaatatgaactcttaatctacaggaatgagaatggaggatcattgaaggccatgatataaacaaat

SEQ ID NO: 310768 - DNA, 120 bp, Artificial Sequence
  ENSG00000134352_41 (sequence is synthesized)
ttgcatgttgaagcctgtataaaacatggtacagtgagtgaatatacccccatccccaagaacactttatacatattaaatggatatatgattactgtgcaaaaattcattctggaaatg

SEQ ID NO: 310769 - DNA, 120 bp, Artificial Sequence
  ENSG00000134352_42 (sequence is synthesized)
aacatatatttgagcactaatatgtaatgtacacctgccctaaggagaaaataaattataaaactttttacattcaaaattactttcccaagcatgtcttagaataatctatgtgttgat

SEQ ID NO: 310770 - DNA, 120 bp, Artificial Sequence
  ENSG00000134352_43 (sequence is synthesized)
gcatgtaaattgtactttaggtaggcaaagaaatctggttatttatgtaaaaactagtctaataaagttagttagtggctttatcactttaaatctttagtgtccaaaagtggtgtttaa

SEQ ID NO: 310771 - DNA, 120 bp, Artificial Sequence
  ENSG00000134352_44 (sequence is synthesized)
agtaatagcacatcagaaaaccttgtctggacaaaactagttcactcactgcttctgcacctgcagttgctccctttagggttataaaataatgacccaaatgttacatgtgttgatatt

SEQ ID NO: 310772 - DNA, 120 bp, Artificial Sequence
  ENSG00000134352_45 (sequence is synthesized)
ataacttgtcagttactgatgtctgtggtatcctaccctcatctctgaaagggataatactgaataattattagaaaactataaaacttcacactttgtaccattaaaacctaaaatttt

SEQ ID NO: 310773 - DNA, 120 bp, Artificial Sequence
  ENSG00000134352_46 (sequence is synthesized)
aatcttgtccttttttactatggatcagtcggcactcgggaacagcagcaaggaaaaaaagcaaatttcattcacatgttctgtgttcatacctcttctctacctaattgttcatttaaa

SEQ ID NO: 310774 - DNA, 120 bp, Artificial Sequence
  ENSG00000134352_47 (sequence is synthesized)
tttcagccttattccttgataagggattttaccacatgaagtcatccagtgaccctagctcttattgtgaagttagtggagtatacttagaaatgttacaactttaaaatgttacaaaac

SEQ ID NO: 310775 - DNA, 120 bp, Artificial Sequence
  ENSG00000134352_48 (sequence is synthesized)
attcattaaagctcatatttaaagtagagcatctagtttgagaaatagaaatcaattattaaagatgtcttttttctacccatttaactagttaaaaccatgacatgtaaatgtagaagt

SEQ ID NO: 310776 - DNA, 120 bp, Artificial Sequence
  ENSG00000134352_49 (sequence is synthesized)
agaataatcatagaattccctaaaatatttctgtttactaacatatattgaccaagtacatcaagcaggagagatcttccttcattctgttatagtccacatcattctaattttgctcag

SEQ ID NO: 310777 - DNA, 120 bp, Artificial Sequence
  ENSG00000134352_50 (sequence is synthesized)
ttgttattaagagcatattcctaaaccatacacttttgtttcaataaagttttattttgttgagatgaataaaataacaaagttataagctgcataagacaaaagttcaattgttcaaaa

SEQ ID NO: 310778 - DNA, 120 bp, Artificial Sequence
  ENSG00000134352_51 (sequence is synthesized)
aaaatttactgggatagctttctattacaggtattgttagattatattgtgctgataagattactttctaaaaaatttgtacttttctgtaaattaaaagaatatggagtcataaaatgg

SEQ ID NO: 310779 - DNA, 120 bp, Artificial Sequence
  ENSG00000134352_52 (sequence is synthesized)
caagtgttttaggattagcctaaaattggacattgtcattgatttcaaagaaggtatgaactagcagtcttacagcctaattcttctttggactggtccttggcagcagttccttttcag

SEQ ID NO: 310780 - DNA, 120 bp, Artificial Sequence
  ENSG00000134352_53 (sequence is synthesized)
actcgataaacagaattcagatgatgtaagtcaaaacaaaactttacaaagccaagcgtattatcttttgcattaacctatttttttccatcatacatgctactagtatgtgcattagca

SEQ ID NO: 310781 - DNA, 120 bp, Artificial Sequence
  ENSG00000134352_54 (sequence is synthesized)
tgatattctcatatacattgcattaaaaattaaaaggtggcagctcagggtgagctcttctgttgctcatttgttcctaaatttttaagggctttttctcagtcaatagtttgtacaaac

SEQ ID NO: 310782 - DNA, 120 bp, Artificial Sequence
  ENSG00000134352_55 (sequence is synthesized)
tggttagtttaacttcattacccatttcattaaagttgatgggtcgtgtgatgagatgcatttaaggccgatagtgatagatgttttttttatttcttgaacacaggctttgtctgaatg

SEQ ID NO: 310783 - DNA, 120 bp, Artificial Sequence
  ENSG00000134352_56 (sequence is synthesized)
atgttcttttatctcttgaacacaagctttgaatgataactacaggttttaagtgctgttacattaataccataatgtgatgtgttagaaacaaagggatatttcaaaggtagatatttg

SEQ ID NO: 310784 - DNA, 120 bp, Artificial Sequence
  ENSG00000134352_57 (sequence is synthesized)
aaaattctctagtctcaatatgtatgtgtattgaatatactctaaaaataaatgtgcaatttgctagtaggacaatgcagtgactgactagcattaggtatgtttcttttatatcctagc

SEQ ID NO: 310785 - DNA, 120 bp, Artificial Sequence
  ENSG00000134352_58 (sequence is synthesized)
tatgtcccactttcttctaagtgcaatcctttcatgttcacttgctgttttaccccatctactctaacttcatttggaaggcttgtctagagtatagcatgtatttttacctttgcagtg

SEQ ID NO: 310786 - DNA, 120 bp, Artificial Sequence
  ENSG00000134352_59 (sequence is synthesized)
aattgcatgtgctaattgtaaccacagctatttttatgttgacataactccaaatgttatattaaatgttctattatatattagctctaatcccttaagtaaattttaagaaataaatac

SEQ ID NO: 310787 - DNA, 120 bp, Artificial Sequence
  ENSG00000134352_60 (sequence is synthesized)
ttgttcaaattttttttctgtatgtggttactatcatctgactatgcatatttgtaacagcatttatcattagtggtgttagctaaataagcatcttagtgtaaatgagatgcttcgtgt

SEQ ID NO: 310788 - DNA, 120 bp, Artificial Sequence
  ENSG00000134352_61 (sequence is synthesized)
gggttttgtgacattttaaatgacataatggaatgtgatttaaaagaaaaccagtacactatcttggtcttaataacatagaatggagatggcaaatttatccactagttttccagattt

SEQ ID NO: 310789 - DNA, 88 bp, Artificial Sequence
  ENSG00000134352_62 (sequence is synthesized)
gaatggagatggcaaatttatccactagttttccagatttactatttaatagctgaggtctgaaatcgtagcatcctccctcctagtt

SEQ ID NO: 310790 - DNA, 120 bp, Artificial Sequence
  ENSG00000134352_63 (sequence is synthesized)
tcttgtggcctgtctgtgcccaccctgcactctgctggagtctccatccttgttgcagtgagacttgaagttcaagattgatacatggcatcctcctgctacttcttgaggttactaagt

SEQ ID NO: 310791 - DNA, 120 bp, Artificial Sequence
  ENSG00000134352_64 (sequence is synthesized)
agtatatgaaactaatcagtcagcaagtccacctggaaggaaaagaaaatctcaactattaatgtgccttcacattgtgattttgtctaaaaaaatgtagtgagtcaaaaaacccacaag

SEQ ID NO: 310792 - DNA, 120 bp, Artificial Sequence
  ENSG00000134352_65 (sequence is synthesized)
ccagccaacagtaactccttcacatatataccagagtttatagaaataacatgtcagctttgggctatgtgctcctttgtttaaaatcttctatttggttatggcttgtataggctcaag

SEQ ID NO: 310793 - DNA, 120 bp, Artificial Sequence
  ENSG00000134352_66 (sequence is synthesized)
cctgatttctttaaggtgtggtggctcatcttatcctaatgtgtatgatagatacagtccatcctgctttggaaaagattatgtaactccttgagagcatactctttctctagcccaaag

SEQ ID NO: 310794 - DNA, 120 bp, Artificial Sequence
  ENSG00000134352_67 (sequence is synthesized)
gcagtgagagagttttcttgttcaggattgcttaactttccatttaagctttttctttttaaattaatacaaacttctacactttcaaaatacgaaatatattacaactgcgtataggct

SEQ ID NO: 310795 - DNA, 120 bp, Artificial Sequence
  ENSG00000134352_68 (sequence is synthesized)
cttccatacttaagtccagtgcttgggcaagttaatggagtgaaagactacaagcaaagaggaactgaggtagaaaaagaagaatgtgtgaaagcagcaggaagctcagccaactcgaaa

SEQ ID NO: 310796 - DNA, 120 bp, Artificial Sequence
  ENSG00000134352_69 (sequence is synthesized)
gcagggtgaacagcttgagtcctgttgctgctgatcggggttggctcttggacaacttagtaagatcatggaaaggctgcttgggttctccatagaaaagttctgtctccatcaagggag

SEQ ID NO: 310797 - DNA, 120 bp, Artificial Sequence
  ENSG00000134352_70 (sequence is synthesized)
gaaaatgtacctttcaactcaaaattcaatatttgtttttaaatatagctattttccccaaccgctaaagattttcaacagatacgaagccagagcttagttttagaaacctgtggacat

SEQ ID NO: 310798 - DNA, 120 bp, Artificial Sequence
  ENSG00000134352_71 (sequence is synthesized)
tcaaacctgattctttattccctgtgactatggttatgtcattttacatgtcaaaaaagtgtatctagaattgtcatttcttatttttgagctttttttagtgagaattatcccctcact

SEQ ID NO: 310799 - DNA, 120 bp, Artificial Sequence
  ENSG00000134352_72 (sequence is synthesized)
taaatggctttttatttaaacatctgtgcattctgtatgaaattgtagtctttctgggataacatggtgagctatatggtggtaatccacacacacaaaaataaaagccaaaaaaaaacc

SEQ ID NO: 310800 - DNA, 120 bp, Artificial Sequence
  ENSG00000134352_73 (sequence is synthesized)
ggatctgacagtgttccggagccggggcgagcagccaaaaggcccgcggagtcgcgctgggccgccccggcgcagctgaaccgggggccgcgcctgccaggccgacgggtctggcccagc

SEQ ID NO: 310801 - DNA, 120 bp, Artificial Sequence
  ENSG00000134352_74 (sequence is synthesized)
ctggcgccaaggggttcgtgcgctgtggagacgcggagggtcgaggcggcgcggcctgagtgaaacccaatggaaaaagcatgacatttagaagtagaagacttagcttcaaatccctac

SEQ ID NO: 310802 - DNA, 120 bp, Artificial Sequence
  ENSG00000134352_75 (sequence is synthesized)
accactgaatctacagggcaacacacaagtttgctgattgcaaagcaaaacgtgacacccccacctcatgcactgttgattattctactgtgtattttgtcaacattgaagtctgggtag

SEQ ID NO: 310803 - DNA, 120 bp, Artificial Sequence
  ENSG00000134352_76 (sequence is synthesized)
acttttactaccccaaagtttgtctcatggatccattatggcttcttcacatggcttgagtcttgccaacgaggaccttacagcttagttgaagaaattttgcataagtaaatcagaaaa

SEQ ID NO: 310804 - DNA, 120 bp, Artificial Sequence
  ENSG00000134352_77 (sequence is synthesized)
aggagaacctgtggactatgtagacagtaaatagagtaggaatttaaatataccagtagtggataattttaccttcaaaggttttatgaagaagaaaatacttgagccttgagttagtat

SEQ ID NO: 310805 - DNA, 120 bp, Artificial Sequence
  ENSG00000134352_78 (sequence is synthesized)
gtggacaaataggaagaaggtggcatcttagagagcagcatgagcaaaggcacaggcttgaaaacataaaagcagatgtttaataaagcaaagtttctgcctaaattagatttggcattt

SEQ ID NO: 310806 - DNA, 120 bp, Artificial Sequence
  ENSG00000134352_79 (sequence is synthesized)
tatacacacatatatcaatatatacacacataaatatatatacatacacccatatatatatatatatgatgcttagcatttaagagttaatatttgccaacccatagtttattctcaagc

SEQ ID NO: 310807 - DNA, 120 bp, Artificial Sequence
  ENSG00000134352_80 (sequence is synthesized)
taagagttaatatttgccaacccatagtttattctcaagcatttaactgatttcttgatttctactgagcttcataggatgttagttacttacaaagggatatgtgtggtggaaggataa

SEQ ID NO: 310808 - DNA, 120 bp, Artificial Sequence
  ENSG00000134352_81 (sequence is synthesized)
aattaagtgaatagtatatggctgcaatattactttcatacattttttactgtaaaagactaagtaaaattcaaaattaatcaggacagtcatttaaaaaatctccaatgttaattatcc

SEQ ID NO: 310809 - DNA, 120 bp, Artificial Sequence
  ENSG00000134352_82 (sequence is synthesized)
caattagtgattaatttgatgaacaagtcctcttttaaatgcagatgaggatttgtgtggtatttagggatcttaggcttgtttactttttagtttattcctactcgtgccactcctcat

SEQ ID NO: 310810 - DNA, 80 bp, Artificial Sequence
  ENSG00000134363_0 (sequence is synthesized)
gtccattgaatcgcgcgggcggccggcggcgagcgcggggctgcgccgggatcgctgcgccctccgccgctggcctctgc

SEQ ID NO: 310811 - DNA, 120 bp, Artificial Sequence
  ENSG00000134363_1 (sequence is synthesized)
ctccccgcgccgctgcgctcctcgccccgcgcctgcccccaggatggtccgcgcgaggcaccagccgggtgggctttgcctcctgctgctgctgctctgccagttcatggaggaccgcag

SEQ ID NO: 310812 - DNA, 120 bp, Artificial Sequence
  ENSG00000134363_2 (sequence is synthesized)
tgcccaggctgggaactgctggctccgtcaagcgaagaacggccgctgccaggtcctgtacaagaccgaactgagcaaggaggagtgctgcagcaccggccggctgagcacctcgtggac

SEQ ID NO: 310813 - DNA, 120 bp, Artificial Sequence
  ENSG00000134363_3 (sequence is synthesized)
cgaggaggacgtgaatgacaacacactcttcaagtggatgattttcaacgggggcgcccccaactgcatcccctgtaaagaaacgtgtgagaacgtggactgtggacctgggaaaaaatg

SEQ ID NO: 310814 - DNA, 120 bp, Artificial Sequence
  ENSG00000134363_4 (sequence is synthesized)
ccgaatgaacaagaagaacaaaccccgctgcgtctgcgccccggattgttccaacatcacctggaagggtccagtctgcgggctggatgggaaaacctaccgcaatgaatgtgcactcct

SEQ ID NO: 310815 - DNA, 120 bp, Artificial Sequence
  ENSG00000134363_5 (sequence is synthesized)
aaaggcaagatgtaaagagcagccagaactggaagtccagtaccaaggcagatgtaaaaagacttgtcgggatgttttctgtccaggcagctccacatgtgtggtggaccagaccaataa

SEQ ID NO: 310816 - DNA, 120 bp, Artificial Sequence
  ENSG00000134363_6 (sequence is synthesized)
tgcctactgtgtgacctgtaatcggatttgcccagagcctgcttcctctgagcaatatctctgtgggaatgatggagtcacctactccagtgcctgccacctgagaaaggctacctgcct

SEQ ID NO: 310817 - DNA, 120 bp, Artificial Sequence
  ENSG00000134363_7 (sequence is synthesized)
gctgggcagatctattggattagcctatgagggaaagtgtatcaaagcaaagtcctgtgaagatatccagtgcactggtgggaaaaaatgtttatgggatttcaaggttgggagaggccg

SEQ ID NO: 310818 - DNA, 120 bp, Artificial Sequence
  ENSG00000134363_8 (sequence is synthesized)
gtgttccctctgtgatgagctgtgccctgacagtaagtcggatgagcctgtctgtgccagtgacaatgccacttatgccagcgagtgtgccatgaaggaagctgcctgctcctcaggtgt

SEQ ID NO: 310819 - DNA, 120 bp, Artificial Sequence
  ENSG00000134363_9 (sequence is synthesized)
tccggatcttgcaactccatttcggaagacaccgaggaagaggaggaagatgaagaccaggactacagctttcctatatcttctattctagagtggtaaactctctataagtgttcagtg

SEQ ID NO: 310820 - DNA, 120 bp, Artificial Sequence
  ENSG00000134363_10 (sequence is synthesized)
aaagaaaaagaaaaaaagaaaaatatattgtccatactgtaaataagtgtatgcttatttatttggggggaaaactatacattaaaggacctttgtcctaaagctctctcccaggccacc

SEQ ID NO: 310821 - DNA, 120 bp, Artificial Sequence
  ENSG00000134363_11 (sequence is synthesized)
aaggacctttgtcctaaagctctctcccaggccaccttgttactcattggacacggagaggcattcattgtgaggtctactggatgaggcccatagttgagacttgtagacatttattta

SEQ ID NO: 310822 - DNA, 120 bp, Artificial Sequence
  ENSG00000134363_12 (sequence is synthesized)
tactgtgtcatgttttataatttatacataaaatgtctggttgactgtataccttgtttttgaagaaatttattcgtgaaaggaagagcagttgttatttattgtgaggtctcttgcttg

SEQ ID NO: 310823 - DNA, 120 bp, Artificial Sequence
  ENSG00000134363_13 (sequence is synthesized)
taaagtaaaagctttttttccttgtaaaccatttaagtccattccttactattcactcactcatctgtctcccttcatttcactgttagactcttttccactttcaacaaacttgcatgt

SEQ ID NO: 310824 - DNA, 120 bp, Artificial Sequence
  ENSG00000134363_14 (sequence is synthesized)
cagtttctgtcatgtttatttattggattctctgctgcctgatctgtacatacatgatccctcgggttttgtttacaaggaaccttgactgaccaaaaggcattataactctgactcaaa

SEQ ID NO: 310825 - DNA, 120 bp, Artificial Sequence
  ENSG00000134363_15 (sequence is synthesized)
tacaaggtacagaagataagcatctttgaggaaactcctacttcagttcttttgttatgatgaagacatttgtgagagaggagatgattagaattctagtaatgtacttttaagatgtta

SEQ ID NO: 310826 - DNA, 120 bp, Artificial Sequence
  ENSG00000134363_16 (sequence is synthesized)
cagatacaaagaaatgatgtgggtgtcaggagactaaaggatgttgaaggctacacattcaaccttttgttaggtgtttcctttaagctactcagctgtaccttttaaattagttctttt

SEQ ID NO: 310827 - DNA, 120 bp, Artificial Sequence
  ENSG00000134363_17 (sequence is synthesized)
tcaaccagtatatcactaaaagttatatcaaagctttatcagttcaagtttcttgcttttcataatacttttttctgatgcaattttatattttcaaacatggcaagttaaaatataaat

SEQ ID NO: 310828 - DNA, 120 bp, Artificial Sequence
  ENSG00000134363_18 (sequence is synthesized)
ttcaaacatggcaagttaaaatataaattcatttaaatatatagttttgtacttttctaccatgtaaatgtgcaatgtatataaaagttataatgtgtatttgtaaataaatgatgagtg

SEQ ID NO: 310829 - DNA, 120 bp, Artificial Sequence
  ENSG00000134363_19 (sequence is synthesized)
aacagcagatgccaaaaacaaaaaaagcatctcactgcaagtcacataaaaatgcaacgctgtaatatggctgtatcagagggctttgaaaacatacactgagctgcttctgcgctgttg

SEQ ID NO: 310830 - DNA, 120 bp, Artificial Sequence
  ENSG00000134363_20 (sequence is synthesized)
tttttccacccctccacccctttcgatttatttcctacttttctcccgcgtctctctcacttcccctcctccacgctcaccccctccccatccccgccgggtctccttcgctagccacct

SEQ ID NO: 310831 - DNA, 120 bp, Artificial Sequence
  ENSG00000134365_0 (sequence is synthesized)
aagtgaccttaaagccctagctttgtggtagtgcacttaaattcagaatcacacttggtaactaataatgaaagatttcaaaccccaaacagtgcaactgaaacttttgcattactatac

SEQ ID NO: 310832 - DNA, 120 bp, Artificial Sequence
  ENSG00000134365_1 (sequence is synthesized)
tactgagaatatctaacatgttgttactaatcaatgtcattctgaccttgtgggtttcctgtgctaatggacaagtgaaaccttgtgattttccagaaattcaacatggaggtctatatt

SEQ ID NO: 310833 - DNA, 120 bp, Artificial Sequence
  ENSG00000134365_2 (sequence is synthesized)
ataagagtttgcgtagactatactttccagcagctgcaggacaatcttattcctattactgtgatcaaaattttgtgactccttcaggaagttactgggattacattcattgcacacaag

SEQ ID NO: 310834 - DNA, 120 bp, Artificial Sequence
  ENSG00000134365_3 (sequence is synthesized)
atggttggtcaccaacggtcccatgcctcagaacatgctcaaaatcagatgtagaaattgaaaatggattcatttctgaatcttcctctatttatattttaaatgaagaaacacaatata

SEQ ID NO: 310835 - DNA, 120 bp, Artificial Sequence
  ENSG00000134365_4 (sequence is synthesized)
attgtaaaccaggatatgcaacagcagagggaaattcttcaggatcaattacatgtttgcaaaatggatggtcaacacaaccaatttgcattaaattttgtgatatgcctgtttttgaga

SEQ ID NO: 310836 - DNA, 120 bp, Artificial Sequence
  ENSG00000134365_5 (sequence is synthesized)
attccagagccaagagtaatggcatgtggtttaagctccatgacacattggactatgaatgctatgatggatatgaaagcagttatggaaacaccacagattccatagtgtgtggtgaag

SEQ ID NO: 310837 - DNA, 120 bp, Artificial Sequence
  ENSG00000134365_6 (sequence is synthesized)
atggctggtcccatttgccaacatgctataattcttcagaaaactgtgggcctcctccacctattagcaatggagataccacgtccttcccgcaaaaagtgtatctgccatggtcaagag

SEQ ID NO: 310838 - DNA, 120 bp, Artificial Sequence
  ENSG00000134365_7 (sequence is synthesized)
tcgagtaccagtgccagtcctactatgaacttcagggttctaaatatgtaacatgtagtaatggagactggtcagaaccaccaagatgcatatcaatgaaaccttgtgagtttccagaaa

SEQ ID NO: 310839 - DNA, 120 bp, Artificial Sequence
  ENSG00000134365_8 (sequence is synthesized)
ttcaacatggacatctatattatgagaatacgcgtagaccatactttccagtagctacaggacaatcttactcctattactgtgaccaaaattttgtgactccttcaggaagttactggg

SEQ ID NO: 310840 - DNA, 120 bp, Artificial Sequence
  ENSG00000134365_9 (sequence is synthesized)
aagatgggtggttgccaacagtcccatgcctcagaacatgctcaaaatcagatatagaaattgaaaatggattcatttctgaatcttcctctatttatattttaaataaagaaatacaat

SEQ ID NO: 310841 - DNA, 120 bp, Artificial Sequence
  ENSG00000134365_10 (sequence is synthesized)
ataaatgtaaaccaggatatgcaacagcagatggaaattcttcaggttcaattacatgtttgcaaaatggatggtcagcacaaccaatttgcattaaattttgtgatatgcctgtttttg

SEQ ID NO: 310842 - DNA, 120 bp, Artificial Sequence
  ENSG00000134365_11 (sequence is synthesized)
agaattccagagccaagagtaatggcatgcggtttaagctccatgacacattggactacgaatgctacgatggatatgaaatcagttatggaaacaccacaggttccatagtgtgtggtg

SEQ ID NO: 310843 - DNA, 120 bp, Artificial Sequence
  ENSG00000134365_12 (sequence is synthesized)
aagatgggtggtcccatttcccaacatgttataattcttcagaaaagtgtgggcctcctccacctattagcaatggtgataccacctcctttctactaaaagtgtatgtgccacagtcaa

SEQ ID NO: 310844 - DNA, 120 bp, Artificial Sequence
  ENSG00000134365_13 (sequence is synthesized)
gagtcgagtaccaatgccagtcctactatgaacttcagggttctaattatgtaacatgtagtaatggagagtggtcggaaccaccaagatgcatacatccatgtataataactgaagaaa

SEQ ID NO: 310845 - DNA, 120 bp, Artificial Sequence
  ENSG00000134365_14 (sequence is synthesized)
acatgaataaaaataacatacagttaaaaggaaaaagtgacataaaatattatgcaaaaacaggggataccattgaatttatgtgtaaattgggatataatgcgaatacatcagttctat

SEQ ID NO: 310846 - DNA, 120 bp, Artificial Sequence
  ENSG00000134365_15 (sequence is synthesized)
catttcaagcagtgtgtagggaaggcatagtggaataccccagatgcgaataaggcagcattgttaccctaaatgtatgtccaacttccacttctcactcttatggtctcaaagcttgca

SEQ ID NO: 310847 - DNA, 120 bp, Artificial Sequence
  ENSG00000134365_16 (sequence is synthesized)
agcttgcaaagatagcttctgatattgttgtaatttctactttatttcaaagaaaattaatataatagtttcaatttgcaacttaatatgttctcaaaaatatgttaaaacaaactaaat

SEQ ID NO: 310848 - DNA, 120 bp, Artificial Sequence
  ENSG00000134365_17 (sequence is synthesized)
atgcttgtactaaaataataaaaactacccttatattggacttcctatcaatgaattagtaagtatagaaacagataactgaatggctttctgcatattgtacagtatacctagacatag

SEQ ID NO: 310849 - DNA, 120 bp, Artificial Sequence
  ENSG00000134365_18 (sequence is synthesized)
tgtgtacatatatgtacatatatatgtagtcctcctatgagtgtgaattatcttgagacttaaaaaaaaaaaaaacaacgttgaaaatgcagatgtcttcctaagaaatcaaataagata

SEQ ID NO: 310850 - DNA, 120 bp, Artificial Sequence
  ENSG00000134369_0 (sequence is synthesized)
cacgggactgacaggcaggcaggccgcgggctgggatccggacaccaaagcaaaagcaccgctgggcgccggaggagccgcggggcttccatccttcctttgactgatttttaaatttta

SEQ ID NO: 310851 - DNA, 120 bp, Artificial Sequence
  ENSG00000134369_1 (sequence is synthesized)
atttgtattttccccgccgccccgccccttttcctccgaccccgccctatcgctccccggcttccctgctctttcctttttcccggcttccttcctcgcgtttctttcccctgcgccctc

SEQ ID NO: 310852 - DNA, 120 bp, Artificial Sequence
  ENSG00000134369_2 (sequence is synthesized)
ggcttgcctctctccctcctccctcgctctctcccccttctctccccttcttcctcggtttcttccgtcctctctctccccctcctcctcccccgcctcctcctcctgcgctcccgcccc

SEQ ID NO: 310853 - DNA, 120 bp, Artificial Sequence
  ENSG00000134369_3 (sequence is synthesized)
ctgccccctccccccgtgcctgcagacgcgcggatcgtccatgcgctcctcgcgggcagaatgctgggcagcagcgtcaagagcgtgcagcccgaggtggagctgagcagcggcggcggc

SEQ ID NO: 310854 - DNA, 120 bp, Artificial Sequence
  ENSG00000134369_4 (sequence is synthesized)
ggcgccggcaggaaggcggcagcggcggacggcagaggcatgctgcccaagcgcgccaaggcgcccggcggcggcggcggcatggccaaggccagcgcggctgagctgaaggtcttcaag

SEQ ID NO: 310855 - DNA, 120 bp, Artificial Sequence
  ENSG00000134369_5 (sequence is synthesized)
gcggctgagctgaaggtcttcaagtccggcagcgtggacagccgtgtccccggcgggccgcccgcctccaacctgcgcaagcagaagtcactcaccaacctctcttttctcacggactcc

SEQ ID NO: 310856 - DNA, 120 bp, Artificial Sequence
  ENSG00000134369_6 (sequence is synthesized)
gagaaaaagctgcagctttatgagcccgaatggagcgacgatatggccaaggcgcccaaaggcttaggcaaggtggggtccaagggccgtgaagctccgctgatgtccaagacgctgtcc

SEQ ID NO: 310857 - DNA, 120 bp, Artificial Sequence
  ENSG00000134369_7 (sequence is synthesized)
aagtcggagcactcgctcttccaggccaagggcagcccggcgggcggcgccaagacccccctggctccgctcgcgcccaacctgggaaagccgagccggatccctcgaggaccctatgcg

SEQ ID NO: 310858 - DNA, 120 bp, Artificial Sequence
  ENSG00000134369_8 (sequence is synthesized)
gaggtcaagccgctcagcaaggcgcctgaagcggccgtgagcgaagatggcaaatcggacgacgagctgctctccagcaaggccaaggcgcaaaagagctctgggcctgtcccctctgcc

SEQ ID NO: 310859 - DNA, 120 bp, Artificial Sequence
  ENSG00000134369_9 (sequence is synthesized)
aagggccaggaggagcgcgccttcctcaaggtggaccccgagctggtggtgaccgtgctgggagacctggagcagctgctcttcagccagatgctggacccagagtcccagagaaagagg

SEQ ID NO: 310860 - DNA, 120 bp, Artificial Sequence
  ENSG00000134369_10 (sequence is synthesized)
acagtgcagaatgtcctggatctccggcagaacctggaagagaccatgtccagcctgcgagggtcccaggtgactcacagctccctggagatgacctgctacgacagcgatgatgccaac

SEQ ID NO: 310861 - DNA, 120 bp, Artificial Sequence
  ENSG00000134369_11 (sequence is synthesized)
ccacgcagcgtgtccagcctctccaaccgctcgtcccctctgtcatggcgctatggccagtccagtccgcggctgcaggctggtgacgcgccctctgtgggtgggagctgccgctcggag

SEQ ID NO: 310862 - DNA, 120 bp, Artificial Sequence
  ENSG00000134369_12 (sequence is synthesized)
gggacgcccgcctggtacatgcacggcgaacgggcccactactcccacaccatgcccatgcgcagccccagcaagctcagccatatctcccgcctggagctggtcgaatccctggactcg

SEQ ID NO: 310863 - DNA, 120 bp, Artificial Sequence
  ENSG00000134369_13 (sequence is synthesized)
gatgaggtggacctcaagtccggctacatgagcgacagtgacctcatgggcaagaccatgacggaggatgatgacatcactaccggctgggatgaaagcagctccatcagtagtggactc

SEQ ID NO: 310864 - DNA, 120 bp, Artificial Sequence
  ENSG00000134369_14 (sequence is synthesized)
agcgatgcctcagacaatctcagttcagaagaattcaatgccagctcctcactcaactccctcccaagtactcccactgcttctcgcaggaactcaacaatagtgctacgcacagactca

SEQ ID NO: 310865 - DNA, 120 bp, Artificial Sequence
  ENSG00000134369_15 (sequence is synthesized)
gagaagcgctcactggcagaaagtgggctgagctggtttagtgaatcagaggagaaagcccctaaaaaactggagtacgacagtggtagcctgaagatggaacctgggacttctaagtgg

SEQ ID NO: 310866 - DNA, 120 bp, Artificial Sequence
  ENSG00000134369_16 (sequence is synthesized)
cggagggagcggcctgagagctgtgatgattcatccaagggtggagaactgaaaaagcccatcagcctgggccaccctggttccctgaagaagggcaagaccccacctgtggctgtaact

SEQ ID NO: 310867 - DNA, 120 bp, Artificial Sequence
  ENSG00000134369_17 (sequence is synthesized)
tcccccatcactcacacagcccagagtgccctcaaagtcgcaggcaaacctgagggcaaagctacagacaagggtaagcttgcagtgaagaatactgggctccaacgctcctcctctgat

SEQ ID NO: 310868 - DNA, 120 bp, Artificial Sequence
  ENSG00000134369_18 (sequence is synthesized)
gctggtcgggaccgcctgagtgatgctaagaagcccccctcgggcattgctcgcccctccacttcgggatcctttggctacaagaagcctcctcctgccacaggcacagccactgtcatg

SEQ ID NO: 310869 - DNA, 120 bp, Artificial Sequence
  ENSG00000134369_19 (sequence is synthesized)
caaactggtggttcagccactctcagcaagatccagaagtcctcaggcatccctgtcaagccagtaaatgggcgcaagactagcttagatgtttccaacagtgcagagccaggattcctg

SEQ ID NO: 310870 - DNA, 120 bp, Artificial Sequence
  ENSG00000134369_20 (sequence is synthesized)
gctcctggagcccgttctaacatccagtaccgcagcctgccccggccagccaagtcaagttctatgagcgtgaccggcgggcggggtggacctcgccctgtgagcagcagcattgacccc

SEQ ID NO: 310871 - DNA, 120 bp, Artificial Sequence
  ENSG00000134369_21 (sequence is synthesized)
agtctcctcagcaccaagcagggaggccttacgccttccagactgaaggagcctaccaaggtagccagtgggcggaccactccagcccctgtcaatcagacagatcgggaaaaggagaag

SEQ ID NO: 310872 - DNA, 120 bp, Artificial Sequence
  ENSG00000134369_22 (sequence is synthesized)
gccaaagccaaggcagtggccttggactcagacaacatctccttgaagagtattggctccccagaaagtactcccaagaaccaagcaagccaccccacagccaccaagctggcagagctg

SEQ ID NO: 310873 - DNA, 120 bp, Artificial Sequence
  ENSG00000134369_23 (sequence is synthesized)
ccaccaacccctctcagggccacagcgaagagctttgtcaaaccaccctcactagccaatcttgacaaggtcaactccaacagtctggatctaccatcatccagtgataccacccatgct

SEQ ID NO: 310874 - DNA, 120 bp, Artificial Sequence
  ENSG00000134369_24 (sequence is synthesized)
tcaaaggtcccagatctgcatgctacaagctcagcatctgggggccctctcccttcctgcttcacccccagtccggcacccatcctcaatattaactcagccagcttctcccagggcctg

SEQ ID NO: 310875 - DNA, 120 bp, Artificial Sequence
  ENSG00000134369_25 (sequence is synthesized)
gagctaatgagtggtttcagtgtgccaaaagagacccgcatgtaccccaaactctcaggcctgcacaggagcatggagtccctccagatgccaatgagcctccccagtgccttccccagc

SEQ ID NO: 310876 - DNA, 120 bp, Artificial Sequence
  ENSG00000134369_26 (sequence is synthesized)
agtactcccgtccccaccccacctgctccccctgctgctcccacagaagaagagacggaagagctgacttggagtggaagccccagagctgggcaactggacagtaatcagcgggatcgg

SEQ ID NO: 310877 - DNA, 120 bp, Artificial Sequence
  ENSG00000134369_27 (sequence is synthesized)
aacactcttcccaagaaagggctcaggtaccagcttcagtcccaggaggagaccaaggagaggcgacattcccataccattggtgggctgcctgaatccgatgaccagtcagagctgcct

SEQ ID NO: 310878 - DNA, 120 bp, Artificial Sequence
  ENSG00000134369_28 (sequence is synthesized)
tctccccctgcacttcccatgtctctgagtgcaaagggccaacttaccaacatagtgagtcccactgcggccaccacgccaagaatcacccgctccaacagcatccccacccacgaggcg

SEQ ID NO: 310879 - DNA, 120 bp, Artificial Sequence
  ENSG00000134369_29 (sequence is synthesized)
gccttcgagctgtacagcggctcccaaatggggagcaccctgtccctggccgagagacccaagggaatgattcggtcaggatccttccgagaccccacggacgatgttcacggctcagtg

SEQ ID NO: 310880 - DNA, 120 bp, Artificial Sequence
  ENSG00000134369_30 (sequence is synthesized)
ctgtccctggcctccagtgcctcctccacctactcctcagctgaggagaggatgcaatctgagcaaatccggaagcttcgtagggaactggaatcatcccaggaaaaagtggccaccttg

SEQ ID NO: 310881 - DNA, 120 bp, Artificial Sequence
  ENSG00000134369_31 (sequence is synthesized)
acgtctcagctttctgccaatgctaatctggtggctgcttttgagcagagcctggtgaatatgacatcccgcctgcgacacctggcagagacggccgaggagaaggacactgagctgctg

SEQ ID NO: 310882 - DNA, 120 bp, Artificial Sequence
  ENSG00000134369_32 (sequence is synthesized)
gatttgcgagaaaccatagactttctgaagaaaaagaactctgaggcccaggcagtcattcagggagcccttaatgcctcagaaaccacacccaaagaacttcggatcaagagacaaaac

SEQ ID NO: 310883 - DNA, 120 bp, Artificial Sequence
  ENSG00000134369_33 (sequence is synthesized)
tcctcagatagcatctcaagcctcaacagcatcactagccattccagcatcggcagcagcaaggatgctgatgcgaaaaagaagaaaaaaaagagttgggtctatgagcttcgaagttcc

SEQ ID NO: 310884 - DNA, 120 bp, Artificial Sequence
  ENSG00000134369_34 (sequence is synthesized)
ttcaacaaagcgttcagtataaaaaaggggcccaagtcagcttcctcatactcggatatagaggagattgctacacccgactcttcagccccctcatcccccaaactacagcatggttct

SEQ ID NO: 310885 - DNA, 120 bp, Artificial Sequence
  ENSG00000134369_35 (sequence is synthesized)
acagagactgcttcaccctccatcaagtcctccacctcgtcctccgtgggcactgatgtcaccgagggccctgctcacccagccccccacactaggctgttccatgcaaatgaggaggag

SEQ ID NO: 310886 - DNA, 120 bp, Artificial Sequence
  ENSG00000134369_36 (sequence is synthesized)
gagccagagaagaaggaggtatcggagctgcgctctgagctatgggagaaggaaatgaagcttacagacatccgcttggaggccctcaactctgcccaccaactggatcagcttcgggag

SEQ ID NO: 310887 - DNA, 120 bp, Artificial Sequence
  ENSG00000134369_37 (sequence is synthesized)
accatgcacaacatgcagttggaggtggacctgctgaaagcagagaatgaccgactgaaggtagccccaggcccctcatcaggctccactccagggcaggtccctggatcatctgcatta

SEQ ID NO: 310888 - DNA, 120 bp, Artificial Sequence
  ENSG00000134369_38 (sequence is synthesized)
tcttccccacgccgctccctaggcctggcactcacccattccttcggccccagtcttgcagacacagacctgtcacccatggatggcatcagtacttgtggtccaaaggaggaagtgacc

SEQ ID NO: 310889 - DNA, 120 bp, Artificial Sequence
  ENSG00000134369_39 (sequence is synthesized)
ctccgggtggtggtgaggatgcccccgcagcacatcatcaaaggggacttgaagcagcaggaattcttcctgggctgtagcaaggtcagtggaaaagttgactggaagatgctggatgaa

SEQ ID NO: 310890 - DNA, 120 bp, Artificial Sequence
  ENSG00000134369_40 (sequence is synthesized)
gctgttttccaagtgttcaaggactatatttctaaaatggacccagcctctaccctgggactaagcactgagtccatccatggctacagcatcagccacgtgaaacgagtgttggatgca

SEQ ID NO: 310891 - DNA, 120 bp, Artificial Sequence
  ENSG00000134369_41 (sequence is synthesized)
gagccccccgagatgcctccttgccgtcgaggtgtcaataacatatcagtctccctcaaaggtctgaaggagaaatgcgtcgacagcctggtgttcgagacgctgatccccaagccgatg

SEQ ID NO: 310892 - DNA, 120 bp, Artificial Sequence
  ENSG00000134369_42 (sequence is synthesized)
atgcagcactacataagcctcctgctgaagcaccggcgcctcgtcctctcgggccccagcggcacgggcaagacctacctgaccaatcgcttggccgagtacctggtggagcgctctggc

SEQ ID NO: 310893 - DNA, 120 bp, Artificial Sequence
  ENSG00000134369_43 (sequence is synthesized)
cgtgaggtcacagagggcatcgtcagcaccttcaacatgcaccagcagtcttgcaaggatctgcaactgtatctttccaacctagccaaccagatagaccgggaaacaggaattggggat

SEQ ID NO: 310894 - DNA, 120 bp, Artificial Sequence
  ENSG00000134369_44 (sequence is synthesized)
gtgcccctggtgattctattggatgacctgagtgaagcaggctccatcagtgagttggtcaatggggccctcacctgcaagtatcataaatgtccctatattataggtaccaccaatcag

SEQ ID NO: 310895 - DNA, 120 bp, Artificial Sequence
  ENSG00000134369_45 (sequence is synthesized)
cctgtaaaaatgacacccaaccatggcttgcacttgagcttcaggatgttgaccttctccaacaacgtggagccagccaatggcttcctggttcgttacctgaggaggaagctggtagag

SEQ ID NO: 310896 - DNA, 120 bp, Artificial Sequence
  ENSG00000134369_46 (sequence is synthesized)
tcagacagcgacatcaatgccaacaaggaagagctgcttcgggtgctcgactgggtacccaagctgtggtatcatctccacaccttccttgagaagcacagcacctcagacttcctcatc

SEQ ID NO: 310897 - DNA, 120 bp, Artificial Sequence
  ENSG00000134369_47 (sequence is synthesized)
ggcccttgcttctttctgtcgtgtcccattggcattgaggacttccggacctggttcattgacctgtggaacaactctatcattccctatctacaggaaggagccaaggatgggataaag

SEQ ID NO: 310898 - DNA, 120 bp, Artificial Sequence
  ENSG00000134369_48 (sequence is synthesized)
gtccatggacagaaagctgcttgggaggacccagtggaatgggtccgggacacacttccctggccatcagcccaacaagaccaatcaaagctgtaccacctgcccccacccaccgtgggc

SEQ ID NO: 310899 - DNA, 120 bp, Artificial Sequence
  ENSG00000134369_49 (sequence is synthesized)
cctcacagcattgcctcacctcccgaggataggacagtcaaagacagcaccccaagttctctggactcagatcctctgatggccatgctgctgaaacttcaagaagctgccaactacatt

SEQ ID NO: 310900 - DNA, 120 bp, Artificial Sequence
  ENSG00000134369_50 (sequence is synthesized)
gagtctccagatcgagaaaccatcctggaccccaaccttcaggcaacactttaagggttcggcaatcactgtcacccccggacagcagaacgctggcatcagctatcttagctcctcctc

SEQ ID NO: 310901 - DNA, 120 bp, Artificial Sequence
  ENSG00000134369_51 (sequence is synthesized)
tcccctctcctctttcagagcactggctctccagccccaggaggagaacaggagggaggaggagatgaaagaggagggacaggttcttggtgctgtacctttgagaacttcctaggaagg

SEQ ID NO: 310902 - DNA, 120 bp, Artificial Sequence
  ENSG00000134369_52 (sequence is synthesized)
aatggtggggtggcgtttgggaacttgtgccccctaaacacatttactggcctcctctaatgactttggggaaaagatgattctgggtctttcccttgacttcttgtttcaattacaaac

SEQ ID NO: 310903 - DNA, 120 bp, Artificial Sequence
  ENSG00000134369_53 (sequence is synthesized)
tcctgggctttctggggaggggttcagaaaacatcaaaacactgcagcagttcctaaatgattctcacaagcaaccctgagagagacagtcttgtgagggagatctgggggaggcaggaa

SEQ ID NO: 310904 - DNA, 120 bp, Artificial Sequence
  ENSG00000134369_54 (sequence is synthesized)
tttctcacagacccttcccaattccatcaccactgccaacaactcctcccccagagatctggctggagcccagaaaaagaagcatgtggtttaaaaaatgtttaaatcaatctgtaaaag

SEQ ID NO: 310905 - DNA, 120 bp, Artificial Sequence
  ENSG00000134369_55 (sequence is synthesized)
gtaaaaatgaaaaacaaaaacaagcaaacaaacaaaaaacaatggaaaagatgaagctggagagagaggaaccagttgccaaggtagagagctgcccgctcctgccctctggatgacata

SEQ ID NO: 310906 - DNA, 120 bp, Artificial Sequence
  ENSG00000134369_56 (sequence is synthesized)
ggggacatcaacaagacggctgccaacctgagaagtcaccaaaccacaaaaataaccttacagccttcagggaaagactaccagctctgtctttctaccctctaatttaacaatgcataa

SEQ ID NO: 310907 - DNA, 120 bp, Artificial Sequence
  ENSG00000134369_57 (sequence is synthesized)
tctaatttaacaatgcataagagtcaataaaccctacttttttatttttggtttttattttgttttcatttttttctcccatttgcctatttatttttttgtttcccttttttttttctt

SEQ ID NO: 310908 - DNA, 120 bp, Artificial Sequence
  ENSG00000134369_58 (sequence is synthesized)
cacatgtccacgagatgcttgggttgcttttccaggggctagtttggcttttccaagtgggttttctttggagaatctgatgccatgcaattggcatgacacctgccatgccactatctt

SEQ ID NO: 310909 - DNA, 120 bp, Artificial Sequence
  ENSG00000134369_59 (sequence is synthesized)
tggcatccatggggcttatatgagacatgaagcattggctcagaagtagagggagaagaggaacccagttcccttgacttcccttttgagagcacacgttctgctgggtagctcaattgc

SEQ ID NO: 310910 - DNA, 120 bp, Artificial Sequence
  ENSG00000134369_60 (sequence is synthesized)
cagcctctgtcatgagaaggtatagccccatcttgatagaagagttactccgagctttatcatggaccagaggaaaaccagaaaactgaaaacattcctctgtcttgtggccagtttggc

SEQ ID NO: 310911 - DNA, 120 bp, Artificial Sequence
  ENSG00000134369_61 (sequence is synthesized)
ctttcactgcactattctgatggtgcctgactgaatccaaatatcctagctggctcttactatttttcacaaatgagtattcacatataagagatgaacatccatgtgagatcatcccaa

SEQ ID NO: 310912 - DNA, 120 bp, Artificial Sequence
  ENSG00000134369_62 (sequence is synthesized)
tcagaatataagactcaaggagtttgacttggtggccaatacctgccttccaaagagatcctacctttgcagatttgctcctttcccattgccttgaaggtctggcaatccctgttcttt

SEQ ID NO: 310913 - DNA, 89 bp, Artificial Sequence
  ENSG00000134369_63 (sequence is synthesized)
ctttcccattgccttgaaggtctggcaatccctgttctttcatttgacaagtacttactgagtactcactatatacaaatcattaggtt

SEQ ID NO: 310914 - DNA, 120 bp, Artificial Sequence
  ENSG00000134369_64 (sequence is synthesized)
tttacagtccagcaggaaatgttaacctccattcagctacgcccccttgttatctagaccttcgggatcatctaagaaatgtagctgaaacccaaggagccagctagaaagaagcttttg

SEQ ID NO: 310915 - DNA, 120 bp, Artificial Sequence
  ENSG00000134369_65 (sequence is synthesized)
attagatgtacaatacattgggggcagaagatctgggatcaattaagatggagcctgaaggactatggaatcttgcttgtcaggaatgggcaagtctacttcctgccatttctgaaagcc

SEQ ID NO: 310916 - DNA, 120 bp, Artificial Sequence
  ENSG00000134369_66 (sequence is synthesized)
ccgcgggaccagcttctaggctgagctgcctagtaggctgaagcttcaggactctgcaggtcaaggatatgtgatgagcaccggcctaagtgtttgctcttcagattcctaagtagcaca

SEQ ID NO: 310917 - DNA, 120 bp, Artificial Sequence
  ENSG00000134369_67 (sequence is synthesized)
agactttatcagaatctataggcataccaacctggatcactcttccacccaaccgaggagtagatgcatctgaatcttcatatcggtatattaagtccaaaagatggtccgggctgcccc

SEQ ID NO: 310918 - DNA, 120 bp, Artificial Sequence
  ENSG00000134369_68 (sequence is synthesized)
tcacaaaagcttctgcatccacgtggtaagctcccatggatgacagggttctgtatgatggagactattattgctattgctgctaattccatgagctgtgaagatccctaaccaactcag

SEQ ID NO: 310919 - DNA, 120 bp, Artificial Sequence
  ENSG00000134369_69 (sequence is synthesized)
ctgtaacatatgcaattctgtggtgggaagaggctgtgtgtccaaggatggtgctgaaatcactgccttaaggtctctgctgtgcagaatgaggaggcccccgagctggctgttctaact

SEQ ID NO: 310920 - DNA, 120 bp, Artificial Sequence
  ENSG00000134369_70 (sequence is synthesized)
tagaaggaagagaagactggatgggcctgcttgggatctaggcctcttctaaaccctatcctaagctccagttccatggcaaggctcagacttttaatgccatcttaatctgatggttga

SEQ ID NO: 310921 - DNA, 120 bp, Artificial Sequence
  ENSG00000134369_71 (sequence is synthesized)
gcgcttcactctattttctggtgctgcccagccagtgccttctgccatggatgttactggctacttgagaaaaaggagaggggagaaccccttctttcattccaactgcctccgacccca

SEQ ID NO: 310922 - DNA, 120 bp, Artificial Sequence
  ENSG00000134369_72 (sequence is synthesized)
aagggattcttggctctctggtaaccatggataccaccatgaattttatttggatcctcagcaggttgattctggaggcctcatgctatgactttttatttctcttcctgggatccacca

SEQ ID NO: 310923 - DNA, 120 bp, Artificial Sequence
  ENSG00000134369_73 (sequence is synthesized)
ccctctactctcagctgactgctgcatttaggccaggtctccaattgctttcctccagaaagtgtgttcccgtctagtgaggtagtattgaagcctcggctttccctctggagcctggga

SEQ ID NO: 310924 - DNA, 120 bp, Artificial Sequence
  ENSG00000134369_74 (sequence is synthesized)
ccctgtttacagttgcacatctgggcccctcactgtggggattgatcattctcatgaaggaatcacagttatatggcaactgcagaaggctgagcctcctcatggtgctataaccccttg

SEQ ID NO: 310925 - DNA, 120 bp, Artificial Sequence
  ENSG00000134369_75 (sequence is synthesized)
ggacactcatccagacttctctgaagcagaaaacctgagctccccactcactgccctagaatttatggcaaggagcaaatctacagcattctctcccacctacgtcctgcttcttggttg

SEQ ID NO: 310926 - DNA, 120 bp, Artificial Sequence
  ENSG00000134369_76 (sequence is synthesized)
agactactgggatccttcagaaaagaaacactgggtcccatagctaaattctcaaccgccaggcaccttcagaagaatccagcctaatactggaatttgtgctattatcttcctctccag

SEQ ID NO: 310927 - DNA, 120 bp, Artificial Sequence
  ENSG00000134369_77 (sequence is synthesized)
ccccccaactccatccctcaccacagttgtctaggaaatgacatgaattcaatatctaatgtcaaccaatggggagagccacaactccaggagaggttcctgagctgagtcccttaattt

SEQ ID NO: 310928 - DNA, 120 bp, Artificial Sequence
  ENSG00000134369_78 (sequence is synthesized)
ctggatgaagaagaccaacaagttttgtccaatgtatttgtttctcagaccttgcctaggcactaaaaataaaatactaggtcattggaggctaatgtgggacctgatgtctgcgtgtgt

SEQ ID NO: 310929 - DNA, 120 bp, Artificial Sequence
  ENSG00000134369_79 (sequence is synthesized)
gtgtgtgtgtgtgtgtgtgtgtgtctccctctctcacacacacaagagcagtttgctgttgctgtttcctaccttctgaggcttcaaagtattttttaaaatctatgctttgtggcagct

SEQ ID NO: 310930 - DNA, 120 bp, Artificial Sequence
  ENSG00000134369_80 (sequence is synthesized)
ctacggtgcttatctctgtctttgtgtcaatccttaagtacccatgtctttttcatgtctaaccattgggaaggtagaggctggcagggaagacaaatctgctacaagtccatgggaaga

SEQ ID NO: 310931 - DNA, 120 bp, Artificial Sequence
  ENSG00000134369_81 (sequence is synthesized)
ccctacaatgaaatgttcattggttggtatactgttttagtcttgaattgccaactttccaactgatctatccatattccttaagtactaaagacaaaatagagggcttctttttctctc

SEQ ID NO: 310932 - DNA, 120 bp, Artificial Sequence
  ENSG00000134369_82 (sequence is synthesized)
ttaatgtcttgccttctggttttcctggtttgcaagactaagtgtacctaatctcaccatctcttcacttctagctctctgaaacaagggtcacactactcagagggataaccccttaca

SEQ ID NO: 310933 - DNA, 120 bp, Artificial Sequence
  ENSG00000134369_83 (sequence is synthesized)
gtggtctgaggagtaactatttcctaaagtattctaaaagagtaggaagagagaaatggtagcctgctgcttctcacagacacctcacatcctcacttgggatggcatccacatagaaac

SEQ ID NO: 310934 - DNA, 120 bp, Artificial Sequence
  ENSG00000134369_84 (sequence is synthesized)
cctgcatttaggtaaaatttgcctgactgaaggggactcagtcctccaaatcaaggtcaagaagatatctgcatgagaccttaagaactctttattgccattatttggagagggcggggg

SEQ ID NO: 310935 - DNA, 120 bp, Artificial Sequence
  ENSG00000134369_85 (sequence is synthesized)
aattgtcctaatcacacatttaacacagggaataagtgctgaagtgacccagatcaccaagcgcagttcctcatcatactttatttttgctttccttattccttggcactgactaagcta

SEQ ID NO: 310936 - DNA, 120 bp, Artificial Sequence
  ENSG00000134369_86 (sequence is synthesized)
aagttaagaagccgacttcataagccaacccctgtgatgggatggaaaaatgggcttttgcagagggtttattaatagagatggatatactactcacaagttctggctcatggctccact

SEQ ID NO: 310937 - DNA, 120 bp, Artificial Sequence
  ENSG00000134369_87 (sequence is synthesized)
gagaaggccatagtaataaaatgatcttatgaacactgttccccaaaggccaaagcctgaagatattgccccttataatccaatcagccttatattttaataagtcctgaatcaacctga

SEQ ID NO: 310938 - DNA, 120 bp, Artificial Sequence
  ENSG00000134369_88 (sequence is synthesized)
ctacggatatatggggccaccagggtgcatgggtgcatgtctgctcagcctagccctggaagtgagcactgccggccacagatcctgggaaaggtggtagtaacccagaagatgtagcct

SEQ ID NO: 310939 - DNA, 120 bp, Artificial Sequence
  ENSG00000134369_89 (sequence is synthesized)
tgaagggaggatacctatcaaaatgccaaagctgcagggacacgaagacggttgaaaattcaacctgtgtatactagatccttccagtttgatggtttggtcattcttcttcatgattat

SEQ ID NO: 310940 - DNA, 120 bp, Artificial Sequence
  ENSG00000134369_90 (sequence is synthesized)
accatggagaattttctgtgacaagggtggtcatggaagtaagtgagtgatcccctggtttctcattccttaaagcagtggttcgcaaagtatggcacaagaccagcagcatcagcagcc

SEQ ID NO: 310941 - DNA, 120 bp, Artificial Sequence
  ENSG00000134369_91 (sequence is synthesized)
tttgggaacttgttagaaacgaaaattctcaatcccatcccagatctgctgaatcagaaactctaatgagaggacccggcaatccacgttttaataagccctcctggtgattctgatgca

SEQ ID NO: 310942 - DNA, 120 bp, Artificial Sequence
  ENSG00000134369_92 (sequence is synthesized)
cactaaattcaactgttttaaagggaaagccctttatagtattggagttcccacactgagaggctttggggcccaaaataagaaggttctaggttgtcattcagactttaacattaattt

SEQ ID NO: 310943 - DNA, 120 bp, Artificial Sequence
  ENSG00000134369_93 (sequence is synthesized)
caaagtcacctttctcatgcttccttgtgtttctgtttttccatttatgattttaacaaagaaaggtatgtgtgcttttgggtggaagttaggagaatgtttgtgtctttcctagttgaa

SEQ ID NO: 310944 - DNA, 120 bp, Artificial Sequence
  ENSG00000134369_94 (sequence is synthesized)
tacaaccttcagagaaaaaccttatgccttggaaattactacctggcacacaaaggggcttcaacaaggaaaagcagttggaggtctcttccagattgctcttctgccgaattatttgta

SEQ ID NO: 310945 - DNA, 120 bp, Artificial Sequence
  ENSG00000134369_95 (sequence is synthesized)
tctattccgagctgattatgtaataggatggaaaaagtaaaaaaaaaaaaaaaaatctaatttgtatttccatgacaacgtgttctcccagcaacatccctctcctttatttgagttata

SEQ ID NO: 310946 - DNA, 120 bp, Artificial Sequence
  ENSG00000134369_96 (sequence is synthesized)
aagggcactgctgggcctgagaaccaggccagaacctccttctgtatggcagctaacagtgtagggctccagtatcccaggaaggccccttatccacactccactcagctcataggagag

SEQ ID NO: 310947 - DNA, 120 bp, Artificial Sequence
  ENSG00000134369_97 (sequence is synthesized)
tcttgcataatgaagacacagacctgggcacttcagtccttgtgctcctcctctcttttccccacagcaggacctggatacagaagtactcagccaaggtgacagaataaaatccttttt

SEQ ID NO: 310948 - DNA, 120 bp, Artificial Sequence
  ENSG00000134369_98 (sequence is synthesized)
cagaagtactcagccaaggtgacagaataaaatcctttttttgttgttttctgtttgtttgtttgttttggagaaggagtctcgctttgtcacccaggctggtgtgcagtggcacgatct

SEQ ID NO: 310949 - DNA, 77 bp, Artificial Sequence
  ENSG00000134369_99 (sequence is synthesized)
agttttgccttgttggccaggctgtgctggagctcctgacctcaggtgattcacctgccacagcctcccaaagtgct

SEQ ID NO: 310950 - DNA, 120 bp, Artificial Sequence
  ENSG00000134369_100 (sequence is synthesized)
gggattacaggcgtgagccacagcaccctgccaaataagatcctttttaaaaaatatctgaaaaaagcttcatatctttacaaactcataaaatagctgattgggccatggaggagatga

SEQ ID NO: 310951 - DNA, 120 bp, Artificial Sequence
  ENSG00000134369_101 (sequence is synthesized)
caaactcataaaatagctgattgggccatggaggagatgaggctgtttagaactggttttgtttcaagtttgtcaattttccctgtatgagaacttgggtaaagcacaaagaaacataca

SEQ ID NO: 310952 - DNA, 120 bp, Artificial Sequence
  ENSG00000134369_102 (sequence is synthesized)
gtgctagtaacaggtctcctgcgccctggaactaagtgtttggaggaaggactaaaccccgggggaggtgagtataaaataattccactaagatcacctcctcagtccccagaaggctga

SEQ ID NO: 310953 - DNA, 120 bp, Artificial Sequence
  ENSG00000134369_103 (sequence is synthesized)
tggtggatcctctggccatctcctgtggggtcttactgctcctctgccatttctctatgcctgaagacacgaagatgatatcaaggcagagctaccatatcgcagccagtctctaggcta

SEQ ID NO: 310954 - DNA, 120 bp, Artificial Sequence
  ENSG00000134369_104 (sequence is synthesized)
ctgctgtgcagtggctcccactttctaatgcttttttgtttttgctttttctaacaaaacaatcttttttcaaaatgaattccaacccctgctagcttccttccccgcctccatactgtt

SEQ ID NO: 310955 - DNA, 120 bp, Artificial Sequence
  ENSG00000134369_105 (sequence is synthesized)
ttaggcagcaccgtttatgtgacagagtccgtgtttctcaaatgcatggtgttcctcaggtggagagtgggcagaagtttttgcaacactttttttttaagttattgggtgcaaaatccc

SEQ ID NO: 310956 - DNA, 120 bp, Artificial Sequence
  ENSG00000134369_106 (sequence is synthesized)
aaaccaggatatgtgtatgtctgtgtgtttatgttttttatttgaccctcccctctttcaacctacccccttttatatctaatgtagaaaaagcgaaattgaatctggaaagcaaactgt

SEQ ID NO: 310957 - DNA, 120 bp, Artificial Sequence
  ENSG00000134369_107 (sequence is synthesized)
tgtatatagttgcggtaacaatcatgaagagagagccgggctgtcccctcagtaattcattttaaataacaaattatttaaaaataaaattcatgccagagccagctgaagaggccttcc

SEQ ID NO: 310958 - DNA, 120 bp, Artificial Sequence
  ENSG00000134369_108 (sequence is synthesized)
ttcatcaccactgaggccacccccaatctgggccctctgtccatctggcatgtctcctcccagcaagattcatctgttcaatgccatttgcgtttcaataaagttatctcctgtactgtc

SEQ ID NO: 310959 - DNA, 120 bp, Artificial Sequence
  ENSG00000134369_109 (sequence is synthesized)
ggagaaaagggagcggagggcaggcgagggttaggtttccgaccctccgcgtggcccacagctcataccttttcgggtgtccccgggtgtcaggcgagagcggtcctggggggcgctggg

SEQ ID NO: 310960 - DNA, 120 bp, Artificial Sequence
  ENSG00000134369_110 (sequence is synthesized)
tgcccacccggtgaatggccgcctgagccggggaagatgcttcatctgcccctgcccagatccggaagaacggtgaatttcccccgcagctgggatgaaagcagctccatcagtagtgga

SEQ ID NO: 310961 - DNA, 120 bp, Artificial Sequence
  ENSG00000134369_111 (sequence is synthesized)
tacgcctccgccatcccggtgcctcgtgcctcttcccagaccaggattcctacaccgggcgcttctccccagctgcggccacgccaggccggcctggccctgagcccacagagagcagcc

SEQ ID NO: 310962 - DNA, 120 bp, Artificial Sequence
  ENSG00000134369_112 (sequence is synthesized)
tcccccagactgggaaaggctgcaggtccttctagaaactcctctcctagggccttccgggggagaggctctcccaagtttgctggggcggtgagggagtcagctgaggatggggaaggc

SEQ ID NO: 310963 - DNA, 120 bp, Artificial Sequence
  ENSG00000134369_113 (sequence is synthesized)
cccttcagctccccatggaatagtcccaggacaaccccgaaagcagccctctccagccgggctggatccggaagaattggcgagagacaaggcacccagggaaagaagaaaaaagcccag

SEQ ID NO: 310964 - DNA, 120 bp, Artificial Sequence
  ENSG00000134369_114 (sequence is synthesized)
gaagggactccagtctgccagacccggggcagaagcccttctcggacgagctttcacggagaaactcaaataccaggggctccggaaggtcggaagcctccaagctgcccaggaaaagac

SEQ ID NO: 310965 - DNA, 120 bp, Artificial Sequence
  ENSG00000134369_115 (sequence is synthesized)
caaagagatataaactacaaaagttctgggacccccaggtctttggagcctgatgagggggcagcttcgtgggcttcctctccagtctgcagcccagtgcagggcaagcgcccctctccc

SEQ ID NO: 310966 - DNA, 120 bp, Artificial Sequence
  ENSG00000134369_116 (sequence is synthesized)
tctccgggggccattagcttctcctcagtccatcagcagagtcagccagtcacagccacggtggcccccttccagtacaggttgcaaactgaccagaaacctggccccctctcccagggc

SEQ ID NO: 310967 - DNA, 120 bp, Artificial Sequence
  ENSG00000134369_117 (sequence is synthesized)
ttatctgggcccatagtattccaagtcctatatcaagtctctagaaggtgagggcctttagataccctttagtgtgatgtctggactggtcagtgaggagtaccaggggcatgaccccag

SEQ ID NO: 310968 - DNA, 120 bp, Artificial Sequence
  ENSG00000134369_118 (sequence is synthesized)
cttcctagggcatgaaggcaagtagaggagacctgtaagccccaggggtcctctccttaacctttacctcacggccaaagagccatcaaagaccatcgttaaaatagccctttacatttt

SEQ ID NO: 310969 - DNA, 120 bp, Artificial Sequence
  ENSG00000134369_119 (sequence is synthesized)
tatgcaaatgtgttgtgtgtccacacacacacaaacaatcttatttgatcctcactttagttctccaactactcttccaatgaaacaaccaaagctcacataggttatatggtgctgaaa

SEQ ID NO: 310970 - DNA, 120 bp, Artificial Sequence
  ENSG00000134369_120 (sequence is synthesized)
tggcaagttagcctggacgtttagtaaccagtcaagctttgctacagaagtcaagatggatgggagtctgatgccacaaaatctgtgatctctaactccagtcaggtcttcaagatacct

SEQ ID NO: 310971 - DNA, 120 bp, Artificial Sequence
  ENSG00000134369_121 (sequence is synthesized)
tggcagtcctcttacttgtccacagtcagttttcttttttattccactaccagtgattcccagctttcattgcttttttcaagctcctcattccaccactgatttgccttactctgaaca

SEQ ID NO: 310972 - DNA, 120 bp, Artificial Sequence
  ENSG00000134369_122 (sequence is synthesized)
tagctttggcgccccccttagttaagaaaatgaacattttcaagagagaactccattgacttttccccactccatgcgtttatattcatccaatacttatttatttgtctccattttgtt

SEQ ID NO: 310973 - DNA, 120 bp, Artificial Sequence
  ENSG00000134369_123 (sequence is synthesized)
ggaaggattcatcccttctggccaagagtgaccgcttatctaatgttttgggatgccctctttagcaaccatacaacccccctttacccaacacatgcccttttctacctctctaatctc

SEQ ID NO: 310974 - DNA, 120 bp, Artificial Sequence
  ENSG00000134369_124 (sequence is synthesized)
ttatgctctattcattccttccctgcttataaacctgccaaaggctcttgtatgttaaaggggaaagatgtatcaatctatgttctaactataatcttatttctttgcttcctccagtcg

SEQ ID NO: 310975 - DNA, 120 bp, Artificial Sequence
  ENSG00000134369_125 (sequence is synthesized)
atcctacatttccacctccctttcacacctaaccccactataattatgcttctgtcaccatcattctaccaaaaacactttcactgcagtcaccagtgactcccatttttccaaaatcca

SEQ ID NO: 310976 - DNA, 73 bp, Artificial Sequence
  ENSG00000134369_126 (sequence is synthesized)
tcactgcagtcaccagtgactcccatttttccaaaatccaacttacaatttttagtacttattttcctttttt

SEQ ID NO: 310977 - DNA, 120 bp, Artificial Sequence
  ENSG00000134369_127 (sequence is synthesized)
gactcatccatgttgtgtcatgtatccacacttcattcctttttgtggctgaataatattccattgtgtggatataccacagtttgtttagctgttcatcagttgataggtaggcattga

SEQ ID NO: 310978 - DNA, 120 bp, Artificial Sequence
  ENSG00000134369_128 (sequence is synthesized)
gttgttttcactttttgcctattatgaataatgctgccataaacattcatgtacaagtttgtgtgtggacatatgttttttgttctctggggtatatacctagaagtggaattgctgggt

SEQ ID NO: 310979 - DNA, 120 bp, Artificial Sequence
  ENSG00000134369_129 (sequence is synthesized)
catatggtaactctatgtttgactttttgaggaattggcaagctgttttccagagcagctacaccattttacattcctgtcagcagcatatgagggtgccgatatctccacattctttgt

SEQ ID NO: 310980 - DNA, 120 bp, Artificial Sequence
  ENSG00000134369_130 (sequence is synthesized)
gctgggattacaggcgtgagccacacacccagcccttatagctccacattcttgctaacacttactgacctcttttttgtaatagctagcttagtgggtgtgaggtggtatctcgttgtg

SEQ ID NO: 310981 - DNA, 120 bp, Artificial Sequence
  ENSG00000134369_131 (sequence is synthesized)
ggtgtgaggtggtatctcgttgtggttttgattttcatattcttaatggctaataccaagcatcttttcatgtgcttatttgctatttgtatgtctttatggagaaatgtgtattcaaat

SEQ ID NO: 310982 - DNA, 120 bp, Artificial Sequence
  ENSG00000134369_132 (sequence is synthesized)
ccttggcccacttttaaaatcaggttatttgtcttttgttgttgagctttaagagttttttaataattctgaatattagacccttatcagacacatgatttgaaaaatagtttctctcat

SEQ ID NO: 310983 - DNA, 120 bp, Artificial Sequence
  ENSG00000134369_133 (sequence is synthesized)
tgtatgggttgctgttttgctttcttgaaaatattctttgaagaacaaaagttttccattttcatgaggcatcatttatctagttttttcctttggctacttgtgctttaggtgctgtat

SEQ ID NO: 310984 - DNA, 120 bp, Artificial Sequence
  ENSG00000134369_134 (sequence is synthesized)
ctaagaaattattgcctaatccagggtcatgaagacttactcctggaattccttctaaatttttttttagttttaggtctttgttccatttttagtaaatttttgtacatggtatgaggt

SEQ ID NO: 310985 - DNA, 120 bp, Artificial Sequence
  ENSG00000134369_135 (sequence is synthesized)
aggcagtctaacttcattcttttacatgagaatatccagttgttccagcatcatttgctgaaaagactattttttcccccactgaattgtcttggcactctaggaaatcaattgactata

SEQ ID NO: 310986 - DNA, 120 bp, Artificial Sequence
  ENSG00000134369_136 (sequence is synthesized)
catatatgagtttcattctagactttcagttctattccattcttctatatgagtttctttctagactttcagttctattccattcttctatatgtctatccttggccagtaccacattgt

SEQ ID NO: 310987 - DNA, 120 bp, Artificial Sequence
  ENSG00000134369_137 (sequence is synthesized)
tttgattactgtagctttgtagtaagtttggaaattgggaagtgtgagtcctccaactttgttctttttcaaggttgttttggctactctgtgtcctttgcatttccatgtgaatttcag

SEQ ID NO: 310988 - DNA, 120 bp, Artificial Sequence
  ENSG00000134369_138 (sequence is synthesized)
gattcgtttgttaatctcagattgaattttgctagggattgcattgaatctgtatatcaatttagagagtattgcctcttaacaatgttaagtcttccaatccatgaacaggcatgcctt

SEQ ID NO: 310989 - DNA, 120 bp, Artificial Sequence
  ENSG00000134369_139 (sequence is synthesized)
tatctaaatattctttcatttctttcagtgatattttgcagtttttcagcatatgaaccttgtacttattttgttaaacttagtttttatactgttctaaactgaattgttttcttaatt

SEQ ID NO: 310990 - DNA, 120 bp, Artificial Sequence
  ENSG00000134369_140 (sequence is synthesized)
tctcttttgagttatagattactagtgtataaaaatacaattgattttttgcacattgatcttatatcctgcagacttgctgggctcacttatcagctcaattggttttacaatctcttc

SEQ ID NO: 310991 - DNA, 120 bp, Artificial Sequence
  ENSG00000134369_141 (sequence is synthesized)
ttaatctgtatttctatccatatcagtctcctgagttccagacctttacttccaaccacgtttggatgtttccacttagttgacctcatagagatatctctaacttaatatgtccaaaat

SEQ ID NO: 310992 - DNA, 120 bp, Artificial Sequence
  ENSG00000134369_142 (sequence is synthesized)
taaagtcatccccttcaccccacttacaacaaacacacaagccaaccttttcccttctgcagtttgcgtatctcaggtattatcatttgcctggttgcccaagcctctaatacgagaatc

SEQ ID NO: 310993 - DNA, 120 bp, Artificial Sequence
  ENSG00000134369_143 (sequence is synthesized)
atctttgattcctcactgtttcaccctgtatagtcagttagttctaactcctacgtagatctcaattctatccctcttctgtattgtcactaccctggctcaggtttttatcattcttct

SEQ ID NO: 310994 - DNA, 120 bp, Artificial Sequence
  ENSG00000134369_144 (sequence is synthesized)
cctagaatatttcaataatttccttactggtcttgctgtgctcgttcttccagtgctttccttgcccccagagtaatccaattatatcagttaagatcagaaattactccaggccaggca

SEQ ID NO: 310995 - DNA, 120 bp, Artificial Sequence
  ENSG00000134369_145 (sequence is synthesized)
agttaagatcagaaattactccaggccaggcacagcggcccacgctataatcccagcacttcagaaggccaagacgggaggttcactttaggccaggagttcaagacaagcctgggcaac

SEQ ID NO: 310996 - DNA, 120 bp, Artificial Sequence
  ENSG00000134369_146 (sequence is synthesized)
gtagtcctagttactccagaggctgagtctggaggactgcttgagcccaggaggtagaagctgcagtgagccacagtggttgcactgactccagcctgggtgagagagagacctggtttc

SEQ ID NO: 310997 - DNA, 120 bp, Artificial Sequence
  ENSG00000134369_147 (sequence is synthesized)
gtgagcagaagggtcgtgagccaacctgtggtaatatgcacccctatcggaccttcgtttcccaccacatccctccacggaccttgttttaggcaatgcactgacccatgctccgatttt

SEQ ID NO: 310998 - DNA, 120 bp, Artificial Sequence
  ENSG00000134369_148 (sequence is synthesized)
tagaaatttctaaaagcctggaaaggagccaggaggaggccgggaggaagccctctatggagaaggttctgcccaggcctccccaactccttacccacccgtgccccagagagaagtggc

SEQ ID NO: 310999 - DNA, 120 bp, Artificial Sequence
  ENSG00000134369_149 (sequence is synthesized)
tcgctgctcacaccccctcctgccagtgcagcgcgagtaagagcgcccaagggaccacagctggcatcccaggggttaatttcggagcagcccaggtggaggtcgagcccccagccccgt

SEQ ID NO: 311000 - DNA, 120 bp, Artificial Sequence
  ENSG00000134369_150 (sequence is synthesized)
cggcacctccaggcttccgaggccaccggaacggaggaggcttcggtggctctttgtctacctgctctgggtgttaaagagcccgctcgcagcctgcatcgccggggctcgggacagaag

SEQ ID NO: 311001 - DNA, 120 bp, Artificial Sequence
  ENSG00000134369_151 (sequence is synthesized)
agtgcaaagggccaacttaccaacataggtctttatggacagattagacatccacctgcctgtatggaggcagaagaatagacaagggagctccttgtgggtatgaaaccctgaaaggct

SEQ ID NO: 311002 - DNA, 120 bp, Artificial Sequence
  ENSG00000134369_152 (sequence is synthesized)
actcctcacaaatccggaagcttcgtagggaactggaatcatcccaggaaaaagtggccaccttgacgtctcagctttctgccaatgtgagtgccatgaagtacggaaagatcaaggcag

SEQ ID NO: 311003 - DNA, 120 bp, Artificial Sequence
  ENSG00000134369_153 (sequence is synthesized)
ttattttgactatcgttagacaagttcagccaagggaggaaaactacctggtaaggtatcccctggactgagacgtcaagggcatgcgtcttcttcacagctctatgatagaagacgagg

SEQ ID NO: 311004 - DNA, 120 bp, Artificial Sequence
  ENSG00000134369_154 (sequence is synthesized)
ggattgttcttccccttctctgagcctcaacttttatgaagaaccattttgcttctactctaattaataggtatggatgagttcatgtctgatgggctgagctccctagagaaagagaag

SEQ ID NO: 311005 - DNA, 120 bp, Artificial Sequence
  ENSG00000134369_155 (sequence is synthesized)
aagattgattaccagtggttctgcatggaggcagaaacaaccttgccattggccatggacaaaagcagttatggattataattatagggctcttagagcctttccactgccctggggggt

SEQ ID NO: 311006 - DNA, 120 bp, Artificial Sequence
  ENSG00000134369_156 (sequence is synthesized)
gttcatgtctttgttcatgccacgtaactgtgcaggcacatgattggtcattagaattctgtctagtgaccacgacactactgagaaacctaactcccattctggtctgactccttcatt

SEQ ID NO: 311007 - DNA, 120 bp, Artificial Sequence
  ENSG00000134369_157 (sequence is synthesized)
cccaactgccttttctgagcagtctccttgggcagatggtagaaacaatctgaaattcaggttgagagctagaattctttgtttctactctcagtacctccatttagaacgagtctattt

SEQ ID NO: 311008 - DNA, 120 bp, Artificial Sequence
  ENSG00000134369_158 (sequence is synthesized)
ctttagaccttagtttttctaccctgtgacatggggagaaatgaagccacctcctctaaccaggctgtggtactttctcccctgtgactgagttgcaaacagagaacataagagccattt

SEQ ID NO: 311009 - DNA, 120 bp, Artificial Sequence
  ENSG00000134369_159 (sequence is synthesized)
tcccccaaagctgtaaacaacagctgagccggatctgcaggagctttccaagtgtttgcacaaaagtaaccatgtctgcaatttccgcagtagtttctggttttctctctgcccttcctc

SEQ ID NO: 311010 - DNA, 120 bp, Artificial Sequence
  ENSG00000134369_160 (sequence is synthesized)
tctggggaacccagctgtcaggcctggggtctatccgtcggaattaggtagaagaatctccaccaagattctgaatgtttccaacacatttcagcagcagttccctcaccacactagtta

SEQ ID NO: 311011 - DNA, 120 bp, Artificial Sequence
  ENSG00000134369_161 (sequence is synthesized)
ttctctcgattctcttttcccaaaccctcaattcataagttgtaccagtttgtttgaagctcatgttaagcactttttcccactcttgggggacccataagaattgtaacataaacaaga

SEQ ID NO: 311012 - DNA, 120 bp, Artificial Sequence
  ENSG00000134369_162 (sequence is synthesized)
accatcttttctctcccttgtgccacacccaccaaagcaaatggcctgggtcacgtcctgcacaccccaggaaattcatgtctgggagatgctgggggggagaggcgccagggaggcaga

SEQ ID NO: 311013 - DNA, 120 bp, Artificial Sequence
  ENSG00000134369_163 (sequence is synthesized)
gaacattattatgtctgattcatttacactgcaatctgtcagccaccatgctgtcaaggctgggctgaagccaagaaattgaatttagagggtgatttttcttagaacaggaagttccat

SEQ ID NO: 311014 - DNA, 120 bp, Artificial Sequence
  ENSG00000134369_164 (sequence is synthesized)
ttggctaagagagaacaaactaaacacccagacacggtgggttctgcatcttaaaggcagatttttgccgagggtcagaaccctgccctcaagcaggagatgggatgctgggactctagg

SEQ ID NO: 311015 - DNA, 120 bp, Artificial Sequence
  ENSG00000134369_165 (sequence is synthesized)
aaggttccacagctctcttcaggattccgtgactccaaaccaaacttttgtcatgttccatggaacttcctagccactaaagctgagggcacaccctagatgtaggggcccagaccactt

SEQ ID NO: 311016 - DNA, 120 bp, Artificial Sequence
  ENSG00000134369_166 (sequence is synthesized)
tacccctctcaaatgctagcctttctgcagcaccactgcttagccctgaggtcttacaggtaccctagtctggggttgggattaagggaagggtcaatgtagggagaggaagtgtagggg

SEQ ID NO: 311017 - DNA, 120 bp, Artificial Sequence
  ENSG00000134369_167 (sequence is synthesized)
aggcagcacagaagagcatacaggggttcttggggcctctcatgagtagtcttccagggactacaaggagtctacaagcagacatgcaggatgtagagaagcaaaccagagaagacctga

SEQ ID NO: 311018 - DNA, 120 bp, Artificial Sequence
  ENSG00000134369_168 (sequence is synthesized)
ggtcaagaagacagatgttgcctgcacagtgggtgaaaggaaactgctcaggttgtgacatattataatctcctcagagcccaggccttgacagatttatagtaaaagtgcaagaggagg

SEQ ID NO: 311019 - DNA, 120 bp, Artificial Sequence
  ENSG00000134369_169 (sequence is synthesized)
ctctaactggactaaagggattgcctccagccctggtcctatgaagtaggctccagacatgcggagcagtggatgaaaactagagttgacccaacagggagggagaattgtaagccagta

SEQ ID NO: 311020 - DNA, 120 bp, Artificial Sequence
  ENSG00000134369_170 (sequence is synthesized)
ggagccatgagagtgccgtcgatttcctagagctctgcatgaaggagctgcgcagagtatgcccacttcttgctagggtcaccaacttgctcagatagtctcacgatggctatttctcca

SEQ ID NO: 311021 - DNA, 120 bp, Artificial Sequence
  ENSG00000134369_171 (sequence is synthesized)
tccccaagtgctcccctttctagcccccggcctcattccctttaccttgcctatacatcttgcagccagttggccagctagaggtcaaactatgccaaaccaagtggccttagctcctcc

SEQ ID NO: 311022 - DNA, 120 bp, Artificial Sequence
  ENSG00000134369_172 (sequence is synthesized)
actgagcacctttccgaactagcctgcctcttatccagagagccctttggtatccttcactcctcatgaaacagacctgacacctagtggccaaacggtggaatgcctctgcagtttcct

SEQ ID NO: 311023 - DNA, 120 bp, Artificial Sequence
  ENSG00000134369_173 (sequence is synthesized)
tccagccttgcaaacctggagaatccgggaacaaggagcagctgcaaagcaagaaagggtgaagcagtggagtagcagaggaggaagaaacgcaccaaatagtttctgccaggagattat

SEQ ID NO: 311024 - DNA, 120 bp, Artificial Sequence
  ENSG00000134369_174 (sequence is synthesized)
ttggtcccttgggggccggcccactccacaatgcaggagttaaaccaaaataataggaacgaccccagaggctatggcccgcctaccaagttggccacaccaaatatcacatagagcaga

SEQ ID NO: 311025 - DNA, 120 bp, Artificial Sequence
  ENSG00000134369_175 (sequence is synthesized)
gggatagtcctacctctggtagttgataggttttagatctcaagtctccaggagcctctggaaacctgccctaccctcaacctggcttcattattcaagaagctggttcccaccagaaaa

SEQ ID NO: 311026 - DNA, 120 bp, Artificial Sequence
  ENSG00000134369_176 (sequence is synthesized)
tttctttgatttcccctttgtctgctcaggaaaatcaatatttttttaaccaccaagaggtttgctggcattggtcagctccgagatacaggaaatcagttaaaactatttcccattgtc

SEQ ID NO: 311027 - DNA, 120 bp, Artificial Sequence
  ENSG00000134369_177 (sequence is synthesized)
agttattgcctttcccccagccttatgcaacttagcaatctctttctgtgtttgtttcaggctaatctggtggctgcttttgagcagagcctggtgaatatgacatcccgcctgcgacac

SEQ ID NO: 311028 - DNA, 120 bp, Artificial Sequence
  ENSG00000134369_178 (sequence is synthesized)
ctggcagagacggccgaggagaaggtgagaggcctgggaaagggtgggaggggtgggtgcggcgagggggttctcctggacagagaggccgaagctgaccatctgttcttgctcatgaat

SEQ ID NO: 311029 - DNA, 120 bp, Artificial Sequence
  ENSG00000134369_179 (sequence is synthesized)
gccagtttctccccacctcactgtcaccctggattctcaatctgccccccaatacagtgtgagcatattccttatcccaattccttgcccttctctatcaagttttgcagaattccaatg

SEQ ID NO: 311030 - DNA, 120 bp, Artificial Sequence
  ENSG00000134369_180 (sequence is synthesized)
cctcgcccattgcctgacacatcataagggctcagggctcctgctaatcccaactaatgacgctgttttctttttttgagatggagtttcgttcttgtcacccaggctggagtgcactgg

SEQ ID NO: 311031 - DNA, 120 bp, Artificial Sequence
  ENSG00000134371_0 (sequence is synthesized)
agtcaggcgttctccgcgggcagccggcggcggggccttgccttacagcgcggggtcctcggcggcctgggtggctactgcccctgctgctgtcgtaggcgaggacggctgttagtgctg

SEQ ID NO: 311032 - DNA, 120 bp, Artificial Sequence
  ENSG00000134371_1 (sequence is synthesized)
ctgctgttggttcgtcgcggcggcgaaggaggaggaggaagagggcgaggcgacaagagaagaaggaggcaggcgcggcggcagcggcggcgccccgagccggcggaggcgagggggggg

SEQ ID NO: 311033 - DNA, 120 bp, Artificial Sequence
  ENSG00000134371_2 (sequence is synthesized)
aagatggcggacgtgcttagcgtcctgcgacagtacaacatccagaagaaggagattgtggtgaagggagacgaagtgatcttcggggagttctcctggcccaagaatgtgaagaccaac

SEQ ID NO: 311034 - DNA, 120 bp, Artificial Sequence
  ENSG00000134371_3 (sequence is synthesized)
tatgttgtttgggggactggaaaggaaggccaacccagagagtactacacattggattccattttatttctacttaataacgtgcacctttctcatcctgtttatgtccgacgtgcagct

SEQ ID NO: 311035 - DNA, 120 bp, Artificial Sequence
  ENSG00000134371_4 (sequence is synthesized)
actgaaaatattcctgtggttagaagacctgatcgaaaagatctacttggatatctcaatggtgaagcgtcaacatcggcaagtatagacagaagcgctcccttagaaataggtcttcag

SEQ ID NO: 311036 - DNA, 120 bp, Artificial Sequence
  ENSG00000134371_5 (sequence is synthesized)
cgatctactcaagtcaaacgagctgcagatgaagttttagcagaagcaaagaaaccacgaattgaggatgaagagtgtgtgcgccttgataaagagagattggctgcccgtttggagggt

SEQ ID NO: 311037 - DNA, 120 bp, Artificial Sequence
  ENSG00000134371_6 (sequence is synthesized)
cacaaagaagggattgtacagactgaacagattaggtctttgtctgaagctatgtcagtggaaaaaattgctgcaatcaaagccaaaattatggctaagaaaagatctactatcaagact

SEQ ID NO: 311038 - DNA, 120 bp, Artificial Sequence
  ENSG00000134371_7 (sequence is synthesized)
gatctagatgatgacataactgcccttaaacagaggagttttgtggatgctgaggtagatgtgacccgagatattgtcagcagagagagagtatggaggacacgaacaactatcttacaa

SEQ ID NO: 311039 - DNA, 120 bp, Artificial Sequence
  ENSG00000134371_8 (sequence is synthesized)
agcacaggaaagaatttttccaagaacatttttgcaattcttcaatctgtaaaagccagagaagaagggcgtgcacctgaacagcgacctgccccaaatgcagcacctgtggatcccact

SEQ ID NO: 311040 - DNA, 120 bp, Artificial Sequence
  ENSG00000134371_9 (sequence is synthesized)
ttgcgcaccaaacagcctatcccagctgcctataacagatacgatcaggaaagattcaaaggaaaagaagaaacggaaggcttcaaaattgacactatgggaacctaccatggtatgaca

SEQ ID NO: 311041 - DNA, 120 bp, Artificial Sequence
  ENSG00000134371_10 (sequence is synthesized)
ctgaaatctgtaacggagggtgcatctgcccggaagactcagactcctgcagcccagccagtaccaagaccagtttctcaagcaagacctcccccaaatcagaagaaaggatctcgaaca

SEQ ID NO: 311042 - DNA, 120 bp, Artificial Sequence
  ENSG00000134371_11 (sequence is synthesized)
cccattatcataattcctgcagctaccacctctttaataaccatgcttaatgcaaaagaccttctacaggacctgaaatttgtcccatcagatgaaaagaagaaacaaggttgtcaacga

SEQ ID NO: 311043 - DNA, 120 bp, Artificial Sequence
  ENSG00000134371_12 (sequence is synthesized)
gaaaatgaaactctaatacaaagaagaaaagaccagatgcaaccagggggcactgcaattagtgttacagtaccttatagagtagtagaccagccccttaaacttatgcctcaagactgg

SEQ ID NO: 311044 - DNA, 120 bp, Artificial Sequence
  ENSG00000134371_13 (sequence is synthesized)
gaccgcgttgtagccgtttttgtgcagggtcctgcatggcagttcaaaggttggccatggcttttgcctgatggatcaccagttgatatatttgctaaaattaaagccttccatctgaag

SEQ ID NO: 311045 - DNA, 120 bp, Artificial Sequence
  ENSG00000134371_14 (sequence is synthesized)
tatgatgaagttcgtctggatccaaatgttcagaaatgggatgtaacagtattagaactcagctatcacaaacgtcatttggatagaccagtgttcttacggttttgggaaacattggac

SEQ ID NO: 311046 - DNA, 120 bp, Artificial Sequence
  ENSG00000134371_15 (sequence is synthesized)
aggtacatggtaaagcataaatcgcacttgagattctgaattatttggctcctccatttctggaaattgagactcaagctttatgaatttatcaagaacttaaaaatgaagaaggtcaca

SEQ ID NO: 311047 - DNA, 120 bp, Artificial Sequence
  ENSG00000134371_16 (sequence is synthesized)
gattgatcttttataagaccttatttgatgctttgtgcttcaaggagatgatacctgtcatccatataagcaaactttttggcttacaactatttttttaatattagccttctagtctgt

SEQ ID NO: 311048 - DNA, 120 bp, Artificial Sequence
  ENSG00000134371_17 (sequence is synthesized)
aatggaaattgtatattttgatagaagttttttctccattggttaaattagcattacttaaaatttgtttctttagaaaataaatgcaggttataaatgtgtgtatatttagagattata

SEQ ID NO: 311049 - DNA, 120 bp, Artificial Sequence
  ENSG00000134371_18 (sequence is synthesized)
aggctctctgagccatcttctgatttttcattgctctataattctttttactgaaaatactatgttatgaatggtattaaattttagtctctggaacatccaaaaccaagcaaagggatg

SEQ ID NO: 311050 - DNA, 120 bp, Artificial Sequence
  ENSG00000134371_19 (sequence is synthesized)
tgactattttgaatgaatcagaatgtcaacttgtatgtacactatatctacacttactcattatttaaaaagaataatgaaaaatctagatcaattcttcaatttgattgaactgttcag

SEQ ID NO: 311051 - DNA, 120 bp, Artificial Sequence
  ENSG00000134371_20 (sequence is synthesized)
ccttttcaagatttctttatttacaaatgattacatttaaatgaatgtacattcttctcactgactttggtgattttgaaacctagaatgatgtgtttctatctgtaatatctttccatt

SEQ ID NO: 311052 - DNA, 120 bp, Artificial Sequence
  ENSG00000134371_21 (sequence is synthesized)
tgaaaaaaatctcaaaacacagattaaaaccacaataggctgtagtattttttattttgggagccagagtatgatttgggggaagaatatgtatcagccctattgcagtataactttaag

SEQ ID NO: 311053 - DNA, 120 bp, Artificial Sequence
  ENSG00000134371_22 (sequence is synthesized)
ctccttttctctttagtccacttttgattgtaatttttatggtataggattttgaatcttctattttaggcttgtcagtcttggagttcttatcttccattatccctaaatattgataaa

SEQ ID NO: 311054 - DNA, 120 bp, Artificial Sequence
  ENSG00000134371_23 (sequence is synthesized)
ctcccaggcaccaaagaaaacatttgcttaattgtctgaaaagaaacaagagaaaaacactggtatttttatgtctgtattcaatatggtataaaatataaaaactatattttaacttag

SEQ ID NO: 311055 - DNA, 120 bp, Artificial Sequence
  ENSG00000134371_24 (sequence is synthesized)
catttgccttgaaccttgatttcactttgttttttttttttccttaaaggcaactaggaagctttactttcctaaagtgtttttgccattggaatttttgctgatcacagtcttatgtca

SEQ ID NO: 311056 - DNA, 120 bp, Artificial Sequence
  ENSG00000134371_25 (sequence is synthesized)
tttttttctctgtttttattcccagcaattttctcctaggttaacatatttttggtgaacgtttaggcctttcataggtattaagctgacattatctagcttcttaatgaaatttaacac

SEQ ID NO: 311057 - DNA, 120 bp, Artificial Sequence
  ENSG00000134371_26 (sequence is synthesized)
tgtcacaaaaatgagaagttattattttttaagtgatcacatagttcataccactagtaactagaaaagatatttattcacatgatatttacaaggctcttcagaagggaacagtcagca

SEQ ID NO: 311058 - DNA, 120 bp, Artificial Sequence
  ENSG00000134371_27 (sequence is synthesized)
ttttaaattactagattttagcatacttaacaaggtttgaacagattctacccctattttcctccctttttagcgtcttctttccttaaagataaaagaaaactcaaatttgtttacatt

SEQ ID NO: 311059 - DNA, 120 bp, Artificial Sequence
  ENSG00000134371_28 (sequence is synthesized)
aggctttcttagcatataaatatatttccaaaataaattacatgttgtgtaaactttctccatgatgaaatagtcaaggaccagaatctgtaatatttttatgtaagattacttgtcaag

SEQ ID NO: 311060 - DNA, 120 bp, Artificial Sequence
  ENSG00000134371_29 (sequence is synthesized)
actactacaagtcagtatgaactaccttcccataaagatttttggtatttgtacttatttatgaactttacttgagacagaatatggttaaaattaggaacatctactttgaatgaggtt

SEQ ID NO: 311061 - DNA, 120 bp, Artificial Sequence
  ENSG00000134371_30 (sequence is synthesized)
tatttttctattttgaatttgccttatgtatattcaaaggcttatggaaatactgtaaaggaacattaggaaaaggacaaataggctataaccatctatcttaaaatcagacccttagta

SEQ ID NO: 311062 - DNA, 120 bp, Artificial Sequence
  ENSG00000134371_31 (sequence is synthesized)
taagcacctctttttcttttcctctttgacaatttagtctcttatttaggtccatgtaattaatttcattccattattttttagctgtttattctaaaaaacaaaaattttcagccactc

SEQ ID NO: 311063 - DNA, 120 bp, Artificial Sequence
  ENSG00000134371_32 (sequence is synthesized)
ccatttattctcccatgacatggtcctatatagcagtacttaacacagtgccttgcacatagtaggcattcagtaaatacttacatgcatgaatgaataatgtattttcagtgtaacaaa

SEQ ID NO: 311064 - DNA, 120 bp, Artificial Sequence
  ENSG00000134371_33 (sequence is synthesized)
tttattataaaagtgtagttcgactcttcttggtcttggagtttgagagtacagaattacagggaatgaagagaggtataagtagatattttaatggaaatgaagtataaattaataact

SEQ ID NO: 311065 - DNA, 120 bp, Artificial Sequence
  ENSG00000134371_34 (sequence is synthesized)
tgacttacccctccataagttactgctaactggagatacccttgtatgcccaacctgtaaaggaaaaagttctatttctatatttataggacattcttctcagtcaaggaacagtaagaa

SEQ ID NO: 311066 - DNA, 120 bp, Artificial Sequence
  ENSG00000134371_35 (sequence is synthesized)
atatgtaggtttcaatcagttgctctcaaccctgactgcattttagaatcatttggagagtttttaaaaatatccatgcctgaatcttgattcccattttcatgtaatttgagacaagac

SEQ ID NO: 311067 - DNA, 120 bp, Artificial Sequence
  ENSG00000134371_36 (sequence is synthesized)
ctggtcatcagtattttttttaaagttctccaggtaatttgaatgtgcaggaaggattcagaatcactggtttaatttgttattgaaaacagtaccagtattaaatgtgtttcctcttcc

SEQ ID NO: 311068 - DNA, 120 bp, Artificial Sequence
  ENSG00000134371_37 (sequence is synthesized)
ttcttttctgtatgtatgtgtggtttttgattttttgttgttgttgttgttttgtggccaccctttgcactagaccatcccttttattggtggtattggcctatattcccattgacaaat

SEQ ID NO: 311069 - DNA, 120 bp, Artificial Sequence
  ENSG00000134371_38 (sequence is synthesized)
ataggagtattttactgtttaatatttaaacaatgtttaatgtatttcattattaactagtattatagtttgtttttttcccatgtctccataacttttactaacatttgtttttagcag

SEQ ID NO: 311070 - DNA, 120 bp, Artificial Sequence
  ENSG00000134371_39 (sequence is synthesized)
tttactaacatttgtttttagcagcacaacagtaatccatataaaaacaactaattcataatgaggaaaatctcataatttttaaggcagaaagaagtattaatttttgatctgccatgt

SEQ ID NO: 311071 - DNA, 120 bp, Artificial Sequence
  ENSG00000134371_40 (sequence is synthesized)
agaatgagacaaatacagtttgcttatgaaaggaaagtggcatacttttaaattggtctacacagaaaagtaaaagtaaactattcatttaaataagattcattatctaataaatattga

SEQ ID NO: 311072 - DNA, 120 bp, Artificial Sequence
  ENSG00000134371_41 (sequence is synthesized)
gggaatatttttcctaaataaaaatttttctgactgctaacaaaaattaaagtgattacattgttcttttttggaggggtggggaggaatatttgttgaactaaagtatataaaattttt

SEQ ID NO: 311073 - DNA, 120 bp, Artificial Sequence
  ENSG00000134371_42 (sequence is synthesized)
tgagactagcagtatattttataatattacaaatacaacaattatttataaaagctagtcaaattaatggcttagaaagtagctgtaaactttgtgttttgaaattgcttgtttaaatgc

SEQ ID NO: 311074 - DNA, 120 bp, Artificial Sequence
  ENSG00000134371_43 (sequence is synthesized)
tctttttaaattttttatttttaatttttttggaagtttattaaagcccttcatatacacatactttttaaaaaaagattcttaataaagaaattattggtttgtctggttaaagtccat

SEQ ID NO: 311075 - DNA, 120 bp, Artificial Sequence
  ENSG00000134371_44 (sequence is synthesized)
tttgtctggttaaagtccatatagaatgctgagaaataatttataaaataagaactatagaaatttgttctcagctgaaaagttggcagctgctctgtttctttaaaaaagtacaacatg

SEQ ID NO: 311076 - DNA, 120 bp, Artificial Sequence
  ENSG00000134371_45 (sequence is synthesized)
aaaatttaattacattagccttaatattacttgactgaatttctactatttattcacttgtgtttgagattcacccagctattctaatgatagaaataaaaagtggagaaatgactaaag

SEQ ID NO: 311077 - DNA, 120 bp, Artificial Sequence
  ENSG00000134371_46 (sequence is synthesized)
ttgacttaagttaagaattggagtgggaattttgaaatgccatgtcctatatattctggcatatttgttggcacatttgcaagtatgttgatcccagcattgtttatatctgttggaata

SEQ ID NO: 311078 - DNA, 120 bp, Artificial Sequence
  ENSG00000134371_47 (sequence is synthesized)
tctgttggaataataactaaggaaaaattgaaaatgtataatagatgtataaagatttatatttagttagtatataatagataatacttgcaggttttttatgtgttttgggtttctgtg

SEQ ID NO: 311079 - DNA, 120 bp, Artificial Sequence
  ENSG00000134371_48 (sequence is synthesized)
taatctttataagggcatcttggaagttataaatatgtgccatttactgaaaagtgggaagcatttttatatgagtaaagctaatgaaataaaactagttttattgccaaaattcaaaaa

SEQ ID NO: 311080 - DNA, 120 bp, Artificial Sequence
  ENSG00000134371_49 (sequence is synthesized)
cttgtttttaacaatgtaatgtctttcgctctttaaagagatggattatagtgattataatgcttacaaagtatgtaattaacagaactaaatacttgggtatctgtgaatataagcctt

SEQ ID NO: 311081 - DNA, 88 bp, Artificial Sequence
  ENSG00000134371_50 (sequence is synthesized)
ggggcttcacaattagttattatgaatgtcaattgtacaattctgaaatgtcttatgtttttagcagccccagtttttgttagtggta

SEQ ID NO: 311082 - DNA, 120 bp, Artificial Sequence
  ENSG00000134371_51 (sequence is synthesized)
tgtcttatgtttttagcagccccagtttttgttagtggtaccatcatttttccttagaaaatacccaagcttgaaagttttagtcatttgttcttctgttaccttcattcatttaaaaaa

SEQ ID NO: 311083 - DNA, 120 bp, Artificial Sequence
  ENSG00000134371_52 (sequence is synthesized)
aaagaattctaatattactgactgtaggaaattggtcagggtggtgggagaaatagaaaaaagatgcaaaccttcttggaaggctgggaggttttgcaaaagctttgaaagataatttgg

SEQ ID NO: 311084 - DNA, 120 bp, Artificial Sequence
  ENSG00000134371_53 (sequence is synthesized)
ctgaagtcaactggattctcttacccggagcctgatagcaaagattagataacctggggatgtaaagaaattgatctagataagttagtttacttaggcctcccagaacgtggcctttaa

SEQ ID NO: 311085 - DNA, 120 bp, Artificial Sequence
  ENSG00000134371_54 (sequence is synthesized)
cgtggcctttaatcaactgcaggagtcgggaggtaggggtggcgggttggaggtggtgtggtggggtggcgaggcagtggtgaccacgttaattacccacaagtgtgttgactcaaagcc

SEQ ID NO: 311086 - DNA, 66 bp, Artificial Sequence
  ENSG00000134371_55 (sequence is synthesized)
atttttagtagagacgggggttcaccacgttagccaggttggtcttgatttcctgacctcgcgatc

SEQ ID NO: 311087 - DNA, 120 bp, Artificial Sequence
  ENSG00000134371_56 (sequence is synthesized)
tgatctgattggggagggacacattagtcacactataaaattgtgactatgacaagtgttaaaggtacgttgtgcaacaagagcctaaaattgggggatttgttgcaggagtcagaatac

SEQ ID NO: 311088 - DNA, 120 bp, Artificial Sequence
  ENSG00000134371_57 (sequence is synthesized)
ttcatttaggaggtaattcttgaataagatcagaagtttatgtaggatttaacttggtgatgatgacaggaaaacacattttaggagcagtgaacaaaaagcagtagtaaaagccctgtg

SEQ ID NO: 311089 - DNA, 120 bp, Artificial Sequence
  ENSG00000134371_58 (sequence is synthesized)
atggggagagagtggggagtagaaagatttgaaagaagactggttattgtatatattttaaggatgcttgtaggaaagtttgtttttcttcttcctgcctgttcgtaaatgttagtggat

SEQ ID NO: 311090 - DNA, 120 bp, Artificial Sequence
  ENSG00000134371_59 (sequence is synthesized)
tattacattacattgcactaacgtttatgaacagtcaggaagaagaagatggtaaggtagatcatatgtctcttttagcatgcttctgatggagtcattcattgtgccaatctaaatgtg

SEQ ID NO: 311091 - DNA, 120 bp, Artificial Sequence
  ENSG00000134371_60 (sequence is synthesized)
gccacagatatgttttattaggcatccattataatttaagtttttatcttattcaccaccatttaaaaattagagcttgtcacataaacagtctggatttccagcttccttaaaatctat

SEQ ID NO: 311092 - DNA, 120 bp, Artificial Sequence
  ENSG00000134371_61 (sequence is synthesized)
ctggcatgactgcgtactgggtctgtagtctcacatggcaacagccacatccacctgagcaggagctacctcctttagataagaggttttctctagattgccacaggcctcattactctg

SEQ ID NO: 311093 - DNA, 120 bp, Artificial Sequence
  ENSG00000134371_62 (sequence is synthesized)
tgttaaagataagttaatcagttggaaatacaacaaatataaggctttgaagtcagtgctggctttgattttcagttctaccattcattctcctgcttgtgaagttgaggaggttattta

SEQ ID NO: 311094 - DNA, 120 bp, Artificial Sequence
  ENSG00000134371_63 (sequence is synthesized)
acctttctatcagtgattttgtttttattttataatatatataatagaacttacatcatagtattgttgaagattaaaggagacactgtataaaatgcttagtacaaagaggcttaacaa

SEQ ID NO: 311095 - DNA, 120 bp, Artificial Sequence
  ENSG00000134371_64 (sequence is synthesized)
caaagaggcttaacaaatggtagctacttgtattattaatttatgattctgtaaacttaattagatgtatgtgtaaatgtaggcaactatatagctttattgtacttataatttattata

SEQ ID NO: 311096 - DNA, 120 bp, Artificial Sequence
  ENSG00000134371_65 (sequence is synthesized)
tttagtattgttaatgatataattttcattcaaagttataaagactagtttatataaatattatgatagtctttttctttcaagtaattggggtgtttttgcaacaactatgtatgttta

SEQ ID NO: 311097 - DNA, 120 bp, Artificial Sequence
  ENSG00000134371_66 (sequence is synthesized)
tcttatagcagagatcttttgcatttgagagaaagtagctgcaaataagttgtttaaagagggtaataactaggttggccttttccatccatctgttaggactcatacttagaaagaaat

SEQ ID NO: 311098 - DNA, 120 bp, Artificial Sequence
  ENSG00000134371_67 (sequence is synthesized)
gtaatttcttttagttttaagttactgattttctggacaggatggtggctcacagctataatcctagaactttgggaggctgaggcaggagggtagcttgaggccaggagtttgagacca

SEQ ID NO: 311099 - DNA, 120 bp, Artificial Sequence
  ENSG00000134371_68 (sequence is synthesized)
gcctgtgcaaagcagcgagaccctgtctctaaaaataaaaaaaaaaattaagtaactttcatctgaaaattatataaagtgttcaggattttaatatgtagttacataattataagtagg

SEQ ID NO: 311100 - DNA, 120 bp, Artificial Sequence
  ENSG00000134371_69 (sequence is synthesized)
aatattacttttataaaatgttttttctgtactctgtgtttagactggcatattattctatttgagaatattatattacactttaaacaattttcaaaacttgttgcttgtcttgatatt

SEQ ID NO: 311101 - DNA, 120 bp, Artificial Sequence
  ENSG00000134371_70 (sequence is synthesized)
tcaggaaacagagtggttctatcatgtgtccgcctagcagtataaaggtgtaccccttaaatgaaacactattttttatatatatgtaaaaactgtttacaaaatgtaaaaattaagata

SEQ ID NO: 311102 - DNA, 120 bp, Artificial Sequence
  ENSG00000134371_71 (sequence is synthesized)
gtatgtatataatagtccattgtatcccttaagttttgaaagtttattttatatacttgttacctgttacatgaacatattatgtgttacggaacatatatccgtattaacatattatct

SEQ ID NO: 311103 - DNA, 120 bp, Artificial Sequence
  ENSG00000134371_72 (sequence is synthesized)
gttgtatacagttttttgttagatatgcatttttcatagacttttctaagaagccatcacgtaagtgaataggcaatatttttttctcttttagcacaaagaagctcaacaaatggtact

SEQ ID NO: 311104 - DNA, 120 bp, Artificial Sequence
  ENSG00000134371_73 (sequence is synthesized)
tgtaaaaaatcctttatatcccttttataataattttcccccttgtgattttttccaactttttttgacgggggcagataatgttctggttatagatttggaccaagtcttaatataagg

SEQ ID NO: 311105 - DNA, 120 bp, Artificial Sequence
  ENSG00000134371_74 (sequence is synthesized)
gagataaaagagagaactttatattatgatttgttggcctgtttgttacagcaaattaagcttcagttttctcatcagaaaggtggtataacttccttagggatttgttttgaggtttaa

SEQ ID NO: 311106 - DNA, 120 bp, Artificial Sequence
  ENSG00000134371_75 (sequence is synthesized)
ctgtatccagttacaccttgtttagcattgcccttttcactgcttctttaaaagtttattttgtttttttattactgtttttgagatggagtttcactgtctcacccaggctggagtgcg

SEQ ID NO: 311107 - DNA, 71 bp, Artificial Sequence
  ENSG00000134371_76 (sequence is synthesized)
ttgagatggagtttcactgtctcacccaggctggagtgcggtagcgtgatctcagctcagtgcaacatccg

SEQ ID NO: 311108 - DNA, 120 bp, Artificial Sequence
  ENSG00000134371_77 (sequence is synthesized)
tcttctttcgttgttgcctggcagctgcaggaaggattttgagcagttttaatggggttttagtctataatatgaaatccacggttcctcagctgctgcacaggcaggcagcagtttaaa

SEQ ID NO: 311109 - DNA, 120 bp, Artificial Sequence
  ENSG00000134375_0 (sequence is synthesized)
atcactcgcggcattggagtcaagatggaggagtacgcgcgagagccttgcccatggcgaattgtggatgactgtggtggggcctttacgatgggtaccattggtggtggtatctttcaa

SEQ ID NO: 311110 - DNA, 120 bp, Artificial Sequence
  ENSG00000134375_1 (sequence is synthesized)
gcaatcaaaggttttcgcaattctccagtgggagtaaaccacagactacgagggagtttgacagctattaaaaccagggctccacagttaggaggtagctttgcagtttggggagggctg

SEQ ID NO: 311111 - DNA, 120 bp, Artificial Sequence
  ENSG00000134375_2 (sequence is synthesized)
ttttccatgattgactgtagtatggttcaagtcagaggaaaggaagatccctggaactccatcacaagtggtgccttaacgggagccatactggcagcaagaaatggaccagtggccatg

SEQ ID NO: 311112 - DNA, 120 bp, Artificial Sequence
  ENSG00000134375_3 (sequence is synthesized)
gttgggtcagccgcaatgggtggcattctcctagctttaattgaaggagctggtatcttgttgacaagatttgcctctgcacagtttcccaatggtcctcagtttgcagaagacccctcc

SEQ ID NO: 311113 - DNA, 120 bp, Artificial Sequence
  ENSG00000134375_4 (sequence is synthesized)
cagttgccttcaactcagttaccttcctcaccttttggagactatcgacaatatcagtaggacttctttcctaggatttctttaacagaacgagttgtggttcgagaaggatttcagaag

SEQ ID NO: 311114 - DNA, 120 bp, Artificial Sequence
  ENSG00000134375_5 (sequence is synthesized)
atcaagttacagtctgtttttaaaaccataggtgggacagctatggccaataggctataaagagacatttagcacttttttctatttaaaggaacaagcggggaagggtgctaaaagata

SEQ ID NO: 311115 - DNA, 120 bp, Artificial Sequence
  ENSG00000134375_6 (sequence is synthesized)
gaaggaccaaaaggccaaaaaacagtgaaatatgatcatcatctccttgcggacttctctgcctggttttgtgtgttctgttattcaaacaataaaaagctggtggaacttactctttct

SEQ ID NO: 311116 - DNA, 120 bp, Artificial Sequence
  ENSG00000134375_7 (sequence is synthesized)
tttaagataagttgtagacttcgatgtttcatgctcatgtacttcaaataatgcatgttttatagttagtccctcatcacttgaagtgacttctgagaattatgcagagtcaacatggat

SEQ ID NO: 311117 - DNA, 120 bp, Artificial Sequence
  ENSG00000134375_8 (sequence is synthesized)
catttcacagtgagatgctttatggattgaaggatatggtaaaatgtttatagtttactttgaaagtaaaatatactatgtcttggttttgaggatattggatacaaaactctcttcctt

SEQ ID NO: 311118 - DNA, 120 bp, Artificial Sequence
  ENSG00000134375_9 (sequence is synthesized)
tagggctactgagtcttgattcctgatcatcagaaatttcaccagaaacaacttgcttccaatatacccaattctatatgaagaattcatggagagtgtactggcactggaagagtttag

SEQ ID NO: 311119 - DNA, 120 bp, Artificial Sequence
  ENSG00000134375_10 (sequence is synthesized)
tgtttcttgtatgcttgaaaataaagtatgtactgttttgaatgtgttccaagtcctctgcataaacgatgtattttggggtctggttgggcctggaaaatggatgagcacttcagaaca

SEQ ID NO: 311120 - DNA, 120 bp, Artificial Sequence
  ENSG00000134375_11 (sequence is synthesized)
ggtcattttcctgatattggaagtgacatgtggccctataggaggcatgatgttagttaattacacatttgcctacatctgtgggaaatggagaacaaagccatgtgggtactgtaaaca

SEQ ID NO: 311121 - DNA, 120 bp, Artificial Sequence
  ENSG00000134375_12 (sequence is synthesized)
cacgtttatcttttggcccaatgccatacatatggtaggcatttaattactgattgtgtttggataatttgggaattttcgactgtggtaaaatatacataaaataatacttattaacca

SEQ ID NO: 311122 - DNA, 120 bp, Artificial Sequence
  ENSG00000134375_13 (sequence is synthesized)
agtttggtctaacggtttgtcacaaacatatatccctatagtttcttcttgatttgtagtttgtttgaaaaattaacctgaattatgatacccatttgaaaatcttgtctctgtccttca

SEQ ID NO: 311123 - DNA, 120 bp, Artificial Sequence
  ENSG00000134375_14 (sequence is synthesized)
ttgtctctgtccttcagacactcggtgattttttttttttttccttctccagaagaaagacagttatttaaagctcaggtgtgaggccgggcacggggctcacgcctgtaatcccagcac

SEQ ID NO: 311124 - DNA, 120 bp, Artificial Sequence
  ENSG00000134375_15 (sequence is synthesized)
ctcccagggcatagaattactgagttagaagaaataactggtttgtttttacataggatgtgatgtctaatattgtactaaaaatgaggatgcttatgctatactccactggtactatcc

SEQ ID NO: 311125 - DNA, 62 bp, Artificial Sequence
  ENSG00000134375_16 (sequence is synthesized)
aaaatgaggatgcttatgctatactccactggtactatccactggatttattttgcaaactt

SEQ ID NO: 311126 - DNA, 120 bp, Artificial Sequence
  ENSG00000134375_17 (sequence is synthesized)
cgcctcggcctcccaaaatgctgggattgtaggcgtgagctaccgcacctggctgtttttgtatttagatagagtttaagtgcaaagtaatctgctgatttaaggttgttttaaattcat

SEQ ID NO: 311127 - DNA, 120 bp, Artificial Sequence
  ENSG00000134375_18 (sequence is synthesized)
taaggttgttttaaattcatatctgaggaataaaggatggacaggcaatttccatccctttgatgttccatagttctagctatttatatcattcatttgccccttcagcatggattggct

SEQ ID NO: 311128 - DNA, 120 bp, Artificial Sequence
  ENSG00000134375_19 (sequence is synthesized)
tacacctgtaatacgttccagaatagctggatttcttttgttttcccatcggtgattttcatagagtagatgctcaatgacatataatgcagaaaggccaaaaatagaggtaagtaaagc

SEQ ID NO: 311129 - DNA, 120 bp, Artificial Sequence
  ENSG00000134375_20 (sequence is synthesized)
tatgaaagaaaagaagaacgaaagaggaagcagagtagtttgattttgtttattgctgcttaaaccagagagatatgttattctggaagggtgatttgcttgtttttacacatatgcagc

SEQ ID NO: 311130 - DNA, 74 bp, Artificial Sequence
  ENSG00000134375_21 (sequence is synthesized)
ttctggaagggtgatttgcttgtttttacacatatgcagcctgactgttttaggcttggcttcttttttgtttg

SEQ ID NO: 311131 - DNA, 120 bp, Artificial Sequence
  ENSG00000134375_22 (sequence is synthesized)
aaagtgctgggattacaggtgtgagctatggcacccggctggcttatttcttataggctttgggccgttgctaattttccagctgatataatacaatccagctttattcgaaagataagt

SEQ ID NO: 311132 - DNA, 120 bp, Artificial Sequence
  ENSG00000134375_23 (sequence is synthesized)
tgatataatacaatccagctttattcgaaagataagtattctaactcttgttcggtgtttattcaaacttgtgtttgcatgtatttgtttggactataaattttgagactatagtgagta

SEQ ID NO: 311133 - DNA, 120 bp, Artificial Sequence
  ENSG00000134376_0 (sequence is synthesized)
agtccctgtattttctgtgaaggagctgtaagtagggtgggacagagatggcacctgggggttctgaggcacccgctcctctctgagacagacagggatcaggagccggactgggaccag

SEQ ID NO: 311134 - DNA, 120 bp, Artificial Sequence
  ENSG00000134376_1 (sequence is synthesized)
accaccagcaacacaccagaggatgttctctaaataagaccatggcacttaagaacattaactaccttctcatcttctacctcagtttctcactgcttatctacataaaaaattcctttt

SEQ ID NO: 311135 - DNA, 120 bp, Artificial Sequence
  ENSG00000134376_2 (sequence is synthesized)
gcaataaaaacaacaccaggtgcctctcaaattcttgccaaaacaattctacatgcaaagatttttcaaaagacaatgattgttcttgttcagacacagccaataatttggacaaagact

SEQ ID NO: 311136 - DNA, 120 bp, Artificial Sequence
  ENSG00000134376_3 (sequence is synthesized)
gtgacaacatgaaagacccttgcttctccaatccctgtcaaggaagtgccacttgtgtgaacaccccaggagaaaggagctttctgtgcaaatgtcctcctgggtacagtgggacaatct

SEQ ID NO: 311137 - DNA, 120 bp, Artificial Sequence
  ENSG00000134376_4 (sequence is synthesized)
gtgaaactaccattggttcctgtggcaagaactcctgccaacatggaggtatttgccatcaggaccctatttatcctgtctgcatctgccctgctggatatgctggaagattctgtgaga

SEQ ID NO: 311138 - DNA, 120 bp, Artificial Sequence
  ENSG00000134376_5 (sequence is synthesized)
tagatcacgatgagtgtgcttccagcccttgccaaaatggggccgtgtgccaggatggaattgatggttactcctgcttctgtgtcccaggatatcaaggcagacactgcgacttggaag

SEQ ID NO: 311139 - DNA, 120 bp, Artificial Sequence
  ENSG00000134376_6 (sequence is synthesized)
tggatgaatgtgcttcagatccctgcaagaacgaggctacatgcctcaatgaaataggaagatatacttgtatctgtccccacaattattctggtgtaaactgtgaattggaaattgacg

SEQ ID NO: 311140 - DNA, 120 bp, Artificial Sequence
  ENSG00000134376_7 (sequence is synthesized)
aatgttggtcccagccttgtttaaatggtgcaacttgtcaggatgctctgggggcctatttctgcgactgtgcccctggattcctgggggatcactgtgaactcaacactgatgagtgtg

SEQ ID NO: 311141 - DNA, 120 bp, Artificial Sequence
  ENSG00000134376_8 (sequence is synthesized)
ccagtcaaccttgtctccatggagggctgtgtgtggatggagaaaacagatatagctgtaactgcacgggtagtggattcacagggacacactgtgagaccttgatgcctctttgttggt

SEQ ID NO: 311142 - DNA, 120 bp, Artificial Sequence
  ENSG00000134376_9 (sequence is synthesized)
caaaaccttgtcacaataatgctacatgtgaggacagtgttgacaattacacttgtcactgctggcctggatacacaggtgcccagtgtgagatcgacctcaatgaatgcaatagtaacc

SEQ ID NO: 311143 - DNA, 120 bp, Artificial Sequence
  ENSG00000134376_10 (sequence is synthesized)
cctgccagtccaatggggaatgtgtggagctgtcctcagagaaacaatatggacgcatcactggactgccttcttctttcagctaccatgaagcctcaggttatgtctgtatctgtcagc

SEQ ID NO: 311144 - DNA, 120 bp, Artificial Sequence
  ENSG00000134376_11 (sequence is synthesized)
ctggattcacaggaatccactgcgaagaagacgtcaatgaatgttcttcaaacccttgccaaaatggtggtacttgtgagaacttgcctgggaattatacttgccattgcccatttgata

SEQ ID NO: 311145 - DNA, 120 bp, Artificial Sequence
  ENSG00000134376_12 (sequence is synthesized)
acctttctagaactttttatggaggaagggactgttctgatattctcctgggctgtacccatcagcaatgtctaaataatggaacatgcatccctcacttccaagatggccagcatggat

SEQ ID NO: 311146 - DNA, 120 bp, Artificial Sequence
  ENSG00000134376_13 (sequence is synthesized)
tcagctgcctatgtccatctggctacaccgggtccctgtgtgaaatcgcaaccacactttcatttgagggcgatggcttcctgtgggtcaaaagtggctcagtgacaaccaagggctcag

SEQ ID NO: 311147 - DNA, 120 bp, Artificial Sequence
  ENSG00000134376_14 (sequence is synthesized)
tttgtaacatagccctcaggtttcagactgttcagccaatggctcttctacttttccgaagcaacagggatgtgtttgtgaagctggagctgctaagtggctacattcacttatcaattc

SEQ ID NO: 311148 - DNA, 120 bp, Artificial Sequence
  ENSG00000134376_15 (sequence is synthesized)
aggtcaataatcagtcaaaggtgcttctgttcatttcccacaacaccagcgatggagagtggcatttcgtggaggtaatatttgcagaggctgtgacccttaccttaatcgacgactcct

SEQ ID NO: 311149 - DNA, 120 bp, Artificial Sequence
  ENSG00000134376_16 (sequence is synthesized)
gtaaggagaaatgcatcgcgaaagctcctactccacttgaaagtgatcaatcaatatgtgcttttcagaactcctttttgggtggtttaccagtgggaatgaccagcaatggtgttgctc

SEQ ID NO: 311150 - DNA, 120 bp, Artificial Sequence
  ENSG00000134376_17 (sequence is synthesized)
tgcttaacttctataatatgccatccacaccttcgtttgtaggctgtctccaagacattaaaattgattggaatcacattaccctggagaacatctcgtctggctcatcattaaatgtca

SEQ ID NO: 311151 - DNA, 120 bp, Artificial Sequence
  ENSG00000134376_18 (sequence is synthesized)
aggcaggctgtgtgagaaaggattggtgtgaaagccaaccttgtcaaagcagaggacgctgcatcaacttgtggctgagttaccagtgtgactgccacaggccctatgaaggccccaact

SEQ ID NO: 311152 - DNA, 120 bp, Artificial Sequence
  ENSG00000134376_19 (sequence is synthesized)
gtctgagagagtatgtggcaggcagatttggccaggatgactccactggttatgtcatctttactcttgatgagagctatggagacaccatcagcctctccatgtttgtccgaacgcttc

SEQ ID NO: 311153 - DNA, 120 bp, Artificial Sequence
  ENSG00000134376_20 (sequence is synthesized)
tatcaatatatccgtgtctggctagagcgcggcagactagcaatgctgactccaaactctcccaaattagtagtaaaatttgttcttaatgatggaaatgtccacttgatatctttgaaa

SEQ ID NO: 311154 - DNA, 120 bp, Artificial Sequence
  ENSG00000134376_21 (sequence is synthesized)
atcaagccatataaaattgaactgtatcagtcttcacaaaacctaggatttatttctgcttctacgtggaaaatcgaaaagggagatgtcatctacattggtggcctacctgacaagcaa

SEQ ID NO: 311155 - DNA, 120 bp, Artificial Sequence
  ENSG00000134376_22 (sequence is synthesized)
gagactgaacttaatggtggattcttcaaaggctgtatccaagatgtaagactaaacaaccaaaatctggaattctttccaaatccaacaaacaatgcatctctcaatccagttcttgtc

SEQ ID NO: 311156 - DNA, 120 bp, Artificial Sequence
  ENSG00000134376_23 (sequence is synthesized)
aatgtaacccaaggctgtgctggagacaacagctgcaagtccaacccctgtcacaatggaggtgtttgccattcccggtgggatgacttctcctgttcctgtcctgccctcacaagtggg

SEQ ID NO: 311157 - DNA, 120 bp, Artificial Sequence
  ENSG00000134376_24 (sequence is synthesized)
aaagcctgtgaggaggttcagtggtgtggattcagcccgtgtcctcacggagcccagtgccagccggtgcttcaaggatttgaatgtattgcaaatgctgtttttaatggacaaagcggt

SEQ ID NO: 311158 - DNA, 120 bp, Artificial Sequence
  ENSG00000134376_25 (sequence is synthesized)
caaatattattcagaagcaatgggaatattaccagagaactcaccaatatcacatttggtttcagaacaagggatgcaaatgtaataatattgcatgcagaaaaagagcctgaatttctt

SEQ ID NO: 311159 - DNA, 120 bp, Artificial Sequence
  ENSG00000134376_26 (sequence is synthesized)
aatattagcattcaagattccagattattctttcaattgcaaagtggcaacagcttttatatgctaagtctgacaagtttgcagtcagtgaatgatggcacatggcacgaagtgaccctt

SEQ ID NO: 311160 - DNA, 120 bp, Artificial Sequence
  ENSG00000134376_27 (sequence is synthesized)
tccatgacagacccactgtcccagacctccaggtggcaaatggaagtggacaacgaaacaccttttgtgaccagcacaattgctactggaagcctcaactttttgaaggataatacagat

SEQ ID NO: 311161 - DNA, 120 bp, Artificial Sequence
  ENSG00000134376_28 (sequence is synthesized)
atttatgtgggagacagagctattgacaatataaagggcctgcaagggtgtctaagtacaatagaaatcggaggcatttatctctcttactttgaaaatgttcatggtttcattaataaa

SEQ ID NO: 311162 - DNA, 120 bp, Artificial Sequence
  ENSG00000134376_29 (sequence is synthesized)
cctcaggaagagcaatttctcaaaatctctaccaattcagtggtcactggctgtttgcagttaaatgtctgcaactccaacccctgtttgcatggaggaaactgtgaagacatctatagc

SEQ ID NO: 311163 - DNA, 120 bp, Artificial Sequence
  ENSG00000134376_30 (sequence is synthesized)
tcttatcattgctcctgtcccttgggatggtcagggaaacactgtgaactcaacatcgatgaatgcttttcaaacccctgtatccatggcaactgctctgacagagttgcagcctaccac

SEQ ID NO: 311164 - DNA, 120 bp, Artificial Sequence
  ENSG00000134376_31 (sequence is synthesized)
tgcacatgtgagcctggatacactggtgtgaactgtgaagtggatatagacaactgccagagtcaccagtgtgcaaatggagccacctgcattagtcatactaatggctattcttgcctc

SEQ ID NO: 311165 - DNA, 120 bp, Artificial Sequence
  ENSG00000134376_32 (sequence is synthesized)
tgttttggaaattttacaggaaaattttgcagacagagcagattaccctcaacagtctgtgggaatgagaagacaaatctcacttgctacaatggaggcaactgcacagagttccagact

SEQ ID NO: 311166 - DNA, 120 bp, Artificial Sequence
  ENSG00000134376_33 (sequence is synthesized)
gaattaaaatgtatgtgccggccaggttttactggagaatggtgtgaaaaggacattgatgagtgtgcctctgatccgtgtgtcaatggaggtctgtgccaggacttactcaacaaattc

SEQ ID NO: 311167 - DNA, 120 bp, Artificial Sequence
  ENSG00000134376_34 (sequence is synthesized)
cagtgcctctgtgatgttgcctttgctggcgagcgctgcgaggtggacttggcagatgacttgatctccgacattttcaccactattggctcagtgactgtcgccttgttactgatcctc

SEQ ID NO: 311168 - DNA, 120 bp, Artificial Sequence
  ENSG00000134376_35 (sequence is synthesized)
ttgctggccattgttgcttctgttgtcacctccaacaaaagggcaactcagggaacctacagccccagccgtcaggagaaggagggctcccgagtggaaatgtggaacttgatgccaccc

SEQ ID NO: 311169 - DNA, 120 bp, Artificial Sequence
  ENSG00000134376_36 (sequence is synthesized)
cctgcaatggagagactgatttaggagcattgtgtcccttcgagatggggatccacacactgtgaatgtgatgactgtacttcaggtatctctgacatacctgacaatgttaatctgcaa

SEQ ID NO: 311170 - DNA, 120 bp, Artificial Sequence
  ENSG00000134376_37 (sequence is synthesized)
ctgggattacactggaactacaggaatgattcctttgaccaccttaaaaactttcacagtggttccgctcgacaccattgttttattatattatatcagccaattgcaaaaaaagtctgt

SEQ ID NO: 311171 - DNA, 120 bp, Artificial Sequence
  ENSG00000134376_38 (sequence is synthesized)
gccagtaatttcagccttataattagcaaaaacatcttccagagaataaagtcttctgtggctttagtggctatcactgaaactctttcctcttttcaacctgggaacaaattttagttt

SEQ ID NO: 311172 - DNA, 120 bp, Artificial Sequence
  ENSG00000134376_39 (sequence is synthesized)
tcattttaggtttctgtactttctgtagtttctgtgtaaactgccatatgtttacatggaaactacaggaaaaaattggctacatttctcacttctcctatcatgtggtcaaagttattg

SEQ ID NO: 311173 - DNA, 120 bp, Artificial Sequence
  ENSG00000134376_40 (sequence is synthesized)
ttgtataccagcgatgggatgtatacttttgtccttcattcatggattcagagaaagctctgggaatgacttatggtccaaaaaagtgacccaatggcaacaaataaaaattgaaatgca

SEQ ID NO: 311174 - DNA, 120 bp, Artificial Sequence
  ENSG00000134376_41 (sequence is synthesized)
ctgtgctggagacaacagctgcaagaggcagaccaatgtgggaagggcactcactgagttgggatccagaggacctaagtaccaagtttcactgtttcgcttctgtgtaggatcttgggc

SEQ ID NO: 311175 - DNA, 120 bp, Artificial Sequence
  ENSG00000134376_42 (sequence is synthesized)
ttgcctttgctggcgagcgctgcgaggtggacgtaagcagcctctccttttatgtctctctcttattctggcagaatctttttcagcttctttcttacctcattttgcgtatgaatgacg

SEQ ID NO: 311176 - DNA, 120 bp, Artificial Sequence
  ENSG00000134376_43 (sequence is synthesized)
agccagttgttgagtggggtgaacaggaagattattaacatacatttgaacattcccaaatgaaaaaaaaagccattgaatttcaagaaatgccttgattcattttagatctctggggaa

SEQ ID NO: 311177 - DNA, 120 bp, Artificial Sequence
  ENSG00000134376_44 (sequence is synthesized)
gttcttctgctgcagcatgaaatggttgcatgctgccaactgccccgcatctgctgaaaggaggccctgctgtttatggggactgcttatggggtcaccacatagctgaccttgctctgt

SEQ ID NO: 311178 - DNA, 120 bp, Artificial Sequence
  ENSG00000134376_45 (sequence is synthesized)
gactactgagtggtaccagcttgctctggttggtcttcattcctgagtagttccattgtcctgaatatttatttgcctttgctatagaattcgcatcccaatgatttcaatctttccagt

SEQ ID NO: 311179 - DNA, 120 bp, Artificial Sequence
  ENSG00000134376_46 (sequence is synthesized)
tggtattttatggcagaccatggctttaaccaaatggtgtattagcaggaagagctgtactgtgtaaactctgctgctgtggtgcaaagggtcccccttgtgggcatgaaaagtatcttg

SEQ ID NO: 311180 - DNA, 120 bp, Artificial Sequence
  ENSG00000134376_47 (sequence is synthesized)
tttcacatttcagaattcctcaaatcacgagagaaatattaaagagggataaaggaggaatgaaagggatgacatttttatatgctatactgggaactggagtgcatctcaagttcttta

SEQ ID NO: 311181 - DNA, 120 bp, Artificial Sequence
  ENSG00000134376_48 (sequence is synthesized)
cgttacacacagaaaatgttgaaatttttatgctatcaaatttgataatgatgttaaattttatgttattcaaatttgctagaaaagttattgtacttatatttacactgggaaaaatga

SEQ ID NO: 311182 - DNA, 120 bp, Artificial Sequence
  ENSG00000134376_49 (sequence is synthesized)
cctagtctcaagtaatcttcctcaacgattctgtagctaaagtcattccacatatcaaatttaaattactctttttttttcacaacttgcttacctaaaacccagaggaaatttgcatgt

SEQ ID NO: 311183 - DNA, 120 bp, Artificial Sequence
  ENSG00000134376_50 (sequence is synthesized)
atgttatccaatgaacagttttgtattgtctgctttctgttctgaaaattttcagaattattgaggcattccccaattcattaatggctagcaatttacctacaattgcattgatatcac

SEQ ID NO: 311184 - DNA, 120 bp, Artificial Sequence
  ENSG00000134376_51 (sequence is synthesized)
tgagaaaaccaattacaatctagatctctatcatatttctttctcaatagattaagtgatgcctctggaaaatatatcagttgttgttgaggatttctgagaaaagtaaatgagaaataa

SEQ ID NO: 311185 - DNA, 120 bp, Artificial Sequence
  ENSG00000134376_52 (sequence is synthesized)
gaaaagaagggggtgtctatttacacttaggattctctttcaatgtttcagttttgaaatttaatggtctttgatttgtggcagtgtttgctgcaaggtcgataaaaaaaatgtttattt

SEQ ID NO: 311186 - DNA, 120 bp, Artificial Sequence
  ENSG00000134376_53 (sequence is synthesized)
ccttattcactgacctttcaaggagaacatacagtaaaaaaattccccaggtgtcaatatcaggaaagtggtattttccctgaacaacttctatcatgcatgctttccaccctagtttaa

SEQ ID NO: 311187 - DNA, 120 bp, Artificial Sequence
  ENSG00000134376_54 (sequence is synthesized)
aaaatgcatccaaataaatcttgatgtgactcaactgattaaatgcatgaaataaatcttgtaatatataatatttcccaattatgtaagctgctagaaataaatatgagatctgcaaac

SEQ ID NO: 311188 - DNA, 120 bp, Artificial Sequence
  ENSG00000134376_55 (sequence is synthesized)
gcgagaaagaggtgacattgaagaacaagcccacacttctggatatggtccaaaatgatcagaaactcactctgtcaacctagtaggtgtttggatggatacctcttttttaacagaaag

SEQ ID NO: 311189 - DNA, 120 bp, Artificial Sequence
  ENSG00000134376_56 (sequence is synthesized)
tgagtcacattagagccttctggaagagaattctgagctaaagaatgatgggattactcaaagttcattttctcctctaattttttatctcagttcccataggaaaatctatgctgaaat

SEQ ID NO: 311190 - DNA, 120 bp, Artificial Sequence
  ENSG00000134376_57 (sequence is synthesized)
agaggttcagacagaatgaaacaataaaaaagaagaaaaactacagtttaggtcaaaggggagaacattttattagacaaaacttcaaatagggaaaaatgatttttaaaaaatgtataa

SEQ ID NO: 311191 - DNA, 120 bp, Artificial Sequence
  ENSG00000134376_58 (sequence is synthesized)
tgtgctatttttctttcttataagtacttctgaattcatgtctcttttttgttgctaactctaatacatgatgcaaatatggttgctgtcgaggtaaaataaattacaactaaaagattg

SEQ ID NO: 311192 - DNA, 120 bp, Artificial Sequence
  ENSG00000134376_59 (sequence is synthesized)
cctcatagaattgcctacaacccaaaagtatatataccttatccatatgagtctacttttcccagagaaactcttcaactgttcttcacctcatacaggaattcttaaaatggagttggt

SEQ ID NO: 311193 - DNA, 120 bp, Artificial Sequence
  ENSG00000134376_60 (sequence is synthesized)
caatggcttcaggcaatctgtgacctgctgaaaatacaggaaaattagaatatgtatttgagtggctaggggtaagttcaggggtagaaataatgcatactgaatagcttttatcagctg

SEQ ID NO: 311194 - DNA, 120 bp, Artificial Sequence
  ENSG00000134376_61 (sequence is synthesized)
cttaaagggatttatgtccccaaaacagttatgaactggggctctatagaatacagatactatataagcagataattgttaaccttttgttttagcactgtgccatgcaccttacaaata

SEQ ID NO: 311195 - DNA, 120 bp, Artificial Sequence
  ENSG00000134376_62 (sequence is synthesized)
ccatctctaattcttatagctctgtaaagaaggtttcatgatttttattttgcatatgtgtaaactgaggctgagaggttgagtgacgtataaagggcctatccacacgtttgctgcagt

SEQ ID NO: 311196 - DNA, 120 bp, Artificial Sequence
  ENSG00000134376_63 (sequence is synthesized)
aaggttgagctgccttcaaagcctctgctcttctatttgatgtgccagcataactgtatgaataaatctttgctcaacacaatttctttttttttaatgagaaaggtgttcttccatctc

SEQ ID NO: 311197 - DNA, 120 bp, Artificial Sequence
  ENSG00000134376_64 (sequence is synthesized)
atgtatcatcgagggtaagataagtgatctctgatcaaacttcctacattgaaaaaattaaataaactgagctcagacatatttgacaaagatattttgactgactcaatatttcccata

SEQ ID NO: 311198 - DNA, 120 bp, Artificial Sequence
  ENSG00000134376_65 (sequence is synthesized)
agcatagttaataaaataatggatatgtgagtgctccctggcaagtgccctttggattaattggaattttctgttttctagctggcctcttttgcatcacaaagacacaggtcttttgcc

SEQ ID NO: 311199 - DNA, 120 bp, Artificial Sequence
  ENSG00000134376_66 (sequence is synthesized)
atttttacaaaacagcggggagtctagggtatacctgaatttgacccttttaacgttcattttcatttgcagcctgccttctgtggttggttctttgtggtacaggcattccaagtctat

SEQ ID NO: 311200 - DNA, 120 bp, Artificial Sequence
  ENSG00000134376_67 (sequence is synthesized)
atgtgcatgaaaggagatagccttgagtcacattctgctttctgttgcaccaattttggttctgcaacttattaactgagatcgtttagttgtattccaattccatgtatctttcaaaat

SEQ ID NO: 311201 - DNA, 120 bp, Artificial Sequence
  ENSG00000134376_68 (sequence is synthesized)
attgcaaatattttcttgtcattaattttgagtaatccaactattgtcaagggtgggttgcttcctggttgaacgtcacactttctgcctaatggcacaatgcatggaactcatccaaaa

SEQ ID NO: 311202 - DNA, 120 bp, Artificial Sequence
  ENSG00000134376_69 (sequence is synthesized)
ctcacacattgtttctatttacaacaaatatctccctgtcttctgatatttattagtttacaaaatttatatttgacatttaaattcagatatatttgaaatatagaaagaaaagaaagc

SEQ ID NO: 311203 - DNA, 120 bp, Artificial Sequence
  ENSG00000134376_70 (sequence is synthesized)
ttagagttttccttcttttcccaggagacttttcaactggaaaaacttacatgatgctagatatttctaaaacattgaacctgtgttcagtagattctatgctttcaaagtccttaacca

SEQ ID NO: 311204 - DNA, 120 bp, Artificial Sequence
  ENSG00000134376_71 (sequence is synthesized)
tcattacttaattgactagatgttaatggatttatttttacttttcatgcattaattaacctctaataaaaatgccaatgatgctgataatacatgtgtatctattgttgactgtttagt

SEQ ID NO: 311205 - DNA, 120 bp, Artificial Sequence
  ENSG00000134376_72 (sequence is synthesized)
tcaacagagaaataggtgagaaagtgatggagtagttagaggaagacagaaaatagtgggctatctcccatggcctagggaaatgtgacttccatcacatccaaggatattgaaaagcta

SEQ ID NO: 311206 - DNA, 120 bp, Artificial Sequence
  ENSG00000134376_73 (sequence is synthesized)
tcctcaaataaattggcttctctcctgccttggttaaaccttcagcttaatagtgtcatcctggcaggttttgaatgatggatggtgtgaacactctggcccacccaagaccgagaatgc

SEQ ID NO: 311207 - DNA, 120 bp, Artificial Sequence
  ENSG00000134376_74 (sequence is synthesized)
ttggcaggctcctgagggttgtcaagttttgctcagatctaatcagagaagtctccctccagtccagaagcataagccaaaaaaggaaaacaaaatgtctcagctatgcttggtatccaa

SEQ ID NO: 311208 - DNA, 120 bp, Artificial Sequence
  ENSG00000134376_75 (sequence is synthesized)
agggataaggagctgtttttcttggaagaaatctttgttttcctttataccttgggctggccttgccccactacctcaccccctttcattttgagcctagtgattagtctctgacccata

SEQ ID NO: 311209 - DNA, 120 bp, Artificial Sequence
  ENSG00000134376_76 (sequence is synthesized)
cgtgcaagttttacattttggaaggtgagggaaagaataagggaaaattaaaaattgtttacatacaatttcaacattataagctgcactatagagatcttggagctaagattttatata

SEQ ID NO: 311210 - DNA, 120 bp, Artificial Sequence
  ENSG00000134376_77 (sequence is synthesized)
aattttcaaaagtaaaatagccgccttagttgctgttctatcccaaggtcttagcagagtgtttgtcacatagtatgtgttaaataaatatccactgtgtgactgaatacatgattggtg

SEQ ID NO: 311211 - DNA, 120 bp, Artificial Sequence
  ENSG00000134376_78 (sequence is synthesized)
acttaatccatgaatatacagaaaaacaaattcttgctggaaaattagtttaaaaaaatgacaatatcccaggaagaagaaaacttcaatttacctgagacttgatgtcacttgtcttgg

SEQ ID NO: 311212 - DNA, 120 bp, Artificial Sequence
  ENSG00000134376_79 (sequence is synthesized)
aaaatttggcttttgaaagtcattctacctcaacatttcagaaattatgcttggctattggaacacagatttattagcaagtacaatcttctaattattgatttttgcttttgttataaa

SEQ ID NO: 311213 - DNA, 120 bp, Artificial Sequence
  ENSG00000134376_80 (sequence is synthesized)
atttttgcttttgttataaaaaaaggatttccacagaaaataattcaaaatctctcagaataaacctctcctcttcctcctcctcctccttccctccttctttttttttttttttttttt

SEQ ID NO: 311214 - DNA, 120 bp, Artificial Sequence
  ENSG00000134376_81 (sequence is synthesized)
gctttttccttagcctgagggctctgatgcatgaggatcctgatagcctgaatgtaggtctgccctgcagactccagatggcaaaatacagcctctctccttgtgcccctaataaactga

SEQ ID NO: 311215 - DNA, 120 bp, Artificial Sequence
  ENSG00000134376_82 (sequence is synthesized)
acatttatataaggtggcaaccacactaatgctcttgagcattgacactggtgtaggcatggcccacttttctcttggtttctaaatatttgcatctattttctcattctaattaattcc

SEQ ID NO: 311216 - DNA, 120 bp, Artificial Sequence
  ENSG00000134376_83 (sequence is synthesized)
gtgtgtatatgtatatatatgtgtacagattatttccattaaaccccaaatgtgttaaagaaattttaagaaacatctccgacattatcaagtatgtataaagtatgtgtggatgggtag

SEQ ID NO: 311217 - DNA, 120 bp, Artificial Sequence
  ENSG00000134376_84 (sequence is synthesized)
ataagactgtgctgttccagagagataaggcaaactttttcttcccatttcacaaccaatgtattcaacagggacctgggtttctgctgttctgtttattttgaaggtgtgaaaaggaca

SEQ ID NO: 311218 - DNA, 120 bp, Artificial Sequence
  ENSG00000134376_85 (sequence is synthesized)
ttcaaggcttattttaaacatatcagaagcactttgtctgtgtataaaatattttcctattctaactttaaatatgaaaaaagtgttcttaatataactagaaatatctccttattgtgt

SEQ ID NO: 311219 - DNA, 120 bp, Artificial Sequence
  ENSG00000134376_86 (sequence is synthesized)
gtatttagtacaaacatattatcattctcaacacttctatatgtgaatgaccactgcaatttcttcccactccatttctgggtattttcacattttaagttgccctccatcactatgatt

SEQ ID NO: 311220 - DNA, 120 bp, Artificial Sequence
  ENSG00000134376_87 (sequence is synthesized)
ctattttcatttctgttctttcattcttatctattatttatgacacaaaaattgagaattacaggccaggtgtggtggttcactcctataatcccagcactatgggaggctgaagtgggc

SEQ ID NO: 311221 - DNA, 70 bp, Artificial Sequence
  ENSG00000134376_88 (sequence is synthesized)
aggcggctgagattctgtctaaaaaaaaaaaaaaaaaaagagagaattaccgattaaaattactgattat

SEQ ID NO: 311222 - DNA, 120 bp, Artificial Sequence
  ENSG00000134376_89 (sequence is synthesized)
agagagaattaccgattaaaattactgattatattcatctatgtttttacatgaagctattcaaatgaattgttacgttttctctgatatatgattaaatatataaagagaaatcaggaa

SEQ ID NO: 311223 - DNA, 120 bp, Artificial Sequence
  ENSG00000134376_90 (sequence is synthesized)
tttacatcgagtccctaaattgtagaaaaacaattatctagtatcagtactcaaattatacctccctggtataatttctgattccataaaactgtctctctaacaaagttacaaataatc

SEQ ID NO: 311224 - DNA, 120 bp, Artificial Sequence
  ENSG00000134376_91 (sequence is synthesized)
ctttctctatttcctttcctgcaatactttcccttttcctaacaaatagaacaatttttctgttgtttctaaatttatgagctccttgacttttctatcaaatggactaatttcagttgc

SEQ ID NO: 311225 - DNA, 120 bp, Artificial Sequence
  ENSG00000134376_92 (sequence is synthesized)
ttgcttttcaatgaatatttaataaaaataagcactgtagtttatacataaatttaaaagtatatattgtaaaacttgaattttcttagaagcatggttttctaagatttgcaagtaaat

SEQ ID NO: 311226 - DNA, 120 bp, Artificial Sequence
  ENSG00000134376_93 (sequence is synthesized)
gaagcatggttttctaagatttgcaagtaaatttattttcttaagtatctttcagaaaaaaatatgaaagcatagtatacatcataaccaaaatatatttgacattatgattttttaaaa

SEQ ID NO: 311227 - DNA, 120 bp, Artificial Sequence
  ENSG00000134376_94 (sequence is synthesized)
ttataaatatttcagagattataaaataataatttaaaaaaactttcttaatgtttttattgtttccaccagtacgttatcatttatgctaaatatctttgtgtagatatacccttccaa

SEQ ID NO: 311228 - DNA, 120 bp, Artificial Sequence
  ENSG00000134376_95 (sequence is synthesized)
ctaaatatctttgtgtagatatacccttccaaagaagacgttatttgtgttcatttaaaggaaaaatagtttgatcctatgaattaattcagaaagcaactaaaataacaatggcctgcc

SEQ ID NO: 311229 - DNA, 120 bp, Artificial Sequence
  ENSG00000134376_96 (sequence is synthesized)
aaatgtcattttgtaaatatacgtctatgactttaggagctgtcctggtttgaaaacatgaggacagtttatccattggatgccatctatttagtcccaattaagaaagttgtttttttg

SEQ ID NO: 311230 - DNA, 120 bp, Artificial Sequence
  ENSG00000134376_97 (sequence is synthesized)
tgagaatgaccaaggtaaatttaaatataccattcaaacaaacaaggacaaaataatatccttgttatagagtacatgtagcatatagtatgaagtaatatactacaaaagcaaagaaag

SEQ ID NO: 311231 - DNA, 120 bp, Artificial Sequence
  ENSG00000134376_98 (sequence is synthesized)
tgtattctatcttgcaatagtaatagacaatttttatatagcaaattcatatcctttggagtagtgacaatcatttcaaactgggagcaactaattgtgaagattttccttcttactcat

SEQ ID NO: 311232 - DNA, 120 bp, Artificial Sequence
  ENSG00000134376_99 (sequence is synthesized)
ccattttcttcacatccaaggctgaacgtgtgatgctgctgcttcagatgatttgttccaaagttaaattttgtgacaaaagacatggggaaaaccttcccatcaatatttacattcaca

SEQ ID NO: 311233 - DNA, 120 bp, Artificial Sequence
  ENSG00000134376_100 (sequence is synthesized)
agtatttgcaataagcataaaatagattatagccagaccatatgtatagttttcacatttactcccttctagacatacctgtacttatgtacttacaggctgttccaaatgtaatatgtt

SEQ ID NO: 311234 - DNA, 120 bp, Artificial Sequence
  ENSG00000134376_101 (sequence is synthesized)
ctctaccaaatgtggttaagaaatattcactcacaatttctttctgtgtacaattctgatgcctctgttgtcactgtaattgtcagttgcttttctgttttccaaatgtcttcttgtcat

SEQ ID NO: 311235 - DNA, 120 bp, Artificial Sequence
  ENSG00000134376_102 (sequence is synthesized)
aaggtatctgactttaaaaaatgttttcccttttctttttattcttctgtattttccagctgcatgtgtgtgactatggcttttacatatttgcacagaaaaataaaacctttgtttctg

SEQ ID NO: 311236 - DNA, 120 bp, Artificial Sequence
  ENSG00000134389_0 (sequence is synthesized)
agtacattgaaattcaaagtcatgcttgtaactgttaatgaaagcagatttaaagcaacaccaccatcactggagtatttttagttatatacgattgagactaccaagcatgttgctctt

SEQ ID NO: 311237 - DNA, 120 bp, Artificial Sequence
  ENSG00000134389_1 (sequence is synthesized)
attcagtgtaatcctaatctcatgggtatccactgttgggggagaaggaacactttgtgattttccaaaaatacaccatggatttctgtatgatgaagaagattataaccctttttccca

SEQ ID NO: 311238 - DNA, 120 bp, Artificial Sequence
  ENSG00000134389_2 (sequence is synthesized)
agttcctacaggggaagttttctattactcctgtgaatataattttgtgtctccttcaaaatccttttggactcgcataacatgcacagaagaaggatggtcaccaacaccgaagtgtct

SEQ ID NO: 311239 - DNA, 120 bp, Artificial Sequence
  ENSG00000134389_3 (sequence is synthesized)
cagaatgtgttcctttccttttgtgaaaaatggtcattctgaatcttcaggactaatacatctggaaggtgatactgtacaaattatttgcaacacaggatacagccttcaaaacaatga

SEQ ID NO: 311240 - DNA, 120 bp, Artificial Sequence
  ENSG00000134389_4 (sequence is synthesized)
gaaaaacatttcgtgtgtagaacggggctggtccactcctcccatatgcagcttcactaaaggagaatgtcatgttccaattttagaagccaatgtagatgctcagccaaaaaaagaaag

SEQ ID NO: 311241 - DNA, 120 bp, Artificial Sequence
  ENSG00000134389_5 (sequence is synthesized)
ctacaaagttggagacgtgttgaaattctcctgcagaaaaaatcttataagagttggatcagactcagttcaatgttaccaatttgggtggtcacctaactttccaacatgcaaaggaca

SEQ ID NO: 311242 - DNA, 120 bp, Artificial Sequence
  ENSG00000134389_6 (sequence is synthesized)
agtacgatcatgtggtccacctcctcaactctccaatggtgaagttaaggagataagaaaagaggaatatggacacaatgaagtagtggaatatgattgcaatcctaattttataataaa

SEQ ID NO: 311243 - DNA, 120 bp, Artificial Sequence
  ENSG00000134389_7 (sequence is synthesized)
cgggcctaagaaaatacaatgtgtggatggagaatggacaactttacccacttgtgttgaacaagtgaaaacatgtggatacatacctgaactcgagtacggttatgttcagccgtctgt

SEQ ID NO: 311244 - DNA, 120 bp, Artificial Sequence
  ENSG00000134389_8 (sequence is synthesized)
ccctccctatcaacatggagtttcagtcgaggtgaattgcagaaatgaatatgcaatgattggaaataacatgattacctgtattaatggaatatggacagagcttcctatgtgtgttgc

SEQ ID NO: 311245 - DNA, 120 bp, Artificial Sequence
  ENSG00000134389_9 (sequence is synthesized)
aacacaccaacttaagaggtgcaaaatagcaggagttaatataaaaacattactcaagctatctgggaaagaatttaatcataattctagaatacgttacagatgttcagacatcttcag

SEQ ID NO: 311246 - DNA, 120 bp, Artificial Sequence
  ENSG00000134389_10 (sequence is synthesized)
atacaggcactcagtctgtataaacgggaaatggaatcctgaagtagactgcacagaaaaaagggaacaattctgcccaccgccacctcagatacctaatgctcagaatatgacaaccac

SEQ ID NO: 311247 - DNA, 120 bp, Artificial Sequence
  ENSG00000134389_11 (sequence is synthesized)
atctacttccagaagcaaaagaaattgtatgtaaagatggacgatggcaatcattaccacgctgtgttgagtctactgcatattgtgggccccctccatctattaacaatggagatacca

SEQ ID NO: 311248 - DNA, 120 bp, Artificial Sequence
  ENSG00000134389_12 (sequence is synthesized)
cctcattcccattatcagtatatcctccagggtcaacagtgacgtaccgttgccagtccttctataaactccagggctctgtaactgtaacatgcagaaataaacagtggtcagaaccac

SEQ ID NO: 311249 - DNA, 120 bp, Artificial Sequence
  ENSG00000134389_13 (sequence is synthesized)
caagatgcctagatccatgtgtggtatctgaagaaaacatgaacaaaaataacatacagttaaaatggagaaacgatggaaaactctatgcaaaaacaggggatgctgttgaattccagt

SEQ ID NO: 311250 - DNA, 120 bp, Artificial Sequence
  ENSG00000134389_14 (sequence is synthesized)
gtaaattcccacataaagcgatgatatcatcaccaccatttcgagcaatctgtcaggaagggaaatttgaatatcctatatgtgaatgaagcaagcataattttcctgaatatattcttc

SEQ ID NO: 311251 - DNA, 120 bp, Artificial Sequence
  ENSG00000134389_15 (sequence is synthesized)
aaacatccatctatgctaaaagtagccattatgtagccaattctgtagttacttcttttattctttcaggtgttgtttaactcagttttatttagaactctggatttttagagctttaga

SEQ ID NO: 311252 - DNA, 120 bp, Artificial Sequence
  ENSG00000134389_16 (sequence is synthesized)
aatttgtaagctgagagaacaatgtttcacttaataggagggtgtcttagtccatattacattgttataacagagtatcacagactggataacttctaaccaatagtttatttgtttcat

SEQ ID NO: 311253 - DNA, 120 bp, Artificial Sequence
  ENSG00000134389_17 (sequence is synthesized)
aaatctaaaagctgagaagtccaagatggtggggctgcctctggtgagggtcttctcgaagcatcataatatgctggaaggcatcacaacatggtggaagggatcacgtggcaaaagagc

SEQ ID NO: 311254 - DNA, 120 bp, Artificial Sequence
  ENSG00000134389_18 (sequence is synthesized)
atgtacatgggagtgagagaaaaagagagagagagacagagtggcgggggcggggaggagcgcaaactcatcctttataaagacaccactcctgagataacaatccaatcccatgataat

SEQ ID NO: 311255 - DNA, 120 bp, Artificial Sequence
  ENSG00000134389_19 (sequence is synthesized)
gacattaatccattcaagaagatagagctctcgtgacttaatcaccttctaaagatctcacctgacaacactgttgcattggcagttaagtttccacgtaaactttcggggacacattca

SEQ ID NO: 311256 - DNA, 120 bp, Artificial Sequence
  ENSG00000134389_20 (sequence is synthesized)
aaccacaggagaaactcaaattgttcctgggcaaatcacaacatggggaattttattcataaatgtccacagaaacagtaaatgttctcgcttcagtacttaattcatctaatccctcct

SEQ ID NO: 311257 - DNA, 120 bp, Artificial Sequence
  ENSG00000134389_21 (sequence is synthesized)
gtttgtctcaaattataggataactttgaaactttctgaattaacgttatttaaaaggaaatgtagatgttattttagtctctatcttcatgttattatcacttaaaaacctgcgaaagc

SEQ ID NO: 311258 - DNA, 120 bp, Artificial Sequence
  ENSG00000134389_22 (sequence is synthesized)
tgtcaacttttgtggttgtagcaagtattaataaatatttataaatcctctaatgtaagtctagctacctatccaatactaaataccccttaaagtattaaatgcactatctgctgtaaa

SEQ ID NO: 311259 - DNA, 120 bp, Artificial Sequence
  ENSG00000134398_0 (sequence is synthesized)
agggacctggccagccgtgcagctgcccaggcgctatggcgagtgcggtcagggggtcgaggccgtggccccggctggggctccagctccagttcgcggcgctgctgctcgggacgctga

SEQ ID NO: 311260 - DNA, 120 bp, Artificial Sequence
  ENSG00000134398_1 (sequence is synthesized)
gtccacaggttcatactctcaggccagagaacctcctgctggtgtccaccttggatggaagtctccacgcactaagcaagcagacaggggacctgaagtggactctgagggatgatcccg

SEQ ID NO: 311261 - DNA, 120 bp, Artificial Sequence
  ENSG00000134398_2 (sequence is synthesized)
tcatcgaaggaccaatgtacgtcacagaaatggcctttctctctgacccagcagatggcagcctgtacatcttggggacccaaaaacaacagggattaatgaaactgccattcaccatcc

SEQ ID NO: 311262 - DNA, 120 bp, Artificial Sequence
  ENSG00000134398_3 (sequence is synthesized)
ctgagctggttcatgcctctccctgccgcagctctgatggggtcttctacacaggccggaagcaggatgcctggtttgtggtggaccctgagtcaggggagacccagatgacactgacca

SEQ ID NO: 311263 - DNA, 120 bp, Artificial Sequence
  ENSG00000134398_4 (sequence is synthesized)
cagagggtccctccaccccccgcctctacattggccgaacacagtatacggtcaccatgcatgacccaagagccccagccctgcgctggaacaccacctaccgccgctactcagcgcccc

SEQ ID NO: 311264 - DNA, 120 bp, Artificial Sequence
  ENSG00000134398_5 (sequence is synthesized)
ccatggatggctcacctgggaaatacatgagccacctggcgtcctgcgggatgggcctgctgctcactgtggacccaggaagcgggacggtgctgtggacacaggacctgggcgtgcctg

SEQ ID NO: 311265 - DNA, 120 bp, Artificial Sequence
  ENSG00000134398_6 (sequence is synthesized)
tgatgggcgtctacacctggcaccaggacggcctgcgccagctgccgcatctcacgctggctcgagacactctgcatttcctcgccctccgctggggccacatccgactgcctgcctcag

SEQ ID NO: 311266 - DNA, 120 bp, Artificial Sequence
  ENSG00000134398_7 (sequence is synthesized)
gcccccgggacacagccaccctcttctctaccttggacacccagctgctaatgacgctgtatgtggggaaggatgaaactggcttctatgtctctaaagcactggtccacacaggagtgg

SEQ ID NO: 311267 - DNA, 120 bp, Artificial Sequence
  ENSG00000134398_8 (sequence is synthesized)
ccctggtgcctcgtggactgaccctggcccccgcagatggccccaccacagatgaggtgacactccaagtctcaggagagcgagagggctcacccagcactgctgttagatacccctcag

SEQ ID NO: 311268 - DNA, 120 bp, Artificial Sequence
  ENSG00000134398_9 (sequence is synthesized)
gcagtgtggccctcccaagccagtggctgctcattggacaccacgagctacccccagtcctgcacaccaccatgctgagggtccatcccaccctggggagtggaactgcagagacaagac

SEQ ID NO: 311269 - DNA, 120 bp, Artificial Sequence
  ENSG00000134398_10 (sequence is synthesized)
ctccagagaatacccaggccccagccttcttcttggagctattgagcctgagccgagagaaactttgggactccgagctgcatccagaagaaaaaactccagactcttacttggggctgg

SEQ ID NO: 311270 - DNA, 120 bp, Artificial Sequence
  ENSG00000134398_11 (sequence is synthesized)
gaccccaagacctgctggcagctagcctcactgctgtcctcctgggagggtggattctctttgtgatgaggcagcaacagccgcaggtggtggagaagcagcaggagacccccctggcac

SEQ ID NO: 311271 - DNA, 120 bp, Artificial Sequence
  ENSG00000134398_12 (sequence is synthesized)
ctgcagactttgctcacatctcccaggatgcccagtccctgcactcgggggccagccggaggagccagaagaggcttcagagtccctcaaagcaagcccagccactcgacgaccctgaag

SEQ ID NO: 311272 - DNA, 120 bp, Artificial Sequence
  ENSG00000134398_13 (sequence is synthesized)
gggacgggcagtggctgtcaagcggctcctccgcgagtgctttggcctggttcggcgggaagttcaactgctgcaggagtctgacaggcaccccaacgtgctccgctacttctgcaccga

SEQ ID NO: 311273 - DNA, 120 bp, Artificial Sequence
  ENSG00000134398_14 (sequence is synthesized)
gcggggaccccagttccactacattgccctggagctctgccgggcctccttgcaggagtacgtagaaaacccggacctggatcgcgggggtctggagcccgaggtcgtgctgcagcagct

SEQ ID NO: 311274 - DNA, 120 bp, Artificial Sequence
  ENSG00000134398_15 (sequence is synthesized)
gatgtctggcctggcccacctgcactctttacacatagtgcaccgggacctgaagccaggaaatattctcatcaccgggcctgacagccagggcctgggcagagtggtgctctcagactt

SEQ ID NO: 311275 - DNA, 120 bp, Artificial Sequence
  ENSG00000134398_16 (sequence is synthesized)
cggcctctgcaagaagctgcctgctggccgctgtagcttcagcctccactccggcatccccggcacggaaggctggatggcgcccgagcttctgcagctcctgccaccagacagtcctac

SEQ ID NO: 311276 - DNA, 120 bp, Artificial Sequence
  ENSG00000134398_17 (sequence is synthesized)
cagcgctgtggacatcttctctgcaggctgcgtgttctactacgtgctttctggtggcagccacccctttggagacagtctttatcgccaggcaaacatcctcacaggggctccctgtct

SEQ ID NO: 311277 - DNA, 120 bp, Artificial Sequence
  ENSG00000134398_18 (sequence is synthesized)
ggctcacctggaggaagaggtccacgacaaggtggttgcccgggacctggttggagccatgttgagcccactgccgcagccacgcccctctgccccccaggtgctggcccaccccttctt

SEQ ID NO: 311278 - DNA, 120 bp, Artificial Sequence
  ENSG00000134398_19 (sequence is synthesized)
ttggagcagagccaagcaactccagttcttccaggacgtcagtgactggctggagaaggagtccgagcaggagcccctggtgagggcactggaggcgggaggctgcgcagtggtccggga

SEQ ID NO: 311279 - DNA, 120 bp, Artificial Sequence
  ENSG00000134398_20 (sequence is synthesized)
caactggcacgagcacatctccatgccgctgcagacagatctgagaaagttccggtcctataaggggacatcagtgcgagacctgctccgtgctgtgaggaacaagaagcaccactacag

SEQ ID NO: 311280 - DNA, 120 bp, Artificial Sequence
  ENSG00000134398_21 (sequence is synthesized)
ggagctcccagttgaggtgcgacaggcactcggccaagtccctgatggcttcgtccagtacttcacaaaccgcttcccacggctgctcctccacacgcaccgagccatgaggagctgcgc

SEQ ID NO: 311281 - DNA, 120 bp, Artificial Sequence
  ENSG00000134398_22 (sequence is synthesized)
ctctgagagcctcttcctgccctactacccgccagactcagaggccaggaggccatgccctggggccacagggaggtgaggtgggctggatgccacacagatggtctccgtgctggctca

SEQ ID NO: 311282 - DNA, 71 bp, Artificial Sequence
  ENSG00000134398_23 (sequence is synthesized)
gtgggctggatgccacacagatggtctccgtgctggctcactgaagagctgagcctgtggctggcctcaga

SEQ ID NO: 311283 - DNA, 120 bp, Artificial Sequence
  ENSG00000134398_24 (sequence is synthesized)
gatcatgccactgcactccagcctggtccacagagagacactgtcaccccctttcccccacaagactggcagaggctgggcagcctggggctgatgaagcagagatgttcgctggatccc

SEQ ID NO: 311284 - DNA, 120 bp, Artificial Sequence
  ENSG00000134398_25 (sequence is synthesized)
gatgaagcagagatgttcgctggatcccaggccctggcacccctcaggaaatacaagaaaaagaatattcacatctgtttaatgtgcataaagccaaggaaaggacagttccgaattcaa

SEQ ID NO: 311285 - DNA, 120 bp, Artificial Sequence
  ENSG00000134398_26 (sequence is synthesized)
cctgggaaatgtgagttccacctttctctggtcccatcttggagcaaggtccccaacccagggaaccctgaacagcatccatgaccaattcccagccacatttcgacccacttgacctcc

SEQ ID NO: 311286 - DNA, 120 bp, Artificial Sequence
  ENSG00000134398_27 (sequence is synthesized)
agccgtgcagctgcccaggcgctatggcgagtgcggtcagggggtcgaggccgtggccccggctggggctccagctccagttcgcggcgctgctgctcgggacgctgagtccacaggggt

SEQ ID NO: 311287 - DNA, 120 bp, Artificial Sequence
  ENSG00000134398_28 (sequence is synthesized)
atctcctgttctgcagaggatataagtcaggactcagcacattgtgagaaggctgtctgagggacctgttgaaagggtggtaaggggaggtctggctgtgtctgcagggcaatctgacta

SEQ ID NO: 311288 - DNA, 120 bp, Artificial Sequence
  ENSG00000134398_29 (sequence is synthesized)
tcaagctggaggtatcccagggccttctccaggactctgagggctttaaagagaaatgtatataccagttagcttttgctaaataaaaatcaacccaaaactcaagagcttaaaactaaa

SEQ ID NO: 311289 - DNA, 120 bp, Artificial Sequence
  ENSG00000134398_30 (sequence is synthesized)
acatcacttaaatttattcaactcagaatttggtgagatgacaatttaggttgggctcagcacagtggttcttctgctggtcttgactgaacttgttcatgcatgtgtggtcagctgcta

SEQ ID NO: 311290 - DNA, 120 bp, Artificial Sequence
  ENSG00000134398_31 (sequence is synthesized)
gtcaactggatggctgtgtttctgaaagttggttggtagttggttggcttttggcagaggtggctgggccatatgtctcttatccctagcaggcaagcctaggcttgttcacatgatatc

SEQ ID NO: 311291 - DNA, 120 bp, Artificial Sequence
  ENSG00000134398_32 (sequence is synthesized)
gggtgtgggaatttctgcatttcctcaagaggctgtgtagcaaaatgattcagtgtgctggctctggagcctgactgcctgggttcaaggccaggctctgccatttagtagctgtgtgac

SEQ ID NO: 311292 - DNA, 120 bp, Artificial Sequence
  ENSG00000134398_33 (sequence is synthesized)
ggaaatgatagtaatacctgttaattggttgctatggaaatgggctcacctggcacagtgagcactgtgtgttgctgctcttactccttcctgtaaattttccgtctcctagaaactgcc

SEQ ID NO: 311293 - DNA, 120 bp, Artificial Sequence
  ENSG00000134398_34 (sequence is synthesized)
tcctctctgagaccactcagcaactctctccctctacccagctctgattttgccccctgcctccctcccagcagctccccaggcccctgcgatcttgctctgtaagttcatgcagtctgg

SEQ ID NO: 311294 - DNA, 120 bp, Artificial Sequence
  ENSG00000134398_35 (sequence is synthesized)
tgaggccatctcagtcacagatactgggcccatcacggggcagggcgtggccaggacaaagctctcttaggctctcatgttacagcaacagccgcaggtggtggagaagcagcaggagac

SEQ ID NO: 311295 - DNA, 120 bp, Artificial Sequence
  ENSG00000134398_36 (sequence is synthesized)
gttccactacattgccctggagctctgccgggcctccttgcaggagtgcaccgggacctgaagccaggaaatattctcatcaccgggcctgacagccagggcctgggcagagtggtgctc

SEQ ID NO: 311296 - DNA, 120 bp, Artificial Sequence
  ENSG00000134419_0 (sequence is synthesized)
ctctttccgccatctttccgcgccggtgagtagcactctctgagagctccaatttcatccgtctgccatcggcgccatcctgcaatctaagccacaatggtgcgcatgaatgtcctggca

SEQ ID NO: 311297 - DNA, 120 bp, Artificial Sequence
  ENSG00000134419_1 (sequence is synthesized)
gatgctctcaagagtatcaacaatgccgaaaagagaggcaaacgccaggtgcttattaggccgtgctccaaagtcatcgtccggtttctcactgtgatgatgaagcatggttacattggc

SEQ ID NO: 311298 - DNA, 120 bp, Artificial Sequence
  ENSG00000134419_2 (sequence is synthesized)
gaatttgaaatcattgatgaccacagagctgggaaaattgttgtgaacctcacaggcaggctaaacaagtgtggggtgatcagccccagatttgacgtgcaactcaaagacctggaaaaa

SEQ ID NO: 311299 - DNA, 120 bp, Artificial Sequence
  ENSG00000134419_3 (sequence is synthesized)
tggcagaataatctgcttccatcccgccagtttggtttcattgtactgacaacctcagctggcatcatggaccatgaagaagcaagacgaaaacacacaggagggaaaatcctgggattc

SEQ ID NO: 311300 - DNA, 120 bp, Artificial Sequence
  ENSG00000134419_4 (sequence is synthesized)
tttttctagggatgtaatacatatatttacaaataaaatgcctcatggactctggtgcttccacttggtcgttttgagcctttacagcagtgtagccacagcttctgcggcagcatgcag

SEQ ID NO: 311301 - DNA, 120 bp, Artificial Sequence
  ENSG00000134419_5 (sequence is synthesized)
ttgcttcgtttatcggtgaatgcgattccctgaagtgactaatacagccaagggaaaaagttcttatgaaaccagtatgcctaagaaacagtcacccctgctgtctgccaaaaccaggta

SEQ ID NO: 311302 - DNA, 87 bp, Artificial Sequence
  ENSG00000134419_6 (sequence is synthesized)
ctaagaaacagtcacccctgctgtctgccaaaaccaggtatttgacactaaatattttagttggagacagagtctgactctattgct

SEQ ID NO: 311303 - DNA, 77 bp, Artificial Sequence
  ENSG00000134419_7 (sequence is synthesized)
tctcagccgcctgagtaactgggattacaagtgtgtgtcgccacatccggctaatttttatattttagtagagacag

SEQ ID NO: 311304 - DNA, 89 bp, Artificial Sequence
  ENSG00000134419_8 (sequence is synthesized)
gcctccacgagccattacacctggcctatatttcagtattttctattagtttttgatgaatttgttttgcctggctaggattattctgt

SEQ ID NO: 311305 - DNA, 90 bp, Artificial Sequence
  ENSG00000134419_9 (sequence is synthesized)
ttgatgaatttgttttgcctggctaggattattctgtagataggattttagatctggcttttgtcactgactgctgtaataaatacttgc

SEQ ID NO: 311306 - DNA, 120 bp, Artificial Sequence
  ENSG00000134419_10 (sequence is synthesized)
taagaattgttccaagagaatctggtgccacttgcaggtgcccattgaagtgcaatgggcactgttgatcactgaggaggtagtgggtgctgacccggtgctggggcctgtcccctagtc

SEQ ID NO: 311307 - DNA, 120 bp, Artificial Sequence
  ENSG00000134419_11 (sequence is synthesized)
tctgctttgcccttggctagctaggtggtgtgccaagtggggagagaagctaccttattaaggggcatggatcagcttcctgaaaggagggcctgcctctgtaagatatgggaagtcgct

SEQ ID NO: 311308 - DNA, 120 bp, Artificial Sequence
  ENSG00000134419_12 (sequence is synthesized)
gagaatgttacagaacggccctagagatggggcagataacggcccccatttgtgagaagtgagttgggaggcatgtttggggcctctgatgtttgggaggctgtgggtaattaacatgag

SEQ ID NO: 311309 - DNA, 120 bp, Artificial Sequence
  ENSG00000134419_13 (sequence is synthesized)
ttttggggtccagcagcagaattcaggtttcctcttccactcagtaacctcagcatccgtatctgtaatgggaatgatacaaaacctatccccaagttgagggaaaaatgagattgtgta

SEQ ID NO: 311310 - DNA, 120 bp, Artificial Sequence
  ENSG00000134419_14 (sequence is synthesized)
aagcgcacttggcacatgacagtcacaagcatggggacagtgagtccagaaggattttcttatgccagcattgtaagccctaggatcacagggctctggcttgtttaaccatcgtgtctc

SEQ ID NO: 311311 - DNA, 120 bp, Artificial Sequence
  ENSG00000134419_15 (sequence is synthesized)
tggtccctagcctgcaaacctggtgtgtagggatgcctcagtcgcttacatgttgattgagtgaatcgtcggtttctttctggacactgacttcaaaaataaaataggatatgaaaatgg

SEQ ID NO: 311312 - DNA, 120 bp, Artificial Sequence
  ENSG00000134419_16 (sequence is synthesized)
ccatcctgcaatctaaggttcggtctcggtgtcctgcgaggaggctggtccccaccttggccgaggatcctggccttgccggttcctggacaggcatagaggagagccatggctgggcgc

SEQ ID NO: 311313 - DNA, 120 bp, Artificial Sequence
  ENSG00000134419_17 (sequence is synthesized)
cccagactgtgcactcaggggatcccggtccgtggggtgcaggccgcagcgcgggcgggagccggagccttcgactgcccagctaggcggtagctccggttcgggccgcagcgtctggat

SEQ ID NO: 311314 - DNA, 120 bp, Artificial Sequence
  ENSG00000134419_18 (sequence is synthesized)
ctccctttagtgctgaggcagcgccttggccccgggcggcgggcaacatcggggctggtgggccgtgcagcttctcactgctgcggccgcgctgggagcttgggaggctgaggccaccca

SEQ ID NO: 311315 - DNA, 120 bp, Artificial Sequence
  ENSG00000134419_19 (sequence is synthesized)
tttgacgtgcaactcaaagacctggaaaaatggcagaataatctgcttccatcccgccagtttgggtaagttggcctttccttaattaaaagaagttaatgctaagaatttctgtggtgc

SEQ ID NO: 311316 - DNA, 120 bp, Artificial Sequence
  ENSG00000134419_20 (sequence is synthesized)
agtttgacttaagggtttttttctttttttctgtttaaaacaaagcagtggtaatttgtctactcttaaccattttgacctaatagctcaagtgttatccatatttcttttctctctctt

SEQ ID NO: 311317 - DNA, 120 bp, Artificial Sequence
  ENSG00000134419_21 (sequence is synthesized)
tgttgcccaggctggagtgcagtggctgttcacaggtgcggtcataacacgctacagccttggcttcttggcctcgagcagtcctccccgctcagcctcttgtggatttgggaatacagg

SEQ ID NO: 311318 - DNA, 120 bp, Artificial Sequence
  ENSG00000134419_22 (sequence is synthesized)
ctcttgtggatttgggaatacaggcgcctgccaccgtgcctggctatttgccacatttcatgtgttgagcttcaggttctgagaggcacatgagagcttagactggcagaaaaggggggt

SEQ ID NO: 311319 - DNA, 120 bp, Artificial Sequence
  ENSG00000134419_23 (sequence is synthesized)
gggaccaaagtatgtctgtcatacctgagaacgaatgcaattgacctgtgggctgtggaggaggggatagtctgaaactgctgaagagtcacttagagtaggactgctggaaaaaggagc

SEQ ID NO: 311320 - DNA, 120 bp, Artificial Sequence
  ENSG00000134419_24 (sequence is synthesized)
agagtcacttagagtaggactgctggaaaaaggagctctgctaggtgtttgggagctaaatgaatctaagtcattgaaaggactcctgagctcatttcgagaccagcctggccaacatgg

SEQ ID NO: 311321 - DNA, 90 bp, Artificial Sequence
  ENSG00000134419_25 (sequence is synthesized)
atggcaaaaccccgtctctactaaaaaaacaaaaaacaaaaacaaaaatcagccggttttggaggctgaggcagggagaattgtttgaac

SEQ ID NO: 311322 - DNA, 120 bp, Artificial Sequence
  ENSG00000134419_26 (sequence is synthesized)
agtgtggggtgatcagccccagatttgacgtgcaactcaaagacctggaaaaatggcagaataatctgcttccatcccgccagtttggaatttataccctccaaattatgcgtctggtgc

SEQ ID NO: 311323 - DNA, 120 bp, Artificial Sequence
  ENSG00000134419_27 (sequence is synthesized)
tgggaaaacttagtttgggagtctttgtccttaaaagcctatctgagttcaaacccttgtttttctgctttaaagccatgagatcttgggcaagtcacagccttgatttcttcatccgta

SEQ ID NO: 311324 - DNA, 120 bp, Artificial Sequence
  ENSG00000134419_28 (sequence is synthesized)
aaagtggtaatagttcctctgtttatcacctgatttaattttggtaaagcactttatgagctgacacagtaaatgtgtatctttgtggttaagaatttataccctccaaattatgcgtct

SEQ ID NO: 311325 - DNA, 120 bp, Artificial Sequence
  ENSG00000134419_29 (sequence is synthesized)
ggtgccttggttgaaagtattctcacttcatggttgctgtattacaggtacggtattctcaccaaaatcatttctctttgtaattatgatactgattttaatgccgcacatttgcatact

SEQ ID NO: 311326 - DNA, 120 bp, Artificial Sequence
  ENSG00000134419_30 (sequence is synthesized)
atatgcttgttacagtgatccccacagtaactcatgaagcagccactcattgtacaaatgaacgtctccatataatagtttagctattatacagtacatggcagaaacacaattcaaact

SEQ ID NO: 311327 - DNA, 120 bp, Artificial Sequence
  ENSG00000134419_31 (sequence is synthesized)
caagtttatacgaatactttcaagtctccttacctgagagcagaaagtgacatttaaatttaaaggagttcccagcctttgttttcagtgcagtttgtttcatggtgtaggcagaagtca

SEQ ID NO: 311328 - DNA, 120 bp, Artificial Sequence
  ENSG00000134419_32 (sequence is synthesized)
gggctgtgtgattgtgtggctgggctctctggatttggctctttgggttgcaggagtcatggctcatacgctacatgaggcaccagctcatgtaggcactgtcagttcctatgtgcccca

SEQ ID NO: 311329 - DNA, 120 bp, Artificial Sequence
  ENSG00000134419_33 (sequence is synthesized)
caggaaagcgcccttaaccactgatgagtgttgatgtttttctgcactagaaggcactatgttgaactattaaacttaccagcactttctttttccactccatagtttcattgtactgac

SEQ ID NO: 311330 - DNA, 80 bp, Artificial Sequence
  ENSG00000134419_34 (sequence is synthesized)
tttatttttatttatatttcttttgagatagtcttgctctggttttccctagctcaagccatcctcccacctcagcctcc

SEQ ID NO: 311331 - DNA, 120 bp, Artificial Sequence
  ENSG00000134419_35 (sequence is synthesized)
tgagtagctggggaatacaggtgcattccactgtgactgctgatttttctttaacttttttgtagaggtggggtctcgctatgttgcttaggtttgtcttggactcatgggctcaagtga

SEQ ID NO: 311332 - DNA, 120 bp, Artificial Sequence
  ENSG00000134419_36 (sequence is synthesized)
agagtgctgggattacaggtgtgagtcactgggcccagccgagaaataaatttgaacagagcattctgtaaatggaacttatttgtggcacccttgttctgtggtatgctagtttgaaaa

SEQ ID NO: 311333 - DNA, 120 bp, Artificial Sequence
  ENSG00000134419_37 (sequence is synthesized)
gtggtatgctagtttgaaaaattctagcctacaacagttgatatgcaggccctgctgctctctgcccgttttttgagacggagtctcactctcacccaggttggagtgcagtggcacgat

SEQ ID NO: 311334 - DNA, 120 bp, Artificial Sequence
  ENSG00000134419_38 (sequence is synthesized)
tcgccatgttggccaggctggtctgggactcctgacctcaggtgatccaccgcgcctggcctgttctgtgactttcgacaaagcaaacaatttttggtttcttggaatttcatttctccc

SEQ ID NO: 311335 - DNA, 120 bp, Artificial Sequence
  ENSG00000134419_39 (sequence is synthesized)
tttctccccatttaaaagagaacgtccccctccatcgctttcatgcaagacatggacctacccttagcgtggaaattgagcttggaagtaaggtagtgtgtaaagactagattgattaaa

SEQ ID NO: 311336 - DNA, 120 bp, Artificial Sequence
  ENSG00000134419_40 (sequence is synthesized)
attctggccttgatcacatcctcttacgattcttctgggttgggggagggtatgctgttttaattctaccagaatgagaagaatttttgctgctggaatcaacataaaacttggatgcag

SEQ ID NO: 311337 - DNA, 120 bp, Artificial Sequence
  ENSG00000134419_41 (sequence is synthesized)
cgtgcggcagactttggaaagatctttcactatagcttgcttggataaaactggttttcccatattcctatccctgcatttctttcatctgccgtgagattgtccttgttagtcaagtca

SEQ ID NO: 311338 - DNA, 120 bp, Artificial Sequence
  ENSG00000134419_42 (sequence is synthesized)
cagcatagctgatggggtaatagtaggagaacttaagcaggcttcctggcgtagagcagttgggcctttctgacaagcccattttcagtttctgtgggtcaatctctgcttttggaagtg

SEQ ID NO: 311339 - DNA, 120 bp, Artificial Sequence
  ENSG00000134419_43 (sequence is synthesized)
tttttcaagtgtgcctgtgattttagagcagattttgtgagcagagggtcttcagttagtggacatcagttagtggactttcttcagtagtgttttagggctggcatgtagttgagtgat

SEQ ID NO: 311340 - DNA, 120 bp, Artificial Sequence
  ENSG00000134419_44 (sequence is synthesized)
ggcagcccttggcgagcttttacttgggaggatcattgttgccatgtcccagtagccacgagatgagataattgcaggccctttgctctttctgccttccatcattctgtcagatttgtt

SEQ ID NO: 311341 - DNA, 120 bp, Artificial Sequence
  ENSG00000134419_45 (sequence is synthesized)
tggaaaaatttgtctggggctgtaggacattgtttcttggaaatatgtaacggtacttcattggtgggagcagcgttcttagttcagtgcctggacagcgtgttccttagatattctaat

SEQ ID NO: 311342 - DNA, 120 bp, Artificial Sequence
  ENSG00000134419_46 (sequence is synthesized)
aatttgtagagcttcaggatttgagaccctatgattttatttcagccttattatgtaagaaagggttggctgtagtctctcttgtcgagacttgatctctaggctatgtaaaatctgatc

SEQ ID NO: 311343 - DNA, 120 bp, Artificial Sequence
  ENSG00000134419_47 (sequence is synthesized)
atcctggacagctctccagccaacagggagcacgccagtggcctgacactgccatgtattgccttgttccatctctttgcatgcctttgctttttctcctaggcaggcgtagtcttactt

SEQ ID NO: 311344 - DNA, 120 bp, Artificial Sequence
  ENSG00000134438_0 (sequence is synthesized)
agttggctccccgcctttagcgccgagagccccagctaccccgagcccgaacttccgacttctgggactaaggcggcagcgggctgagcgctcggccacccccagcgtgcgcagcccggg

SEQ ID NO: 311345 - DNA, 120 bp, Artificial Sequence
  ENSG00000134438_1 (sequence is synthesized)
cgggcttcgcccgcggagcttgacctagggtcgggacccgtcgggttgcaccgccgcactcgggaagacccggcttcgagcctctcctctccgtctccaaagcgccctcccgcctcccgg

SEQ ID NO: 311346 - DNA, 120 bp, Artificial Sequence
  ENSG00000134438_2 (sequence is synthesized)
cgctccccatgcacctgccgggctgcgcgccagccatggccgacgggagcttctcgcttgccggccacctgctccgcagcccgggcgggagcacctcgcgacttcacagcatcgaggcca

SEQ ID NO: 311347 - DNA, 120 bp, Artificial Sequence
  ENSG00000134438_3 (sequence is synthesized)
tcctggggtttaccaaggacgacgggatcctcggcaccttcccggcggagcggggcgcccggggcgcgaaggagcgggataggaggctgggcgcgcggcccgcctgccccaaggcgcccg

SEQ ID NO: 311348 - DNA, 120 bp, Artificial Sequence
  ENSG00000134438_4 (sequence is synthesized)
cgccagccccggcgcccgcccccgagtacgaagcccctcgaccctactgccccaaggagcccggggaggcacggccgagcccagggctgcccgtcgggccagccaccggcgaagcgaaac

SEQ ID NO: 311349 - DNA, 120 bp, Artificial Sequence
  ENSG00000134438_5 (sequence is synthesized)
ggccagccaccggcgaagcgaaactgtcagaggaggaacagcccaagaaaaagcatcggcggaaccgcacgactttcaccacgtaccagctgcatgagctggagcgcgcgttcgagaagt

SEQ ID NO: 311350 - DNA, 120 bp, Artificial Sequence
  ENSG00000134438_6 (sequence is synthesized)
cccactacccggacgtgtacagccgcgaggagctggccggcaaggtcaacctaccagaggtccgggtccaggtgtggttccagaaccgacgggctaagtggcggcggcaggagaagctgg

SEQ ID NO: 311351 - DNA, 120 bp, Artificial Sequence
  ENSG00000134438_7 (sequence is synthesized)
aagtgtcctccatgaagctgcaggactcgcccctcctctccttcagccgctccccgccctccgcgacgctgtcgcccctcggggcgggcccgggcagcggtggcgggccggctgggggcg

SEQ ID NO: 311352 - DNA, 80 bp, Artificial Sequence
  ENSG00000134438_8 (sequence is synthesized)
cgggggcgccacggcgctgcagagcctgccgggcttcgggccgccggcgcagagcctgcctgccagctacacgccaccgc

SEQ ID NO: 311353 - DNA, 120 bp, Artificial Sequence
  ENSG00000134438_9 (sequence is synthesized)
cgccgcctccgcccttcctgaactccccgccgttgggccccggcctgcaacctctcgcgccgccgccgccctcctacccgtgcgggcccggcttcggggacaagttcccgctggacgagg

SEQ ID NO: 311354 - DNA, 120 bp, Artificial Sequence
  ENSG00000134438_10 (sequence is synthesized)
cggacccgcgcaacagcagcatcgcggcgctgcgtctgaaagccaaggagcacatccaggccatcgggaagccgtggcaggccctctaggggcactggggaacgtcttgggatccgaccc

SEQ ID NO: 311355 - DNA, 120 bp, Artificial Sequence
  ENSG00000134438_11 (sequence is synthesized)
cgggccgaccgcaccgtacccgcatcctctctcccagggacaacccccctccccagctcggcccctctttccctgtcgcctgcagccacccgccaagcatagttcagggccacgcgcctg

SEQ ID NO: 311356 - DNA, 120 bp, Artificial Sequence
  ENSG00000134438_12 (sequence is synthesized)
ctcccgatgcacggggagaagggcgactttcaggcctgaggagaggccctctggccgcctcaacgcacttcgcggacctcagccctgcagctggagggcaacaggctgccgggccccgct

SEQ ID NO: 311357 - DNA, 120 bp, Artificial Sequence
  ENSG00000134438_13 (sequence is synthesized)
atcaccgcaggcgctggagcctccaggcccaaacaggctgaagctcctaaacttggccattcccaggaggcttggagacccccagataaccataacagggaagcaggggaggcggaaaaa

SEQ ID NO: 311358 - DNA, 120 bp, Artificial Sequence
  ENSG00000134438_14 (sequence is synthesized)
tagagtttgagaaacttttgtataagtagtttcaaactatttgagaggagaattaaagacatgcttgttttgtttcgactctgtttaagcacgctcaggacttggggagaggagtgaata

SEQ ID NO: 311359 - DNA, 120 bp, Artificial Sequence
  ENSG00000134438_15 (sequence is synthesized)
ttggggtacgggaggagggtgcgttgacggacagggtgggtcagggaaagaggaggactgagaagaagctcagggtttccttgtgaaaattctagggacacttcgctgcagcagagaatc

SEQ ID NO: 311360 - DNA, 120 bp, Artificial Sequence
  ENSG00000134438_16 (sequence is synthesized)
gtccccattccgaacgcttcggcggcctagaccagaggcgcccttccctggagccggcgtgcgcgcttggggtccggagtggatggggctaaggctcagatgctagcgcgctcccagttc

SEQ ID NO: 311361 - DNA, 120 bp, Artificial Sequence
  ENSG00000134438_17 (sequence is synthesized)
ccccgctagccccatagtccagcggcagctgatattttcaagtttgacttcaatagaaagcgtcaagaccaccttccctagggcgagagcgaagtgtcccccggcccctggcgtccccgc

SEQ ID NO: 311362 - DNA, 120 bp, Artificial Sequence
  ENSG00000134438_18 (sequence is synthesized)
tctcctaaggactcctctcagttcaccaagcagatctccggttcggtgccagtccctaacacccaaggttgatcaccagcggtacaagaactgaggcaaagagatgcttttccttttcgg

SEQ ID NO: 311363 - DNA, 120 bp, Artificial Sequence
  ENSG00000134438_19 (sequence is synthesized)
agccgcgagactctctaacctccccaactcgctccacactcgccaacccagagttcggtaaaaggcgcgtctggtgaggtgccgcgctcggagagtgtcctggagcgccctacgccaccg

SEQ ID NO: 311364 - DNA, 120 bp, Artificial Sequence
  ENSG00000134438_20 (sequence is synthesized)
ccccgagagctagttcttgcgggcgtgccctggacagtatctgcagttctttggcgccggctctagggcgaggaaggaatctcgaaatctcagcccgcttcacaatctcctgagactctc

SEQ ID NO: 311365 - DNA, 120 bp, Artificial Sequence
  ENSG00000134438_21 (sequence is synthesized)
tgaagaaggagagtcccggactcccgcctgagcgtgctcgatatccaccgttgacactggaagctgggcgaccgccagcagaacctggatgcccgccaacaggtcctggcacgggggggg

SEQ ID NO: 311366 - DNA, 120 bp, Artificial Sequence
  ENSG00000134438_22 (sequence is synthesized)
ggggggcgtccaccccacaacccccgtccctaagcgtgctttcaggatgatgcccccagagccttaattagcatcaactggctactgtctgtcggtcctgagcaaattagtgaagctccc

SEQ ID NO: 311367 - DNA, 120 bp, Artificial Sequence
  ENSG00000134438_23 (sequence is synthesized)
agtcccctttcctcgtctaaataaactctgtctctctggaaggtgggaaagatggaataagatcacctgtaaaggctttgtggaaagtaccaagaccctggcatgacgcaatatggattg

SEQ ID NO: 311368 - DNA, 120 bp, Artificial Sequence
  ENSG00000134438_24 (sequence is synthesized)
taatcatcgtccccatttccccgaaattccctggctgttctccggttcctgaaaccgacttgggaaaaggatgaccacgctggagctgggaatatgggaagcctcatcatagtttccagt

SEQ ID NO: 311369 - DNA, 120 bp, Artificial Sequence
  ENSG00000134438_25 (sequence is synthesized)
cctttctctgcgggtctaagaggctattgcataaccagggctgtgtacccctagacctccagatggtgccttgcacacagtaggctgatcagtaaaaatgtactgaataaattattcccc

SEQ ID NO: 311370 - DNA, 120 bp, Artificial Sequence
  ENSG00000134438_26 (sequence is synthesized)
cccaagaggtagggagtaatatctgcacttttcctcacaaggatgtctccttgggggaggaggatggagcagcccgtgtgttatcaccttttagcaagaaaacaaaacaaaacaaaacca

SEQ ID NO: 311371 - DNA, 120 bp, Artificial Sequence
  ENSG00000134438_27 (sequence is synthesized)
gccggcgctcaagtccgaggggactgggaggagttacaacagatatagacggacaaactaaacgcgaggtccgggacttcgtacaacccagccaagaaaggagtgggtcccgaaaaggga

SEQ ID NO: 311372 - DNA, 120 bp, Artificial Sequence
  ENSG00000134438_28 (sequence is synthesized)
aaggtgagtgcgcacccctggctgtgcgaggccgttcgggcgcccgagcttaggagttggccagacgagagcgccccttccttaacttttattaaggcaactgggcgcggggttggggac

SEQ ID NO: 311373 - DNA, 120 bp, Artificial Sequence
  ENSG00000134438_29 (sequence is synthesized)
cgtctatggcgggagcttccaatttgcattcagagaaagcttaggacccatcgccgccctcaccacggacctccccgggccatctcggagcccgcaggcgggctggccagtgcccacagc

SEQ ID NO: 311374 - DNA, 120 bp, Artificial Sequence
  ENSG00000134440_0 (sequence is synthesized)
agatctacgctctctgatgcaacgccggaatcgcggaaaccgccggtgcacgttggagtcataagacggcgtcggtgttgcagtctgtgtccttggaggtgaccagggccactgcaggca

SEQ ID NO: 311375 - DNA, 120 bp, Artificial Sequence
  ENSG00000134440_1 (sequence is synthesized)
tggtgctagcagagctgtacgtctctgaccgagagggaagcgatgccacgggagatggaaccaaggagaaaccatttaaaacaggtctaaaggctttgatgacagtagggaaagaaccat

SEQ ID NO: 311376 - DNA, 120 bp, Artificial Sequence
  ENSG00000134440_2 (sequence is synthesized)
ttcctaccatttacgtagattcacaaaaagaaaatgagaggtggaatgttatttctaaatcacagttgaagaacattaaaaagatgtggcatagggaacaaatgaagagtgaatcccggg

SEQ ID NO: 311377 - DNA, 120 bp, Artificial Sequence
  ENSG00000134440_3 (sequence is synthesized)
aaaagaaagaggcagaagatagtttacgaagagaaaagaacctggaagaagcaaagaagattaccattaaaaatgatccaagtctcccagagccaaaatgtgtgaagattggtgcgttag

SEQ ID NO: 311378 - DNA, 120 bp, Artificial Sequence
  ENSG00000134440_4 (sequence is synthesized)
aaggatatagaggccaaagagtaaaggtgtttggctgggtccacaggctgcgcaggcaaggaaagaatttaatgtttctggtgttgcgagatggtacaggttatcttcagtgtgtcttgg

SEQ ID NO: 311379 - DNA, 120 bp, Artificial Sequence
  ENSG00000134440_5 (sequence is synthesized)
cggatgagttgtgtcagtgctacaatggagttctcttgtccacggagagcagtgttgcagtgtatggaatgctaaatcttaccccaaagggcaagcaggctccaggtggccatgagctga

SEQ ID NO: 311380 - DNA, 120 bp, Artificial Sequence
  ENSG00000134440_6 (sequence is synthesized)
gttgtgacttctgggaactaattgggttggcccctgctggaggagctgacaacctgatcaatgaggagtctgacgttgatgtccagctcaacaacagacacatgatgatccgaggagaaa

SEQ ID NO: 311381 - DNA, 120 bp, Artificial Sequence
  ENSG00000134440_7 (sequence is synthesized)
acatgtccaaaatcctaaaagcacgatccatggtcaccaggtgctttagagatcacttctttgatagggggtactatgaagttactcctccaacattagtgcaaacacaagtagaaggtg

SEQ ID NO: 311382 - DNA, 120 bp, Artificial Sequence
  ENSG00000134440_8 (sequence is synthesized)
gtgccacactcttcaagcttgactattttggggaagaggcatttttgactcaatcctctcagttgtacttggagacctgcctcccagccctgggagatgttttttgtattgctcagtcat

SEQ ID NO: 311383 - DNA, 120 bp, Artificial Sequence
  ENSG00000134440_9 (sequence is synthesized)
accgggcagagcagtccagaacacgaaggcacctggctgagtacactcacgtggaagctgagtgtcctttcctgacttttgacgacctcctgaaccggttggaggacttggtttgtgatg

SEQ ID NO: 311384 - DNA, 120 bp, Artificial Sequence
  ENSG00000134440_10 (sequence is synthesized)
tggtagatcgaatattgaagtcacctgcagggagcatagtgcatgagctcaacccgaactttcagccccccaaacggcctttcaaacggatgaactattcagatgctatcgtttggctaa

SEQ ID NO: 311385 - DNA, 120 bp, Artificial Sequence
  ENSG00000134440_11 (sequence is synthesized)
gaacatgatgtaaagaaagaagatggaactttctatgaatttggagaagatatcccagaagctcctgagagactgatgacagacaccattaatgaaccaatcttgctgtgtcgatttcct

SEQ ID NO: 311386 - DNA, 120 bp, Artificial Sequence
  ENSG00000134440_12 (sequence is synthesized)
gtggagatcaagtccttctacatgcagcgatgtcctgaggattcccgtcttactgaatctgtcgacgtgttgatgcccaatgttggtgagattgtgggaggctcaatgcgtatctttgat

SEQ ID NO: 311387 - DNA, 120 bp, Artificial Sequence
  ENSG00000134440_13 (sequence is synthesized)
agtgaagaaatactggcaggttataaaagggaagggattgaccccactccctattactggtatacggatcagagaaaatacggtacatgtccccatggaggatatggcttgggcttggaa

SEQ ID NO: 311388 - DNA, 120 bp, Artificial Sequence
  ENSG00000134440_14 (sequence is synthesized)
cgattcttaacgtggattctgaataggtatcacatccgagacgtgtgcttataccctcgatttgtccagcgttgcacgccataaccattttctccagaagcgtggaggaaagattatgaa

SEQ ID NO: 311389 - DNA, 120 bp, Artificial Sequence
  ENSG00000134440_15 (sequence is synthesized)
aggaacaggctctttaaaaaagaaaacaaaaagccagaatcttcctttttttgtttcattggggtttctctttctgtttttctttctactaccataaaaactatctcaaatcacctgaac

SEQ ID NO: 311390 - DNA, 120 bp, Artificial Sequence
  ENSG00000134440_16 (sequence is synthesized)
atcaagtgatattaaggttgtcatcttaagaaaaaatatccatttttttcttaagttcgggaaacaaagttcggggaaaatacctggcatgaaactgtagttagggatacatttcagcat

SEQ ID NO: 311391 - DNA, 120 bp, Artificial Sequence
  ENSG00000134440_17 (sequence is synthesized)
tttactcactttatccaagttattcattttattcaagttatatgtatgtataattcaacaattttagattatggtgtaagatactccagtaacttatctttctgtccttttaagtgtacc

SEQ ID NO: 311392 - DNA, 120 bp, Artificial Sequence
  ENSG00000134440_18 (sequence is synthesized)
ttgaattctttgatttattttattgcatcaatgaattaaaacaaaaatcttgggggaagaaattggcaatatcgtataaaaatctgctcatattagaacacagtataattcagcagtaaa

SEQ ID NO: 311393 - DNA, 120 bp, Artificial Sequence
  ENSG00000134440_19 (sequence is synthesized)
cactagaatcaaatgaatagccttttgtatcagttattaatcttttctaactctgcttagctgctaataatcctgaggcatagaaattgaagaatttgtaaaaatagaattgccttaaag

SEQ ID NO: 311394 - DNA, 120 bp, Artificial Sequence
  ENSG00000134440_20 (sequence is synthesized)
gatttgaagtaagaacataattttggggagagttttttagtgattcacagtatccctcttagcattaatttaaggtaaagaggcagattgattttccctctttcctggtaattcctaagt

SEQ ID NO: 311395 - DNA, 120 bp, Artificial Sequence
  ENSG00000134440_21 (sequence is synthesized)
aattaagaataaataagttccaaaagaaattgtagctggaatcttaataacaattgtgagtggctgtttgagttgcccccaccatgtccttagatctaatctgtgctaccttattaactc

SEQ ID NO: 311396 - DNA, 120 bp, Artificial Sequence
  ENSG00000134440_22 (sequence is synthesized)
acagcaggcttactgaatggcttcatttcagatttagttgatttctccaccaaatgcatgtcatgtattctcaataggctgtattcccagcagtcaataaatgaacacccgtaaaaactc

SEQ ID NO: 311397 - DNA, 120 bp, Artificial Sequence
  ENSG00000134440_23 (sequence is synthesized)
gtctcgcagctggcgcggtgtttgctggtgacatgaactcaaccagcctccaccatctggggatcggggcgacatccttggtctggtttgcaagaggacccgcacgcctccagctggggc

SEQ ID NO: 311398 - DNA, 120 bp, Artificial Sequence
  ENSG00000134440_24 (sequence is synthesized)
ggaattggaagattcagaaaggaaagttggggaggcggggaaggaagggtgcaaaagtgacactgtgccagggtctccagggccgcggagctccgggacaggcagcgccttccgagctgc

SEQ ID NO: 311399 - DNA, 120 bp, Artificial Sequence
  ENSG00000134440_25 (sequence is synthesized)
acaaacgcgtggggcggggcgtctctggatccggaagttgcctctgccctcaccaaagatggcggccccggcgccgctcgcccacctctcgtaaccaatggaaccgcggcgctcggccga

SEQ ID NO: 311400 - DNA, 120 bp, Artificial Sequence
  ENSG00000134440_26 (sequence is synthesized)
tgaccagggccactgcaggcatggtgctagagctgtacgtctctgaccgagagggaagcgatgccacgggagatggaaccaaggagaaaccatttaaaacaggtctaaagtattgtacaa

SEQ ID NO: 311401 - DNA, 120 bp, Artificial Sequence
  ENSG00000134440_27 (sequence is synthesized)
ttgtattgctcagtcataccgggcagagcagtccagaacacgaaggcacctggctgagtatgaagttgtctttttgttttatttctttctaggtaatatctttagagaagaaatcttagt

SEQ ID NO: 311402 - DNA, 120 bp, Artificial Sequence
  ENSG00000134440_28 (sequence is synthesized)
gtaggtaaattatgtttatgttttaaaaaaaaccaactgatatattaagtggttaatggaagaacatataacaaagttttgccaccttagatcgtagctaagttctcttttttcactttg

SEQ ID NO: 311403 - DNA, 120 bp, Artificial Sequence
  ENSG00000134440_29 (sequence is synthesized)
atatataaaggagcaaacaagaaattgctactcagtggagaagaggggagtccacagctaatttgcaaagttgggaattggtagcattgttggcattttatggacagcttcccaatgtta

SEQ ID NO: 311404 - DNA, 120 bp, Artificial Sequence
  ENSG00000134440_30 (sequence is synthesized)
tcccgtcttactgaatctgtcagtttctgtttcaaagagtattaataattttgctttttaagggggtggggactgtcatctggaatcaggtacagctcatgccaaatatttcattctcta

SEQ ID NO: 311405 - DNA, 120 bp, Artificial Sequence
  ENSG00000134440_31 (sequence is synthesized)
tctagaataacaatatttaaagacgttgggttttttcaccctcccctgattgaagttgacatgctttgttaaattagagaaatgtaaacatttgaatattacatgatcatagtggctcct

SEQ ID NO: 311406 - DNA, 120 bp, Artificial Sequence
  ENSG00000134440_32 (sequence is synthesized)
ttagcccttggagcttaattgtaattttcatttaaactctagggcagtgctgtgtctgatcgcttgatagtaattgtgtatcttctttcacttatatttaaaggtcgacgtgttgatgcc

SEQ ID NO: 311407 - DNA, 120 bp, Artificial Sequence
  ENSG00000134443_0 (sequence is synthesized)
agcagtagcaccagcggctgcggcggcggagctcctccgaggtccgggtcaccagtctctgctcttcccagcctctccggcgcgctccaagggcttcccgtcgggaccatgcgcggccgt

SEQ ID NO: 311408 - DNA, 120 bp, Artificial Sequence
  ENSG00000134443_1 (sequence is synthesized)
gagctcccgctggtcctgctggcgctggtcctctgcctggcgccccgggggcgagcggtcccgctgcctgcgggcggagggaccgtgctgaccaagatgtacccgcgcggcaaccactgg

SEQ ID NO: 311409 - DNA, 120 bp, Artificial Sequence
  ENSG00000134443_2 (sequence is synthesized)
gcggtggggcacttaatggggaaaaagagcacaggggagtcttcttctgtttctgagagagggagcctgaagcagcagctgagagagtacatcaggtgggaagaagctgcaaggaatttg

SEQ ID NO: 311410 - DNA, 120 bp, Artificial Sequence
  ENSG00000134443_3 (sequence is synthesized)
aaggagaacagaaaccaccagccacctcaacccaaggccctgggcaatcagcagccttcgtgggattcagaggatagcagcaacttcaaagatgtaggttcaaaaggcaaagttggtaga

SEQ ID NO: 311411 - DNA, 120 bp, Artificial Sequence
  ENSG00000134443_4 (sequence is synthesized)
ctctctgctccaggttctcaacgtgaaggaaggaacccccagctgaaccagcaatgataatgatggcctctctcaaaagagaaaaacaaaacccctaagagactgcgttctgcaagcatc

SEQ ID NO: 311412 - DNA, 120 bp, Artificial Sequence
  ENSG00000134443_5 (sequence is synthesized)
agttctacggatcatcaacaagatttccttgtgcaaaatatttgactattctgtatctttcatccttgactaaattcgtgattttcaagcagcatcttctggtttaaacttgtttgctgt

SEQ ID NO: 311413 - DNA, 120 bp, Artificial Sequence
  ENSG00000134443_6 (sequence is synthesized)
gaacaattgtcgaaaagagtcttccaattaatgcttttttatatctaggctacctgttggttagattcaaggccccgagctgttaccattcacaataaaagcttaaacacattgtccaaa

SEQ ID NO: 311414 - DNA, 120 bp, Artificial Sequence
  ENSG00000134444_0 (sequence is synthesized)
accaggaagacgcctgcagagccgggctgctggtgcagcagaggctgaggcatcaggtgcagctgcatccggatctcctgccttggagcgtactccttgtctctaagtcgggaggcagga

SEQ ID NO: 311415 - DNA, 120 bp, Artificial Sequence
  ENSG00000134444_1 (sequence is synthesized)
cgtggtcaggccggggctgtggaggtgcgctgtgtcccctgaggcctagaggattcgggctgcggcccgtcggaaccagtcagggaggcgcccacactcctgacaggataagatggcggc

SEQ ID NO: 311416 - DNA, 120 bp, Artificial Sequence
  ENSG00000134444_2 (sequence is synthesized)
gatggcgcctggaggtagtggcagtggtggcggcgtgaatccatttctcagtgattcggatgaggacgatgacgaggtagctgcaacagaggaacggcgggcagtacttcggctgggcgc

SEQ ID NO: 311417 - DNA, 120 bp, Artificial Sequence
  ENSG00000134444_3 (sequence is synthesized)
cggaagtggcctagatcctggctctgcgggctcgctgtcgccacaggatcccgtggccttaggaagcagtgcgcggccagggctccctggggaggcgtcggcggctgcagtggccctggg

SEQ ID NO: 311418 - DNA, 120 bp, Artificial Sequence
  ENSG00000134444_4 (sequence is synthesized)
gggcaccggggagaccccggcccgattatcaattgatgcgatcgctgctcagctgttgcgcgatcaatacttgctgaccgccctggagctgcataccgagctgttagagagtggccggga

SEQ ID NO: 311419 - DNA, 120 bp, Artificial Sequence
  ENSG00000134444_5 (sequence is synthesized)
gctgcctcggctgcgcgactacttctccaatccaggcaacttcgagaggcaaagtggaaccccgccggggatgggggcgccaggggtccctggagcagccggcgttgggggcgctggagg

SEQ ID NO: 311420 - DNA, 120 bp, Artificial Sequence
  ENSG00000134444_6 (sequence is synthesized)
tcgggaaccgagtacagcgtcgggcgggggacagctcaatcgagctgggagcattagtacccttgattctttagactttgcaagatattcagatgatggtaacagggaaacagatgaaaa

SEQ ID NO: 311421 - DNA, 120 bp, Artificial Sequence
  ENSG00000134444_7 (sequence is synthesized)
agtggcagtcctggagtttgaactacggaaagccaaggagaccattcaggccctccgagccaacctgacaaaggccgcagaacatgaagttcctttacaggaacgaaaaaattacaaatc

SEQ ID NO: 311422 - DNA, 120 bp, Artificial Sequence
  ENSG00000134444_8 (sequence is synthesized)
aagtcctgaaattcaggagccaatcaaacctcttgaaaagagagctctaaacttcttagtcaatgaatttttattgaagaataactataagcttacatcaataaccttttcagatgaaaa

SEQ ID NO: 311423 - DNA, 120 bp, Artificial Sequence
  ENSG00000134444_9 (sequence is synthesized)
cgatgatcaggattttgaattatgggatgatgtaggattaaacattccaaaacctccagacttattgcaactctaccgggattttggaaatcatcaagtaactggaaaagatcttgtaga

SEQ ID NO: 311424 - DNA, 120 bp, Artificial Sequence
  ENSG00000134444_10 (sequence is synthesized)
tgtggccagtggagtagaagaagatgaattagaggcccttacaccaattataagcaaccttcctccaactcttgaaactccccagcctgcagagaactccatgttagtacagaaattaga

SEQ ID NO: 311425 - DNA, 120 bp, Artificial Sequence
  ENSG00000134444_11 (sequence is synthesized)
agataaaattagtttgttaaatagtgagaaatggtcattgatggagcaaatcagaagacttaaaagtgaaatggacttcctcaaaaatgaacactttgccatcccagcagtttgtgactc

SEQ ID NO: 311426 - DNA, 120 bp, Artificial Sequence
  ENSG00000134444_12 (sequence is synthesized)
tgttcagcctcctttggatcagttgccccacaaagactctgaggacagtggacagcatccagatgtaaatagttcagacaagggaaaaaacacagacatccatctttcaatatcagatga

SEQ ID NO: 311427 - DNA, 120 bp, Artificial Sequence
  ENSG00000134444_13 (sequence is synthesized)
agctgattccactattcctaaagagaattccccaaattcattccccaggagagaaagagaaggaatgccaccttcttctctatcaagtaaaaagacagttcattttgataaacctaatag

SEQ ID NO: 311428 - DNA, 120 bp, Artificial Sequence
  ENSG00000134444_14 (sequence is synthesized)
gaaattgtctcctgcattccatcaagcactactctctttttgtcgaatgtcagcagatagtcgtttaggatacgaggtgtctcgtattgcagacagtgaaaaaagcgttatgttaatgct

SEQ ID NO: 311429 - DNA, 120 bp, Artificial Sequence
  ENSG00000134444_15 (sequence is synthesized)
gggacgctgcctgccacacattgttcccaatgtgctattggcaaagagagaggagttgatccccctcatattgtgtacagcatgtctacatcctgagcctaaagagcgagatcagcttct

SEQ ID NO: 311430 - DNA, 120 bp, Artificial Sequence
  ENSG00000134444_16 (sequence is synthesized)
ccacatacttttcaatttgatcaagaggccagatgatgagcaaaggcaaatgatactgacaggttgtgtggcatttgcgcgtcatgttggaccaacacgtgtagaagctgaacttttacc

SEQ ID NO: 311431 - DNA, 120 bp, Artificial Sequence
  ENSG00000134444_17 (sequence is synthesized)
acagtgttgggaacagattaatcacaaatacccagaaagacgactgcttgtggcagaatcctgtggagcactggcaccttaccttcctaaagaaatccgtagctccttggttctttcaat

SEQ ID NO: 311432 - DNA, 120 bp, Artificial Sequence
  ENSG00000134444_18 (sequence is synthesized)
gttgcaacaaatgttaatggaagataaggcagatttggtaagagaagctgttatcaaaagccttggtatcattatgggatacattgatgatccagacaaatatcatcagggttttgaatt

SEQ ID NO: 311433 - DNA, 120 bp, Artificial Sequence
  ENSG00000134444_19 (sequence is synthesized)
gttgctgtcagccttgggtgatccctcagaaagagtagttagtgctacacatcaagtatttttaccagcttacgctgcgtggactacagaacttggaaatttacagtctcatcttatact

SEQ ID NO: 311434 - DNA, 120 bp, Artificial Sequence
  ENSG00000134444_20 (sequence is synthesized)
tacactactgaacaagattgaaaaacttctcagggaaggagaacatggactggatgaacacaaactccacatgtatctttctgccttgcagtccttgatcccatctctctttgcattagt

SEQ ID NO: 311435 - DNA, 120 bp, Artificial Sequence
  ENSG00000134444_21 (sequence is synthesized)
gctacagaatgcacctttctccagcaaagccaagcttcatggtgaagtgccacagatagaagtgactaggtttcctcggcctatgtcgcctcttcaagatgtgtccactattatcggaag

SEQ ID NO: 311436 - DNA, 120 bp, Artificial Sequence
  ENSG00000134444_22 (sequence is synthesized)
tcgtgagcaattggcagtgctgctgcaactttatgactaccagctagaacaagagggtacaacaggctgggagagtttactgtgggttgtcaatcaattgttgccacaacttatagaaat

SEQ ID NO: 311437 - DNA, 120 bp, Artificial Sequence
  ENSG00000134444_23 (sequence is synthesized)
agttggcaaaattaatgttacttcaactgcctgtgtccatgaattctccagatttttctggcgcctttgccggacatttggcaaaatttttacaaacactaaggtaaaacctcagttcca

SEQ ID NO: 311438 - DNA, 120 bp, Artificial Sequence
  ENSG00000134444_24 (sequence is synthesized)
ggagattttaagactatctgaagaaaacattgattcctcagcaggaaatggggtcctcactaaagctacagtccccatttatgcaacaggagtccttacgtgttatattcaggaagaaga

SEQ ID NO: 311439 - DNA, 120 bp, Artificial Sequence
  ENSG00000134444_25 (sequence is synthesized)
gctcctcttgatagcctgaaggcttcttttgtggaattgggtgcaaacccagcctaccatgagttactattaactgttttgtggtatggtgttgtccatacttcagcactcgtgaggtgt

SEQ ID NO: 311440 - DNA, 120 bp, Artificial Sequence
  ENSG00000134444_26 (sequence is synthesized)
actgctgctagaatgtttgagctgactcttcgaggcatgagtgaagcgttagttgacaagcgggttgctccggcccttgttaccttgtccagtgatcctgaattctctgtcaggattgcc

SEQ ID NO: 311441 - DNA, 120 bp, Artificial Sequence
  ENSG00000134444_27 (sequence is synthesized)
acaattccagcctttggcactattatggaaacagtaattcaaagagagttgctggaaagagtgaaaatgcagttggcttctttcctggaagatcctcagtatcaagaccaacattctttg

SEQ ID NO: 311442 - DNA, 120 bp, Artificial Sequence
  ENSG00000134444_28 (sequence is synthesized)
catacagagatcataaaaacatttggtagagttggccctaacgcagaacccaggttccgagatgagtttgttataccacatttgcataagttagccttggtgaacaacttacagattgtg

SEQ ID NO: 311443 - DNA, 120 bp, Artificial Sequence
  ENSG00000134444_29 (sequence is synthesized)
gattctaaaagactggacattgctacgcatctttttgaagcctacagtgcactttcctgttgtttcatttcagaggatttaatggttaatcactttttacctggtctcagatgtttacgg

SEQ ID NO: 311444 - DNA, 120 bp, Artificial Sequence
  ENSG00000134444_30 (sequence is synthesized)
actgacatggaacatctctctccagagcatgaggttattttaagttccatgataaaagaatgtgaacaaaaagttgaaaacaagaccgtccaagagcctcaaggctcaatgtcaattgct

SEQ ID NO: 311445 - DNA, 120 bp, Artificial Sequence
  ENSG00000134444_31 (sequence is synthesized)
gcaagcttagtgagtgaagatacaaagaccaagtttttgaacaaaatgggccagttgacaacatcaggtgccatgttggccaatgtatttcagagaaagaagtagaagcaggaaagaagc

SEQ ID NO: 311446 - DNA, 120 bp, Artificial Sequence
  ENSG00000134444_32 (sequence is synthesized)
ccccagtaaacactaagatggacctcaagccgactggttccttgtacttgaagtacttgccttttttgtttcctcagttttatgttcttgcattataattttatcctaacctccaaagat

SEQ ID NO: 311447 - DNA, 120 bp, Artificial Sequence
  ENSG00000134444_33 (sequence is synthesized)
atttgcactgcttttaattactgctgtatatttgttgattttggagttacaactgtggtgatagaaaattgagttgatggtctgtaccaagtcccttgtctatgttcttgtctttcagaa

SEQ ID NO: 311448 - DNA, 120 bp, Artificial Sequence
  ENSG00000134444_34 (sequence is synthesized)
aaatatatatatagtgaagaagttttttttaatttttggatgggatattcgcaaatatctgtattatacactaagctattacaatggtacttaaaataatgtaaatttgaagtcattgtt

SEQ ID NO: 311449 - DNA, 120 bp, Artificial Sequence
  ENSG00000134444_35 (sequence is synthesized)
gaagtcattgttataaaataataaagtggagattacttaagtatttaaattatgaaagaataatgcagactttttattgtttcttaactgactagaaagagccaccagcattactctgtg

SEQ ID NO: 311450 - DNA, 120 bp, Artificial Sequence
  ENSG00000134444_36 (sequence is synthesized)
ccttttggacatcagtttgtgtgttctgtaggaattgtgtgcattccattcacacagtatttctttaggatgctgtgatgatttgaattacaaatcctacagtcaatagctaaagacgaa

SEQ ID NO: 311451 - DNA, 120 bp, Artificial Sequence
  ENSG00000134444_37 (sequence is synthesized)
accttcatttcagaactctcatgaatattctttaagtgctatttaaacctccccagcacttagatgcatataatggacttacctgaggaaagacagcacataggcatggggagaggtaac

SEQ ID NO: 311452 - DNA, 120 bp, Artificial Sequence
  ENSG00000134444_38 (sequence is synthesized)
caaggtgaattttacaaactggtgtatagtagatttaaatgctcaaaaataaatgtaactgagaagagttaataattgtgagatttttcccaaattgagatacagaagaaaatatagttt

SEQ ID NO: 311453 - DNA, 120 bp, Artificial Sequence
  ENSG00000134444_39 (sequence is synthesized)
gaatctgaaatttaacacttatttatgtaaaacactttatttaagatattttctaatgattttaattttagagagtaccttttcattctgtgtgttacagagaagtactgaaaagttaag

SEQ ID NO: 311454 - DNA, 120 bp, Artificial Sequence
  ENSG00000134444_40 (sequence is synthesized)
gacacttgggggctacttttttccctctaaactaaaaaagacattggctgaattataactagttagttatcacctcgtcccttaaagtcagtgacctcctgtgtttgatgtatattacat

SEQ ID NO: 311455 - DNA, 120 bp, Artificial Sequence
  ENSG00000134444_41 (sequence is synthesized)
agagtcttaagtcagtgtacagttccactggaatttgacagttgtctctacagtcatgcaactcgaagtagaaaagagtgctggacataggaagggggtgcttggtttgaggggttaatg

SEQ ID NO: 311456 - DNA, 120 bp, Artificial Sequence
  ENSG00000134444_42 (sequence is synthesized)
tgaggcctttttgaaaaatgaatattttgataaaaagaattcttgttttagcacagttgatgcacataagtgattctcatatttgttgtataaactggtttaatacatttggaacatagt

SEQ ID NO: 311457 - DNA, 120 bp, Artificial Sequence
  ENSG00000134444_43 (sequence is synthesized)
tggattacattcatttcctgggaaagctagcttaccatacattcaagtttataaaacaatttgccataggcaaagccatttaaaaagttcattctgaaattatttcatttacctacagtg

SEQ ID NO: 311458 - DNA, 120 bp, Artificial Sequence
  ENSG00000134444_44 (sequence is synthesized)
aaataattgtgaactaagtagtctttctgaaaactgttgggttctaggcattcctgagaaattgaaagtggctacctttcatgtcaaaaatgttgatctattataaataaaatgtttttg

SEQ ID NO: 311459 - DNA, 120 bp, Artificial Sequence
  ENSG00000134444_45 (sequence is synthesized)
catatgtttttgatttggtttgggctatgcattttactttcgttttgaaacactatactttctattaagcaaaaaaatgagaaaagcctatattcatgagaatatactaatattttgtaa

SEQ ID NO: 311460 - DNA, 120 bp, Artificial Sequence
  ENSG00000134444_46 (sequence is synthesized)
atataatttatataaatttacctattttggtttatttttactaaaaggggaccatgttgctataaaactaatacatttcagaggtacctggaagaaaaatgtttaaactctgatttgctt

SEQ ID NO: 311461 - DNA, 120 bp, Artificial Sequence
  ENSG00000134444_47 (sequence is synthesized)
caaactatagtagaatatgtgtatgtttgttatcaggtgaatgggtagaatgtatttttattgtgaacatttttcttaattaatgaatatatttatttaagtgctaatgtttttttaaag

SEQ ID NO: 311462 - DNA, 120 bp, Artificial Sequence
  ENSG00000134444_48 (sequence is synthesized)
gcaatagtaggcaagattcacagtgtatttcaagtgagagtctcttttcttaaatattttaatatcattaagatttcacattgtggttttgttttttgtttgtttgtttgtttttagtaa

SEQ ID NO: 311463 - DNA, 120 bp, Artificial Sequence
  ENSG00000134444_49 (sequence is synthesized)
aatatgtcttgtctttacagacaagacagacactaatcattgagactgagatttggactgagtccaaaatagggcataaaactcccatactcattccttttaaacagaagtaaacttacg

SEQ ID NO: 311464 - DNA, 120 bp, Artificial Sequence
  ENSG00000134444_50 (sequence is synthesized)
gtacaagtttttaagtgttcaacttaatgaaaaactaagtttgcaaagtaatgaaaagctaatttgaaattatacctgtgtttccagagtaatccagagattaaattttttcagaaatcc

SEQ ID NO: 311465 - DNA, 120 bp, Artificial Sequence
  ENSG00000134444_51 (sequence is synthesized)
actgctgctagaatgtttgaggtatgtcaacacatgcctctgttggtttcaattataatgatttttttttttttgcgaagaagaagggaattttttttaataaaaaggctttgcatatca

SEQ ID NO: 311466 - DNA, 120 bp, Artificial Sequence
  ENSG00000134444_52 (sequence is synthesized)
tattcacccctttagagagattattttgctaaacatcaaattgattttcaacctgaacgaaattgtgagtaatttaagtcatgccatcctcattatccatagcttttaggatatgtcact

SEQ ID NO: 311467 - DNA, 120 bp, Artificial Sequence
  ENSG00000134444_53 (sequence is synthesized)
actataggatatgtcactactatacactataattctaatgggggtctcaagtcaaggtgctatcacattcttgtttttaaaaagttggctcaaatagtctctcttaaaatttagagaggt

SEQ ID NO: 311468 - DNA, 120 bp, Artificial Sequence
  ENSG00000134444_54 (sequence is synthesized)
gagatcaggatgtattgaattgtcttttcatcatcccatttttcaagacaacctattttggaccattatttgaactccaaggatgtaactttctgtagttactaccctgctgatctttga

SEQ ID NO: 311469 - DNA, 120 bp, Artificial Sequence
  ENSG00000134444_55 (sequence is synthesized)
actgcagtagctaactacagctaacattctgtgctggttatattttcttaactattctttgtgtaaagattgtactaattttttcagttcattaaagaaagttacactttagctcttcaa

SEQ ID NO: 311470 - DNA, 70 bp, Artificial Sequence
  ENSG00000134444_56 (sequence is synthesized)
ttttcagttcattaaagaaagttacactttagctcttcaatgttacacttaaagagctttggactgcgaa

SEQ ID NO: 311471 - DNA, 69 bp, Artificial Sequence
  ENSG00000134444_57 (sequence is synthesized)
gtggtgacgtggtgggaagcggagattgcagtgggccgctattgcaccactgcactccagcctggtcca

SEQ ID NO: 311472 - DNA, 89 bp, Artificial Sequence
  ENSG00000134444_58 (sequence is synthesized)
aaaagctttgtaagtagcaattctaattcataattcatgaaatactccagattagccaggtaacaaaattcaaccttcaaggttggatg

SEQ ID NO: 311473 - DNA, 120 bp, Artificial Sequence
  ENSG00000134444_59 (sequence is synthesized)
gattagccaggtaacaaaattcaaccttcaaggttggatgttaattctcttacaagaaaactacaaaataaatttagccttttgtatgagtagacatctatttcaaagttctactgtaac

SEQ ID NO: 311474 - DNA, 120 bp, Artificial Sequence
  ENSG00000134444_60 (sequence is synthesized)
tatgagtagacatctatttcaaagttctactgtaactttacagtgtgcttagttttgatactatttttttcagtacattaaaaagaaatagagactggccgggcacggtggctcatgcct

SEQ ID NO: 311475 - DNA, 67 bp, Artificial Sequence
  ENSG00000134444_61 (sequence is synthesized)
acccagggagtgagactacatctcaaaaaaaaaaaataataatagagacaaactactaatcaaaaat

SEQ ID NO: 311476 - DNA, 120 bp, Artificial Sequence
  ENSG00000134444_62 (sequence is synthesized)
acaaactactaatcaaaaataatgtatcaggtaagtttctgcatattggtaaaaaaattgaattttagacaattttcatactgcgtaagaatgtgttctgtatgcattttgtgtgtgagc

SEQ ID NO: 311477 - DNA, 120 bp, Artificial Sequence
  ENSG00000134444_63 (sequence is synthesized)
ctacactgtgatcacagtctccaagtggcacatctcatcattcatattttctcttcagaaccaagtacaggaaactgttttgattgtcttttttgtggtttactttgcatgtttaagaaa

SEQ ID NO: 311478 - DNA, 120 bp, Artificial Sequence
  ENSG00000134444_64 (sequence is synthesized)
atgtttaagaaaaatcttaaaacatcctattctctgttaagaccacaccaatcataaagtacataacagttaatataaacttaatattgcatcaaaaacaaatatattttattttgatag

SEQ ID NO: 311479 - DNA, 120 bp, Artificial Sequence
  ENSG00000134444_65 (sequence is synthesized)
atcttcagttcagtgttatgaggaatgtaaactgtttgcttttctccagagaggcgtcaataaatctgggaaattctgtcccccgcatatctacatggagaactatattactattttaat

SEQ ID NO: 311480 - DNA, 120 bp, Artificial Sequence
  ENSG00000134444_66 (sequence is synthesized)
tccttttattccattacagactaatccaccatatttatttcagttagatcattgcatgaatagatttctggagggactttaatgtagtaaaatatatgtagtttataaactggtattttg

SEQ ID NO: 311481 - DNA, 120 bp, Artificial Sequence
  ENSG00000134444_67 (sequence is synthesized)
tgttgtgtgttatgtatattaaattcttggtcagtgatctttttagggtgtcatttgttgatagtaatctgctttttataattttaacaaactgcttccctcctggaaaagtaacccttt

SEQ ID NO: 311482 - DNA, 120 bp, Artificial Sequence
  ENSG00000134444_68 (sequence is synthesized)
cttaattgttggcattttaaaccttagatattttcaggacatgcatcttcaatgaagctggaaatgttacagataatctctctataaaatgtacattgctgagtaatataaatataataa

SEQ ID NO: 311483 - DNA, 120 bp, Artificial Sequence
  ENSG00000134444_69 (sequence is synthesized)
tttctcattgactttatgatttcatagatgctttatcttcatttctgatcattacttgacagttctttaaattcttagctttctctgttcataagccttcccatcatgtattaaataatg

SEQ ID NO: 311484 - DNA, 120 bp, Artificial Sequence
  ENSG00000134444_70 (sequence is synthesized)
ttaaaggttgttttgggaacagattgaggtcagttttagaattagcctgtctaagtcaggcatggtgccacgtgtctatagtcccacctactcagaagctgaggtgggaggatcacttga

SEQ ID NO: 311485 - DNA, 120 bp, Artificial Sequence
  ENSG00000134444_71 (sequence is synthesized)
gcagaacccaggttccgagatgagtgtcagttttagaattagcctgtctaagtcaggcatggtgccacgtgtctatagtcccacctactcagaagctgaggtgggaggatcacttgaggc

SEQ ID NO: 311486 - DNA, 120 bp, Artificial Sequence
  ENSG00000134444_72 (sequence is synthesized)
ggcatggtggcacgtatctgtagtccatcaactcgggaggccaaggcaggaagatcacttgagtccaagtgtttgaggctgtggtgcactatgattgcacctgtgaatagtcattgcatt

SEQ ID NO: 311487 - DNA, 120 bp, Artificial Sequence
  ENSG00000134444_73 (sequence is synthesized)
ccagcccaagcaacagagcaagaccccatctcttaataaaaaagaaagaatgatatccatctgggttattattaaatcatctcctggtccttcatctcctactgcttttaaccatctgtc

SEQ ID NO: 311488 - DNA, 120 bp, Artificial Sequence
  ENSG00000134444_74 (sequence is synthesized)
tacatctgaggggttaactgttaagtgaattaattaatacatatgtggtaccccaggacaatatgtgtgtagtgaaatctgaattctatagtaaagttctgtctgtcttcctgagaatta

SEQ ID NO: 311489 - DNA, 120 bp, Artificial Sequence
  ENSG00000134444_75 (sequence is synthesized)
agaaaagaaaatgagaaatgagaagaaaatgaggcatacatataccaggaacctaataggctgttggtgaagggggtgaatgaaactctggtagctcagagggttgttcctgctctcatt

SEQ ID NO: 311490 - DNA, 120 bp, Artificial Sequence
  ENSG00000134444_76 (sequence is synthesized)
ccatttttatgaaatctgatttatctatttttttgttgtgttgtttgtgctctaagtatcaattttaagaaaccattgccaagtcaatcaatgttatagaagatatatatatctatatgt

SEQ ID NO: 311491 - DNA, 120 bp, Artificial Sequence
  ENSG00000134444_77 (sequence is synthesized)
atatgaatatatataagagctaaagctatgaaacaattagaagaaaacatttgttatatatatttaggtcaacgattcattttgagttaatttttatatatggagtaaaacagcgtctaa

SEQ ID NO: 311492 - DNA, 120 bp, Artificial Sequence
  ENSG00000134444_78 (sequence is synthesized)
ctttattcttttcatatggctatccagttatccagaaacatttgttcaagataaaaaaattcctcttttgaatagtcttgctacttttgtcaaaaatcagttgggcctagattcttcggg

SEQ ID NO: 311493 - DNA, 120 bp, Artificial Sequence
  ENSG00000134444_79 (sequence is synthesized)
tttatttctggactttcagttctgttccattggtctgtatgtctagccatatgccactaccacactgttttgataactgttgtttgtagtaagttttgaaattgggatatatgagtcctc

SEQ ID NO: 311494 - DNA, 120 bp, Artificial Sequence
  ENSG00000134444_80 (sequence is synthesized)
tttagtaaactgcaaattgaaagcataaaaattttggacaacctgcctatagggacgcttagaagactttcaagaagaaagttctgatttccaattatggaaatcaagagtataccatct

SEQ ID NO: 311495 - DNA, 120 bp, Artificial Sequence
  ENSG00000134444_81 (sequence is synthesized)
catttgggttattaaaattctttgccatttatcagaaatgtttatgctagtggctcttcaggaaacactaagttgtattttacaaccaccaataaacatatgttttccaaagtaatgata

SEQ ID NO: 311496 - DNA, 120 bp, Artificial Sequence
  ENSG00000134444_82 (sequence is synthesized)
agtaaacagttgtaattttaaatataatcgcattatgatttttttctttacacttaaaatatacttatgtttttttaaattattttaataattttagattcctcagcaggaaatggggtc

SEQ ID NO: 311497 - DNA, 120 bp, Artificial Sequence
  ENSG00000134444_83 (sequence is synthesized)
tgcttgcaaatcaactctgctgcatgcgttcacaagtttcataaagattgcatgctttctgttttcaatacaaattgtatttttttttcatacccatccttgctttttattttttaattt

SEQ ID NO: 311498 - DNA, 120 bp, Artificial Sequence
  ENSG00000134452_0 (sequence is synthesized)
ctgctttcaaggtgtctagatacagagtgaagaatgtcacagtaggaagtgcactggactaggggagtcaggagacccgggttcttgtgttggcaccatcactcatgagctacgaggtga

SEQ ID NO: 311499 - DNA, 120 bp, Artificial Sequence
  ENSG00000134452_1 (sequence is synthesized)
cttcaggctgccattggacctgtcaagtgcctgagtcatgtgataatgggctacattgcgcagggcccctgggccatctccacaggagatgccagaggacgagtgcccacttgctggtct

SEQ ID NO: 311500 - DNA, 120 bp, Artificial Sequence
  ENSG00000134452_2 (sequence is synthesized)
tcacagagcacgctgaaatgagacggtttaagcggaagcatcttactgccattgactgccagcatttggctcggagtcacttggctgtgacccagcccttcggtcaaagatggacaaaca

SEQ ID NO: 311501 - DNA, 120 bp, Artificial Sequence
  ENSG00000134452_3 (sequence is synthesized)
gagatccgaaccatggtctctatcctaaaccgagaacaaaaagagggagtaggggtcagggaagtcaaagatgcatccctgagttcttcctagcaggcaagcagccgtgcaccaatgaca

SEQ ID NO: 311502 - DNA, 120 bp, Artificial Sequence
  ENSG00000134452_4 (sequence is synthesized)
tggccaaaagcaattctgttggccaggacagctgtcaggactctgagggtgacatgatctttcctgcagagagcagctgtgcactgcctcaggaaggcagtgcagggccgggctcaccag

SEQ ID NO: 311503 - DNA, 120 bp, Artificial Sequence
  ENSG00000134452_5 (sequence is synthesized)
ggtctgccccgccctccaggaagcggtcttggtcctctgaggaagagagtaaccaggctaccgggaccagccggtgggatggagtttctaagaaagctccacggcaccatttgtctgtgc

SEQ ID NO: 311504 - DNA, 120 bp, Artificial Sequence
  ENSG00000134452_6 (sequence is synthesized)
catgcacaaggcctagggaggccaggcaagaagcagaggacagtacgtctcggctctctgcggagtctggtgaaaccgaccaagatgctggggacgtgggtcctgatcccattcctgact

SEQ ID NO: 311505 - DNA, 120 bp, Artificial Sequence
  ENSG00000134452_7 (sequence is synthesized)
catactatgggcttcttgggaccttgccctgccaggaagcactgagccacatttgcagcctgcctagtgaggtcctgaggcacgtgtttgccttcctcccggtggaagacctctattgga

SEQ ID NO: 311506 - DNA, 120 bp, Artificial Sequence
  ENSG00000134452_8 (sequence is synthesized)
acctgagcttggtgtgccacttgtggagggagatcatcagtgacccgctgttcattccttggaagaagctgtaccatcgatacctgatgaatgaagagcaagctgtcagcaaagtggacg

SEQ ID NO: 311507 - DNA, 120 bp, Artificial Sequence
  ENSG00000134452_9 (sequence is synthesized)
gcatcctgtctaactgtggcatagaaaaggagtcagacctgtgtgtgctgaacctcatacgatacacagccaccactaagtgctctccgagtgtggatcccgagagggtgctgtggagtc

SEQ ID NO: 311508 - DNA, 120 bp, Artificial Sequence
  ENSG00000134452_10 (sequence is synthesized)
tgagggaccaccccctcctccccgaggctgaggcgtgtgtgcggcaacacctccccgacctctacgctgctgccgggggtgtcaacatctgggccctggtggcggctgtggtgctcctct

SEQ ID NO: 311509 - DNA, 120 bp, Artificial Sequence
  ENSG00000134452_11 (sequence is synthesized)
ccagcagtgtgaatgacatccagcgactgctcttctgcctccggagacccagctccacggtgaccatgccagatgtcaccgagaccctgtactgcatagccgtgcttctctacgccatga

SEQ ID NO: 311510 - DNA, 120 bp, Artificial Sequence
  ENSG00000134452_12 (sequence is synthesized)
gggagaaggggattaacatcagcaataggattcactacaacattttctattgcctatatcttcaggagaattcctgcactcaggccacaaaagttaaagaggagccatctgtctggccag

SEQ ID NO: 311511 - DNA, 120 bp, Artificial Sequence
  ENSG00000134452_13 (sequence is synthesized)
gcaagaaaaccatccaacttacacatgaacaacagctgattctgaatcacaagatggaacctctccaggtggtgaaaattatggcctttgccggcactgggaagacctcaacgctggtca

SEQ ID NO: 311512 - DNA, 120 bp, Artificial Sequence
  ENSG00000134452_14 (sequence is synthesized)
agtatgcagagaagtggtctcagagcaggtttctgtatgtgacattcaacaagagcatcgcaaagcaggccgaacgcgtcttccccagcaacgtcatctgcaaaaccttccactccatgg

SEQ ID NO: 311513 - DNA, 120 bp, Artificial Sequence
  ENSG00000134452_15 (sequence is synthesized)
gattcataagagccaagcttgtgtgtaagactctagaaaacttctttgcctcggctgacgaagagctgaccattgatcacgtgcctatttggtgtaagaacagccaaggacagagagtca

SEQ ID NO: 311514 - DNA, 120 bp, Artificial Sequence
  ENSG00000134452_16 (sequence is synthesized)
tggttgagcagagtgaaaaactgaatggtgtccttgaagcgagccgcctctgggataacatgcggaagctgggggagtgcacagaagaggcgcaccagatgactcatgacggctacttga

SEQ ID NO: 311515 - DNA, 120 bp, Artificial Sequence
  ENSG00000134452_17 (sequence is synthesized)
aactctggcagctgagcaagccttcgctggcctcttttgacgccatctttgtggatgaggcccaggactgcacaccagctatcatgaacatagttctgtctcagccatgtgggaaaatct

SEQ ID NO: 311516 - DNA, 120 bp, Artificial Sequence
  ENSG00000134452_18 (sequence is synthesized)
ttgtaggggacccgcaccagcagatctataccttccggggtgcggtcaacgccctgttcacagtgccccacacccacgtcttctatctcacgcagagttttcggtttggtgtggaaatag

SEQ ID NO: 311517 - DNA, 120 bp, Artificial Sequence
  ENSG00000134452_19 (sequence is synthesized)
cttatgtgggagctactatcttggatgtttgcaagagagtcaggaaaaagactttggttggaggaaaccatcagagtggcattagaggtgacgcaaaggggcaagtggccttgttgtccc

SEQ ID NO: 311518 - DNA, 120 bp, Artificial Sequence
  ENSG00000134452_20 (sequence is synthesized)
ggaccaacgccaacgtgtttgatgaggccgtacgggtgacggaaggggaattcccttcaaggatacatttgattggggggattaaatcatttggattggacagaatcattgatatttgga

SEQ ID NO: 311519 - DNA, 120 bp, Artificial Sequence
  ENSG00000134452_21 (sequence is synthesized)
tccttcttcagccagaggaagaacggaggaaacaaaacctcgtcattaaagacaaatttatcagaagatgggtgcacaaagaaggctttagtggcttcaagaggtatgtgaccgctgccg

SEQ ID NO: 311520 - DNA, 120 bp, Artificial Sequence
  ENSG00000134452_22 (sequence is synthesized)
aggacaaggagcttgaagccaagatcgcagttgttgaaaagtataacatcaggattccagagctggtgcaaaggatagaaaaatgccatatagaagatttggactttgcagagtacattc

SEQ ID NO: 311521 - DNA, 120 bp, Artificial Sequence
  ENSG00000134452_23 (sequence is synthesized)
tgggcactgtgcacaaagccaaaggcctggagtttgacactgtgcatgttttggatgattttgtgaaagtgccttgtgcccggcataacctgccccagcttccgcacttcagagttgagt

SEQ ID NO: 311522 - DNA, 120 bp, Artificial Sequence
  ENSG00000134452_24 (sequence is synthesized)
cattttctgaggatgaatggaatttactgtatgttgcagtaactcgagccaagaagcgtctcatcatgaccaaatcattggaaaacattttgactttggctggggagtacttcttgcaag

SEQ ID NO: 311523 - DNA, 120 bp, Artificial Sequence
  ENSG00000134452_25 (sequence is synthesized)
cagagctgacaagcaacgtcttaaaaacaggcgtggtgcgctgctgcgtgggacagtgcaacaatgccatccctgttgacaccgtccttaccatgaagaagctgcccatcacctatagca

SEQ ID NO: 311524 - DNA, 120 bp, Artificial Sequence
  ENSG00000134452_26 (sequence is synthesized)
acaggaaggaaaacaaggggggctacctctgccactcctgtgcggagcagcgcatcgggcccctggcgttcctgacagcctccccggagcaggtgcgcgccatggagcgcactgtggaga

SEQ ID NO: 311525 - DNA, 120 bp, Artificial Sequence
  ENSG00000134452_27 (sequence is synthesized)
acatcgtactgccccggcatgaggccctgctcttcctcgtcttctgaggacaaggcgcacgttctccgcagtgcagagcagcttgccgaggaccccgcgtgaagaaagccagcgaggggg

SEQ ID NO: 311526 - DNA, 120 bp, Artificial Sequence
  ENSG00000134452_28 (sequence is synthesized)
gcttctgctccctgagactctgggttcacccacagcactttctgaggaagaggacaccagcccaagctggacctgccatttctccactccctacagacagccagtctccacttgcctccc

SEQ ID NO: 311527 - DNA, 120 bp, Artificial Sequence
  ENSG00000134452_29 (sequence is synthesized)
ctctggatgtatctggtcagggaagtgggggatgttcttttgataaaaaaaaaaaaaaaaatttatgtatttaaacttttattacaagatttcaattaaacaggcaccatagcactggca

SEQ ID NO: 311528 - DNA, 120 bp, Artificial Sequence
  ENSG00000134452_30 (sequence is synthesized)
cggccagaggaggagctcgctgccgggggacgctgggctgagcggccggcggcgcgggcccggcggcggcggcagcggggtccgggtccggagcgccacatgagacggtttaagcggaag

SEQ ID NO: 311529 - DNA, 120 bp, Artificial Sequence
  ENSG00000134452_31 (sequence is synthesized)
gggagtaggggaagaaatacaaataaaagctgggcgcaggggctcacgcctgtaatgccagcactttgcgggaggccgaggtcagggaagtcaaagatgcatccctgagttcttcctagc

SEQ ID NO: 311530 - DNA, 120 bp, Artificial Sequence
  ENSG00000134452_32 (sequence is synthesized)
tgggctgagcggccggcggcgcgggcccggcggcggcggcagcggggtccgggtccggagcgccacatctgtggtccgaagacaaccctatgaggcatcagtagggttttacaggtgggg

SEQ ID NO: 311531 - DNA, 120 bp, Artificial Sequence
  ENSG00000134452_33 (sequence is synthesized)
gggaaagtctgtttctttttttcatcaagtcttttcaatcatgtgccattgtttttgtgaattaagcatcagtcataaatctagaagaacaatttggccttttctggttcacctaactgt

SEQ ID NO: 311532 - DNA, 120 bp, Artificial Sequence
  ENSG00000134452_34 (sequence is synthesized)
ggtcccccttctgtgaggatgccctggctccactgctgtatgggagttgacagtgtgaccgcagggtgctgcctttgccagggtctcaaactctgggttaccatatgctttacttcctag

SEQ ID NO: 311533 - DNA, 120 bp, Artificial Sequence
  ENSG00000134452_35 (sequence is synthesized)
tcagttcaattgaggatgactttatatttatttttaatgtctgtatttaatctctgaatgctttgaagcattcatgttgtcattgtccccagtggagaaataaaaggccatataattgta

SEQ ID NO: 311534 - DNA, 120 bp, Artificial Sequence
  ENSG00000134452_36 (sequence is synthesized)
gccaccttgctttgcccctattctcagtgttcacagggaaaaatgccaggaaggttttgtgcacccagccttcctccctctcactctttagtcccttttgaaatggcatttgaaaagtag

SEQ ID NO: 311535 - DNA, 120 bp, Artificial Sequence
  ENSG00000134452_37 (sequence is synthesized)
actttccagaagaacacatccttgccggggagagtaagtgttcaggcacctggcctttgtcacagacatgtggaaaagtgagctggtcagcactcactctttacccttcccacaaaccat

SEQ ID NO: 311536 - DNA, 120 bp, Artificial Sequence
  ENSG00000134452_38 (sequence is synthesized)
agccctttttctttcgttgcatctttagccactaaagcacatggatcgtctgtagactttttctgtaaagggccaggcagtaaagatttcggactctgcaagtcacatgatctctgttgc

SEQ ID NO: 311537 - DNA, 120 bp, Artificial Sequence
  ENSG00000134452_39 (sequence is synthesized)
agctacccagccccactgctgtagtgcgagagcccctgttgacagtacattagtgaacaagtatggctgtgttccagtaaaattaattcacaaaaacggccattgtctggatgtggccca

SEQ ID NO: 311538 - DNA, 120 bp, Artificial Sequence
  ENSG00000134452_40 (sequence is synthesized)
cgtgtagtttgctgacctctggtttaaagaaaagtgtgactttaaaaaatctctaaaccagtacccccaggagttaagcagaataaatcattatgtacaaatagtctctacctatacaaa

SEQ ID NO: 311539 - DNA, 120 bp, Artificial Sequence
  ENSG00000134452_41 (sequence is synthesized)
aaggacgcacccaagtgacagggacgagaaagaagcaggcccagtctgagtcagggacccgtttccctccagagaagggcgagctagtgttgctgtcttcccatgacgaggggggtgcct

SEQ ID NO: 311540 - DNA, 120 bp, Artificial Sequence
  ENSG00000134452_42 (sequence is synthesized)
acactggtcccatagactgtcttcccctgcatccttctgtctgcctgggccaatttatacgttgatacttccacgtgggccccaagtgatagcgtcgagcatttctatagcgcttttctt

SEQ ID NO: 311541 - DNA, 120 bp, Artificial Sequence
  ENSG00000134452_43 (sequence is synthesized)
ttcctgttgactgcactatttcaaatccctgtgaagtaggtgaggatcttgagccgagggctttgctcctcagtcggagacggagaggctactgcactgcactgacttgcccagggacac

SEQ ID NO: 311542 - DNA, 120 bp, Artificial Sequence
  ENSG00000134452_44 (sequence is synthesized)
acagcgagttagtgatgcagtcaggcctggaacccgggtctccccactttaagaccatctgctcttgcgcagctgcttaggaacgtgcagcacctgccaccatctgttagtggagcttgt

SEQ ID NO: 311543 - DNA, 120 bp, Artificial Sequence
  ENSG00000134452_45 (sequence is synthesized)
gtcaccttaatttgtgtgtatattcttcttagaaaacctcgtcattaaagacaaatttatcagaagatgggtgcacaaagaaggctttagtggcttcaagaggtatgtgaccgctgccga

SEQ ID NO: 311544 - DNA, 120 bp, Artificial Sequence
  ENSG00000134452_46 (sequence is synthesized)
agaggaggagctcgctgccgggggacgctgggctgagcggccggcggcgcgggcccggcggcggcggcagcggggtccgggtccggagcgccacagtcagggaagtcaaagatgcatccc

SEQ ID NO: 311545 - DNA, 120 bp, Artificial Sequence
  ENSG00000134452_47 (sequence is synthesized)
tgcttgtgagctctgtgcttatctgggttgtaggtgaggagataagagagagctgtgtgatcctttattaggggcttttcatatgagaggcacaagaggtgcgcgccatggagcgcactg

SEQ ID NO: 311546 - DNA, 120 bp, Artificial Sequence
  ENSG00000134452_48 (sequence is synthesized)
tcactagtggcactgttgctgctggcacggtcgcgtcttactgttttcccgtgacgatcacatgtgagcttacaccacagtgaccccgaggagtgtagtgctgttatctccacttacagg

SEQ ID NO: 311547 - DNA, 120 bp, Artificial Sequence
  ENSG00000134452_49 (sequence is synthesized)
caggaaacaaatacataggtttagccatttgtacttttatcctgtagcaacatattgtttacatataatgccgtcttgccaagaggggtgttctcatggaagtgaggcacagaaagtcaa

SEQ ID NO: 311548 - DNA, 120 bp, Artificial Sequence
  ENSG00000134452_50 (sequence is synthesized)
aatgacttgcttaaagttcagagtctcacaaatcctgatcagttgtaggcttttcttggaagggagtgaggaagactcagccgaggcacacttgacccaggtctcctggatgtagaggca

SEQ ID NO: 311549 - DNA, 120 bp, Artificial Sequence
  ENSG00000134453_0 (sequence is synthesized)
cgccgagcgccctgaggactcagcgaagggtgggcgccgccgaggcctcctgccgctggcgggtttccgcggagtgccgcccggctccgctctgccgccggcgcggctcatgggcagagt

SEQ ID NO: 311550 - DNA, 120 bp, Artificial Sequence
  ENSG00000134453_1 (sequence is synthesized)
gccggcgcggctcatgggcagagtcggccgggcgggccggcattaaactgaagaaaagatgtccctgtacgatgacctaggagtggagaccagtgactcaaaaacagaaggctggtccaa

SEQ ID NO: 311551 - DNA, 120 bp, Artificial Sequence
  ENSG00000134453_2 (sequence is synthesized)
aaacttcaaacttctgcagtctcagcttcaggtgaagaaggcagctctcactcaggcaaagagccaaaggacgaaacaaagtacagtcctcgccccagtcattgacctgaagcgaggtgg

SEQ ID NO: 311552 - DNA, 120 bp, Artificial Sequence
  ENSG00000134453_3 (sequence is synthesized)
ctcctcagatgaccggcaaattgtggacactccaccgcatgtagcagctgggctgaaggatcctgttcccagtgggttttctgcaggggaagttctgattcccttagctgacgaatatga

SEQ ID NO: 311553 - DNA, 120 bp, Artificial Sequence
  ENSG00000134453_4 (sequence is synthesized)
ccctatgtttcctaatgattatgagaaagtagtgaagcgccaaagagaggaacgacagagacagcgggagctggaaagacaaaaggaaatagaagaaagggaaaaaaggcgtaaagacag

SEQ ID NO: 311554 - DNA, 120 bp, Artificial Sequence
  ENSG00000134453_5 (sequence is synthesized)
acatgaagcaagtgggtttgcaaggagaccagatccagattctgatgaagatgaagattatgagcgagagaggaggaaaagaagtatgggcggagctgccattgccccacccacttctct

SEQ ID NO: 311555 - DNA, 120 bp, Artificial Sequence
  ENSG00000134453_6 (sequence is synthesized)
ggtagagaaagacaaagagttaccccgagattttccttatgaagaggactcaagacctcgatcacagtcttccaaagcagccattcctcccccagtgtacgaggaacaagacagaccgag

SEQ ID NO: 311556 - DNA, 120 bp, Artificial Sequence
  ENSG00000134453_7 (sequence is synthesized)
atctccaaccggacctagcaactccttcctcgctaacatggggggcacggtggcgcacaagatcatgcagaagtacggcttccgggagggccagggtctggggaagcatgagcagggcct

SEQ ID NO: 311557 - DNA, 120 bp, Artificial Sequence
  ENSG00000134453_8 (sequence is synthesized)
gagcactgccttgtcagtggagaagaccagcaagcgtggcggcaagatcatcgtgggcgacgccacagagaaagatgcatccaagaagtcagattcaaatccgctgactgaaatacttaa

SEQ ID NO: 311558 - DNA, 120 bp, Artificial Sequence
  ENSG00000134453_9 (sequence is synthesized)
gtgtcctactaaagtggtcttactaaggaacatggttggtgcgggagaggtggatgaagacttggaagttgaaaccaaggaagaatgtgaaaaatatggcaaagttggaaaatgtgtgat

SEQ ID NO: 311559 - DNA, 120 bp, Artificial Sequence
  ENSG00000134453_10 (sequence is synthesized)
atttgaaattcctggtgcccctgatgatgaagcagtacggatatttttagaatttgagagagttgaatcagcaattaaagcggttgttgacttgaatgggaggtattttggtggacgggt

SEQ ID NO: 311560 - DNA, 120 bp, Artificial Sequence
  ENSG00000134453_11 (sequence is synthesized)
ggtaaaagcatgtttctacaatttggacaaattcagggtcttggatttggcagaacaagtttgattttaagaactagagcacgagtcatctccggtgatccttaaatgaactgcaggctg

SEQ ID NO: 311561 - DNA, 120 bp, Artificial Sequence
  ENSG00000134453_12 (sequence is synthesized)
agaaaagaaggaaaaaggtcacagcctccatggctgttgcataccaagactcttggaaggacttctaagatatatgttgattgatcccttttttattttgtggttttttaatatagtata

SEQ ID NO: 311562 - DNA, 120 bp, Artificial Sequence
  ENSG00000134453_13 (sequence is synthesized)
ctctggttgtttctcttttttattattactcctgagttgatgacattttttgttagatttcatggtaattctcaagtgcttcaatgatgcagcatttcttgcactaaaaaaaaaaaaaaa

SEQ ID NO: 311563 - DNA, 120 bp, Artificial Sequence
  ENSG00000134453_14 (sequence is synthesized)
aaaaaaactagaaagttttgggacatggggttatattaaattattctttgtttttctttttcttttaataaagcctgcaagttactaaattgtagtttcataaattctgtagtaaagtat

SEQ ID NO: 311564 - DNA, 120 bp, Artificial Sequence
  ENSG00000134453_15 (sequence is synthesized)
catcttggcagtgtgccaaaggtgaaaatgatgctttctctaacagagaaattcttagtgactccagtcgtagaaaaacgtctttacaacctgaataagattgaagaattgtgaacatac

SEQ ID NO: 311565 - DNA, 120 bp, Artificial Sequence
  ENSG00000134453_16 (sequence is synthesized)
catggcctattggatgaatcatttgccgtaggctaaatcagactgtagggtttgtgatggatttatggagtatgtgggtatagaaatcatgaatctagcatttgttttcagagattcaag

SEQ ID NO: 311566 - DNA, 120 bp, Artificial Sequence
  ENSG00000134453_17 (sequence is synthesized)
catagtcttaagggtagatcagaaatgacaaatgaattcaaaacctagcaggtgcattgtaaatgtgtgcccagttatgttttggaaatggcagttccttggggtcatgtttctactggc

SEQ ID NO: 311567 - DNA, 120 bp, Artificial Sequence
  ENSG00000134453_18 (sequence is synthesized)
aaaatttgcaatagtgttctattgtatgtaattttaaaatttataagattatccacgttggccaagtaaactgtactgccaatagaattctggaattgtgagaaattgtatcattgaagt

SEQ ID NO: 311568 - DNA, 120 bp, Artificial Sequence
  ENSG00000134453_19 (sequence is synthesized)
tcagtaggatgtgtggcttaaaaatttatcaggaccacaaaaaagaaaacaaaaatatttggtactgaggttcattgccagggcaggaggtatttccagaaaatactcatgcctgtgttc

SEQ ID NO: 311569 - DNA, 120 bp, Artificial Sequence
  ENSG00000134453_20 (sequence is synthesized)
tgttccttgctttcccaaatactgcatgtgactttcctaagcggcagctgaaagactcgagcccgtgctgtctcctttggttattatgacatgaaagtgtatcaagaactcagcatttct

SEQ ID NO: 311570 - DNA, 120 bp, Artificial Sequence
  ENSG00000134453_21 (sequence is synthesized)
ttgcatccatggacttggtttggagacataaggaatattctgaccctttttaaaaaaggattttctcatgtttttatttaacataaataaaagaataacattttatcttttgtggtatta

SEQ ID NO: 311571 - DNA, 120 bp, Artificial Sequence
  ENSG00000134453_22 (sequence is synthesized)
ttttattgaataaaattgagttttatgataaaagtgcacctgttctgtaaagtaagttggggttaaggaatgtgaggtaaattacataattgaacattgtggaagacagaatcaaaagca

SEQ ID NO: 311572 - DNA, 120 bp, Artificial Sequence
  ENSG00000134453_23 (sequence is synthesized)
gccctggaacttcagttatctatggaattaggcataccattcctcaagtggaaaccatgtttgtgcttacaagtaccggagtgtgcttgtttaattttagaaactaatggttccaaccca

SEQ ID NO: 311573 - DNA, 120 bp, Artificial Sequence
  ENSG00000134453_24 (sequence is synthesized)
cctttcatgcatgcatttattgttgttatgctttgtaaaacattgtttgcacctaaatgggtggcttttcctaacattctcatggtcagcaaccagagagttgcaaccaactcatactac

SEQ ID NO: 311574 - DNA, 120 bp, Artificial Sequence
  ENSG00000134453_25 (sequence is synthesized)
ttgatttccgttcgcatgaggacagcttggtgtgtgcctttctccccagtcttttatttttaaaataactgtgttaatcagttagtgctttatttataatgaatttctgatagtcgaata

SEQ ID NO: 311575 - DNA, 80 bp, Artificial Sequence
  ENSG00000134453_26 (sequence is synthesized)
gtgctttatttataatgaatttctgatagtcgaataatttctaaatctcctgcaagttagtacttgagaaatttgaaatt

SEQ ID NO: 311576 - DNA, 120 bp, Artificial Sequence
  ENSG00000134453_27 (sequence is synthesized)
agtccccgcggcgggcgctggtctctccacgcggctgcggcccggtaccctccgcccgccgccgcctctggtgaccctggccctgaccttctccctcttcccttcctcctcctcctcctc

SEQ ID NO: 311577 - DNA, 120 bp, Artificial Sequence
  ENSG00000134453_28 (sequence is synthesized)
atgtctgcctcgggctgtttggtgctgaagagcgtttcttctccgtctcgtgcaccgcatcctgacgaaattgtctggtcaccagaaccgagtagcccgtagcgtgtcccccctggccct

SEQ ID NO: 311578 - DNA, 120 bp, Artificial Sequence
  ENSG00000134453_29 (sequence is synthesized)
gcacggttgcccctctctggggctcggagccggttcctcccggggtctcagaactgggagtgcagacgttggcgtttctcagactccggagctgcccgggacaggaatgcagccctaacc

SEQ ID NO: 311579 - DNA, 120 bp, Artificial Sequence
  ENSG00000134453_30 (sequence is synthesized)
ccggcgtcgcctcggctcgtgcagtttgagcggtgtttcagcgctcacgtccgaccccaggcagtctttgagcttcgcctcttgccccgagaatgtgtaatgatcggagaatgcaggtgg

SEQ ID NO: 311580 - DNA, 120 bp, Artificial Sequence
  ENSG00000134453_31 (sequence is synthesized)
aatgaggttctgcccctgcttgcaggagtttggtttctgggaaagcaggcgtgaaaacccaggcccgggttgatttgagaaacgcaagtggggtctggaaggacctctcttgagagagga

SEQ ID NO: 311581 - DNA, 120 bp, Artificial Sequence
  ENSG00000134453_32 (sequence is synthesized)
ttgggtactttggggatgaaatttttcattatgtcgtttgggattgagaacatttaccatcactaagtcatatttatatacctctgctaggtgtttgtaagttatacttggtacttgaat

SEQ ID NO: 311582 - DNA, 120 bp, Artificial Sequence
  ENSG00000134453_33 (sequence is synthesized)
ccaattgtgtagatgcctaggacataaatggtggggatcgctattgaaattaaattaattattgtaagtaggactcagttctgtaacacatctaatgatatgctgctcagttctgtaaca

SEQ ID NO: 311583 - DNA, 120 bp, Artificial Sequence
  ENSG00000134453_34 (sequence is synthesized)
tacagccttaatctttacaagtaaagttactgtttaattaaagttaaacctttatcttataggatacctgtattaactgtcttttgtttgcctttcagcggttgttgacttgaatgggag

SEQ ID NO: 311584 - DNA, 120 bp, Artificial Sequence
  ENSG00000134453_35 (sequence is synthesized)
gagtgttgccacttttctacattttaaatcctagcatcagaggtttgttcatatgtagcaggaggtcatctgaagtagcaggtcctccttttttagttttttcttaggggggtgggtgat

SEQ ID NO: 311585 - DNA, 120 bp, Artificial Sequence
  ENSG00000134453_36 (sequence is synthesized)
agagccatatagtgtggcagtgaatatacctgctatctccatctcagaggtcgtctctacttttcccttttgccctttcagtatagatgtgatttctgattctcttacagattgtttgct

SEQ ID NO: 311586 - DNA, 120 bp, Artificial Sequence
  ENSG00000134453_37 (sequence is synthesized)
ttgcgagatctgatgttatgttgcagtctcttggtaaatgatgcctagttggtgttttattttcatttaatttttacagtctgttctgtgttgagggaattcaggaaagagacaaacata

SEQ ID NO: 311587 - DNA, 120 bp, Artificial Sequence
  ENSG00000134453_38 (sequence is synthesized)
tgttagcattttaatcagggaattaagtttgagtcagcctagctgaacttcctttgctaaagaaagaagaaaacttttctggcagccccgttcatgcacagcttaggatacatcacgagc

SEQ ID NO: 311588 - DNA, 120 bp, Artificial Sequence
  ENSG00000134453_39 (sequence is synthesized)
gtcttaaacatatataaatactggaagtgcaattccactatgtgctttttcttttcagtttgataaatagttcatttgacattgatttgggtaattttctttctggaatcccagcaatac

SEQ ID NO: 311589 - DNA, 120 bp, Artificial Sequence
  ENSG00000134453_40 (sequence is synthesized)
aatggtaccaggagcctgggcctctgttgctgaaaggtcctggaccttttacctctaaaatttcatgatacttattttaacatgaaaagcctttattgaattgtgcattctttaatcccc

SEQ ID NO: 311590 - DNA, 120 bp, Artificial Sequence
  ENSG00000134453_41 (sequence is synthesized)
gggcgacgccacagagaaaggtgtgtccccagggaagcgtgtgactagagggaaaggactggccccatccatatcagacatggccagtcttgatcctcatgtgtcagcagggggacaatg

SEQ ID NO: 311591 - DNA, 120 bp, Artificial Sequence
  ENSG00000134453_42 (sequence is synthesized)
agtaagagtgttttcttttgatgtttataacacaagttgtaattggcacattacaaaacattttctacaaacaggacagggtatgctataagtaacattcttactgcagaaggtgacagg

SEQ ID NO: 311592 - DNA, 120 bp, Artificial Sequence
  ENSG00000134453_43 (sequence is synthesized)
cgttggttatttgtacttctcttgctcaattattacagttttaaacataaagacaatgatttcaagttttatttgatgaagaaacaggaatgcttcatgattgaggatcagtatgatgac

SEQ ID NO: 311593 - DNA, 120 bp, Artificial Sequence
  ENSG00000134453_44 (sequence is synthesized)
tgaagaccttgattctagcgtgctcagtagtttagttccttagacatgcctttggtttcagtcatttggtgagtatttagtgcctctcacatgcactgcactgtgcggagagcacttgga

SEQ ID NO: 311594 - DNA, 120 bp, Artificial Sequence
  ENSG00000134453_45 (sequence is synthesized)
ttacaggaagcatgctctgtactctcagtggtgtgttcagttgaagaaacacataaaataactgaaagatattcagttactagactaggtagtattgactaagttcaggagttgagaaaa

SEQ ID NO: 311595 - DNA, 120 bp, Artificial Sequence
  ENSG00000134453_46 (sequence is synthesized)
ggattagatcagtgaaaaaatagactgccttgtgagcaatagcagatatgggctgcgctttgaaacgaacaggtgggatttgcagggaagggtattctgattgggataatggctcgtagg

SEQ ID NO: 311596 - DNA, 120 bp, Artificial Sequence
  ENSG00000134453_47 (sequence is synthesized)
agacagtgaagatcaggactaccaaaatggaatggatgggcctgttggggattagcagaagtgcttaggtgggtggaattacagagggctaggaaagctagacagagctagtcaaaatga

SEQ ID NO: 311597 - DNA, 120 bp, Artificial Sequence
  ENSG00000134453_48 (sequence is synthesized)
caccagcctttttaatctgaaagctctgcttcctctgtttctttatcctgttgctgtttgttgaccacataattatttgtttacgtcatcagctggcacagggcctttatgaggtcagag

SEQ ID NO: 311598 - DNA, 120 bp, Artificial Sequence
  ENSG00000134453_49 (sequence is synthesized)
actgcctagccctgtgttcctggcacctaacaatgcctgtcataaaaacaggcattcagtacgtttttgatgatgaacaaattatacttatttccttggtatttgacaactacttgactg

SEQ ID NO: 311599 - DNA, 120 bp, Artificial Sequence
  ENSG00000134460_0 (sequence is synthesized)
aactcctgactccgatagagactggatggacccacaagggtgacagcccaggcggaccgatcttcccatcccacatcctccggcgcgatgccaaaaagaggctgacggcaactgggcctt

SEQ ID NO: 311600 - DNA, 120 bp, Artificial Sequence
  ENSG00000134460_1 (sequence is synthesized)
ctgcagagaaagacctccgcttcactgccccggctggtcccaagggtcaggaagatggattcatacctgctgatgtggggactgctcacgttcatcatggtgcctggctgccaggcagag

SEQ ID NO: 311601 - DNA, 120 bp, Artificial Sequence
  ENSG00000134460_2 (sequence is synthesized)
ctctgtgacgatgacccgccagagatcccacacgccacattcaaagccatggcctacaaggaaggaaccatgttgaactgtgaatgcaagagaggtttccgcagaataaaaagcgggtca

SEQ ID NO: 311602 - DNA, 120 bp, Artificial Sequence
  ENSG00000134460_3 (sequence is synthesized)
ctctatatgctctgtacaggaaactctagccactcgtcctgggacaaccaatgtcaatgcacaagctctgccactcggaacacaacgaaacaagtgacacctcaacctgaagaacagaaa

SEQ ID NO: 311603 - DNA, 120 bp, Artificial Sequence
  ENSG00000134460_4 (sequence is synthesized)
gaaaggaaaaccacagaaatgcaaagtccaatgcagccagtggaccaagcgagccttccaggtcactgcagggaacctccaccatgggaaaatgaagccacagagagaatttatcatttc

SEQ ID NO: 311604 - DNA, 120 bp, Artificial Sequence
  ENSG00000134460_5 (sequence is synthesized)
gtggtggggcagatggtttattatcagtgcgtccagggatacagggctctacacagaggtcctgctgagagcgtctgcaaaatgacccacgggaagacaaggtggacccagccccagctc

SEQ ID NO: 311605 - DNA, 120 bp, Artificial Sequence
  ENSG00000134460_6 (sequence is synthesized)
atatgcacaggtgaaatggagaccagtcagtttccaggtgaagagaagcctcaggcaagccccgaaggccgtcctgagagtgagacttcctgcctcgtcacaacaacagattttcaaata

SEQ ID NO: 311606 - DNA, 120 bp, Artificial Sequence
  ENSG00000134460_7 (sequence is synthesized)
cagacagaaatggctgcaaccatggagacgtccatatttacaacagagtaccaggtagcagtggccggctgtgttttcctgctgatcagcgtcctcctcctgagtgggctcacctggcag

SEQ ID NO: 311607 - DNA, 120 bp, Artificial Sequence
  ENSG00000134460_8 (sequence is synthesized)
cggagacagaggaagagtagaagaacaatctagaaaaccaaaagaacaagaatttcttggtaagaagccgggaacagacaacagaagtcatgaagcccaagtgaaatcaaaggtgctaaa

SEQ ID NO: 311608 - DNA, 120 bp, Artificial Sequence
  ENSG00000134460_9 (sequence is synthesized)
tggtcgcccaggagacatccgttgtgcttgcctgcgttttggaagctctgaagtcacatcacaggacacggggcagtggcaaccttgtctctatgccagctcagtcccatcagagagcga

SEQ ID NO: 311609 - DNA, 120 bp, Artificial Sequence
  ENSG00000134460_10 (sequence is synthesized)
gcgctacccacttctaaatagcaatttcgccgttgaagaggaagggcaaaaccactagaactctccatcttattttcatgtatatgtgttcattaaagcatgaatggtatggaactctct

SEQ ID NO: 311610 - DNA, 120 bp, Artificial Sequence
  ENSG00000134460_11 (sequence is synthesized)
ccaccctatatgtagtataaagaaaagtaggtttacattcatctcattccaacttcccagttcaggagtcccaaggaaagccccagcactaacgtaaatacacaacacacacactctacc

SEQ ID NO: 311611 - DNA, 120 bp, Artificial Sequence
  ENSG00000134460_12 (sequence is synthesized)
ctatacaactggacattgtctgcgtggttcctttctcagccgcttctgactgctgattctcccgttcacgttgcctaataaacatccttcaagaactctgggctgctacccagaaatcat

SEQ ID NO: 311612 - DNA, 120 bp, Artificial Sequence
  ENSG00000134460_13 (sequence is synthesized)
aatttctaaaaaacagaggccatggcagaataatctttgggtaacttcaaaacggggcagccaaacccatgaggcaatgtcaggaacagaaggatgaatgaggtcccaggcagagaatca

SEQ ID NO: 311613 - DNA, 120 bp, Artificial Sequence
  ENSG00000134460_14 (sequence is synthesized)
tacttagcaaagttttacctgtgcgttactaattggcctctttaagagttagtttctttgggattgctatgaatgataccctgaatttggcctgcactaatttgatgtttacaggtggac

SEQ ID NO: 311614 - DNA, 120 bp, Artificial Sequence
  ENSG00000134460_15 (sequence is synthesized)
acacaaggtgcaaatcaatgcgtacgtttcctgagaagtgtctaaaaacaccaaaaagggatccgtacattcaatgtttatgcaaggaaggaaagaaagaaggaagtgaagagggagaag

SEQ ID NO: 311615 - DNA, 120 bp, Artificial Sequence
  ENSG00000134460_16 (sequence is synthesized)
ggatggaggtcacactggtagaacgtaaccacggaaaagagcgcatcaggcctggcacggtggctcaggcctataaccccagctccctaggagaccaaggcgggagcatctcttgaggcc

SEQ ID NO: 311616 - DNA, 89 bp, Artificial Sequence
  ENSG00000134460_17 (sequence is synthesized)
gagaccagcctgggcagcatagcaagacacatccctacaaaaaattagaaattggctggatgtggtggcatacgcctgtagtcctagcc

SEQ ID NO: 311617 - DNA, 73 bp, Artificial Sequence
  ENSG00000134460_18 (sequence is synthesized)
ttaaggaaaaaaagacaagatgagcataccagcagtccttgaacattatcaaaaagttcagcatattagaatc

SEQ ID NO: 311618 - DNA, 120 bp, Artificial Sequence
  ENSG00000134460_19 (sequence is synthesized)
agtccttgaacattatcaaaaagttcagcatattagaatcaccgggaggccttgttaaaagagttcgctgggcccatcttcagagtctctgagttgttggtctggaatagagccaaatgt

SEQ ID NO: 311619 - DNA, 120 bp, Artificial Sequence
  ENSG00000134460_20 (sequence is synthesized)
tttgtgtgtctaacaattcccaggtgctgttgctgctgctactattccaggaacacactttgagaaccattgtgttattgctctgcacgcccacccactctcaactcccacgaaaaaaat

SEQ ID NO: 311620 - DNA, 120 bp, Artificial Sequence
  ENSG00000134460_21 (sequence is synthesized)
caacttccagagctaagatttcggtggaagtcctggttccatatctggtgcaagatctcccctcacgaatcagttgagtcaacattctagctcaacaacatcacacgattaacattaacg

SEQ ID NO: 311621 - DNA, 120 bp, Artificial Sequence
  ENSG00000134460_22 (sequence is synthesized)
aaaattattcatttgggaaactatcagccagttttcacttctgaaggggcaggagagtgttatgagaaatcacggcagttttcagcagggtccagattcagattaaataactattttctg

SEQ ID NO: 311622 - DNA, 120 bp, Artificial Sequence
  ENSG00000134460_23 (sequence is synthesized)
tcatttctgtgaccaaccacatacaaacagactcatctgtgcactctccccctcccccttcaggtatatgttttctgagtaaagttgaaaagaatctcagaccagaaaatatagatatat

SEQ ID NO: 311623 - DNA, 120 bp, Artificial Sequence
  ENSG00000134460_24 (sequence is synthesized)
atttaaatcttacttgagtagaactgattacgacttttgggtgttgaggggtctataagatcaaaacttttccatgataatactaagatgttatcgaccatttatctgtccttctctcaa

SEQ ID NO: 311624 - DNA, 120 bp, Artificial Sequence
  ENSG00000134460_25 (sequence is synthesized)
aagtgtatggtggaattttccagaagctatgtgatacgtgatgatgtcatcactctgctgttaacatataataaatttattgctattgtttataaaagaataaatgatattttttaaaaa

SEQ ID NO: 311625 - DNA, 120 bp, Artificial Sequence
  ENSG00000134460_26 (sequence is synthesized)
tccttatctagacttccattttcctaccccatagatacccactctttgcccctaacttgccttcaactcctctactgccttgtaaatgtcccatgtgtgcttgaaaaaagagtgggctct

SEQ ID NO: 311626 - DNA, 120 bp, Artificial Sequence
  ENSG00000134460_27 (sequence is synthesized)
gctattgttggaatcaaatttgttaattgtggttatcacatttgattgttcttactgattttctgtctgtcctatccatcataaaggaagacactgttaaaatttctcattatgatagta

SEQ ID NO: 311627 - DNA, 120 bp, Artificial Sequence
  ENSG00000134460_28 (sequence is synthesized)
gagaagtggagagcctggcacagaagcagctgtcccttagtgcatctctgctccatccagtggttcaatggcattcgtattattatgacctgtttccaagtcacagatggaaaccaggac

SEQ ID NO: 311628 - DNA, 120 bp, Artificial Sequence
  ENSG00000134460_29 (sequence is synthesized)
tggggagggaggctggggagaaagcattgctcagagttttggggacagctagggtcagagttagaattcagcctcgtctgctctgctgagaccacttcaccgcttcccagtgcccctgct

SEQ ID NO: 311629 - DNA, 120 bp, Artificial Sequence
  ENSG00000134460_30 (sequence is synthesized)
gtggaaccatgaggggtggcatccctggcgaagtgcccacaccaggattcctgcctcctcgggcgtgtctggggccggctgcctggggcaggcggggtgggagtgaggccctgactcctg

SEQ ID NO: 311630 - DNA, 120 bp, Artificial Sequence
  ENSG00000134461_0 (sequence is synthesized)
cggggcaggtcacgcttgggcctggctgcctcaggagccaccctgcacggcgccgggcgaggctgtgcgcgccctcccggaccctccactttggggctttgcggtgtagcggcgcgcccc

SEQ ID NO: 311631 - DNA, 120 bp, Artificial Sequence
  ENSG00000134461_1 (sequence is synthesized)
actcccttacgtgttcagtcccgaatcacgtacgggccgctgcagctccaggacggcggacgccagcgctctcggatccccaggcccctccgtgctcatcccggaccgctccgtccctga

SEQ ID NO: 311632 - DNA, 120 bp, Artificial Sequence
  ENSG00000134461_2 (sequence is synthesized)
ggaaaaaccgccccgtgcccggaaccgcggcttctcccacgcggggcaggccggggctgtgagggggcagcccgcctgcggactaggccgggggtttgaggaggcggctctgccggggac

SEQ ID NO: 311633 - DNA, 120 bp, Artificial Sequence
  ENSG00000134461_3 (sequence is synthesized)
aaagccgggggcgtgaggggcggttctgccgggttcggggcgcgcggggcaggttgcgtgaagaggcggaaagtcccactcgccctcggcttctccctgcccggccgccggtgtcccgcc

SEQ ID NO: 311634 - DNA, 80 bp, Artificial Sequence
  ENSG00000134461_4 (sequence is synthesized)
gcccagcccggggacccgcggcgcctctgcaggctggtgcaggagggccggctgcgcgccctgaaggaggagctgcaggc

SEQ ID NO: 311635 - DNA, 120 bp, Artificial Sequence
  ENSG00000134461_5 (sequence is synthesized)
ggccgggggctgcccggggccggccggggataccctcctgcactgcgccgcgcgccacgggcatcgggacgtgctggcctatctggccgaggcctggggcatggacatcgaggccaccaa

SEQ ID NO: 311636 - DNA, 120 bp, Artificial Sequence
  ENSG00000134461_6 (sequence is synthesized)
tcgactgcctgaagaaggccgactggactcctctgatgatggcctgcacaaggaagaacctgggggtgatccaggagctggtggaacatggcgccaatccactcctgaagaacaaagatg

SEQ ID NO: 311637 - DNA, 120 bp, Artificial Sequence
  ENSG00000134461_7 (sequence is synthesized)
gctggaacagtttccacattgccagtcgagaaggcgaccctctgatcctccagtacctgctcactgtttgcccaggtgcctggaagacagagagcaaaattagaaggactcctctgcata

SEQ ID NO: 311638 - DNA, 120 bp, Artificial Sequence
  ENSG00000134461_8 (sequence is synthesized)
ctgcagcaatgcatggccatttggaggcagtcaaggtgcttcttaagaggtgccaatatgaaccagactacagagacaactgtggcgtcaccgccttgatggacgcaatccagtgtgggc

SEQ ID NO: 311639 - DNA, 120 bp, Artificial Sequence
  ENSG00000134461_9 (sequence is synthesized)
acatcgacgtcgctaggctgctcctcgatgaacatggggcttgcctttcagcagaagacagcctgggtgcccaggctctgcacagggcagctgtcacagggcaggacgaagccatccgat

SEQ ID NO: 311640 - DNA, 120 bp, Artificial Sequence
  ENSG00000134461_10 (sequence is synthesized)
tcttggtctctgaacttggcgtcgatgtagatgtgagagccacatcaacccacctcacagcacttcattatgcagctaaggaaggacatacaagtacaattcagactctcttatccttgg

SEQ ID NO: 311641 - DNA, 120 bp, Artificial Sequence
  ENSG00000134461_11 (sequence is synthesized)
gagctgacatcaattctaaagatgaaaaaaatcgatcagccctgcatctggcctgtgcaggtcagcacttggcctgtgccaagtttctcctgcagtcgggactgaaggattctgaagaca

SEQ ID NO: 311642 - DNA, 120 bp, Artificial Sequence
  ENSG00000134461_12 (sequence is synthesized)
tcacgggcaccctggctcagcagctcccaaggagagcagatgtccttcagggctctggccatagcgcaatgacataaggatgtttccaagaggaggcaataaagtgcatggtaattcata

SEQ ID NO: 311643 - DNA, 120 bp, Artificial Sequence
  ENSG00000134461_13 (sequence is synthesized)
catgagttgctgggagcctgagcacctttcgtttttcggctcagagaaagccaagtgcaacttgcttcagtcatcctgaacctgagttcaaccaaccgcagccacctacgtttgacccca

SEQ ID NO: 311644 - DNA, 120 bp, Artificial Sequence
  ENSG00000134461_14 (sequence is synthesized)
gcgagatcaaagttgtatatctgaggtgtaccagtggtgaagtcagtgccacatctgcactggcccccaaggtcagctccctgggtctgtctccaaaaatggttgctgatgacatcacca

SEQ ID NO: 311645 - DNA, 89 bp, Artificial Sequence
  ENSG00000134461_15 (sequence is synthesized)
ctgggtctgtctccaaaaatggttgctgatgacatcaccaaccattgactggaagagtctgaggatgatagtgaaactgaccagccaca

SEQ ID NO: 311646 - DNA, 120 bp, Artificial Sequence
  ENSG00000134461_16 (sequence is synthesized)
cagaaagaaagaaacacaaaaacatgaaacacagtggtagcaccacttctgatgagattgtcaacattgcctaacagatgcagcagcagtctttagccagagaactctctggaaccatta

SEQ ID NO: 311647 - DNA, 82 bp, Artificial Sequence
  ENSG00000134461_17 (sequence is synthesized)
gaattcctggggcctgcccagtctgtgagctgccatgttgatagtatcacagatgataccaacagtgaagctgtggaatgcc

SEQ ID NO: 311648 - DNA, 120 bp, Artificial Sequence
  ENSG00000134461_18 (sequence is synthesized)
agtatcacagatgataccaacagtgaagctgtggaatgcccagctagttaaagaatgcaaaggaaaatattttcacaaagggttatctgataaccaaaaaaaaaaaagacatttcatcta

SEQ ID NO: 311649 - DNA, 120 bp, Artificial Sequence
  ENSG00000134461_19 (sequence is synthesized)
agccacttaacaccgtgtctgatgtgtagtaaataataaatgtcaatgattctcaaagaacccaggaatagaaaaagcatttaataaaaattagctcttggcataatctcttcatccaca

SEQ ID NO: 311650 - DNA, 120 bp, Artificial Sequence
  ENSG00000134461_20 (sequence is synthesized)
agctctgcagcctggtttctttgaccccatctctatggaagaaattgcccatgatattcttctgaaatggtcaggattctgaagcgctttatctctttaaatagaaacctgacttgaatt

SEQ ID NO: 311651 - DNA, 120 bp, Artificial Sequence
  ENSG00000134461_21 (sequence is synthesized)
tgttgctagacaaaactttaaaaaaaagccttttactccataaagtgcctccccctcacacacaggtttttgttttcaggaataacgttatttgaagctataaatacccattgtatgaaa

SEQ ID NO: 311652 - DNA, 120 bp, Artificial Sequence
  ENSG00000134463_0 (sequence is synthesized)
gtagtacggactgggcctggcctggggcgtccccgcgaagcctgggcctgtcaggcggttccgtccgggtctcggccaccgtcgagttccgtcgagttccgtcccggccctgctcacagc

SEQ ID NO: 311653 - DNA, 120 bp, Artificial Sequence
  ENSG00000134463_1 (sequence is synthesized)
agcgccctcggagcgcccagcacctgcggccggccaggcagcgcgatcctgcggcgtctggccatcccgaatgctatggccgccgtcgccgtcttgcgggccttcggggcaagtgggccc

SEQ ID NO: 311654 - DNA, 120 bp, Artificial Sequence
  ENSG00000134463_2 (sequence is synthesized)
ctgggcccagctccccgcccgcttctgcagccgggacccggccggggcggggcggcgggagtcggagccgcggcccaccagcgcgcggcagctggacggcataaggaacatcgtcttgag

SEQ ID NO: 311655 - DNA, 120 bp, Artificial Sequence
  ENSG00000134463_3 (sequence is synthesized)
ataaggaacatcgtcttgagcaatcccaagaagaggaacgcgttgtcacttgcaatgctgaagtctctccaaagtgacattcttcatgacgctgacagcaacgatctgaaagtcattatc

SEQ ID NO: 311656 - DNA, 120 bp, Artificial Sequence
  ENSG00000134463_4 (sequence is synthesized)
atctcggctgaggggcctgtgttttcttctgggcatgacttaaaggagctgacagaggagcaaggccgtgattaccatgccgaagtatttcagacctgttccaaggtcatgatgcacatc

SEQ ID NO: 311657 - DNA, 120 bp, Artificial Sequence
  ENSG00000134463_5 (sequence is synthesized)
cggaaccaccccgttcccgtcattgccatggtcaatggcctggccgcggctgccggctgtcaactggttgccagctgcgacattgccgtggcgagcgacaagtcctcttttgccactcct

SEQ ID NO: 311658 - DNA, 120 bp, Artificial Sequence
  ENSG00000134463_6 (sequence is synthesized)
tggagatgctctttactggtgagcccatttctgcccaggaggccctgctccacgggctgcttagcaaggtggtgccagaggcggagctgcaggaggagaccatgcggatcgctaggaaga

SEQ ID NO: 311659 - DNA, 120 bp, Artificial Sequence
  ENSG00000134463_7 (sequence is synthesized)
tcgcatcgctgagccgtccggtggtgtccctgggcaaagccaccttctacaagcagctgccccaggacctggggacggcttactacctcacctcccaggccatggtggacaacctggccc

SEQ ID NO: 311660 - DNA, 120 bp, Artificial Sequence
  ENSG00000134463_8 (sequence is synthesized)
tgcgggacgggcaggagggcatcacggccttcctccagaagagaaaacctgtctggtcacacgagccagtgtgagtggaggcagaggagtgaggcccacgggcagcgcccaggagcccac

SEQ ID NO: 311661 - DNA, 120 bp, Artificial Sequence
  ENSG00000134463_9 (sequence is synthesized)
cttcccctctggcccagccaccactgcctctcagcttcaacaggtgacaggctgctttcgtgacttgatattggtgtcatagcatttggcctacattaaaagccacaatttcatggggaa

SEQ ID NO: 311662 - DNA, 120 bp, Artificial Sequence
  ENSG00000134463_10 (sequence is synthesized)
aggacaaaatggagagtgactgaggtgctgacctcagtgcaaggctggtgaaccctgcagcgggccagctatggtgggaagcctggcatttggggtgctccttgcaacgtcttaagcaag

SEQ ID NO: 311663 - DNA, 120 bp, Artificial Sequence
  ENSG00000134463_11 (sequence is synthesized)
cgaccccccgacatagcaaaaggtggcaacccatggaggcagaaagaaggacgccagcctgacccttatctgaaacgtcctaagcagagttaatcctggctgctcaggagaggcgacaca

SEQ ID NO: 311664 - DNA, 120 bp, Artificial Sequence
  ENSG00000134463_12 (sequence is synthesized)
tttcaaatctccacgagatattctccacacagaaaatcttcttgattctatagagacttaatcatgcctatggctttgaataatcttatgtgatttaaataaattaaatctttatagaga

SEQ ID NO: 311665 - DNA, 67 bp, Artificial Sequence
  ENSG00000134463_13 (sequence is synthesized)
gccgtgattaccatgccgaagtatttcagacctgttccaagggtctcactctgtcgcccaggctgga

SEQ ID NO: 311666 - DNA, 120 bp, Artificial Sequence
  ENSG00000134463_14 (sequence is synthesized)
tgaaagtcattatcatctcggctgaggggcctgtgttttcttctgggcatgacttaaaggagctgacagaggagcaaggccgtgattaccatgccgaagtatttcagacctgttccaagc

SEQ ID NO: 311667 - DNA, 120 bp, Artificial Sequence
  ENSG00000134463_15 (sequence is synthesized)
aatttaactccccccacccacctctgcctcccagccttctccggagttcctcctccagtgcatgcgatgattcaagatccgcttgttaaaagtgcctttcatatcaggacgttctgccca

SEQ ID NO: 311668 - DNA, 120 bp, Artificial Sequence
  ENSG00000134470_0 (sequence is synthesized)
ctgggcagcgctcgcccggggagtccagcggtgtcctgtggagctgccgccatggccccgcggcgggcgcgcggctgccggaccctcggtctcccggcgctgctactgctgctgctgctc

SEQ ID NO: 311669 - DNA, 120 bp, Artificial Sequence
  ENSG00000134470_1 (sequence is synthesized)
cggccgccggcgacgcggggcatcacgtgccctccccccatgtccgtggaacacgcagacatctgggtcaagagctacagcttgtactccagggagcggtacatttgtaactctggtttc

SEQ ID NO: 311670 - DNA, 120 bp, Artificial Sequence
  ENSG00000134470_2 (sequence is synthesized)
aagcgtaaagccggcacgtccagcctgacggagtgcgtgttgaacaaggccacgaatgtcgcccactggacaacccccagtctcaaatgcattagagaccctgccctggttcaccaaagg

SEQ ID NO: 311671 - DNA, 120 bp, Artificial Sequence
  ENSG00000134470_3 (sequence is synthesized)
ccagcgccaccctccacagtaacgacggcaggggtgaccccacagccagagagcctctccccttctggaaaagagcccgcagcttcatctcccagctcaaacaacacagcggccacaaca

SEQ ID NO: 311672 - DNA, 120 bp, Artificial Sequence
  ENSG00000134470_4 (sequence is synthesized)
gcagctattgtcccgggctcccagctgatgccttcaaaatcaccttccacaggaaccacagagataagcagtcatgagtcctcccacggcaccccctctcagacaacagccaagaactgg

SEQ ID NO: 311673 - DNA, 120 bp, Artificial Sequence
  ENSG00000134470_5 (sequence is synthesized)
gaactcacagcatccgcctcccaccagccgccaggtgtgtatccacagggccacagcgacaccactgtggctatctccacgtccactgtcctgctgtgtgggctgagcgctgtgtctctc

SEQ ID NO: 311674 - DNA, 120 bp, Artificial Sequence
  ENSG00000134470_6 (sequence is synthesized)
tgctacctcaagtcaaggcaaactcccccgctggccagcgttgaaatggaagccatggaggctctgccggtgacttgggggaccagcagcagagatgaagacttggaaaactgctctcac

SEQ ID NO: 311675 - DNA, 120 bp, Artificial Sequence
  ENSG00000134470_7 (sequence is synthesized)
cacctatgaaactcggggaaaccagcccagctaagtccggagtgaaggagcctctctgctttagctaaagacgactgagaagaggtgcaaggaagcgggctccaggagcaagctcaccag

SEQ ID NO: 311676 - DNA, 120 bp, Artificial Sequence
  ENSG00000134470_8 (sequence is synthesized)
gcctctcagaagtcccagcaggatctcacggactgccgggtcggcgcctcctgcgcgagggagcaggttctccgcattcccatgggcaccacctgcctgcctgtcgtgccttggacccag

SEQ ID NO: 311677 - DNA, 120 bp, Artificial Sequence
  ENSG00000134470_9 (sequence is synthesized)
ggcccagcttcccaggagagaccaaaggcttctgagcaggatttttatttcattacagtgtgagctgcctggaatacatgtggtaatgaaataaaaaccctgccccgaatcttccgtccc

SEQ ID NO: 311678 - DNA, 120 bp, Artificial Sequence
  ENSG00000134470_10 (sequence is synthesized)
tcatcctaactttcagttcacagagaaaagtgacatacccaaagctctctgtcaattacaaggcttctcctggcgtgggagacgtctacagggaagacaccagcgtttgggcttctaacc

SEQ ID NO: 311679 - DNA, 120 bp, Artificial Sequence
  ENSG00000134470_11 (sequence is synthesized)
accctgtctccagctgctctgcacacatggacagggacctgggaaaggtgggagagatgctgagcccagcgaatcctctccattgaaggattcaggaagaagaaaactcaactcagtgcc

SEQ ID NO: 311680 - DNA, 120 bp, Artificial Sequence
  ENSG00000134470_12 (sequence is synthesized)
caactcagtgccattttacgaatatatgcgtttatatttatacttccttgtctattatatctatacattatatattatttgtattttgacattgtaccttgtataaacaaaataaaacat

SEQ ID NO: 311681 - DNA, 120 bp, Artificial Sequence
  ENSG00000134470_13 (sequence is synthesized)
ggagcagaatatctgaaagcttcaaccatgaggtccagacacacgaggcctgcgtgagactcaggacaatggaaaactgcccccagtgccaccaccatcggacaagcaggcagcaagcag

SEQ ID NO: 311682 - DNA, 80 bp, Artificial Sequence
  ENSG00000134470_14 (sequence is synthesized)
agctgcagcaggaattcggcgaagtggcggagctggggccccagcgggcgccgggggccgcgggagccagcaggtggcgg

SEQ ID NO: 311683 - DNA, 120 bp, Artificial Sequence
  ENSG00000134470_15 (sequence is synthesized)
cccgcgcctccgcaccgcggcgacacctccgcgggcactcacccaggccggccgctcacaaccgagcgcagggccgcggagggagaccaggaaagccgaaggcggagcagctggaggcga

SEQ ID NO: 311684 - DNA, 120 bp, Artificial Sequence
  ENSG00000134470_16 (sequence is synthesized)
ccagcgccgggcgaggtcaagtggatccgagccgcagagagggctggagagagtctgctctccgatgactttgcccactctcttcgcagtggggacaccggaccgagtgcacactggagg

SEQ ID NO: 311685 - DNA, 120 bp, Artificial Sequence
  ENSG00000134470_17 (sequence is synthesized)
gctgaggcaccgaacatgagcaggggaggaaggaatgcctgggagcagctgagccgagcccctgccaccagcctcctccgcacgcccgtggaatcagcactttctgcttcccgcccctga

SEQ ID NO: 311686 - DNA, 120 bp, Artificial Sequence
  ENSG00000134470_18 (sequence is synthesized)
caggcatccttccagagagactgtataaataaacatatagaggataaggaatgctggacagttgcttcttttctccttttctgtaccatgtttgtttccacttgctggtataccttgtag

SEQ ID NO: 311687 - DNA, 120 bp, Artificial Sequence
  ENSG00000134470_19 (sequence is synthesized)
ccagccctggtagaaggtgccggccagatgcccagggcatcagcacccaggcagctccagacaggccagccacgtatgaccagtgtcctgcctcgcctgtgcttgtcattcgggagctga

SEQ ID NO: 311688 - DNA, 120 bp, Artificial Sequence
  ENSG00000134470_20 (sequence is synthesized)
ccatggccccgcggcgggcgcgcggctgccggaccctcggtctcccggcgctgctactgctgctgctgctccggccgccggcgacgcgggagcccgcagcttcatctcccagctcaaaca

SEQ ID NO: 311689 - DNA, 120 bp, Artificial Sequence
  ENSG00000134470_21 (sequence is synthesized)
gggtcgcagggagagcgccgccgctgcgcccgggtcacccacgtaagggagcgggcggcctggctggggtctccgaggccgaggtcaggagcagttctgagaagcccgttttggccacgg

SEQ ID NO: 311690 - DNA, 120 bp, Artificial Sequence
  ENSG00000134470_22 (sequence is synthesized)
gagcgcggagccggcggcgtccagcagtttggagacacgggcgagtgcgcttctcccaggcgcctggactgcagggcgggtgttgcatagcacgcggtcctcggaggggtccgggagaaa

SEQ ID NO: 311691 - DNA, 120 bp, Artificial Sequence
  ENSG00000134470_23 (sequence is synthesized)
ctcaagtcaagctcacagagaaaagtgacatacctgaggctctctgtcaattacaaggctcctcctggcgtgggagatgtctatagggaagacaccagcgtttgggctcctcccaatgac

SEQ ID NO: 311692 - DNA, 120 bp, Artificial Sequence
  ENSG00000134470_24 (sequence is synthesized)
cctgtctccagctgtgctgcacgcactgacagggagccggaaaaggtggaggagatgctaagcccagtgaatcctctccatcgaaggattcaggaagaagaaaactcatctcagcgccat

SEQ ID NO: 311693 - DNA, 120 bp, Artificial Sequence
  ENSG00000134470_25 (sequence is synthesized)
agcgccattttacatatatatgcatttatacttccttgtctgttatatctacacattatatatgatttgtattttgacattgtgccttgtataaacaaaataaaatatatattttcaata

SEQ ID NO: 311694 - DNA, 120 bp, Artificial Sequence
  ENSG00000134480_0 (sequence is synthesized)
agcgcgccagcgccggctagccggacgccctaggcttccgcgagatcttcggtgggggtacgggtgttttacgccaggacgctgatgcgtttgggttctcgtctgcagaccctctggacc

SEQ ID NO: 311695 - DNA, 120 bp, Artificial Sequence
  ENSG00000134480_1 (sequence is synthesized)
tggtcacgattccataatgtaccacaacagtagtcagaagcggcactggaccttctccagcgaggagcagctggcaagactgcgggctgacgccaaccgcaaattcagatgcaaagccgt

SEQ ID NO: 311696 - DNA, 120 bp, Artificial Sequence
  ENSG00000134480_2 (sequence is synthesized)
ggccaacgggaaggttcttccgaatgatccagtctttcttgagcctcatgaagaaatgacactctgcaaatactatgagaaaaggttattggaattctgttcggtgtttaagccagcaat

SEQ ID NO: 311697 - DNA, 120 bp, Artificial Sequence
  ENSG00000134480_3 (sequence is synthesized)
gccaagatctgttgtgggtacggcttgtatgtatttcaaacgtttttatcttaataactcagtaatggaatatcaccccaggataataatgctcacttgtgcatttttggcctgcaaagt

SEQ ID NO: 311698 - DNA, 120 bp, Artificial Sequence
  ENSG00000134480_4 (sequence is synthesized)
agatgaattcaatgtatctagtcctcagtttgttggaaacctccgggagagtcctcttggacaggagaaggcacttgaacagatactggaatatgaactacttcttatacagcaacttaa

SEQ ID NO: 311699 - DNA, 120 bp, Artificial Sequence
  ENSG00000134480_5 (sequence is synthesized)
agaatccagagattttgaggaaaacagctgatgactttcttaatagaattgcattgacggatgcttaccttttatacacaccttcccaaattgccctgactgccattttatctagtgcct

SEQ ID NO: 311700 - DNA, 120 bp, Artificial Sequence
  ENSG00000134480_6 (sequence is synthesized)
ccagggctggaattactatggaaagttatttatcagagagtctgatgctgaaagagaacagaacttgcctgtcacagttactagatataatgaaaagcatgagaaacttagtaaagaagt

SEQ ID NO: 311701 - DNA, 120 bp, Artificial Sequence
  ENSG00000134480_7 (sequence is synthesized)
atgaaccacccagatctgaagaagttgctgttctgaaacagaagttggagcgatgtcattctgctgagcttgcacttaacgtaatcacgaagaagaggaaaggctatgaagatgatgatt

SEQ ID NO: 311702 - DNA, 120 bp, Artificial Sequence
  ENSG00000134480_8 (sequence is synthesized)
acgtctcaaagaaatccaaacatgaggaggaagaatggactgatgacgacctggtagaatctctctaaccatttgaagttgatttctcaatgctaactaatcaagagaagtaggaagcat

SEQ ID NO: 311703 - DNA, 120 bp, Artificial Sequence
  ENSG00000134480_9 (sequence is synthesized)
atcaaacgtttaactttatttaaaaagtataatgtgaaaacataaaatatattaaaacttttctattgttttctttccctttcacagtaactttatgtaaaataaaccatcttcaaaaga

SEQ ID NO: 311704 - DNA, 120 bp, Artificial Sequence
  ENSG00000134480_10 (sequence is synthesized)
gaatatcaccccaggataataatgtgagtatgtctgtctaatatattgttttcatttaagaagacctttataatcttttgagtattttttgggaggagagaattgtgagagagagagaga

SEQ ID NO: 311705 - DNA, 120 bp, Artificial Sequence
  ENSG00000134480_11 (sequence is synthesized)
gagaactgacttcctaatacagggtaatttagacttgaattctatttttttttttttattcagaacttgagatctctgtttacctgtacttcagtaattctgatggtatgtgaacttcag

SEQ ID NO: 311706 - DNA, 120 bp, Artificial Sequence
  ENSG00000134480_12 (sequence is synthesized)
aagtgtgagagattttatttcaacactgacaagctagttactagagggcctacaaaggtaagtaacaagtttccatttcaacttgagagacaaatgatgttaaaatataagaagcagggt

SEQ ID NO: 311707 - DNA, 120 bp, Artificial Sequence
  ENSG00000134480_13 (sequence is synthesized)
aacggttgcccagttgcccggtcactaaattctgagcagctgcgggagctcttctggctcccaggacaatctcgctccgtcgtttctctgcctctgcggcgcggagtgcgtttttctatc

SEQ ID NO: 311708 - DNA, 120 bp, Artificial Sequence
  ENSG00000134480_14 (sequence is synthesized)
aaaataagcgagcaccttgccaggttccgtgggtacaaagacgaacaacgccatccccgtcgtcgaatggcagacaagtaaccagtctttgtaacgtagtgaagaagagagttcttccga

SEQ ID NO: 311709 - DNA, 120 bp, Artificial Sequence
  ENSG00000134480_15 (sequence is synthesized)
cctggttcaataccttttaatggtatatgggagctgagcagaaaccattcatctgtggcatgccctttctgtaatcggctcaactggcagcgcataaatacttgggaagaaaaacaagca

SEQ ID NO: 311710 - DNA, 120 bp, Artificial Sequence
  ENSG00000134480_16 (sequence is synthesized)
attattgtttaaaaagagaacacgataattagtcatgcaagtaaattttcctggtgttcagtcttccctatggtgttaaatgcttttcattaaaggagttttcagtaacatcacaaattc

SEQ ID NO: 311711 - DNA, 120 bp, Artificial Sequence
  ENSG00000134480_17 (sequence is synthesized)
atttttaaggagggaaaacagaataacttattttgcaatataatttaacaatttagtatattcagagatagagtccatatatccttgatataaaatctaaacccagtttcttgtatcaca

SEQ ID NO: 311712 - DNA, 120 bp, Artificial Sequence
  ENSG00000134480_18 (sequence is synthesized)
ctaacatggccataccataccttccatgcttatttctctgtcatttagtgtgcataacaacaacgattcaagcttttcgtgaagaaaaatcctcagtaggatgctggccagtagtgttcg

SEQ ID NO: 311713 - DNA, 120 bp, Artificial Sequence
  ENSG00000134480_19 (sequence is synthesized)
gtcttgtccacatacatgtgataaagcatagactacatgaagttccttttgcagtataagctaaaatgacattttaaaagattgtttaaagtacgtagcattataagcatgctccatgag

SEQ ID NO: 311714 - DNA, 120 bp, Artificial Sequence
  ENSG00000134480_20 (sequence is synthesized)
gtagtctacttatttctaccaaaattacagtataaaacaaggtttaaaatctctggcatcattgtgctactaagctatgaattactatgtttaccttaatggatcttttattaaatgtta

SEQ ID NO: 311715 - DNA, 120 bp, Artificial Sequence
  ENSG00000134480_21 (sequence is synthesized)
aatgtttctgttaattccaacaaaaacaagactgataaataatttaatacctctttaaattcactgtactcttcttctggcatgattttttccatagagtatcgtgctcgaacacgcagg

SEQ ID NO: 311716 - DNA, 87 bp, Artificial Sequence
  ENSG00000134480_22 (sequence is synthesized)
tcaacactgacaagctagttactagagggcctacaaaggctcataggtggaattttcagttaatgctggaaggagttaagactttgg

SEQ ID NO: 311717 - DNA, 120 bp, Artificial Sequence
  ENSG00000134480_23 (sequence is synthesized)
aataatatgagatttgggagaggctggggagaatgatatggtttggctctgtacccccatccaaatctcatgttgaattgtaattcccagtgttgggaggggacctggtaggaggtgatt

SEQ ID NO: 311718 - DNA, 78 bp, Artificial Sequence
  ENSG00000134480_24 (sequence is synthesized)
attccccttcacatgctgtttctcctgtcactatgtgaagatgtgcttgcttcccctttgccttctaccatgactgta

SEQ ID NO: 311719 - DNA, 120 bp, Artificial Sequence
  ENSG00000134480_25 (sequence is synthesized)
cttcacatgctgtttctcctgtcactatgtgaagatgtgcttgcttcccctttgccttctaccatgactgtaagattcctgaggcctcccccgccatgcttcctgtacagcctgcagaac

SEQ ID NO: 311720 - DNA, 120 bp, Artificial Sequence
  ENSG00000134480_26 (sequence is synthesized)
tctccaagagtacaggcattatagagttgtgggttttttcattttttgcatacttccttacgtacagtactgttgtccattattaaagggatttttctctcttctgtctttatttaatga

SEQ ID NO: 311721 - DNA, 120 bp, Artificial Sequence
  ENSG00000134480_27 (sequence is synthesized)
agaatccttcctgtgttcatagaaagcagaagcaatatgtatacatactacatttttgctttttttcttattctccaaggatttttcccttacccccttttaaaaaaaattttctatctg

SEQ ID NO: 311722 - DNA, 120 bp, Artificial Sequence
  ENSG00000134480_28 (sequence is synthesized)
aaaatttcctggtttatcttttgtaatccacatgggtaaaaggaggagaacattttcttaaagggaggtaagaggtaaacaatactggttatgcttcagtgttatccttaccacactttt

SEQ ID NO: 311723 - DNA, 120 bp, Artificial Sequence
  ENSG00000134480_29 (sequence is synthesized)
tttgaatattcttattccatcgtgactaatatcaaattaaagctgcaactcatttgcctaattttttaagcaaaatatgataggcaaacctatgctttttttaaaaaaggcaccacaaaa

SEQ ID NO: 311724 - DNA, 120 bp, Artificial Sequence
  ENSG00000134480_30 (sequence is synthesized)
aacaaaacttagtagccagctttaaaagtgttaaggaatgtgttttgccctctagaaacctttataaatggctttttgaatgccatcctgatatatttagctatttgtccattactatta

SEQ ID NO: 311725 - DNA, 120 bp, Artificial Sequence
  ENSG00000134480_31 (sequence is synthesized)
aactgcagaaggtatttcaactgttacatggtactgaaagccagtcgtctgggtaatgaatattatttttctttagttacccgaaaacatttccaaatgggtttttaaaaaaaaccagat

SEQ ID NO: 311726 - DNA, 120 bp, Artificial Sequence
  ENSG00000134480_32 (sequence is synthesized)
atatgattttgaatagctgtctacatcaaactcttacgctagtatagataagtaggtagcagcaaattgtatattcagttgtggttgttttttaattttgttttgatgtaaggtcttgct

SEQ ID NO: 311727 - DNA, 120 bp, Artificial Sequence
  ENSG00000134480_33 (sequence is synthesized)
atgttgcccaggctgtctcagactcctaggctctagtgatcctctgcctcagttttctgagtaattgggactacaggcacacatcaccacagccttataattaacctattagatcctata

SEQ ID NO: 311728 - DNA, 120 bp, Artificial Sequence
  ENSG00000134480_34 (sequence is synthesized)
agtgaatccgtgtaagtagattataacagttactaggaattttgcagattaaatatgttagagaaatgtaattcaaattgaaatgagtcaatataaaaatatgaaagcacagactattac

SEQ ID NO: 311729 - DNA, 120 bp, Artificial Sequence
  ENSG00000134480_35 (sequence is synthesized)
agcaaattacttacatatgaatcatggccagctgtatttcactatgtgaccttggtaagttattaaacctctaagtgccagtttcccacactgaaaatggggaagataaaaatgcctact

SEQ ID NO: 311730 - DNA, 120 bp, Artificial Sequence
  ENSG00000134480_36 (sequence is synthesized)
aatatcttgactaatccatatcctccctgtcttctatcatgtaaccaaggaaggagaccacctgggatactatgttggtccaagtccagctaaaaaacagaaggggtggaaaggagagta

SEQ ID NO: 311731 - DNA, 120 bp, Artificial Sequence
  ENSG00000134480_37 (sequence is synthesized)
agggagagaatggaatgaattgagctgatttcaaggaaaaggagcatgggacatgttgagatttttggtatcagtgttaaacggtgattgaagccacataggttagcagcccccatagaa

SEQ ID NO: 311732 - DNA, 120 bp, Artificial Sequence
  ENSG00000134480_38 (sequence is synthesized)
ataactgccttttgtagcttggaactactaagcagacatcttttaagcccttagcatttttttttcctgtattttatacattagaggaatagcataaagtgttgctcttggaatctaggg

SEQ ID NO: 311733 - DNA, 120 bp, Artificial Sequence
  ENSG00000134480_39 (sequence is synthesized)
ctttccttactgtgggaacacctccttgggttcctgtctcactcactttgattaccaatgtcattctgccacgtatgttccatatgtcctatctatctgccctgcacaattatgagaggg

SEQ ID NO: 311734 - DNA, 120 bp, Artificial Sequence
  ENSG00000134480_40 (sequence is synthesized)
aaggaattattgcatttataaaatccttttcaaaagaggccattagcaaaaatactaatctaaagcttcagcttctccctgggccttgctctgatgctaaggtttaaactgcccctgaag

SEQ ID NO: 311735 - DNA, 120 bp, Artificial Sequence
  ENSG00000134480_41 (sequence is synthesized)
gaggaagaaaataaataaattaaatgcttagctcttttagacagaagtaatcaattatgcaagatatcccttggttttattttaacttaacctttgtgaatacttcacaaaaatacacat

SEQ ID NO: 311736 - DNA, 120 bp, Artificial Sequence
  ENSG00000134480_42 (sequence is synthesized)
acagaagtaaataaaactatacagttgaactaaatatccagcagatacaacaagtagtcagaagttcaaagatggataagttaggcagctgatgaggttgtctgcataatcaaaggggta

SEQ ID NO: 311737 - DNA, 120 bp, Artificial Sequence
  ENSG00000134480_43 (sequence is synthesized)
gcacaaataatgaacaaataacttttaacaaaagcattctagttaacataaaagaaattggtagtctataaaatggttgaatgggtaacatgcattgatcaatacaacaaccaataatat

SEQ ID NO: 311738 - DNA, 120 bp, Artificial Sequence
  ENSG00000134480_44 (sequence is synthesized)
ttactgaattcaaactatttacttgtaaacatttaacaaagcattatgagatctaaatacagtctttgacaatttcaacaaaataagtcgtatgtttaaaaaataaagctgatgagcaat

SEQ ID NO: 311739 - DNA, 120 bp, Artificial Sequence
  ENSG00000134489_0 (sequence is synthesized)
acacattttaggtatgtgattagaaaacatacttgtcagaattgtctggctggattaatttgctaatttgaccttcttcatcatttgatgtgatgccagatactaatagcacaatcaatt

SEQ ID NO: 311740 - DNA, 120 bp, Artificial Sequence
  ENSG00000134489_1 (sequence is synthesized)
tatcactaagcactcgtgttactttagcattttttatgtccttagtagcttttgctataatgctaggaaatgctttggtcattttagcttttgtggtggacaaaaaccttagacatcgaa

SEQ ID NO: 311741 - DNA, 120 bp, Artificial Sequence
  ENSG00000134489_2 (sequence is synthesized)
gtagttatttttttcttaacttggccatctctgacttctttgtgggtgtgatctccattcctttgtacatccctcacacgctgttcgaatgggattttggaaaggaaatctgtgtatttt

SEQ ID NO: 311742 - DNA, 120 bp, Artificial Sequence
  ENSG00000134489_3 (sequence is synthesized)
ggctcactactgactatctgttatgtacagcatctgtatataacattgtcctcatcagctatgatcgatacctgtcagtctcaaatgctgtgtcttatagaactcaacatactggggtct

SEQ ID NO: 311743 - DNA, 120 bp, Artificial Sequence
  ENSG00000134489_4 (sequence is synthesized)
tgaagattgttactctgatggtggccgtttgggtgctggccttcttagtgaatgggccaatgattctagtttcagagtcttggaaggatgaaggtagtgaatgtgaacctggattttttt

SEQ ID NO: 311744 - DNA, 120 bp, Artificial Sequence
  ENSG00000134489_5 (sequence is synthesized)
cggaatggtacatccttgccatcacatcattcttggaattcgtgatcccagtcatcttagtcgcttatttcaacatgaatatttattggagcctgtggaagcgtgatcatctcagtaggt

SEQ ID NO: 311745 - DNA, 120 bp, Artificial Sequence
  ENSG00000134489_6 (sequence is synthesized)
gccaaagccatcctggactgactgctgtctcttccaacatctgtggacactcattcagaggtagactatcttcaaggagatctctttctgcatcgacagaagttcctgcatcctttcatt

SEQ ID NO: 311746 - DNA, 120 bp, Artificial Sequence
  ENSG00000134489_7 (sequence is synthesized)
cagagagacagaggagaaagagtagtctcatgttttcctcaagaaccaagatgaatagcaatacaattgcttccaaaatgggttccttctcccaatcagattctgtagctcttcaccaaa

SEQ ID NO: 311747 - DNA, 120 bp, Artificial Sequence
  ENSG00000134489_8 (sequence is synthesized)
gggaacatgttgaactgcttagagccaggagattagccaagtcactggccattctcttaggggtttttgctgtttgctgggctccatattctctgttcacaattgtcctttcattttatt

SEQ ID NO: 311748 - DNA, 120 bp, Artificial Sequence
  ENSG00000134489_9 (sequence is synthesized)
cctcagcaacaggtcctaaatcagtttggtatagaattgcattttggcttcagtggttcaattcctttgtcaatcctcttttgtatccattgtgtcacaagcgctttcaaaaggctttct

SEQ ID NO: 311749 - DNA, 120 bp, Artificial Sequence
  ENSG00000134489_10 (sequence is synthesized)
tgaaaatattttgtataaaaaagcaacctctaccatcacaacacagtcggtcagtatcttcttaaagacaattttctcacctctgtaaattttagtctcaatctcacctaaatgaatcag

SEQ ID NO: 311750 - DNA, 120 bp, Artificial Sequence
  ENSG00000134489_11 (sequence is synthesized)
gtctgccctttatcttgcccttttcattctaccaacagatctgcactttgaagtcaatggtaaattactccagtgaataatagcagtataatatgacttgataatatttttgtaaacttg

SEQ ID NO: 311751 - DNA, 120 bp, Artificial Sequence
  ENSG00000134489_12 (sequence is synthesized)
tagtcataatagtactatattcttcttagtcctcacctcttccttgtcttttagatcttaatttcatgctgattacaaaaatccagttttgttttctttctatgttccatgcataataca

SEQ ID NO: 311752 - DNA, 120 bp, Artificial Sequence
  ENSG00000134489_13 (sequence is synthesized)
gtcttaagtgaatttctcttttttaattttatcgtaatagaaacttatccagtttgaaaatcattccctaaagcatgcaataggaaaaagaacctcctggctgggactgcccaactctgt

SEQ ID NO: 311753 - DNA, 120 bp, Artificial Sequence
  ENSG00000134489_14 (sequence is synthesized)
tctgatcagtgggtgggtgaggtagggtttgagttggcaagagcagggaacgggcatgtgcccaggtgagctcctgtgtgtgtccagattttatattcctaatcccagtaaggaagaaag

SEQ ID NO: 311754 - DNA, 120 bp, Artificial Sequence
  ENSG00000134489_15 (sequence is synthesized)
ggaggccctggtggtcacaggatcagaaggcaagggataggcagtggtcaccaatggttgaaagtatggcttgtcccatttcttcctgttctctttttctagcttccacatcagcttcct

SEQ ID NO: 311755 - DNA, 120 bp, Artificial Sequence
  ENSG00000134489_16 (sequence is synthesized)
tttttgagaacatatagaagaagaaggctaagagatggtgaagagactgcatgattaaactagatagacctggtatacagtcactgaactagtagatgtcaataattattatttttaaaa

SEQ ID NO: 311756 - DNA, 120 bp, Artificial Sequence
  ENSG00000134489_17 (sequence is synthesized)
ggcaacagaacaagactctgtctaaaaagaaaaaaaaatttttttgtttaagacagcatcttgctctgtctcccaggctggagcgtagtaatgcaatcatagctcactgcagcctggaac

SEQ ID NO: 311757 - DNA, 120 bp, Artificial Sequence
  ENSG00000134489_18 (sequence is synthesized)
tccttggctcaagcaatcctgctgccttggcctcccaagtatgtaggactacaggtactcgccaccacacctggataattaaaaaattatttctgtagagatgaagtctcactgtgttgc

SEQ ID NO: 311758 - DNA, 87 bp, Artificial Sequence
  ENSG00000134489_19 (sequence is synthesized)
aaaaaattatttctgtagagatgaagtctcactgtgttgcccagcctgggtgtcaataattattttttaaaaaaaatttttaaaaag

SEQ ID NO: 311759 - DNA, 88 bp, Artificial Sequence
  ENSG00000134489_20 (sequence is synthesized)
ttttagtagagatgaggttttgccattttggtcaggctggaatttttttttttttaattttgataagacagggtattggctgaaacaa

SEQ ID NO: 311760 - DNA, 120 bp, Artificial Sequence
  ENSG00000134489_21 (sequence is synthesized)
gggattataggcacaagacaccacaataattattgcctgtatgtcaattattattttaaaatattgttgtatttacttaatgtctttaatgcatttgcccaatattttacattgtactgc

SEQ ID NO: 311761 - DNA, 120 bp, Artificial Sequence
  ENSG00000134489_22 (sequence is synthesized)
tcagaggtattcctttattatgtggttagcataggttatactttgctgacgattcacattttattagtttggttatgttttgtccttttaaaacattttcttttgagatgggggtcttgc

SEQ ID NO: 311762 - DNA, 120 bp, Artificial Sequence
  ENSG00000134489_23 (sequence is synthesized)
tctgttgcccacgcaggagtgcagtggcatgctctcagctcactgcagccctgactgcctaggctccagcaatcttcttacgtcagcctccagagtagctgggaccgcaggcacttgcca

SEQ ID NO: 311763 - DNA, 120 bp, Artificial Sequence
  ENSG00000134489_24 (sequence is synthesized)
ccacgccccactaaaaattttttaaattgttgcctttcttgaagtgttctctgcctgtctttgtcacaaaatttcatttttctcatagttaatttcatctctccggtaagattttattgg

SEQ ID NO: 311764 - DNA, 120 bp, Artificial Sequence
  ENSG00000134489_25 (sequence is synthesized)
tgtttcttttataactttgcagttcttacaccgtttggtgattttcatgtttcttagaaactttaaacctttaacttcaaacattaaaatacaagtcttttaagtacatgagtgcttaga

SEQ ID NO: 311765 - DNA, 120 bp, Artificial Sequence
  ENSG00000134489_26 (sequence is synthesized)
aatgtacataatgtttatatacacttatgccttacattaaagtccaatatgagaaatacatgtttaacattcaataataattttaaaaatttgagaaataaactctcataaatgcacaca

SEQ ID NO: 311766 - DNA, 120 bp, Artificial Sequence
  ENSG00000134490_0 (sequence is synthesized)
gtctctgggcggctgctgccgctgccgctgctgctgctgcgggggtcgggcggcggccaggggatttgggcaggcaccgtggatccccgagaaggggacgagttgacagatgtgcgtgag

SEQ ID NO: 311767 - DNA, 120 bp, Artificial Sequence
  ENSG00000134490_1 (sequence is synthesized)
gaggtctctggtcggcctcaccttttgtacctgctacctggcttcttacctcacgaacaagtatgtgctgtctgtcttgaaatttacctaccctacattattccaagggtggcagacgct

SEQ ID NO: 311768 - DNA, 120 bp, Artificial Sequence
  ENSG00000134490_2 (sequence is synthesized)
cattggtggacttttgcttcatgtgtcctggaaactgggctgggtagagatcaacagcagttcaagatctcatgttcttgtgtggcttcctgcttcagtgctgtttgtgggtataatcta

SEQ ID NO: 311769 - DNA, 120 bp, Artificial Sequence
  ENSG00000134490_3 (sequence is synthesized)
tgctgggtccagagcattgtccagactggccattcctgtgtttctcactttgcataatgtagctgaagttatcatctgtgggtaccagaagtgttttcagaaagagaaaacatctcctgc

SEQ ID NO: 311770 - DNA, 120 bp, Artificial Sequence
  ENSG00000134490_4 (sequence is synthesized)
aaagatctgtagtgccctcctcctcctggccgcagcaggatgccttcccttcaatgactcccagtttaatccagatggatatttttgggctataattcacttactctgtgtaggggctta

SEQ ID NO: 311771 - DNA, 120 bp, Artificial Sequence
  ENSG00000134490_5 (sequence is synthesized)
taaaattctacagaagtcccagaaacccagtgcattaagtgacattgaccagcaatacttaaactatatattcagtgtggtgctcctggcatttgcatctcatcccacaggtgatctctt

SEQ ID NO: 311772 - DNA, 120 bp, Artificial Sequence
  ENSG00000134490_6 (sequence is synthesized)
cagcgtcctggacttcccattcctgtacttctacagattccatggtagctgctgtgccagtggatttttgggattctttctcatgttcagtacagtgaagctaaaaaaccttctggcccc

SEQ ID NO: 311773 - DNA, 120 bp, Artificial Sequence
  ENSG00000134490_7 (sequence is synthesized)
agggcagtgtgcagcctggattttctttgctaagataatcacagctggcttatcaatattgctgtttgatgcgatcctgaccagtgcaaccacgggatgcctcctgctcggtgcgcttgg

SEQ ID NO: 311774 - DNA, 120 bp, Artificial Sequence
  ENSG00000134490_8 (sequence is synthesized)
agaggccttgctggttttctcagagcggaagagctcctgaacaagacggtcaagagaaagactcacaggctgctgcgggagaacagcttgtacacctgtgtacgagcccctggtctcata

SEQ ID NO: 311775 - DNA, 120 bp, Artificial Sequence
  ENSG00000134490_9 (sequence is synthesized)
gctccctgttggatgtgtcagaaagaggaatgcaaggacagtgaggccaggtgggcagtgccatcaccctcacccaagtgaatgtggtggtggctgatgaggccgaggccctggtgcttc

SEQ ID NO: 311776 - DNA, 120 bp, Artificial Sequence
  ENSG00000134490_10 (sequence is synthesized)
aaggagcaccctttctgggggtctgcaggtcactgcagaggagcggtctgttacatcttcccatttggagaacctctctcaaccgtgctgtagctggttctgcagaaacaggaagtacag

SEQ ID NO: 311777 - DNA, 120 bp, Artificial Sequence
  ENSG00000134490_11 (sequence is synthesized)
gatttcatgggctggctctgctcgcctcgactgagcttcacacctctggatgccacatgctctctcccaaacactgctttcagtgcaaggtagtgggcctaaggggtttggttgtctttt

SEQ ID NO: 311778 - DNA, 120 bp, Artificial Sequence
  ENSG00000134490_12 (sequence is synthesized)
ttgacctcctaggatcaagccatcctcctgcctcagcatccacagtagctgatgtgcaccaccagacccgtctcattttttctatttttattattttagagatggggatctcactgtgtt

SEQ ID NO: 311779 - DNA, 85 bp, Artificial Sequence
  ENSG00000134490_13 (sequence is synthesized)
ccaccttggcctcaaagtattctcatttttatttttaaattgacagacgtaacagtgcgcatttatcacgcacaacacaatgctt

SEQ ID NO: 311780 - DNA, 120 bp, Artificial Sequence
  ENSG00000134490_14 (sequence is synthesized)
gacgtaacagtgcgcatttatcacgcacaacacaatgctttgggaatggttaaatctagctcacaaatgcattacctcacacggttgtcatttttgtggtgaggcttggttgtatgtttt

SEQ ID NO: 311781 - DNA, 120 bp, Artificial Sequence
  ENSG00000134490_15 (sequence is synthesized)
gtttcattcatgtttttacatccttggagtctcctctgggtccgtcctttctttgctgtcatgctggcttgcctaaggcccaccgccacctgcgtacgagcattttaaactctagagtga

SEQ ID NO: 311782 - DNA, 120 bp, Artificial Sequence
  ENSG00000134490_16 (sequence is synthesized)
gtgacagcctttttatggttggtgttactatttatttcctgcctctaaacttctcgtggtccttataaacttgtcaggatgtgtgttgcgttgaattctgcatgtcctttttttgcccac

SEQ ID NO: 311783 - DNA, 120 bp, Artificial Sequence
  ENSG00000134490_17 (sequence is synthesized)
cctcaggttaagctggtactaacttatccccagaggaaacagggtttatgagcactgacagatgtcttccctgggcaaaaaaaaaaaaaatagtatatgtatacacacacacatacacat

SEQ ID NO: 311784 - DNA, 120 bp, Artificial Sequence
  ENSG00000134490_18 (sequence is synthesized)
ttatatttatatttcttaaagcttttaatccctttcattccctgatatctcagagatttcaaatcattgaacactgaagtatatttttcaggccagatgaaaaattgtattaaaacccta

SEQ ID NO: 311785 - DNA, 70 bp, Artificial Sequence
  ENSG00000134490_19 (sequence is synthesized)
atatttttcaggccagatgaaaaattgtattaaaaccctattcctggtaagcagatcacctgaggtcggg

SEQ ID NO: 311786 - DNA, 120 bp, Artificial Sequence
  ENSG00000134490_20 (sequence is synthesized)
tccagcctgggcaacagagcgagacagtctcaaaaacaacaacaacaacaaaaaccctattccttgcctttgtaggagtcaaaataaatgaacttcttttttcttttttttattattata

SEQ ID NO: 311787 - DNA, 120 bp, Artificial Sequence
  ENSG00000134490_21 (sequence is synthesized)
ttcctttggtcctgccccacacgggcgcgcttttccttcaggggctgtgactaattatggaaaacggcacacctgccactctctcagaccatgaggtttaactgagtgaacaccgctgtt

SEQ ID NO: 311788 - DNA, 120 bp, Artificial Sequence
  ENSG00000134490_22 (sequence is synthesized)
atgaaaaggcaaaaggagcacaaggaggaaggaacacggtgttcagggatggcgatgaagagcggaggctttgcaaggacggaccctcagtctcaggtatgtcttaatcagcagtgtgag

SEQ ID NO: 311789 - DNA, 120 bp, Artificial Sequence
  ENSG00000134490_23 (sequence is synthesized)
aacagacgaatcagcagcgtgagaagagacgaattgctcagtctcatgtaggtctttatcagcagcataagaacagatgaatacaaccgccaagggaaggttctgtccaatctgaaacaa

SEQ ID NO: 311790 - DNA, 120 bp, Artificial Sequence
  ENSG00000134490_24 (sequence is synthesized)
tttccaactcttttacctttcctctgtgactgcttttatttcttcaaatcaaactggtggaaaagcagcaacaagcacccacaggctgtgagcttttcagtcgcaaacccgtacacaagc

SEQ ID NO: 311791 - DNA, 120 bp, Artificial Sequence
  ENSG00000134490_25 (sequence is synthesized)
cttcatcacatggtctctgatgcatctgtagtaactatgaagtccacaacatgacctccctccaggtcctgaggactggtctgccttctctgttaaggcagaattgttgctgagagcagc

SEQ ID NO: 311792 - DNA, 120 bp, Artificial Sequence
  ENSG00000134490_26 (sequence is synthesized)
atccctcatggctttccctacctgctaggagacgaaacacccagcagggccagccaagagctcctgccacgctctggttctagcagtggtactgacattccctccgctccatctggctgg

SEQ ID NO: 311793 - DNA, 120 bp, Artificial Sequence
  ENSG00000134490_27 (sequence is synthesized)
gctcctccgcactgtatctgcacaccaagccctctagaaggtcccaatgccagactcacggaattcagacgccagagagatgaagagagtttttacagaaggcaaactccatcctccatc

SEQ ID NO: 311794 - DNA, 120 bp, Artificial Sequence
  ENSG00000134490_28 (sequence is synthesized)
gcaaccacgtacttccgcggaaggcgttcacttccactttgcatgccggctgggatttgtggtccagtgtcacagggtgaagtgattcctcacgggtgaacatggagctgtctcaggccc

SEQ ID NO: 311795 - DNA, 120 bp, Artificial Sequence
  ENSG00000134490_29 (sequence is synthesized)
caaggtttatttctaagcagctactctgatattgatcacgaggtatatttaagttttttgttttgttttttcaatgccacaagtattgtcttttattatatctggttctcagttttaaaa

SEQ ID NO: 311796 - DNA, 120 bp, Artificial Sequence
  ENSG00000134490_30 (sequence is synthesized)
agttttaaaaatcggatgtggatgctgtaatggtgcggcgctcagaaagcagagcccaacgtgctgaacctgccctcctgtttgttggccactgggaggaaaaacaggcccggcagcttc

SEQ ID NO: 311797 - DNA, 120 bp, Artificial Sequence
  ENSG00000134490_31 (sequence is synthesized)
ccgagcagagccctggggcctcttgctttgtggtgtctcctgtactacaggtggtggcggggggcaggtttcacttgctgggaaaaggacaccttgctgctggggccttgttattctggg

SEQ ID NO: 311798 - DNA, 120 bp, Artificial Sequence
  ENSG00000134490_32 (sequence is synthesized)
ccagtgcaaccacgggatgacagaggaccagagggatggcacggagagtaggctccacacacagagagacattttctctttcaccagtgtacccaaggcaggatggcagtgcccagcaca

SEQ ID NO: 311799 - DNA, 82 bp, Artificial Sequence
  ENSG00000134490_33 (sequence is synthesized)
tcaccagtgtacccaaggcaggatggcagtgcccagcacacagtaggtgctcaccaggctgcagagacggggtttcaccacg

SEQ ID NO: 311800 - DNA, 120 bp, Artificial Sequence
  ENSG00000134490_34 (sequence is synthesized)
tgagccaccatgcctggtccaaaacaatgcatgttaaaaacttagagcctggcacccagcaaacaatcaaggcatctattaccatcttatcatccttgtaactttatcatctcttctgga

SEQ ID NO: 311801 - DNA, 120 bp, Artificial Sequence
  ENSG00000134490_35 (sequence is synthesized)
aatatgctccaacccagaagaatctacttcttagtctaaactttctgcgaccgtgttcctaaaatccagtgttcttttccagctatgaagtccacaacatgacctccctccaggtcctga

SEQ ID NO: 311802 - DNA, 120 bp, Artificial Sequence
  ENSG00000134504_0 (sequence is synthesized)
ggcagagagacggcaatatggcgagaatgcctggcagcggggactgtaacaccagcgcgggcggcagcgccagcgctgccgccgccgccgccgagaacaatggggagcggggcgagggcg

SEQ ID NO: 311803 - DNA, 120 bp, Artificial Sequence
  ENSG00000134504_1 (sequence is synthesized)
agcgcggcgcggggggccgcggccgccgccacagccgtccgcactactgcagcgcgggcgaggaggaggaggaagaggaggaggaggacgagatccaggaggtgcagataacgggggacg

SEQ ID NO: 311804 - DNA, 120 bp, Artificial Sequence
  ENSG00000134504_2 (sequence is synthesized)
aggaggaggaggaggacggaggtggggggctggaggaggacgaggaggaggaggaagaggaggagatggggctggactgggacgagcccctggagcccgaggactcggccggggaggagc

SEQ ID NO: 311805 - DNA, 120 bp, Artificial Sequence
  ENSG00000134504_3 (sequence is synthesized)
tggagcccgagccggtccatatgatcaatatggaccagagcgccgcgctggagcccgaggcgccgccgcgactgctggcgccccgggcccgcggtgggccgcccggggacggctccgagc

SEQ ID NO: 311806 - DNA, 120 bp, Artificial Sequence
  ENSG00000134504_4 (sequence is synthesized)
tggaccccgacgtgctgcagcgccccgagcgggcccggctgagcgagaacacccggctggccacccgctacgccgtgcgcatcttccgggagtacctgagcgagaaggcgcagagcccgg

SEQ ID NO: 311807 - DNA, 120 bp, Artificial Sequence
  ENSG00000134504_5 (sequence is synthesized)
acttcgagaccatggacaagggggcgctgtgccgcgtgctgcgctccttctatgccgaggcccgctccaaaagcggccagctctacagcaagtcgtcgctcatcagcatccgcagctccc

SEQ ID NO: 311808 - DNA, 120 bp, Artificial Sequence
  ENSG00000134504_6 (sequence is synthesized)
tcaaccgctacctcaatgagcccccgtactgccgcacgctcgacctcaccaaggaccccgagctgcgcagcgccaacctgacgctggccgcggtcatccgcaagctcgaggagcagggcg

SEQ ID NO: 311809 - DNA, 120 bp, Artificial Sequence
  ENSG00000134504_7 (sequence is synthesized)
ccgggccggtggtgcagaagcaagccatcacgcgcgccgacctgcgcaagctgtacacctccagcgtcttcagcaccaacacgcccttcgggctgctcaacaaggtctggttcgagacgt

SEQ ID NO: 311810 - DNA, 120 bp, Artificial Sequence
  ENSG00000134504_8 (sequence is synthesized)
gcatgtacttctgtacccgcggccgcgagaaccagcgtgagttggaggaggactcttttgggctggccatggacgaggacggtcgcaagttcgtctacttcaagtccctcgggccctacc

SEQ ID NO: 311811 - DNA, 120 bp, Artificial Sequence
  ENSG00000134504_9 (sequence is synthesized)
acaagtcgcgctcgtcgtcgtggagcaagaagcgcgccgagagcagcgacgaggagaacttgccccgcatgtatgagacgggcaccgagttctgcccctacgccagcttcgtcaagtacc

SEQ ID NO: 311812 - DNA, 120 bp, Artificial Sequence
  ENSG00000134504_10 (sequence is synthesized)
tgtcgaaacgcaaccctctctgcaaggcgttcttccagcggccccgggaccactgcagcgagggcgatgtgacctggtacgagaacaaagccatcggcaagaacttgctaggcactcgga

SEQ ID NO: 311813 - DNA, 120 bp, Artificial Sequence
  ENSG00000134504_11 (sequence is synthesized)
tgcagatgctctccaaggcggccaagctctccaagacctacaccaaccactgcatcggcgccgtctccatcgccacgctcaacagcatcgcgggcattggcaccaagctgggctcgcccg

SEQ ID NO: 311814 - DNA, 120 bp, Artificial Sequence
  ENSG00000134504_12 (sequence is synthesized)
ccccgcagggctgctacgccgaggctctgaacggggcggcacggcaccactcccaccacccccccacccatccctcccaccaccaccgcccccagccgccctcgctggggaacacttaca

SEQ ID NO: 311815 - DNA, 120 bp, Artificial Sequence
  ENSG00000134504_13 (sequence is synthesized)
tcctccccaaagacagccaggtcgggcccgacgtgaaatccgaggctgcgcccaagcgcgccctgtacgagtctgtgttcgggtcgggggaaatctgcggccccacttcccccaaaagac

SEQ ID NO: 311816 - DNA, 120 bp, Artificial Sequence
  ENSG00000134504_14 (sequence is synthesized)
gcacagaagcaccaattctcccacaatagtttcacctgctattgtttcccccacccaggacagtcggcccaatatgtcaagacctctgatcactagatcccctgcatctccactgaacaa

SEQ ID NO: 311817 - DNA, 120 bp, Artificial Sequence
  ENSG00000134504_15 (sequence is synthesized)
ccaaggcatccctactccagcacaactcacaaaatccaatgcgcctgtccacattgatgtgggcggccacatgtacaccagcagcctggccaccctcaccaaataccctgaatccagaat

SEQ ID NO: 311818 - DNA, 120 bp, Artificial Sequence
  ENSG00000134504_16 (sequence is synthesized)
cggaagactttttgatggtacagagcccattgttttggacagtctcaaacagcactatttcattgacagagatggacagatgttcagatatatcttgaattttctacgaacatccaaact

SEQ ID NO: 311819 - DNA, 120 bp, Artificial Sequence
  ENSG00000134504_17 (sequence is synthesized)
cctcattcctgatgatttcaaggactacactttgttatatgaagaggcaaaatattttcagcttcagcccatgttgttggagatggaaagatggaagcaggacagagaaactggtcgatt

SEQ ID NO: 311820 - DNA, 120 bp, Artificial Sequence
  ENSG00000134504_18 (sequence is synthesized)
ttcaaggccctgtgagtgcctcgtcgtgcgtgtggccccagacctcggagaaaggatcacgctaagcggtgacaaatccttgatagaagaagtatttccagagatcggcgacgtgatgtg

SEQ ID NO: 311821 - DNA, 120 bp, Artificial Sequence
  ENSG00000134504_19 (sequence is synthesized)
taactctgtcaatgcaggctggaatcacgactcgacgcacgtcatcaggtttccactaaatggctactgtcacctcaactcagtccaggtcctcgagaggttgcagcaaagaggatttga

SEQ ID NO: 311822 - DNA, 120 bp, Artificial Sequence
  ENSG00000134504_20 (sequence is synthesized)
aatcgtgggctcctgtgggggaggagtagactcgtcccagttcagcgaatacgtccttcggcgggaactgaggcggacgccccgtgtaccctccgtcatccggataaagcaagagcctct

SEQ ID NO: 311823 - DNA, 120 bp, Artificial Sequence
  ENSG00000134504_21 (sequence is synthesized)
ggactaaatggacatatttcttatgcaaaaaggaaaacacacacaaccaataactcaaacaaaaaagggacatttatgtgcagttgggacagcaaaccaagtcctggacgtaaaatcgaa

SEQ ID NO: 311824 - DNA, 120 bp, Artificial Sequence
  ENSG00000134504_22 (sequence is synthesized)
taaaagacacatttatatccaatagagaccacacctgtattcatatgggaacaattggaatagtgatatcctcaaggtgtaaaaaatatataaatatatatatatatgtcaaaaggtagg

SEQ ID NO: 311825 - DNA, 120 bp, Artificial Sequence
  ENSG00000134504_23 (sequence is synthesized)
aaatgcaaaaaagaaaaaaaaaaaaggtgacagccgcagttggtgctgtgatggccgtgaagtgtcctgggccttccgaggcctctgacaaataaacaagccatgagtggtgaggacaca

SEQ ID NO: 311826 - DNA, 120 bp, Artificial Sequence
  ENSG00000134504_24 (sequence is synthesized)
gtctccttacagtttccattgccaacaacagccatccatatttcttttttcctttgtctttctttttcctttttttttaaaaaaacaaaacaaacaaaacaccttgaatcaagtttgttt

SEQ ID NO: 311827 - DNA, 120 bp, Artificial Sequence
  ENSG00000134504_25 (sequence is synthesized)
gtatatggaggttccacgtctttctttaggcagggaccaggcaggacttcagaaaaaccctcatgagcacattgcaaagatgttagacatgaaattttaaatgtagtttgtacagaagtc

SEQ ID NO: 311828 - DNA, 120 bp, Artificial Sequence
  ENSG00000134504_26 (sequence is synthesized)
acacttttttgtccacctcacagatgtgaactttactttgttttaaaactgatcagttttgccaaggggccagaattattccttgttagaattgctccagttcaagtctgctgctttcct

SEQ ID NO: 311829 - DNA, 120 bp, Artificial Sequence
  ENSG00000134504_27 (sequence is synthesized)
acaatttttcaaattttataatgtattaaatacaataaactctgtttaaaaaataaggtctgtgtgaaacacacatgtgggggtgaggctggattaaagtgaaattttttctttttgaaa

SEQ ID NO: 311830 - DNA, 120 bp, Artificial Sequence
  ENSG00000134504_28 (sequence is synthesized)
ccaccacctgcctcaccagtagctgggactacagctcccgtcactagctttttctcctcaagcctgcactgcacaccaactgggacggagggtgcagatgaataaaggcaaatccatcac

SEQ ID NO: 311831 - DNA, 120 bp, Artificial Sequence
  ENSG00000134504_29 (sequence is synthesized)
ctggaccggcgcggacttgccccagacctacggggagcgccccaggtctttaatgacagcttaaatgtggctgttggaaaagtcgaaagggatgtggctgacgtggggcgtgtttcgctc

SEQ ID NO: 311832 - DNA, 120 bp, Artificial Sequence
  ENSG00000134504_30 (sequence is synthesized)
ctttgcaagagtcggaaagggagttgggagccgcgcggctggccccaggcccccgcgcctcgccgccagcaagtaggtgggggagccgccgccgccgccagccccatcccgctcccaagc

SEQ ID NO: 311833 - DNA, 120 bp, Artificial Sequence
  ENSG00000134504_31 (sequence is synthesized)
ctcgcccgctgcgccctggccgcgggcgccgagagggtgcggggcctcgccgtgcctcctccaccctgctcattaacctgcctgctccgctccgctccgggcggccccagacacgggttt

SEQ ID NO: 311834 - DNA, 120 bp, Artificial Sequence
  ENSG00000134504_32 (sequence is synthesized)
cccgcggcagcacccgcggcccgcccggcgcagccgccgccccgaccccccggctccggggggcaatgagggggcagtggaaggggcactgctcctcgggcattacttagagaaacgaga

SEQ ID NO: 311835 - DNA, 120 bp, Artificial Sequence
  ENSG00000134504_33 (sequence is synthesized)
ccgtcccgccctctcgccggccctccctctctcccgcccgggcccgcgcaattctccgccagagggacagtcggcccaatatgtcaagacctctgatcactagatcccctgcatctccac

SEQ ID NO: 311836 - DNA, 120 bp, Artificial Sequence
  ENSG00000134504_34 (sequence is synthesized)
cttttccagtttccgaggtgcccgcccccgcgcgcctgaggcagcgcagcccggagggcgaacgaatggcggttggcaaactttgagacagtcggcccaatatgtcaagacctctgatca

SEQ ID NO: 311837 - DNA, 120 bp, Artificial Sequence
  ENSG00000134504_35 (sequence is synthesized)
aggtgaaagacagtgaataaaagaattcatttgacaaagcctaggactattttgaatggtctcgtcctgagatatttatcaagcggggaccaacactttgcagacaatcgtaatttttcc

SEQ ID NO: 311838 - DNA, 120 bp, Artificial Sequence
  ENSG00000134504_36 (sequence is synthesized)
actcttactgttgtcacttaaccttgccctcacatggtgcctttcctccaaagagcttagaaactcactcagtgacacttctgttgggtaggtgaattatcaccctctatagcagtcatt

SEQ ID NO: 311839 - DNA, 120 bp, Artificial Sequence
  ENSG00000134504_37 (sequence is synthesized)
ccgtaagtcttgtgattgtgccaggtgctgggatgagcactggagatacagaagagacagatatagaacacgacagctgggcacggtggcacacgcctatagtcccagccactccagagg

SEQ ID NO: 311840 - DNA, 120 bp, Artificial Sequence
  ENSG00000134504_38 (sequence is synthesized)
ggaggatcacttgagcccaggagttcaggttcagcctgggcaacatagtgagacagacagacacagaacacgatggacagctctgtgttcatggaactgcattatgggagtggagtggga

SEQ ID NO: 311841 - DNA, 120 bp, Artificial Sequence
  ENSG00000134504_39 (sequence is synthesized)
gagtgggaggcaaacagtcaacataaatatattgcccaggaggtggtaagtggatttctggggcagagtatgctggcatattgaggactatcaggaaagccagtttggcttgaagaaagt

SEQ ID NO: 311842 - DNA, 120 bp, Artificial Sequence
  ENSG00000134504_40 (sequence is synthesized)
gactcagggagagagagtacccagacaggaggcccgggaaaatcagggacagatcacggagagcctcgttaggaggtggcaagtgccctaggattgtttattttggcatcttttggtttt

SEQ ID NO: 311843 - DNA, 120 bp, Artificial Sequence
  ENSG00000134504_41 (sequence is synthesized)
ggttcgtttgtgtatgtgagccaaatggaaatccattggagggttttgagcagaagggagaactgacagaactcgtattttaaagtgaacattgcgacagcagctagagaataggagaaa

SEQ ID NO: 311844 - DNA, 120 bp, Artificial Sequence
  ENSG00000134504_42 (sequence is synthesized)
caaggagaccaggcagcaagctgtggttcaagcagctgaaaagtgtccagttgtgtgtgtctggagggtagagctaataaggttttctgacgatggctgtgggttgtgagacataagccc

SEQ ID NO: 311845 - DNA, 120 bp, Artificial Sequence
  ENSG00000134504_43 (sequence is synthesized)
gggatgactaagatttttgacagaggaactgggtgagtggaactgccatttcctgagatggagaagtgtaggggagcaagagatgtgggggtggaattgagaactcagaggctaatgtgt

SEQ ID NO: 311846 - DNA, 120 bp, Artificial Sequence
  ENSG00000134504_44 (sequence is synthesized)
gctgagcaccgactctctgccctaccctgggccatggcctgagcatgtgttgtcttcttacaaccctaacaggtaagcactgttaatcctctctgtcttgctgatgggaaggcagaggca

SEQ ID NO: 311847 - DNA, 120 bp, Artificial Sequence
  ENSG00000134504_45 (sequence is synthesized)
cacctgggtctcgattccagctccgtgtgacacaaaaccatttgaagtcaatggagtgagggttctagttttttccctctttttaactggaatgggcccatgactttgttcagtatttag

SEQ ID NO: 311848 - DNA, 120 bp, Artificial Sequence
  ENSG00000134504_46 (sequence is synthesized)
tcagcagaacccttcccaaagcacagagactagaagcacccactcttctgtgctgcctcttgaggattgttccactactatttataactctttaaaatatatgaacagatgtctgagaac

SEQ ID NO: 311849 - DNA, 120 bp, Artificial Sequence
  ENSG00000134504_47 (sequence is synthesized)
agaagagcagaaaactggcagaaaatgttccctaagcatgctagcggaaggcacatgctcccaggcggcgggctggctgctgggtcgcagggttcccgaggacgagattcgcgttctcac

SEQ ID NO: 311850 - DNA, 120 bp, Artificial Sequence
  ENSG00000134504_48 (sequence is synthesized)
ctgtgcggagagcgtcccctggaggtgtgtggtgctcccgcatggccctgcacagcgttcctgagacggcctcagcagtttaagcctctttaaagcccagaaagcctgtccccttccaca

SEQ ID NO: 311851 - DNA, 120 bp, Artificial Sequence
  ENSG00000134504_49 (sequence is synthesized)
gacagaggggcagaaccattcagagccaggacaggaaggcctcggccacacctttgggccagtgaataacgatcatcaattcatgtgcttgacagtttcccacatcagatatggaaattt

SEQ ID NO: 311852 - DNA, 120 bp, Artificial Sequence
  ENSG00000134504_50 (sequence is synthesized)
tcatctggattaacgtggtcatatgacacagccatgacctacccttgcgtcctgctccaccgaccaagaaataggcaccagcctatgggcacgcagagactctgggataaggcttacgac

SEQ ID NO: 311853 - DNA, 120 bp, Artificial Sequence
  ENSG00000134504_51 (sequence is synthesized)
acccgatacctcactaagttgttgtgtgatcactgtttaaggaactttgctgtgaacgtgttgttgtttccaaagtaatggctccatcagctgtttgcattacattgaaataagcttttg

SEQ ID NO: 311854 - DNA, 120 bp, Artificial Sequence
  ENSG00000134504_52 (sequence is synthesized)
accacatccaaggtaacattggatcacattgaataattatcacatgatgcctatcggactccgaagaagagcttagcgatttcctcctgttagcatttagtgaccttaagactcaaagaa

SEQ ID NO: 311855 - DNA, 120 bp, Artificial Sequence
  ENSG00000134504_53 (sequence is synthesized)
aaatggacatcagggttaggttctctgctgttcatggcttcctcccctttggatttcctctcctaatcatggcaagggatcttttccagggtgctggtttggccaagcaagctgggatgc

SEQ ID NO: 311856 - DNA, 120 bp, Artificial Sequence
  ENSG00000134504_54 (sequence is synthesized)
ctcttgctgagggctgcattcctgcctctgctggggaatccatggagggagctgttcttcgtctttgtatttacctgccaccaaagcacatcttgattttgaatttagggattgttttct

SEQ ID NO: 311857 - DNA, 120 bp, Artificial Sequence
  ENSG00000134504_55 (sequence is synthesized)
tcctgtccttatgctgacaggtatgcatatgcattgtgaatttacctacagaaatagagcactgctgggtagaatgttaattttgttcttataaggacttgtgtatgtttttttaatttg

SEQ ID NO: 311858 - DNA, 120 bp, Artificial Sequence
  ENSG00000134504_56 (sequence is synthesized)
ccagcacttgaggttttaattaatttttagaaaacatactctcttgctttcccatctcatctagtaagctgttttgcaacatagcagactatattctatattgaagtaggcaactaaaaa

SEQ ID NO: 311859 - DNA, 120 bp, Artificial Sequence
  ENSG00000134504_57 (sequence is synthesized)
ggcaactaaaaaataatactttttaaaaaagtaaggattcactttacattgactacatttcagttcattccaataaaagtttttttgaggtgggtttttttgttttgtttttttttttta

SEQ ID NO: 311860 - DNA, 120 bp, Artificial Sequence
  ENSG00000134504_58 (sequence is synthesized)
atcactttgcctttaaggtggtgtggaagtaatttaattatattcagaactcgggcaggaaacatttgcaagtctaatatttgttggattcctaaagaaacagaatgctccagatcagtt

SEQ ID NO: 311861 - DNA, 120 bp, Artificial Sequence
  ENSG00000134504_59 (sequence is synthesized)
tcctgtatttttgtctatctaatctaagagtcacaggtactgtttcctgcatttaacagtgtcagacatgtagtgccaaacccaggaatcttgctggcgttaggtttttgatttcaaaat

SEQ ID NO: 311862 - DNA, 120 bp, Artificial Sequence
  ENSG00000134504_60 (sequence is synthesized)
taaggaacagattctatggcttacatttgtataagaagtttagaatatctttatttttcttacattttctaatatgtaatcattgtgctggttcttgtctccttgaatgaatgcagggca

SEQ ID NO: 311863 - DNA, 120 bp, Artificial Sequence
  ENSG00000134504_61 (sequence is synthesized)
ataaatctgtttcagatgttacaaacttgaaaacctgtagataatcctctagtgtcttcagtaatccctttgttctgctattgaaattacatcaatcttccaggccaaaacatatatatt

SEQ ID NO: 311864 - DNA, 120 bp, Artificial Sequence
  ENSG00000134504_62 (sequence is synthesized)
aactcggtattaggaaaacttgaacaaaggcggagttgagagtacaaatgaatcactgactaagtaaactctgccatcactgtcctttccagattctttatcatctcataggatgtattt

SEQ ID NO: 311865 - DNA, 120 bp, Artificial Sequence
  ENSG00000134504_63 (sequence is synthesized)
tagtgataaatgagctttgaaatgtgaaccctcatttttgacagagagggcagcattgcatatacaaaaacaggagatttgaggccaaacagacctgagttggaaacccagtcccatcac

SEQ ID NO: 311866 - DNA, 120 bp, Artificial Sequence
  ENSG00000134504_64 (sequence is synthesized)
tgactagccatgaacctcagttttctcatttataaaatgggcctaacaccatcgagtgttgtagctggtgtgtgtaaagcaagcatgaaaggcacattttaggcattagaaatgcttgct

SEQ ID NO: 311867 - DNA, 120 bp, Artificial Sequence
  ENSG00000134504_65 (sequence is synthesized)
tcctctctcctgcccattaatccagggtcttcctttgagaggagcagctcacagggacatgggtgctggatgagatgaaccagagtgcgcataatctcaaactttggggtgtttatgtag

SEQ ID NO: 311868 - DNA, 83 bp, Artificial Sequence
  ENSG00000134504_66 (sequence is synthesized)
gacttggagagagactttgtgcttcaatgtttcagagatgaggtcttgctggccttgaactcctgcacccaagaaatctatgt

SEQ ID NO: 311869 - DNA, 120 bp, Artificial Sequence
  ENSG00000134504_67 (sequence is synthesized)
aggtatgtaccactgtgcccagctcaacaaatatttattgagagtataccaggggacacaatgttctaggtactggggatataacggtgaacaaaggccaggcatggtggctcatgcctg

SEQ ID NO: 311870 - DNA, 120 bp, Artificial Sequence
  ENSG00000134504_68 (sequence is synthesized)
ctttgggaggctgaggcgggaggatctcttgagtccagaagtttgagatgagcctgggcaacatagtgccatctcatctatctaaaagatttaaaaattagccaggcatgatggtgtgtg

SEQ ID NO: 311871 - DNA, 85 bp, Artificial Sequence
  ENSG00000134504_69 (sequence is synthesized)
atagtgagccatgatcataccactgcactatagcctgggaaacagaatgagaccccatctctaaaaacaaaaacatgtacaaaac

SEQ ID NO: 311872 - DNA, 120 bp, Artificial Sequence
  ENSG00000134504_70 (sequence is synthesized)
aatgagaccccatctctaaaaacaaaaacatgtacaaaacagacacaggtctgcacttatggagctgatatcctagtggaatatttagagaagtcagatgtattatactcaaattgtttt

SEQ ID NO: 311873 - DNA, 120 bp, Artificial Sequence
  ENSG00000134508_0 (sequence is synthesized)
gcccagccgccgcccgaacccccccggaagccgcgcatggacccgcggcgccgccaggctgccctctccttcctcaccaacatctcgctggacggccggctgccgccgcaggacgcggag

SEQ ID NO: 311874 - DNA, 80 bp, Artificial Sequence
  ENSG00000134508_1 (sequence is synthesized)
ccaagccgggcgccggcggcgcctgcggcgcgaggactcggttcagcttgctcgccgctgccgagcggggcggctgcatc

SEQ ID NO: 311875 - DNA, 120 bp, Artificial Sequence
  ENSG00000134508_2 (sequence is synthesized)
catcgcgctcgccgcgccgggcacgccggctgcggggttagccgctgggtccggcccctgcctcccacagccctcgtcgctgccgcccttgattcctggcggccatgcgaccgtgtccgg

SEQ ID NO: 311876 - DNA, 120 bp, Artificial Sequence
  ENSG00000134508_3 (sequence is synthesized)
gggcgtcgggggagcagtggcagccgccccggccggcgcctctcgccgcctgtgcccaactgcagctgctcgacgggtccggggccgccgggcaggaggagttggaggaggacgatgcct

SEQ ID NO: 311877 - DNA, 120 bp, Artificial Sequence
  ENSG00000134508_4 (sequence is synthesized)
ggggccgccgggcaggaggagttggaggaggacgatgcctttatcagcgtgcaggtgccggcggccgcctttttgggctccgggacccccgggagtgggagcggcagtcggggacgcctc

SEQ ID NO: 311878 - DNA, 120 bp, Artificial Sequence
  ENSG00000134508_5 (sequence is synthesized)
aactcgttcactcagggaatcctgcccatcgccttctccaggccgacttcgcagaactactgctccctggagcagccaggccagggcggcagcaccagcgccttcgagcagctgcagagg

SEQ ID NO: 311879 - DNA, 120 bp, Artificial Sequence
  ENSG00000134508_6 (sequence is synthesized)
tcccgacggcgcctcatctcccagagatcttccttggagaccctggaagatattgaggagaacgcccctctccggagatgtcgaactctctcaggttcacccagaccaaagaattttaag

SEQ ID NO: 311880 - DNA, 120 bp, Artificial Sequence
  ENSG00000134508_7 (sequence is synthesized)
aagattcattttatcaagaacatgcggcaacacgataccaggaatggcagaatagtccttatcagtggcagaagatccttctgtagtatattttcagtgctgccgtatcgcgacagtacc

SEQ ID NO: 311881 - DNA, 120 bp, Artificial Sequence
  ENSG00000134508_8 (sequence is synthesized)
caagtcggggacttgaagttggacggaggaagacaatcaactggtgcagtgagtttgaaagagatcattggtctggaaggtgtggagctgggtgctgatgggaagactgtttcctatacc

SEQ ID NO: 311882 - DNA, 120 bp, Artificial Sequence
  ENSG00000134508_9 (sequence is synthesized)
caatttctgttacccacaaatgcctttggagcccggagaaataccatagactccacctcctctttctcccagttccgtaacctgagccaccgcagcctctccataggccgggcaagcggc

SEQ ID NO: 311883 - DNA, 120 bp, Artificial Sequence
  ENSG00000134508_10 (sequence is synthesized)
acccaggggagcctcgacacaggtagtgacctgggagactttatggactatgacccaaatctcttggatgacccccagtggccttgtggcaaacacaaacgcgttctgatcttcccttcc

SEQ ID NO: 311884 - DNA, 120 bp, Artificial Sequence
  ENSG00000134508_11 (sequence is synthesized)
tacatgacaacagtgattgactacgtgaagccctcggatctcaagaaggacatgaacgagaccttcaaggagaagtttcctcacattaagctgacactcagcaaaattaggagtctgaaa

SEQ ID NO: 311885 - DNA, 120 bp, Artificial Sequence
  ENSG00000134508_12 (sequence is synthesized)
cgagagatgcggaagcttgcgcaggaggactgtggccttgaggagcccacggtggccatggccttcgtctactttgaaaagctcgccctcaaggggaaactcaacaaacagaaccggaag

SEQ ID NO: 311886 - DNA, 120 bp, Artificial Sequence
  ENSG00000134508_13 (sequence is synthesized)
ctgtgtgctggggcatgtgtgctgttagcagccaaaattggaagtgacctcaaaaaacacgaagtcaagcatttaattgacaaactggaagagaagttccggctgaacaggcgagaactg

SEQ ID NO: 311887 - DNA, 120 bp, Artificial Sequence
  ENSG00000134508_14 (sequence is synthesized)
attgcctttgaattcccggtgttagtggccttggaattcgccctccacttgcccgagcacgaagtcatgccccactacagacggctggtccagagttcctagcactggccccgaggacag

SEQ ID NO: 311888 - DNA, 120 bp, Artificial Sequence
  ENSG00000134508_15 (sequence is synthesized)
ccaagggccatttcttctcagcttggtggagcagcacttacttactactggaaatgaaaaaaagtagaactcagaataccagacttttcttcctctcgacatagtttggggagaagcagt

SEQ ID NO: 311889 - DNA, 120 bp, Artificial Sequence
  ENSG00000134508_16 (sequence is synthesized)
actagaaactttccaaggagtcttgggtgtgtagccaagaggagccatgagctatggactcctcaagcacgggaagaggaggtgtgtgctgagaacagagaggccctgccctctgtccac

SEQ ID NO: 311890 - DNA, 120 bp, Artificial Sequence
  ENSG00000134508_17 (sequence is synthesized)
tagcgagaatccctagctgccccagcccagtctttctccccggcattcacaaactttgcaagcgtggtccagggccttctccagatctgttccaacttggagtgtgaagggcttgagcat

SEQ ID NO: 311891 - DNA, 120 bp, Artificial Sequence
  ENSG00000134508_18 (sequence is synthesized)
acgggggaagagagtctgcagaagttgggggaaaacttttaaaagataccctcattgtgtcaaagagtgtgccaatctatttttgtatcagcattggaagtgcactttcccctggggcgt

SEQ ID NO: 311892 - DNA, 120 bp, Artificial Sequence
  ENSG00000134508_19 (sequence is synthesized)
gcccttagcctggggccatgggtcaggctgaccttcaacaattatttctagatgatttctggataagaattgctctctcggtaccagacagtttgacatcctccacccttagaaaatgac

SEQ ID NO: 311893 - DNA, 120 bp, Artificial Sequence
  ENSG00000134508_20 (sequence is synthesized)
tgacattgttttgttactgctcctacccaccaaggggataaagaaggcgagttctgagtgttggatgagtcagtcgcgtggaaggacgtggagcgtggcgctctgtaacttcctgccgtc

SEQ ID NO: 311894 - DNA, 120 bp, Artificial Sequence
  ENSG00000134508_21 (sequence is synthesized)
tgccaccccgccacgtgtatttaaccctcgcactttctccactgtggagatggctggggcggcgccccacagtgtgtattcctgtcctctatgttagagtgcatcagaagcacatttact

SEQ ID NO: 311895 - DNA, 120 bp, Artificial Sequence
  ENSG00000134508_22 (sequence is synthesized)
gtgctatctatatcgctatataaaagtgttttataaaaacccagaataggagcacgacgcatgattggtgtttgaggcgtttgccagctgggacaaactgcgtttggagctgtggttaag

SEQ ID NO: 311896 - DNA, 120 bp, Artificial Sequence
  ENSG00000134508_23 (sequence is synthesized)
ctgactaaggaggcggtggctctttcttaacattcccacgtgcccagggctgttcatgcaagattttaatggtgacttgtcctggcttactgggacagtctgtatgaggcatgtcaccac

SEQ ID NO: 311897 - DNA, 120 bp, Artificial Sequence
  ENSG00000134508_24 (sequence is synthesized)
actgtcgcctcatagctgcaagagagaggcaccagctgaagttcccctgactgaagagagcctgtggccatgtaaaaagagaattaaactcttgttgctttttgtatacctgtatgcgtt

SEQ ID NO: 311898 - DNA, 120 bp, Artificial Sequence
  ENSG00000134508_25 (sequence is synthesized)
tgtgtagacgtgtgtctcaccagtcacctttgccctgcattgctgatccccttgcgcacactgattctagtgaggtcacagattcggagcttcacacaccagcccagagaaagggcgatg

SEQ ID NO: 311899 - DNA, 120 bp, Artificial Sequence
  ENSG00000134508_26 (sequence is synthesized)
gaaccgaaccgagggtctgcagctttcgttagcagagctgtcagattcttgacagtcttggaggatggagaaattcaagcagcagctggtgagggccaaaacagaatacttggcttcttc

SEQ ID NO: 311900 - DNA, 120 bp, Artificial Sequence
  ENSG00000134508_27 (sequence is synthesized)
agaatcttagattgcactgagtttagtcctaaatattttgctaacaaatttccttggccagaatcagttgtaagacagtgatttgggtggtggggggagggaggagggagaggatatgat

SEQ ID NO: 311901 - DNA, 120 bp, Artificial Sequence
  ENSG00000134508_28 (sequence is synthesized)
taatgtggtctctttggctgatcgaaagctagatcaactggtacttagggcacttgctgtttataaagcaaaattgagaaaatattcaaggtgcctccatcgcctgaactacaaaatgcc

SEQ ID NO: 311902 - DNA, 120 bp, Artificial Sequence
  ENSG00000134508_29 (sequence is synthesized)
cttggccttcctcacatggggtctgtcaccttgcatctctgataagccatccaccttcctggtcagtgcctacagggggagagcctttctgagaagcaggtcctgtggtatctgagaatg

SEQ ID NO: 311903 - DNA, 120 bp, Artificial Sequence
  ENSG00000134508_30 (sequence is synthesized)
gtctagagagctccccactgcccatctgcccccgaatttcctgccaagctctggggagtggggtggggggagggacgtccgatggatgacaggccgccagcccagacgtggggagagaag

SEQ ID NO: 311904 - DNA, 120 bp, Artificial Sequence
  ENSG00000134508_31 (sequence is synthesized)
cctgagtcctttcctgtgtgataaaatcaggctaatttacttggatttggggtgatttgtttggtttttagcatttatgaggtgagcccatgaagttagtggtccattactttttaaaga

SEQ ID NO: 311905 - DNA, 120 bp, Artificial Sequence
  ENSG00000134508_32 (sequence is synthesized)
tgcattttcattttaaactgtctcctggcctgtggatttgtggaatggacagttttgtgggttttaatttatttgtgaggagtcggggctgagaaggcattttatcaggaggtctccttt

SEQ ID NO: 311906 - DNA, 120 bp, Artificial Sequence
  ENSG00000134508_33 (sequence is synthesized)
tgcacgtccatgacatgagcttttcggaggcaaaggaagtggaggagggtgagagatgcaggtcactgccagaggcacctctgtgacacggaacattccagacacgtcgcagccttgggc

SEQ ID NO: 311907 - DNA, 120 bp, Artificial Sequence
  ENSG00000134508_34 (sequence is synthesized)
ttcggcgaggaggaagtctgagcctgtgaagcgagaaggccaggcagtagactggctctgaggttttgccctttgacctcctccacagagggcagcttcagccccttgtaagccctgccc

SEQ ID NO: 311908 - DNA, 120 bp, Artificial Sequence
  ENSG00000134508_35 (sequence is synthesized)
cctctcaggactgccctgaggcctctccagtcctccccacactcagagatctgtggggaagctccgcccagccacactccttgggataatactagccggttctgcctgattccttttccc

SEQ ID NO: 311909 - DNA, 120 bp, Artificial Sequence
  ENSG00000134508_36 (sequence is synthesized)
ccggagccagcctagggggcccgggactcctctagtgagccttgactgttaggtaagagacaggaagcagacaagccaagaggttgctgcagctgcccccaggaggaaacgggcagcagg

SEQ ID NO: 311910 - DNA, 120 bp, Artificial Sequence
  ENSG00000134508_37 (sequence is synthesized)
gagtgtggcccagcccccactgtacccctccaggggcccgagcccttgccagcccaatgacaccttgaagtcaccacttttcctttcttgcccgctaataaaacctatttaaacaggaaa

SEQ ID NO: 311911 - DNA, 120 bp, Artificial Sequence
  ENSG00000134508_38 (sequence is synthesized)
ttcataccaaatgcaaatgggttttgttttccttggcattttgttgttccgatcacagatttccctgccagggtgtctgtggttatcagctgcaggctcagcttggggcggccgcttcac

SEQ ID NO: 311912 - DNA, 120 bp, Artificial Sequence
  ENSG00000134508_39 (sequence is synthesized)
acaagccactctgtaccacgtgccctaccttagtgacgggagtaaggagcttccttcccctccatgtcattccttcctgttcccttcattccccaacagcaaataaaactgttgaatgct

SEQ ID NO: 311913 - DNA, 120 bp, Artificial Sequence
  ENSG00000134508_40 (sequence is synthesized)
ggccatttttcttcctggtgtttgaatgactcataaaatgagtttggagtggtctgaagcctctgcctccttccttgaatgctttctaagaggggctgccatgcaagaatatatgctgat

SEQ ID NO: 311914 - DNA, 120 bp, Artificial Sequence
  ENSG00000134508_41 (sequence is synthesized)
aagaacatgcggcaacacgataccaggaatggcagctcctgagtctccttgggacccctgatgagcacagcccaggctctcagtctgcgggccagatccacggctgatttgctcttctga

SEQ ID NO: 311915 - DNA, 120 bp, Artificial Sequence
  ENSG00000134508_42 (sequence is synthesized)
ccctgaaaacgctggcatggaggctcccgcgtccccagacctgctgaccgtgtgatagaggccccagtattgaggaggatttggacttctcatctcagcaaggaccagagtgcagctcaa

SEQ ID NO: 311916 - DNA, 120 bp, Artificial Sequence
  ENSG00000134508_43 (sequence is synthesized)
agaaacacgatccccaggcccagcctcagacccactgggtcagaagctctggggcggggcccagcaatctatttcaacaaggccccaacttgcgcctgtcgcccgttcaggcttgggagc

SEQ ID NO: 311917 - DNA, 120 bp, Artificial Sequence
  ENSG00000134508_44 (sequence is synthesized)
agccactgtggacaaagccttgtgtacctccagctttactggaccttctggaagatgtgaacagtgtctagtgctccagaaaagattttatttattctagcacaaatggacagaagttat

SEQ ID NO: 311918 - DNA, 120 bp, Artificial Sequence
  ENSG00000134508_45 (sequence is synthesized)
gcccctctccggaggaaaatccatgaataacgttgagaagcccctggagtttcgagaggctactagaagccatggtccttggaacaacgtggccactgtgagccgaaggaaaccgggtga

SEQ ID NO: 311919 - DNA, 120 bp, Artificial Sequence
  ENSG00000134508_46 (sequence is synthesized)
ctcggggtaccggctacagagggctctcccctcttcaggaattcccaggcagggctgttgagcctcgggatgcagtgtccttgagtctcgaggtgtcgaggagaggctggaggaggacgt

SEQ ID NO: 311920 - DNA, 120 bp, Artificial Sequence
  ENSG00000134508_47 (sequence is synthesized)
tacataatgtggccatcctttccattttcaagaagttgccttgctttgatactgcaaattcagtatttgtacactggaatgataaaaagatgttccactttcttttcagccagaaagctt

SEQ ID NO: 311921 - DNA, 120 bp, Artificial Sequence
  ENSG00000134508_48 (sequence is synthesized)
cctctccggaggtaattttctgtttcatttatgtatatgtaaacagtacaccatgacagccagagattgattttggttttttaacttcttgatctatagaattaaatttaaaaataacca

SEQ ID NO: 311922 - DNA, 120 bp, Artificial Sequence
  ENSG00000134508_49 (sequence is synthesized)
cccaatttgcatggagatttgggtgcttttctttccgtggcgcctcttcattttgtaaactgctgcttaatggaacaagagcccagcattgtcccggcctatcccccaggtgcagtcaca

SEQ ID NO: 311923 - DNA, 120 bp, Artificial Sequence
  ENSG00000134508_50 (sequence is synthesized)
cagtaggtacagtcctggacttcattctcagcaggaggggcaacaagaactcctcaggaggtaaccacgatgtcgctccctggctaggtgctgggaagcccaattaggatagttgtgagt

SEQ ID NO: 311924 - DNA, 120 bp, Artificial Sequence
  ENSG00000134508_51 (sequence is synthesized)
acctataaatacggacacccggccccggagcccgcgagccagcggccaggcgaccggcgggcggccagccagcgagccgaactagccgagctaggccgacttcgcagaactactgctccc

SEQ ID NO: 311925 - DNA, 120 bp, Artificial Sequence
  ENSG00000134516_0 (sequence is synthesized)
agccaccccctgacggcttccccacgggaggacgcgaggccccggcccagccatggccccctggcgcaaagctgacaaggagcggcacggcgtggccatatacaacttccaaggcagcgg

SEQ ID NO: 311926 - DNA, 120 bp, Artificial Sequence
  ENSG00000134516_1 (sequence is synthesized)
agccccccagctctccctgcagatcggcgatgtggtgcgaatacaggagacgtgtggagactggtataggggatacctcataaagcacaaaatgttacagggcatttttcctaagtcatt

SEQ ID NO: 311927 - DNA, 120 bp, Artificial Sequence
  ENSG00000134516_2 (sequence is synthesized)
tatccacatcaaggaagtgacagttgagaaaagaagaaatactgagaacatcattcctgcagaaattcctctggcacaagaagtgacaacgacactttgggaatggggaagcatctggaa

SEQ ID NO: 311928 - DNA, 120 bp, Artificial Sequence
  ENSG00000134516_3 (sequence is synthesized)
acaactctatgtggccagcaaaaaggagcgttttctccaggtgcagtccatgatgtacgatctgatggagtggaggtcccagcttctctcaggaaccttacccaaggatgagctgaagga

SEQ ID NO: 311929 - DNA, 120 bp, Artificial Sequence
  ENSG00000134516_4 (sequence is synthesized)
actgaagcagaaagtcacgtccaaaattgactatggcaacaaaatccttgagcttgatttgattgtcagagatgaagacggaaatatcttggaccctgataataccagtgtcatcagctt

SEQ ID NO: 311930 - DNA, 120 bp, Artificial Sequence
  ENSG00000134516_5 (sequence is synthesized)
gttccatgcacatgaggaagcaactgataaaatcacagagcgtatcaaagaagaaatgtcaaaagaccagccagattatgcaatgtattcccggatctcctcatcccccacccatagcct

SEQ ID NO: 311931 - DNA, 120 bp, Artificial Sequence
  ENSG00000134516_6 (sequence is synthesized)
ctatgtgtttgtgagaaactttgtgtgcagaattggggaagatgctgagctcttcatgtctctctacgaccccaacaagcaaacggtcataagtgagaactacctagtgcgatggggcag

SEQ ID NO: 311932 - DNA, 120 bp, Artificial Sequence
  ENSG00000134516_7 (sequence is synthesized)
ccggggcttccctaaggagattgagatgctcaacaatctgaaggtggtcttcacggatcttggaaacaaagacctcaacagggataaaatttacttgatttgtcaaatagtccgggtcgg

SEQ ID NO: 311933 - DNA, 120 bp, Artificial Sequence
  ENSG00000134516_8 (sequence is synthesized)
caagatggatcttaaggatactggtgcaaagaagtgcacgcagggactgaggaggccctttggggtggcagttatggatataacagacatcatcaaggggaaagcagagagtgatgaaga

SEQ ID NO: 311934 - DNA, 120 bp, Artificial Sequence
  ENSG00000134516_9 (sequence is synthesized)
aaagcagcacttcattccttttcacccggttacagctgagaatgacttcctacacagcctgctgggcaaagtcatagcctccaagggggacagtggagggcaaggcctctgggtgaccat

SEQ ID NO: 311935 - DNA, 120 bp, Artificial Sequence
  ENSG00000134516_10 (sequence is synthesized)
gaagatgctggtgggtgacatcattcagattcgcaaggactatccacacctggtggacaggaccaccgtggtggccaggaagctgggattcccagagatcatcatgccaggggatgtcag

SEQ ID NO: 311936 - DNA, 120 bp, Artificial Sequence
  ENSG00000134516_11 (sequence is synthesized)
gaacgacatctacattactctcttacaaggtgactttgacaagtacaacaagaccacacagaggaatgtggaagtcatcatgtgtgtgtgcgcggaggatggcaaaacgctgcctaatgc

SEQ ID NO: 311937 - DNA, 120 bp, Artificial Sequence
  ENSG00000134516_12 (sequence is synthesized)
aatttgcgtgggagcaggggacaagcccatgaatgagtatcgctccgttgtgtactatcaagtcaaacagccacgctggatggaaacagtcaaggtggctgtccctattgaagacatgca

SEQ ID NO: 311938 - DNA, 120 bp, Artificial Sequence
  ENSG00000134516_13 (sequence is synthesized)
gaggatccatctgcgattcatgtttcgacatcggtcatctctggaatctaaagataaaggagaaaagaactttgccatgtcctatgtgaagctgatgaaagaagatgggactactctaca

SEQ ID NO: 311939 - DNA, 120 bp, Artificial Sequence
  ENSG00000134516_14 (sequence is synthesized)
cgatggattccatgacttagttgtcctcaagggggacagcaagaagatggaggatgccagcgcatacctgacccttccttcttatcgacaccatgtggaaaacaagggggccacgctgag

SEQ ID NO: 311940 - DNA, 120 bp, Artificial Sequence
  ENSG00000134516_15 (sequence is synthesized)
caggagctccagcagtgttggggggctttctgtcagctcccgggatgtgttctccatttccaccctggtgtgctccacaaagctcactcagaatgtgggcttgctgggtttgctgaagtg

SEQ ID NO: 311941 - DNA, 120 bp, Artificial Sequence
  ENSG00000134516_16 (sequence is synthesized)
gcgtatgaagcctcaactgctacaggagaatttagaaaagttgaagattgtggatggagaggaagtggtgaagtttctccaggatactctggatgccctcttcaacatcatgatggagca

SEQ ID NO: 311942 - DNA, 120 bp, Artificial Sequence
  ENSG00000134516_17 (sequence is synthesized)
ttctcaaagtgatgaatatgacatcctcgtctttgatgccttgatttacataataggactcattgcagaccggaaatttcagcatttcaacaccgttctggaggcttacatccaacagca

SEQ ID NO: 311943 - DNA, 120 bp, Artificial Sequence
  ENSG00000134516_18 (sequence is synthesized)
tttcagtgcgaccttggcttacaagaaattgatgacagtgctgaagacttacttggatacctccagcagaggggagcaatgtgagccaatcctaagaacgctgaaggctttggaatatgt

SEQ ID NO: 311944 - DNA, 120 bp, Artificial Sequence
  ENSG00000134516_19 (sequence is synthesized)
gttcaagttcattgttcggtcgaggacattattttcacagctttatgaaggcaaagaacagatggagtttgaagaatccatgagacggctctttgaatccatcaacaatctgatgaaaag

SEQ ID NO: 311945 - DNA, 120 bp, Artificial Sequence
  ENSG00000134516_20 (sequence is synthesized)
tcaatacaaaactaccatccttttgcaggtggcggctttgaaatacatcccatctgtcctgcatgatgtagaaatggtctttgatgcgaagttactcagccaactcctgtatgagttcta

SEQ ID NO: 311946 - DNA, 120 bp, Artificial Sequence
  ENSG00000134516_21 (sequence is synthesized)
cacctgcatccctcctgtgaaactccagaagcagaaagtacagtctatgaatgagatagtccagagcaacctctttaaaaagcaagaatgccgggacattctgcttcctgtcatcaccaa

SEQ ID NO: 311947 - DNA, 120 bp, Artificial Sequence
  ENSG00000134516_22 (sequence is synthesized)
agagctgaaggagctgctggagcagaaggatgacatgcaacaccaggtcctggagaggaagtactgcgttgaattgctcaacagcatcttggaagtccttagctaccaggatgcggcctt

SEQ ID NO: 311948 - DNA, 120 bp, Artificial Sequence
  ENSG00000134516_23 (sequence is synthesized)
cacctaccaccatatccaggagatcatggtccagctgctgcggacagtgaaccggacagtcatcaccatgggccgggatcacattctgattagtcactttgtggcatgtatgacagccat

SEQ ID NO: 311949 - DNA, 120 bp, Artificial Sequence
  ENSG00000134516_24 (sequence is synthesized)
cttaaaccagatgggtgaccagcactactccttctacattgagaccttccagaccagctctgaacttgtggacttcttgatggagaccttcatcatgttcaaggacctcattggaaagaa

SEQ ID NO: 311950 - DNA, 120 bp, Artificial Sequence
  ENSG00000134516_25 (sequence is synthesized)
gtttgcagaaaccatgaaccagaagttcctagaacacacgaactttgagttccagctgtggaacaactattttcatctggcagtggcttttatcacccaggattctctgcagctggagca

SEQ ID NO: 311951 - DNA, 120 bp, Artificial Sequence
  ENSG00000134516_26 (sequence is synthesized)
gttctcacacgccaaatacaacaaaatcctgaataagtatggggacatgagacggctaattggcttctccatccgtgatatgtggtacaagcttggtcagaacaaaatctgcttcatccc

SEQ ID NO: 311952 - DNA, 120 bp, Artificial Sequence
  ENSG00000134516_27 (sequence is synthesized)
aggcatggtaggacctatattagagatgacacttatccctgaggctgagctccggaaagccaccataccaatcttcttcgacatgatgctgtgtgaatatcaaagaagtggggatttcaa

SEQ ID NO: 311953 - DNA, 120 bp, Artificial Sequence
  ENSG00000134516_28 (sequence is synthesized)
aaagtttgaaaacgaaatcatcctgaagctggaccacgaggtagaagggggccgaggcgacgagcagtacatgcagctcctggagtcaatcctgatggaatgtgctgcagagcacccaac

SEQ ID NO: 311954 - DNA, 120 bp, Artificial Sequence
  ENSG00000134516_29 (sequence is synthesized)
cattgccaagtcggtggagaacttcgtgaacctggtcaaaggcctcctggagaagctgctggattaccggggtgtgatgacagatgagagcaaagacaaccgcatgagctgcaccgtgaa

SEQ ID NO: 311955 - DNA, 120 bp, Artificial Sequence
  ENSG00000134516_30 (sequence is synthesized)
cctgctgaatttctacaaagataacaacagggaggagatgtacataaggtacctgtacaaactccgcgatcttcacctggactgtgacaattacacagaggctgcctacacgctccttct

SEQ ID NO: 311956 - DNA, 120 bp, Artificial Sequence
  ENSG00000134516_31 (sequence is synthesized)
ccacacctggcttctcaagtggtcggatgagcagtgtgcatcacaggtcatgcagacaggccagcagcacccccagacacaccggcagctgaaggagacgctctacgagaccatcatagg

SEQ ID NO: 311957 - DNA, 120 bp, Artificial Sequence
  ENSG00000134516_32 (sequence is synthesized)
ctactttgacaaaggaaagatgtgggaagaggccataagtctgtgcaaggagctggcggaacagtacgagatggagatctttgactatgagctgctcagccagaacctgatccagcaggc

SEQ ID NO: 311958 - DNA, 120 bp, Artificial Sequence
  ENSG00000134516_33 (sequence is synthesized)
aaaattctatgaaagcatcatgaaaatcctcaggcccaaaccagactactttgctgttggatactacggccagggattcccctccttcctgcggaacaaagtgttcatctaccgcgggaa

SEQ ID NO: 311959 - DNA, 120 bp, Artificial Sequence
  ENSG00000134516_34 (sequence is synthesized)
ggaatatgagcgaagagaagatttccagatgcagctgatgacccagttccccaatgcagagaagatgaacaccacctctgccccgggagatgatgtgaagaatgccccaggccagtatat

SEQ ID NO: 311960 - DNA, 120 bp, Artificial Sequence
  ENSG00000134516_35 (sequence is synthesized)
ccagtgcttcactgtccagcctgtcttggatgaacatcccaggttcaagaataagccagtgcctgaccagattataaacttctacaaatccaactacgtgcaaaggttccactactcccg

SEQ ID NO: 311961 - DNA, 120 bp, Artificial Sequence
  ENSG00000134516_36 (sequence is synthesized)
gcccgtgcgcagggggaccgtagacccagagaatgagtttgcttccatgtggattgagagaacctccttcgtgactgcatacaagctgccggggatcctgcgctggtttgaggtggtgca

SEQ ID NO: 311962 - DNA, 120 bp, Artificial Sequence
  ENSG00000134516_37 (sequence is synthesized)
catgtcgcagaccacaattagtcctctggagaatgccatagaaaccatgtccacggccaatgagaagatcctgatgatgataaaccagtaccagagtgatgagaccctccccatcaaccc

SEQ ID NO: 311963 - DNA, 120 bp, Artificial Sequence
  ENSG00000134516_38 (sequence is synthesized)
actctccatgctcctgaacgggattgtggaccctgctgtcatgggaggcttcgccaagtatgagaaggccttcttcactgaagagtatgtcagggaccaccctgaggaccaggacaagct

SEQ ID NO: 311964 - DNA, 120 bp, Artificial Sequence
  ENSG00000134516_39 (sequence is synthesized)
gacccacctcaaggacctgattgcatggcagatccccttcttgggagctgggattaagatccatgagaaaagggtgtcagataacttgcgacccttccatgaccggatggaggaatgttt

SEQ ID NO: 311965 - DNA, 120 bp, Artificial Sequence
  ENSG00000134516_40 (sequence is synthesized)
caagaacctgaaaatgaaggtggagaaggagtacggtgtccgagagatgcctgactttgacgacaggagagtgggccgtcccaggtctatgctgcgctcatacagacagatgtccatcat

SEQ ID NO: 311966 - DNA, 120 bp, Artificial Sequence
  ENSG00000134516_41 (sequence is synthesized)
ctctctggcttccatgaattctgactgcagcacccccagcaagcctacctcagagagctttgacctggaattagcatcacccaagacgccgagagtggagcaggaggaaccgatctcccc

SEQ ID NO: 311967 - DNA, 120 bp, Artificial Sequence
  ENSG00000134516_42 (sequence is synthesized)
ggggagcaccctgcctgaggtcaagctgcggaggtccaagaagaggacaaagagaagcagcgtagtttttgcggatgagaaagcagctgcagagtcggacctgaagcggctttccaggaa

SEQ ID NO: 311968 - DNA, 120 bp, Artificial Sequence
  ENSG00000134516_43 (sequence is synthesized)
gcatgagttcatgagtgacaccaacctctcggagcatgcggccatccccctcaaggcgtctgtcctctctcaaatgagctttgccagccagtccatgcctaccatcccagccctggcgct

SEQ ID NO: 311969 - DNA, 120 bp, Artificial Sequence
  ENSG00000134516_44 (sequence is synthesized)
ctcagtggcaggcatccctgggttggatgaggccaacacatctccccgcctcagccagaccttcctccaactctcagatggtgacaagaagacactcacacggaagaaggtcaatcagtt

SEQ ID NO: 311970 - DNA, 120 bp, Artificial Sequence
  ENSG00000134516_45 (sequence is synthesized)
cttcaagacaatgctggccagcaaatcggctgaagaaggcaaacagatcccagactcgctgtccacggacctgtgagctgctgctgactagggctgcatgggagagccagggaggggagt

SEQ ID NO: 311971 - DNA, 120 bp, Artificial Sequence
  ENSG00000134516_46 (sequence is synthesized)
ttctggaagaggaaagccatgcgtggaacatcgaagcctcagagagtgggagactgtccccatcagttgtccttacttagaggagacagagaggccaatcaggtcccagagcttgaatgc

SEQ ID NO: 311972 - DNA, 120 bp, Artificial Sequence
  ENSG00000134516_47 (sequence is synthesized)
taacaagcccagcatcccctggggctgtgatcatggtggatgaggaagcctcaacgtagattcctgaactcaaggtaccagcaagaatgccttctcccagtgtgctctccccaacatcct

SEQ ID NO: 311973 - DNA, 120 bp, Artificial Sequence
  ENSG00000134516_48 (sequence is synthesized)
aggcacagctttcataacccagtttcttaggtgtaagaaactgtttttatctcatttattaagtctcagaacttaacagaaaaggaagccttttaaatattctttttaattttattttag

SEQ ID NO: 311974 - DNA, 120 bp, Artificial Sequence
  ENSG00000134516_49 (sequence is synthesized)
attaacagttttgtactttacatttttttatacaaccaaccagtttcttttctagccaatcatctctgaagagttgctgtttcttactgacaataaaaaatgttctcttggttcgaataa

SEQ ID NO: 311975 - DNA, 120 bp, Artificial Sequence
  ENSG00000134516_50 (sequence is synthesized)
ctgtggaacaactattttcatctggcagtggcttttatcacccaggattctctgcagctggagcagttctcacacgccaaatacaacaaaatcctgaataagtcagaacaaaatctgctt

SEQ ID NO: 311976 - DNA, 120 bp, Artificial Sequence
  ENSG00000134516_51 (sequence is synthesized)
ccctgattctgttgtctaaatgccaggtgcctttgggatggtgttgaataatgtgttcaacaccttttgagcttggttagtgcagtgttccataataagaccttgtgatatttccttaca

SEQ ID NO: 311977 - DNA, 120 bp, Artificial Sequence
  ENSG00000134516_52 (sequence is synthesized)
attttcagatttttacgtctcttttaatgctactaatattctataccaagaacaacttgtacatttttactgaaggcttaccttgcacctcatgctctgccaggacttgggggtttccca

SEQ ID NO: 311978 - DNA, 120 bp, Artificial Sequence
  ENSG00000134516_53 (sequence is synthesized)
gttgtaagcactgagatattggggttgttagcactacctcaacccaactgatggccacactttagatgtgcaggaaatggatcttggaaacaaagacctcaacagggataaaatttactt

SEQ ID NO: 311979 - DNA, 120 bp, Artificial Sequence
  ENSG00000134516_54 (sequence is synthesized)
gctgtatgaagtgcaattggctccatgtggtaagatgaggctatgccccctcctctgttttctctcagctcttgccttcctctatctctcagcttctgacattcatcctttcactttagt

SEQ ID NO: 311980 - DNA, 120 bp, Artificial Sequence
  ENSG00000134516_55 (sequence is synthesized)
attgccaagaacatcttaggcaaggttttaaatcaatgcaacagagattcccctcctctgatccccacactctgcccccaagtagattctttaagggggcaattttcccaaccatgtggc

SEQ ID NO: 311981 - DNA, 120 bp, Artificial Sequence
  ENSG00000134516_56 (sequence is synthesized)
ctttcatggggaagaggggagtccagccctcctatgaggcaagggaagctgggggtctttctctcctttccagagcaaacctcatgtttgcaactttccccatttcccatggctggggac

SEQ ID NO: 311982 - DNA, 120 bp, Artificial Sequence
  ENSG00000134516_57 (sequence is synthesized)
cgtgtgtgcaggtttctgaggaccctgaagcccttgatgaattcttagcaggcagacttgactgcagctgccttgatgggcggggtgccaggctgaggcccaccggtcagcctctggctc

SEQ ID NO: 311983 - DNA, 120 bp, Artificial Sequence
  ENSG00000134516_58 (sequence is synthesized)
tgcctctccagcgctgttagcacatttccactacatgctgggcacaaaacccagggcttccagatatgggcttcctgaagcctgccactgcggtgctatgggtattgcagaggcggcacc

SEQ ID NO: 311984 - DNA, 120 bp, Artificial Sequence
  ENSG00000134516_59 (sequence is synthesized)
tgaggagctgagaggtgaagtgcttactcgtgcccaggcagctggggtggctgggacatgacagagctgggagttgagccctgacctttgcacttcagagcctgtgtgtatcctttccac

SEQ ID NO: 311985 - DNA, 120 bp, Artificial Sequence
  ENSG00000134516_60 (sequence is synthesized)
catcacacagggcttttccaggctggggagaatccacctgttctcccaccaaaagggagagcagcccacttggtactgagctaggtgtttctatagcccccagccccaggcctattctaa

SEQ ID NO: 311986 - DNA, 120 bp, Artificial Sequence
  ENSG00000134516_61 (sequence is synthesized)
ccactgatgtctcagacccctgcaagcccctcctgtgtgccaggagtccaggtggggatacagggatgaaatctcactgtcctggctttgagagtgttggtcttgtaaactaacgattat

SEQ ID NO: 311987 - DNA, 120 bp, Artificial Sequence
  ENSG00000134516_62 (sequence is synthesized)
ttaaaaatgagacttggtttcagacagccctggattcaatcttagtttccccctggaaaagaggtttgttggaagtgttctgggaacctgggagtgggagatggattaactgccctggca

SEQ ID NO: 311988 - DNA, 120 bp, Artificial Sequence
  ENSG00000134516_63 (sequence is synthesized)
agggaggggtgccaaatgaaagagcaaggggccaaccaagatgccttagtgaagaaagggccctccagaaacttcccagtgggcctcgcaggctactcttgcgtggatggataagaatgg

SEQ ID NO: 311989 - DNA, 120 bp, Artificial Sequence
  ENSG00000134516_64 (sequence is synthesized)
aaatgtcttctgtgtttgtcgattctaggggacaccatttacatgatagtctaaatgaatgtccgccacccccgcctgtagttgtgtagtgtgcaacctgtgcaaccatatgtggcaggc

SEQ ID NO: 311990 - DNA, 120 bp, Artificial Sequence
  ENSG00000134516_65 (sequence is synthesized)
tggcatggaatggtataatacagaataaatgaacttggagccagcttcatagaaaccatgccacgccctcctcactgatctttcagagacccagatctgcctcatgctaagcctctgtct

SEQ ID NO: 311991 - DNA, 120 bp, Artificial Sequence
  ENSG00000134516_66 (sequence is synthesized)
ggctctgctcatagccacccaccctctaatctctccccacacccaccacttcctgggggtgacaccatcccagcaagctccagcagggacaggggagaggcctgctgtcccttgggccct

SEQ ID NO: 311992 - DNA, 120 bp, Artificial Sequence
  ENSG00000134516_67 (sequence is synthesized)
caggattcactgagcatccatttgtcacactaggtggccccttgttctcagttagccaggcctccccaggggccagaagtttgcccttggtatgtccctaagacctgtggcttctttgtg

SEQ ID NO: 311993 - DNA, 120 bp, Artificial Sequence
  ENSG00000134516_68 (sequence is synthesized)
gacctggaagactctttctggctttacagaaatggccaccacatcttatagctgcaaagtgtttggtgcatagatgctacctatctgccaccgtcgtcactcactcactgtccagtgagg

SEQ ID NO: 311994 - DNA, 120 bp, Artificial Sequence
  ENSG00000134516_69 (sequence is synthesized)
aggttagagcacagccgatggtcctaactcacagaagggaatctgaggccctaacaggggacatggcatgcctgagagcactccatctggtaggcagaagtccttgacgtctgctgctat

SEQ ID NO: 311995 - DNA, 120 bp, Artificial Sequence
  ENSG00000134516_70 (sequence is synthesized)
gtgcctggctctgtgtgctaagggccaggtcagaagggaacaagacaggaccagtgctgccctgtggaactcagcaggccgatcatggtgaagacgcttgctgtttcctgaacattgagg

SEQ ID NO: 311996 - DNA, 120 bp, Artificial Sequence
  ENSG00000134516_71 (sequence is synthesized)
gtgccaggccctgcgccaactgctactccttctttatttcatttactccactgcgcatacccaggaagtagttcatgttatccaccccattgtatggatgaggaaactggggcactgaga

SEQ ID NO: 311997 - DNA, 120 bp, Artificial Sequence
  ENSG00000134516_72 (sequence is synthesized)
acatcactctcttgcctatcaccagccagcaaatggcagagactgagttcagacccaggccctcttccctggaacaggcacctacccactgccccgccaccacccccaggatagcctgaa

SEQ ID NO: 311998 - DNA, 120 bp, Artificial Sequence
  ENSG00000134516_73 (sequence is synthesized)
cacagctgcaacatttggcccaagccatttcactggtatctgctcagcaggtctcaccacaccctggcggtctgggctctttctcccatttggccaatgtcaaaaccagcagtcagagag

SEQ ID NO: 311999 - DNA, 120 bp, Artificial Sequence
  ENSG00000134516_74 (sequence is synthesized)
taactaatttttcatgtctctgtgacgccaagctggggctgtaaccactaggtcatctggcccctccaccaggtgacacgtgggtttgagactctcttcccgctgtctcctgcaatgggg

SEQ ID NO: 312000 - DNA, 120 bp, Artificial Sequence
  ENSG00000134516_75 (sequence is synthesized)
agagaaatccagggtgttggtgttgggagctggaggaagagtaagctcacactgtcccctgccttggagcagaaggttctgtttcctggggatgtcagggctttggggcaaggttttgac

SEQ ID NO: 312001 - DNA, 120 bp, Artificial Sequence
  ENSG00000134516_76 (sequence is synthesized)
caggagccaggaggctgaacccttgtctgtagggtgggcaatcttcactgcaagaggacagcttcaatgtcccctggcacggcaggaaataggcatcctgcctcctgcttggcacataca

SEQ ID NO: 312002 - DNA, 120 bp, Artificial Sequence
  ENSG00000134516_77 (sequence is synthesized)
atgtgtgatccctggatgctggctctgtcccccagccctccccctgtctacctcccccaaggcactgcccctcctctacccacccattcacaccccagctctgctctccttccagccctg

SEQ ID NO: 312003 - DNA, 120 bp, Artificial Sequence
  ENSG00000134516_78 (sequence is synthesized)
agtggctttggggctgaaacccagcaacaagtttccatagacacccaggaggttccgatgcagatggtccacgaccacgctttgggagcactgtctagggcctacatcttcaatgtaaac

SEQ ID NO: 312004 - DNA, 120 bp, Artificial Sequence
  ENSG00000134516_79 (sequence is synthesized)
cctcacgatgcccttggctgagtggaactcagtgacaatcgaacattccactgagacctaatatccttcagatgagtctggcatctggaaggcagcatgctgtggaatctggcttgttgg

SEQ ID NO: 312005 - DNA, 120 bp, Artificial Sequence
  ENSG00000134516_80 (sequence is synthesized)
aagacagaactgtgttctgctgtggccgttgcaattactatttccagaataattgtgcaagtgcctcgcctctctcagcttcaattgcctaatctgaatgttgagcaagtgcctgaccct

SEQ ID NO: 312006 - DNA, 120 bp, Artificial Sequence
  ENSG00000134516_81 (sequence is synthesized)
tcctgagcaacagttccttcatctgtaacatgggggtactttaatcaatctcatcattgtgaggattaagtgtgaaaacaaaaggtacttcaagtgatcagtaaataatggatcctcggt

SEQ ID NO: 312007 - DNA, 120 bp, Artificial Sequence
  ENSG00000134516_82 (sequence is synthesized)
aagtggtagctctcttctttctttcccttaagtttcagcccaacagatctctttcgtcagctgttatcattgtaaaaatcatcagttaaaggcaaataaactggcctccaattatgagga

SEQ ID NO: 312008 - DNA, 120 bp, Artificial Sequence
  ENSG00000134516_83 (sequence is synthesized)
tagcacagaactcctgataaattgtctctctctccttcctttatttctcttgcttgtcatattgcattggccagaccattcattatcaagttgcatgttagctggaatggcacctaactt

SEQ ID NO: 312009 - DNA, 120 bp, Artificial Sequence
  ENSG00000134516_84 (sequence is synthesized)
atccaggcaatagttctctcatctgaaaagaggaattcctgagactcatctcatagggttgtcataaatattaagtaatctaagaaatttaaaatagttaacttagtacctgtcatgcac

SEQ ID NO: 312010 - DNA, 120 bp, Artificial Sequence
  ENSG00000134516_85 (sequence is synthesized)
ccagagaggtgcccagttgttctctgggctcctgcttgtccctgccaggtgtctccttttcactgcacctggtagcttactgcatattttccctcaaacaggtacctgtacaaactccgc

SEQ ID NO: 312011 - DNA, 120 bp, Artificial Sequence
  ENSG00000134516_86 (sequence is synthesized)
tcagcaggtatttttgtttaagagcaattcttatgggcccagactattgcaacatgcttcaaggaactcagaagcaaagaacactgccctaccctcaaggatcttggaatcttgatagaa

SEQ ID NO: 312012 - DNA, 120 bp, Artificial Sequence
  ENSG00000134516_87 (sequence is synthesized)
ggctatacaaatccatcttccagcatccaggcttttgaagagggtgactaactttattgggcatctacttagaaaattttgattctcatcataatcttgtcaggttgtgatatacccatt

SEQ ID NO: 312013 - DNA, 120 bp, Artificial Sequence
  ENSG00000134516_88 (sequence is synthesized)
tccctggtgaataaactgagcttcagagaattgattgacttttctgttaaaggtcatctaaccaataaatggggctgctgcgattcaaccccaggcctgtctgcaaagcacatcctcttt

SEQ ID NO: 312014 - DNA, 120 bp, Artificial Sequence
  ENSG00000134516_89 (sequence is synthesized)
ctctgaacctgcaactgtgtggtctatttaaaaacgttttggtaacgctagtaattagaatttactaaacagaaatgctttctcattttaggaatgtatgtttcatagcaaaagcctaac

SEQ ID NO: 312015 - DNA, 120 bp, Artificial Sequence
  ENSG00000134516_90 (sequence is synthesized)
tgggtggttcgatgtttgttatgctctccatttgcttcagccatggggctattcagcctgtgactcttcctagatacagttctttattagtattaatatcacgataaagggaaataagca

SEQ ID NO: 312016 - DNA, 120 bp, Artificial Sequence
  ENSG00000134516_91 (sequence is synthesized)
ctttaacctctgcccatcgtgctttaaaccaaggacccaaaattcaaatgctttcaggggccagtcaccaacataaatgagtatgcccaaccatgtcactcctctgctgaaacctgccaa

SEQ ID NO: 312017 - DNA, 120 bp, Artificial Sequence
  ENSG00000134516_92 (sequence is synthesized)
aaaagacacagttaacaggcaagcagccatcttatctcctgtctgagccactctttcttccacttttgtcaccctttcaagtcactaccgagcaggctgagcagatgcacttatccaaga

SEQ ID NO: 312018 - DNA, 120 bp, Artificial Sequence
  ENSG00000134516_93 (sequence is synthesized)
taggggtactatgttctcaaaggggcacaagaccagtctaccttctaaattgccttgtcaggaaagcctgtgcaaaagtcactcttacggagcccagaacacagaccttgattttaaatg

SEQ ID NO: 312019 - DNA, 120 bp, Artificial Sequence
  ENSG00000134516_94 (sequence is synthesized)
caccacaagggactctgccaggcctgaagtttactgtaatgaacctccctggacagtgcagggtcagatcgggtgtcagcagccggggatggctaccaggagcctcagcctcttcctgtc

SEQ ID NO: 312020 - DNA, 120 bp, Artificial Sequence
  ENSG00000134516_95 (sequence is synthesized)
tttcagcttctacaaatccaactacgtgcaaaggttccactactcccggcccgtgcgcagggggaccgtagacccagagaatgagtttgctgtgagtatcttccctacccttgatcattc

SEQ ID NO: 312021 - DNA, 120 bp, Artificial Sequence
  ENSG00000134516_96 (sequence is synthesized)
cctggagccacctggaggaaccagagcatgcatcggccagcctcagaatgggaaggaacttgatagaaagccagagaaaataaagccaacctccatggataccatgacgtccgttcccca

SEQ ID NO: 312022 - DNA, 120 bp, Artificial Sequence
  ENSG00000134516_97 (sequence is synthesized)
atctcttccattagggcctgtgtccttatttcttgagcctttttccccttaatacagaacccaggcctcatgtcagaggcactttttcaaccacagggcattcaggcattgccagcacgt

SEQ ID NO: 312023 - DNA, 120 bp, Artificial Sequence
  ENSG00000134516_98 (sequence is synthesized)
agaaaccctcaggctaagaaggggtgttgataaaatcaaaccttccagcaaacaccagtaagaagccacagcaatgtagtcatcactgtcccctgagtgctagtctcctctgtgtgtgtc

SEQ ID NO: 312024 - DNA, 120 bp, Artificial Sequence
  ENSG00000134516_99 (sequence is synthesized)
cagctaggattcaaacaagactggattaaggaggtgtctccaagtctcagctctttggcctggacagtaattcttaatatttttggagccactgcctctttgagagtctaatgaacactg

SEQ ID NO: 312025 - DNA, 120 bp, Artificial Sequence
  ENSG00000134516_100 (sequence is synthesized)
ggaacccttccccgagaaaacaaatggacacattcaatattgcctaaaaattcagactgctaataaacccaggttagtacttacttggcctaagtccagggagagcttacacttaatgtt

SEQ ID NO: 312026 - DNA, 120 bp, Artificial Sequence
  ENSG00000134516_101 (sequence is synthesized)
gggaaagaattcttaagggtaaggtgagagcgtgtttctgggtcttgcaatatttattctgctttcgggtagatgggaggcccggggacctggctgggtttctgccaagcttctccgata

SEQ ID NO: 312027 - DNA, 120 bp, Artificial Sequence
  ENSG00000134516_102 (sequence is synthesized)
gccgggatcacattctgattgatgcagctgatgataggactgaaccgattgggtgctacggagtattaaatgtgatagtatctgccaagggttagcacagggctgctcacgggatcagtg

SEQ ID NO: 312028 - DNA, 120 bp, Artificial Sequence
  ENSG00000134516_103 (sequence is synthesized)
ctcagtaaatgctagttatcatgcaatccttattgttagtttcattattatctgtatgataaattgattgtagtgtcatctgcaaataggtaaataaagcattatacattgccaaaacaa

SEQ ID NO: 312029 - DNA, 120 bp, Artificial Sequence
  ENSG00000134531_0 (sequence is synthesized)
acacaccccagtacaccagcagaggaaacttataacctcgggaggcaggtccttcccctcagtgcggtcacatacttccagaagagcggaccagggctgctgccagcacctgccactcag

SEQ ID NO: 312030 - DNA, 120 bp, Artificial Sequence
  ENSG00000134531_1 (sequence is synthesized)
agcgcctctgtcgctgggacccttcagaactctctttgctcacaagttaccaaaaaaaaaagagccaacatgttggtattgctggctggtatctttgtggtccacatcgctactgttatt

SEQ ID NO: 312031 - DNA, 120 bp, Artificial Sequence
  ENSG00000134531_2 (sequence is synthesized)
atgctatttgttagcaccattgccaatgtctggttggtttccaatacggtagatgcatcagtaggtctttggaaaaactgtaccaacattagctgcagtgacagcctgtcatatgccagt

SEQ ID NO: 312032 - DNA, 120 bp, Artificial Sequence
  ENSG00000134531_3 (sequence is synthesized)
gaagatgccctcaagacagtgcaggccttcatgattctctctatcatcttctgtgtcattgccctcctggtcttcgtgttccagctcttcaccatggagaagggaaaccggttcttcctc

SEQ ID NO: 312033 - DNA, 120 bp, Artificial Sequence
  ENSG00000134531_4 (sequence is synthesized)
tcaggggccaccacactggtgtgctggctgtgcattcttgtgggggtgtccatctacactagtcattatgcgaatcgtgatggaacgcagtatcaccacggctattcctacatcctgggc

SEQ ID NO: 312034 - DNA, 120 bp, Artificial Sequence
  ENSG00000134531_5 (sequence is synthesized)
tggatctgcttctgcttcagcttcatcatcggcgttctctatctggtcctgagaaagaaataaggccggacgagttcatggggatctggggggtggggaggaggaagccgttgaatctgg

SEQ ID NO: 312035 - DNA, 120 bp, Artificial Sequence
  ENSG00000134531_6 (sequence is synthesized)
gagggaagtggaggttgctgtacaggaaaaaccgagataggggaggggggagggggaagcaaaggggggaggtcaaatcccaaaccattactgaggggattctctactgccaagcccctg

SEQ ID NO: 312036 - DNA, 120 bp, Artificial Sequence
  ENSG00000134531_7 (sequence is synthesized)
ccctggggagaaagtagttggctagtactttgatgctcccttgatggggtccagagagcctccctgcagccaccagacttggcctccagctgttcttagtgacacacactgtctggggcc

SEQ ID NO: 312037 - DNA, 120 bp, Artificial Sequence
  ENSG00000134531_8 (sequence is synthesized)
ccatcagctgccacaacaccagccccacttctgggtcatgcactgaggtccacagacctactgcactgagttaaaatagcggtacaagttctggcaagagcagatactgtctttgtgctg

SEQ ID NO: 312038 - DNA, 120 bp, Artificial Sequence
  ENSG00000134531_9 (sequence is synthesized)
aatacgctaagcctggaagccatcctgcccttctgacccaaagcaaaacatcacattccagtctgaagtgcctactggggggctttggcctgtgagccattgtccctctttggaacagat

SEQ ID NO: 312039 - DNA, 120 bp, Artificial Sequence
  ENSG00000134531_10 (sequence is synthesized)
atttagctctgtggaattcagtgacaaaatgggaggaggaaagagagtttgtaaggtcatgctggtgggttagctaaaccaagaaggagaccttttcacaatggaaaacctgggggatgg

SEQ ID NO: 312040 - DNA, 120 bp, Artificial Sequence
  ENSG00000134531_11 (sequence is synthesized)
tcagagcccagtcgagacctcacacacggctgtccctcatggagacctcatgccatggtctttgctaggcctcttgctgaaagccaaggcagctcttctggagtttctctaaagtcacta

SEQ ID NO: 312041 - DNA, 120 bp, Artificial Sequence
  ENSG00000134531_12 (sequence is synthesized)
gtgaacaattcggtggtaaaagtaccacacaaactatgggatccaaggggcagtcttgcaacagtgccatgttagggttatgtttttaggattcccctcaatgcagtcagtgtttctttt

SEQ ID NO: 312042 - DNA, 120 bp, Artificial Sequence
  ENSG00000134531_13 (sequence is synthesized)
aagtatacaacaggagagagatggacatggctcattgtagcacaatcctattactcttcctctaacatttttgaggaagttttgtctaattatcaatattgaggatcagggctcctaggc

SEQ ID NO: 312043 - DNA, 120 bp, Artificial Sequence
  ENSG00000134531_14 (sequence is synthesized)
tcagtggtagctctggcttagacaccacctggagtgatcacctcttggggaccctgcctatcccacttcacaggtgaggcatggcaattctggaagctgattaaaacacacataaaccaa

SEQ ID NO: 312044 - DNA, 120 bp, Artificial Sequence
  ENSG00000134531_15 (sequence is synthesized)
aaccaaacaacaggcccttgggtgaaaggtgctatataattgtgaagtattaagcctaccgtatttcagccatgataagaacagagtgcctgcattcccaggaaaatacgaaaatcccat

SEQ ID NO: 312045 - DNA, 120 bp, Artificial Sequence
  ENSG00000134531_16 (sequence is synthesized)
gagataaataaaaatataggtgatgggcagatcttttctttaaaataaaaaagcaaaaactcttgtggtacctagtcagatggtagacgagctgtctgctgccgcaggagcacctctata

SEQ ID NO: 312046 - DNA, 120 bp, Artificial Sequence
  ENSG00000134531_17 (sequence is synthesized)
caggacttagaagtagtatgttattcctggttaagcaggcattgctttgccctggagcagctattttaagccatctcagattctgtctaaaggggttttttgggaagacgttttctttat

SEQ ID NO: 312047 - DNA, 120 bp, Artificial Sequence
  ENSG00000134531_18 (sequence is synthesized)
cgccctgagaagatctaccccagggagaatctgagacatcttgcctacttttctttattagctttctcctcatccatttcttttatacctttcctttttggggagttgttatgccatgat

SEQ ID NO: 312048 - DNA, 120 bp, Artificial Sequence
  ENSG00000134531_19 (sequence is synthesized)
ttttggtatttatgtaaaaggattattactaattctatttctctatgtttattctagttaaggaaatgttgagggcaagccaccaaattacctaggctgaggttagagagattggccagc

SEQ ID NO: 312049 - DNA, 120 bp, Artificial Sequence
  ENSG00000134531_20 (sequence is synthesized)
aaaaactgtgggaagatgaactttgtcattatgatttcattatcacatgattatagaaggctgtcttagtgcaaaaaacatacttacatttcagacatatccaaagggaatactcacatt

SEQ ID NO: 312050 - DNA, 120 bp, Artificial Sequence
  ENSG00000134531_21 (sequence is synthesized)
ttgttaagaagttgaactatgactggagtaaaccatgtattcccttatcttttactttttttctgtgacatttatgtctcatgtaatttgcattactctggtggattgttctagtactgt

SEQ ID NO: 312051 - DNA, 120 bp, Artificial Sequence
  ENSG00000134531_22 (sequence is synthesized)
attgggcttcttcgttaatagattatttcatatactataattgtaaatattttgatacaaatgtttataactctagggatataaaaacagattctgattcccttcattgtgtgaatgttt

SEQ ID NO: 312052 - DNA, 120 bp, Artificial Sequence
  ENSG00000134531_23 (sequence is synthesized)
ttttctaaaaaaaatgtggagaaatatggataattatgacatttatccctcattaagctgcctatcagtttgatttggacaacttgacatttatttgagacattaagctactttctggta

SEQ ID NO: 312053 - DNA, 120 bp, Artificial Sequence
  ENSG00000134531_24 (sequence is synthesized)
gtaactgaatattattaagcatagttttatcttgctttgattaaacctcttaggcaaaaaatggaacttcataagctaatacattagaaaggggttatgattataaatcagaaatgcttg

SEQ ID NO: 312054 - DNA, 120 bp, Artificial Sequence
  ENSG00000134531_25 (sequence is synthesized)
tgacattaagaaatgaggcacttgtgaaatttctttgaaatagccagctcctctaatgtgtcttcaaaatataaagtgattcacaaaggcatgcatcacacctatttgtagcagcccatt

SEQ ID NO: 312055 - DNA, 120 bp, Artificial Sequence
  ENSG00000134531_26 (sequence is synthesized)
cattacataaaccagggcatacctgtgtgggctctgtgagtgaagggaggcttcactactttctgtgagcagtaaggactggtatctttctgtgagcaataaggactggataaagactgc

SEQ ID NO: 312056 - DNA, 120 bp, Artificial Sequence
  ENSG00000134531_27 (sequence is synthesized)
atatccttgtgtcgtgtcagcaccaatacaataaggagggttttaatgtgaagcaggcaatcttccagccccttctggtcttggatgaaatagttgcacagagtattgcaccaaaaatac

SEQ ID NO: 312057 - DNA, 120 bp, Artificial Sequence
  ENSG00000134531_28 (sequence is synthesized)
acaatggaggctgaaaagttcaacatattttaagtcaattaatcaaattgcattgattcttgatgctttcttagaggcctacatgatttcttagattgctctgataaactatcataaggg

SEQ ID NO: 312058 - DNA, 120 bp, Artificial Sequence
  ENSG00000134531_29 (sequence is synthesized)
gtccacctcccctcatttagctcccccagggatttcttttcccccatgtcatacacccagtcctaaatcaacccccaaggctatccttccatcccttctgcagagggaacttttgtcaga

SEQ ID NO: 312059 - DNA, 120 bp, Artificial Sequence
  ENSG00000134531_30 (sequence is synthesized)
ctctgcaacaaactcctagctctatccagagtgtcctctgctgctaagattggtatctttctcctcaaaagcctggatggtgaatgggggtgcattagtcagaattctccagagaaacag

SEQ ID NO: 312060 - DNA, 120 bp, Artificial Sequence
  ENSG00000134531_31 (sequence is synthesized)
aaaaaataagattcgcgtgtgtgtgcaaacatatatataaataaataaaaatatatttattttaaggaattgactcacatgattttgaaggcaggcaagcccaaagtctgcaaggggtgg

SEQ ID NO: 312061 - DNA, 120 bp, Artificial Sequence
  ENSG00000134531_32 (sequence is synthesized)
gccagcagagagctggtgctacagtgcgggtctgaaagttgccagagtcccttttatagagaagcttaaaaaatatttgttgaattaaatgtcttaggtagagacaaattgaattaaagt

SEQ ID NO: 312062 - DNA, 120 bp, Artificial Sequence
  ENSG00000134531_33 (sequence is synthesized)
ggttaagtaaatactcttaggtgaaatttgtgcaaattatgagtataaagagggtgagctacagaactctccatgaccactcaagaatgggacccaaaggcaaatgataacttattcatt

SEQ ID NO: 312063 - DNA, 120 bp, Artificial Sequence
  ENSG00000134531_34 (sequence is synthesized)
catcaagggataaacttgagttatcaaatggttaatagataaagatcccactctgccttggatttagccatcgcagtccctgtgtaaaaccccaccggctttcaggcatggaaaaaaatt

SEQ ID NO: 312064 - DNA, 120 bp, Artificial Sequence
  ENSG00000134531_35 (sequence is synthesized)
tcacaaaggccttgaaagaaggcatatgaagaccaaaaggatattgagcagggttccatacttgaataaaggaagaaactcccttcaatgtttactaagaaatagttagaatatagcata

SEQ ID NO: 312065 - DNA, 120 bp, Artificial Sequence
  ENSG00000134531_36 (sequence is synthesized)
tcctgtatagatgaaatgtcctagcgaaaatgtttaaatgtatttaaagaagagctagattttgtggggggagagaagggaataggataggctggtgggaggaagaatgaaaagaagaaa

SEQ ID NO: 312066 - DNA, 120 bp, Artificial Sequence
  ENSG00000134531_37 (sequence is synthesized)
acttgttggaaattttggagtagattgtgaggaggggtgactcactttaaagatgtatcatttggaggtagacacgattttcagagcacaaaacagataaggaaagatgtatgctgattg

SEQ ID NO: 312067 - DNA, 120 bp, Artificial Sequence
  ENSG00000134531_38 (sequence is synthesized)
tgtggagcccaagggaaggcggggttttggagtcttacgtggctttgtttctgaaagggagacatgtgaagcctactcctgaggcgggaggctggggacatgaccatcaagacctataat

SEQ ID NO: 312068 - DNA, 120 bp, Artificial Sequence
  ENSG00000134531_39 (sequence is synthesized)
tgataaacaactaggggctgggtgctgcacctacatgctggggaaatagaaaatgaagcagacatgtgtcccatcttcttccagctttcagtctagcttggaaataaatctcatacctag

SEQ ID NO: 312069 - DNA, 120 bp, Artificial Sequence
  ENSG00000134531_40 (sequence is synthesized)
agaaaatggaggatctgtgggatgtagatgaggtgggagcatgaatgcctagggagggaagaagaaagattttcagttcttcagcttttcctcatgaccctatctcatgccatgagcaat

SEQ ID NO: 312070 - DNA, 120 bp, Artificial Sequence
  ENSG00000134531_41 (sequence is synthesized)
tgtctggcatctcctgtgggttggaccactgctgcatttcttacttgccaacatcactttgtcccaaatgccattcctttgttccagggcctccttgtcttccatctggggaactggagg

SEQ ID NO: 312071 - DNA, 120 bp, Artificial Sequence
  ENSG00000134531_42 (sequence is synthesized)
tgagaagcattataatagcctctctgcctttatctacaatctctccaacctgtgctttatgctgatgtcaggatgggcgttgatggatgcttctatcactgtcggggcagggagggccag

SEQ ID NO: 312072 - DNA, 120 bp, Artificial Sequence
  ENSG00000134531_43 (sequence is synthesized)
aacactagcataagatgtcaatatgtctatccatatgtcaggtccatactcaactcaagcttctggttaactgctgatctattggcaactccagttcccaataagttcctcatctccttc

SEQ ID NO: 312073 - DNA, 120 bp, Artificial Sequence
  ENSG00000134531_44 (sequence is synthesized)
tgagaccacctcagtgtggacttaatcgtccacatcactgtcagcattttggttaaaaccattcaacaagtctccaggaagctccaaactttccttcatcttcctgtcttcttctgagcc

SEQ ID NO: 312074 - DNA, 120 bp, Artificial Sequence
  ENSG00000134531_45 (sequence is synthesized)
ctccaaactcttccaacctctacccgttacccagttccaaaggtgcttccacactttcaagtatctttatagcaatgccccactcctggtaccaaattcctgtattagtctgttttcaca

SEQ ID NO: 312075 - DNA, 120 bp, Artificial Sequence
  ENSG00000134531_46 (sequence is synthesized)
ctgctatgaagacatacttgagactcggtaatttatatagaaaagaggtttaattgacaaaaaagctaacaaagtgagccctgattcaaaaatgactgtctacacttggcacatgaggga

SEQ ID NO: 312076 - DNA, 120 bp, Artificial Sequence
  ENSG00000134531_47 (sequence is synthesized)
ctttatgatattaagagattaattaaacaacagtggatggggaggaagaacagacttttgagctcttcccaatataggaatgtgttagttctaaaaattttcttaagttgtttgcttgga

SEQ ID NO: 312077 - DNA, 120 bp, Artificial Sequence
  ENSG00000134531_48 (sequence is synthesized)
actcagagtatatttttccatacgaaaaattcagaactattttatttatgatatgggctaaaaagacttctgtaatctagcttggaaacttaataatcattaaacttattttcaatgaga

SEQ ID NO: 312078 - DNA, 120 bp, Artificial Sequence
  ENSG00000134531_49 (sequence is synthesized)
agtgcggtcacatacttccagaagagcggaccagggctgctgccagcacctgccactcagagcgcctctgtcgctgggacccttcagcccttcccccttttaagaagaggatgtttgtaa

SEQ ID NO: 312079 - DNA, 120 bp, Artificial Sequence
  ENSG00000134531_50 (sequence is synthesized)
attagaagcaacaggaacaagaaagtcatttgaagagcccgaggaggattaaacataagtattcgttatgtaatatttgtaattccctgcaatcagcctgttcctttccccatagggggc

SEQ ID NO: 312080 - DNA, 120 bp, Artificial Sequence
  ENSG00000134531_51 (sequence is synthesized)
tctttcctgagggtgtgctcttagaggtctccccccttaaggggcaagggttagacaaatgacaatttctaagaggaccgaaaggattgtatacaccctgcctcgtgaactagacagcag

SEQ ID NO: 312081 - DNA, 120 bp, Artificial Sequence
  ENSG00000134531_52 (sequence is synthesized)
atatcttattacttgcacttaacatggggcagcctagcgattgagtaactgggttgggttggcaacagctacccggcttcacttatgaataatagtaataataataaccgcagctaaagc

SEQ ID NO: 312082 - DNA, 120 bp, Artificial Sequence
  ENSG00000134531_53 (sequence is synthesized)
tcaggggccaccacactggtgtgctgtgagtatctcatgggtagactccagtttacacttttaagtccatcttaccatgggtgtttctggcaacttgaacagattagcacatggttcagt

SEQ ID NO: 312083 - DNA, 120 bp, Artificial Sequence
  ENSG00000134531_54 (sequence is synthesized)
gaaacttccttgtgcaattttctcctctggttatttgttctcttgtggagaaccttggattgctgcttaggttaagaaccctcatctgcttcattgttcaaaaccagtgctcctgggtag

SEQ ID NO: 312084 - DNA, 120 bp, Artificial Sequence
  ENSG00000134531_55 (sequence is synthesized)
gtgattctcacttaattgttgttctttcccaatatactcggtttggtggaaggacatgctcttttgcatccctgagtagctttcctagacccacaagggccagacaggacagctgggtgg

SEQ ID NO: 312085 - DNA, 120 bp, Artificial Sequence
  ENSG00000134531_56 (sequence is synthesized)
taggcatgaggttctgtgttttacatcacagcgtggccacacaaaccagtgcagacatgagagcccagacacctctaatttatcaacataccgtcgagcttggcccaggggacatccatc

SEQ ID NO: 312086 - DNA, 120 bp, Artificial Sequence
  ENSG00000134531_57 (sequence is synthesized)
agaactcctgtttagggacaaacaagcagaattcattttcctattgctaatgagggaaataggatcttcttaaaattagtaaaactttttctcgactttaatgtaagaaaacacaccgac

SEQ ID NO: 312087 - DNA, 120 bp, Artificial Sequence
  ENSG00000134531_58 (sequence is synthesized)
ttaagccacagcccttgcccttcatgaacttacagctcagttgtgggaaaacaaaataaacacacgcttgcccttcaaacaattaaataacaggaggataaaagtgaatgtccacaggag

SEQ ID NO: 312088 - DNA, 120 bp, Artificial Sequence
  ENSG00000134531_59 (sequence is synthesized)
taatcctgccagagctgtaggtggttaagggctggaggatctagtgcagcttcttcggtctctagaagagccttcccagcagcaggggtgagtggagcttgaggtgaacctggaggagtg

SEQ ID NO: 312089 - DNA, 120 bp, Artificial Sequence
  ENSG00000134531_60 (sequence is synthesized)
agcgcctctgtcgctgggacccttcaggactgctgggcagaccgctggggaaaggaaagagatcccttctgtggagagtggaaaggactcactgtgccttcctcagcccttcctgcttcc

SEQ ID NO: 312090 - DNA, 120 bp, Artificial Sequence
  ENSG00000134531_61 (sequence is synthesized)
tagaccctcttggcttgctctgggtggctctagggatttcaggtagtgccagacccacagggactactggagagagacacgttgaagaccggggaaaacttgtggatgaggcaagactgc

SEQ ID NO: 312091 - DNA, 120 bp, Artificial Sequence
  ENSG00000134531_62 (sequence is synthesized)
ttttctgtagactctatggagcctggtggggcacataactgaaacgtggacacaggaaagggcaggagaactctctttgctcacaagttaccaaaaaaaaaagagccaacatgttggtat

SEQ ID NO: 312092 - DNA, 120 bp, Artificial Sequence
  ENSG00000134532_0 (sequence is synthesized)
acttgacaggttcagttggagacgatcataggtggctgctgtgacaaagggaaattgtgcttttccagcatgcttactgaccctgatttacctcaggagtttgaaaggatgtcttccaag

SEQ ID NO: 312093 - DNA, 120 bp, Artificial Sequence
  ENSG00000134532_1 (sequence is synthesized)
cgaccagcctctccgtatggggaagcagatggagaggtagccatggtgacaagcagacagaaagtggaagaagaggagagtgacgggctcccagcctttcaccttcccttgcatgtgagt

SEQ ID NO: 312094 - DNA, 120 bp, Artificial Sequence
  ENSG00000134532_2 (sequence is synthesized)
tttcccaacaagcctcactctgaggaatttcagccagtttctctgctgacgcaagagacttgtggccataggactcccacttctcagcacaatacaatggaagttgatggcaataaagtt

SEQ ID NO: 312095 - DNA, 120 bp, Artificial Sequence
  ENSG00000134532_3 (sequence is synthesized)
atgtcttcatttgccccacacaactcatctacctcacctcagaaggcagaagaaggtgggcgacagagtggcgagtccttgtctagtacagccctgggaactcctgaacggcgcaagggc

SEQ ID NO: 312096 - DNA, 120 bp, Artificial Sequence
  ENSG00000134532_4 (sequence is synthesized)
agtttagctgatgttgttgacaccttgaagcagaggaaaatggaagagctcatcaaaaacgagccggaagaaacccccagtattgaaaaactactctcaaaggactggaaagacaagctt

SEQ ID NO: 312097 - DNA, 120 bp, Artificial Sequence
  ENSG00000134532_5 (sequence is synthesized)
cttgcaatgggatcggggaactttggcgaaataaaagggactcccgagagcttagctgagaaagaaaggcaactcatgggtatgatcaaccagctgaccagcctccgagagcagctgttg

SEQ ID NO: 312098 - DNA, 120 bp, Artificial Sequence
  ENSG00000134532_6 (sequence is synthesized)
gctgcccacgatgagcagaagaaactagctgcctctcagattgagaaacagcgtcagcaaatggagctggccaagcagcaacaagaacaaattgcaagacagcagcagcagcttctacag

SEQ ID NO: 312099 - DNA, 120 bp, Artificial Sequence
  ENSG00000134532_7 (sequence is synthesized)
caacaacacaaaatcaatttgctccagcaacagatccaggttcaaggtcagctgccgccattaatgattcccgtattccctcctgatcaacggacactggctgcagctgcccagcaagga

SEQ ID NO: 312100 - DNA, 120 bp, Artificial Sequence
  ENSG00000134532_8 (sequence is synthesized)
ttcctcctccctccaggcttcagctataaggctggatgtagtgacccttaccctgttcagctgatcccaactaccatggcagctgctgccgcagcaacaccaggcttaggcccactccaa

SEQ ID NO: 312101 - DNA, 120 bp, Artificial Sequence
  ENSG00000134532_9 (sequence is synthesized)
ctgcagcagttatatgctgcccagctagctgcaatgcaggtatctccaggagggaagctgccaggcataccccaaggcaaccttggtgctgctgtatctcctaccagcattcacacagac

SEQ ID NO: 312102 - DNA, 120 bp, Artificial Sequence
  ENSG00000134532_10 (sequence is synthesized)
aagagcacaaacagcccaccacccaaaagcaaggatgaagtggcacagccactgaacctatcagctaaacccaagacctctgatggcaaatcacccacatcacccacctctccccatatg

SEQ ID NO: 312103 - DNA, 120 bp, Artificial Sequence
  ENSG00000134532_11 (sequence is synthesized)
ccagctctgagaataaacagtggggcaggccccctcaaagcctctgtcccagcagcgttagctagtccttcagccagagttagcacaataggttacttaaatgaccatgatgctgtcacc

SEQ ID NO: 312104 - DNA, 120 bp, Artificial Sequence
  ENSG00000134532_12 (sequence is synthesized)
aaggcaatccaagaagctcggcaaatgaaggagcaactccgacgggaacaacaggtgcttgatgggaaggtggctgttgtgaatagtctgggtctcaataactgccgaacagaaaaggaa

SEQ ID NO: 312105 - DNA, 120 bp, Artificial Sequence
  ENSG00000134532_13 (sequence is synthesized)
aaaacaacactggagagtctgactcagcaactggcagttaaacagaatgaagaaggaaaatttagccatgcaatgatggatttcaatctgagtggagattctgatggaagtgctggagtc

SEQ ID NO: 312106 - DNA, 120 bp, Artificial Sequence
  ENSG00000134532_14 (sequence is synthesized)
tcagagtcaagaatttatagggaatcccgagggcgtggtagcaatgaaccccacataaagcgtccaatgaatgccttcatggtgtgggctaaagatgaacggagaaagatccttcaagcc

SEQ ID NO: 312107 - DNA, 120 bp, Artificial Sequence
  ENSG00000134532_15 (sequence is synthesized)
tttcctgacatgcacaactccaacatcagcaagatattgggatctcgctggaaagctatgacaaacctagagaaacagccatattatgaggagcaagcccgtctcagcaagcagcacctg

SEQ ID NO: 312108 - DNA, 120 bp, Artificial Sequence
  ENSG00000134532_16 (sequence is synthesized)
gagaagtaccctgactataagtacaagcccaggccaaagcgcacctgcctggtggatggcaaaaagctgcgcattggtgaatacaaggcaatcatgcgcaacaggcggcaggaaatgcgg

SEQ ID NO: 312109 - DNA, 120 bp, Artificial Sequence
  ENSG00000134532_17 (sequence is synthesized)
cagtacttcaatgttgggcaacaagcacagatccccattgccactgctggtgttgtgtaccctggagccatcgccatggctgggatgccctcccctcacctgccctcggagcactcaagc

SEQ ID NO: 312110 - DNA, 120 bp, Artificial Sequence
  ENSG00000134532_18 (sequence is synthesized)
gtgtctagcagcccagagcctgggatgcctgttatccagagcacttacggtgtgaaaggagaggagccacatatcaaagaagagatacaggccgaggacatcaatggagaaatttatgat

SEQ ID NO: 312111 - DNA, 120 bp, Artificial Sequence
  ENSG00000134532_19 (sequence is synthesized)
gagtacgacgaggaagaggatgatccagatgtagattatgggagtgacagtgaaaaccatattgcaggacaagccaactgataagggtcaaaagattgttgtgaccttaggacttaaaga

SEQ ID NO: 312112 - DNA, 120 bp, Artificial Sequence
  ENSG00000134532_20 (sequence is synthesized)
agccctaactggttcatccttaccagtggccaagcacattaactttctcatacactgactgttactttaactgttagtcttaaatagttgggacatcagctgactaatagacctcagcct

SEQ ID NO: 312113 - DNA, 120 bp, Artificial Sequence
  ENSG00000134532_21 (sequence is synthesized)
caaaaggcttggaaagaaaaaacaaatacaacaagcaaacaacaatatcaacaacaagagattgaaataagctatgggtaaaataatgccagtaattcagctgctacatccaagcactga

SEQ ID NO: 312114 - DNA, 120 bp, Artificial Sequence
  ENSG00000134532_22 (sequence is synthesized)
agtcttacccgtcaacttttttttttttttaaataaactttatggctgtttgttctacaatgttctagaaattctcactcaggtacacagtgccaacaagtggcttgtgaatgtgttttg

SEQ ID NO: 312115 - DNA, 120 bp, Artificial Sequence
  ENSG00000134532_23 (sequence is synthesized)
ttgttttgtgctacaatttttaaaaagaaaaaagttttgttttgttttttggggtttctgggttttttccttttctttttctttcctttcattttttttctttgtaatgcacctgacaga

SEQ ID NO: 312116 - DNA, 120 bp, Artificial Sequence
  ENSG00000134532_24 (sequence is synthesized)
aaaaaaagaaaaatgaatttctctttacttctctccaccttctccatctctctactttaaagatggaagtctgtgcatgaggggaaagagggaaaaagagcctgtttttaacttccttgc

SEQ ID NO: 312117 - DNA, 120 bp, Artificial Sequence
  ENSG00000134532_25 (sequence is synthesized)
tatccaccacaaaataagcaattattttctttagaggactttatctattgcacaccacactacatctttgagcaagtgccaaatttgtactgaagtgttgaccaagttcattttttctct

SEQ ID NO: 312118 - DNA, 120 bp, Artificial Sequence
  ENSG00000134532_26 (sequence is synthesized)
ttactttttccttttccttcttaagttaggacagtgttaaatcttagacaatcccttgaaaaacctgaaataccagcagctggtgagatttgacttttttttttaatggaaactgtaggt

SEQ ID NO: 312119 - DNA, 120 bp, Artificial Sequence
  ENSG00000134532_27 (sequence is synthesized)
gctgttctcaggtgaaaagagagagagagagagagacataagaaatttagagaaaaatattttctgatcttggatttttgtgtgtatgtatgtatgtgattatggtactaataataggaa

SEQ ID NO: 312120 - DNA, 120 bp, Artificial Sequence
  ENSG00000134532_28 (sequence is synthesized)
taacgttggaccattgtgagttaaacccacatctggggatgaaatcccacatcctcccaagtgactggtctagaaataatcttgaccttgactttgcacttcaaatgacaacttaaccaa

SEQ ID NO: 312121 - DNA, 120 bp, Artificial Sequence
  ENSG00000134532_29 (sequence is synthesized)
gatgtcctttctccctggtcagttggttccattaacgtttgctacttagtgatttttgtttttcctgttgatattttgagcaaaacaatcattgttttcattgaatatatttggccattt

SEQ ID NO: 312122 - DNA, 120 bp, Artificial Sequence
  ENSG00000134532_30 (sequence is synthesized)
tttcagacaaatagaattagcttatttcttcaacattccatcctttcccgatcaggaaatgaaactgatgattttataaggtatttttcacccctccatgaagtgaggtggaggccttta

SEQ ID NO: 312123 - DNA, 120 bp, Artificial Sequence
  ENSG00000134532_31 (sequence is synthesized)
gcatttcagaagtgtgggccatatgtagttcatgccataaaaagtaggatttaattaaaagtcattgcagcccaataaaatggagcctggctgcacccagggatccttgccactgctctt

SEQ ID NO: 312124 - DNA, 120 bp, Artificial Sequence
  ENSG00000134532_32 (sequence is synthesized)
cccttgctgtcagattaatccactgaagtccaactttggttcaagcagagtatttgcaaagagcaacaactgaatgtgatgggactgcttatgtagattttgccagccaaatgccaaggc

SEQ ID NO: 312125 - DNA, 120 bp, Artificial Sequence
  ENSG00000134532_33 (sequence is synthesized)
agttgtagggcctgtacaaataaatgcaaaatcatttcaagtcaattgccattatttgtattgaagtatcagatagatagtaaatactgcaactagtagcttgatgtgctatagttttca

SEQ ID NO: 312126 - DNA, 120 bp, Artificial Sequence
  ENSG00000134532_34 (sequence is synthesized)
ctccagtcatcattttcctatctcaccccccgaaacaccaccctaaagttggatttttacatataaataaaaaaagaatcccttttatttttctctctctcagaagacttgctctggggt

SEQ ID NO: 312127 - DNA, 120 bp, Artificial Sequence
  ENSG00000134532_35 (sequence is synthesized)
tttgcttggaggagctgatcatatcctgcatgtcagagatttcattttgtttgtttttctgtttgtttgtttttgatgactttatttacatttgaactgcctctttttgctagtgttgta

SEQ ID NO: 312128 - DNA, 120 bp, Artificial Sequence
  ENSG00000134532_36 (sequence is synthesized)
ttttgctagtgttgtaatgatgatgatgataaaataataataataatagtaataataataataatggtcagctgttcccagattagtaagttatgtataatttattttatttctcccttt

SEQ ID NO: 312129 - DNA, 120 bp, Artificial Sequence
  ENSG00000134532_37 (sequence is synthesized)
ctattttattctgctctgatttggaagtgcagccaataagctgttagatatttaaaacaaatttccatctccaactcatatatgtatgtatatgtatatatatatatacatatatataca

SEQ ID NO: 312130 - DNA, 120 bp, Artificial Sequence
  ENSG00000134532_38 (sequence is synthesized)
cacacacatttacccacaattttacttctctttccgtaagttttctcttttttaagaattttggccccaacaatatcagttctgatgtttaaaacaaaggagtgaattaataggagggtc

SEQ ID NO: 312131 - DNA, 120 bp, Artificial Sequence
  ENSG00000134532_39 (sequence is synthesized)
agtgaattaataggagggtcgtgttcaatcttaattaacttatgctctcatcactcattttagttatttaattgccacagtcatctagagccaatttttttttgtttttgtttgttttgt

SEQ ID NO: 312132 - DNA, 120 bp, Artificial Sequence
  ENSG00000134532_40 (sequence is synthesized)
gaaaaaatagacacttgtttttatatcatttttatgtacaatgtgaaaacagatttttaaaaaatttgttctctgtctttgttaacaaattccttccgatttatgtgggttcacctctca

SEQ ID NO: 312133 - DNA, 120 bp, Artificial Sequence
  ENSG00000134532_41 (sequence is synthesized)
cgtttgctggatacttactttacaccatgttatgaaagatgctttgttttcatttcatgagtttgggctacaagaatactttgttttagctccaggtagatgccattgaaggcattcatg

SEQ ID NO: 312134 - DNA, 120 bp, Artificial Sequence
  ENSG00000134532_42 (sequence is synthesized)
gctgaaatcaattctaacacacttaccgatgaattgacaacactttggtgtttggtcttttttttgttatattttgttttatttgaaggggaaaacaaaattgttaatggtgacttttaa

SEQ ID NO: 312135 - DNA, 120 bp, Artificial Sequence
  ENSG00000134532_43 (sequence is synthesized)
ctgctgaaattcaaaatttgattttagttaggtttatgtccgagactaaactgtgcatgaaccgaaacaaaaagcaagttcataccgctgcattctgttctcttgttctgacggttaatt

SEQ ID NO: 312136 - DNA, 120 bp, Artificial Sequence
  ENSG00000134532_44 (sequence is synthesized)
cactggacatcaaattttctttgccctagttttccccaaaagaaaacaaaagcaaaaatagttatattaatgttgaaagtgctttgaagtcacttgataaaaggtgctatgaatagcaac

SEQ ID NO: 312137 - DNA, 120 bp, Artificial Sequence
  ENSG00000134532_45 (sequence is synthesized)
ttactgtgttactacattgcctttttggcattggttgatttataattttggtaaaggatcctaaaaccctgtattctttttctgtgccccataatgaccaaaaaagataaagaaaatgag

SEQ ID NO: 312138 - DNA, 120 bp, Artificial Sequence
  ENSG00000134532_46 (sequence is synthesized)
agtaagatcaaaagatcaaactaaaacataaacagtctccttcctgtctgctttcttacctatctgttcacactttatctctttccctttctctctctctctcacatgcgcgcgcgcgcg

SEQ ID NO: 312139 - DNA, 120 bp, Artificial Sequence
  ENSG00000134532_47 (sequence is synthesized)
cgcgcacacacacacacacacacacttgccccaacactgagaaataatcttgccagaattctggtttttatagttgttgtagtccgtttctctaaaaatagtcctgttttcatatgaatc

SEQ ID NO: 312140 - DNA, 120 bp, Artificial Sequence
  ENSG00000134532_48 (sequence is synthesized)
taagagaacattaccggagaaaataaagttactcatttatagttactaataataagttagtgattaacttaccacaattggataaaatataaaactattcttcagcacatttatacctaa

SEQ ID NO: 312141 - DNA, 120 bp, Artificial Sequence
  ENSG00000134532_49 (sequence is synthesized)
attagtgaagtccatttgtgaagttcatttggcatctgcagttaagagttaaccatgtataaaatccctcccaaagaacataatcatcgttagaaccaaatcctcttataaagaacaaat

SEQ ID NO: 312142 - DNA, 120 bp, Artificial Sequence
  ENSG00000134532_50 (sequence is synthesized)
ataaaaaagttttctgtggtgaagctattttatagatttgatttccggagtagaattttaccttaattcacttaaagaaaattaaccattttttggtccaacttcagatattttcttaat

SEQ ID NO: 312143 - DNA, 120 bp, Artificial Sequence
  ENSG00000134532_51 (sequence is synthesized)
ccagaagctgtgactgttcccagaagaaacctcttatatcacatttaaaacataaaaaataattacactttcactcattctaatgggtaaattgttgaattgtaataaacaactgtatat

SEQ ID NO: 312144 - DNA, 120 bp, Artificial Sequence
  ENSG00000134532_52 (sequence is synthesized)
ttacaaacaggtttataaggtatttgtctatcaaattaataataaaataaaacttacggggtctgcaaggaaaactatgaaggccacttaaagtggttcaggtatccctttgtcttgtag

SEQ ID NO: 312145 - DNA, 120 bp, Artificial Sequence
  ENSG00000134532_53 (sequence is synthesized)
ggcatagctgttggtttagccaggcttttacagtatttaattttaaagtatcctataactatcaacttcccaggttgaagacgatgtgttgagtttcctactgattgattgattcctgtc

SEQ ID NO: 312146 - DNA, 120 bp, Artificial Sequence
  ENSG00000134532_54 (sequence is synthesized)
ctccccagtgtttccgtcactggttcactaaaacagtatttatatagctccactggctctaaagctcttagtccttctaatattttggattttacaagtaaaaatggaaaaaaaatagaa

SEQ ID NO: 312147 - DNA, 120 bp, Artificial Sequence
  ENSG00000134532_55 (sequence is synthesized)
aagagacaatcaaatgcctggagcttaaaacaaagtatgtgcaacctaccatctcacttgaaatttaataaaataataagtaattatgtaaatataacatagagttatagatttatattt

SEQ ID NO: 312148 - DNA, 120 bp, Artificial Sequence
  ENSG00000134532_56 (sequence is synthesized)
tgttcataacacatagtgtaatataagttgtatattttcatgtttttggttttatgttatcattcatgccacaataaaaataaaacaggagtttatgtgctcttaaaaaaaagatgtggg

SEQ ID NO: 312149 - DNA, 86 bp, Artificial Sequence
  ENSG00000134532_57 (sequence is synthesized)
ttgccaccaacctgtttttcggcattctcctttttcagtattactgccatgcaaggcaccaataaaaacagcaaatgtgttcttta

SEQ ID NO: 312150 - DNA, 120 bp, Artificial Sequence
  ENSG00000134532_58 (sequence is synthesized)
gaccctgatttacctcaggagtttgaaagctcttcatgagaagattcatggaaacaatgtcaagaagcttctacttccaattcatatgtcatctgcccaaaagttgtgattcctatactc

SEQ ID NO: 312151 - DNA, 120 bp, Artificial Sequence
  ENSG00000134532_59 (sequence is synthesized)
aacttggacctaaatcaaaatgggaaataagataaaagaagcagaagtgccagtagtccatgctgggaattttgtcttagagctagtctattactaatctagagagtcatctatctaggc

SEQ ID NO: 312152 - DNA, 120 bp, Artificial Sequence
  ENSG00000134532_60 (sequence is synthesized)
attttcataaagattgtaataggcagtcttaaagtttgtctcttacttgaaatacaccaagggccatcgctaagtgaaatacaaacaatatcttagaattagaaaatgacttcaggtaaa

SEQ ID NO: 312153 - DNA, 120 bp, Artificial Sequence
  ENSG00000134532_61 (sequence is synthesized)
ttaaaagtaaacaaaaggcaactattattaaaaacattcttttctatcgctttttgtagaaaacatttagttgtattgggaaatttctatttcgaagtttattaaaactaacttttgtgg

SEQ ID NO: 312154 - DNA, 120 bp, Artificial Sequence
  ENSG00000134532_62 (sequence is synthesized)
ggttttttttagcagagattagaaaaggttttcagagaagggaaaatgccataagtgagtagacttttaggcaatagcgctgattaaataaatgccgatgtttggcaataggactgtgga

SEQ ID NO: 312155 - DNA, 120 bp, Artificial Sequence
  ENSG00000134532_63 (sequence is synthesized)
acacacacaccggcacacacgcacacacacagacacacacacacagagtgaaaaaggcgagccaccaaaacccatctccagtctcctcccgggggcccccagcccgcctctgtgccactt

SEQ ID NO: 312156 - DNA, 120 bp, Artificial Sequence
  ENSG00000134532_64 (sequence is synthesized)
tgcatcccacgccggaggaggcattaacgagaccggtgctgcattcttacaaccctaaaatccatctgctcttaacacaccgtcaaaaagagggggaaatgcatctccgagggagtgctc

SEQ ID NO: 312157 - DNA, 120 bp, Artificial Sequence
  ENSG00000134532_65 (sequence is synthesized)
gggagatttctaaactgagctttttaaacggtccaaggtgtagagccatacttcaggaggatcctcagaagttttggacaagcctccccaaatgtggcaggtgctgtgctggccattggt

SEQ ID NO: 312158 - DNA, 120 bp, Artificial Sequence
  ENSG00000134532_66 (sequence is synthesized)
gacccaaagatgatgaaaaatatgttcctgcccacaaggagttagcgacctactgggctttcctcttgctgatgacatgattcctgtttgaatctgttgacaagattctgaaagctgaac

SEQ ID NO: 312159 - DNA, 120 bp, Artificial Sequence
  ENSG00000134532_67 (sequence is synthesized)
attggagagatgtcctgcagtgctgcctccacagcctgagagaagatccctggtgatagctacaggtcatgtttctagagcccattcagctctcccagcgcttctctaccatacatggca

SEQ ID NO: 312160 - DNA, 120 bp, Artificial Sequence
  ENSG00000134532_68 (sequence is synthesized)
ctcattaactttcaagtggaaacaaacaagtattttggcaatactaaacgtaaagtatttccagtgtttaattcacttcaggacaatcacatataaaaataaagcttatctaaatcttaa

SEQ ID NO: 312161 - DNA, 120 bp, Artificial Sequence
  ENSG00000134532_69 (sequence is synthesized)
tgcttgtgttaagcagtgtgtagagagctaatatgtaaaaagaatttggcaaataaattttgcaagtatttggcacaatttttccttttaccgaatgtactaatgccaaaaaatgttggt

SEQ ID NO: 312162 - DNA, 120 bp, Artificial Sequence
  ENSG00000134532_70 (sequence is synthesized)
tacttcctacacttgtgtgtatttgaaggcaaatgaaagtagactagaaatgccaccaaagcacatcacacattagcaacaatgtacatttcttcttcacacataaaacattgactcttc

SEQ ID NO: 312163 - DNA, 120 bp, Artificial Sequence
  ENSG00000134532_71 (sequence is synthesized)
tgctttttattggttactttattgataattgctatctttcatcttctcctacttcatcagttcctccaattgagcaaagtctatattgggataaaatgtatctttccttccttaattaat

SEQ ID NO: 312164 - DNA, 120 bp, Artificial Sequence
  ENSG00000134532_72 (sequence is synthesized)
gttgatttttgccaaaatatgtattttatttgagtcataataaaaattataatagttttttcttacagtaaccatgcaggatgccttgagtagtcctgaagaactaaatatagtaaatgc

SEQ ID NO: 312165 - DNA, 120 bp, Artificial Sequence
  ENSG00000134532_73 (sequence is synthesized)
tcatcactgcaggattctgaggaggcaggcaggatacatgcgtgattctccttcccatctttgcacagaacctatactcgtgcactgcatctgctttcctcttgctgatgacatgattcc

SEQ ID NO: 312166 - DNA, 120 bp, Artificial Sequence
  ENSG00000134532_74 (sequence is synthesized)
gtgtgtgtgtgtgtgtgtgcatgcgtgtgtgaagaatgcacactatctcctgttggtaagtgtgtgcttactccctgaccagatgctgcggtgcacggggcagccaccatctctgcatgc

SEQ ID NO: 312167 - DNA, 120 bp, Artificial Sequence
  ENSG00000134532_75 (sequence is synthesized)
agagcacaaacagcccaccacccaaaagcaaggttacttaaatgaccatgatgctgtcaccaaggcaatccaagaagctcggcaaatgaaggagcaactccgacgggaacaacaggtgct

SEQ ID NO: 312168 - DNA, 120 bp, Artificial Sequence
  ENSG00000134532_76 (sequence is synthesized)
cacccaaaagcaaggtacccttttgaagaagccactgtcttgccacttagctttatttttcattcaatggtatttattaaatgtctattgtatgccagcagctagcttaaactctgggtg

SEQ ID NO: 312169 - DNA, 120 bp, Artificial Sequence
  ENSG00000134532_77 (sequence is synthesized)
tacaaggaggtaagaatcaagtaagggcaacaggtgtgcatgtcaacttatctgcatacattgaatcattcatttattcatttattcaatatgcgtgtatcgataactatagtagaaaat

SEQ ID NO: 312170 - DNA, 120 bp, Artificial Sequence
  ENSG00000134532_78 (sequence is synthesized)
gtgagagataaaaaagattatcagatgggtatcttgtacccaaggagcttacagtctgattatgtagatatttataaaaatagccaaatagccatactctatgatacaaaataaattttg

SEQ ID NO: 312171 - DNA, 120 bp, Artificial Sequence
  ENSG00000134532_79 (sequence is synthesized)
taaaaagttacagataaagtacattggaagttatattgggaggcagagatcatcttcagggagagatcccatcaggagtttgccagagaagggaaaactgaaatagaccttaaaatacaa

SEQ ID NO: 312172 - DNA, 120 bp, Artificial Sequence
  ENSG00000134532_80 (sequence is synthesized)
tcctcatgatgtgaaaatgcttttacagggacctgggagatttctaaactgagtgctgtgctggccattggtgacccaaagatgatgaaaaatatgttcctgcccacaaggagttagcga

SEQ ID NO: 312173 - DNA, 120 bp, Artificial Sequence
  ENSG00000134532_81 (sequence is synthesized)
cctactggggtttttctcagaaattacgtactctacggctgcccatcctattcaagaatgaggcaatagaaaagcatttgcaaaagttagttacaaatgtggggcttgacgttgagctaa

SEQ ID NO: 312174 - DNA, 120 bp, Artificial Sequence
  ENSG00000134532_82 (sequence is synthesized)
gcactgcactgggtaggaaaaagcatttcaagaaatagataatatcaaggacatcaggacaccgggagtgggagagattggactgggagactcagcagataaagattttggtgcgatgag

SEQ ID NO: 312175 - DNA, 120 bp, Artificial Sequence
  ENSG00000134532_83 (sequence is synthesized)
gaataagagtcccttccacctccccagttaaataaattcaaaggccaaaaaagcaaaacaaaacaaaaacccacccacagacaaaacccggattttaagatgcttattaactactttggt

SEQ ID NO: 312176 - DNA, 120 bp, Artificial Sequence
  ENSG00000134532_84 (sequence is synthesized)
ggtaagtagtgtagaagtgattataatcaaggttaattctgataaatcatgagaaaaataccaaaaaagaaccatggagagtcaagagaacattttcaacaagaagcattttgaaagaat

SEQ ID NO: 312177 - DNA, 120 bp, Artificial Sequence
  ENSG00000134532_85 (sequence is synthesized)
tcattagagagctgacatttgagatatgctttgaagaaattgtgggcttcaacaagtaaagtgagtttccagctgggggcaggaagttcagttacaaggccattataatactttaaatta

SEQ ID NO: 312178 - DNA, 120 bp, Artificial Sequence
  ENSG00000134532_86 (sequence is synthesized)
aaaagagtgagaatctaaattagtcagggtaatgaccgtggacaaagagatgaaaggaataaacaggtggaagagttatggttagtagaattctttgagtaggcaaaagggaaaggaaaa

SEQ ID NO: 312179 - DNA, 120 bp, Artificial Sequence
  ENSG00000134532_87 (sequence is synthesized)
ttcagtatccttttcccttggatcctgggagtaaaacctcagcagtactccctccctttgccagcctgaggagtcagagactcaaagttgttcccagctcttgcgccttcattgtagagc

SEQ ID NO: 312180 - DNA, 120 bp, Artificial Sequence
  ENSG00000134533_0 (sequence is synthesized)
gcagtccctccgccgctagtcggagcgagcgcgagtgaggagacccccgccgggccactggcacttgcttctgcggcgagtcccacccacgaccgcagcccagcaactcgcaaacgcaac

SEQ ID NO: 312181 - DNA, 120 bp, Artificial Sequence
  ENSG00000134533_1 (sequence is synthesized)
ctgaagcctgggctgcgcagtgtgggagggcttcgcgatcttgggggacccattccgaacttgcagaggaccgtagctctcctggcctggagagtgtgaacaggattgtggactcttcca

SEQ ID NO: 312182 - DNA, 120 bp, Artificial Sequence
  ENSG00000134533_2 (sequence is synthesized)
agattcacaatgatatggtgaatccaaagactggaaccaaaaagatttactcagtgctttagttttaacaacagtaaattgtctaccaacacccatcatggctaaaagtgcggaggtcaa

SEQ ID NO: 312183 - DNA, 120 bp, Artificial Sequence
  ENSG00000134533_3 (sequence is synthesized)
actggcaatatttgggagagcaggcgtgggcaagtcagctcttgtagtgagatttctgaccaaacggttcatctgggaatatgatcccaccctcgaatcaacctaccgacaccaagcaac

SEQ ID NO: 312184 - DNA, 120 bp, Artificial Sequence
  ENSG00000134533_4 (sequence is synthesized)
catcgatgatgaagttgtttccatggagatactagacactgctggtcaggaagataccattcagagggaggggcacatgcgatggggggaaggctttgtgctggtctacgacattactga

SEQ ID NO: 312185 - DNA, 120 bp, Artificial Sequence
  ENSG00000134533_5 (sequence is synthesized)
ccgaggaagttttgaggaagtgctgccacttaagaacatcctagatgagatcaaaaagcccaagaatgtgactctcatcttggttggaaacaaagctgacttggaccactccaggcaggt

SEQ ID NO: 312186 - DNA, 120 bp, Artificial Sequence
  ENSG00000134533_6 (sequence is synthesized)
tagcacagaagaaggagagaagctggccacagaattggcttgtgctttttacgagtgctctgcctgcactggagaagggaacatcacagagatattctatgaattgtgtcgagaggtgcg

SEQ ID NO: 312187 - DNA, 120 bp, Artificial Sequence
  ENSG00000134533_7 (sequence is synthesized)
tcgccggaggatggtgcagggcaagacgaggcgacgcagctccaccacgcatgtcaagcaagccattaacaagatgctcaccaaaatcagtagttaggcagcccagctgaggtggaccaa

SEQ ID NO: 312188 - DNA, 120 bp, Artificial Sequence
  ENSG00000134533_8 (sequence is synthesized)
ctaattggaaacactcttccccttctgttcccctttcaaaaataaaacaaaatattgcattctttgtttggattctgagaaatgtctgggcttcccattgtttctggcctctaataggtt

SEQ ID NO: 312189 - DNA, 120 bp, Artificial Sequence
  ENSG00000134533_9 (sequence is synthesized)
attctgaaatgactggtttatgttaagctatttttaggcatcttcaccttgctttaagtaggttgaagtttttgcaaaggcatttaaaaattcaatttcttgtcagatactacaaataat

SEQ ID NO: 312190 - DNA, 120 bp, Artificial Sequence
  ENSG00000134533_10 (sequence is synthesized)
tttcttaaaagtctaagatagcagaaaatacagtaaaaacacaggagaagaagctgagctattggaacaggaaatagaaggaactctagtttctgtttgaagtgaggattttctgaatta

SEQ ID NO: 312191 - DNA, 120 bp, Artificial Sequence
  ENSG00000134533_11 (sequence is synthesized)
tctaatatcatctaggttttctttaaaattttattttgttcttcagttcaagcatcttctcactaatgtttttcactataacagagaattcatttcaatttgagttggttctctcaatga

SEQ ID NO: 312192 - DNA, 120 bp, Artificial Sequence
  ENSG00000134533_12 (sequence is synthesized)
tctattgatcattacaccctaactctccttccttggctcaaacaatattttccctataacaaaggcaataggacacaaaattcacatcctgctgggccttttttcatcaagtcagggtga

SEQ ID NO: 312193 - DNA, 120 bp, Artificial Sequence
  ENSG00000134533_13 (sequence is synthesized)
tataaaaacattggaagtcttttcaccaaaccctgactttattgaatgctagtagaagatgtagaattagagacatctgatttgtttatcaccttagcagaaaaaccacagtccaaaaga

SEQ ID NO: 312194 - DNA, 120 bp, Artificial Sequence
  ENSG00000134533_14 (sequence is synthesized)
caagcaaattaagaatggagcttaaccatgcctccattgggaagtctagactttgagccaggtacagtaagaaaaattagcctctgattcattaagtttgccacatgacttattttgata

SEQ ID NO: 312195 - DNA, 120 bp, Artificial Sequence
  ENSG00000134533_15 (sequence is synthesized)
ttttggatacattaactcacttaggagaattcagaaaagaatgggtgattaaagttcattacagctgaataaatgtgtctaaaacagactcttgtattctgaaagtacagtctacaactg

SEQ ID NO: 312196 - DNA, 120 bp, Artificial Sequence
  ENSG00000134533_16 (sequence is synthesized)
ataaaaccttatgattcttttctcccccattatgcccctatatatatcaagatttgggtactttattttagtagaaaatatatatcttttacatatgtatgtatttataaatgcatagat

SEQ ID NO: 312197 - DNA, 120 bp, Artificial Sequence
  ENSG00000134533_17 (sequence is synthesized)
atatgtataaaaatttgtaagcgttagcggcattaattcaccaatgcatttggacaacttgatgtaactgactttattttatgtgactataataaaaagcataattttctcattctgtca

SEQ ID NO: 312198 - DNA, 120 bp, Artificial Sequence
  ENSG00000134533_18 (sequence is synthesized)
attggagttgactaatatgaatgtatgttattcaacccaaagagacatgaagaggcccaaaagtgactctctccattgccccactgcatgtgtttgtacactgaatgcttacagatagat

SEQ ID NO: 312199 - DNA, 120 bp, Artificial Sequence
  ENSG00000134533_19 (sequence is synthesized)
cctataatttttttttttaactccttcactgttgttggcagaatttagtttcttcctgttacaaggattgaggtcgccatttccttgctggtagtcacctgaggactgttcccagattct

SEQ ID NO: 312200 - DNA, 120 bp, Artificial Sequence
  ENSG00000134533_20 (sequence is synthesized)
tatgccctttctcctgcatcttccaagccagcaatggaagaggtaaccatccatcacggttttcccagaacaggctgatttgcgtcttctgtcctggcataaggatcccttcactctcgg

SEQ ID NO: 312201 - DNA, 120 bp, Artificial Sequence
  ENSG00000134533_21 (sequence is synthesized)
taatcttctagtcgacaaagtcacacccaaggaaagcaccaaacttctctgaggtcaatattatgttggattgtgcagagcctgttccataaagatctttatgtgcccaacaagctgcag

SEQ ID NO: 312202 - DNA, 120 bp, Artificial Sequence
  ENSG00000134533_22 (sequence is synthesized)
tgctatgaacaaaaataaggcacttttcttcaactaacttttgcatgcctaaaacctttttctctaattaactagccattttatatattaacatatttgtaaatatctgtatattcatcc

SEQ ID NO: 312203 - DNA, 120 bp, Artificial Sequence
  ENSG00000134533_23 (sequence is synthesized)
ttatataaactgcccagtgtttcaagggggttttgaaaatactataatattcacatatcatctaggttagactctctcacctatattttgtggcatagcaagatattaataagttttcat

SEQ ID NO: 312204 - DNA, 120 bp, Artificial Sequence
  ENSG00000134533_24 (sequence is synthesized)
ggtcaaatgtgttttgaaatgctcaaatgaagttaaacaggtgtctttactgaaagaattctcagagcctctaacaggcttgtgtgtgagtctttaagaaagagatttagtatatattgt

SEQ ID NO: 312205 - DNA, 120 bp, Artificial Sequence
  ENSG00000134533_25 (sequence is synthesized)
aaatgcgaaagaatgacagccaggtatatcatattcaaacttctcctcagaaattatgcaagcaagaaaagagtgaaatgaaatatctgaagcattttgacaaaaagaaaatccaccgac

SEQ ID NO: 312206 - DNA, 120 bp, Artificial Sequence
  ENSG00000134533_26 (sequence is synthesized)
ctagaattctataccctgaaaaattactcttcaaaagtgaaggataaattaagactttcttgggcaacaaaaattgaaggaatttgctgccaataaacctgccttgaaaaaaaaatgata

SEQ ID NO: 312207 - DNA, 120 bp, Artificial Sequence
  ENSG00000134533_27 (sequence is synthesized)
tattcctcctattttcatttcttactcttttagataaagtctcttcatctagaacttttattttgcgtaatcgactgttacgtatccttttgcttatttatgctgaagtagctttgctga

SEQ ID NO: 312208 - DNA, 120 bp, Artificial Sequence
  ENSG00000134533_28 (sequence is synthesized)
taacacacaagataaaggatatatcagaggtcttggcattctgatttttaacaacctccaaagaaatcagatgatggaaattaaaaaatatatatttgttcttttctctatgtatgagat

SEQ ID NO: 312209 - DNA, 120 bp, Artificial Sequence
  ENSG00000134538_0 (sequence is synthesized)
aaagggtggacttgttgcagttgctgtaggattctaaatccaggtgattgtttcaaactgagcatcaacaacaaaaacatttgtatgatatctatatttcaatcatggaccaaaatcaac

SEQ ID NO: 312210 - DNA, 120 bp, Artificial Sequence
  ENSG00000134538_1 (sequence is synthesized)
atttgaataaaacagcagaggcacaaccttcagagaataagaaaacaagatactgcaatggattgaagatgttcttggcagctctgtcactcagctttattgctaagacactaggtgcaa

SEQ ID NO: 312211 - DNA, 120 bp, Artificial Sequence
  ENSG00000134538_2 (sequence is synthesized)
ttattatgaaaagttccatcattcatatagaacggagatttgagatatcctcttctcttgttggttttattgacggaagctttgaaattggaaatttgcttgtgattgtatttgtgagtt

SEQ ID NO: 312212 - DNA, 120 bp, Artificial Sequence
  ENSG00000134538_3 (sequence is synthesized)
actttggatccaaactacatagaccaaagttaattggaatcggttgtttcattatgggaattggaggtgttttgactgctttgccacatttcttcatgggatattacaggtattctaaag

SEQ ID NO: 312213 - DNA, 120 bp, Artificial Sequence
  ENSG00000134538_4 (sequence is synthesized)
aaactaatatcaattcatcagaaaattcaacatcgaccttatccacttgtttaattaatcaaattttatcactcaatagagcatcacctgagatagtgggaaaaggttgtttaaaggaat

SEQ ID NO: 312214 - DNA, 120 bp, Artificial Sequence
  ENSG00000134538_5 (sequence is synthesized)
ctgggtcatacatgtggatatatgtgttcatgggtaatatgcttcgtggaataggggagactcccatagtaccattggggctttcttacattgatgatttcgctaaagaaggacattctt

SEQ ID NO: 312215 - DNA, 120 bp, Artificial Sequence
  ENSG00000134538_6 (sequence is synthesized)
ctttgtatttaggtatattgaatgcaatagcaatgattggtccaatcattggctttaccctgggatctctgttttctaaaatgtacgtggatattggatatgtagatctaagcactatca

SEQ ID NO: 312216 - DNA, 120 bp, Artificial Sequence
  ENSG00000134538_7 (sequence is synthesized)
ggataactcctactgattctcgatgggttggagcttggtggcttaatttccttgtgtctggactattctccattatttcttccataccattctttttcttgccccaaactccaaataaac

SEQ ID NO: 312217 - DNA, 120 bp, Artificial Sequence
  ENSG00000134538_8 (sequence is synthesized)
cacaaaaagaaagaaaagcttcactgtctttgcatgtgctggaaacaaatgatgaaaaggatcaaacagctaatttgaccaatcaaggaaaaaatattaccaaaaatgtgactggttttt

SEQ ID NO: 312218 - DNA, 120 bp, Artificial Sequence
  ENSG00000134538_9 (sequence is synthesized)
tccagtcttttaaaagcatccttactaatcccctgtatgttatgtttgtgcttttgacgttgttacaagtaagcagctatattggtgcttttacttatgtcttcaaatacgtagagcaac

SEQ ID NO: 312219 - DNA, 120 bp, Artificial Sequence
  ENSG00000134538_10 (sequence is synthesized)
agtatggtcagccttcatctaaggctaacatcttattgggagtcataaccatacctatttttgcaagtggaatgtttttaggaggatatatcattaaaaaattcaaactgaacaccgttg

SEQ ID NO: 312220 - DNA, 120 bp, Artificial Sequence
  ENSG00000134538_11 (sequence is synthesized)
ctgtgatgtcattgtccttttacctattatattttttcatactctgtgaaaacaaatcagttgccggactaaccatgacctatgatggaaataatccagtgacatctcatagagatgtac

SEQ ID NO: 312221 - DNA, 120 bp, Artificial Sequence
  ENSG00000134538_12 (sequence is synthesized)
cactttcttattgcaactcagactgcaattgtgatgaaagtcaatgggaaccagtctgtggaaacaatggaataacttacatctcaccctgtctagcaggttgcaaatcttcaagtggca

SEQ ID NO: 312222 - DNA, 120 bp, Artificial Sequence
  ENSG00000134538_13 (sequence is synthesized)
ataaaaagcctatagtgttttacaactgcagttgtttggaagtaactggtctccagaacagaaattactcagcccatttgggtgaatgcccaagagatgatgcttgtacaaggaaatttt

SEQ ID NO: 312223 - DNA, 120 bp, Artificial Sequence
  ENSG00000134538_14 (sequence is synthesized)
acttttttgttgcaatacaagtcttgaatttatttttctctgcacttggaggcacctcacatgtcatgctgattgttaaaattgttcaacctgaattgaaatcacttgcactgggtttcc

SEQ ID NO: 312224 - DNA, 120 bp, Artificial Sequence
  ENSG00000134538_15 (sequence is synthesized)
actcaatggttatacgagcactaggaggaattctagctccaatatattttggggctctgattgatacaacgtgtataaagtggtccaccaacaactgtggcacacgtgggtcatgtagga

SEQ ID NO: 312225 - DNA, 120 bp, Artificial Sequence
  ENSG00000134538_16 (sequence is synthesized)
catataattccacatcattttcaagggtctacttgggcttgtcttcaatgttaagagtctcatcacttgttttatatattatattaatttatgccatgaagaaaaaatatcaagagaaag

SEQ ID NO: 312226 - DNA, 120 bp, Artificial Sequence
  ENSG00000134538_17 (sequence is synthesized)
atatcaatgcatcagaaaatggaagtgtcatggatgaagcaaacttagaatccttaaataaaaataaacattttgtcccttctgctggggcagatagtgaaacacattgttaaggggaga

SEQ ID NO: 312227 - DNA, 120 bp, Artificial Sequence
  ENSG00000134538_18 (sequence is synthesized)
aaaaaagccacttctgcttctgtgtttccaaacagcattgcattgattcagtaagatgttatttttgaggagttcctggtcctttcactaagaatttccacatcttttatggtggaagta

SEQ ID NO: 312228 - DNA, 120 bp, Artificial Sequence
  ENSG00000134538_19 (sequence is synthesized)
taaataagcctatgaacttataataaaacaaactgtaggtagaaaaaatgagagtactcattgttacattatagctacatatttgtggttaaggttagactatatgatccatacaaatta

SEQ ID NO: 312229 - DNA, 120 bp, Artificial Sequence
  ENSG00000134538_20 (sequence is synthesized)
aagtgagagacatggttactgtgtaataaaagaaaaaatacttgttcaggtaattctaattcttaataaaacaaatgagtatcatacaggtagaggttaaaaaggaggagctagattcat

SEQ ID NO: 312230 - DNA, 120 bp, Artificial Sequence
  ENSG00000134538_21 (sequence is synthesized)
atcctaagtaaagagaaatgcctagtgtctattttattaaacaaacaaacacagagtttgaactataatactaaggcctgaagtctagcttggatatatgctacaataatatctgttact

SEQ ID NO: 312231 - DNA, 120 bp, Artificial Sequence
  ENSG00000134539_0 (sequence is synthesized)
attcacactataatacatgtctcaccaatagatgattcaagaacatcatttaaatacacaatttttcattctctatttttgctaaatttcttcatactcaactttcagattctttaatct

SEQ ID NO: 312232 - DNA, 120 bp, Artificial Sequence
  ENSG00000134539_1 (sequence is synthesized)
ccagctcagcttcaacaattcaacgctgttctttctgaaaaagtacacatcgtgccttctctacttcgctcttggaacataatttctcatggcagtgtttaagaccactctgtggaggtt

SEQ ID NO: 312233 - DNA, 120 bp, Artificial Sequence
  ENSG00000134539_2 (sequence is synthesized)
aatttctgggaccttagggataatatgcctttcgttgatgtctacgttgggaattttgttgaaaaattcttttactaaactgagtattgagccagcatttactccaggacccaacataga

SEQ ID NO: 312234 - DNA, 120 bp, Artificial Sequence
  ENSG00000134539_3 (sequence is synthesized)
actccagaaagactctgactgctgttcttgccaagaaaaatgggttgggtaccggtgcaactgttacttcatttccagtgaacagaaaacttggaacgaaagtcggcatctctgtgcttc

SEQ ID NO: 312235 - DNA, 120 bp, Artificial Sequence
  ENSG00000134539_4 (sequence is synthesized)
tcagaaatccagcctgcttcagcttcaaaacacagatgaactggattttatgagctccagtcaacaattttactggattggactctcttacagtgaggagcacaccgcctggttgtggga

SEQ ID NO: 312236 - DNA, 120 bp, Artificial Sequence
  ENSG00000134539_5 (sequence is synthesized)
gaatggctctgcactctcccagtatctatttccatcatttgaaacttttaatacaaagaactgcatagcgtataatccaaatggaaatgctttagatgaatcctgtgaagataaaaatcg

SEQ ID NO: 312237 - DNA, 120 bp, Artificial Sequence
  ENSG00000134539_6 (sequence is synthesized)
ttatatctgtaagcaacagctcatttaaatgtttcttggggcagagaaggtggagagtaaagacccaacattactaacaatgatacagttgcatgttatattattactaattgtctactt

SEQ ID NO: 312238 - DNA, 120 bp, Artificial Sequence
  ENSG00000134539_7 (sequence is synthesized)
ctggagtctataaaatgtttttaaacagtgtcatatacaattgtcatgtatgtgaaacaatgtgttttaaaattgatgaaattcgttcacctacatttgagaattataaaattaacataa

SEQ ID NO: 312239 - DNA, 120 bp, Artificial Sequence
  ENSG00000134539_8 (sequence is synthesized)
taattcacatcaaataaaatttagaaaataaaatttaactcacactgcccaggctggagcatagtggcaagatcatagctcattgcaagctcaagtgatcctcctgactcagcctcccaa

SEQ ID NO: 312240 - DNA, 120 bp, Artificial Sequence
  ENSG00000134539_9 (sequence is synthesized)
aagtgatcctcctgactcagcctcccaagtagctaggactgcaggcaccatgtcactatgcccgactaatttttaatttttaattttttgtcaagacaaggtcttgctatgttgcccagg

SEQ ID NO: 312241 - DNA, 120 bp, Artificial Sequence
  ENSG00000134539_10 (sequence is synthesized)
tgctgggattataggtgtgaaccaccatccctggccctcttcacattcttgtatgaagattgatttgggaaaaatgcatttcaggtaactgacaaaagatataggatgaaaaataatatc

SEQ ID NO: 312242 - DNA, 120 bp, Artificial Sequence
  ENSG00000134539_11 (sequence is synthesized)
agatataggatgaaaaataatatctttcaaatgtttaatttgaactaagagagcttatgcattgcactttctggagatttgtaatgttttggttttgttgtccatgtgactacaaaataa

SEQ ID NO: 312243 - DNA, 120 bp, Artificial Sequence
  ENSG00000134539_12 (sequence is synthesized)
tatattttttaattaaaaaatttaaaataatacaggcaagcatgtaatgattatcaatatttttttccaccaactatcctatacccctgacctcctttcattaggcattatcttctgttt

SEQ ID NO: 312244 - DNA, 120 bp, Artificial Sequence
  ENSG00000134539_13 (sequence is synthesized)
tgattttaacacttagagtggttttctctgttatgaatcaaagctgatctattttcatcatttttgtgatgaaaaaattaattttgattgacttaggatggaaggatttggactgggtgt

SEQ ID NO: 312245 - DNA, 120 bp, Artificial Sequence
  ENSG00000134539_14 (sequence is synthesized)
aaaaaaaaaaaaaaaaaagatgaaaggatttggaaccttaattgcatctgaaaaactgcctcacctttgttatttagtgtactccaaccacggagtaacatcccatcataatcccaaatc

SEQ ID NO: 312246 - DNA, 120 bp, Artificial Sequence
  ENSG00000134539_15 (sequence is synthesized)
caaccacggagtaacatcccatcataatcccaaatcctactcaaacaaaaggggaagggattatgcaggtgtacactaggccactggtgtaccaattagaaaccactttagagttatgcc

SEQ ID NO: 312247 - DNA, 120 bp, Artificial Sequence
  ENSG00000134539_16 (sequence is synthesized)
gtaccaattagaaaccactttagagttatgcctactgtacccacataatcctaaaaatatgttacaactgctacttcatagtttatgccacttattttattttttacttttattattttt

SEQ ID NO: 312248 - DNA, 87 bp, Artificial Sequence
  ENSG00000134539_17 (sequence is synthesized)
ttatttttttttctgagacacggtttcattcccattgcccaggctgtagtgcaatgatgcaatcatggttcactgcagcttcaactt

SEQ ID NO: 312249 - DNA, 90 bp, Artificial Sequence
  ENSG00000134539_18 (sequence is synthesized)
ctgagtacttgggactcaggtgcgagccatcatgctcagctaattttttgtatcatttgtagaaatggggttttgtatgtcaaggattct

SEQ ID NO: 312250 - DNA, 120 bp, Artificial Sequence
  ENSG00000134539_19 (sequence is synthesized)
attacaggcataagccactgtgcccggccagtttatataatttaaacactgccttttggttccttgattcccatatgctaggacaagtaattattattttattttattttactttaagtt

SEQ ID NO: 312251 - DNA, 63 bp, Artificial Sequence
  ENSG00000134539_20 (sequence is synthesized)
ctaatgctcttcctccccttgccccccaccccccgacaggccttggtctaagaacatgtggtg

SEQ ID NO: 312252 - DNA, 84 bp, Artificial Sequence
  ENSG00000134539_21 (sequence is synthesized)
aagtctttgctatgaggacaagtaattattttctgtttttctcaatacattaattattagttcctccgttagttgtgaagtcct

SEQ ID NO: 312253 - DNA, 120 bp, Artificial Sequence
  ENSG00000134539_22 (sequence is synthesized)
atacattaattattagttcctccgttagttgtgaagtcctaattagggaaaaggagttaggctggcgggagcagggaaaagcagaaagagaaagcagataagctatgagtctgcctttct

SEQ ID NO: 312254 - DNA, 120 bp, Artificial Sequence
  ENSG00000134539_23 (sequence is synthesized)
tcatggtccaggatatgggccatgtgctaaactattaccagacacctgcaagttacctcaccgcaaccttggcattatcagtactggacaaagccctctgcagcatacagcataaacact

SEQ ID NO: 312255 - DNA, 120 bp, Artificial Sequence
  ENSG00000134539_24 (sequence is synthesized)
attccataaaatcctaagcaagcctttgtttctttgcagtcagcttttcttctgctgatgctgcctgttgcctccctggaaacatattttcctacttttctttaataaatctgccttcct

SEQ ID NO: 312256 - DNA, 120 bp, Artificial Sequence
  ENSG00000134539_25 (sequence is synthesized)
ttacctacagctgtcttggtaaattcttttacctcaatgccaccggcccaggtagccgttgctcacccacaacattagtgtattagtccgttcttatgctgctactaaagatatacccaa

SEQ ID NO: 312257 - DNA, 120 bp, Artificial Sequence
  ENSG00000134539_26 (sequence is synthesized)
gactgggaaatttataaaataaagacatttaattgactcacagttctgcagggttggagaagcctcaggaaacttacagtaatgacagaagggaaagcaaacacatccctctacgcatgg

SEQ ID NO: 312258 - DNA, 120 bp, Artificial Sequence
  ENSG00000134539_27 (sequence is synthesized)
aatgacagaagggaaagcaaacacatccctctacgcatggcagcagaaaggagacgtgctgagcaaaaggaaaaataccctcttattaaatcatcagatctagtgagaactcactcacta

SEQ ID NO: 312259 - DNA, 85 bp, Artificial Sequence
  ENSG00000134539_28 (sequence is synthesized)
tcatgagaacagcaaagaggtaactacccccatgattaaattacctcctaccagttccctcacatgatacgtgaggattaggggc

SEQ ID NO: 312260 - DNA, 120 bp, Artificial Sequence
  ENSG00000134539_29 (sequence is synthesized)
gcatgcataagaaagtgagttattttacagctgaactgggacagctctttgcttatttccagagatgcctaggtgtctgtttttgactcttggccatgatatgggtagtaggctaactaa

SEQ ID NO: 312261 - DNA, 120 bp, Artificial Sequence
  ENSG00000134539_30 (sequence is synthesized)
ctagctaacaaatggtttatggtgagttctttaaagttcaaaatccctcagtggaatccagggtcaatttgtttattgatagcttccatatgagataattacagatcttgtctctgctgt

SEQ ID NO: 312262 - DNA, 120 bp, Artificial Sequence
  ENSG00000134539_31 (sequence is synthesized)
gtgaccagacacagataaaagactgcaagaaatttcagtttcagctctcatgaaaccaagtttcatctcacaaatatcaggtttcatccagagatgaatggtgtctttgcgcaaatatct

SEQ ID NO: 312263 - DNA, 120 bp, Artificial Sequence
  ENSG00000134539_32 (sequence is synthesized)
ctttgcgcaaatatctcttggtcccacactgcttgtttgaattctctttctcatacggtatcatattcctttcacttattaaaaagtttttcatggctgggcgcggtggctcaagcctgt

SEQ ID NO: 312264 - DNA, 120 bp, Artificial Sequence
  ENSG00000134539_33 (sequence is synthesized)
aaaaaaaaaaaaaaaaaaaaagcttttcataagtatgctcattagaaccttataattcatttcagttatctacacctggaaatgttagttctataattttggactttctgaaacttttct

SEQ ID NO: 312265 - DNA, 120 bp, Artificial Sequence
  ENSG00000134539_34 (sequence is synthesized)
ctttatatcctaacgcaggggttgaaaaacttttctcaaaaagctctatagcatatattttcaactttgtggaccagtctctgttgaaacttctcaaccttgccatggtggtgctaaaga

SEQ ID NO: 312266 - DNA, 120 bp, Artificial Sequence
  ENSG00000134539_35 (sequence is synthesized)
agacataaataatacaaaaatgaatggtttgactgtgttacaaaagaattttattgacaaaacatatggtgagacagatttggtccacaggccatagtttgccaacatgtgcccaagtat

SEQ ID NO: 312267 - DNA, 120 bp, Artificial Sequence
  ENSG00000134539_36 (sequence is synthesized)
gtaagatgagaatataaggccataaattctactctctgctttattcttttccaggtcacttcttaccagttgtaaatgtacttacaaattttgctatatgaaaacagttatgtctgttac

SEQ ID NO: 312268 - DNA, 120 bp, Artificial Sequence
  ENSG00000134539_37 (sequence is synthesized)
tatcaatctgtgttcattttaaagggtgacaatctacaaattatgtgttatagacaagttgcaagatgttcaccaatgattcccaccttgtgctatacatgccttggtggaatttctttc

SEQ ID NO: 312269 - DNA, 120 bp, Artificial Sequence
  ENSG00000134539_38 (sequence is synthesized)
cacattgtatcaaggttgctctgtgtgaccaatgaaataaagtggaaatgatgatatttcatttctgagaataggtcatcaaagatagtatgacttcctttttcctctctcccagattac

SEQ ID NO: 312270 - DNA, 120 bp, Artificial Sequence
  ENSG00000134539_39 (sequence is synthesized)
ttgatctggggaaaaccagttataatgtcatgagcagccctgttgaaaggaccatgcggcaaggaactgaagactcttacacacagccagcaaggaactgaagtctatttccaatagcca

SEQ ID NO: 312271 - DNA, 120 bp, Artificial Sequence
  ENSG00000134539_40 (sequence is synthesized)
tgctatgagccttctttgcttgtataggctccagtcttagtcaagccttcagatgattacagcccccagccaacaccttgacggcaacctcatgagagaccctgagctaggtccatcgtg

SEQ ID NO: 312272 - DNA, 89 bp, Artificial Sequence
  ENSG00000134539_41 (sequence is synthesized)
acggcaacctcatgagagaccctgagctaggtccatcgtgctatgctgttcgaggattcctcactctcagaagctgtgtgaaatagtaa

SEQ ID NO: 312273 - DNA, 120 bp, Artificial Sequence
  ENSG00000134539_42 (sequence is synthesized)
acataacttttattcttttaagtcactaaatattaacgtgtcacatagcaataatcaatacatattttggtaccaagaatgaagttactattataaagaaaaaaaaaaaccactaaaatt

SEQ ID NO: 312274 - DNA, 120 bp, Artificial Sequence
  ENSG00000134539_43 (sequence is synthesized)
ttggagtgcttgaaaacaggcagtggatggaggccaaaaggacaggaaagactgaaaccttctagtatgggcttatagtagggaagtgaaaacatattagaaactggagaaagtaaaaat

SEQ ID NO: 312275 - DNA, 120 bp, Artificial Sequence
  ENSG00000134539_44 (sequence is synthesized)
ctttctatttagtaccagaaagtttagcaacacttttgtctgtagcattgtggaaagtagaaaatgtacttaatgatttaagagaatgctctaaacttatttccaactagagtgttgaat

SEQ ID NO: 312276 - DNA, 120 bp, Artificial Sequence
  ENSG00000134539_45 (sequence is synthesized)
atcttgtctgatttcttcctactacttatattacaatgctatagaacacacataagctaatggaagggctgttgagcaaaagaagacagaacttgatagttttgagattcctggactctc

SEQ ID NO: 312277 - DNA, 120 bp, Artificial Sequence
  ENSG00000134539_46 (sequence is synthesized)
aaatgttagcatgtcaaaaatgctaaaattgagaaatagattctgagcaaagatccaatctagagtgctctcaggaaagcatgattctaaacaagaaggtgtgggtgtgactgaaatttc

SEQ ID NO: 312278 - DNA, 120 bp, Artificial Sequence
  ENSG00000134539_47 (sequence is synthesized)
ctgtaaatatcatagaaagaacacaagtagtgcctcaattcagtcagatgaagatctataaaggtcaaataatagggcttctaggaagccccagggtattgtccctcaggtatctcagca

SEQ ID NO: 312279 - DNA, 120 bp, Artificial Sequence
  ENSG00000134539_48 (sequence is synthesized)
gaagctccaggtagagagaagattgaagagatttatgtgtgcggtttttacaaatagagttcatagaaaacctcaaaacacttttgagatgactatgtcagtagaaaattgacaatgaat

SEQ ID NO: 312280 - DNA, 120 bp, Artificial Sequence
  ENSG00000134539_49 (sequence is synthesized)
tgctaccttttattcaaaagtaagaataattcaaaggacagaactaagagcctgtaaggtggatccaagagttatgaagagtgattttataagcagaaataggactgagtcctaatcaaa

SEQ ID NO: 312281 - DNA, 120 bp, Artificial Sequence
  ENSG00000134539_50 (sequence is synthesized)
tgagtcccgacatttgctatgctagattttaaattattatgcatcagtgactcctttgtaattctcatgcccctccctcttttgaacaaggatgtctatagtttgttctttcgaatgttg

SEQ ID NO: 312282 - DNA, 120 bp, Artificial Sequence
  ENSG00000134539_51 (sequence is synthesized)
agtgtataagggaaggaaatctctagtattgttaatttcacaagccttcacatggagaaaaatgatactcaagaagctaaacttaaggaacttcacctgatgagtctcactcatacctgg

SEQ ID NO: 312283 - DNA, 120 bp, Artificial Sequence
  ENSG00000134539_52 (sequence is synthesized)
atgtgacaaatttcggactttgaactgacattgtaacggaatgagatttggcagttggtgtggattttgtatgtgggagggacataaatcatttggggccaaagattagactcttgtaaa

SEQ ID NO: 312284 - DNA, 120 bp, Artificial Sequence
  ENSG00000134539_53 (sequence is synthesized)
cagcttcctatatgctcccaatgatccctgtttcttggaatttaacccttttgatataatcaattacattgtataagggttgatcactgtgaccaagagaataaggcagaagttatcgca

SEQ ID NO: 312285 - DNA, 120 bp, Artificial Sequence
  ENSG00000134539_54 (sequence is synthesized)
tatcacttttgaggctagattataaaagacagtatgtctttggcgttgccctttctcatatcatctgatttggtggaagccagctaccttgtcgtgagcaactcttttaagcgttccatg

SEQ ID NO: 312286 - DNA, 120 bp, Artificial Sequence
  ENSG00000134539_55 (sequence is synthesized)
gttcaactcttcagccagtgtcaagccttagaaaatacaacccaacctacatttttactgcaacctcatgagggatcctgagctagaaccacctagcacagttgctcttgatttctgacc

SEQ ID NO: 312287 - DNA, 120 bp, Artificial Sequence
  ENSG00000134539_56 (sequence is synthesized)
tcagaaactgtgaagtgaaatattttgttgttttaagcttacgagtttgaggataatttgttctttatagtagttagctgatacaatatgcttcatcatcatgacctcatgaatagagaa

SEQ ID NO: 312288 - DNA, 120 bp, Artificial Sequence
  ENSG00000134539_57 (sequence is synthesized)
gattacaggcatgagccattgtgtctggccaaatagaggacattttagagcccaatagtaagctaggattatatttccttctttgaggttctattgttataacccttatacaataaaaaa

SEQ ID NO: 312289 - DNA, 120 bp, Artificial Sequence
  ENSG00000134539_58 (sequence is synthesized)
attgttataacccttatacaataaaaaacaactcttctgccagattaaaattttttgttttttggtttttttagttctcaattatgttgtataacccatgagtgtcactttattctcatt

SEQ ID NO: 312290 - DNA, 120 bp, Artificial Sequence
  ENSG00000134539_59 (sequence is synthesized)
ggaaatatcctcccaagagctcttacccacctgctgttgtttggactggcaccttactagacctgctccacaaactgccgtcatgaaatttttcttcactaattttctcatttacactaa

SEQ ID NO: 312291 - DNA, 120 bp, Artificial Sequence
  ENSG00000134539_60 (sequence is synthesized)
atacttcattgattacagtttacctcttcatatattttaattgagcaaaaacacaataaagaatacctatcttaaatttactcgtaaacatttaagctatgtctacacttacacgattac

SEQ ID NO: 312292 - DNA, 120 bp, Artificial Sequence
  ENSG00000134539_61 (sequence is synthesized)
taccagattgcaatagagactacctaccaccaccaagactctcttgctgtttgctaattgatactgtctcccctgttccaagaaaactgctactctgatttctgaaaatataggtttatt

SEQ ID NO: 312293 - DNA, 120 bp, Artificial Sequence
  ENSG00000134539_62 (sequence is synthesized)
tagcctgttctttaatttcatataaatggaagcttagcatgtatgatctttgtggcttctgttgctaagcattacgtctgtgagatacatccatatattcgtgcagcagtagctcctcac

SEQ ID NO: 312294 - DNA, 120 bp, Artificial Sequence
  ENSG00000134539_63 (sequence is synthesized)
ttttattgtcatgtagaattcataagaatgtatcacaatttgcttatttattctaatattgttcaacatttgagtcatttccacttttcactattatgagtaaaattgctataaacattt

SEQ ID NO: 312295 - DNA, 120 bp, Artificial Sequence
  ENSG00000134539_64 (sequence is synthesized)
taatatagctcttgtgggacatgtggcttcatatcttttgagtgtacgcctaggagttgaatttctaagtcataagctgtcatatatttaggccctttagttcacgctttaaaaactagt

SEQ ID NO: 312296 - DNA, 120 bp, Artificial Sequence
  ENSG00000134539_65 (sequence is synthesized)
gataatttattcataaagcttatttataatttcactggcagtttatgtgagtgttactctgtattcttgacaatacatagtattatgaattattttagtctaaggaccttctggatacta

SEQ ID NO: 312297 - DNA, 120 bp, Artificial Sequence
  ENSG00000134539_66 (sequence is synthesized)
tgcatttgcatacaattgtacatttaatttccatcttccaaatgaataatgatgcttatccctcatctttttttttcatttttatatccccttctatgtagtgcttgtttaagcttttag

SEQ ID NO: 312298 - DNA, 120 bp, Artificial Sequence
  ENSG00000134539_67 (sequence is synthesized)
ccattatttatttttaacagcgctgttgcagtataattgagatactttaagcatactttatatgcttaaagtatgacatttgatgtatttccatatctatgcatctgtgaaaccatcacc

SEQ ID NO: 312299 - DNA, 120 bp, Artificial Sequence
  ENSG00000134539_68 (sequence is synthesized)
tcagcaatatataaaacacctactaacctcaaaagtatcctttcccctatgtataaaatacttcctcttgctcctcccctcacagatgaatattctgttactatagatttgcctttctat

SEQ ID NO: 312300 - DNA, 120 bp, Artificial Sequence
  ENSG00000134539_69 (sequence is synthesized)
gttttatatagatagaatcatataatatgtacatctgtgttctagatttttcattcagcatcataatagtttttatactcatctatgttgatacatgtatcaatagttaattccctttta

SEQ ID NO: 312301 - DNA, 89 bp, Artificial Sequence
  ENSG00000134539_70 (sequence is synthesized)
tgatacatgtatcaatagttaattcccttttagagactgagtattgctctgtcacccagattagagtgcagtggtgtgatctcagctca

SEQ ID NO: 312302 - DNA, 67 bp, Artificial Sequence
  ENSG00000134539_71 (sequence is synthesized)
tcagctcactgcaaccttcaccacctgggttcaagttattctcatgcctcagcctccccagtagccg

SEQ ID NO: 312303 - DNA, 120 bp, Artificial Sequence
  ENSG00000134539_72 (sequence is synthesized)
tggaattacaggcgtgagccaccacatccagccgattcctttttacttctgagagtcttctgatccttgagtaaagtatgtttcttgtacctcaatatgcttaattttttccttctggct

SEQ ID NO: 312304 - DNA, 120 bp, Artificial Sequence
  ENSG00000134539_73 (sequence is synthesized)
tttcttgtacctcaatatgcttaattttttccttctggctttcgttttaggttcagggtatatatgtaggcttcttatatgagtacattgcatgttgcagtggtttggtgtacagataat

SEQ ID NO: 312305 - DNA, 120 bp, Artificial Sequence
  ENSG00000134539_74 (sequence is synthesized)
tttgtcatcctggtaatcagcatagtacctgacaggcagtttttctatcctcatccttctccctctcccccccaagtaggccccagtgtctattgtttcctttttttgtgtgcctgtgta

SEQ ID NO: 312306 - DNA, 120 bp, Artificial Sequence
  ENSG00000134539_75 (sequence is synthesized)
ctccatggttagctcccacttataagggagaatatgtggtttttggttttctgttcttccattgatttgcttaggataatggcctctagttctatccatgttcctgcaaaggacatgatt

SEQ ID NO: 312307 - DNA, 120 bp, Artificial Sequence
  ENSG00000134539_76 (sequence is synthesized)
ggtgtatatgtaccacattttctttacctagtccattgtctcaatatacttaagttatactcagtaatgttttgtagtttttaatattcaggccttttatgtttttatgagatttcccca

SEQ ID NO: 312308 - DNA, 120 bp, Artificial Sequence
  ENSG00000134539_77 (sequence is synthesized)
tgtagtttttaatattcaggccttttatgtttttatgagatttccccaaagtagtctattgtttttaaagctattatacattttattttctaatttcaaatgttttattttaaaattgta

SEQ ID NO: 312309 - DNA, 120 bp, Artificial Sequence
  ENSG00000134539_78 (sequence is synthesized)
tgtatatatatatatatatatatatattcatttacacagttgattctaagtgtatcttttattgtttaacctgcctaaattcacttatcctagcagcatttctgtagatttcattgggtt

SEQ ID NO: 312310 - DNA, 120 bp, Artificial Sequence
  ENSG00000134539_79 (sequence is synthesized)
attgggttatctgcatagatgaataaagacagtttttacctctttcttttgaaaactgtgtgcctttaattctttttatcaccttgtcacagtggccagaatattcaacacaaagttgaa

SEQ ID NO: 312311 - DNA, 120 bp, Artificial Sequence
  ENSG00000134539_80 (sequence is synthesized)
tacaagtggtgagtaaacacccttgttttgctattgatcttagagcatgaatattcactttttttacctttatacttaattttagctgtaggattttcataaatgacctttactaggttg

SEQ ID NO: 312312 - DNA, 120 bp, Artificial Sequence
  ENSG00000134539_81 (sequence is synthesized)
agaaagttccctcctattcctagtctgatgagaatttttataaggagtacatatgacatatgcttttattaaatgttttattctgcctcgattgaaatcagatagtttttatttcccagt

SEQ ID NO: 312313 - DNA, 120 bp, Artificial Sequence
  ENSG00000134539_82 (sequence is synthesized)
tataaacctcagttgttcatgttatcttttttacgtatctttgcagatgctttgctaattttttaaaattttattttattgaggtaaatacaacataagatctatcctcttaacaaattt

SEQ ID NO: 312314 - DNA, 120 bp, Artificial Sequence
  ENSG00000134539_83 (sequence is synthesized)
tcaagtctacagtacagtattattaacaataggtacaatgttgtatagtagatctctataatttattcatcttgcataattgaggctttatgccctttgattaacgacgtcccatttttt

SEQ ID NO: 312315 - DNA, 120 bp, Artificial Sequence
  ENSG00000134539_84 (sequence is synthesized)
cctctctccattcctggcaaccaccattctattctctgattttataagcttgaccactttagatatttcacgtaagtggaatcatatagtatttatcctgtgacttgtttatttcattta

SEQ ID NO: 312316 - DNA, 120 bp, Artificial Sequence
  ENSG00000134539_85 (sequence is synthesized)
gcataatgtcctcaagtttcatccacattgttacatattgcaggatttcatttttaaggctggataatattctattgtatgtgtatgtacacattggctactgtgactagtatagcaatg

SEQ ID NO: 312317 - DNA, 120 bp, Artificial Sequence
  ENSG00000134539_86 (sequence is synthesized)
ctgtgactagtatagcaatggacagtagtatactaatatttctttgagattcttatttcaattcttttgcataattacccagaaaggggattggtggatcatatggtagttctattttta

SEQ ID NO: 312318 - DNA, 120 bp, Artificial Sequence
  ENSG00000134539_87 (sequence is synthesized)
cctgttttccacagaagcagcacaatttttcattcccaccaaagtgttcaaggggtctaattaccccacgtacttctcaacacttgtctttcatttgtttgataatagccatccttataa

SEQ ID NO: 312319 - DNA, 120 bp, Artificial Sequence
  ENSG00000134539_88 (sequence is synthesized)
gtgagagatgatatttggtggttataatttgcatttccctgatgattagtgatattgagcatcatttcatatgcccattgaccctttgtatgttttttatgaagaaatgaccattcaagt

SEQ ID NO: 312320 - DNA, 120 bp, Artificial Sequence
  ENSG00000134539_89 (sequence is synthesized)
ctttgatacattttttaattgggttacttgtgttttttttaatattgagttgtaggagttctttatatgttttggatattgactccttttctgatatatgatttgcaattattttctccc

SEQ ID NO: 312321 - DNA, 85 bp, Artificial Sequence
  ENSG00000134539_90 (sequence is synthesized)
gactccttttctgatatatgatttgcaattattttctcccattctgtagatcatcctttcattccattggttatttcctttgtga

SEQ ID NO: 312322 - DNA, 89 bp, Artificial Sequence
  ENSG00000134539_91 (sequence is synthesized)
gaaagtttattttgcaaaggttgagaacatatgcccataacacagcctcacctcaggaggtcctgctgacatgtgcccaaggtggtcag

SEQ ID NO: 312323 - DNA, 120 bp, Artificial Sequence
  ENSG00000134539_92 (sequence is synthesized)
ttggtctagaaaggtgggacaattcaaagcagaagtgaaacaactggaagcaaggagggggcttccaggtcacaggtaagagacaaatggttgcacctttttgtttctgattagcctttc

SEQ ID NO: 312324 - DNA, 120 bp, Artificial Sequence
  ENSG00000134539_93 (sequence is synthesized)
tcagatatgcatttatctcagtgagcaaagagatgactttgaatagaatggggggctcccaggtcacaggtaagggacaaatggttgcatctttttgtttctgattagcctttccaaagg

SEQ ID NO: 312325 - DNA, 120 bp, Artificial Sequence
  ENSG00000134539_94 (sequence is synthesized)
cctttccaaaggaggcaatcagatacgtatttatctcagtgagcaaagagatgactttgaatagaatgggaggcagttttgccctaagcagttcccagcttgaattttcccttttgttga

SEQ ID NO: 312326 - DNA, 120 bp, Artificial Sequence
  ENSG00000134539_95 (sequence is synthesized)
gggggcccaagatattttcctttcacacctttgatgcgaacaagctgtttgtttgctatagtcctacttgtctattcttgcttttgttgcctgtgcttttggtgtcagattgatgatatc

SEQ ID NO: 312327 - DNA, 120 bp, Artificial Sequence
  ENSG00000134539_96 (sequence is synthesized)
atgatatcattgccaaaaccaatgtcaaaaggttttcctctatgttttctttgaagggctttacattttcagtacttacatttaggcttttaatccatttgaaatttatttttgcatatg

SEQ ID NO: 312328 - DNA, 120 bp, Artificial Sequence
  ENSG00000134539_97 (sequence is synthesized)
gtgtaagataagcaatttctttgcaatatggatgttcatttttcccgtcactgtttgttgaagaaactgtcatttccccttaaatagtcctgccacccaaagaccgtttaaccatatttg

SEQ ID NO: 312329 - DNA, 120 bp, Artificial Sequence
  ENSG00000134539_98 (sequence is synthesized)
caaagtttattcccaagttctccaatctgtttaattggtctatatgttcatctttatgccagtgccatattgtttcaattattgtagctttgtaatatattttgatatcaggaagtttga

SEQ ID NO: 312330 - DNA, 120 bp, Artificial Sequence
  ENSG00000134539_99 (sequence is synthesized)
ggcctctggccttctgtttcttgctcaagatttgtttggctattcagggctttttgtggttccatgtatattttagtatcattgttttcctaattctaaaatgccattgaggtcttgata

SEQ ID NO: 312331 - DNA, 120 bp, Artificial Sequence
  ENSG00000134539_100 (sequence is synthesized)
ggtattgcactaaatctgcagatcacattgtgaaatacaaatattttaactatatgaagtcttttaataaatgaatataggaggatttttgcatgttgattttgtaccctgcaactttac

SEQ ID NO: 312332 - DNA, 120 bp, Artificial Sequence
  ENSG00000134539_101 (sequence is synthesized)
ttggttttaggaggcttttttgtggattctttagagcatgccataggcaaacagggaccattgtacttcttcttttacaatctgtatgttgttaatttcttttccttgcctaagagcttt

SEQ ID NO: 312333 - DNA, 120 bp, Artificial Sequence
  ENSG00000134539_102 (sequence is synthesized)
aagtaggacaagggttaaatagaaatggcaagtgcaaacatccttgccatgtttctgatgtcagaggaaaagttcagctttttccatagcatgatattagctatgcactttacatatagg

SEQ ID NO: 312334 - DNA, 120 bp, Artificial Sequence
  ENSG00000134539_103 (sequence is synthesized)
gccttcaaaatgttgaaatatttttctcaaattctaggttggcaggagttatcatcataaaatgggtattaaattttgtgaaaactttttttctgaatctattgagatgcacaggtgaca

SEQ ID NO: 312335 - DNA, 120 bp, Artificial Sequence
  ENSG00000134539_104 (sequence is synthesized)
tttatccttcattctattaatgtggtatattacattaattgattttgtatgttaggctatccttgcaccccagggataaatgccacttgcttatggcatatactccttttagtgtactgt

SEQ ID NO: 312336 - DNA, 120 bp, Artificial Sequence
  ENSG00000134539_105 (sequence is synthesized)
tgaattaattttgctactactttgttgaggatttttgcatctacgtttactagacatattggcttatagttttcttgtggtatctttgacaagctttggtgtaatggtaatgctggccac

SEQ ID NO: 312337 - DNA, 120 bp, Artificial Sequence
  ENSG00000134539_106 (sequence is synthesized)
ataaaattagtttgaaagtatttattctttttaaatttttatataatagcttgggaaagatggccattaatttctccttaaatatttggtggcttcaccagaagagccatcttgtcctgg

SEQ ID NO: 312338 - DNA, 120 bp, Artificial Sequence
  ENSG00000134539_107 (sequence is synthesized)
gaatttttttgttgtaagtttcttgattactgattcaatcttcattctagttatagatacgctcatattttctatttcttcataattcagtcttggtaggtccttgtctttgtgaatttt

SEQ ID NO: 312339 - DNA, 120 bp, Artificial Sequence
  ENSG00000134539_108 (sequence is synthesized)
ttcatttcttctaggttatccaatttgttggcctataattgttcttagttgtctcttaccatcttttatatttctgtggcatcagttgcaatgtcttatttctgatttcatttatttaag

SEQ ID NO: 312340 - DNA, 120 bp, Artificial Sequence
  ENSG00000134539_109 (sequence is synthesized)
gcctctcttctttttcttagtctagctaaaggtttgtcaagttatttatattttccaaaaactaactcttagttttgtttactttttatatatcctttccattcactattttatttctga

SEQ ID NO: 312341 - DNA, 120 bp, Artificial Sequence
  ENSG00000134539_110 (sequence is synthesized)
actaatctttattattttctttattcttctaaatttgaactttgtttgttcttttctacatttctagttgcttgggatatgtattagtccattttcacactgttgataaagacttaactg

SEQ ID NO: 312342 - DNA, 88 bp, Artificial Sequence
  ENSG00000134539_111 (sequence is synthesized)
tatcatggcagaaggtaaaacacatgtctcacatggcggcagacaagagagaatgaaagccaagccaaagggggtttccccttataaa

SEQ ID NO: 312343 - DNA, 120 bp, Artificial Sequence
  ENSG00000134539_112 (sequence is synthesized)
aaaacacatgtctcacatggcggcagacaagagagaatgaaagccaagccaaagggggtttccccttataaaaccatctgatttcataagactgattcactaccatgagaacagtatggg

SEQ ID NO: 312344 - DNA, 73 bp, Artificial Sequence
  ENSG00000134539_113 (sequence is synthesized)
tataaagtgcattgtttgagacctttcttttttcttaatgcagatattcatcactataaacttttcttttagc

SEQ ID NO: 312345 - DNA, 120 bp, Artificial Sequence
  ENSG00000134539_114 (sequence is synthesized)
cttaatgcagatattcatcactataaacttttcttttagccctacttttactacatcccataagttttgttagactttatttttgttttcatttattctaatgtgtttttaaatttccct

SEQ ID NO: 312346 - DNA, 120 bp, Artificial Sequence
  ENSG00000134539_115 (sequence is synthesized)
tttgatttattctttgcagattggttgttcaaaaatgtattgttaaattatcacatatttattagttttccttttgcaactgatttctagtttcattcccttgatgctgtaaaagatact

SEQ ID NO: 312347 - DNA, 120 bp, Artificial Sequence
  ENSG00000134539_116 (sequence is synthesized)
tgatatgacttcaattttcttaattttcttaagacttcttttatgacctaacatatgatctatcctgcagaatgatccatgtgcacttgagaagaatgtatactctgctgctgttggatg

SEQ ID NO: 312348 - DNA, 120 bp, Artificial Sequence
  ENSG00000134539_117 (sequence is synthesized)
gaatgttctgcacatgtctgtaggtgacttgacttgcagtgttgatcaggtcatctgggtctttgttgcctttatgtttggttgttctatccattattaaaagtgagcactgaaatctcc

SEQ ID NO: 312349 - DNA, 88 bp, Artificial Sequence
  ENSG00000134539_118 (sequence is synthesized)
tactgatcaagttcaagagactctaatgcctcagcctcccaagtagcaggggttacagattctttaatctccagctcagcttcaacaa

SEQ ID NO: 312350 - DNA, 120 bp, Artificial Sequence
  ENSG00000134539_119 (sequence is synthesized)
tgtgtgatttcagtcactaaattaaaaataaccagaaaagctatttcttggattggctgattttggggtaatgctttaagagaaaaggacatgattaacagtggatgtttttaggatttt

SEQ ID NO: 312351 - DNA, 120 bp, Artificial Sequence
  ENSG00000134539_120 (sequence is synthesized)
catgcattagcactttccacattcattatattttcctgattcttcattgtataacttagacatgatttcatgaagttttttccacaggtttgaagagtggtttctgacagggctaccttt

SEQ ID NO: 312352 - DNA, 120 bp, Artificial Sequence
  ENSG00000134539_121 (sequence is synthesized)
aaattctgagtgagaactgaactttagcctggttaaattgtgagcaacagtgttctagtatagcaatagaaaatgccaaatattaatgacacaatgctgaaaaggttttaattgactatt

SEQ ID NO: 312353 - DNA, 120 bp, Artificial Sequence
  ENSG00000134539_122 (sequence is synthesized)
tatgttgtgacatccaaaaattacacaaatgaacagtttgacacattgtactgttgttaatgacatcactctttgagagtgtgttcacgttagcacagaatctcctaatgttgaaatgtt

SEQ ID NO: 312354 - DNA, 120 bp, Artificial Sequence
  ENSG00000134539_123 (sequence is synthesized)
ttaggtgaaaggcctaaaagcaagtaattttgagtatgaacaaatggaatgttctaggggaaaaaggattgtttatgtatgttcaatatactgtgaaatgaagccaggcctcaaagttgt

SEQ ID NO: 312355 - DNA, 120 bp, Artificial Sequence
  ENSG00000134539_124 (sequence is synthesized)
tacccatcaatttgttatcagttatcacaccaagtccagaatgttcctatgtcttcttttccctataatatctctacgaaccaatgagcagctagacatttatcagagcaaaacctgcac

SEQ ID NO: 312356 - DNA, 120 bp, Artificial Sequence
  ENSG00000134539_125 (sequence is synthesized)
tgagatgaggagagggcatactctcaactagtattattgtgacaatggtagactacgttgaatgaaagattcttgagctagacacactttcatgtgatttctgacttggatacttacttg

SEQ ID NO: 312357 - DNA, 120 bp, Artificial Sequence
  ENSG00000134539_126 (sequence is synthesized)
accttatgttttctcatctatgtaatgagaaccatactatctatcttgtgattttgttgagagaataaaaataaatgcctgttatgtaagtccataaaacacaacgtggtgcttgttaat

SEQ ID NO: 312358 - DNA, 120 bp, Artificial Sequence
  ENSG00000134539_127 (sequence is synthesized)
atcttctacctccagatctttaagcacctctgccaatttaaaataaatggtaaattcactttactgcaacagagctggtagagaagaaaatgtttgaataatcttcctgaagaataagat

SEQ ID NO: 312359 - DNA, 120 bp, Artificial Sequence
  ENSG00000134539_128 (sequence is synthesized)
acatcacataaaaatgttggtattgggtgaagtcccgattggaaagtcttcagtgttttattggcaagatgactccgttatcaaatgaaagaatgttgtggattctccgtcactagtttc

SEQ ID NO: 312360 - DNA, 120 bp, Artificial Sequence
  ENSG00000134539_129 (sequence is synthesized)
tgcttttaagaactcagctcctgagtttgctctttaagtcattactctgtctgtctttctctacagtgtttaagaccactctgtggaggttaatttctgggaccttagggataatatgcc

SEQ ID NO: 312361 - DNA, 120 bp, Artificial Sequence
  ENSG00000134539_130 (sequence is synthesized)
tttcgttgatgtctacgttgggaattttgttgaaaaattgtaagtttttctaagcaagtctccataaaaatcaaaactgtgaagacatcatttaataataaaggcttcatcttgctaatg

SEQ ID NO: 312362 - DNA, 120 bp, Artificial Sequence
  ENSG00000134545_0 (sequence is synthesized)
gggcagtctgcgaagattgcaggcattgtttgttcttgtcttggatttatgcctttaaatttcaccttttattacacagctatagcaggcctttttatgagactaacctggcctctccac

SEQ ID NO: 312363 - DNA, 120 bp, Artificial Sequence
  ENSG00000134545_1 (sequence is synthesized)
taaaggatgtgtgactttctggggacagaagagtacagtccctgacatcacacactgcagagatggataaccaaggagtaatctactcagacctgaatctgcccccaaacccaaagaggc

SEQ ID NO: 312364 - DNA, 120 bp, Artificial Sequence
  ENSG00000134545_2 (sequence is synthesized)
agcaacgaaaacctaaaggcaataaaaactccattttagcaactgaacaggaaataacctatgcggaattaaaccttcaaaaagcttctcaggattttcaagggaatgacaaaacctatc

SEQ ID NO: 312365 - DNA, 120 bp, Artificial Sequence
  ENSG00000134545_3 (sequence is synthesized)
actgcaaagatttaccatcagctccagagaagctcattgttgggatcctgggaattatctgtcttatcttaatggcctctgtggtaacgatagttgttattccctctacattaatacaga

SEQ ID NO: 312366 - DNA, 120 bp, Artificial Sequence
  ENSG00000134545_4 (sequence is synthesized)
ggcacaacaattcttccctgaatacaagaactcagaaagcacgtcattgtggccattgtcctgaggagtggattacatattccaacagttgttactacattggtaaggaaagaagaactt

SEQ ID NO: 312367 - DNA, 120 bp, Artificial Sequence
  ENSG00000134545_5 (sequence is synthesized)
tttcaccatcctcatggattggtgtgtttcgtaacagcagtcatcatccatgggtgacaatgaatggtttggctttcaaacatgagataaaagactcagataatgctgaacttaactgtg

SEQ ID NO: 312368 - DNA, 120 bp, Artificial Sequence
  ENSG00000134545_6 (sequence is synthesized)
cagtgctacaagtaaatcgacttaaatcagcccagtgtggatcttcaataatatatcattgtaagcataagctttagaggtaaagcgtttgcatttgcagtgcatcagataaattgtata

SEQ ID NO: 312369 - DNA, 120 bp, Artificial Sequence
  ENSG00000134545_7 (sequence is synthesized)
aatagaaatatattatgattgcataaatcttaaaatgaattatgttatttgctctaataagaaaattctaaatcaattattgaaacaggatacacacaattactaaagtacagacatcct

SEQ ID NO: 312370 - DNA, 120 bp, Artificial Sequence
  ENSG00000134545_8 (sequence is synthesized)
gacatcctagcatttgtgtcgggctcattttgctcaacatggtatttgtggttttcagcctttctaaaagttgcatgttatgtgagtcagcttataggaagtaccaagaacagtcaaacc

SEQ ID NO: 312371 - DNA, 120 bp, Artificial Sequence
  ENSG00000134545_9 (sequence is synthesized)
catggagacagaaagtagaatagtggttgccaatgtctgagggaggttgaaataggagatgacctctaactgatagaacgttactttgtgtcgtgatgaaaactttctaaatttcagtag

SEQ ID NO: 312372 - DNA, 120 bp, Artificial Sequence
  ENSG00000134545_10 (sequence is synthesized)
tggtgatggttgtaactctgcgaatatactaaacatcattgatttttaatcattttaagtgcatgaaatgtatgctttgtacacgacacttcaataaagctatccagaaaaaaaaaaaaa

SEQ ID NO: 312373 - DNA, 120 bp, Artificial Sequence
  ENSG00000134545_11 (sequence is synthesized)
gcatgccccagaggtacagatgtatatgtctcccaggaagtctctgtgggtgaaggactgatctcaagttgtggctgacactagttaaagccaagttagagggctgtttcagggtctaca

SEQ ID NO: 312374 - DNA, 120 bp, Artificial Sequence
  ENSG00000134545_12 (sequence is synthesized)
ttgagactacagttgatatgcctacctcctgagacactagtgtgtgagtctcctcctgggcccctgggcaaatggttttggcagcatgaccaaggcctaaatggggctgaaggcaagcac

SEQ ID NO: 312375 - DNA, 120 bp, Artificial Sequence
  ENSG00000134545_13 (sequence is synthesized)
taatgcaaaatgagctccaatactcgttctccacctcacccttttaattgcactagggaatcctgtatataaaccatttattaacttcttaactactgttattatagagtacagtccctg

SEQ ID NO: 312376 - DNA, 120 bp, Artificial Sequence
  ENSG00000134545_14 (sequence is synthesized)
tcgaagattacaaggggaattttcacgttaatgattgaatgtgcctctaaacatttcatattttcagggaatagagttctcattgtaatgtatatatttggactaaatgtggaatgatta

SEQ ID NO: 312377 - DNA, 120 bp, Artificial Sequence
  ENSG00000134545_15 (sequence is synthesized)
ttctgaatttgtcaaagaataaatgaaagaataattgttgaaagtattcgcttctgatgcaatcgtatgtatatatttggatttcataactcaaaaatatgttctaggagtctgaaaaac

SEQ ID NO: 312378 - DNA, 120 bp, Artificial Sequence
  ENSG00000134545_16 (sequence is synthesized)
cttactgagaaatagaaattaatttttgaaagtagttaaatcaagaattataagaactatatgagatggtgaaatttggttctttagatctatgaaatacttttccaaaaaaccaccatt

SEQ ID NO: 312379 - DNA, 120 bp, Artificial Sequence
  ENSG00000134545_17 (sequence is synthesized)
aatatgaataaatctatgtggaatcatagagatgaagaaagatgtggaaagttagtgaaatgctgacataaatattttacaatagaccatagtagtccatatatttcaaccgctcattgg

SEQ ID NO: 312380 - DNA, 120 bp, Artificial Sequence
  ENSG00000134545_18 (sequence is synthesized)
ccatatatttcaaccgctcattggtcagctagtaaccttcttgattatcaggtgtccaatctttggcttctgtgggccacattggaagaagaagagtcttgggccacacataaaatacac

SEQ ID NO: 312381 - DNA, 120 bp, Artificial Sequence
  ENSG00000134548_0 (sequence is synthesized)
atcagattctcaatcttgcttgaagactgacaagatgtccctgtggactcccaaactctactccagatggggaggtgcccttaacaccaagattttaaaagctccaatttcagagcaaga

SEQ ID NO: 312382 - DNA, 120 bp, Artificial Sequence
  ENSG00000134548_1 (sequence is synthesized)
gtcgaaaactcacagataaagttatagttatttcagggttctgaaaagacgcagaacatgaagggactcagaagtctggcagcaacaaccttggctcttttcctggtgtttgttttcctg

SEQ ID NO: 312383 - DNA, 120 bp, Artificial Sequence
  ENSG00000134548_2 (sequence is synthesized)
ggaaactccagctgcgctccgcagagactgttggagagaaggaactggactcctcaagctatgctctacctgaaaggggcacagggtcgccgcttcatctccgaccagagccggagaaag

SEQ ID NO: 312384 - DNA, 120 bp, Artificial Sequence
  ENSG00000134548_3 (sequence is synthesized)
gacctctccgaccggccactgccggaaagacgaagcccaaatccccaactactaactattccggaggcagcaaccatcttactggcgtcccttcagaaatcaccagaagatgaagaaaaa

SEQ ID NO: 312385 - DNA, 120 bp, Artificial Sequence
  ENSG00000134548_4 (sequence is synthesized)
aactttgatcaaaccagattcctggaagacagtctgcttaactggtgaaaatatactggattatgtttaattatggttctattctctttgaaaacatgaaccatgtgaataaaacctttg

SEQ ID NO: 312386 - DNA, 120 bp, Artificial Sequence
  ENSG00000134548_5 (sequence is synthesized)
gacccttttattccatttgtaatcttaagaacacacacagatagttttattctttcagaaacaaaatatatataggatgcttagctgagaacatcatcttctttcattgcttcaggtcct

SEQ ID NO: 312387 - DNA, 120 bp, Artificial Sequence
  ENSG00000134548_6 (sequence is synthesized)
gtttagatgaccaaaaatgttttcagatcaccttgtgtcttactcttgagtttcttagaatatttataattataaggctgaagactaaagtgttctttccttttaactatagccagtacc

SEQ ID NO: 312388 - DNA, 120 bp, Artificial Sequence
  ENSG00000134548_7 (sequence is synthesized)
tgtcttgatcttagttgtgtttttttttcattttgttacccacttgcattttgttttcactcagcagaaattctccttctctgttttccttttatcccatccccaagaatgtggaaggaa

SEQ ID NO: 312389 - DNA, 120 bp, Artificial Sequence
  ENSG00000134548_8 (sequence is synthesized)
ggtgagaaacatggcaggatgggaaataggagagtatgactctctatagctcatccaggagtaatcaattaagaagataaattggatgactgtggagaagctctgtgataggaacacttc

SEQ ID NO: 312390 - DNA, 120 bp, Artificial Sequence
  ENSG00000134548_9 (sequence is synthesized)
agtgtggttgctgagaggagacagtcattgaggtagaaggtttgccaaagatccagagctcagagctccctttgtgctctttgggaattaccttgcattcagtttagaaacatggatcta

SEQ ID NO: 312391 - DNA, 120 bp, Artificial Sequence
  ENSG00000134548_10 (sequence is synthesized)
aaagttactgggaaataagcagatggagacacactctgttgtttacgtattggaagaagggaacaagccagttttgttagaggtaactcattttccatgaccaaacagactcaacagatt

SEQ ID NO: 312392 - DNA, 120 bp, Artificial Sequence
  ENSG00000134548_11 (sequence is synthesized)
caagtactctgcttactctaattgactagactctaggttttatttgacatcatagcattacataaatcactctgataacataagtgcacagtaatatgcctgatctcttcctttttaaaa

SEQ ID NO: 312393 - DNA, 120 bp, Artificial Sequence
  ENSG00000134548_12 (sequence is synthesized)
gccaacttgagttcagtaccatctgaatacacacacatgcacatatacccacacacgcatacacacatactcctgtggcaaacataataatgtatttatttagaattataatatgaccat

SEQ ID NO: 312394 - DNA, 120 bp, Artificial Sequence
  ENSG00000134548_13 (sequence is synthesized)
catgttaattattttttacctaatcagagttgttattgacaaatgtcataagtggaaagtattaattcttattgtcatcagtatttagccattatttagtagctcaagaatatctttatg

SEQ ID NO: 312395 - DNA, 120 bp, Artificial Sequence
  ENSG00000134548_14 (sequence is synthesized)
tgaatgtctctgtaacttggaattgcaatttcactgtgttaagtaatcagaactctgcttataagatttatctgtatcttgtttcataatttaataatgaaactaaattcaagttaatgt

SEQ ID NO: 312396 - DNA, 120 bp, Artificial Sequence
  ENSG00000134548_15 (sequence is synthesized)
aatgttgatctccgtcgaaaaataacttgtgagcattaaaatatctgtatggcattataataggcacctgtcattaattatgatttgatttgaaagtagacttactaggtagtgcttaca

SEQ ID NO: 312397 - DNA, 120 bp, Artificial Sequence
  ENSG00000134548_16 (sequence is synthesized)
tctgatttattgaaaattttttccaaaagcattgtcttttatttatacagtcctaaccacttcaccattaggaggggtgggacattaaaaattatttacccatcagacataaaattgtac

SEQ ID NO: 312398 - DNA, 120 bp, Artificial Sequence
  ENSG00000134548_17 (sequence is synthesized)
aaattgactattcaaaatagtatgtgtattcaaagaacacttttaacatctatcttatgaaataattcttcctacaactaaccagaacaatctcaaaaatgtcatactaaccattgtttt

SEQ ID NO: 312399 - DNA, 120 bp, Artificial Sequence
  ENSG00000134548_18 (sequence is synthesized)
aaaagctgtctcaatgatcaatagctgttaaaatatagctccaagtattctaagtactcaaattccttgaatgttcttatgtacaaatatgctgattaattaaaaggtccctcttcccaa

SEQ ID NO: 312400 - DNA, 120 bp, Artificial Sequence
  ENSG00000134548_19 (sequence is synthesized)
gagggcagcccgggttggcagcagcagcagctggatgccgagcgccggagctgggagctcgcgcgtccagccccgcgccaatggtggcaagggcggcccaggctggcgctgcggctcccc

SEQ ID NO: 312401 - DNA, 120 bp, Artificial Sequence
  ENSG00000134548_20 (sequence is synthesized)
agctccagggcccctggctcagcccggggttgcgctgggagcgctggaaactcggcagccccgcgcgaccctatcctggagcaacctgccccctccccacgcccggggactgcgctgtgc

SEQ ID NO: 312402 - DNA, 120 bp, Artificial Sequence
  ENSG00000134548_21 (sequence is synthesized)
tcaaaccagattcctggaagacagtctgcttaactgcttttgtcggtcttggggaaaaggatgaagaaatgactacagtggagagatggagtcacctggcagcagctgtctgaatagggg

SEQ ID NO: 312403 - DNA, 120 bp, Artificial Sequence
  ENSG00000134548_22 (sequence is synthesized)
actgagtacaggatagaaggtgattcctacacatactgccaaagccagcctcctcttcctcatcgtatctctcatcctccacttcatcttccacatcactgctctgaggactggaggcct

SEQ ID NO: 312404 - DNA, 120 bp, Artificial Sequence
  ENSG00000134548_23 (sequence is synthesized)
gagaccctgaaggagaaggtggtactgaggaaggcctgggatatttaaatccttctgtctgccaaagacaaaaataagacataaacatcacaacagtttcttggctttcaacgatgtaaa

SEQ ID NO: 312405 - DNA, 120 bp, Artificial Sequence
  ENSG00000134548_24 (sequence is synthesized)
tactatgcatgcactatcaattttttaagtagttatctatcttttgtagtctgggtgctattaaactttgattcattttgattttgataccaccaatctcaagagggattcattcaatat

SEQ ID NO: 312406 - DNA, 120 bp, Artificial Sequence
  ENSG00000134548_25 (sequence is synthesized)
atagctattctttattaagtactgaaatgtgctaagtgttatatacatattattatcatcttatcttttaacaacactctgataaatatgtttttttcagtacagaagaaaatggagggt

SEQ ID NO: 312407 - DNA, 120 bp, Artificial Sequence
  ENSG00000134548_26 (sequence is synthesized)
tagaggggtcaagtaacttgcccaacatcactcagcacataaatggtagagcaaagatttgtaccaggtctgtgatgactccagaaactttaatgtcaactgccaccttacactgctgat

SEQ ID NO: 312408 - DNA, 120 bp, Artificial Sequence
  ENSG00000134548_27 (sequence is synthesized)
actgttagtctctaagtctcaaatttgttcagcaaagcttttggatgtggatagcctggaaatgccatggatggccaccactagaaggcatcctggaagtcaggtcacttaattgactct

SEQ ID NO: 312409 - DNA, 120 bp, Artificial Sequence
  ENSG00000134548_28 (sequence is synthesized)
acaattccactagttgctgttatttcagttaatgagaaaatatcactagactttaattaatttgcccttctacttgagatactgagataacttatttgataaacacacactgcaatgcca

SEQ ID NO: 312410 - DNA, 120 bp, Artificial Sequence
  ENSG00000134548_29 (sequence is synthesized)
ctaaagaaaccagatgaaaaaacatgattggagtgcatataattgaatggggagacagatgtgtaaaagtgttatagcgctcgtcactctgtatttcaattactttatacattatatcat

SEQ ID NO: 312411 - DNA, 120 bp, Artificial Sequence
  ENSG00000134548_30 (sequence is synthesized)
gtcatacatgtacagtcattttaaggttcagatactttacctgtcagcaatacaacaaaagaactgagttctgcacttgagacctagcttgaagtaggtgctcaatgcttattagacgta

SEQ ID NO: 312412 - DNA, 120 bp, Artificial Sequence
  ENSG00000134548_31 (sequence is synthesized)
ataactggataaataagtagataagcagataaatggatgaatattgctgaattatcattaagtggaatgaccacctctgaataagctaagcaatcaactctgaatgctagaatcataaac

SEQ ID NO: 312413 - DNA, 120 bp, Artificial Sequence
  ENSG00000134548_32 (sequence is synthesized)
atgaaagtcagaatttgtagcctgagggtttaagaaaaccttatcaccttttttacgggcaaattttacttcaggttaactttctagatctgttcctctggaaacctgatataggtggaa

SEQ ID NO: 312414 - DNA, 120 bp, Artificial Sequence
  ENSG00000134548_33 (sequence is synthesized)
tataagtcatgttattagggatggttgtttatggtaacagtgacccctgattgagaaattatatctgaactgaaaaatctataaatacttgataaggcgccagagtttttgggaatctct

SEQ ID NO: 312415 - DNA, 120 bp, Artificial Sequence
  ENSG00000134548_34 (sequence is synthesized)
gaatgactcttataagatgactcataattgggcatattccttgcagggagcatgaaagctggtttgcggagatttacatgagatagaggctcctgtggggcatgcagctactaagctaag

SEQ ID NO: 312416 - DNA, 120 bp, Artificial Sequence
  ENSG00000134548_35 (sequence is synthesized)
gtgatctcatttgcaatggtatgggtcttatcttcttgcacctaagctgtcacctagtgtgtaggcggccaaagatgtttagctcttggattgctgtgtagactactgcaaggactgatc

SEQ ID NO: 312417 - DNA, 120 bp, Artificial Sequence
  ENSG00000134548_36 (sequence is synthesized)
ccactaaagagaaatgcctgacgctcccctgcttcaagtggcacctcatgtcttctccctgctaagtgaatctgatgacaaatgtggcctatagcagtcttatgaacataaacgtctagt

SEQ ID NO: 312418 - DNA, 120 bp, Artificial Sequence
  ENSG00000134548_37 (sequence is synthesized)
ctcatctagttcaattcctcctggggtgctgaacttactctattttactcttgccaagcggtcaccctatatttaaacacttccttggagagcaaattcactttcaattaaagcagtcca

SEQ ID NO: 312419 - DNA, 120 bp, Artificial Sequence
  ENSG00000134548_38 (sequence is synthesized)
gtttgtttttgaacaactccccaaagaataaatgtccatcagaaccatttcaagcattaaggcagagaaagttttaattcagagatgcttctccaatgagatgaattaactgtcttgaga

SEQ ID NO: 312420 - DNA, 120 bp, Artificial Sequence
  ENSG00000134548_39 (sequence is synthesized)
gctttaggacagtctgatttgtgagttcctctctctctcctttggtttgattcaacattatgaaaaagtatcatagcttgtgtgcatagctacttccaaatttaaatgtattatttaaac

SEQ ID NO: 312421 - DNA, 120 bp, Artificial Sequence
  ENSG00000134548_40 (sequence is synthesized)
ttataaaaagaaatatagctttcaaaaaaaaatacattgaatatttaccgttggtggtgatgttagttccacatggaatttatctggaaaagctctgcttaatgtcaggtgtctggcatg

SEQ ID NO: 312422 - DNA, 120 bp, Artificial Sequence
  ENSG00000134548_41 (sequence is synthesized)
ctggtaatactattgatagaaagccaaatcacaggttaataaaaacccttagatatctcaataatcaagttattaaataaggccttattctcctagttctgaaacatatgtattttttaa

SEQ ID NO: 312423 - DNA, 120 bp, Artificial Sequence
  ENSG00000134548_42 (sequence is synthesized)
agtgacagaatctatgcagtctaagtttgagactcaggaaagaaattacagtttatagttttactatttttcaacccataggcagagtaatactataaaatgctggggaagaatgcccat

SEQ ID NO: 312424 - DNA, 120 bp, Artificial Sequence
  ENSG00000134548_43 (sequence is synthesized)
actggtcatattgagctctgaattgagcattaaggtgactgaaaacactggtttcattccacagagaagcagtgtggcatggagaaaagatagggcctgaatattcagataaattgggtg

SEQ ID NO: 312425 - DNA, 120 bp, Artificial Sequence
  ENSG00000134548_44 (sequence is synthesized)
taaatcctgcttcagaccttaggcaagaaacatcacttctaaaagcctagtgtatctatcttcattgcaagatggagatagtaaaattaatcatccaggttgtaatgagcactggcattt

SEQ ID NO: 312426 - DNA, 120 bp, Artificial Sequence
  ENSG00000134548_45 (sequence is synthesized)
gtgtgtgcagatactcagcaaatggcagcatctctcattcagccaagagtgttcagcactgtgcaaacagacacattatgtgaaggcaaagtcaattcatttattattaaatcaccactg

SEQ ID NO: 312427 - DNA, 120 bp, Artificial Sequence
  ENSG00000134548_46 (sequence is synthesized)
ctaagctgtgtgagcatccaggtgtttataaacctattgcatgattgaaaggaggtatttcctgtagtcatcattttgaaaaaccatattatacccattactcactacagttgagaaata

SEQ ID NO: 312428 - DNA, 120 bp, Artificial Sequence
  ENSG00000134548_47 (sequence is synthesized)
tgactacactatttctctagagagaaacaaagtagggacttttctcttgatgttttcttcaacttcataaaatgtttccttataccagtaacacatcaagtgaggcactgacaatggaat

SEQ ID NO: 312429 - DNA, 120 bp, Artificial Sequence
  ENSG00000134548_48 (sequence is synthesized)
agctagtaagatcagtgctagatcctgatggacttgctattatgaatagactcaaacgaaacatgaagaaatacatataggactttgtaaacttattaaattttaaaaagtacatggaga

SEQ ID NO: 312430 - DNA, 120 bp, Artificial Sequence
  ENSG00000134548_49 (sequence is synthesized)
cactgagattttaacaattataatattggattaactttagagattatgactagaatcaatatgtttatagtccagtggaattttttaagtggtctgctgtgtttatctaaacttgcttac

SEQ ID NO: 312431 - DNA, 120 bp, Artificial Sequence
  ENSG00000134548_50 (sequence is synthesized)
tctgcctaagtatctccaatccagaagatctgagagcctctcagttctgttcctctggataatcctttggcggcgtgactgtttgcaaaatccatagagaaacttagtcagctgattgca

SEQ ID NO: 312432 - DNA, 120 bp, Artificial Sequence
  ENSG00000134548_51 (sequence is synthesized)
agaatcatctggagaacggaaccgcctgtcaacgatgtaaatacctgaagaacacaaaagccaaagcacaagtaaaagtaggactaaccttaaacatttgttctcctgtgatttactaac

SEQ ID NO: 312433 - DNA, 120 bp, Artificial Sequence
  ENSG00000134548_52 (sequence is synthesized)
tctttggttccatcaaaaacctatgcattatctaccccctgactcaggaattacccccactttattcttttctgaggccctaattcccttctaatggtttacaaccatcactgacacaca

SEQ ID NO: 312434 - DNA, 120 bp, Artificial Sequence
  ENSG00000134548_53 (sequence is synthesized)
gccaacgaagtggatcttgctgaaaaaaactctggcagtctagggatacgctggatcagtgatcctccatggggttgctcactaaccagaatttccagggcggggcctggatatctgtgc

SEQ ID NO: 312435 - DNA, 120 bp, Artificial Sequence
  ENSG00000134548_54 (sequence is synthesized)
cttttatgttccccagtgttcccactgttcagccgaggctgaaaaccccagatctagcctgaggaaagagccacagtacacccataaaagactgagggaaggccagggcttggtagctca

SEQ ID NO: 312436 - DNA, 85 bp, Artificial Sequence
  ENSG00000134548_55 (sequence is synthesized)
attcctggggaaatcccatctctacatacaaaatttagccaggtgtggtggtgtgcgcctgtagccccagctactcgggaggttg

SEQ ID NO: 312437 - DNA, 120 bp, Artificial Sequence
  ENSG00000134548_56 (sequence is synthesized)
ggtgtggtggtgtgcgcctgtagccccagctactcgggaggttggggcaggagaatcacctgagccagaaatgtggagactgcagtgagccaggatcaggccactgcactccagcctggg

SEQ ID NO: 312438 - DNA, 120 bp, Artificial Sequence
  ENSG00000134551_0 (sequence is synthesized)
agcataaagttgggagtgacaccagagccttctgcaagatgcttctgattctgctgtcagtggccctgctggccttcagctcagctcaggacttagatgaagatgtcagccaagaagacg

SEQ ID NO: 312439 - DNA, 120 bp, Artificial Sequence
  ENSG00000134551_1 (sequence is synthesized)
ttcccttggtaatatcagatggaggagactctgagcagttcatagatgaggagcgtcagggaccacctttgggaggacagcaatctcaaccctctgctggtgatgggaaccagaatgatg

SEQ ID NO: 312440 - DNA, 120 bp, Artificial Sequence
  ENSG00000134551_2 (sequence is synthesized)
caaggtccaccacctcctcagggaaagccacaaggaccaccccaacagggaggccatccccctcctcctcaaggaaggccacaaggaccaccccaacagggaggccatccccgtcctcct

SEQ ID NO: 312441 - DNA, 120 bp, Artificial Sequence
  ENSG00000134551_3 (sequence is synthesized)
cgaggaaggccacaaggaccaccccaacagggaggccatcagcaaggtcctcccccacctcctcctggaaagccccagggaccacctccccaagggggccgcccacaaggacctccacag

SEQ ID NO: 312442 - DNA, 120 bp, Artificial Sequence
  ENSG00000134551_4 (sequence is synthesized)
gggcagtctcctcagtaatctaggattcaatgataggtatgattccagtttattatccatcaaaggctccaactgctacagttctccaacttcattgtgccagtgaatctattgaaaagc

SEQ ID NO: 312443 - DNA, 120 bp, Artificial Sequence
  ENSG00000134551_5 (sequence is synthesized)
taatgtgatcatgctctaacttcaatataccaataaaataatcagcttgcaatttctgattatagcatctccttctgagtgtttgggactctggaatctgagacccatgttcacattgta

SEQ ID NO: 312444 - DNA, 120 bp, Artificial Sequence
  ENSG00000134551_6 (sequence is synthesized)
agaacatccaggaccccttctccttgatgtttccagcaagcttctttcctccttatccttattaagtcatctgcctggggaaggagttccactgtttctttccttctctgtcttcttagc

SEQ ID NO: 312445 - DNA, 120 bp, Artificial Sequence
  ENSG00000134551_7 (sequence is synthesized)
tcgaatttaaattgcacaattattttcaggtcatttcctgatagtctagtcagcttatgaatgtaagcaaaacaggaccaatgaaagaaagtcccagaagctgagagaaactttaacaag

SEQ ID NO: 312446 - DNA, 120 bp, Artificial Sequence
  ENSG00000134551_8 (sequence is synthesized)
tttgagagtaacttattttgttttctaggaaagtgagtatggttctatgcctgtattccccagaagccactagacctattttcccctattttatcactgatcagttctgtccctgcctat

SEQ ID NO: 312447 - DNA, 120 bp, Artificial Sequence
  ENSG00000134551_9 (sequence is synthesized)
gattcttaccattcttaagaaaacctgaatggatttcatcaaggcggcagcataatttgaagggcaattgcgtgtgaaaattgatgtgacttgatttacacaatagtcagaaaacatttt

SEQ ID NO: 312448 - DNA, 120 bp, Artificial Sequence
  ENSG00000134551_10 (sequence is synthesized)
agaaattgatgactttataatgcaaccaggagtattgaaaaaaaagtaagcaatgagctcaaataattaaaaaagagagacaaaatacacttgggagaacagaaataagaattaatgaaa

SEQ ID NO: 312449 - DNA, 120 bp, Artificial Sequence
  ENSG00000134551_11 (sequence is synthesized)
atttaaaagattaaatgaatgagaagaaatgattcataaattttgaactaacagtaataacttcttgaaaatccaataaaattggcaaaagattgtgaaaattctggaagaataagggaa

SEQ ID NO: 312450 - DNA, 120 bp, Artificial Sequence
  ENSG00000134551_12 (sequence is synthesized)
acagataatcttcagagtaatcaggtaaagcttaaacaagtgttttaaaagatgagtttttcctacattctgaaaagcaaacatgaaaaactgaacacagtttttacagatatacaatat

SEQ ID NO: 312451 - DNA, 120 bp, Artificial Sequence
  ENSG00000134551_13 (sequence is synthesized)
atatctaagtaaaatatgatgaaatttaatagagaattcactcctcccaaaagcaccttcatggaagattcctcattaacaggcagtcctttagtatgctgatttatacaaaatgctgaa

SEQ ID NO: 312452 - DNA, 120 bp, Artificial Sequence
  ENSG00000134551_14 (sequence is synthesized)
aagaagagaaataccccaagttcttgaaaaaaaattttttgatatgactactctaacagtaataactataaatctcactttaaataatttaaaacaaattaaagtgatatatgagttaaa

SEQ ID NO: 312453 - DNA, 120 bp, Artificial Sequence
  ENSG00000134551_15 (sequence is synthesized)
tgaccaagcagacttgattccaggaatgttaaggaatgttcattatttgttttggataatgaagtcagcagaggaaaaaaaaatatgaccatctcaaaagatgccaacgttgtctttgat

SEQ ID NO: 312454 - DNA, 120 bp, Artificial Sequence
  ENSG00000134551_16 (sequence is synthesized)
aatatttaatatattttttaaaaaacaattcttgtaaaatacttttttgattagccttctgaccatgattaaaatggtgtacctcaaagtagctgctaaccttatgtgtatctgcaacac

SEQ ID NO: 312455 - DNA, 120 bp, Artificial Sequence
  ENSG00000134551_17 (sequence is synthesized)
cctgaaaaattatctaataaaaaggcacaaagaaaaagcttgtcaatgttgtggataattagaaagtgaataattttatttaatattagataaacaagcacataacagagatacatatat

SEQ ID NO: 312456 - DNA, 120 bp, Artificial Sequence
  ENSG00000134551_18 (sequence is synthesized)
tcaaatggaaggagtaaaattaccaccacatgcagatctgtttttctgtccagaaaataacaagagattctactcaggtaaaaaaggaaaggaaggaaaaccattgtaattaaaataaaa

SEQ ID NO: 312457 - DNA, 120 bp, Artificial Sequence
  ENSG00000134551_19 (sequence is synthesized)
tttaatacaatagccgtttattaattcaacttctaaagaatctttgtgattacacaatgaccagctagtaaatataataagaaaatgattattcacaaaggaaccaaaaggcctagtctt

SEQ ID NO: 312458 - DNA, 120 bp, Artificial Sequence
  ENSG00000134551_20 (sequence is synthesized)
cgaatttttaatgccattgtgatagcaagcatctgattattttactctaagttatttccacttctgattttaagaacagcttctttcccagggatgggttccccctagtgatgtattctc

SEQ ID NO: 312459 - DNA, 120 bp, Artificial Sequence
  ENSG00000134551_21 (sequence is synthesized)
ttcaccacaagagtttgcagctctggctttctttctgctcatctgtaaagataactacagctcctctataaaccatctcaccattattaccgaaatcagacaaattctggagatagtcaa

SEQ ID NO: 312460 - DNA, 120 bp, Artificial Sequence
  ENSG00000134551_22 (sequence is synthesized)
agctgtgaggattcgaagatctctttcacatcttgacccagtcaattccgttcaccagtgttatgaatccattccccaaaattccaattaggaattatatatttattattataatgagga

SEQ ID NO: 312461 - DNA, 120 bp, Artificial Sequence
  ENSG00000134551_23 (sequence is synthesized)
tactatacaaggcatttagcatggctgcaaagagagagctccaatgtctaaatgcaacgctgacaatttcttcatctatcacatgtacctgttatacatacttattaattggatgtgcag

SEQ ID NO: 312462 - DNA, 120 bp, Artificial Sequence
  ENSG00000134551_24 (sequence is synthesized)
ttaatttcttcctttaaaaaaaaaactataggctcaatatgaaagtagaaagcactaaggtgtactaatgaatgggcacatagcttttttcacaaaaagattattttgccccagacagct

SEQ ID NO: 312463 - DNA, 120 bp, Artificial Sequence
  ENSG00000134551_25 (sequence is synthesized)
atctgcattctgatccagatactgtatgttcttaacataaagtgaaatttctcatacttcatgatgaaagaaaaaactgaattctcattgttaataaacaaataaagacaattctctgca

SEQ ID NO: 312464 - DNA, 80 bp, Artificial Sequence
  ENSG00000134569_0 (sequence is synthesized)
gggcgacttgcggggcgcgcaggccgccgtgcacccgggacgcttccccctcggggaccctccgcgggcttctccgccgc

SEQ ID NO: 312465 - DNA, 120 bp, Artificial Sequence
  ENSG00000134569_1 (sequence is synthesized)
gggaccccgggcgagcggcgcgggcggcaccatgaggcggcagtggggcgcgctgctgcttggcgccctgctctgcgcacacggcctggccagcagccccgagtgtgcttgtggtcggag

SEQ ID NO: 312466 - DNA, 120 bp, Artificial Sequence
  ENSG00000134569_2 (sequence is synthesized)
gagtgtgcttgtggtcggagccacttcacatgtgcagtgagtgctcttggagagtgtacctgcatccctgcccagtggcagtgtgatggagacaatgactgcggggaccacagcgatgag

SEQ ID NO: 312467 - DNA, 120 bp, Artificial Sequence
  ENSG00000134569_3 (sequence is synthesized)
gatggatgtatactacctacctgttcccctcttgactttcactgtgacaatggcaagtgcatccgccgctcctgggtgtgtgacggggacaacgactgtgaggatgactcggatgagcag

SEQ ID NO: 312468 - DNA, 120 bp, Artificial Sequence
  ENSG00000134569_4 (sequence is synthesized)
gactgtcccccccgggagtgtgaggaggacgagtttccctgccagaatggctactgcatccggagtctgtggcactgcgatggtgacaatgactgtggcgacaacagcgatgagcagtgt

SEQ ID NO: 312469 - DNA, 120 bp, Artificial Sequence
  ENSG00000134569_5 (sequence is synthesized)
gacatgcgcaagtgctccgacaaggagttccgctgtagtgacggaagctgcattgctgagcattggtactgcgacggtgacaccgactgcaaagatggctccgatgaggagaactgtccc

SEQ ID NO: 312470 - DNA, 120 bp, Artificial Sequence
  ENSG00000134569_6 (sequence is synthesized)
tcagcagtgccagcgcccccctgcaacctggaggagttccagtgtgcctatggacgctgcatcctcgacatctaccactgcgatggcgacgatgactgtggagactggtcagacgagtct

SEQ ID NO: 312471 - DNA, 120 bp, Artificial Sequence
  ENSG00000134569_7 (sequence is synthesized)
gactgctcctcccaccagccctgccgctctggggagttcatgtgtgacagtggcctgtgcatcaatgcaggctggcgctgcgatggtgacgcggactgtgatgaccagtctgatgagcgc

SEQ ID NO: 312472 - DNA, 120 bp, Artificial Sequence
  ENSG00000134569_8 (sequence is synthesized)
aactgcaccacctccatgtgtacggcagaacagttccgctgtcactcaggccgctgtgtccgcctgtcctggcgctgtgatggggaggacgactgtgcagacaacagcgatgaagagaac

SEQ ID NO: 312473 - DNA, 120 bp, Artificial Sequence
  ENSG00000134569_9 (sequence is synthesized)
tgtgagaatacaggaagcccccaatgtgccttggaccagttcctgtgttggaatgggcgctgcattgggcagaggaagctgtgcaacggggtcaacgactgtggtgacaacagcgacgaa

SEQ ID NO: 312474 - DNA, 120 bp, Artificial Sequence
  ENSG00000134569_10 (sequence is synthesized)
agcccacagcagaattgccggccccggacgggtgaggagaactgcaatgttaacaacggtggctgtgcccagaagtgccagatggtgcggggggcagtgcagtgtacctgccacacaggc

SEQ ID NO: 312475 - DNA, 120 bp, Artificial Sequence
  ENSG00000134569_11 (sequence is synthesized)
taccggctcacagaggatgggcacacgtgccaagatgtgaatgaatgtgccgaggaggggtattgcagccagggctgcaccaacagcgaaggggctttccaatgctggtgtgaaacaggc

SEQ ID NO: 312476 - DNA, 120 bp, Artificial Sequence
  ENSG00000134569_12 (sequence is synthesized)
tatgaactacggcccgaccggcgcagctgcaaggctctggggccagagcctgtgctgctgttcgccaatcgcatcgacatccggcaggtgctgccacaccgctctgagtacacactgctg

SEQ ID NO: 312477 - DNA, 120 bp, Artificial Sequence
  ENSG00000134569_13 (sequence is synthesized)
cttaacaacctggagaatgccattgcccttgatttccaccaccgccgcgagcttgtcttctggtcagatgtcaccctggaccggatcctccgtgccaacctcaacggcagcaacgtggag

SEQ ID NO: 312478 - DNA, 120 bp, Artificial Sequence
  ENSG00000134569_14 (sequence is synthesized)
gaggttgtgtctactgggctggagagcccagggggcctggctgtggattgggtccatgacaaactctactggaccgactcaggcacctcgaggattgaggtggccaatctggatggggcc

SEQ ID NO: 312479 - DNA, 120 bp, Artificial Sequence
  ENSG00000134569_15 (sequence is synthesized)
caccggaaagtgttgctgtggcagaacctggagaagccccgggccattgccttgcatcccatggagggtaccatttactggacagactggggcaacaccccccgtattgaggcctccagc

SEQ ID NO: 312480 - DNA, 120 bp, Artificial Sequence
  ENSG00000134569_16 (sequence is synthesized)
atggatggctctggacgccgcatcattgccgatacccatctcttctggcccaatggcctcaccatcgactatgccgggcgccgtatgtactgggtggatgctaagcaccatgtcatcgag

SEQ ID NO: 312481 - DNA, 120 bp, Artificial Sequence
  ENSG00000134569_17 (sequence is synthesized)
agggccaatctggatgggagtcaccgtaaggctgtcattagccagggcctcccgcatcccttcgccatcacagtgtttgaagacagcctgtactggacagactggcacaccaagagcatc

SEQ ID NO: 312482 - DNA, 120 bp, Artificial Sequence
  ENSG00000134569_18 (sequence is synthesized)
aatagcgctaacaaatttacggggaagaaccaggaaatcattcgcaacaaactccacttccctatggacatccacaccttgcacccccagcgccaacctgcagggaaaaaccgctgtggg

SEQ ID NO: 312483 - DNA, 120 bp, Artificial Sequence
  ENSG00000134569_19 (sequence is synthesized)
gacaacaacggaggctgcacgcacctgtgtctgcccagtggccagaactacacctgtgcctgccccactggcttccgcaagatcagcagccacgcctgtgcccagagtcttgacaagttc

SEQ ID NO: 312484 - DNA, 120 bp, Artificial Sequence
  ENSG00000134569_20 (sequence is synthesized)
ctgctttttgcccgaaggatggacatccgtcgaatcagctttgacacagaggacctgtctgatgatgtcatcccactggctgacgtgcgcagtgctgtggcccttgactgggactcccgg

SEQ ID NO: 312485 - DNA, 120 bp, Artificial Sequence
  ENSG00000134569_21 (sequence is synthesized)
gatgaccacgtgtactggacagatgtcagcactgataccatcagcagggccaagtgggatggaacaggacaggaggtggtagtggataccagtttggagagcccagctggcctggccatt

SEQ ID NO: 312486 - DNA, 120 bp, Artificial Sequence
  ENSG00000134569_22 (sequence is synthesized)
gattgggtcaccaacaaactgtactggacagatgcaggtacagaccggattgaagtagccaacacagatggcagcatgagaacagtactcatctgggagaaccttgatcgtcctcgggac

SEQ ID NO: 312487 - DNA, 120 bp, Artificial Sequence
  ENSG00000134569_23 (sequence is synthesized)
atcgtggtggaacccatgggcgggtacatgtattggactgactggggtgcgagccccaagattgaacgagctggcatggatgcctcaggccgccaagtcattatctcttctaatctgacc

SEQ ID NO: 312488 - DNA, 120 bp, Artificial Sequence
  ENSG00000134569_24 (sequence is synthesized)
tggcctaatgggttagctattgattatgggtcccagcgtctatactgggctgacgccggcatgaagacaattgaatttgctggactggatggcagtaagaggaaggtgctgattggaagc

SEQ ID NO: 312489 - DNA, 120 bp, Artificial Sequence
  ENSG00000134569_25 (sequence is synthesized)
cagctcccccacccatttgggctgaccctctatggagagcgcatctattggactgactggcagaccaagagcatacagagcgctgaccggctgacagggctggaccgggagactctgcag

SEQ ID NO: 312490 - DNA, 120 bp, Artificial Sequence
  ENSG00000134569_26 (sequence is synthesized)
gagaacctggaaaacctaatggacatccatgtcttccaccgccgccggcccccagtgtctacaccatgtgctatggagaatggcggctgtagccacctgtgtcttaggtccccaaatcca

SEQ ID NO: 312491 - DNA, 120 bp, Artificial Sequence
  ENSG00000134569_27 (sequence is synthesized)
agcggattcagctgtacctgccccacaggcatcaacctgctgtctgatggcaagacctgctcaccaggcatgaacagtttcctcatcttcgccaggaggatagacattcgcatggtctcc

SEQ ID NO: 312492 - DNA, 120 bp, Artificial Sequence
  ENSG00000134569_28 (sequence is synthesized)
ctggacatcccttattttgctgatgtggtggtaccaatcaacattaccatgaagaacaccattgccattggagtagacccccaggaaggaaaggtgtactggtctgacagcacactgcac

SEQ ID NO: 312493 - DNA, 120 bp, Artificial Sequence
  ENSG00000134569_29 (sequence is synthesized)
aggatcagtcgtgccaatctggatggctcacagcatgaggacatcatcaccacagggctacagaccacagatgggctcgcggttgatgccattggccggaaagtatactggacagacacg

SEQ ID NO: 312494 - DNA, 120 bp, Artificial Sequence
  ENSG00000134569_30 (sequence is synthesized)
ggaacaaaccggattgaagtgggcaacctggacgggtccatgcggaaagtgttggtgtggcagaaccttgacagtccccgggccatcgtactgtaccatgagatggggtttatgtactgg

SEQ ID NO: 312495 - DNA, 120 bp, Artificial Sequence
  ENSG00000134569_31 (sequence is synthesized)
acagactggggggagaatgccaagttagagcggtccggaatggatggctcagaccgcgcggtgctcatcaacaacaacctaggatggcccaatggactgactgtggacaaggccagctcc

SEQ ID NO: 312496 - DNA, 120 bp, Artificial Sequence
  ENSG00000134569_32 (sequence is synthesized)
caactgctatgggccgatgcccacaccgagcgaattgaggctgctgacctgaatggtgccaatcggcatacattggtgtcaccggtgcagcacccatatggcctcaccctgctcgactcc

SEQ ID NO: 312497 - DNA, 120 bp, Artificial Sequence
  ENSG00000134569_33 (sequence is synthesized)
tggaccgggcacagccactaggttttaacaagtgcggctcgagaaatggcggctgctcccacctctgcttgcctcggccttctggcttctcctgtgcctgccccactggcatccagctga

SEQ ID NO: 312498 - DNA, 120 bp, Artificial Sequence
  ENSG00000134569_34 (sequence is synthesized)
agggagatgggaagacctgtgatccctctcctgagacctacctgctcttctccagccgtggctccatccggcgtatctcactggacaccagtgaccacaccgatgtgcatgtccctgttc

SEQ ID NO: 312499 - DNA, 120 bp, Artificial Sequence
  ENSG00000134569_35 (sequence is synthesized)
ctgagctcaacaatgtcatctccctggactatgacagcgtggatggaaaggtctattacacagatgtgttcctggatgttatcaggcgagcagacctgaacggcagcaacatggagacag

SEQ ID NO: 312500 - DNA, 120 bp, Artificial Sequence
  ENSG00000134569_36 (sequence is synthesized)
tgatcgggcgagggctgaagaccactgacgggctggcagtggactgggtggccaggaacctgtactggacagacacaggtcgaaataccattgaggcgtccaggctggatggttcctgcc

SEQ ID NO: 312501 - DNA, 120 bp, Artificial Sequence
  ENSG00000134569_37 (sequence is synthesized)
gcaaagtactgatcaacaatagcctggatgagccccgggccattgctgttttccccaggaaggggtacctcttctggacagactggggccacattgccaagatcgaacgggcaaacttgg

SEQ ID NO: 312502 - DNA, 120 bp, Artificial Sequence
  ENSG00000134569_38 (sequence is synthesized)
atggttctgagcggaaggtcctcatcaacacagacctgggttggcccaatggccttaccctggactatgatacccgcaggatctactgggtggatgcgcatctggaccggatcgagagtg

SEQ ID NO: 312503 - DNA, 120 bp, Artificial Sequence
  ENSG00000134569_39 (sequence is synthesized)
ctgacctcaatgggaaactgcggcaggtcttggtcagccatgtgtcccacccctttgccctcacacagcaagacaggtggatctactggacagactggcagaccaagtcaatccagcgtg

SEQ ID NO: 312504 - DNA, 120 bp, Artificial Sequence
  ENSG00000134569_40 (sequence is synthesized)
ttgacaaatactcaggccggaacaaggagacagtgctggcaaatgtggaaggactcatggatatcatcgtggtttcccctcagcggcagacagggaccaatgcctgtggtgtgaacaatg

SEQ ID NO: 312505 - DNA, 120 bp, Artificial Sequence
  ENSG00000134569_41 (sequence is synthesized)
gtggctgcacccacctctgctttgccagagcctcggacttcgtatgtgcctgtcctgacgaacctgatagccggccctgctcccttgtgcctggcctggtaccaccagctcctagggcta

SEQ ID NO: 312506 - DNA, 120 bp, Artificial Sequence
  ENSG00000134569_42 (sequence is synthesized)
ctggcatgagtgaaaagagcccagtgctacccaacacaccacctaccaccttgtattcttcaaccacccggacccgcacgtctctggaggaggtggaaggaagatgctctgaaagggatg

SEQ ID NO: 312507 - DNA, 120 bp, Artificial Sequence
  ENSG00000134569_43 (sequence is synthesized)
ccaggctgggcctctgtgcacgttccaatgacgctgttcctgctgctccaggggaaggacttcatatcagctacgccattggtggactcctcagtattctgctgattttggtggtgattg

SEQ ID NO: 312508 - DNA, 120 bp, Artificial Sequence
  ENSG00000134569_44 (sequence is synthesized)
cagctttgatgctgtacagacacaaaaaatccaagttcactgatcctggaatggggaacctcacctacagcaacccctcctaccgaacatccacacaggaagtgaagattgaagcaatcc

SEQ ID NO: 312509 - DNA, 120 bp, Artificial Sequence
  ENSG00000134569_45 (sequence is synthesized)
ccaaaccagccatgtacaaccagctgtgctataagaaagagggagggcctgaccataactacaccaaggagaagatcaagatcgtagagggaatctgcctcctgtctggggatgatgctg

SEQ ID NO: 312510 - DNA, 120 bp, Artificial Sequence
  ENSG00000134569_46 (sequence is synthesized)
agtgggatgacctcaagcaactgcgaagctcacgggggggcctcctccgggatcatgtatgcatgaagacagacacggtgtccatccaggccagctctggctccctggatgacacagaga

SEQ ID NO: 312511 - DNA, 120 bp, Artificial Sequence
  ENSG00000134569_47 (sequence is synthesized)
cggagcagctgttacaggaagagcagtctgagtgtagcagcgtccatactgcagccactccagaaagacgaggctctctgccagacacgggctggaaacatgaacgcaagctctcctcag

SEQ ID NO: 312512 - DNA, 120 bp, Artificial Sequence
  ENSG00000134569_48 (sequence is synthesized)
agagccaggtctaaatgcccacattctcttccctgcctgcctgttccttctcctttatggacgtctagtccttgtgctcgcttacaccgcaggccccgcttctgtgtgcttgtcctcctc

SEQ ID NO: 312513 - DNA, 120 bp, Artificial Sequence
  ENSG00000134569_49 (sequence is synthesized)
ctcctcccaccccataactgttcctaagccttcaccggagctgtttaccacgtgagtccataactacctgtgcacaagaaatgatggcacatcacgagaatttagacctggattttacca

SEQ ID NO: 312514 - DNA, 120 bp, Artificial Sequence
  ENSG00000134569_50 (sequence is synthesized)
tgaacctcacatcttgtactccatcctgggccccctgaaactgcttattcgtgattcctcaccagcgtagagctccacctcccctttccccagtaccctcagtgcctgcttctcagtgct

SEQ ID NO: 312515 - DNA, 120 bp, Artificial Sequence
  ENSG00000134569_51 (sequence is synthesized)
gatgcagctgatgacccaggactgcgctctgccccatcacagccagcatgactgcttctctgagagaacttgcccatcaggggctgggacatgggggtgtgggtaaagacagggatgaag

SEQ ID NO: 312516 - DNA, 120 bp, Artificial Sequence
  ENSG00000134569_52 (sequence is synthesized)
gatagaggctgagagaagaaggaagaatcagcccagcaggtatgggcatctgggaaacctccagcctcaagtgtgttagtaacatgaaaaagctttggggggtagttggatctgggtgtc

SEQ ID NO: 312517 - DNA, 120 bp, Artificial Sequence
  ENSG00000134569_53 (sequence is synthesized)
tggtccattgctggcagtggacattattcttgccctaagagacactgccttttcagcagcagatactggtgagatgggggtggctcaggctgttcttcctcctcctagaatgtctggagc

SEQ ID NO: 312518 - DNA, 120 bp, Artificial Sequence
  ENSG00000134569_54 (sequence is synthesized)
tgtttctacattcagataactgggtcccctatcacaaggctactggctaataggaattccctcctggtgccaccactggccagtacctttcctaagtctttgctcaaattaaccaggttg

SEQ ID NO: 312519 - DNA, 120 bp, Artificial Sequence
  ENSG00000134569_55 (sequence is synthesized)
tgagccagtggcttgagtgaatgttaggccttgggggctgagtctctgaaaagtctaagaagctctgcctagaccaaatatggtatacctcctgacccctctctccctcatgtcctggga

SEQ ID NO: 312520 - DNA, 120 bp, Artificial Sequence
  ENSG00000134569_56 (sequence is synthesized)
ttctggggaagagacctagaaacaagctttcaaagaaaaaccagaagttgtcataaatggtcagaaagaacgatcaggttggagacttgggaaacccagggcctaaagagaagtatccat

SEQ ID NO: 312521 - DNA, 120 bp, Artificial Sequence
  ENSG00000134569_57 (sequence is synthesized)
gagggtcaaacttcctgttgaacttcctatgttctttctcaagtgctcagggatctaagttagtggacagcaagcctgtggctacggggtggtgatgttcctcttccagctgtcccctca

SEQ ID NO: 312522 - DNA, 120 bp, Artificial Sequence
  ENSG00000134569_58 (sequence is synthesized)
gctaaggggcttagtttccatgtgggatgccatcacttggttcatgctcattcacacaaagggcacgtgtctcagcctggtatcagggaaattgagacttatttttgccctaaaacgtct

SEQ ID NO: 312523 - DNA, 120 bp, Artificial Sequence
  ENSG00000134569_59 (sequence is synthesized)
ccctagctgttcttcgtggggtttttttgtttgtttttttgcctaatttgctttttctgaccaagccttgtggcaccagcaatctccaaagtcctgtggtgggagggctgaataaataaa

SEQ ID NO: 312524 - DNA, 120 bp, Artificial Sequence
  ENSG00000134569_60 (sequence is synthesized)
aatacaaagaggtgggtaaggagtaggaaggtagagagcaccactgatgaggccctcctagcccatggcagacccagacctcttctcccccaggaattagaagtggcaggagagaacaac

SEQ ID NO: 312525 - DNA, 120 bp, Artificial Sequence
  ENSG00000134569_61 (sequence is synthesized)
aggggctgggaatggaggggagaatttctaggggaagtttcctgagttgaaacttctcctgtggttactggtattgagaaatcagctaccaaagtgaaaaaggacaagatcaattctttt

SEQ ID NO: 312526 - DNA, 120 bp, Artificial Sequence
  ENSG00000134569_62 (sequence is synthesized)
ctagtcagttctaagactgctagagagagataccaggcccttagccttgctctcagtagcgtcagccccagttctgagcctccccacattacacttaacaagcagtaaaggagtgagcac

SEQ ID NO: 312527 - DNA, 120 bp, Artificial Sequence
  ENSG00000134569_63 (sequence is synthesized)
tttgggtccttagactcacgtctggggaggaagagcaagtagaaaagtggcattttcttgattggaaagggggaaggatcttattgcacttgggctgttcagaatgtagaaaggacatat

SEQ ID NO: 312528 - DNA, 120 bp, Artificial Sequence
  ENSG00000134569_64 (sequence is synthesized)
ttgaggaagtatctatttgagcactgatttactctgtaaaaagcaaaatctctctgtcctaaactaatggaagcgattctcccatgctcatgtgtaatggttttaacgttactcactgga

SEQ ID NO: 312529 - DNA, 120 bp, Artificial Sequence
  ENSG00000134569_65 (sequence is synthesized)
gagattggactttctggagttatttaaccactatgttcagtattttaggactttatgataatttaatataaatttagcttttcttaatcaccttgcctggcttggagtcatgactaatcc

SEQ ID NO: 312530 - DNA, 120 bp, Artificial Sequence
  ENSG00000134569_66 (sequence is synthesized)
tgcacctgctctgtctggcagacccatgctgtggaaaacctgcttacagacatcacttttaagtcctttgtggatgtgggcacagtgaagagcaataaagagtgtgaggttcctgctgga

SEQ ID NO: 312531 - DNA, 120 bp, Artificial Sequence
  ENSG00000134569_67 (sequence is synthesized)
catctatcatgctgggtgctgaggaatgtactcatagatacctggtctctatccctgtggagcttacagttcagtggggtccagttatgggaacatgggttaaagttctactctattctg

SEQ ID NO: 312532 - DNA, 120 bp, Artificial Sequence
  ENSG00000134569_68 (sequence is synthesized)
actcactgtgctagcagcaggggcagatgtcaaaaatataagacatagtttctcccttcagggaactatcaccctacctaaacccctattccctagtcttggggtcacttttgcagacct

SEQ ID NO: 312533 - DNA, 120 bp, Artificial Sequence
  ENSG00000134569_69 (sequence is synthesized)
tcattagaagtaagtcaccagaacagtccacactcaaggggaggggattcttaagggcatgagtaccaggaagtgggagtcactgggatcatcttagaggctgcctaccagactcagttt

SEQ ID NO: 312534 - DNA, 120 bp, Artificial Sequence
  ENSG00000134571_0 (sequence is synthesized)
agtccctctttgggtgacctgtgcctgcttcgtgcctggtgtgacgtctctcaggatgcctgagccggggaagaagccagtctcagcttttagcaagaagccacggtcagtggaagtggc

SEQ ID NO: 312535 - DNA, 120 bp, Artificial Sequence
  ENSG00000134571_1 (sequence is synthesized)
cgcaggcagccctgccgtgttcgaggccgagacagagcgggcaggagtgaaggtgcgctggcagcgcggaggcagtgacatcagcgccagcaacaagtacggcctggccacagagggcac

SEQ ID NO: 312536 - DNA, 120 bp, Artificial Sequence
  ENSG00000134571_2 (sequence is synthesized)
acggcatacgctgacagtgcgggaagtgggccctgccgaccagggatcttacgcagtcattgctggctcctccaaggtcaagttcgacctcaaggtcatagaggcagagaaggcagagcc

SEQ ID NO: 312537 - DNA, 120 bp, Artificial Sequence
  ENSG00000134571_3 (sequence is synthesized)
catgctggcccctgcccctgcccctgctgaggccactggagcccctggagaagccccggccccagccgctgagctgggagaaagtgccccaagtcccaaagggtcaagctcagcagctct

SEQ ID NO: 312538 - DNA, 120 bp, Artificial Sequence
  ENSG00000134571_4 (sequence is synthesized)
caatggtcctacccctggagcccccgatgaccccattggcctcttcgtgatgcggccacaggatggcgaggtgaccgtgggtggcagcatcaccttctcagcccgcgtggccggcgccag

SEQ ID NO: 312539 - DNA, 120 bp, Artificial Sequence
  ENSG00000134571_5 (sequence is synthesized)
cctcctgaagccgcctgtggtcaagtggttcaagggcaaatgggtggacctgagcagcaaggtgggccagcacctgcagctgcacgacagctacgaccgcgccagcaaggtctatctgtt

SEQ ID NO: 312540 - DNA, 120 bp, Artificial Sequence
  ENSG00000134571_6 (sequence is synthesized)
cgagctgcacatcaccgatgcccagcctgccttcactggcagctaccgctgtgaggtgtccaccaaggacaaatttgactgctccaacttcaatctcactgtccacgaggccatgggcac

SEQ ID NO: 312541 - DNA, 120 bp, Artificial Sequence
  ENSG00000134571_7 (sequence is synthesized)
cggagacctggacctcctatcagccttccgccgcacgagcctggctggaggtggtcggcggatcagtgatagccatgaggacactgggattctggacttcagctcactgctgaaaaagag

SEQ ID NO: 312542 - DNA, 120 bp, Artificial Sequence
  ENSG00000134571_8 (sequence is synthesized)
agacagtttccggaccccgagggactcgaagctggaggcaccagcagaggaggacgtgtgggagatcctacggcaggcacccccatctgagtacgagcgcatcgccttccagtacggcgt

SEQ ID NO: 312543 - DNA, 120 bp, Artificial Sequence
  ENSG00000134571_9 (sequence is synthesized)
cactgacctgcgcggcatgctaaagaggctcaagggcatgaggcgcgatgagaagaagagcacagcctttcagaagaagctggagccggcctaccaggtgagcaaaggccacaagatccg

SEQ ID NO: 312544 - DNA, 120 bp, Artificial Sequence
  ENSG00000134571_10 (sequence is synthesized)
gctgaccgtggaactggctgaccatgacgctgaggtcaaatggctcaagaatggccaggagatccagatgagcggcagcaagtacatctttgagtccatcggtgccaagcgtaccctgac

SEQ ID NO: 312545 - DNA, 120 bp, Artificial Sequence
  ENSG00000134571_11 (sequence is synthesized)
catcagccagtgctcattggcggacgacgcagcctaccagtgcgtggtgggtggcgagaagtgtagcacggagctctttgtgaaagagccccctgtgctcatcacgcgccccttggagga

SEQ ID NO: 312546 - DNA, 120 bp, Artificial Sequence
  ENSG00000134571_12 (sequence is synthesized)
ccagctggtgatggtggggcagcgggtggagtttgagtgtgaagtatcggaggagggggcgcaagtcaaatggctgaaggacggggtggagctgacccgggaggagaccttcaaataccg

SEQ ID NO: 312547 - DNA, 120 bp, Artificial Sequence
  ENSG00000134571_13 (sequence is synthesized)
gttcaagaaggacgggcagagacaccacctgatcatcaacgaggccatgctggaggacgcggggcactatgcactgtgcactagcgggggccaggcgctggctgagctcattgtgcagga

SEQ ID NO: 312548 - DNA, 120 bp, Artificial Sequence
  ENSG00000134571_14 (sequence is synthesized)
aaagaagctggaggtgtaccagagcatcgcagacctgatggtgggcgcaaaggaccaggcggtgttcaaatgtgaggtctcagatgagaatgttcggggtgtgtggctgaagaatgggaa

SEQ ID NO: 312549 - DNA, 120 bp, Artificial Sequence
  ENSG00000134571_15 (sequence is synthesized)
ggagctggtgcccgacagccgcataaaggtgtcccacatcgggcgggtccacaaactgaccattgacgacgtcacacctgccgacgaggctgactacagctttgtgcccgagggcttcgc

SEQ ID NO: 312550 - DNA, 120 bp, Artificial Sequence
  ENSG00000134571_16 (sequence is synthesized)
ctgcaacctgtcagccaagctccacttcatggaggtcaagattgacttcgtacccaggcaggaacctcccaagatccacctggactgcccaggccgcataccagacaccattgtggttgt

SEQ ID NO: 312551 - DNA, 120 bp, Artificial Sequence
  ENSG00000134571_17 (sequence is synthesized)
gtctggacgtccctatctctggggaccctgctcccactgtgatctggcagaaggctatcacgcaggggaataaggccccagccaggccagccccagatgccccagaggacacaggtgaca

SEQ ID NO: 312552 - DNA, 120 bp, Artificial Sequence
  ENSG00000134571_18 (sequence is synthesized)
gcgatgagtgggtgtttgacaagaagctgctgtgtgagaccgagggccgggtccgcgtggagaccaccaaggaccgcagcatcttcacggtcgagggggcagagaaggaagatgagggcg

SEQ ID NO: 312553 - DNA, 120 bp, Artificial Sequence
  ENSG00000134571_19 (sequence is synthesized)
tctacacggtcacagtgaagaaccctgtgggcgaggaccaggtcaacctcacagtcaaggtcatcgacgtgccagacgcacctgcggcccccaagatcagcaacgtgggagaggactcct

SEQ ID NO: 312554 - DNA, 120 bp, Artificial Sequence
  ENSG00000134571_20 (sequence is synthesized)
gcacagtacagtgggagccgcctgcctacgatggcgggcagcccatcctgggctacatcctggagcgcaagaagaagaagagctaccggtggatgcggctgaacttcgacctgattcagg

SEQ ID NO: 312555 - DNA, 120 bp, Artificial Sequence
  ENSG00000134571_21 (sequence is synthesized)
agctgagtcatgaagcgcggcgcatgatcgagggcgtggtgtacgagatgcgcgtctacgcggtcaacgccatcggcatgtccaggcccagccctgcctcccagcccttcatgcctatcg

SEQ ID NO: 312556 - DNA, 120 bp, Artificial Sequence
  ENSG00000134571_22 (sequence is synthesized)
gtccccccagcgaacccacccacctggcagtagaggacgtctctgacaccacggtctccctcaagtggcggcccccagagcgcgtgggagcaggaggcctggatggctacagcgtggagt

SEQ ID NO: 312557 - DNA, 120 bp, Artificial Sequence
  ENSG00000134571_23 (sequence is synthesized)
actgcccagagggctgctcagagtgggtggctgccctgcaggggctgacagagcacacatcgatactggtgaaggacctgcccacgggggcccggctgcttttccgagtgcgggcacaca

SEQ ID NO: 312558 - DNA, 120 bp, Artificial Sequence
  ENSG00000134571_24 (sequence is synthesized)
atatggcagggcctggagcccctgttaccaccacggagccggtgacagtgcaggagatcctgcaacggccacggcttcagctgcccaggcacctgcgccagaccattcagaagaaggtcg

SEQ ID NO: 312559 - DNA, 120 bp, Artificial Sequence
  ENSG00000134571_25 (sequence is synthesized)
gggagcctgtgaaccttctcatccctttccagggcaagccccggcctcaggtgacctggaccaaagaggggcagcccctggcaggcgaggaggtgagcatccgcaacagccccacagaca

SEQ ID NO: 312560 - DNA, 120 bp, Artificial Sequence
  ENSG00000134571_26 (sequence is synthesized)
ccatcctgttcatccgggccgctcgccgcgtgcattcaggcacttaccaggtgacggtgcgcattgagaacatggaggacaaggccacgctggtgctgcaggttgttgacaagccaagtc

SEQ ID NO: 312561 - DNA, 120 bp, Artificial Sequence
  ENSG00000134571_27 (sequence is synthesized)
ctccccaggatctccgggtgactgacgcctggggtcttaatgtggctctggagtggaagccaccccaggatgtcggcaacacggagctctgggggtacacagtgcagaaagccgacaaga

SEQ ID NO: 312562 - DNA, 120 bp, Artificial Sequence
  ENSG00000134571_28 (sequence is synthesized)
agaccatggagtggttcaccgtcttggagcattaccgccgcacccactgcgtggtgccagagctcatcattggcaatggctactacttccgcgtcttcagccagaatatggttggcttta

SEQ ID NO: 312563 - DNA, 120 bp, Artificial Sequence
  ENSG00000134571_29 (sequence is synthesized)
gtgacagagcggccaccaccaaggagcccgtctttatccccagaccaggcatcacctatgagccacccaactataaggccctggacttctccgaggccccaagcttcacccagcccctgg

SEQ ID NO: 312564 - DNA, 120 bp, Artificial Sequence
  ENSG00000134571_30 (sequence is synthesized)
tgaaccgctcggtcatcgcgggctacactgctatgctctgctgtgctgtccggggtagccccaagcccaagatttcctggttcaagaatggcctggacctgggagaagacgcccgcttcc

SEQ ID NO: 312565 - DNA, 120 bp, Artificial Sequence
  ENSG00000134571_31 (sequence is synthesized)
gcatgttcagcaagcagggagtgttgactctggagattagaaagccctgcccctttgacgggggcatctatgtctgcagggccaccaacttacagggcgaggcacggtgtgagtgccgcc

SEQ ID NO: 312566 - DNA, 120 bp, Artificial Sequence
  ENSG00000134571_32 (sequence is synthesized)
tggaggtgcgagtgcctcagtgaccaggctggctcctggggatggccaggtacaaccggatgccagccccgtgccaggagcctggagggaagttggggaaacccctccctactgttggat

SEQ ID NO: 312567 - DNA, 120 bp, Artificial Sequence
  ENSG00000134571_33 (sequence is synthesized)
gtatgtgtgacaagtgtgtctcctgtgctgcgatgggggatcagcagggcagttgtcgggcagtcctgagtgggtgttgcacagactggtccacagggctcctgaaggaagcccctggat

SEQ ID NO: 312568 - DNA, 120 bp, Artificial Sequence
  ENSG00000134571_34 (sequence is synthesized)
ctttggggtaaaaggagggtggcctcaagaaacaatgtctggggacaggcctttctggcctgctatgtcttcccaatgtttattgggcaataaaagataagtgcagtcacagagaactca

SEQ ID NO: 312569 - DNA, 120 bp, Artificial Sequence
  ENSG00000134574_0 (sequence is synthesized)
ctccgagacgggtggggccggagctccaagctggtttgaacaagccctgggcatgtttggcgggaagttggcttagctcggctacctgtggccccgcagttttgtagtccccgccttgtt

SEQ ID NO: 312570 - DNA, 120 bp, Artificial Sequence
  ENSG00000134574_1 (sequence is synthesized)
tctccccagaggcctctcaatcctccctccatgatcttcgcatagagcacagtaccccttcacacggaggacgcgatggctcccaagaaacgcccagaaacccagaagacctccgagatt

SEQ ID NO: 312571 - DNA, 120 bp, Artificial Sequence
  ENSG00000134574_2 (sequence is synthesized)
gtattacgccccaggaacaagaggagcaggagtcccctggagctggagcccgaggccaagaagctctgtgcgaagggctccggtcctagcagaagatgtgactcagactgcctctgggtg

SEQ ID NO: 312572 - DNA, 120 bp, Artificial Sequence
  ENSG00000134574_3 (sequence is synthesized)
gggctggctggcccacagatcctgccaccatgccgcagcatcgtcaggaccctccaccagcataagctgggcagagcttcctggccatctgtccagcaggggctccagcagtcctttttg

SEQ ID NO: 312573 - DNA, 120 bp, Artificial Sequence
  ENSG00000134574_4 (sequence is synthesized)
cacactctggattcttaccggatattacaaaaggctgccccctttgacaggagggctacatccttggcgtggcacccaactcaccccagcaccgtggctgtgggttccaaagggggagat

SEQ ID NO: 312574 - DNA, 120 bp, Artificial Sequence
  ENSG00000134574_5 (sequence is synthesized)
atcatgctctggaattttggcatcaaggacaaacccaccttcatcaaagggattggagctggagggagcatcactgggctgaagtttaaccctctcaataccaaccagttttacgcctcc

SEQ ID NO: 312575 - DNA, 120 bp, Artificial Sequence
  ENSG00000134574_6 (sequence is synthesized)
tcaatggagggaacaactaggctgcaagactttaaaggcaacattctacgagtttttgccagctcagacaccatcaacatctggttttgtagcctggatgtgtctgctagtagccgaatg

SEQ ID NO: 312576 - DNA, 120 bp, Artificial Sequence
  ENSG00000134574_7 (sequence is synthesized)
gaatgcacaaaaagaaagtgacgcatgtggccctgaacccatgctgtgattggttcctggccacagcctccgtagatcaaacagtgaaaatttgggacctgcgccaggttagagggaaag

SEQ ID NO: 312577 - DNA, 120 bp, Artificial Sequence
  ENSG00000134574_8 (sequence is synthesized)
ccagcttcctctactcgctgccgcacaggcatcctgtcaacgcagcttgtttcagtcccgatggagcccggctcctgaccacggaccagaagagcgagatccgagtttactctgcttccc

SEQ ID NO: 312578 - DNA, 120 bp, Artificial Sequence
  ENSG00000134574_9 (sequence is synthesized)
agtgggactgccccctgggcctgatcccgcaccctcaccgtcacttccagcacctcacacccatcaaggcagcctggcatcctcgctacaacctcattgttgtgggccgatacccagatc

SEQ ID NO: 312579 - DNA, 120 bp, Artificial Sequence
  ENSG00000134574_10 (sequence is synthesized)
ctaatttcaaaagttgtaccccttatgaattgaggacgatcgacgtgttcgatggaaactcagggaagatgatgtgtcagctctatgacccagaatcttctggcatcagttcgcttaatg

SEQ ID NO: 312580 - DNA, 120 bp, Artificial Sequence
  ENSG00000134574_11 (sequence is synthesized)
aattcaatcccatgggggacacgctggcctctgcaatgggttaccacattctcatctggagccaggaggaagccaggacacggaagtgagagacactaaagaaggtgtgggccagacaag

SEQ ID NO: 312581 - DNA, 120 bp, Artificial Sequence
  ENSG00000134574_12 (sequence is synthesized)
gccttggagcccacacatgggatcaagtcctgcaagcagaggtggcgatttgttaaagggccaaaagtatccaaggttagggttggagcaggggtgctgggacctggggcactgtgggac

SEQ ID NO: 312582 - DNA, 120 bp, Artificial Sequence
  ENSG00000134574_13 (sequence is synthesized)
tgggacacttttatgttaatgctctggacttgcctccagagactgctccagagttggtgacacagctgtcccaagggcccctctgtatctagcctggaaccaaggttatcttggaactaa

SEQ ID NO: 312583 - DNA, 120 bp, Artificial Sequence
  ENSG00000134574_14 (sequence is synthesized)
atgacttttctcctctcagtgggtggtagcagagggatcaagcagttatttgatttgtgctcacttttgatatggccaataaaaccataccgactgagcttctgcgtggatcttccagaa

SEQ ID NO: 312584 - DNA, 120 bp, Artificial Sequence
  ENSG00000134574_15 (sequence is synthesized)
tgggtgctccgaggctcccgaggcccgcgcaggtcacgggtgcctccggctgtgcattctacctgcaggtcctttgacaccagagtgtttaggtttcaacacctctcccgctaggtaaca

SEQ ID NO: 312585 - DNA, 120 bp, Artificial Sequence
  ENSG00000134574_16 (sequence is synthesized)
ggaagcagatgagctccgtaacaacagacacacggacttgtcagattccttgttcgtatcagggttcttgcacagttaggacggcttcagagaatcctacctttcctggcgctgtgtgtg

SEQ ID NO: 312586 - DNA, 120 bp, Artificial Sequence
  ENSG00000134574_17 (sequence is synthesized)
ctggatttcatagtcacgcttgttagctgcacgtcctcggtggtcagttgtgagagcccccaattccttcctccttagaaagctcattctctgaggtttactggggcttgaacctggggc

SEQ ID NO: 312587 - DNA, 120 bp, Artificial Sequence
  ENSG00000134574_18 (sequence is synthesized)
tataaggagtttcgagacactcaaaaacgagctggggcttgttaatcaagtggtttttgtccatgagaagaaagaattggttgtcaagacgtcggacctatagtgattgggtcctcaaat

SEQ ID NO: 312588 - DNA, 120 bp, Artificial Sequence
  ENSG00000134574_19 (sequence is synthesized)
acagtttggtgatcaggagttgttgctttattgctattctaatttcacttacctccccagaagtaacctagttaagagcatttccaggccttcctattccttcttttcctaaacggtgac

SEQ ID NO: 312589 - DNA, 120 bp, Artificial Sequence
  ENSG00000134574_20 (sequence is synthesized)
ttctgccatgctgccctaaaatctttttattgtgcattatatgtgatttataaaattgtgacccagtcccatctcgagttttgcagcccaaactgggaagagttctgcattgtactttat

SEQ ID NO: 312590 - DNA, 120 bp, Artificial Sequence
  ENSG00000134574_21 (sequence is synthesized)
ccttgtgtgtttctttggctggggtctcaggaaccctgcacgactgtatttactttcacttcagacttactgtttgtgggagtgttttggggaaggggccaaatcctcactcattttttt

SEQ ID NO: 312591 - DNA, 120 bp, Artificial Sequence
  ENSG00000134574_22 (sequence is synthesized)
atttctggtgctcgttgagaccacacagacatggaaaggccgcaggaggtgatgagacagagattaaccgtgccgaatgaaacaaggcttcctttcggggaattcagcagaaaaaccttt

SEQ ID NO: 312592 - DNA, 120 bp, Artificial Sequence
  ENSG00000134574_23 (sequence is synthesized)
tgcagaccctgcctgtctgaccactgctggggttttccctcagtgtggaagccactacgtcaaacctttacccctgatagcgtctgccaagctgatgtctgggaacctttgtggctgtgg

SEQ ID NO: 312593 - DNA, 120 bp, Artificial Sequence
  ENSG00000134574_24 (sequence is synthesized)
ctgtccccatcagctgctgagtttccagaatttttttgttgttgttcacagcccagattcacctcttcctttccgctcctgtctagagaggagtgggagggagagtacccctgcaggaga

SEQ ID NO: 312594 - DNA, 120 bp, Artificial Sequence
  ENSG00000134574_25 (sequence is synthesized)
aaggcaacattctacgagtttttgccagctcagacaccatcaaataagccagcatggcgtggacccagaaagccacctagagaatggagcaacagctcagaacttgagactgaatgccct

SEQ ID NO: 312595 - DNA, 120 bp, Artificial Sequence
  ENSG00000134574_26 (sequence is synthesized)
gcactcactgtggtgtaatgacctgacctgttcctgggtggaagcttatatggatggaatcttttccataaagtgctctggacttcccaagagaaagtggctggagaaattacagaatgc

SEQ ID NO: 312596 - DNA, 120 bp, Artificial Sequence
  ENSG00000134574_27 (sequence is synthesized)
ggccgggtgcagtggctcatgcttgaaatcccagcactttgggaggccaagcatctggttttgtagcctggatgtgtctgctagtagccgaatggtggtcacaggagacaacgtggggaa

SEQ ID NO: 312597 - DNA, 60 bp, Artificial Sequence
  ENSG00000134574_28 (sequence is synthesized)
gactgccccctgggcctgatcccgcaccctcaccgtcacttccagcacctcacacccatc

SEQ ID NO: 312598 - DNA, 120 bp, Artificial Sequence
  ENSG00000134574_29 (sequence is synthesized)
aagggctgatgtggtaagcctgccaccccagatcgctcctggcccgagcacagagcatctcttacccattggctctctctcttccttttatcccacttctgccatcccatatggttgagt

SEQ ID NO: 312599 - DNA, 120 bp, Artificial Sequence
  ENSG00000134574_30 (sequence is synthesized)
tttctgtctcgctgataagatatttttctgagttttttcagcccagctctgatctcactgtgagaattttctaagatcctgaccctctgttctgtcttctcagcttcagttacctgtgta

SEQ ID NO: 312600 - DNA, 120 bp, Artificial Sequence
  ENSG00000134574_31 (sequence is synthesized)
attttttatttttttattattttttttaaggcagggtctcgctctgtcacccaggtgggagtacagtggggcaagcatggttcattacagccttgatctcccaggctcaagcgatcctcc

SEQ ID NO: 312601 - DNA, 90 bp, Artificial Sequence
  ENSG00000134574_32 (sequence is synthesized)
ttcattacagccttgatctttttttttttttgtagagacagggtattcttgtgttacccaggctgatccttttttttttttttttttttt

SEQ ID NO: 312602 - DNA, 120 bp, Artificial Sequence
  ENSG00000134574_33 (sequence is synthesized)
acccgcagaggcctggcagcgccgcgtttgaggagggttcgtgtcaggaagtcaaggctggatgatcgcttaagcccaggagttaaagaccggcccggacaacaaagcgagaccccgtct

SEQ ID NO: 312603 - DNA, 120 bp, Artificial Sequence
  ENSG00000134574_34 (sequence is synthesized)
tggcatcaaggacaaacccaccttcatcaaaggggtgagcagttccccatgccaggtcgtgctaaagaagtgtttgttggctgggtgcagtggttcgcacctgtaatcccagcactttgg

SEQ ID NO: 312604 - DNA, 120 bp, Artificial Sequence
  ENSG00000134575_0 (sequence is synthesized)
aagtaagatggcggcgaacgcacttccggcgtgtgtccttacgggtgcgtccgggcggctgcttgcaggtgccacccagcgggttccagcttgtttgctgcatagattacaacggtgatg

SEQ ID NO: 312605 - DNA, 120 bp, Artificial Sequence
  ENSG00000134575_1 (sequence is synthesized)
gcgggcaagcggtccggctggagccgggcggctctcctccagctccttctcggcgtgaacctggtggtgatgccgcccacccgggcccggagtctgcgcttcgttaccttgctgtaccgc

SEQ ID NO: 312606 - DNA, 120 bp, Artificial Sequence
  ENSG00000134575_2 (sequence is synthesized)
catggagaccgttcaccagtgaagacatatcccaaggacccctatcaggaagaagaatggccccaggggtttggtcagttaaccaaggaggggatgctacagcactgggaactgggccag

SEQ ID NO: 312607 - DNA, 120 bp, Artificial Sequence
  ENSG00000134575_3 (sequence is synthesized)
gccctgcggcagcgctatcacggcttcctaaacacctcttatcaccggcaagaggtttatgtgcgaagcacagactttgaccggactctcatgagtgctgaggccaacctggctggactc

SEQ ID NO: 312608 - DNA, 120 bp, Artificial Sequence
  ENSG00000134575_4 (sequence is synthesized)
ttccctcccaacgggatgcagcgcttcaacccgaacatctcgtggcagcctattcctgtgcacactgtgcccatcactgaggacaggctgctgaagttcccgttgggcccatgtccccgt

SEQ ID NO: 312609 - DNA, 120 bp, Artificial Sequence
  ENSG00000134575_5 (sequence is synthesized)
tatgagcagctgcagaacgagacccggcagacaccagagtatcagaatgagagttctcggaatgcacaatttctggacatggtggccaacgagacagggcttacagacctgacactggag

SEQ ID NO: 312610 - DNA, 120 bp, Artificial Sequence
  ENSG00000134575_6 (sequence is synthesized)
accgtctggaatgtctatgacacactcttctgtgagcaaacgcacgggctgcgcctgccgccctgggcctcaccccaaaccatgcagcgtctcagccggctaaaggacttcagcttccgc

SEQ ID NO: 312611 - DNA, 120 bp, Artificial Sequence
  ENSG00000134575_7 (sequence is synthesized)
ttcctcttcggaatctaccagcaggcggagaaggcccggcttcaggggggagtcctgctggctcagataaggaagaacctgaccctaatggcgaccacctcccagctccccaagctgctg

SEQ ID NO: 312612 - DNA, 120 bp, Artificial Sequence
  ENSG00000134575_8 (sequence is synthesized)
gtttactctgcgcacgacactaccctggttgccctgcaaatggcactggatgtctacaatggtgaacaagccccctacgcctcctgccacatatttgaactgtaccaggaagattctggg

SEQ ID NO: 312613 - DNA, 120 bp, Artificial Sequence
  ENSG00000134575_9 (sequence is synthesized)
aggccccctggccgctcagcctgcctggctgccctcaccgctgcccactgcaggacttccttcgcctcacagagcccgtcgtgcccaaggattggcagcaggagtgccagctggcaagcg

SEQ ID NO: 312614 - DNA, 120 bp, Artificial Sequence
  ENSG00000134575_10 (sequence is synthesized)
gtcctgcagacacagaggtgattgtggccttggctgtatgtggctccatcctcttcctcctcatagtgctgctcctcaccgtcctcttccggatgcaggcccagcctcctggctaccgcc

SEQ ID NO: 312615 - DNA, 120 bp, Artificial Sequence
  ENSG00000134575_11 (sequence is synthesized)
acgtcgcagatggggaggaccacgcctgacaaccactcagcccccttccctccacctcctaggggaggtgggctgggccctcgctcctgactgttgctgctccccagcccatggacagga

SEQ ID NO: 312616 - DNA, 120 bp, Artificial Sequence
  ENSG00000134575_12 (sequence is synthesized)
gatcctgggttgggcctccctctgatgaccccagccagatgagcgagtggggctcagcgtggcccatggtgcctgtcactcagcattcccatgcctgatgtttaccaagtgctgtgttgg

SEQ ID NO: 312617 - DNA, 120 bp, Artificial Sequence
  ENSG00000134575_13 (sequence is synthesized)
acactggctttctccaaacaggatttgcctcctccacgctccctacacacctgagatgtaaactggcagtcagtgttcactcaggacctaggattagaaaatggcagagttggtgctgga

SEQ ID NO: 312618 - DNA, 120 bp, Artificial Sequence
  ENSG00000134575_14 (sequence is synthesized)
tccaccttgcacttctatcaagccctgttctttttcctccagcctgaagtcttcggcaaatagctcagagggacacggtcttgcctctcagtgcttattttagtgggaaaaacagctaat

SEQ ID NO: 312619 - DNA, 120 bp, Artificial Sequence
  ENSG00000134575_15 (sequence is synthesized)
accaggggtacaaacattggctcccaaggaactggatcacccaacagccagccagccacatttccctgtgtctggctagagccaccattagactcagacagaatgcttcaggaatcgttg

SEQ ID NO: 312620 - DNA, 120 bp, Artificial Sequence
  ENSG00000134575_16 (sequence is synthesized)
tcaccccttcaactggagcaggacggaaggttgtctgtacttgggagggagtagggagtggtgggaagggagttgcttgtcacacgaatcaggaaactgctctccctcagctgggctggg

SEQ ID NO: 312621 - DNA, 120 bp, Artificial Sequence
  ENSG00000134575_17 (sequence is synthesized)
gtctccagggacctgagctacatgcaggttgtgagctggaaaagaaagttctagactgtggcccagaatagggctggggcagctcccagagaatgaatagtgctgtttcctattggactg

SEQ ID NO: 312622 - DNA, 120 bp, Artificial Sequence
  ENSG00000134575_18 (sequence is synthesized)
aaaggccagctggtggaggtcgaggatctcgggaaggaacagctggtttaggaggggacgactggcctgggtagttgggaggctggattcaggattgacctggagccctggcttatggga

SEQ ID NO: 312623 - DNA, 120 bp, Artificial Sequence
  ENSG00000134575_19 (sequence is synthesized)
tggccaacgagacagggcttacagacctgacactggagaccgtctggaatgtctatgacacactcttctgtgaggtgagcccactagggtgcccactgtgatcattcttttccctctcag

SEQ ID NO: 312624 - DNA, 120 bp, Artificial Sequence
  ENSG00000134575_20 (sequence is synthesized)
caggcccaggtcaccaggacggtagaacacagtgcctgataccgtcacgcccctggggaggtccagggaggctgtgcttgtgaaacacgggaacttccctcatgggtgacagagatcctc

SEQ ID NO: 312625 - DNA, 120 bp, Artificial Sequence
  ENSG00000134575_21 (sequence is synthesized)
agagtgggaaatggtttattaattgtcagcagtccctgctgctctccacccagagctcctttctgctgagtctcactttttgtgcctgagcttcctttcctgtgccctgaagcatccaca

SEQ ID NO: 312626 - DNA, 120 bp, Artificial Sequence
  ENSG00000134575_22 (sequence is synthesized)
ccatgtctactggttccagcccctctgcctctctcccctctccctccctcacacacacaggcaccttcccactagggaagagagctgccccctggagaggctggcctaggcctggggcgc

SEQ ID NO: 312627 - DNA, 120 bp, Artificial Sequence
  ENSG00000134575_23 (sequence is synthesized)
ctggccgtaggcctgctgatgccaggctccttttcccgctgcctgtttccccgcttcgctctacagctgctgaagttcccgttgggcccatgtccccgttatgagcagctgcagaacgag

SEQ ID NO: 312628 - DNA, 120 bp, Artificial Sequence
  ENSG00000134575_24 (sequence is synthesized)
ggtcagaagccagcctttcctcaggatgagctgcagaatgagcgacgtctagagcagtctacaaaacttggggtcctactaaactgccttttcccatatgggtgctgactttgaccagat

SEQ ID NO: 312629 - DNA, 120 bp, Artificial Sequence
  ENSG00000134575_25 (sequence is synthesized)
ttcataaccttaatctctgtgcccatgatattgctgtgcatgactggccacttaatgaaagacttctgggatcagattaattgactccagcaaagcgtgaacctggaaagcaacagggcc

SEQ ID NO: 312630 - DNA, 120 bp, Artificial Sequence
  ENSG00000134575_26 (sequence is synthesized)
gggagctccagaggcaaggggaacaaggtatgctgccctcatcttttgccctcagggagcctaaggctgaggctgggcactttggcctccttcttgtatttttggtcacaactacaggaa

SEQ ID NO: 312631 - DNA, 120 bp, Artificial Sequence
  ENSG00000134575_27 (sequence is synthesized)
aagacatctgagagctgtctggaacaaagccctaggagctgagttgcccctgcttggctgggatgaggcaaatttgattaagcatccaaattcggacttaagggcgggcctggcaaagtg

SEQ ID NO: 312632 - DNA, 120 bp, Artificial Sequence
  ENSG00000134588_0 (sequence is synthesized)
cttcaagattatcaataatcggagatacgtatattttatttgtaaagaaaacatggctgccctattcctacgtggttttgtccaaatagggaactgcaagactgggatatctaagtcaaa

SEQ ID NO: 312633 - DNA, 120 bp, Artificial Sequence
  ENSG00000134588_1 (sequence is synthesized)
agaagcattcattgaagcagtggaaagaaagaagaaagatagactggtgctgtatttcaaaagtggaaaatatagcacttttcggctaagtgataatattcaaaatgtagtccttaaatc

SEQ ID NO: 312634 - DNA, 120 bp, Artificial Sequence
  ENSG00000134588_2 (sequence is synthesized)
ctatagaggaaaccaaaatcacctgcatttaactttacaaaataataatggcttgtttattgaaggattatcctccacagatgctgaacaattgaagatattcttggacagagttcatca

SEQ ID NO: 312635 - DNA, 120 bp, Artificial Sequence
  ENSG00000134588_3 (sequence is synthesized)
aaacgaggttcagccacctgtgagacctggtaagggtgggagtgtcttttctagcacaacacagaaggaaatcaacaaaacttcattccacaaagttgatgagaaatcaagtagcaaatc

SEQ ID NO: 312636 - DNA, 120 bp, Artificial Sequence
  ENSG00000134588_4 (sequence is synthesized)
ttttgagatagcaaaaggaagtgggacaggtgtccttcagaggatgcctttgcttacatcaaaattgacacttacttgcggagagttatcagaaaatcagcacaagaagaggaaaagaat

SEQ ID NO: 312637 - DNA, 120 bp, Artificial Sequence
  ENSG00000134588_5 (sequence is synthesized)
gctctcatctagctcagagatgaatgaggaattcttgaaagaaaataattctgtagaatacaagaaatccaaggcagattgttcgaggtgtgtaagctataatcgagagaaacaattgaa

SEQ ID NO: 312638 - DNA, 120 bp, Artificial Sequence
  ENSG00000134588_6 (sequence is synthesized)
gttaaaagagttagaagagaataagaaattggaatgtgaatcttcatgcatcatgaacgccactggaaatccttacctagatgacattggtcttctccaagctctcactgagaaaatggt

SEQ ID NO: 312639 - DNA, 120 bp, Artificial Sequence
  ENSG00000134588_7 (sequence is synthesized)
tttggtatttctgttacaacaagggtatagtgacggttacacaaagtgggataaattaaaactattttttgaattatttccagagaaaatatgccacggcctccccaatttgggaaacac

SEQ ID NO: 312640 - DNA, 120 bp, Artificial Sequence
  ENSG00000134588_8 (sequence is synthesized)
ctgttatatgaatgcagtgttacagtctctactttcaatcccatcgtttgctgatgatttacttaatcagagtttcccatggggtaaaattccccttaatgctcttaccatgtgcttggc

SEQ ID NO: 312641 - DNA, 120 bp, Artificial Sequence
  ENSG00000134588_9 (sequence is synthesized)
acggctacttttttttaaagatacctataatatagaaatcaaggagatgttactcttgaatcttaaaaaggccatttcagcagctgcagagatattccatggcaatgcacagaacgatgc

SEQ ID NO: 312642 - DNA, 120 bp, Artificial Sequence
  ENSG00000134588_10 (sequence is synthesized)
tcatgagtttttagctcactgtttagatcaactgaaagataacatggaaaaactcaacacaatttggaagcctaaaagtgaatttggggaagataattttcctaaacaggtttttgctga

SEQ ID NO: 312643 - DNA, 120 bp, Artificial Sequence
  ENSG00000134588_11 (sequence is synthesized)
tgatcctgacaccagtgggttttcttgccctgtcattactaattttgagttagagttgttgcactccattgcttgtaaagcttgtggtcaggttattctcaagacagaactgaataatta

SEQ ID NO: 312644 - DNA, 120 bp, Artificial Sequence
  ENSG00000134588_12 (sequence is synthesized)
cctctccatcaaccttccccaaagaataaaagcacatccttcatctattcagtctacttttgatcttttttttggagcagaagagcttgagtataaatgtgcaaaatgtgagcacaagac

SEQ ID NO: 312645 - DNA, 120 bp, Artificial Sequence
  ENSG00000134588_13 (sequence is synthesized)
ttccgttggagtgcactcattcagtaggctacctagaatccttattgttcacctcaaacgctatagcttgaatgagttttgtgcattaaagaagaatgaccaggaagtcatcatttccaa

SEQ ID NO: 312646 - DNA, 120 bp, Artificial Sequence
  ENSG00000134588_14 (sequence is synthesized)
atatttaaaggtgtcttctcattgcaatgaaggcaccagaccacctcttcccttgagtgaggatggagaaattacagatttccaattattaaaagttattcgaaagatgacttctggaaa

SEQ ID NO: 312647 - DNA, 120 bp, Artificial Sequence
  ENSG00000134588_15 (sequence is synthesized)
cctggctccacacattggatcagataaggagtctgaacaaaaaaaaggccagacagtctttaaaggggcaagcagaagacagcagcaaaagtaccttggaaaaaattctaaaccaaatga

SEQ ID NO: 312648 - DNA, 120 bp, Artificial Sequence
  ENSG00000134588_16 (sequence is synthesized)
gctagaatctgtatactcaggagatcgagcattcattgaaaaagaaccgttagctcacttaatgacgtatctggaagatacctcactttgtcagttccacaaagctggaggtaaacctgc

SEQ ID NO: 312649 - DNA, 120 bp, Artificial Sequence
  ENSG00000134588_17 (sequence is synthesized)
cagcagcccaggcacacctctctcaaaagttgactttcaaacagtgcccgaaaatccaaaacgaaagaaatatgtgaaaaccagtaagtttgtagcttttgataggattatcaatcctac

SEQ ID NO: 312650 - DNA, 120 bp, Artificial Sequence
  ENSG00000134588_18 (sequence is synthesized)
taaagatttgtatgaagataaaaatatcagaattccagaaagattccaaaaagtgtctgaacagactcagcagtgtgacggtatgagaatctgtgaacaagcccctcagcaggcactgcc

SEQ ID NO: 312651 - DNA, 120 bp, Artificial Sequence
  ENSG00000134588_19 (sequence is synthesized)
tcaaagctttccaaagccaggcacccaggggcacacaaagaacctcctaagacctacaaaattaaatctacagaagtctaacaggaattccctacttgcactgggttccaataagaatcc

SEQ ID NO: 312652 - DNA, 120 bp, Artificial Sequence
  ENSG00000134588_20 (sequence is synthesized)
aagaaacaaagacattttagataagataaaatctaaagccaaggaaacaaaaagaaatgatgataagggagatcatacctaccggctcattagtgttgtcagccatcttgggaagactct

SEQ ID NO: 312653 - DNA, 120 bp, Artificial Sequence
  ENSG00000134588_21 (sequence is synthesized)
aaagtcaggccattatatctgtgatgcctatgactttgagaaacagatctggttcacttacgatgatatgcgggtgttaggtatccaggaggcccagatgcaggaggataggcgttgcac

SEQ ID NO: 312654 - DNA, 120 bp, Artificial Sequence
  ENSG00000134588_22 (sequence is synthesized)
tgggtacatcttcttttacatgcataatgagatctttgaagagatgttgaaaagagaagagaatgcccagcttaatagcaaggaggtagaggagacccttcagaaggaataagaggaacg

SEQ ID NO: 312655 - DNA, 120 bp, Artificial Sequence
  ENSG00000134588_23 (sequence is synthesized)
tactcctccttgtacagatctgcctgactgtctcactcgataccacttcctccatggaaggaaaactgtgaactttatccagagatgaaaatgcaattagtctaggaccaaaggtcaaac

SEQ ID NO: 312656 - DNA, 120 bp, Artificial Sequence
  ENSG00000134588_24 (sequence is synthesized)
agaaacacttaatggggagatctgcattctaatcctgacacagacacctcaatcccatagctctggctgatgagcatccttctctcctacaagactgaaattgtgtttttcatgttcttc

SEQ ID NO: 312657 - DNA, 120 bp, Artificial Sequence
  ENSG00000134588_25 (sequence is synthesized)
ttcattttaatatagtcagggtcttgctctgtcatcctggctagagtgcagtccttcaataataactcactgcagcctcaaactcctggcatcaagcgattctctctcagcctcctgaaa

SEQ ID NO: 312658 - DNA, 120 bp, Artificial Sequence
  ENSG00000134588_26 (sequence is synthesized)
agagagggacttatcttcttgcttgagatgggactatagatgtgtgccaccaggcctagctatttttttttttttttttgctttttgcagagacagggtctcactatgctgcccaggttg

SEQ ID NO: 312659 - DNA, 120 bp, Artificial Sequence
  ENSG00000134588_27 (sequence is synthesized)
gacttgaactcctggcctcaagcaatcttcctgcctctttccatgttctaatacagtggtttaaaaagtatgctccttaaactagcagcaccaggagcatgggggtagtcatttgaaatg

SEQ ID NO: 312660 - DNA, 120 bp, Artificial Sequence
  ENSG00000134588_28 (sequence is synthesized)
caaaatcttgggttccactgtagacctactgattcagaaacttggggtaagggatagcaatctgatggagaccgtgatgcttgatacagtttgagaaccactactgtactacatacacta

SEQ ID NO: 312661 - DNA, 120 bp, Artificial Sequence
  ENSG00000134588_29 (sequence is synthesized)
ccttggttgtatatttaaattgcttattttgtaaaaggttttgattacatttttgtgtttttcatattaatgtatgccttgcctttgtgaacttattaaaagccaaactcacaaaaatca

SEQ ID NO: 312662 - DNA, 120 bp, Artificial Sequence
  ENSG00000134588_30 (sequence is synthesized)
attttgttttcgatcgttaagtgggcacgtggtggagcgttggtgtgtcaggggtgtcgacttcttccacaaactatttaagagacagcagcaggagggactggactggattgtagaaaa

SEQ ID NO: 312663 - DNA, 120 bp, Artificial Sequence
  ENSG00000134588_31 (sequence is synthesized)
cttcaagagttaaggagtgcggagtgctgctcaggtgcctttgtttcaggtcatagtctctgttctatatagcagccaaccacaagggttgattgagtctcactctgttacccaagctgg

SEQ ID NO: 312664 - DNA, 88 bp, Artificial Sequence
  ENSG00000134588_32 (sequence is synthesized)
cctgactggggctacagattccctgtttctgctttaacctgggctgcttgctaagtgcttgcctctcaggatccttgtggagctgaac

SEQ ID NO: 312665 - DNA, 120 bp, Artificial Sequence
  ENSG00000134590_0 (sequence is synthesized)
attgacgtccagcgaagcgaggagcagcgatggacggtcgggtgcagctgataaaggccctcctggccttgccgatccggcctgcgacgcgtcgctggaggaacccgattccctttcccg

SEQ ID NO: 312666 - DNA, 120 bp, Artificial Sequence
  ENSG00000134590_1 (sequence is synthesized)
agacgtttgacggcgataccgaccgactcccggagttcatcgtgcagacgggctcctacatgttcgtggacgagaacacgttctccagcgacgccctgaaggtgacgttcctcatcaccc

SEQ ID NO: 312667 - DNA, 120 bp, Artificial Sequence
  ENSG00000134590_2 (sequence is synthesized)
gcctcacagggcccgccctgcagtgggtgatcccctacatcaagaaggagagccccctcctcaatgattaccggggctttctggccgagatgaagcgagtctttggatgggaggaggacg

SEQ ID NO: 312668 - DNA, 120 bp, Artificial Sequence
  ENSG00000134590_3 (sequence is synthesized)
aggacttctaggccgggagaccctcgggcctgggggcgggtgctctggggagggtccgctgtgttactggccgccgccagggtcgccaccggcgccctccctccgcgcctccctccccct

SEQ ID NO: 312669 - DNA, 120 bp, Artificial Sequence
  ENSG00000134590_4 (sequence is synthesized)
gagccgccgccctctccttccagccagccagcccctcccatgtacatttggacgctgtcctgcgctccagctgcaagctgggctcctgttacacactggacagaccacccactgccgccg

SEQ ID NO: 312670 - DNA, 120 bp, Artificial Sequence
  ENSG00000134590_5 (sequence is synthesized)
ctgccaagccctctcctccccaccagactgccagacgactacatcattctgcccacagacctgcgctgccacagccatcgccatccatcgcatcccaccgacagactgctgctcctagtg

SEQ ID NO: 312671 - DNA, 120 bp, Artificial Sequence
  ENSG00000134590_6 (sequence is synthesized)
atctggactcacctcggaggtatctgggctggccacagtccctggacagtgatccagacagctggccgccccccaagggatctgtcaccttcagcgagacctatttcctccccaccccca

SEQ ID NO: 312672 - DNA, 120 bp, Artificial Sequence
  ENSG00000134590_7 (sequence is synthesized)
gaaacctcttgtgttcttgcctaggcccaggtgttcctggcagccaaatcgagtctctcattttctcttgtggaccagttagttttgcccataacgcagtattctgagtttgcaactgtc

SEQ ID NO: 312673 - DNA, 120 bp, Artificial Sequence
  ENSG00000134590_8 (sequence is synthesized)
tctctgatgtgtgccttttgttcaacacagtaacccctgcattctgctctgctctaatacactacctggagaaagtcttttccttattttcaataaatgtcagacattattgaaaagaaa

SEQ ID NO: 312674 - DNA, 120 bp, Artificial Sequence
  ENSG00000134594_0 (sequence is synthesized)
acacacgcacagagctcgctcgcctcgagcgcacgaacgtggacgttctctttgtgtggagccctcaaggggggttggggccccggttcggtccgggggagatggcgcagcccatcctgg

SEQ ID NO: 312675 - DNA, 120 bp, Artificial Sequence
  ENSG00000134594_1 (sequence is synthesized)
gccatgggagcctgcagcccgcctcggccgctggcctggcgtccctggagctcgactcgtcgctggaccagtacgtgcagattcgcatcttcaaaataatcgtgattggggactccaacg

SEQ ID NO: 312676 - DNA, 120 bp, Artificial Sequence
  ENSG00000134594_2 (sequence is synthesized)
tgggcaagacctgcctgaccttccgcttctgcgggggtaccttcccagacaagactgaagccaccatcggcgtggacttcagggagaagaccgtggaaatcgagggcgagaagatcaagg

SEQ ID NO: 312677 - DNA, 120 bp, Artificial Sequence
  ENSG00000134594_3 (sequence is synthesized)
tgacatctttcaccaacctcaaaatgtggatccaagaatgcaatgggcatgctgtgcccccactagtccccaaagtgcttgtgggcaacaagtgtgacttgagggaacagatccaggtgc

SEQ ID NO: 312678 - DNA, 120 bp, Artificial Sequence
  ENSG00000134594_4 (sequence is synthesized)
cctccaacttagccctgaaatttgctgatgcccacaacatgctcttgtttgagacatcggccaaggaccccaaagagagccagaacgtggagtcgattttcatgtgcttggcttgccgat

SEQ ID NO: 312679 - DNA, 120 bp, Artificial Sequence
  ENSG00000134594_5 (sequence is synthesized)
tgaaggcccagaaatccctgctgtatcgtgatgctgagaggcagcaggggaaggtgcagaaactggagttcccacaggaagctaacagtaaaacttcctgtccttgttgaaaccaaacga

SEQ ID NO: 312680 - DNA, 120 bp, Artificial Sequence
  ENSG00000134594_6 (sequence is synthesized)
tataaatacaagataaattatcactggagttttttctttcccttttttctgtgcctgcataatgctgacacctgcttgtttccatacaaattgatatcaaaataaaatttgtatagatta

SEQ ID NO: 312681 - DNA, 120 bp, Artificial Sequence
  ENSG00000134595_0 (sequence is synthesized)
ccggggaatccgagcaggtatataaggggcccagctagagcccaggcagactgtgaatgcgacctgttcgagagaactcatcaggtgcgagaagcccgcgggttcctgctgatttggcgc

SEQ ID NO: 312682 - DNA, 120 bp, Artificial Sequence
  ENSG00000134595_1 (sequence is synthesized)
ggagcattttgataagcctacccttcccgccggactcgctggcccacaggcccccaagctccgctccgacggagtcccagggccttttcaccgtggccgctccagccccgggagcgcctt

SEQ ID NO: 312683 - DNA, 120 bp, Artificial Sequence
  ENSG00000134595_2 (sequence is synthesized)
ctcctcccgccacgctggcgcaccttcttcccgccccggcaatgtacagccttctggagactgaactcaagaaccccgtagggacacccacacaagcggcgggcaccggcggccccgcag

SEQ ID NO: 312684 - DNA, 120 bp, Artificial Sequence
  ENSG00000134595_3 (sequence is synthesized)
ccccgggaggcgcaggcaagagtagtgcgaacgcagccggcggcgcgaactcgggcggcggcagcagcggtggtgcgagcggaggtggcgggggtacagaccaggaccgtgtgaaacggc

SEQ ID NO: 312685 - DNA, 120 bp, Artificial Sequence
  ENSG00000134595_4 (sequence is synthesized)
ccatgaacgccttcatggtatggtcccgcgggcagcggcgcaaaatggccctggagaaccccaagatgcacaattctgagatcagcaagcgcttgggcgccgactggaaactgctgaccg

SEQ ID NO: 312686 - DNA, 120 bp, Artificial Sequence
  ENSG00000134595_5 (sequence is synthesized)
acgccgagaagcgaccattcatcgacgaggccaagcgacttcgcgccgtgcacatgaaggagtatccggactacaagtaccgaccgcgccgcaagaccaagacgctgctcaagaaagata

SEQ ID NO: 312687 - DNA, 120 bp, Artificial Sequence
  ENSG00000134595_6 (sequence is synthesized)
tcaagaaagataagtactccctgcccagcggcctcctgcctcccggtgccgcggccgccgccgccgctgccgcggccgcagccgctgccgccagcagtccggtgggcgtgggccagcgcc

SEQ ID NO: 312688 - DNA, 120 bp, Artificial Sequence
  ENSG00000134595_7 (sequence is synthesized)
cgcacgtgaacggctgggccaacggcgcgtactcgctggtgcaggagcagctgggctacgcgcagcccccgagcatgagcagcccgccgccgccgcccgcgctgccgccgatgcaccgct

SEQ ID NO: 312689 - DNA, 120 bp, Artificial Sequence
  ENSG00000134595_8 (sequence is synthesized)
cctcagccacagcagccgcggccgccgcctacgggcagcagcccgccaccgccgcggccgcagctgcggccgcagccgccatgagcctgggccccatgggctcggtagtgaagtctgagc

SEQ ID NO: 312690 - DNA, 120 bp, Artificial Sequence
  ENSG00000134595_9 (sequence is synthesized)
gtagtgaagtctgagcccagctcgccgccgcccgccatcgcatcgcactctcagcgcgcgtgcctcggcgacctgcgcgacatgatcagcatgtacctgccacccggcggggacgcggcc

SEQ ID NO: 312691 - DNA, 120 bp, Artificial Sequence
  ENSG00000134595_10 (sequence is synthesized)
gacgccgcctctccgctgcccggcggtcgcctgcacggcgtgcaccagcactaccagggcgccgggactgcagtcaacggaacggtgccgctgacccacatctgagcaccggcctgcgct

SEQ ID NO: 312692 - DNA, 120 bp, Artificial Sequence
  ENSG00000134595_11 (sequence is synthesized)
cgtccacccttgttccccacccccacccccactcccgccccgcacccccaagttgggacgccttgtttagctttgcttgcctgggactgttgccttgtaccgatgatggggagggctgaa

SEQ ID NO: 312693 - DNA, 120 bp, Artificial Sequence
  ENSG00000134595_12 (sequence is synthesized)
agttttgctgtagctgtcgggttttgtacaaaagcaaaaataagtcaggagcagcgaaaatgggacttctagagagctctcttgccccacgccgctgctcctttcacctttgtaggctgg

SEQ ID NO: 312694 - DNA, 120 bp, Artificial Sequence
  ENSG00000134595_13 (sequence is synthesized)
gaatcgctgtgttatttgcaaagaaaaaacagcccccactcctcctcctgagttccagggttattctgttacatttgaaaatgttgtcttgttagtttgcagttagccaaggagtgaatg

SEQ ID NO: 312695 - DNA, 120 bp, Artificial Sequence
  ENSG00000134595_14 (sequence is synthesized)
ggagaaacatagtatcgggtgaggccagctggagaactgcaacgcctacgcccccagtcgtgtcgcgtctgttttcctcgtggttttttggggcgctgaccgctccaagcagcgcggcag

SEQ ID NO: 312696 - DNA, 120 bp, Artificial Sequence
  ENSG00000134595_15 (sequence is synthesized)
ctaaagccaatgttaatttatagccaggtgtgcgtgtgtctcccgcctcgccgcccctggccgcgggacagcttctgtccaatcatgttgagttggtgatttctgccgtgatctgtttga

SEQ ID NO: 312697 - DNA, 120 bp, Artificial Sequence
  ENSG00000134595_16 (sequence is synthesized)
tatttcttcgcgctaatgtgttcagatttcgtttgggtagtggggaggggctactttgtttcagggttttcaagcttttactcttaattcctaaatgagatcaataaattttataaccaa

SEQ ID NO: 312698 - DNA, 120 bp, Artificial Sequence
  ENSG00000134597_0 (sequence is synthesized)
ctttcccgggcgctgattcctgagtgctgagcgcgaacccgaggagatgaaccctttaactaaggtgaagctgatcaacgagctgaatgaacgagaggtccagcttggggtggccgataa

SEQ ID NO: 312699 - DNA, 120 bp, Artificial Sequence
  ENSG00000134597_1 (sequence is synthesized)
ggtgtcctggcactccgagtacaaggacagcgcctggatcttcctgggagggcttccttatgaactgactgaaggggacatcatctgtgtgttctcacaatatggggagattgttaacat

SEQ ID NO: 312700 - DNA, 120 bp, Artificial Sequence
  ENSG00000134597_2 (sequence is synthesized)
taatctcgtgcgggacaagaaaactgggaaatccaaaggattctgtttcctctgctatgaagaccagaggagcacaattctggccgtcgacaattttaatgggatcaagatcaaaggaag

SEQ ID NO: 312701 - DNA, 120 bp, Artificial Sequence
  ENSG00000134597_3 (sequence is synthesized)
aactatccgagtggatcatgtgtctaactatcgggctcctaaggactcagaagaaatagatgatgtgaccagacaactccaggagaagggctgtggggctcgtaccccctcaccaagttt

SEQ ID NO: 312702 - DNA, 80 bp, Artificial Sequence
  ENSG00000134597_4 (sequence is synthesized)
aggagaagggctgtggggctcgtaccccctcaccaagtttgtctgagagctctgaagatgaaaaaccaacaaaaaagcac

SEQ ID NO: 312703 - DNA, 120 bp, Artificial Sequence
  ENSG00000134597_5 (sequence is synthesized)
ctcttcgtcacccagacgcaagacagtaaaggaaaaggatgacactggccctaagaagcacagcagcaagaactcagagagagctcagaagtcagagcccagggaggggcagaagctccc

SEQ ID NO: 312704 - DNA, 120 bp, Artificial Sequence
  ENSG00000134597_6 (sequence is synthesized)
caaatccaggacggcctactctggtggagcagaggacctagagagggagctgaagaaggagaaacccaagcacgagcacaagtcctcaagcaggagggaggcaagagaagaaaagaccag

SEQ ID NO: 312705 - DNA, 120 bp, Artificial Sequence
  ENSG00000134597_7 (sequence is synthesized)
cagatgcacattctagctggtataatgggcgttctgaagggcgtagttatagaagtagaagtaggagccgagataaatcccataggcataaaagggcccgacgctcccgggagcgggagt

SEQ ID NO: 312706 - DNA, 120 bp, Artificial Sequence
  ENSG00000134597_8 (sequence is synthesized)
cttcgaatcccagtgaccgttggcgtcactgaagacttcagctgcacagtagatttggaaataattatgttttttaaatgcagtcaaattcagttgggtggttactatttttgtatctaa

SEQ ID NO: 312707 - DNA, 120 bp, Artificial Sequence
  ENSG00000134597_9 (sequence is synthesized)
aacttctggggctggattcttttaatcccttgactatttagagtcattgggagggctgcagtttcaacagctagatatcctggatattgtttgcaccatccattgtccctgtaccagagt

SEQ ID NO: 312708 - DNA, 120 bp, Artificial Sequence
  ENSG00000134597_10 (sequence is synthesized)
atgtatcctgaactttggttcataaatatggctcttgaacccatagaccccagttgaagatggaattttcaggaaagggaaaatactagataattctagaattctagtcttcgtgttaga

SEQ ID NO: 312709 - DNA, 120 bp, Artificial Sequence
  ENSG00000134597_11 (sequence is synthesized)
tgtttatagcccagcatcttgggacctttccagttactaggtttggacagcttgatgtgaacgaatgggataggatttttaaaatcagccagctccatgcccaaaccttcctgtttgcag

SEQ ID NO: 312710 - DNA, 120 bp, Artificial Sequence
  ENSG00000134597_12 (sequence is synthesized)
aactttttaatgtcttttctttttcattaaaacttttttgttcgatatgcctctttccacattttttccttgcaatgtatttattatttatttgtatttaggtgaaattcacataacata

SEQ ID NO: 312711 - DNA, 120 bp, Artificial Sequence
  ENSG00000134597_13 (sequence is synthesized)
aagttaaccattttaaagggaacaattcagtggcatttggtactgaacatccacagtgttgtgtaaccattgcctctgtctagttccaaaacattttttatcatcccaaaatgaaaccct

SEQ ID NO: 312712 - DNA, 120 bp, Artificial Sequence
  ENSG00000134597_14 (sequence is synthesized)
gtagccattaaacaagagctccccgtttcctccctcctccctgtccctagcaaccaccagtggacttcctgtttatgggtttgcctattctggatctttcataaaaatggaattacacaa

SEQ ID NO: 312713 - DNA, 120 bp, Artificial Sequence
  ENSG00000134597_15 (sequence is synthesized)
gtactttgtttctgtaatacattttgtggcatcacaaaaaccacttattttcactctaggctgaatggcatccctgcatggggagggctggagcttctgttctagatcagtcccaggaca

SEQ ID NO: 312714 - DNA, 120 bp, Artificial Sequence
  ENSG00000134597_16 (sequence is synthesized)
gttgtttttcactgaggcttgttcagcctgggcctagactggaacagactggactccttgggctcttgcaaactaggggtaacccatggtcacagggcccttctggcccttacctgtgtg

SEQ ID NO: 312715 - DNA, 120 bp, Artificial Sequence
  ENSG00000134597_17 (sequence is synthesized)
gcgtcatacgattggggcaaagcacagaggaaattggggtaaaaaacagaaggtcgtagtttgctttctttgtttctcgatgagtgtaaggttagtgagcaaaggcaatctctgcctgga

SEQ ID NO: 312716 - DNA, 120 bp, Artificial Sequence
  ENSG00000134597_18 (sequence is synthesized)
ggctgagaatcacagcccgaagggaacaagaatgaataggagacctgtatattcttcattctgctgaggtgttagcagcagcatttcatgggagagggtgttggcagctcatactggtag

SEQ ID NO: 312717 - DNA, 120 bp, Artificial Sequence
  ENSG00000134597_19 (sequence is synthesized)
gattcctgagtgctgagcgcgaacccgaggagatgaagtaaggcgtcagcttccttttgaggaaggagcagcgggccactgggggtggtccaccgggactggtgtggtagagcgtctgcg

SEQ ID NO: 312718 - DNA, 120 bp, Artificial Sequence
  ENSG00000134597_20 (sequence is synthesized)
gggccgaggggcgggagcggcgcggggactggaacagctcgtcccctagttttgctcttcctcagctccggccggttcgcacttacttgtctgcttttctgcctaccctccccacccccc

SEQ ID NO: 312719 - DNA, 120 bp, Artificial Sequence
  ENSG00000134597_21 (sequence is synthesized)
gttggacaggtctgctttagtgacagaatttaacaagaaggtaaaggatgtagttcaaatcatggttctctgtagcttgtgttcaaatagtttgacagtttggtatgagggctgtcttca

SEQ ID NO: 312720 - DNA, 120 bp, Artificial Sequence
  ENSG00000134602_0 (sequence is synthesized)
atcactcgagcccaggtcccagccaccaccactcacagcgctcggcgttcaggaagaggagcagcagcggaggcggctgcttcagcggcgggcgggcgccagaaaggccccgatcgaaaa

SEQ ID NO: 312721 - DNA, 120 bp, Artificial Sequence
  ENSG00000134602_1 (sequence is synthesized)
gcctgggagggccgccgaactacccccggagggaggagccagtccgaacccaaggcgccaccgccgcagaagcggagcgaggcagcattcgcctccatggcccactcgccggtggctgtc

SEQ ID NO: 312722 - DNA, 120 bp, Artificial Sequence
  ENSG00000134602_2 (sequence is synthesized)
caagtgcctgggatgcagaataacatagctgatccagaagaactgttcacaaaattagagcgcattgggaaaggctcatttggggaagttttcaaaggaattgataaccgtacccagcaa

SEQ ID NO: 312723 - DNA, 120 bp, Artificial Sequence
  ENSG00000134602_3 (sequence is synthesized)
gtcgttgctattaaaatcatagaccttgaggaagccgaagatgaaatagaagacattcagcaagaaataactgtcttgagtcaatgtgacagctcatatgtaacaaaatactatgggtca

SEQ ID NO: 312724 - DNA, 120 bp, Artificial Sequence
  ENSG00000134602_4 (sequence is synthesized)
tatttaaaggggtctaaattatggataataatggaatacctgggcggtggttcagcactggatcttcttcgagctggtccatttgatgagttccagattgctaccatgctaaaggaaatt

SEQ ID NO: 312725 - DNA, 120 bp, Artificial Sequence
  ENSG00000134602_5 (sequence is synthesized)
ttaaaaggtctggactatctgcattcagaaaagaaaattcaccgagacataaaagctgccaatgtcttgctctcagaacaaggagatgttaaacttgctgattttggagttgctggtcag

SEQ ID NO: 312726 - DNA, 120 bp, Artificial Sequence
  ENSG00000134602_6 (sequence is synthesized)
ctgacagatacacagattaaaagaaatacctttgtgggaactccattttggatggctcctgaagttattcaacagtcagcttatgactcaaaagctgacatttggtcattgggaattact

SEQ ID NO: 312727 - DNA, 120 bp, Artificial Sequence
  ENSG00000134602_7 (sequence is synthesized)
gctattgaactagccaagggagagccacctaactccgatatgcatccaatgagagttctgtttcttattcccaaaaacaatcctccaactcttgttggagactttactaagtcttttaag

SEQ ID NO: 312728 - DNA, 120 bp, Artificial Sequence
  ENSG00000134602_8 (sequence is synthesized)
gagtttattgatgcttgcctgaacaaagatccatcatttcgtcctacagcaaaagaacttctgaaacacaaattcattgtaaaaaattcaaagaagacttcttatctgactgaactgata

SEQ ID NO: 312729 - DNA, 120 bp, Artificial Sequence
  ENSG00000134602_9 (sequence is synthesized)
gatcgttttaagagatggaaggcagaaggacacagtgatgatgaatctgattccgagggctctgattcggaatctaccagcagggaaaacaatactcatcctgaatggagctttaccacc

SEQ ID NO: 312730 - DNA, 120 bp, Artificial Sequence
  ENSG00000134602_10 (sequence is synthesized)
gtacgaaagaagcctgatccaaagaaagtacagaatggggcagagcaagatcttgtgcaaaccctgagttgtttgtctatgataatcacacctgcatttgctgaacttaaacagcaggac

SEQ ID NO: 312731 - DNA, 120 bp, Artificial Sequence
  ENSG00000134602_11 (sequence is synthesized)
gagaataacgctagcaggaatcaggcgattgaagaactcgagaaaagtattgctgtggctgaagccgcctgtcccggcatcacagataaaatggtgaagaaactaattgaaaaatttcaa

SEQ ID NO: 312732 - DNA, 120 bp, Artificial Sequence
  ENSG00000134602_12 (sequence is synthesized)
aagtgttcagcagacgaatccccctaagaaacttattattggcttctgtttcatatggacccagagagccccaccaaacctacgtcaagattaacaatgcttaacccatgagctccatgt

SEQ ID NO: 312733 - DNA, 120 bp, Artificial Sequence
  ENSG00000134602_13 (sequence is synthesized)
ctttgcaacactgaagatttggaagaagctattaaactattttgtgatggcgtttatcattttatattttgaaaggattattttgtaaggaataacttttaatactatagtttcacctgt

SEQ ID NO: 312734 - DNA, 120 bp, Artificial Sequence
  ENSG00000134602_14 (sequence is synthesized)
attctagtaaatgttgagacaccgttttgcttttaagtatccctatttcttaagttacgaggatgaatacctttcacattttgatctttagttgactctacagtcatgaaacatacaggt

SEQ ID NO: 312735 - DNA, 120 bp, Artificial Sequence
  ENSG00000134602_15 (sequence is synthesized)
ctttcaaagtcattctcaatattcagcttttgtaaattatcaagcttcaaaaagcttttttttttaaaaaaaaacatgcatattctaaaaatgactattggtggggaggtgtaaataagt

SEQ ID NO: 312736 - DNA, 120 bp, Artificial Sequence
  ENSG00000134602_16 (sequence is synthesized)
cataccttcttaaaacagaaaatttaagtaaagtcttttaaatgaaacctgtaaaagtattgactcttctaccaagttggtatgatattccaggcagctcaatgattatcacatttgaga

SEQ ID NO: 312737 - DNA, 120 bp, Artificial Sequence
  ENSG00000134602_17 (sequence is synthesized)
ccctgtgtttgaagcatttacaggcaatgtacagcaacagaggtacctcttggtgtatagtatttacattctcttttaggtagaagaggcaattttacccttatttcacatggttagaaa

SEQ ID NO: 312738 - DNA, 120 bp, Artificial Sequence
  ENSG00000134602_18 (sequence is synthesized)
tttaaagcaagatcatttacccaaggataggtgtttggtaatgttgaaggagttagtctggcttcatgttttacatcttcaactaaaatcccatactatctgcttggatttggagagcca

SEQ ID NO: 312739 - DNA, 120 bp, Artificial Sequence
  ENSG00000134602_19 (sequence is synthesized)
aaaaataaagctgattgtcatgtgattaaatatctgatcaacaggtatgaatataacttaaatcagcatatttttgccatggtaataaattgtcctataaactatttatatatttttgtt

SEQ ID NO: 312740 - DNA, 120 bp, Artificial Sequence
  ENSG00000134602_20 (sequence is synthesized)
cttcataattatcactaataagcatcagtttgttgtttttaaaaggatatttaagtgagcattttctagttcatatgaaaataaccatagtacaggatgatttctgtccacacaaaggtt

SEQ ID NO: 312741 - DNA, 120 bp, Artificial Sequence
  ENSG00000134602_21 (sequence is synthesized)
aaattagattgcacagttaattttcacttatatttatggtactattatgtgggtgatgcctttttcttttaagcccagtacatatattatgcctgcctaagttctgaactggggctgtat

SEQ ID NO: 312742 - DNA, 120 bp, Artificial Sequence
  ENSG00000134602_22 (sequence is synthesized)
ttcagtagttgtagaattattgatatttagttttgatagctaatgtttaattgtttggatctgcacagtttggtttttgcacaaaagtcatttaaaaaaatctgagtaattgtcaaatat

SEQ ID NO: 312743 - DNA, 120 bp, Artificial Sequence
  ENSG00000134602_23 (sequence is synthesized)
taaaagaaagatattcttcctgtaaggaatacagtttttagtcaaagtggccattacatcctctttttaatttacataatacagatacttgagaaagttgttgtggtgttgtatgccaag

SEQ ID NO: 312744 - DNA, 120 bp, Artificial Sequence
  ENSG00000134602_24 (sequence is synthesized)
aaaattctttttattggtgcctatattgtaacaattatttttaatgcattgtattttgaagtaacggttcagttaaatttttcacctgctgtgtaactgaaacacaattacagtttataa

SEQ ID NO: 312745 - DNA, 120 bp, Artificial Sequence
  ENSG00000134602_25 (sequence is synthesized)
tcatctgtagaagtctggagataattttgcaactcatgttatgggttaaatgaatatttttgtaaaagtaaaagcaacaaatttataaattgattatttgaaactttacaacacaattgc

SEQ ID NO: 312746 - DNA, 120 bp, Artificial Sequence
  ENSG00000134602_26 (sequence is synthesized)
atcccaaatacaaattgtattgcttattcattatagctattcgtcctgtaatctgtttctaggtgaagcatactccagtgttttaggggttttgaaaataaatatttaaatttcacagtc

SEQ ID NO: 312747 - DNA, 120 bp, Artificial Sequence
  ENSG00000134627_0 (sequence is synthesized)
gcatttccagccccggcgttggttgtggatgctggacatccaccgcctccaggcagtttcgccgtcacaccgtcgccatctgtagccaaagcaaaacatatcctaactgagactttgcag

SEQ ID NO: 312748 - DNA, 120 bp, Artificial Sequence
  ENSG00000134627_1 (sequence is synthesized)
ctcttgtggccactctgggctcaccgggaacatgagtggaagagcccgagtgaaggccagaggcatcgcccgcagccccagtgccacagaagtggggcgcatccaagcctcgccattgcc

SEQ ID NO: 312749 - DNA, 120 bp, Artificial Sequence
  ENSG00000134627_2 (sequence is synthesized)
tagatctgttgatcttagtaacaatgaagcatcctctagcaatggcttcttgggaacaagcaggatctcaaccaacgataaatatgggatatcttctggtgatgctggaagtaccttcat

SEQ ID NO: 312750 - DNA, 120 bp, Artificial Sequence
  ENSG00000134627_3 (sequence is synthesized)
ggaaagaggtgtgaaaaacaaacaggactttatggatttgagtatctgtaccagagaaaaattggcacatgtgagaaattgtaaaacaggttccagtggaatacctgtgaaactggttac

SEQ ID NO: 312751 - DNA, 120 bp, Artificial Sequence
  ENSG00000134627_4 (sequence is synthesized)
aaacctctttaacttagattttccccaagactggcagctataccagtaccatgtgacatatattccagatttagcatctagaaggctgagaattgctttactttatagtcatagtgaact

SEQ ID NO: 312752 - DNA, 120 bp, Artificial Sequence
  ENSG00000134627_5 (sequence is synthesized)
ttccaacaaagcaaaagcattcgacggtgccatcctttttctgtcacaaaagctagaagaaaaggtcacagagttgtcaagtgaaactcaaagaggtgagactataaagatgactatcac

SEQ ID NO: 312753 - DNA, 120 bp, Artificial Sequence
  ENSG00000134627_6 (sequence is synthesized)
cctgaagagggagctgccatcaagttctcccgtgtgcatccaggtcttcaatatcatcttcagaaagatcctcaaaaagttgtccatgtaccaaattggacggaacttctataatccttc

SEQ ID NO: 312754 - DNA, 120 bp, Artificial Sequence
  ENSG00000134627_7 (sequence is synthesized)
agagccaatggaaattccccagcacaaattatccctttggcctgggtttgccatttctgtgtcatattttgaaaggaagctcctgtttagtgctgatgtgagttacaaagtcctccggaa

SEQ ID NO: 312755 - DNA, 120 bp, Artificial Sequence
  ENSG00000134627_8 (sequence is synthesized)
tgagacggttctggaattcatgactgctctctgtcaaagaactggcttgtcctgtttcacccagacgtgtgagaagcagctaatagggctcattgtccttacaagatacaataacagaac

SEQ ID NO: 312756 - DNA, 120 bp, Artificial Sequence
  ENSG00000134627_9 (sequence is synthesized)
ctactccattgatgacattgactggtcagtgaagcccacacacacctttcagaagcgggatggcaccgagatcacctatgtggattactacaagcagcagtatgatattactgtatcgga

SEQ ID NO: 312757 - DNA, 120 bp, Artificial Sequence
  ENSG00000134627_10 (sequence is synthesized)
cctgaatcagcccatgcttgttagtctgttaaagaagaagagaaatgacaacagtgaggctcagctcgcccacctgatacctgagctctgctttctaacagggctgactgaccaggcaac

SEQ ID NO: 312758 - DNA, 120 bp, Artificial Sequence
  ENSG00000134627_11 (sequence is synthesized)
atctgatttccagctgatgaaggctgtggctgaaaagacacgtctcagtccttcaggccggcagcagcgcctggccaggcttgtggacaacatccagaggaataccaatgctcgctttga

SEQ ID NO: 312759 - DNA, 120 bp, Artificial Sequence
  ENSG00000134627_12 (sequence is synthesized)
actagagacctggggactgcattttggaagccagatatctctgactggccggattgtgccttcagaaaaaatattaatgcaagaccacatatgtcaacctgtgtctgctgctgactggtc

SEQ ID NO: 312760 - DNA, 120 bp, Artificial Sequence
  ENSG00000134627_13 (sequence is synthesized)
aagattttaaatgcacagtctttgaatacctggttgattttatgtagcgacagaactgaatatgttgccgagagctttctgaactgcttgagaagagttgcaggttccatgggatttaat

SEQ ID NO: 312761 - DNA, 120 bp, Artificial Sequence
  ENSG00000134627_14 (sequence is synthesized)
gtggactaccccaaaatcataaaagtacaagaaaatccagctgcatttgttagagctatacagcaatatgttgatcctgatgttcagctggtaatgtgcattctgccttctaatcagaag

SEQ ID NO: 312762 - DNA, 120 bp, Artificial Sequence
  ENSG00000134627_15 (sequence is synthesized)
acctattatgattccattaaaaaatatttgagctcagactgcccagtcccaagccaatgtgtgcttgctcggaccttgaataaacagggcatgatgatgagtatcgccaccaagatcgct

SEQ ID NO: 312763 - DNA, 120 bp, Artificial Sequence
  ENSG00000134627_16 (sequence is synthesized)
atgcagatgacttgcaagctcggaggcgagctgtgggctgtggaaatacctttaaagtccctgatggtggtcggtattgatgtctgtaaagatgcactcagcaaggacgtgatggttgtt

SEQ ID NO: 312764 - DNA, 120 bp, Artificial Sequence
  ENSG00000134627_17 (sequence is synthesized)
ggatgcgtggccagtgttaaccccagaatcaccaggtggttttcccgctgtatccttcagagaacaatgactgatgttgcagattgcttgaaagttttcatgactggagcactcaacaaa

SEQ ID NO: 312765 - DNA, 120 bp, Artificial Sequence
  ENSG00000134627_18 (sequence is synthesized)
tggtacaagtacaatcatgatttgccagcacggataattgtgtaccgtgctggtgtaggggatggtcagctgaaaacacttattgaatatgaagtcccacagctgctgagcagtgtggca

SEQ ID NO: 312766 - DNA, 120 bp, Artificial Sequence
  ENSG00000134627_19 (sequence is synthesized)
gaatccagctcaaataccagctcaagactgtcggtgattgtggtcaggaagaagtgcatgccacgattctttaccgaaatgaaccgcactgtacagaaccccccacttggcactgttgtg

SEQ ID NO: 312767 - DNA, 120 bp, Artificial Sequence
  ENSG00000134627_20 (sequence is synthesized)
gattcagaagcaacacgtaacgaatggtatgacttttatctgatcagccaggtggcctgccggggaactgttagtcctacctactataatgtcatctatgatgacaacggcttgaagccc

SEQ ID NO: 312768 - DNA, 120 bp, Artificial Sequence
  ENSG00000134627_21 (sequence is synthesized)
gaccatatgcagagacttacattcaaattgtgccacctgtactacaactggccgggcatagtcagtgtcccagcaccatgtcagtatgctcacaagctgacctttctggtggcacaaagc

SEQ ID NO: 312769 - DNA, 120 bp, Artificial Sequence
  ENSG00000134627_22 (sequence is synthesized)
attcataaagaacccagtctggaattagccaaccatctcttctacctgtgatggcatgaactactggcatcactagatggacaatccaagaagaaattggtatactttgtgcaaatctgc

SEQ ID NO: 312770 - DNA, 120 bp, Artificial Sequence
  ENSG00000134627_23 (sequence is synthesized)
cataagctcaaggctgtgactggggaaaaagattgagcttagttttcatgtctaggaaaaaaagcaaaacaacttaatctgaaacagttttaaaaaatgtgtgttattttgttttaaaga

SEQ ID NO: 312771 - DNA, 120 bp, Artificial Sequence
  ENSG00000134627_24 (sequence is synthesized)
gttgtatgcttggggtaaattttcattgtcatatgtggaatttaaatataccatcatctacaaagaattccacagagttaaatatcttaagttaaacacttaaaataagtgtttgcgtga

SEQ ID NO: 312772 - DNA, 120 bp, Artificial Sequence
  ENSG00000134627_25 (sequence is synthesized)
tattttgatgacagataaacagagtctaattcccaccccaaattttgctgaggttttcttaatgttgtagagcattttgtagagtggtttaaatagttgaaaataaagttcagaacatca

SEQ ID NO: 312773 - DNA, 120 bp, Artificial Sequence
  ENSG00000134627_26 (sequence is synthesized)
gttatccattgttatattcttgcaaatataacccaaattatgtattgccctattttacagtggtctgaaatagcaaacccatttaaacactgcaatatatgggaatgttattttttgttg

SEQ ID NO: 312774 - DNA, 120 bp, Artificial Sequence
  ENSG00000134627_27 (sequence is synthesized)
ctccctccctcaatccctccctccggcgggcgtcgctggcgggtggctaggcccaacggcaggaagccgacgctatcctccgttccgcggcgccgggtccgccttccgtctgttctaggg

SEQ ID NO: 312775 - DNA, 120 bp, Artificial Sequence
  ENSG00000134627_28 (sequence is synthesized)
cagatgacttgcaagctcggaggcgagctgtgggctgtggaaatacctgtggttttcccgctgtatccttcagagaacaatgactgatgttgcagattgcttgaaagttttcatgactgg

SEQ ID NO: 312776 - DNA, 120 bp, Artificial Sequence
  ENSG00000134627_29 (sequence is synthesized)
gtgttcggccggggcgggccggggcagccggtgcccgaaattgggctcctgcacacagtggcccgctacaagttctacctggctttcgagaactcgcagcacctggattatatcaccgag

SEQ ID NO: 312777 - DNA, 120 bp, Artificial Sequence
  ENSG00000134627_30 (sequence is synthesized)
aagctctggcgcaacgcgttgctcgctggggcggtgccggtggtgctgggcccagaccgtgccaactacgagcgctttgtgccccgcggcgccttcatccacgtggacgacttcccaagt

SEQ ID NO: 312778 - DNA, 120 bp, Artificial Sequence
  ENSG00000134627_31 (sequence is synthesized)
gcctcctccctggcctcgtacctgcttttcctcgaccgcaaccccgcggtctatcgccgctacttccactggcgccggagctacgctgtccacatcacctccttctgggacgagccttgg

SEQ ID NO: 312779 - DNA, 120 bp, Artificial Sequence
  ENSG00000134627_32 (sequence is synthesized)
tgccgggtgtgccaggctgtacagagggctggggaccggcccaagagcatacggaacttggccagctggttcgagcggtgaagccgcgctcccctggaagcgacccaggggaggccaagt

SEQ ID NO: 312780 - DNA, 120 bp, Artificial Sequence
  ENSG00000134627_33 (sequence is synthesized)
tgtggaaatacctgtgcatagccaagtgaggattccttagagatctgaagaatgaagaatggaattcctcttcagattgctccagaccagaggcaagcgatagatacactgaccacactc

SEQ ID NO: 312781 - DNA, 120 bp, Artificial Sequence
  ENSG00000134627_34 (sequence is synthesized)
ccagaatctctttagccactggtgccccttccccaccccacaaaggatgatggttatcttggacggtagtgtttctcttaagataagtgtgtaccatattcttcctgccttctttaagtc

SEQ ID NO: 312782 - DNA, 120 bp, Artificial Sequence
  ENSG00000134627_35 (sequence is synthesized)
tctctcatttctggtttaataatctggctcacggatctcaatctcccttacacatagcttaactttaagaattcagtaactggagtctgtttttaaaaactttcctattaaaccattggt

SEQ ID NO: 312783 - DNA, 120 bp, Artificial Sequence
  ENSG00000134640_0 (sequence is synthesized)
tctgcgatgtcagagaacggctccttcgccaactgctgcgaggcgggcgggtgggcagtgcgcccgggctggtcgggggctggcagcgcgcggccctccaggacccctcgacctccctgg

SEQ ID NO: 312784 - DNA, 120 bp, Artificial Sequence
  ENSG00000134640_1 (sequence is synthesized)
gtggctccagcgctgtccgcggtgctcatcgtcaccaccgccgtggacgtcgtgggcaacctcctggtgatcctctccgtgctcaggaaccgcaagctccggaacgcaggtaatttgttc

SEQ ID NO: 312785 - DNA, 120 bp, Artificial Sequence
  ENSG00000134640_2 (sequence is synthesized)
ttggtgagtctggcattggctgacctggtggtggccttctacccctacccgctaatcctcgtggccatcttctatgacggctgggccctgggggaggagcactgcaaggccagcgccttt

SEQ ID NO: 312786 - DNA, 120 bp, Artificial Sequence
  ENSG00000134640_3 (sequence is synthesized)
gtgatgggcctgagcgtcatcggctctgtcttcaatatcactgccatcgccattaaccgctactgctacatctgccacagcatggcctaccaccgaatctaccggcgctggcacacccct

SEQ ID NO: 312787 - DNA, 120 bp, Artificial Sequence
  ENSG00000134640_4 (sequence is synthesized)
ctgcacatctgcctcatctggctcctcaccgtggtggccttgctgcccaacttctttgtggggtccctggagtacgacccacgcatctattcctgcaccttcatccagaccgccagcacc

SEQ ID NO: 312788 - DNA, 120 bp, Artificial Sequence
  ENSG00000134640_5 (sequence is synthesized)
cagtacacggcggcagtggtggtcatccacttcctcctccctatcgctgtcgtgtccttctgctacctgcgcatctgggtgctggtgcttcaggcccgcaggaaagccaagccagagagc

SEQ ID NO: 312789 - DNA, 120 bp, Artificial Sequence
  ENSG00000134640_6 (sequence is synthesized)
gtgcctgaagcccagcgacttgcggagctttctaaccatgtttgtggtgtttgtgatctttgccatctgctgggctccacttaactgcatcggcctcgctgtggccatcaacccccaaga

SEQ ID NO: 312790 - DNA, 120 bp, Artificial Sequence
  ENSG00000134640_7 (sequence is synthesized)
aatggctccccagatccctgaggggctatttgtcactagctacttactggcttatttcaacagctgcctgaatgccattgtctatgggctcttgaaccaaaacttccgcagggaatacaa

SEQ ID NO: 312791 - DNA, 120 bp, Artificial Sequence
  ENSG00000134640_8 (sequence is synthesized)
gaggatcctcttggccctttggaacccacggcactgcattcaagatgcttccaagggcagccacgcggaggggctgcagagcccagctccacccatcattggtgtgcagcaccaggcaga

SEQ ID NO: 312792 - DNA, 120 bp, Artificial Sequence
  ENSG00000134640_9 (sequence is synthesized)
tgctctctagcctggatctgaggcacaccagcagcatgacaaactcatgaaatggtgggagagagtctgctgcaagggtgagaccaggcagcctgctgggccacactgtcctgttggcat

SEQ ID NO: 312793 - DNA, 120 bp, Artificial Sequence
  ENSG00000134640_10 (sequence is synthesized)
cacagccccaaggctgggggaacttcatgctgggacaagcagcccatcaacgccatgggttcaggctgatccaggagatgctcacaggccacaggacctggaaaacactcttggtggtgt

SEQ ID NO: 312794 - DNA, 120 bp, Artificial Sequence
  ENSG00000134640_11 (sequence is synthesized)
cttggggatttggtgcacacaagaccaaggaaaggacagaatgaggaaaggcctggggcagaagagcccaactccttctcatagctgaccctcatcctcctgccttggcctcctggctgc

SEQ ID NO: 312795 - DNA, 120 bp, Artificial Sequence
  ENSG00000134640_12 (sequence is synthesized)
tttctccccttccccccagcgtggcaggatctcttcctgttagcaaggatgaaagagagaggtcagtaggactggaacttggtaactgcaagggcctcaggtggggcaggtgcagagggc

SEQ ID NO: 312796 - DNA, 120 bp, Artificial Sequence
  ENSG00000134640_13 (sequence is synthesized)
agctgagagaatcaaaaagaatggtaaagcccaggcccaggacatcaagcaatgtacatatttggaatgacctcatgctgtgggccctgattgtaaataaaaatgcttttgcggaaacag

SEQ ID NO: 312797 - DNA, 120 bp, Artificial Sequence
  ENSG00000134640_14 (sequence is synthesized)
caaaatttggggaagcctgtcttccacctccttgactgaaaagtctggtcagaggtgccacctggctacttcctcctcatccttctaggaccttcctctggacccctcagttctgagccc

SEQ ID NO: 312798 - DNA, 120 bp, Artificial Sequence
  ENSG00000134640_15 (sequence is synthesized)
tgtctgttgctgcatgtggtgggttgacttcagagatagcaccagagaaaggcagacagggaggagtggaggcaaggtgggaggtagggtcagggcaccgacccaacttaaaaggtaatt

SEQ ID NO: 312799 - DNA, 120 bp, Artificial Sequence
  ENSG00000134644_0 (sequence is synthesized)
ggagtgaaaggtaagggggagcgagagcgccagagagagaagatcggggggctgaaatccatcttcatcctaccgctccgcccgtgttggtggaatgagcgttgcatgtgtcttgaagag

SEQ ID NO: 312800 - DNA, 120 bp, Artificial Sequence
  ENSG00000134644_1 (sequence is synthesized)
aaaagcagtgctttggcaggactctttcagcccccacctgaaacatcaccctcaagaaccagctaatcccaacatgcctgttgttttgacatctggaacagggtcgcaagcgcagccaca

SEQ ID NO: 312801 - DNA, 120 bp, Artificial Sequence
  ENSG00000134644_2 (sequence is synthesized)
accagctgcaaatcaggctcttgcagctgggactcactccagccctgtcccaggatctataggagttgcaggccgttcccaggacgacgctatggtggactacttctttcagaggcagca

SEQ ID NO: 312802 - DNA, 120 bp, Artificial Sequence
  ENSG00000134644_3 (sequence is synthesized)
tggtgagcagcttgggggaggaggaagtggaggaggcggctataataatagcaaacatcgatggcctactggggataacattcatgcagaacatcaggtgcgttccatggatgaactgaa

SEQ ID NO: 312803 - DNA, 120 bp, Artificial Sequence
  ENSG00000134644_4 (sequence is synthesized)
tcatgattttcaagcacttgctctggagggaagagcgatgggagagcagctcttgccaggtaaaaagttttgggaaacagatgaatccagcaaagatggaccaaaaggaatattcctggg

SEQ ID NO: 312804 - DNA, 120 bp, Artificial Sequence
  ENSG00000134644_5 (sequence is synthesized)
tgatcaatggcgagacagtgcctggggaacatcagatcattcagtttcccagccaatcatggtgcagagaagacctggtcagagtttccatgtgaacagtgaggtcaattctgtactgtc

SEQ ID NO: 312805 - DNA, 120 bp, Artificial Sequence
  ENSG00000134644_6 (sequence is synthesized)
cccacgatcggagagtgggggactaggcgttagcatggtggagtatgtgttgagctcatccccgggcgattcctgtctaagaaaaggaggatttggcccaagggatgcagacagtgatga

SEQ ID NO: 312806 - DNA, 120 bp, Artificial Sequence
  ENSG00000134644_7 (sequence is synthesized)
aaacgacaaaggtgaaaagaagaacaagggtacgtttgatggagataagctaggagatttgaaggaggagggtgatgtgatggacaagaccaatggtttaccagtgcagaatgggattga

SEQ ID NO: 312807 - DNA, 120 bp, Artificial Sequence
  ENSG00000134644_8 (sequence is synthesized)
tgcagacgtcaaagattttagccgtacccctggtaattgccagaactctgctaatgaagtggatcttctgggtccaaaccagaatggttctgagggcttagcccagctgaccagcaccaa

SEQ ID NO: 312808 - DNA, 120 bp, Artificial Sequence
  ENSG00000134644_9 (sequence is synthesized)
tggtgccaagcctgtggaggatttctccaacatggagtcccagagtgtccccttggaccccatggaacatgtgggcatggagcctcttcagtttgattattcaggcacgcaggtacctgt

SEQ ID NO: 312809 - DNA, 120 bp, Artificial Sequence
  ENSG00000134644_10 (sequence is synthesized)
ggactcagcagcagcaactgtgggactttttgactacaattctcaacaacagctgttccaaagacctaatgcgcttgctgtccagcagttgacagctgctcagcagcagcagtatgcact

SEQ ID NO: 312810 - DNA, 120 bp, Artificial Sequence
  ENSG00000134644_11 (sequence is synthesized)
ggcagctgctcatcagccgcacatcggtttagctcccgctgcgtttgtccccaatccatacatcatcagcgctgctcccccagggacggacccctacacagctggattggctgcagcagc

SEQ ID NO: 312811 - DNA, 120 bp, Artificial Sequence
  ENSG00000134644_12 (sequence is synthesized)
gacactaggcccagctgtggtccctcaccagtattatggagttactccctggggagtctaccctgccagtcttttccagcagcaagctgccgctgccgctgcagcaactaattcagctaa

SEQ ID NO: 312812 - DNA, 120 bp, Artificial Sequence
  ENSG00000134644_13 (sequence is synthesized)
tcaacagaccaccccacaggctcagcaaggacagcagcaggttctccgtggaggagccagccaacgtcctttgaccccaaaccagaaccagcagggacagcaaacggatccccttgtggc

SEQ ID NO: 312813 - DNA, 120 bp, Artificial Sequence
  ENSG00000134644_14 (sequence is synthesized)
agctgcagcagtgaattctgcccttgcatttggacaaggtctggcagcaggcatgccaggttatccggtgttggctcctgctgcttactatgaccaaactggtgcccttgtagtgaatgc

SEQ ID NO: 312814 - DNA, 120 bp, Artificial Sequence
  ENSG00000134644_15 (sequence is synthesized)
aggcgcgagaaatggtcttggagctcctgttcgacttgtagctcctgccccagtcatcattagttcctcagctgcacaagcagctgttgcagcagccgcagcttcagcaaatggagcagc

SEQ ID NO: 312815 - DNA, 120 bp, Artificial Sequence
  ENSG00000134644_16 (sequence is synthesized)
tggtggtcttgctggaacaacaaatggaccatttcgccctttaggaacacagcagcctcagccccagccccagcagcagcccaataacaacctggcatccagttctttctacggcaacaa

SEQ ID NO: 312816 - DNA, 120 bp, Artificial Sequence
  ENSG00000134644_17 (sequence is synthesized)
ctctctgaacagcaattcacagagcagctccctcttctcccagggctctgcccagcctgccaacacatccttgggattcggaagtagcagttctctcggcgccaccctgggatccgccct

SEQ ID NO: 312817 - DNA, 120 bp, Artificial Sequence
  ENSG00000134644_18 (sequence is synthesized)
tggagggtttggaacagcagttgcaaactccaacactggcagtggctcccgccgtgactccctgactggcagcagtgacctttataagaggacatcgagcagcttgacccccattggaca

SEQ ID NO: 312818 - DNA, 120 bp, Artificial Sequence
  ENSG00000134644_19 (sequence is synthesized)
cagtttttataacggccttagcttttcctcctctcctggacccgtgggcatgcctctccctagtcagggaccaggacattcacagacaccacctccttccctctcttcacatggatcctc

SEQ ID NO: 312819 - DNA, 120 bp, Artificial Sequence
  ENSG00000134644_20 (sequence is synthesized)
ttcaagcttaaacctgggaggactcacgaatggcagtggaagatacatctctgctgctccaggcgctgaagccaagtaccgcagtgcaagcagcgcctccagcctcttcagcccgagcag

SEQ ID NO: 312820 - DNA, 120 bp, Artificial Sequence
  ENSG00000134644_21 (sequence is synthesized)
cactcttttctcttcctctcgtttgcgatatggaatgtctgatgtcatgccttctggcaggagcaggcttttggaagattttcgaaacaaccggtaccccaatttacaactgcgggagat

SEQ ID NO: 312821 - DNA, 120 bp, Artificial Sequence
  ENSG00000134644_22 (sequence is synthesized)
ctgagcgccagcttgtcttcaatgaaatcctccaggctgcctaccaactcatggtggatgtgtttggtaattacgtcattcagaagttctttgaatttggcagtcttgaacagaagctgg

SEQ ID NO: 312822 - DNA, 120 bp, Artificial Sequence
  ENSG00000134644_23 (sequence is synthesized)
ctttggcagaacggattcgaggccacgtcctgtcattggcactacagatgtatggctgccgtgttatccagaaagctcttgagtttattccttcagaccagcagaatgagatggttcggg

SEQ ID NO: 312823 - DNA, 120 bp, Artificial Sequence
  ENSG00000134644_24 (sequence is synthesized)
aactagatggccatgtcttgaagtgtgtgaaagatcagaatggcaatcacgtggttcagaaatgcattgaatgtgtacagccccagtctttgcaatttatcatcgatgcgtttaagggac

SEQ ID NO: 312824 - DNA, 120 bp, Artificial Sequence
  ENSG00000134644_25 (sequence is synthesized)
aggtatttgccttatccacacatccttatggctgccgagtgattcagagaatcctggagcactgtctccctgaccagacactccctattttagaggagcttcaccagcacacagagcagc

SEQ ID NO: 312825 - DNA, 120 bp, Artificial Sequence
  ENSG00000134644_26 (sequence is synthesized)
ttgtacaggatcaatatggaaattatgtaatccaacatgtactggagcacggtcgtcctgaggataaaagcaaaattgtagcagaaatccgaggcaatgtacttgtattgagtcagcaca

SEQ ID NO: 312826 - DNA, 120 bp, Artificial Sequence
  ENSG00000134644_27 (sequence is synthesized)
aatttgcaagcaatgttgtggagaagtgtgttactcacgcctcacgtacggagcgcgctgtgctcatcgatgaggtgtgcaccatgaacgacggtccccacagtgccttatacaccatga

SEQ ID NO: 312827 - DNA, 120 bp, Artificial Sequence
  ENSG00000134644_28 (sequence is synthesized)
tgaaggaccagtatgccaactacgtggtccagaagatgattgacgtggcggagccaggccagcggaagatcgtcatgcataagatccggccccacatcgcaactcttcgtaagtacacct

SEQ ID NO: 312828 - DNA, 120 bp, Artificial Sequence
  ENSG00000134644_29 (sequence is synthesized)
atggcaagcacattctggccaagctggagaagtactacatgaagaacggtgttgacttagggcccatctgtggcccccctaatggtatcatctgaggcagtgtcacccgctgttccctca

SEQ ID NO: 312829 - DNA, 120 bp, Artificial Sequence
  ENSG00000134644_30 (sequence is synthesized)
ttcccgctgacctcactggcccactggcaaatccaaccagcaaccagaaatgttctagtgtagagtctgagacgggcaagtggttgctccaggattactccctcctccaaaaaaggaatc

SEQ ID NO: 312830 - DNA, 120 bp, Artificial Sequence
  ENSG00000134644_31 (sequence is synthesized)
aaatccacgagtggaaaagcctttgtaaatttaattttattacacataacatgtactattttttttaattgactaattgccctgctgttttactggtgtataggatacttgtacataggt

SEQ ID NO: 312831 - DNA, 120 bp, Artificial Sequence
  ENSG00000134644_32 (sequence is synthesized)
aaccaatgtacatgggaggccacatattttgttcactgttgtatctatatttcacatgtggaaactttcagggtggttggtttaacaaaaaaaaaaagctttaaaaaaaaaagaaaaaaa

SEQ ID NO: 312832 - DNA, 120 bp, Artificial Sequence
  ENSG00000134644_33 (sequence is synthesized)
ggaaaaggtttttagctcatttgcctggccggcaagttttgcaaatagctcttccccacctcctcattttagtaaaaaacaaacaaaaacaaaaaaacctgagaagtttgaattgtagtt

SEQ ID NO: 312833 - DNA, 120 bp, Artificial Sequence
  ENSG00000134644_34 (sequence is synthesized)
tatatatatatatatatatatatataatgaaaaaggtttcagagttgctaaagcttcagtttgtgacattaagtttatgaaattctaaaaaatgccttttttggagactatattatgctg

SEQ ID NO: 312834 - DNA, 120 bp, Artificial Sequence
  ENSG00000134644_35 (sequence is synthesized)
aattctaaaaaatgccttttttggagactatattatgctgaagaaggctgttcgtgaggaggagatgcgagcacccagaacgtcttttgaggctgggcgggtgtgattgtttactgccta

SEQ ID NO: 312835 - DNA, 120 bp, Artificial Sequence
  ENSG00000134644_36 (sequence is synthesized)
ctggatttttttctattaacattgaaaggtaaaatctgattatttagcatgagaaaaaaaaatccaactctgcttttggtcttgcttctataaatatatagtgtatacttggtgtagact

SEQ ID NO: 312836 - DNA, 120 bp, Artificial Sequence
  ENSG00000134644_37 (sequence is synthesized)
ttgcatatatacaaatttgtagtattttcttgttttgatgtctaatctgtatctataatgtaccctagtagtcgaacatacttttgattgtacaattgtacatttgtatacctgtaatgt

SEQ ID NO: 312837 - DNA, 120 bp, Artificial Sequence
  ENSG00000134644_38 (sequence is synthesized)
aaatgtggagaagtttgaatcaacataaacacgttttttggtaagaaaagagaattagccagccctgtgcattcagtgtatattctcaccttttatggtcgtagcatatagtgttgtata

SEQ ID NO: 312838 - DNA, 120 bp, Artificial Sequence
  ENSG00000134644_39 (sequence is synthesized)
ttgtaaattgtaatttcaaccagaagtaaatttttttcttttgaaggaataaatgttctttatacagcctagttaatgtttaaaaagaaaaaaatagcttggttttatttgtcatctagt

SEQ ID NO: 312839 - DNA, 120 bp, Artificial Sequence
  ENSG00000134644_40 (sequence is synthesized)
ctcaagtatagcgagattctttctaaatgttattcaagattgagttctcactagtgtttttttaatcctaaaaaagtaatgttttgattttgtgacagtcaaaaggacgtgcaaaagtct

SEQ ID NO: 312840 - DNA, 120 bp, Artificial Sequence
  ENSG00000134644_41 (sequence is synthesized)
agccttgcccgagctttccttacaatcagagcccctctcaccttgtaaagtgtgaatcgcccttcccttttgtacagaagatgaactgtattttgcattttgtctacttgtaagtgaatg

SEQ ID NO: 312841 - DNA, 120 bp, Artificial Sequence
  ENSG00000134644_42 (sequence is synthesized)
taacatactgtcaattttccttgtttgaatatagaattgtaacactacacggtgtacatttccagagccttgtgtatatttccaatgaacttttttgcaagcacacttgtaaccatatgt

SEQ ID NO: 312842 - DNA, 120 bp, Artificial Sequence
  ENSG00000134644_43 (sequence is synthesized)
gtataattaacaaacctgtgtatgcttatgcctgggcaactattttttgtaactcttgtgtagattgtctctaaacaatgtgtgatctttattttgaaaaatacagaactttggaatctg

SEQ ID NO: 312843 - DNA, 120 bp, Artificial Sequence
  ENSG00000134644_44 (sequence is synthesized)
agataggcagcattaaaagattttttgaaaaaagataaaaatgtagtttggaaatgtggccagtccctttcatagccaaacggtttgctttcttcttcatagctgttgcagcagccgcag

SEQ ID NO: 312844 - DNA, 120 bp, Artificial Sequence
  ENSG00000134644_45 (sequence is synthesized)
atgccgctgccaccgccggggccggggccggagcctatcccaggatgcaccgcgccaacccagtccccagtgggccgccatgttgtcggagtgaaaggtgttggtggaatgagcgttgca

SEQ ID NO: 312845 - DNA, 120 bp, Artificial Sequence
  ENSG00000134644_46 (sequence is synthesized)
gtgcccagctccaggccgtgttctcccaggtgcgggccggcgggaccccgccttcggccctggcggcgcgcgctcgcctagcgggcgggcactcgcgcgcagcgtttgtgttgcctgcga

SEQ ID NO: 312846 - DNA, 120 bp, Artificial Sequence
  ENSG00000134644_47 (sequence is synthesized)
ataatccaagttttgttagtagctgctgtgtttctgctgttttatttttaacatataaagaatagtatcccagaagactctggagctcccgaaagttgggcaggtgtcttaatttactca

SEQ ID NO: 312847 - DNA, 120 bp, Artificial Sequence
  ENSG00000134644_48 (sequence is synthesized)
ttaggataagctactagttgaggaagttattcaataccattttcccaggaagaggcagctcagaggatgaagtgaacacttttcatattcttctccaaaatgtgagtagctgttccaaag

SEQ ID NO: 312848 - DNA, 84 bp, Artificial Sequence
  ENSG00000134644_49 (sequence is synthesized)
gaactcctgggctcaagcttaggtatgagccaccacacccaactgaggcttctggtgttggtggaatgagcgttgcatgtgtct

SEQ ID NO: 312849 - DNA, 120 bp, Artificial Sequence
  ENSG00000134668_0 (sequence is synthesized)
agcaagggcctccctcccccgcatcacgtgatctcagctccttttcagctagtgggtggaaccccaggagggaaaactcagggaagcccagggcccgtgttgtgcttttggcccaggtag

SEQ ID NO: 312850 - DNA, 120 bp, Artificial Sequence
  ENSG00000134668_1 (sequence is synthesized)
gtggacagacatgtcccaggcgggggacgtagaaggccccagcacaggagaccctgtgctcagtccccaacacaactgtgagcttttacagaacatggaaggagccagctccatgccagg

SEQ ID NO: 312851 - DNA, 120 bp, Artificial Sequence
  ENSG00000134668_2 (sequence is synthesized)
cctgtcaccagatgggccgggagcaagctctgggcccggagtcagggctggcagcagaaggaagatccccaggaaggaggcccttcgaggtggcagctcccgggctgcaggtgctgctga

SEQ ID NO: 312852 - DNA, 120 bp, Artificial Sequence
  ENSG00000134668_3 (sequence is synthesized)
ggtccggccaggggtcttggagctgctagctgtggtacagagccggggctcgatgctggctcctgggctccacatgcagctgccctcggtgcctactcaggggagagctctgacctccaa

SEQ ID NO: 312853 - DNA, 120 bp, Artificial Sequence
  ENSG00000134668_4 (sequence is synthesized)
gaggctccaggtttctctgtgtgacatcttagatgacagttgccccaggaaactttgtagcaggtctgctggcctcccagagagagctctggcctgcagggagaggcttgcaggagtgga

SEQ ID NO: 312854 - DNA, 120 bp, Artificial Sequence
  ENSG00000134668_5 (sequence is synthesized)
ggaggtgagctgcctcaggcccagggaggccagagacggtggaatgagttctccagggtgtgacagaagaagccccacactcagcaaagaggagccccctggaaggcccctgacatcctc

SEQ ID NO: 312855 - DNA, 120 bp, Artificial Sequence
  ENSG00000134668_6 (sequence is synthesized)
accagacccagtccctgtgagggtaagaaagaaatggaggaggcaaggggctcattcagagtgtgaggaaggggctggtgacttcctgtggcttgatcagagccctcgtggggacaacct

SEQ ID NO: 312856 - DNA, 120 bp, Artificial Sequence
  ENSG00000134668_7 (sequence is synthesized)
cctgtctgtgggagaccctccccaagttgctgacctggagtccttgggaggcccttgcagacctccctctccaaaagacactgggtctgggcctggagagccaggtggaagtggggcagg

SEQ ID NO: 312857 - DNA, 120 bp, Artificial Sequence
  ENSG00000134668_8 (sequence is synthesized)
atgtgcctcagggactgagaaatttggatatttgcccgctacaggggatgggccccagccaggcagcccctgtggccctgtcgggttcccagtgcccagtggaggggagtccctcagttc

SEQ ID NO: 312858 - DNA, 120 bp, Artificial Sequence
  ENSG00000134668_9 (sequence is synthesized)
agctgcacaggctcctccacagagcgcagcactgtgcctgggggcgtcagcacaggcctctgcagagcagcaagaagctgtgtgtgtcgtgcggactggcagcgatgaaggccaggctcc

SEQ ID NO: 312859 - DNA, 120 bp, Artificial Sequence
  ENSG00000134668_10 (sequence is synthesized)
agcacaggaccaggaggagctggaggccaaggctcagccagcttccaggggaaggctggagcaaggactcgctgcccccgctgacacctgtgccagctcccgggagcccttgggcggcct

SEQ ID NO: 312860 - DNA, 120 bp, Artificial Sequence
  ENSG00000134668_11 (sequence is synthesized)
cagctcctccctggatactgaagccagcagggcctgctcaggcccattcatggagcagagaagatccaagggcactaagaacctgaagaaaggtccagtgccctgtgcccaagaccgggg

SEQ ID NO: 312861 - DNA, 120 bp, Artificial Sequence
  ENSG00000134668_12 (sequence is synthesized)
cacagacagaagctcagacaactcccaccaggacaggccagaggaacccagcccaggaggctgccccagactggaggaagtgaaaataccccatggagtgaagcttgtgtgctacctggg

SEQ ID NO: 312862 - DNA, 120 bp, Artificial Sequence
  ENSG00000134668_13 (sequence is synthesized)
ttccgggccagtgatccagctcctgggggccatcagccacggccaggcaggggggcagctgccaccaaagctggaggttctagaggacttgatggaggtcagctcaccctcacctgccca

SEQ ID NO: 312863 - DNA, 120 bp, Artificial Sequence
  ENSG00000134668_14 (sequence is synthesized)
gaggctcagaaggaagaaaaggcccatggtgcagggccctgctgggtgccaggttttccagccttctccttcaggaggcacagcaggggaccctggtggcctctctgaccccttctaccc

SEQ ID NO: 312864 - DNA, 120 bp, Artificial Sequence
  ENSG00000134668_15 (sequence is synthesized)
tccaagaagcggttccctggcccttggcgaccccagctcggaccctgcatgttcccagagtggcccaatggaggctgaagaggattctcttccggagcagccagaggactcagctcagct

SEQ ID NO: 312865 - DNA, 120 bp, Artificial Sequence
  ENSG00000134668_16 (sequence is synthesized)
ccaacaggagaagccatccctgtatattggggtgcggggcactgttgtccgttccatgcaggaggtactatggactcgccttcgggagctcccagacccagtgctgagtgaggaggtggt

SEQ ID NO: 312866 - DNA, 120 bp, Artificial Sequence
  ENSG00000134668_17 (sequence is synthesized)
ggagggcattgctgctggcattgaggcagccctctgggacctgacacaaggcaccaatggccggtacaagaccaagtatcgcagcctgctgttcaacctgcgggaccccaggaacctgga

SEQ ID NO: 312867 - DNA, 120 bp, Artificial Sequence
  ENSG00000134668_18 (sequence is synthesized)
cttgtttctcaaagtggttcatggagatgtcaccccctacgacctggtgcggatgagctcgatgcagctggccccccaggagctggcccgctggcgggaccaggaggagaaaaggggcct

SEQ ID NO: 312868 - DNA, 120 bp, Artificial Sequence
  ENSG00000134668_19 (sequence is synthesized)
gaatatcattgagcagcaacagaaggagccgtgcagacttccagcctccaaaatgacccacaagggcgaagtggagattcagcgggacatggaccagacactgaccctggaggatctggt

SEQ ID NO: 312869 - DNA, 120 bp, Artificial Sequence
  ENSG00000134668_20 (sequence is synthesized)
gggaccgcagatgttcatggactgcagcccacaggccctgcccatcgcatcagaggacaccacggggcagcatgaccaccacttcttagaccccaactgccacatctgcaaggactggga

SEQ ID NO: 312870 - DNA, 120 bp, Artificial Sequence
  ENSG00000134668_21 (sequence is synthesized)
gccctcgaatgagctgctaggctccttcgaagccgccaagagctgcggggacaatatcttccagaaagccctaagccaaactcctatgcctgctccagagatgcccaaaaccagggagtt

SEQ ID NO: 312871 - DNA, 120 bp, Artificial Sequence
  ENSG00000134668_22 (sequence is synthesized)
gtctcccacggaaccacaggacagggtccctccatctgggctccatgtgcctgctgcacccacaaaggccctgccctgcctgccaccctgggaaggtgttctggacatgttctccatcaa

SEQ ID NO: 312872 - DNA, 120 bp, Artificial Sequence
  ENSG00000134668_23 (sequence is synthesized)
gcggttccgggccagggcccagctggtctcgggacacagctgtcggcttgtccaggctctgcccaccgtgatccgctcggcaggctgcatcccctccaacattgtctgggaccttctggc

SEQ ID NO: 312873 - DNA, 120 bp, Artificial Sequence
  ENSG00000134668_24 (sequence is synthesized)
cagcatctgcccagccaaggccaaggacgtctgcgtggtcagactgtgcccacatggggcccgggacacccagaactgccgcctgctctactcatacctcaatgataggcagcgccacgg

SEQ ID NO: 312874 - DNA, 120 bp, Artificial Sequence
  ENSG00000134668_25 (sequence is synthesized)
gctggcctctgtggagcacatggggatggtcctgctgcccctgcctgccttccagcccctgcccaccaggctgcgccctttggggggcccaggcctttgggctcttcctgtctcccctct

SEQ ID NO: 312875 - DNA, 120 bp, Artificial Sequence
  ENSG00000134668_26 (sequence is synthesized)
cctttccccaggtctggaggtcactcactcaagtctgttgctggctgtgctgctccccaaggaagggcttccagacacagcagggtccagcccctggttggggaaggttcaaaagatggt

SEQ ID NO: 312876 - DNA, 120 bp, Artificial Sequence
  ENSG00000134668_27 (sequence is synthesized)
ctccttcaacagtaaggtggagaagagatactatcagccagatgacaggaggccgaatgtgcccctgaagggcacccctcccccaggaggtgcctggcagcagagccagggcaggggcag

SEQ ID NO: 312877 - DNA, 120 bp, Artificial Sequence
  ENSG00000134668_28 (sequence is synthesized)
tatagctccaaggggaatctctgcttggcagaggccccccagaggcagggggaggctctggccagagcctgaaaactggcagcatcctgggcgagggcagtggcccccagagccaggctt

SEQ ID NO: 312878 - DNA, 120 bp, Artificial Sequence
  ENSG00000134668_29 (sequence is synthesized)
gcgccagtcccagcatccctattcagtagcaccagctggtcatggctttggccgtggccagcacttccacagggactcctgtccccaccaagccctgctccggcacctcgaatccctggc

SEQ ID NO: 312879 - DNA, 120 bp, Artificial Sequence
  ENSG00000134668_30 (sequence is synthesized)
gaccatgagtcaccagctccaagccttactgtgcccccagaccaagagctccatcccccgccctctgcagcgtttgtctagcgcccttgcagctccagagccccctggcccagcccgtga

SEQ ID NO: 312880 - DNA, 120 bp, Artificial Sequence
  ENSG00000134668_31 (sequence is synthesized)
ctcctctttggggcctacagatgaagctggctctgagtgtcccttccctagaaaggcctgaccctccttacccaccagaacaggggttttgatgccctcactagtgttgaagcctgttcc

SEQ ID NO: 312881 - DNA, 120 bp, Artificial Sequence
  ENSG00000134668_32 (sequence is synthesized)
agagagaggtgggactgcaaggagaggatggtcagccctacccacctgccctgtttgaacttcctgtttgacaatgtttgctgttgattttttgttcaataaagaatttggtaaaattgg

SEQ ID NO: 312882 - DNA, 120 bp, Artificial Sequence
  ENSG00000134668_33 (sequence is synthesized)
agttgtgagtaagcctcttattttccctgagccccagtaaccccatccataaaaggagaatgatcctatttcctcctcacggagttggggtgagaataagtaggttcctgcagggaaaca

SEQ ID NO: 312883 - DNA, 120 bp, Artificial Sequence
  ENSG00000134668_34 (sequence is synthesized)
cccacgacaggaacaagttggcccagaccctgccgcccacccagctgcctccctctgggactaagtgcctggagagcctcctgggctcagtgcccccgccctgccctggcctccacagcc

SEQ ID NO: 312884 - DNA, 120 bp, Artificial Sequence
  ENSG00000134668_35 (sequence is synthesized)
ccatgcctgggggtcccacgcctcgcctcaccagcagtgtggtcttgggcatgtcacctgactgctctgaggcccaccttgtttgtgataaaacggggacagcgatccttaacgcatagg

SEQ ID NO: 312885 - DNA, 120 bp, Artificial Sequence
  ENSG00000134668_36 (sequence is synthesized)
ggaacatggggtgggacagtgctgctggcacaggcctgccagcgccttgtcactgtcggtcctcctccttttggcctcaccccaaggcccccacatgagtggtattaagtcccatcatca

SEQ ID NO: 312886 - DNA, 120 bp, Artificial Sequence
  ENSG00000134668_37 (sequence is synthesized)
tagtcatccccaacctggcattctgcccagatctctgctgggaagcagcaggctgcgctgttccaggcagtgactttttcagatggaaggaacgaagacccactgtattcagtggattgg

SEQ ID NO: 312887 - DNA, 120 bp, Artificial Sequence
  ENSG00000134668_38 (sequence is synthesized)
tttagggatgctccaggcagggaaccacccggcaccctggcagtccatccagagggcctcctggaacttgtcctcagacctgggaagccaacgggagtgacaatagtctagggctcttgg

SEQ ID NO: 312888 - DNA, 120 bp, Artificial Sequence
  ENSG00000134668_39 (sequence is synthesized)
gactcctgcagttgattagaactttcccttggcttccttcggtcactctcagaaggccactctggctgtagttgaatgttctgtgggtcagatgttcacctgggtctcatcagctgcctg

SEQ ID NO: 312889 - DNA, 120 bp, Artificial Sequence
  ENSG00000134668_40 (sequence is synthesized)
ttcaggagaggggtgcagggcaggtccctttaactatattcagtcagtcagtatatttatggggcacctaccaggtgccaggcacggttctaggcactggggaagtgacagtgaacgaca

SEQ ID NO: 312890 - DNA, 120 bp, Artificial Sequence
  ENSG00000134668_41 (sequence is synthesized)
gaaatccctgctccccactcctaccactaatattcaggccaacgactgggagaacctctacctgtgccaagaggatccctaaggggtgtggctgctcctcagtctaaatcagtttgtatt

SEQ ID NO: 312891 - DNA, 120 bp, Artificial Sequence
  ENSG00000134668_42 (sequence is synthesized)
ccctgaacaaactgaatggcaatgtaggagaaagacctagatagccccagagaggaagagagagaggaggtgggaggggaggggaggggaggggaaaataacacatgatagctatcttta

SEQ ID NO: 312892 - DNA, 120 bp, Artificial Sequence
  ENSG00000134668_43 (sequence is synthesized)
ctgtttattgaacacctactgtgtgcaccttttacaagcagtgtctcattcacatctcacaatggcctaggaggttggtgctattccctgcccatttctgggatgaggaacctggcacca

SEQ ID NO: 312893 - DNA, 120 bp, Artificial Sequence
  ENSG00000134668_44 (sequence is synthesized)
aggtcacatatgtgcagtggggaagctgagatttgaacccaggctggctgactccaaagcctgtgctttgagactgttctggaggtggctgataagagtagagtttcaaaatctctttaa

SEQ ID NO: 312894 - DNA, 120 bp, Artificial Sequence
  ENSG00000134668_45 (sequence is synthesized)
accttcctaaagcaatgattgttttatgtttaaagctatttctagtatgaggaaaaaaagtgatttggcaatagacgtcaagagtctttaaaatgttccttctccctgattctgtcatct

SEQ ID NO: 312895 - DNA, 120 bp, Artificial Sequence
  ENSG00000134668_46 (sequence is synthesized)
gcttctgaaatcttgtcctaaggacataatttaaagtttaggaaactactttctgcacaaaaaatgtcctcagtgctatttagtaatagtgaaaacctggaaatgacccaaatgtatagc

SEQ ID NO: 312896 - DNA, 120 bp, Artificial Sequence
  ENSG00000134668_47 (sequence is synthesized)
aacagaggtgagacgtccactccagtctcaccccatcacagcagtgtctacggggactatatgatgtgacaaatgcctctgctattattagtgaacaaaaagagaacaccaagttgaata

SEQ ID NO: 312897 - DNA, 120 bp, Artificial Sequence
  ENSG00000134668_48 (sequence is synthesized)
ccaagttgaatatatgatcccagctgtttcaggaaaaggacccccaaaccctgtgtatagaaaaagattataaagggctgggcacggtggcccacacctttaatcccagcactttgggag

SEQ ID NO: 312898 - DNA, 120 bp, Artificial Sequence
  ENSG00000134668_49 (sequence is synthesized)
tagtgggtggaaccccaggagggaaaactcagggaagcccaggtgagagcgacgcgaccgatggggcccggatttcttggatgctgggggactgtcccagtaaggcttgggaacctgggt

SEQ ID NO: 312899 - DNA, 120 bp, Artificial Sequence
  ENSG00000134668_50 (sequence is synthesized)
ggggcgcctttcagaacgggaccgatgggagagagacgagaagggttatgggcacgaaccccgttcagtatctgctccttgcgcagtgtgagaactgggagagagactcctggcccttcc

SEQ ID NO: 312900 - DNA, 120 bp, Artificial Sequence
  ENSG00000134668_51 (sequence is synthesized)
gatctcagctccttttcagctagtgggtggaaccccaggagggaaaactcagggaagcccagggcccgtgttgtgcttttggcccaggaggaagtgaaaataccccatggagtgaagctt

SEQ ID NO: 312901 - DNA, 120 bp, Artificial Sequence
  ENSG00000134668_52 (sequence is synthesized)
gggaggccaccacctggtgcaacagacatagcactggcttttcctgtgtggccttgggcaagtcttccctcccttgggaacctcactttccccatctgtgcaatggaactaatcatccca

SEQ ID NO: 312902 - DNA, 120 bp, Artificial Sequence
  ENSG00000134668_53 (sequence is synthesized)
gcctcctggcagccccctgcacaaggccaagcttgggccagtgttccagtccccacagtagggacacaggatctgctctgaaaagaaaggaggtgccggggaagtcctcatggcctgctc

SEQ ID NO: 312903 - DNA, 120 bp, Artificial Sequence
  ENSG00000134684_0 (sequence is synthesized)
ctgtgctgtgcgctcctctcccggggaccaccgtcctcagatctccccagggaatgggtcgtcctcttcctgcccccacccgcgagacgcggcagaaaagcccgcggctatcttcccgcc

SEQ ID NO: 312904 - DNA, 120 bp, Artificial Sequence
  ENSG00000134684_1 (sequence is synthesized)
agcaacagcctcccgccgagccggccgggacagaggcggcccccacccccactgggcaggggactgcagacggcgctccccgactctcaagacgaccagggagcttcccttttcctcagc

SEQ ID NO: 312905 - DNA, 120 bp, Artificial Sequence
  ENSG00000134684_2 (sequence is synthesized)
ggggtgaggggcatctgtcgcccgccgacttggaggtggaggggcagggacattccctcgccatcacctcaggagctagaacgcgcccttctcgcagcagggcgtgggcctcccaatccc

SEQ ID NO: 312906 - DNA, 120 bp, Artificial Sequence
  ENSG00000134684_3 (sequence is synthesized)
tccaaggggcggacggcgtgcgcaaccccctggagaagcaacaggcgcccccatccccctccaagccgggtaacgccgaccccctcgtccctcccgctcttcacctccggaagccgggcc

SEQ ID NO: 312907 - DNA, 120 bp, Artificial Sequence
  ENSG00000134684_4 (sequence is synthesized)
aaagcctgggcgaacgactgcgcctcactccgccccctgcgccattttatcgccccctccccgacctcccctaccccgagtcagccgggccaacaccagggggagggcaaaccagcagtg

SEQ ID NO: 312908 - DNA, 120 bp, Artificial Sequence
  ENSG00000134684_5 (sequence is synthesized)
attggcaggaaaccgtcccgcctctaggagggttgtgccccgctcaggcgcctcagccccgccctccgcaccgcccaccgtgcccactggctccaccttttcccgtctcatcgacctgct

SEQ ID NO: 312909 - DNA, 120 bp, Artificial Sequence
  ENSG00000134684_6 (sequence is synthesized)
cgactctctgctgctcctcactttttccggccgctgccggaggggtccaggccgagtaagcggagcgccgagcccagctgatgcaacctggctggactcgcgtgacagttcccggcacgc

SEQ ID NO: 312910 - DNA, 120 bp, Artificial Sequence
  ENSG00000134684_7 (sequence is synthesized)
ggcggcgacggtgacccaggaaggggctctggtgccgggctgagcgggggaagcaggggtagcggagccatgggggacgctcccagccctgaagagaaactgcaccttatcacccggaac

SEQ ID NO: 312911 - DNA, 120 bp, Artificial Sequence
  ENSG00000134684_8 (sequence is synthesized)
ctgcaggaggttctgggggaagagaagctgaaggagatactgaaggagcgggaacttaaaatttactggggaacggcaaccacgggcaaaccacatgtggcttactttgtgcccatgtca

SEQ ID NO: 312912 - DNA, 120 bp, Artificial Sequence
  ENSG00000134684_9 (sequence is synthesized)
aagattgcagacttcttaaaggcagggtgtgaggtaacaattctgtttgcggacctccacgcatacctggataacatgaaagccccatgggaacttctagaactccgagtcagttactat

SEQ ID NO: 312913 - DNA, 120 bp, Artificial Sequence
  ENSG00000134684_10 (sequence is synthesized)
gagaatgtgatcaaagcaatgctggagagcattggtgtgcccttggagaagctcaagttcatcaaaggcactgattaccagctcagcaaagagtacacactagatgtgtacagactctcc

SEQ ID NO: 312914 - DNA, 120 bp, Artificial Sequence
  ENSG00000134684_11 (sequence is synthesized)
tccgtggtcacacagcacgattccaagaaggctggagctgaggtggtaaagcaggtggagcaccctttgctgagtggcctcttataccccggactgcaggctttggatgaagagtattta

SEQ ID NO: 312915 - DNA, 120 bp, Artificial Sequence
  ENSG00000134684_12 (sequence is synthesized)
aaagtagatgcccaatttggaggcattgatcagagaaagattttcacctttgcagagaagtacctccctgcacttggctattcaaaacgggtccatctgatgaatcctatggttccagga

SEQ ID NO: 312916 - DNA, 120 bp, Artificial Sequence
  ENSG00000134684_13 (sequence is synthesized)
acaatggggttctgtccttcatcaagcatgtcctttttccccttaagtccgagtttgtgatcctacgagatgagaaatggggtggaaacaaaacctacacagcttacgtggacctggaaa

SEQ ID NO: 312917 - DNA, 120 bp, Artificial Sequence
  ENSG00000134684_14 (sequence is synthesized)
aggactttgctgctgaggttgtacatcctggagacctgaagaattctgttgaagtcgcactgaacaagttgctggatccaatccgggaaaagtttaatacccctgccctgaaaaaactgg

SEQ ID NO: 312918 - DNA, 120 bp, Artificial Sequence
  ENSG00000134684_15 (sequence is synthesized)
ccagcgctgcctacccagatccctcaaagcagaagccaatggccaaaggccctgccaagaattcagaaccagaggaggtcatcccatcccggctggatatccgtgtggggaaaatcatca

SEQ ID NO: 312919 - DNA, 120 bp, Artificial Sequence
  ENSG00000134684_16 (sequence is synthesized)
ctgtggagaagcacccagatgcagacagcctgtatgtagagaagattgacgtgggggaagctgaaccacggactgtggtgagcggcctggtacagttcgtgcccaaggaggaactgcagg

SEQ ID NO: 312920 - DNA, 120 bp, Artificial Sequence
  ENSG00000134684_17 (sequence is synthesized)
acaggctggtagtggtgctgtgcaacctgaaaccccagaagatgagaggagtcgagtcccaaggcatgcttctgtgtgcttctatagaagggataaaccgccaggttgaacctctggacc

SEQ ID NO: 312921 - DNA, 120 bp, Artificial Sequence
  ENSG00000134684_18 (sequence is synthesized)
ctccggcaggctctgctcctggtgagcacgtgtttgtgaagggctatgaaaagggccaaccagatgaggagctcaagcccaagaagaaagtcttcgagaagttgcaggctgacttcaaaa

SEQ ID NO: 312922 - DNA, 120 bp, Artificial Sequence
  ENSG00000134684_19 (sequence is synthesized)
tttctgaggagtgcatcgcacagtggaagcaaaccaacttcatgaccaagctgggctccatttcctgtaaatcgctgaaaggggggaacattagctagccagcccagcatcttcccccct

SEQ ID NO: 312923 - DNA, 120 bp, Artificial Sequence
  ENSG00000134684_20 (sequence is synthesized)
tcttccaccactgagtcatctgctgtctcttcagtctgctccatccatcacccatttacccatctctcaggacacggaagcagcgggtttggactctttattcggtgcagaactcggcaa

SEQ ID NO: 312924 - DNA, 120 bp, Artificial Sequence
  ENSG00000134684_21 (sequence is synthesized)
ggggcagcttaccctccccagaacccaggatcatcctgtctggctgcagtgagagaccaacccctaacaagggctgggccacagcagggagtccagccctaccttcttcccttggcagct

SEQ ID NO: 312925 - DNA, 120 bp, Artificial Sequence
  ENSG00000134684_22 (sequence is synthesized)
ggagaaatctggtttcaatataactcatttaaaaatttatgccacagtccttataattggaaaaatactggtgcccaggttttcttggagttatccaagcagctgcgcccctagctggga

SEQ ID NO: 312926 - DNA, 120 bp, Artificial Sequence
  ENSG00000134684_23 (sequence is synthesized)
tctggtacctggactaggctaattacagcttctccccaacaggaaactgtgggatttgaaaaggaaagggaagggaaaacagagaacctagtggtctaccaagtggttggcaactttccc

SEQ ID NO: 312927 - DNA, 120 bp, Artificial Sequence
  ENSG00000134684_24 (sequence is synthesized)
aatgtctgcttactctgaggcttggcactgggggccagggcctgccccagggctcctggaatttcccttgatccagctaggctgggacactccctaaatcagctgcgtgttgttagcatc

SEQ ID NO: 312928 - DNA, 120 bp, Artificial Sequence
  ENSG00000134684_25 (sequence is synthesized)
aggcagaatgaatggcagagagtgattctgtcttcatagagggtggggtacttctccataaggcatctcagtcaaatccccatcactgtcataaattcaaataaaatgtctgaacaaggg

SEQ ID NO: 312929 - DNA, 120 bp, Artificial Sequence
  ENSG00000134684_26 (sequence is synthesized)
ttaacaggcagcaaaatgagctcttcagaagaggtaagttgccagctgagacttgaatttagaaatcttcagcctcaatggagagattgaggactgaaaagaacagtgacctggctaact

SEQ ID NO: 312930 - DNA, 120 bp, Artificial Sequence
  ENSG00000134684_27 (sequence is synthesized)
gagtatcaaaggatccagagcagtcctgatgagatctaatcataacttaatggtttttgctgctgataaaaaaataaaagcaaaagtaatgtctttgttcatacgactgtgatgaaattc

SEQ ID NO: 312931 - DNA, 120 bp, Artificial Sequence
  ENSG00000134684_28 (sequence is synthesized)
agccttattaatgagagcactatggttgcatttcactaattagcattttgattcctagggtaatacttgatatcactaatattatgatatcttttaatatttaagagtccctcttgagct

SEQ ID NO: 312932 - DNA, 120 bp, Artificial Sequence
  ENSG00000134684_29 (sequence is synthesized)
cgtgtacttgagggaaagttcactttggttctgatcattagaacgtggaaatccaaagatgtgaaaggttgagttctgggttcccaaacatggcttaccttcagaatcatctagggaatt

SEQ ID NO: 312933 - DNA, 120 bp, Artificial Sequence
  ENSG00000134684_30 (sequence is synthesized)
ttcagaaagtggtggagggaagacttcctttttcccagagacagaaggttatgcacccagtggcctgggaccattgttctgggctttttttcccttcgacatggatttgcttctcactgt

SEQ ID NO: 312934 - DNA, 120 bp, Artificial Sequence
  ENSG00000134684_31 (sequence is synthesized)
gtaccccaaccaccaaaaccaccctgagatcaatgctggtgctcctgcatcagatggcttagagatccttccacctcttaacacaagcatctaggtccactttactcaaatctggcctca

SEQ ID NO: 312935 - DNA, 120 bp, Artificial Sequence
  ENSG00000134684_32 (sequence is synthesized)
gttgagagcagagtataccatcagagcccattctcctgtctgctgtctgggacgtggaaagaaagttagctctagggggtctttccaggggcctctgtaaggagtggatgctcctttccg

SEQ ID NO: 312936 - DNA, 120 bp, Artificial Sequence
  ENSG00000134684_33 (sequence is synthesized)
ccaaggcatgcttctgtgtgcttctatgtgagtgaggacttggagtggggcacaggacctggggaggccaggaagagtagggaatcagcccatatgatgtccttccacacaccaggtgga

SEQ ID NO: 312937 - DNA, 120 bp, Artificial Sequence
  ENSG00000134684_34 (sequence is synthesized)
agctctgagaacacgtgcctcttccttgctgatgccaaaagttgatgcatgaaggacttatcgtacaagtactgttaatgaagcattttacctacagttaattttgttaaaatagaaatg

SEQ ID NO: 312938 - DNA, 120 bp, Artificial Sequence
  ENSG00000134684_35 (sequence is synthesized)
gagggctcaaaccagtacatacccaagtcttactactagtaaggagtggagcagggattcaaatcccagttttgatgtctataaagtcctcgctacgttattttatacttcctcccctag

SEQ ID NO: 312939 - DNA, 120 bp, Artificial Sequence
  ENSG00000134684_36 (sequence is synthesized)
aaacacagattttggtatcttgacacacaattttggtatagcctgggttaatgtaaccctggtgatatgcagggatgtagcaagataagaggacctcctggggctctggtactgaggatg

SEQ ID NO: 312940 - DNA, 120 bp, Artificial Sequence
  ENSG00000134684_37 (sequence is synthesized)
cccctgtgtaaaggcccggattgctttggcctccacagtcactggaacccatccatagcctcactcttctcttgtcctgtgtcttcccagagaagggataaaccgccaggttgaacctct

SEQ ID NO: 312941 - DNA, 120 bp, Artificial Sequence
  ENSG00000134684_38 (sequence is synthesized)
atactggagtgggcagaggtgttagaagtaagggtgggggcagacatgttgaactagaggaatacaacaaaatagatataagccacaagccttcccctgaagcagctgagatgctagctg

SEQ ID NO: 312942 - DNA, 120 bp, Artificial Sequence
  ENSG00000134684_39 (sequence is synthesized)
ggtatacaatagtgccactcatccaatttaagaataataccatacaataaagttcagaatatatggcaaaaactacaaatagtcatgcatgtgggctaggaatagtcatgcatgtgagct

SEQ ID NO: 312943 - DNA, 63 bp, Artificial Sequence
  ENSG00000134684_40 (sequence is synthesized)
ttaggccaaggtgagctcaggattttaaggccagcctgggcaacatggcaaaacgttgtctct

SEQ ID NO: 312944 - DNA, 71 bp, Artificial Sequence
  ENSG00000134684_41 (sequence is synthesized)
tttgggaggccaaggtgggtggccaaggtgagctcaggattttaaggccagcctgggcaacatggcaaaac

SEQ ID NO: 312945 - DNA, 63 bp, Artificial Sequence
  ENSG00000134684_42 (sequence is synthesized)
gtagatgtttatgttcatgtgtttctttccacaggctttggatgaagagtatttaaaagtaga

SEQ ID NO: 312946 - DNA, 87 bp, Artificial Sequence
  ENSG00000134684_43 (sequence is synthesized)
gaaggctgaggcaggcggatcacttgagcccaaaagttagagaccaaaacccagtctctaccagtagcacatgcctgtagtcccagc

SEQ ID NO: 312947 - DNA, 60 bp, Artificial Sequence
  ENSG00000134684_44 (sequence is synthesized)
aaaaaaattagccaggcatatggggaagttgagactgcagtgagccatgatcgcaccact

SEQ ID NO: 312948 - DNA, 120 bp, Artificial Sequence
  ENSG00000134684_45 (sequence is synthesized)
gcctgggcaacagagtgagactctatgtctcaaaaaaagaaaaatgatagaaattagattagacctattatacccaaccggtatatagggtatcgatagtttcttacacagctgttgggc

SEQ ID NO: 312949 - DNA, 120 bp, Artificial Sequence
  ENSG00000134684_46 (sequence is synthesized)
gggcagagcctgcagagcttagagaagcttatctttagattctcccagtttccttctatgtgcatgggcctggctcttagttggccatccacttgtgcgtaatgctaagatattggcatt

SEQ ID NO: 312950 - DNA, 120 bp, Artificial Sequence
  ENSG00000134684_47 (sequence is synthesized)
gatagctttgtgcgacccttccagaaaaaaactcagtaactcagtaaaattttttttttttttttctaaaagagacagagtctggctctgttgcccagcctggtcttgaagtcctgggct

SEQ ID NO: 312951 - DNA, 120 bp, Artificial Sequence
  ENSG00000134684_48 (sequence is synthesized)
cccaaagtgctagaattacaggtgtgagctaccacacctggccaagactcagtaaattctatgtggaatgcatgaatggaaatacctaaaggaggcaaagctactactgctccctccccg

SEQ ID NO: 312952 - DNA, 120 bp, Artificial Sequence
  ENSG00000134684_49 (sequence is synthesized)
aaagctactactgctccctccccgctagtctaataattgagggagagaacagatgaaaatcaggtatgtcatgtctgaaaggttgccaacccagtattaaagaagttacaactcagtgtt

SEQ ID NO: 312953 - DNA, 120 bp, Artificial Sequence
  ENSG00000134684_50 (sequence is synthesized)
tagactctggggattctacactaaatcttacctaatctcagtgtcttaacgtggtgggatcagcagctgacctgccacagggaagaattctacctcatggggttcttctcattcccagag

SEQ ID NO: 312954 - DNA, 120 bp, Artificial Sequence
  ENSG00000134684_51 (sequence is synthesized)
tttatactttggtttagaaaggggaggaggagcctagctgaagcaatcttacagaagtaaaacaggcaaaaaagttagaaagacaaatggttacgggaaaacaaacagttccgggcgcag

SEQ ID NO: 312955 - DNA, 120 bp, Artificial Sequence
  ENSG00000134684_52 (sequence is synthesized)
ttccgggcgcaggggctttaaatccatcacaaggtgatagacgcggaggctttgggtaccatcaaccagacacaaatgctggggcttagggtaatatcaactgggcaaattcctgggaac

SEQ ID NO: 312956 - DNA, 80 bp, Artificial Sequence
  ENSG00000134684_53 (sequence is synthesized)
ggggcttagggtaatatcaactgggcaaattcctgggaactgcggctatagctttccacaatatcttatcagttatttgc

SEQ ID NO: 312957 - DNA, 120 bp, Artificial Sequence
  ENSG00000134684_54 (sequence is synthesized)
caattcagattaaaacaaggtagggtatcacatctgcactgagaacatggctggacctccttgatggctctgagcctggatctccactgacacatgctgttgttttccttgtcacatggt

SEQ ID NO: 312958 - DNA, 120 bp, Artificial Sequence
  ENSG00000134684_55 (sequence is synthesized)
ttaaatattcccaaggaaatgaagaagtagtatcagaaacaaaaatgttcgctttgttgtattaaaagtgttcattcctaagggatgtcccctcagaatatctagaagattctttcagac

SEQ ID NO: 312959 - DNA, 64 bp, Artificial Sequence
  ENSG00000134684_56 (sequence is synthesized)
agggatgtcccctcagaatatctagaagattctttcagaccagatttgagatataaaaaaggca

SEQ ID NO: 312960 - DNA, 90 bp, Artificial Sequence
  ENSG00000134684_57 (sequence is synthesized)
gaaaaggcagtcacaggacacaaggaataaaatggaattactgaactattaccatgtacgagcagcgttctcatcattttcacacccaca

SEQ ID NO: 312961 - DNA, 120 bp, Artificial Sequence
  ENSG00000134684_58 (sequence is synthesized)
accatgtacgagcagcgttctcatcattttcacacccacattcagtgatttaaccctcatccccatcctgtgagatatagctgttgttagcttcactttataagtaacaaagccaacact

SEQ ID NO: 312962 - DNA, 82 bp, Artificial Sequence
  ENSG00000134684_59 (sequence is synthesized)
ctgttgttagcttcactttataagtaacaaagccaacactggcccggcacgtagcaggcagattgcctgaacccaggagttc

SEQ ID NO: 312963 - DNA, 120 bp, Artificial Sequence
  ENSG00000134684_60 (sequence is synthesized)
aaaagaaaagagaaaaagcagcagccaaagcttagaggggttatgtgcctagtttggagtcgcacacagctagctgggaatctaatctgggtctgtcgaactccaaagcccttcctcttt

SEQ ID NO: 312964 - DNA, 120 bp, Artificial Sequence
  ENSG00000134684_61 (sequence is synthesized)
cttcttactcagctgtctccctcaggttatctttaggccttgggttacctatgtgaatgtttctctgcttgtaaataccagttggtctgtgaccctactctaagcataaatggagggact

SEQ ID NO: 312965 - DNA, 120 bp, Artificial Sequence
  ENSG00000134684_62 (sequence is synthesized)
agaagaattagactaacaaatacattcagctcctaaacaccctcaagttagtatagatttcagaatcaaaagacttggattttggacacgttagtctttctgaatgtattttcccttctc

SEQ ID NO: 312966 - DNA, 120 bp, Artificial Sequence
  ENSG00000134684_63 (sequence is synthesized)
atggccaaaggcctgccaagaattcagaaccagaggaggtcatcccatcccggctggatatccgtgtggggaaaatcatcactgtggagaagcacccagatgcagacagcctgtatgtag

SEQ ID NO: 312967 - DNA, 120 bp, Artificial Sequence
  ENSG00000134686_0 (sequence is synthesized)
catctgcctgcccttctgccatccgagcgccctgactgcgccacactgcaggccatggagaatgagctgccagtcccacatacatctagcagtgcctgtgccaccagcagtaccagcggg

SEQ ID NO: 312968 - DNA, 120 bp, Artificial Sequence
  ENSG00000134686_1 (sequence is synthesized)
gccagtagcagcagtggctgcaacaacagcagcagtggtggaagtggccgccccaccgggccccagatttctgtgtacagtggtattccagaccggcagaccgtgcaggtgatccagcag

SEQ ID NO: 312969 - DNA, 120 bp, Artificial Sequence
  ENSG00000134686_2 (sequence is synthesized)
gccctgcacagacagcccagcacggccgctcagtacctgcagcagatgtacgccgcccagcagcagcacctcatgctgcagaccgcggcgctccagcagcagcacctcagcagcgcccag

SEQ ID NO: 312970 - DNA, 120 bp, Artificial Sequence
  ENSG00000134686_3 (sequence is synthesized)
ctccagagcctggcagccgtacagcaggcaagcctggtatccaatagacaaggaagcacttcaggcagcaatgtgtctgcgcaggccccggcccagtcatcttcgatcaacctggcagcc

SEQ ID NO: 312971 - DNA, 120 bp, Artificial Sequence
  ENSG00000134686_4 (sequence is synthesized)
tccccagcagcagcccagctcctcaaccgggcccagagtgtgaactctgcagcagcctcaggcatcgctcagcaggctgtgctcttgggcaacacgtcttccccagccctgactgcaagc

SEQ ID NO: 312972 - DNA, 120 bp, Artificial Sequence
  ENSG00000134686_5 (sequence is synthesized)
caagcacagatgtatctgagggcacagatgctcatcttcacgcccacggccaccgtcgctactgtgcagcctgagctcggcactggctcccccgcccggccccccacccccgcccaggta

SEQ ID NO: 312973 - DNA, 120 bp, Artificial Sequence
  ENSG00000134686_6 (sequence is synthesized)
cagaacttgaccctccgaacacagcagacaccagcggcagcagcctcgggccccacccccactcagcctgtcctgcccagcttggccctgaaacccacgccgggcggtagccagcctctg

SEQ ID NO: 312974 - DNA, 120 bp, Artificial Sequence
  ENSG00000134686_7 (sequence is synthesized)
cctaccccagcacagagcagaaatactgctcaggcttcccctgcaggtgccaagcctggcatagctgacagtgtgatggagccacacaagaaaggagatggcaacagcagtgtgccaggg

SEQ ID NO: 312975 - DNA, 120 bp, Artificial Sequence
  ENSG00000134686_8 (sequence is synthesized)
agcatggaaggccgggctgggctcagccggacggttcctgctgtggctgcccaccccctcattgcaccagcctatgctcagctgcagccacaccagctcctcccacagccatcctcaaag

SEQ ID NO: 312976 - DNA, 120 bp, Artificial Sequence
  ENSG00000134686_9 (sequence is synthesized)
cacctgcagccccaatttgtgatccagcagcagccacagccacaacagcagcagccgccgccccagcagtcacggcctgtgctccaagctgagccccacccccagctcgcctcagtctct

SEQ ID NO: 312977 - DNA, 120 bp, Artificial Sequence
  ENSG00000134686_10 (sequence is synthesized)
ccaagcgtggccctccagcccagctcagaggcccatgccatgccactaggcccggttacacccgccctgccactccagtgtcccactgccaacctgcacaagcctggcggcagtcagcag

SEQ ID NO: 312978 - DNA, 120 bp, Artificial Sequence
  ENSG00000134686_11 (sequence is synthesized)
tgtcaccctcccacacctgatactgggcctcagaatggacatcccgagggcgtgccccacacccctcaacgcaggttccagcacacttcagctgtcatcttacaactgcagcctgcttca

SEQ ID NO: 312979 - DNA, 120 bp, Artificial Sequence
  ENSG00000134686_12 (sequence is synthesized)
ccaccccagcagtgtgtccctgatgactggaaagaagtggcaccaggggagaaaagtgtgcctgagacgcggtctggcccatcaccacatcagcaggctattgtcactgccatgcctggt

SEQ ID NO: 312980 - DNA, 120 bp, Artificial Sequence
  ENSG00000134686_13 (sequence is synthesized)
ggcctgcctgtacccacgagccctaacatccagccgtccccagctcacgagacagggcagggcattgttcatgcactgaccgacctcagcagccccggcatgacctcagggaacggaaac

SEQ ID NO: 312981 - DNA, 120 bp, Artificial Sequence
  ENSG00000134686_14 (sequence is synthesized)
tctgcctccagcatcgccggcactgccccccagaatggtgagaataaaccaccacaggccattgtgaaaccccaaatcctgacgcatgttatcgaagggtttgtgatccaggagggggcg

SEQ ID NO: 312982 - DNA, 120 bp, Artificial Sequence
  ENSG00000134686_15 (sequence is synthesized)
gagcctttcccggtgggacgctcgtccctgctggtggggaatctcaagaagaagtatgcacaggggttcctgcctgagaaacttccacagcaggatcacaccaccaccactgactcggag

SEQ ID NO: 312983 - DNA, 120 bp, Artificial Sequence
  ENSG00000134686_16 (sequence is synthesized)
gaggagggtgctcccctcaaactcaagtgtgagctctgtggccgggtggactttgcctataagttcaagcgttccaagcgcttctgttccatggcttgtgcaaagaggtacaacgtggga

SEQ ID NO: 312984 - DNA, 120 bp, Artificial Sequence
  ENSG00000134686_17 (sequence is synthesized)
tgcaccaaacgggtgggacttttccactcagaccggagcaagctgcagaaggcaggagctgcgacccacaaccgccgtcgggccagcaaagccagtctgccaccacttaccaaggatacc

SEQ ID NO: 312985 - DNA, 120 bp, Artificial Sequence
  ENSG00000134686_18 (sequence is synthesized)
aagaagcagccaacaggcactgtgcccctttcggttactgctgctttgcagctaacacacagccaggaagactccagccgttgctcagataactcaagctatgaggaacccttgtcaccc

SEQ ID NO: 312986 - DNA, 120 bp, Artificial Sequence
  ENSG00000134686_19 (sequence is synthesized)
atctcagccagctcatctacttcccgccggcgacaaggccagcgggacctggagctccccgacatgcatatgcgggacctggtgggcatgggacaccacttcctgccaagtgagcccacc

SEQ ID NO: 312987 - DNA, 120 bp, Artificial Sequence
  ENSG00000134686_20 (sequence is synthesized)
aagtggaatgtagaagacgtctacgaattcatccgctctctgccaggctgccaggagatagcagaggaattccgtgcccaggaaatcgacgggcaagccctgctgctgctcaaggaggac

SEQ ID NO: 312988 - DNA, 120 bp, Artificial Sequence
  ENSG00000134686_21 (sequence is synthesized)
cacctgatgagcgccatgaacatcaagctggggcccgccctgaagatctacgcccgcatcagcatgctcaaggactcctagggctggtggcagccaggattctggcccagggcgcctcct

SEQ ID NO: 312989 - DNA, 120 bp, Artificial Sequence
  ENSG00000134686_22 (sequence is synthesized)
cccgactgagcagagccagacagacattcctgaggggcccagaaatggggccggttggagggcaggggctctccctaggggcatagctggtgaggaggtctgggcacctcctccatggct

SEQ ID NO: 312990 - DNA, 120 bp, Artificial Sequence
  ENSG00000134686_23 (sequence is synthesized)
ctcaggggcctttcatttctgtgggaggggcagagaggtaggtggcacagaagatggggctttatgcttgtaaatattgatagcactggcttcctccaaagtcccaatactctagccccg

SEQ ID NO: 312991 - DNA, 120 bp, Artificial Sequence
  ENSG00000134686_24 (sequence is synthesized)
ctctcttcccctctttctgtcccccattttccagggggtatatggtcagggctccccaacctgagttgggttacttcaagggcagccagcaggcctggatggaggcctagaaagcccttg

SEQ ID NO: 312992 - DNA, 120 bp, Artificial Sequence
  ENSG00000134686_25 (sequence is synthesized)
ccttccttcctcccacttctttctccaggcctggttaactcttccgttgtcagcttctcccccttcagcctgtttctgcagcagccagggttctcccccctacaccctctgcaggtggag

SEQ ID NO: 312993 - DNA, 120 bp, Artificial Sequence
  ENSG00000134686_26 (sequence is synthesized)
agagagaagctgggcccagccgggccgtgcctgctggcacagacgccttaacgctgtgtgtatgactgtgtgactgtgtgggagcctggactgacagataggccaagggctactctctgg

SEQ ID NO: 312994 - DNA, 120 bp, Artificial Sequence
  ENSG00000134686_27 (sequence is synthesized)
catctccaggtgttttgtagcaaacagccacttagtgctttgtcctggactccactcagcctcaggatggggaatagccaagaatggcagcctcagcgcagaggcaaggtcagaaagaga

SEQ ID NO: 312995 - DNA, 120 bp, Artificial Sequence
  ENSG00000134686_28 (sequence is synthesized)
cggcgcttcagagtttcctttccagacacccctccccgcactgtgaagttcccctgaccgccctcctggttcacaaagagcattaagaaagctgcggtggtctgagcaacatagcccaaa

SEQ ID NO: 312996 - DNA, 120 bp, Artificial Sequence
  ENSG00000134686_29 (sequence is synthesized)
gggctgagcctcctggcctgcctgcccgcccaccctgggagtcccagtggtgaggctcagagaactgctaaggggaaagaacagctggagtttctgttgatgtgaagaaggcagctcttg

SEQ ID NO: 312997 - DNA, 120 bp, Artificial Sequence
  ENSG00000134686_30 (sequence is synthesized)
gcctcccactcccacacttctttgcctataaatcttcctagcagcaatttgagctacctgaggaggaggcagggcagaaagggcgagggcctgcctctgacctgccgtgtcctttgcagg

SEQ ID NO: 312998 - DNA, 120 bp, Artificial Sequence
  ENSG00000134686_31 (sequence is synthesized)
aaggaggtaggcacctttctgagcttattctattccccacccacacccccaggcagggttggaaatgaaggacttttttaacctttgttttgttttttaaaaataaatctgtaaaatctg

SEQ ID NO: 312999 - DNA, 80 bp, Artificial Sequence
  ENSG00000134686_32 (sequence is synthesized)
cctttgttgacgccggccaggccggtgcggtcggatgcgccgcggcagccccgggccccggctcggaggctcccggcgga

SEQ ID NO: 313000 - DNA, 120 bp, Artificial Sequence
  ENSG00000134686_33 (sequence is synthesized)
agtcttgcacgtctaagacaatgagacagctcatgagagatgctgtttgaagtggaagagaggaagttcactgtcgtgtggttgtgtatagagacagggcagggcattgttcatgcactg

SEQ ID NO: 313001 - DNA, 120 bp, Artificial Sequence
  ENSG00000134686_34 (sequence is synthesized)
cggaaactctgcctccagcatcgccggcactgccccccagaatggattatctttccaaggtccagaagaggggggtcagtgatcaggaataattgacaagacccttggttagaagtttcc

SEQ ID NO: 313002 - DNA, 120 bp, Artificial Sequence
  ENSG00000134686_35 (sequence is synthesized)
tccccagctcacgatgagaaggggttttgaacagcagtccattccactgtagatttgctctaattatcagaaagttgcttttcaaatgaagtcaaaacctgctctcttggaatttgccag

SEQ ID NO: 313003 - DNA, 120 bp, Artificial Sequence
  ENSG00000134686_36 (sequence is synthesized)
cattggtcatgattctgtcttgtgaattataagagtccatcttatacagtgtttgtagacagttgtcggactgtctcttgcctctccccccattaaaaaagagaaaatctccaggctaaa

SEQ ID NO: 313004 - DNA, 120 bp, Artificial Sequence
  ENSG00000134686_37 (sequence is synthesized)
tctacgaattcatccgctctctgccaggcctccccagcagcttccctaaaggccatgagacttctatatacagtctctcaaagcaccttagacactcacgctttccacagagtccttctg

SEQ ID NO: 313005 - DNA, 120 bp, Artificial Sequence
  ENSG00000134690_0 (sequence is synthesized)
gtgactgtggagtttgaattgggtggcggttgactgtagagccgctctctctcactggcacagcgaggttttgctcagcccttgtctcgggaccgcagcctccgccgagcgccatggctc

SEQ ID NO: 313006 - DNA, 120 bp, Artificial Sequence
  ENSG00000134690_1 (sequence is synthesized)
ctaggaagggcagtagtcgggtggccaagaccaactccttacggaggcggaagctcgcctcctttctgaaagacttcgaccgtgaagtggaaatacgaatcaagcaaattgagtcagaca

SEQ ID NO: 313007 - DNA, 120 bp, Artificial Sequence
  ENSG00000134690_2 (sequence is synthesized)
ggcagaacctcctcaaggaggtggataacctctacaacatcgagatcctgcggctccccaaggctctgcgcgagatgaactggcttgactacttcgcccttggaggaaacaaacaggccc

SEQ ID NO: 313008 - DNA, 120 bp, Artificial Sequence
  ENSG00000134690_3 (sequence is synthesized)
tggaagaggcggcaacagctgacctggatatcaccgaaataaacaaactaacagcagaagctattcagacacccctgaaatctgccaaaacacgaaaggtaatacaggtagatgaaatga

SEQ ID NO: 313009 - DNA, 120 bp, Artificial Sequence
  ENSG00000134690_4 (sequence is synthesized)
tagtggaagaggaagaagaagaagaaaatgaacgtaagaatcttcaaactgcaagagtcaaaaggtgtcctccatccaagaagagaactcagtccatacaaggaaaaggaaaagggaaaa

SEQ ID NO: 313010 - DNA, 120 bp, Artificial Sequence
  ENSG00000134690_5 (sequence is synthesized)
ggtcaagccgtgctaacactgttaccccagccgtgggccgattggaggtgtccatggtcaaaccaactccaggcctgacacccaggtttgactcaagggtcttcaagacccctggcctgc

SEQ ID NO: 313011 - DNA, 120 bp, Artificial Sequence
  ENSG00000134690_6 (sequence is synthesized)
gtactccagcagcaggagagcggatttacaacatctcagggaatggcagccctcttgctgacagcaaagagatcttcctcactgtgccagtgggcggcggagagagcctgcgattattgg

SEQ ID NO: 313012 - DNA, 120 bp, Artificial Sequence
  ENSG00000134690_7 (sequence is synthesized)
ccagtgacttgcagaggcacagtattgcccagctggatccagaggccttgggaaacattaagaagctctccaaccgtctcgcccaaatctgcagcagcatacggacccacaaatgagaca

SEQ ID NO: 313013 - DNA, 120 bp, Artificial Sequence
  ENSG00000134690_8 (sequence is synthesized)
ccaaagttgacaggatggacttttaatgggcacttctgggaccctgaagagacttcttcccttcaggcttattgtttgagtgtgaagttccagagcaaggagccatgttcctctaaggga

SEQ ID NO: 313014 - DNA, 120 bp, Artificial Sequence
  ENSG00000134690_9 (sequence is synthesized)
tcccacaccagttaggtagagctgtctgttcaccctcccatcccagctgatcccagtcactgcttgctggggccatgccatggaagcttcccatcagtctcccagctgaatcctccctgc

SEQ ID NO: 313015 - DNA, 120 bp, Artificial Sequence
  ENSG00000134690_10 (sequence is synthesized)
tctctgagctgctgccttttgcctcctgcaactcaacatcctcttcaccctgccctgcctgcagttgagggggcgaagaagaaccctgtgttctcaggaagactgcctccaccaccgcta

SEQ ID NO: 313016 - DNA, 120 bp, Artificial Sequence
  ENSG00000134690_11 (sequence is synthesized)
cccagagaacctctgcatctggcatttctgctctctatgcttgagaccgggaggtttaggctcagataagtgagctctgggccatgagagggtaggtccagaaggtggggggaactgtac

SEQ ID NO: 313017 - DNA, 120 bp, Artificial Sequence
  ENSG00000134690_12 (sequence is synthesized)
agatcagcagagcaggacagttggcagcagtgacctcagtagggaacatgtccgtctaccctctcgcactcatgacacctccccctaccagccctcctcttcctcctcctcctcctcctg

SEQ ID NO: 313018 - DNA, 120 bp, Artificial Sequence
  ENSG00000134690_13 (sequence is synthesized)
tgggaggtggtcagtgggacttagggatctttcacctgctgtgcccagtagttctgaagtctgcttgtggagcagtgttttatgtttatccctgtttactgaagaccaaatactggtttg

SEQ ID NO: 313019 - DNA, 120 bp, Artificial Sequence
  ENSG00000134690_14 (sequence is synthesized)
gagacaacttccatgtcttgctcttctacctccctagttagtggaaatttggataagggaactgtagggcccagattctggaggttttatgtcattggccacagaataactgtctctaag

SEQ ID NO: 313020 - DNA, 120 bp, Artificial Sequence
  ENSG00000134690_15 (sequence is synthesized)
ctatccatggtccagtggtccctgccaagtctgtagacttcagagagcacttctctcttatggggttcatgggaacaggggtgggtgtgacttgcttggtggcctcattccatgtgtgcc

SEQ ID NO: 313021 - DNA, 120 bp, Artificial Sequence
  ENSG00000134690_16 (sequence is synthesized)
tgtgcctggggcatggactttgttaagcagagtcagcagtgaggtcctcattctccagccagcctctctgccctggagaatcatgtgctatgttctaagaatttgagaactagagtcctc

SEQ ID NO: 313022 - DNA, 120 bp, Artificial Sequence
  ENSG00000134690_17 (sequence is synthesized)
atccccaggcttgaaggcacatggctttctcatgtagggctctctgtggtatttgttattattttgcaacaagaccattttagtaaaacagtcctgttcaagttgtattcttttaagttc

SEQ ID NO: 313023 - DNA, 120 bp, Artificial Sequence
  ENSG00000134690_18 (sequence is synthesized)
ttttattctcctttccctgagatttttgtatatattgttctgagtaatggtatctttgagctgattgttctaatcagagctggtacctactttcaataaattctggttttgtgttttctt

SEQ ID NO: 313024 - DNA, 120 bp, Artificial Sequence
  ENSG00000134690_19 (sequence is synthesized)
gtagagccgctctctctcactggcacagcgaggttttgctcagcccttgtctcgggaccgcaggtacgtgcctggcgacttcttcgggtggtccccgtccgccctcctcgtccctaccca

SEQ ID NO: 313025 - DNA, 120 bp, Artificial Sequence
  ENSG00000134697_0 (sequence is synthesized)
gcacacgtggtccggcgtggttcaggcgggtgtcttcggccgggcttgggaacataaaagtttgtttcaccacgtaagccggacctcgcactccggtcccggtctcgtcgccaagatggt

SEQ ID NO: 313026 - DNA, 120 bp, Artificial Sequence
  ENSG00000134697_1 (sequence is synthesized)
gaagcccaagtacaaaggacggagcaccatcaacccgtccaaggccagcacaaacccagatcgagtgcagggagcaggaggccaaaacatgagggaccgggccaccatccggcgcctgaa

SEQ ID NO: 313027 - DNA, 120 bp, Artificial Sequence
  ENSG00000134697_2 (sequence is synthesized)
tatgtataggcaaaaggagcgcaggaacagtcgtggtaaaataattaaacccctgcaatatcaatcaacggtggcttctggcacagtggcaagagtagagccaaatattaaatggtttgg

SEQ ID NO: 313028 - DNA, 120 bp, Artificial Sequence
  ENSG00000134697_3 (sequence is synthesized)
aaacacacgtgtgattaagcagtcatcattacaaaaatttcaagaggaaatggatacagttatgaaggatccatacaaagttgtcatgaagcaaagcaagttaccaatgtctcttctcca

SEQ ID NO: 313029 - DNA, 120 bp, Artificial Sequence
  ENSG00000134697_4 (sequence is synthesized)
tgatcgaatccggcctcataacttgaaggtgcacattcttgatactgaaagttttgaaactacatttggccctaagtcacagaggaaacgaccaaacttatttgcaagtgatatgcagtc

SEQ ID NO: 313030 - DNA, 120 bp, Artificial Sequence
  ENSG00000134697_5 (sequence is synthesized)
tcttatcgaaaatgctgaaatgtccactgagagctatgaccagggcaaggatcgtgatttggtaactgaagacactggtgtgagaaatgaagctcaagaagagatctataaaaagggaca

SEQ ID NO: 313031 - DNA, 120 bp, Artificial Sequence
  ENSG00000134697_6 (sequence is synthesized)
gtccaaaagaatatggggtgagctctacaaggtgatagattcatcagatgttgtagttcaagttcttgatgctagagatccaatgggtactcgttcccctcacattgaaacttacctgaa

SEQ ID NO: 313032 - DNA, 120 bp, Artificial Sequence
  ENSG00000134697_7 (sequence is synthesized)
gaaggaaaaaccttggaaacacctcatttttgtacttaacaaatgtgaccttgttccaacctgggcaacaaaacggtgggttgctgtcctctcccaggattatccaacacttgctttcca

SEQ ID NO: 313033 - DNA, 120 bp, Artificial Sequence
  ENSG00000134697_8 (sequence is synthesized)
tgcaagccttactaacccgtttggcaagggagcattcattcagcttctgcggcagtttggaaagttgcacactgacaagaaacagatcagtgttgggttcattggctatccaaatgttgg

SEQ ID NO: 313034 - DNA, 120 bp, Artificial Sequence
  ENSG00000134697_9 (sequence is synthesized)
aaggtctggcagtatattactttgatgcgtcggatattcctgattgactgtccaggtgtggtttacccctctgaggactccgagacagacattgtgctaaaaggagttgttcaagtagaa

SEQ ID NO: 313035 - DNA, 120 bp, Artificial Sequence
  ENSG00000134697_10 (sequence is synthesized)
aaaattaagagtcctgaagaccacattggtgctgtacttgaacgagcaaagccagaatatatcagcaaaacatacaagattgattcttgggagaatgctgaggactttcttgagaagctc

SEQ ID NO: 313036 - DNA, 120 bp, Artificial Sequence
  ENSG00000134697_11 (sequence is synthesized)
gctttccggactgggaagttactaaagggtggagagcccgacttgcagactgtgggtaagatggtcctcaatgactggcagaggggccggattcctttctttgtcaagccacccaatgca

SEQ ID NO: 313037 - DNA, 120 bp, Artificial Sequence
  ENSG00000134697_12 (sequence is synthesized)
gagccacttgtggccccccagcttctaccctcctcatctttggaagttgtcccagaagcagcccagaacaatccaggggaggaagtcacagaaactgcaggtgaagggtcagaatccatc

SEQ ID NO: 313038 - DNA, 120 bp, Artificial Sequence
  ENSG00000134697_13 (sequence is synthesized)
attaaggaagaaacagaagagaacagtcactgtgatgctaacacagagatgcagcagattctcacacgagttcggcagaactttggtaaaatcaacgtggtgcctcagttttctggggat

SEQ ID NO: 313039 - DNA, 120 bp, Artificial Sequence
  ENSG00000134697_14 (sequence is synthesized)
gacctggttcctgtggaggtgtcagatcttgaggaagagcttgagagcttttctgatgaagaggaggaggaacaggagcaacaaagagatgatgcggaagagtcttcctcggagcctgag

SEQ ID NO: 313040 - DNA, 120 bp, Artificial Sequence
  ENSG00000134697_15 (sequence is synthesized)
gaggaaaatgtgggaaacgacaccaaagccgttattaaagcactggatgagaagattgccaaatatcagaagtttctagacaaagccaaagccaaaaagttttcagcagtcagaatatcc

SEQ ID NO: 313041 - DNA, 120 bp, Artificial Sequence
  ENSG00000134697_16 (sequence is synthesized)
aagggactgagtgaaaagatatttgcaaaacctgaagaacaaagaaaaacactggaagaagatgtagatgacagagcaccttccaaaaagggaaagaagcggaaggcacaaagggaagag

SEQ ID NO: 313042 - DNA, 120 bp, Artificial Sequence
  ENSG00000134697_17 (sequence is synthesized)
gaacaggaacattcaaataaagctcccagggcgcttacatcaaaagaacggaggcgagcagtacgacagcaacggccgaaaaaagttggtgtgcgctactatgaaacacacaacgtgaaa

SEQ ID NO: 313043 - DNA, 120 bp, Artificial Sequence
  ENSG00000134697_18 (sequence is synthesized)
aataggaacaggaacaaaaagaagaccaatgactcagagggacagaaacacaaacgcaaaaaattcagacaaaagcagtaatgtttaaaaggtttttattaaattatacaaaaacaggca

SEQ ID NO: 313044 - DNA, 120 bp, Artificial Sequence
  ENSG00000134697_19 (sequence is synthesized)
gctcaaaaatattagctattcttctcaaatacaatcctatcgaagatcaaagattgggtcagctttgtcataccatgtagcttcaagtactaattattggagcaacatatggagaaagta

SEQ ID NO: 313045 - DNA, 120 bp, Artificial Sequence
  ENSG00000134697_20 (sequence is synthesized)
gagatttttgtggttggtggcttcttacctaatttgggtgaactacttgttgcattttaagcaatgacttgttggttatactggttggttatcaaatagtgcactgtgtacttctgcctt

SEQ ID NO: 313046 - DNA, 120 bp, Artificial Sequence
  ENSG00000134697_21 (sequence is synthesized)
ctgcttttcattctgcacattttttaggattaaattggcaattcaggaaacttcctagaaagggttcattattaacctagaatccaagggtgggtccacagacaaagaggggggtgtgtt

SEQ ID NO: 313047 - DNA, 120 bp, Artificial Sequence
  ENSG00000134697_22 (sequence is synthesized)
tcctgcatttatccattcctccatttgaccatcagctttcacactgagagcatggcttagggcatccttttacctggcagcctccccttggcctgctttactcaccactgtgctcacctg

SEQ ID NO: 313048 - DNA, 120 bp, Artificial Sequence
  ENSG00000134697_23 (sequence is synthesized)
caagcttgttcccaccgttgggtttatagacaaattttcaatagaaaattcctgtttgtgtattgtttgtatccagcaccttccaaaaagggaaagaagcggaaggcacaaagggaagag

SEQ ID NO: 313049 - DNA, 120 bp, Artificial Sequence
  ENSG00000134697_24 (sequence is synthesized)
catgcccttgactgctagctgagactgatgaagcctttgctgttctcacccccacttcctccaaataggagttatatattctcaaatataattgtacgtgagtgtcgttaggataaagtg

SEQ ID NO: 313050 - DNA, 120 bp, Artificial Sequence
  ENSG00000134697_25 (sequence is synthesized)
ttaacttttggttaaggacatgggtagctggcggtgaaatagtgatggtttcacaatactcaaaagtagaggtcttgtttctcacagccctgacctccacaaatggcgcattaaatctca

SEQ ID NO: 313051 - DNA, 120 bp, Artificial Sequence
  ENSG00000134697_26 (sequence is synthesized)
aaagcttggcacatacttatctttgcggttacctaaaacaggccagtcatttcagggtccccagacttagttctctaatgaactctcttcaatcacagaattccccctccttaccttata

SEQ ID NO: 313052 - DNA, 120 bp, Artificial Sequence
  ENSG00000134697_27 (sequence is synthesized)
ctcttgcttcaggatgcctcctatcttagtctgttttgtgatgatgcaacagaatactacagattgggtaattataatgaacagaaattgttttggctcatgtttctggaggctgggaag

SEQ ID NO: 313053 - DNA, 120 bp, Artificial Sequence
  ENSG00000134697_28 (sequence is synthesized)
tccagtatcaaggcaccagcatctgacaagggtcatcccatcgtggaaagtgggaggacaagagcaagcaagagagggtcaaacttgcttttataacaaactcactcttttttttttttt

SEQ ID NO: 313054 - DNA, 120 bp, Artificial Sequence
  ENSG00000134697_29 (sequence is synthesized)
gggattacagacgtgagccaccacatccggccaacagactcactcttaaaaacgaacccatccccgagatccattagtccattcatggggatggagccctcatgatctaattacctctta

SEQ ID NO: 313055 - DNA, 120 bp, Artificial Sequence
  ENSG00000134697_30 (sequence is synthesized)
attcatggggatggagccctcatgatctaattacctcttattaggccttacctaccaacacttgctgcattggggattaagtttctgtatcagtccattttcatactgctatgaagaaat

SEQ ID NO: 313056 - DNA, 120 bp, Artificial Sequence
  ENSG00000134697_31 (sequence is synthesized)
tcacagttccacatggctggggaggtttcacaatcatggcggaaggtgaaggaggaacaaaggcatgtcttacatggcatcaggcaagagtgtgtgtccagggaaactgccctttataaa

SEQ ID NO: 313057 - DNA, 120 bp, Artificial Sequence
  ENSG00000134697_32 (sequence is synthesized)
aactgccctttataaaaccatcagctctcgtgagacttaattcatcataggagcggcatgggaaagacctgcccccataattcaattacctcccacccggtccttcccacaacacatggg

SEQ ID NO: 313058 - DNA, 120 bp, Artificial Sequence
  ENSG00000134697_33 (sequence is synthesized)
gattatgggagctacaaatcaagatgagatttggacacagccaaaccataccagtttccaacatatgaattttgggggacacatttaaatcagaggacctcctcaaatgcctctcttagt

SEQ ID NO: 313059 - DNA, 120 bp, Artificial Sequence
  ENSG00000134697_34 (sequence is synthesized)
atctgtaacatccagcctggccttcatttttatgtagttgtgtgtgctgattttgcatgtgcttatatcagcagccccctagggaaggtctagggagccttgcttttctatgataaatca

SEQ ID NO: 313060 - DNA, 120 bp, Artificial Sequence
  ENSG00000134697_35 (sequence is synthesized)
ttggttggttttaatggtttaaatagtcttagttggttcatcctgtggaactacacatgtattcctttgatcctagtactgatctctgggcttaatgtacattggtttaaaaatacatta

SEQ ID NO: 313061 - DNA, 120 bp, Artificial Sequence
  ENSG00000134697_36 (sequence is synthesized)
atgaaatgactcaaatttgggtgttttcaataccttcccttagtcctgagaagaggactgtttaagagcaagatatgagttcagaaattccatttttcattttctgattctatttatttc

SEQ ID NO: 313062 - DNA, 120 bp, Artificial Sequence
  ENSG00000134697_37 (sequence is synthesized)
aatagtaacatgataggaaactagtaccgtgaaggcaagctaaactttgtagttttttgtgaaatacacaaaacctataatattacaaacttaaagataatattacaaacttaaagaagt

SEQ ID NO: 313063 - DNA, 120 bp, Artificial Sequence
  ENSG00000134697_38 (sequence is synthesized)
ctaagaagtaaatgatttagttcaataatccatagtagttaggaaataagttgagtttcatctaagctagtttttctgttttaaattcagcaggtttcaaaagccacaggatgaaaaacc

SEQ ID NO: 313064 - DNA, 120 bp, Artificial Sequence
  ENSG00000134697_39 (sequence is synthesized)
tagccacaacgaactctgcccagagactgttttgaagttgtctctaaatattattattttatttttcccagactcccttaaatgtcatccctcttttatttgtactgtagcaaaccattt

SEQ ID NO: 313065 - DNA, 120 bp, Artificial Sequence
  ENSG00000134697_40 (sequence is synthesized)
gaccttacttttgcatattttcttttcatagagagtgattgtttaggacttgttgatttctctctgcttctcttgaatgcagaccaccactaggagtttagctcaccatataatagtttg

SEQ ID NO: 313066 - DNA, 120 bp, Artificial Sequence
  ENSG00000134697_41 (sequence is synthesized)
gaacgtatcagagttgtttctgcccactttgataagactgagagtattttatatgcccccgtgtggctttggcctgtgttagttaatgtgattcatatttagatctgttttaaattatca

SEQ ID NO: 313067 - DNA, 120 bp, Artificial Sequence
  ENSG00000134697_42 (sequence is synthesized)
ttctatgtcctctggttggagagggccctgccaaaattcaagcttcagatccctggtcagacgtcagctcctgagggaagccgtggaaccagactaccctatcaaattcttaaagcttca

SEQ ID NO: 313068 - DNA, 80 bp, Artificial Sequence
  ENSG00000134698_0 (sequence is synthesized)
gggcgcgcgcgctggctcccgctcccgctcccgttggcggcggcggcggcggcggcggcggggattgtttttgttgtcgc

SEQ ID NO: 313069 - DNA, 120 bp, Artificial Sequence
  ENSG00000134698_1 (sequence is synthesized)
gaagagccggagccgggtccctgtccccgggccgggcgccgccgccgccccctgcccagcgcccgcgtctccgcggcgccaccccagcgccaatattccggagatcaagcgttacgcggc

SEQ ID NO: 313070 - DNA, 120 bp, Artificial Sequence
  ENSG00000134698_2 (sequence is synthesized)
gaggcgccggggaccggggcgaggcggcccccgccgccgccatggaggcgctgggacccggacctccggctagcctgtttcagccacctcgtcgtcctggccttggaactgttggaaaac

SEQ ID NO: 313071 - DNA, 120 bp, Artificial Sequence
  ENSG00000134698_3 (sequence is synthesized)
caattcgactgttagccaatcattttcaggttcagattcctaaaatagatgtgtatcactatgatgtggatattaagcctgaaaaacggcctcgtagagtcaacagggaggtagtagata

SEQ ID NO: 313072 - DNA, 120 bp, Artificial Sequence
  ENSG00000134698_4 (sequence is synthesized)
caatggtgcggcacttcaagatgcaaatatttggtgatcggcagcctgggtatgatggcaaaagaaacatgtacacagcacatccactaccaattggacgggatagggttgatatggagg

SEQ ID NO: 313073 - DNA, 120 bp, Artificial Sequence
  ENSG00000134698_5 (sequence is synthesized)
tgactcttccaggcgagggtaaagaccaaacatttaaagtgtctgttcagtgggtgtcagttgtgagccttcagttgcttttagaagctttggctgggcacttgaatgaagtcccagatg

SEQ ID NO: 313074 - DNA, 120 bp, Artificial Sequence
  ENSG00000134698_6 (sequence is synthesized)
actcagtacaagcacttgatgttatcacaagacaccttccctccatgaggtacaccccagtgggccgttcctttttctcacccccggaaggttactaccaccctctgggagggggcaggg

SEQ ID NO: 313075 - DNA, 120 bp, Artificial Sequence
  ENSG00000134698_7 (sequence is synthesized)
aggtctggtttggttttcatcagtctgtgagacctgccatgtggaatatgatgctcaacattgatgtatctgcaactgctttctaccgggctcagcctatcattgagttcatgtgtgagg

SEQ ID NO: 313076 - DNA, 120 bp, Artificial Sequence
  ENSG00000134698_8 (sequence is synthesized)
ttttagacattcagaacatcaatgaacagaccaaacctctaacagactcccagcgtgtcaaatttaccaaagaaatcagaggtctcaaagttgaggtgacccactgtggacagatgaaac

SEQ ID NO: 313077 - DNA, 120 bp, Artificial Sequence
  ENSG00000134698_9 (sequence is synthesized)
gaaaataccgagtttgtaatgtgactagacggccagccagtcatcaaacttttcctttgcagctagaaaacggtcaagctatggaatgtacagtagctcaatattttaagcaaaagtata

SEQ ID NO: 313078 - DNA, 120 bp, Artificial Sequence
  ENSG00000134698_10 (sequence is synthesized)
gtctgcaactgaaatacccccatcttccctgtctccaagtgggacaagaacaaaagcatacatacttgccactcgaggtctgtaatatagtggcaggacagcgatgtatcaagaagctca

SEQ ID NO: 313079 - DNA, 120 bp, Artificial Sequence
  ENSG00000134698_11 (sequence is synthesized)
cagacaatcagacttccacaatgatcaaagctacagcaagatctgctcctgacagacaggaagagatcagtagactggtgaagagcaacagtatggtgggtggacctgatccatacctta

SEQ ID NO: 313080 - DNA, 120 bp, Artificial Sequence
  ENSG00000134698_12 (sequence is synthesized)
aagaatttggtattgttgtccacaatgaaatgacagagctcacaggcagggtacttccagcaccaatgctgcaatatggaggccggaataaaacagtagccacacccaaccagggtgtct

SEQ ID NO: 313081 - DNA, 120 bp, Artificial Sequence
  ENSG00000134698_13 (sequence is synthesized)
gggacatgcgaggaaagcagttttatgctggcattgaaattaaagtttgggcagttgcttgttttgcacctcagaaacaatgtagggaagatttactaaagagtttcactgaccagctgc

SEQ ID NO: 313082 - DNA, 120 bp, Artificial Sequence
  ENSG00000134698_14 (sequence is synthesized)
gtaaaatctctaaggatgcaggaatgcccatccagggtcagccatgtttctgcaagtatgcacaaggtgcagacagtgtggagcctatgtttaaacatctgaaaatgacttatgtgggcc

SEQ ID NO: 313083 - DNA, 120 bp, Artificial Sequence
  ENSG00000134698_15 (sequence is synthesized)
tacagctaatagtggttatcctgcctggaaagacaccagtatatgcggaggtgaaacgtgttggagatacccttctaggtatggccacacagtgtgtccaggtaaaaaatgtagtgaaga

SEQ ID NO: 313084 - DNA, 120 bp, Artificial Sequence
  ENSG00000134698_16 (sequence is synthesized)
cctcacctcaaaccctttccaatctttgcctgaagataaatgcaaaacttggaggaattaacaatgtgcttgtgcctcatcaaaggccctcggtgttccagcagcctgtcatcttcctgg

SEQ ID NO: 313085 - DNA, 120 bp, Artificial Sequence
  ENSG00000134698_17 (sequence is synthesized)
gagcggatgtcacacaccccccagcaggggatgggaagaaaccttccattgctgctgtggttggcagtatggatggccaccccagccggtactgtgccaccgttcgggtgcagacttccc

SEQ ID NO: 313086 - DNA, 120 bp, Artificial Sequence
  ENSG00000134698_18 (sequence is synthesized)
ggcaggagatctcccaagagctcctctacagtcaagaggtcatccaggacctgactaacatggttcgagagctgctgattcagttctacaaatccacacgcttcaaacccactcggatca

SEQ ID NO: 313087 - DNA, 120 bp, Artificial Sequence
  ENSG00000134698_19 (sequence is synthesized)
tctattaccgtggaggggtatctgagggacaaatgaaacaggtagcttggccagaactaatagcaattcgaaaggcatgtattagcttggaagaagattaccggccaggaataacttata

SEQ ID NO: 313088 - DNA, 120 bp, Artificial Sequence
  ENSG00000134698_20 (sequence is synthesized)
ttgtggtgcaaaaaagacatcacacacgactcttctgtgcagataaaacagaaagggtagggaaaagtggcaatgtaccagcaggcactacagtggatagtaccatcacacatccatctg

SEQ ID NO: 313089 - DNA, 120 bp, Artificial Sequence
  ENSG00000134698_21 (sequence is synthesized)
agtttgacttttacctctgtagtcatgcaggaattcagggaaccagccgtccctcacattaccaggtcttgtgggatgacaactgcttcactgcagatgaactccagctactgacttacc

SEQ ID NO: 313090 - DNA, 120 bp, Artificial Sequence
  ENSG00000134698_22 (sequence is synthesized)
agctgtgtcacacctatgtgaggtgcactcgctcagtctctattccagcccctgcatattatgcccggcttgtagcatttagggcaaggtatcatctggtggataaagatcatgacagtg

SEQ ID NO: 313091 - DNA, 120 bp, Artificial Sequence
  ENSG00000134698_23 (sequence is synthesized)
cggaaggcagtcatgtgtcaggacagagcaacggccgggatcctcaggccttggctaaggctgtgcaaatccaccatgatacccagcacacgatgtattttgcctgagagtctcagaaaa

SEQ ID NO: 313092 - DNA, 120 bp, Artificial Sequence
  ENSG00000134698_24 (sequence is synthesized)
agaactcaaccaatttggcaccccatgcagcctcaaaatgtttcaaatgcctaccgcctctagatcgagccacgttgacttcaggtggtcttctaccagcagctcggaatagttgcactg

SEQ ID NO: 313093 - DNA, 120 bp, Artificial Sequence
  ENSG00000134698_25 (sequence is synthesized)
aatctatactttgcagcactgtctgatgcgtcaacaaaattgagccatttttttaaagtaatagatactaatagattatcttttctgatgcactggactgaatttttacctcaatgtgca

SEQ ID NO: 313094 - DNA, 120 bp, Artificial Sequence
  ENSG00000134698_26 (sequence is synthesized)
aaggctgatcagcctgaactttctaaaggactttacaagaagggtttctatggaatattttgctagctgtggtgttcaccgcatccctctagtcttagaagagaagattattcctttttt

SEQ ID NO: 313095 - DNA, 120 bp, Artificial Sequence
  ENSG00000134698_27 (sequence is synthesized)
ctgtagtcattgagtggggtatatgcataagtgggagagaaaaaccaaacaatctacttcagttcagtgtaactatttaattgtgtgggtccatagactttttaatgaagatttctgact

SEQ ID NO: 313096 - DNA, 120 bp, Artificial Sequence
  ENSG00000134698_28 (sequence is synthesized)
ttgccactgtaaatgcctttaatgagcattaatttttgaaagttttacagagttttattagttttactactttatcttattgatctctgcagacttgtgctggtgcaagtacatgctgac

SEQ ID NO: 313097 - DNA, 120 bp, Artificial Sequence
  ENSG00000134698_29 (sequence is synthesized)
gtgacataaacagatgtaatgcatgtcacagtgacggagataacactgccatgataaaagtactcatgtttcccctatttggaaaaaaaaattgcttttagtatttttccaagttttcaa

SEQ ID NO: 313098 - DNA, 120 bp, Artificial Sequence
  ENSG00000134698_30 (sequence is synthesized)
aagtgcccattttatgctgctgtgtggtttgttaaatctaaatgatttttaaacttttctcatagaaacttaactttggcaataaacattttttaaggtctctcctcttccttccccaac

SEQ ID NO: 313099 - DNA, 120 bp, Artificial Sequence
  ENSG00000134698_31 (sequence is synthesized)
aatgtagttttctagatgagatttcagtatgattttatcagctatttcttatatatcataatctggcaatttctgaaaccagtcagaaaagacatatatttccatgcctttttaaagaat

SEQ ID NO: 313100 - DNA, 120 bp, Artificial Sequence
  ENSG00000134698_32 (sequence is synthesized)
tatttttacctgttttatattcacagttggtgtcctgtcactttgttttaaaataagctagaaccaggatgcttccttattggaaaggctttgccagtccttaaggtacaatgagtgatg

SEQ ID NO: 313101 - DNA, 120 bp, Artificial Sequence
  ENSG00000134698_33 (sequence is synthesized)
ctgcaacttgcaaatgtaccagcatttaaaatttcttttcctgggaatcaaggtaactcacacgactacttgcagtacaaattttttgcttctctttcgacatgaaatgtacttggtggg

SEQ ID NO: 313102 - DNA, 120 bp, Artificial Sequence
  ENSG00000134698_34 (sequence is synthesized)
ttttccttccttttattaaactaaaactgtgtggaaaaggttgatttttcttaatagattctggattccactcacagggagatgggattcctttcttgtccaaacaaagggagttgctct

SEQ ID NO: 313103 - DNA, 120 bp, Artificial Sequence
  ENSG00000134698_35 (sequence is synthesized)
aaagcgagcatcagttaaaatgtaggggaaaatgtattctgtatgtagtgtagataatactttgtgaatggacaacagttacatagtgtcttggtagcaccagccagtgtttcccagccc

SEQ ID NO: 313104 - DNA, 120 bp, Artificial Sequence
  ENSG00000134698_36 (sequence is synthesized)
agagtttactgacttgtaattctctatccaggacatcaggagtgagggatggaaaaggggataaaaggcctggagccacactctatatggctgaggaaggagctagggaaagagatagac

SEQ ID NO: 313105 - DNA, 120 bp, Artificial Sequence
  ENSG00000134698_37 (sequence is synthesized)
acaatggggtgaaaacaattttgccgcccctgcctggaaactgctggtggggaaatgatggtgaagggtgtttgcttgaactcatgagacggtccaaatctcataaactagccttctcaa

SEQ ID NO: 313106 - DNA, 120 bp, Artificial Sequence
  ENSG00000134698_38 (sequence is synthesized)
aatcccagcaatataaagcactgtttttcttcagtcgtttaaataaacttgtaaatacattgaagtttacatttccatgtgctgttgatcaacggcgccacctgtgtttgctgagactgg

SEQ ID NO: 313107 - DNA, 120 bp, Artificial Sequence
  ENSG00000134698_39 (sequence is synthesized)
tctctgagagagttttatgtcgatcgaggcctgttgctcattaagctgagtgcagacgtccttaatccctgcagatagtgggatgaaagcaagttctgtaaaatgaagcacaacatagcc

SEQ ID NO: 313108 - DNA, 120 bp, Artificial Sequence
  ENSG00000134698_40 (sequence is synthesized)
aggagtgaagagatggcagatgttaatttcttaaaattttccttttttttttttttttttgcaaatacctcacttggataatacaaatcaggacatgttggtgaggggctggctgcttgg

SEQ ID NO: 313109 - DNA, 120 bp, Artificial Sequence
  ENSG00000134698_41 (sequence is synthesized)
ctgctgcttttattcacacttgttcagggagagcacagagaatacccttcagcatggccactctggacccaagaggaggaaaaaacggaagcttttttaggagaaggaggacttgctgga

SEQ ID NO: 313110 - DNA, 120 bp, Artificial Sequence
  ENSG00000134698_42 (sequence is synthesized)
atccaagatgtgaagaactcttggtgactggctggctggccagcgggcaccacacctgcacttgagtgcctcgggcttgcttattaataacgcacagaagaagcatcacttctcaccatc

SEQ ID NO: 313111 - DNA, 120 bp, Artificial Sequence
  ENSG00000134698_43 (sequence is synthesized)
tcctggcatgtatggagcagggagcaaggctatgttcccgaaagccctgattagcttgtcttgctctacgctcgacctcgaacaatacagcttgtaagacctcagtcagtcctggtacac

SEQ ID NO: 313112 - DNA, 120 bp, Artificial Sequence
  ENSG00000134698_44 (sequence is synthesized)
tggggtaaatcagtgtggtggtggaagaaaagccgggaggcctatttttataggaaaatagtaccattaaaggtgcaatgctgtcattttggacaaaaggaaagaaatttggaagagctg

SEQ ID NO: 313113 - DNA, 120 bp, Artificial Sequence
  ENSG00000134698_45 (sequence is synthesized)
ggattattggcaaaaacttgctgaggggtgaatctttagagctaatcactgcagaatcagagttgcagcaatatgattgcaagcaagtctgaatgcatagttttactttaattcggcttg

SEQ ID NO: 313114 - DNA, 120 bp, Artificial Sequence
  ENSG00000134698_46 (sequence is synthesized)
acaatttgaataggtaaccccctcgggactgactgaatcgttatgcatgtgtcaatcaatgggaggtgtgcattctctagaagtagttttaggctgtttggtttggttttggttttgttt

SEQ ID NO: 313115 - DNA, 120 bp, Artificial Sequence
  ENSG00000134698_47 (sequence is synthesized)
tttaaatgcagcctgttgaggcactgtcatgtggtgtgaaagatttaaatgtagcaacgctaaagagtaataatttggggataagaagtggggacattggccgggcgcggtggctcacgc

SEQ ID NO: 313116 - DNA, 60 bp, Artificial Sequence
  ENSG00000134698_48 (sequence is synthesized)
cactttgggaggcctaggtgggcggatcagctgaggtcgagagttcgagtctggtggtgg

SEQ ID NO: 313117 - DNA, 120 bp, Artificial Sequence
  ENSG00000134698_49 (sequence is synthesized)
ctctgtctcaaaaaaaaaaaggggggggggggacattaagagagtggtgatgacccaaatgttgaaccaattatgttttggtggtggtgttcttagctgttgaatcctgaatggtttata

SEQ ID NO: 313118 - DNA, 120 bp, Artificial Sequence
  ENSG00000134698_50 (sequence is synthesized)
aagtgaactagctggcttaatgcagccagcgttctgggcagcagaacatattcattcttactgtaaattctatttgctgcttccaaaggtgatgattttcaagcagacatgttctatatg

SEQ ID NO: 313119 - DNA, 120 bp, Artificial Sequence
  ENSG00000134698_51 (sequence is synthesized)
gtctgtgttttaggatctggtgcccagcctctatcagagcttgcctacctggcaaagctgcctacccttcaagtgggaaaatataatccactgtttaacaaggctcaccctctccaccct

SEQ ID NO: 313120 - DNA, 120 bp, Artificial Sequence
  ENSG00000134698_52 (sequence is synthesized)
gtcctaacgaccttttgtgaatgtgctgtgatattttcttgctcaatagcaaggtggtagctctgctttcattttaagaaagtggaggctgagggcattgtatcaatactgttgcaactc

SEQ ID NO: 313121 - DNA, 120 bp, Artificial Sequence
  ENSG00000134698_53 (sequence is synthesized)
caagaagttttccttgtaaaattaaaggaaagatcttgttattgattaaccattttcttatgccttgctattgacatattcatgctctttctacgtctagtggctgaaaatgtttgcatt

SEQ ID NO: 313122 - DNA, 120 bp, Artificial Sequence
  ENSG00000134698_54 (sequence is synthesized)
tgttcatttgactaatggtgtgatttttgtttctatattattagacctgtaatgttttaaaatgtattttattaaatttggactggatgtatgtctctagcaatacgaggtactttctaa

SEQ ID NO: 313123 - DNA, 120 bp, Artificial Sequence
  ENSG00000134698_55 (sequence is synthesized)
actattaagggaggggttgtatcctcatgttgagataagatgatggtcgtttaaattttgcaattttttttggcctgcagggatattttgtgtttatgtgtccaaaaaaggaataaattg

SEQ ID NO: 313124 - DNA, 120 bp, Artificial Sequence
  ENSG00000134698_56 (sequence is synthesized)
gcattcttgtgccaaaagttgtttttcctgtcaattgtctaataagtatgcagtacactgtaatggcaacatacatggttgctttataaaaacagtttcctcagtatgagaaattttaca

SEQ ID NO: 313125 - DNA, 120 bp, Artificial Sequence
  ENSG00000134698_57 (sequence is synthesized)
aagaacagtggaaaaactttgtgtttttaactcttgggtctccctatttttaaaaattgctatttggtatacaattattatgtgtcaattaaaactaaaataaaacttttaaaaaagaaa

SEQ ID NO: 313126 - DNA, 120 bp, Artificial Sequence
  ENSG00000134698_58 (sequence is synthesized)
agtctctttatattttagtagcatgttaaaaaaaatgagctacaatagaaaacttttttaaggatttaaactttcagagtttaaattgtaagaagcaaataaaattgcatgtgcctctga

SEQ ID NO: 313127 - DNA, 120 bp, Artificial Sequence
  ENSG00000134709_0 (sequence is synthesized)
gtgacgccggacgcgtcgacagcgcgagggttcgcgcgtgagctgcgcgggtcgggcctggtaccgagctttcctgggggctagcaggtcgtggacgccggctcctggaggagagccggt

SEQ ID NO: 313128 - DNA, 120 bp, Artificial Sequence
  ENSG00000134709_1 (sequence is synthesized)
aggagggagtgtgaaggtgtccgcggcgtcgtcgacggcggcgccggccatggaggagacgcagccgccgccgcagcctaagctgcccctgtgcgacagcctcatgatctggctgcagac

SEQ ID NO: 313129 - DNA, 120 bp, Artificial Sequence
  ENSG00000134709_2 (sequence is synthesized)
attcaatactgcctcaccttgtcaagatgtcaaacagctgactagtggagttgccatggcacaagttcttcatcaaattgatgcagcttggtttaacgaatcttggttaagccgaattaa

SEQ ID NO: 313130 - DNA, 120 bp, Artificial Sequence
  ENSG00000134709_3 (sequence is synthesized)
agaggatgttggggacaactggagaataaaggccagtaatgtaaagaaggtccttcaaggaattatgagttattatcatgagtttttggggcagcagatttcagaagcacttatccctga

SEQ ID NO: 313131 - DNA, 120 bp, Artificial Sequence
  ENSG00000134709_4 (sequence is synthesized)
tttaaaccaaataaccgaatgttcagatccagtggagcttgggaggttgctccagcttattttaggttgtgcgatcaactgtgaaaagaagcaagaacatattcaaaatataatgacact

SEQ ID NO: 313132 - DNA, 120 bp, Artificial Sequence
  ENSG00000134709_5 (sequence is synthesized)
ggaagagtctgttcaacatgtggtcatgactgctattcaagagttgatgagtaaagaaatattgagctctcctccaaatgatgctgttggagaattggagcaacagcttaaaagagcctt

SEQ ID NO: 313133 - DNA, 120 bp, Artificial Sequence
  ENSG00000134709_6 (sequence is synthesized)
ggaagaacttcaggaagcactagcagaaaaagaagagctgaggcaaagatgtgaagaattggatatgcaggtgactacacttcaagatgaaaagaattcactggtttctgaaaatgagat

SEQ ID NO: 313134 - DNA, 120 bp, Artificial Sequence
  ENSG00000134709_7 (sequence is synthesized)
gatgaatgaaaaacttgaccagttggatggctcttttgatgatccaaacacagtggttgcaaaaaagtattttcatgcacaattacaactagaacaattacaggaagaaaacttcaggct

SEQ ID NO: 313135 - DNA, 120 bp, Artificial Sequence
  ENSG00000134709_8 (sequence is synthesized)
tgaagctgcaaaagatgattaccgtgttcactgtgaagaacttgaaaagcagctaatcgaattccagcataggaatgatgaattgactagtcttgcagaagaaacaagagccctgaaaga

SEQ ID NO: 313136 - DNA, 120 bp, Artificial Sequence
  ENSG00000134709_9 (sequence is synthesized)
tgaaatagatgttcttagggctacctctgataaagcaaataaactggagtcaacagttgagatatatcgtcagaagctacaagatctgaatgaccttcgcaagcaggtgaaaactttaca

SEQ ID NO: 313137 - DNA, 120 bp, Artificial Sequence
  ENSG00000134709_10 (sequence is synthesized)
ggaaaccaacatgatgtatatgcataatacagtcagcttagaagaagaattaaaaaaagcaaatgcagcacgtacacaattagaaacatacaaaaggcaggttcaagatcttcatgttaa

SEQ ID NO: 313138 - DNA, 120 bp, Artificial Sequence
  ENSG00000134709_11 (sequence is synthesized)
actttcctccgaatccaagagggcagacacactagcgtttgaaatgaagcggcttgaagaaaaacatgaagctttacttaaggaaaaagagagactaattgagcagcgtgatactttgaa

SEQ ID NO: 313139 - DNA, 120 bp, Artificial Sequence
  ENSG00000134709_12 (sequence is synthesized)
agaaacaaatgaagagcttcgatgttcacaagtacaacaggaccacctaaaccaaacagatgcatctgctacaaaaagttatgagaatcttgctgctgagattatgccagtggaatatag

SEQ ID NO: 313140 - DNA, 120 bp, Artificial Sequence
  ENSG00000134709_13 (sequence is synthesized)
ggaggtgtttattcgactgcaacatgaaaataagatgcttcgcttacagcaagaaggctctgagaatgaacgtattgaggaacttcaggagcagctagaacagaaacaccgtaaaatgaa

SEQ ID NO: 313141 - DNA, 120 bp, Artificial Sequence
  ENSG00000134709_14 (sequence is synthesized)
tgaactggaaactgagcagaggctgagcaaagagcgtattagagaattgcagcagcagattgaggacctccagaaatctttacaggaacaaggttccaagtctgaaggcgaaagttccag

SEQ ID NO: 313142 - DNA, 120 bp, Artificial Sequence
  ENSG00000134709_15 (sequence is synthesized)
caaattaaagcagaagttggaagctcatatggaaaaactcacagaggtccatgaagaattacagaagaaacaagaactcattgaagatcttcagccagatataaatcaaaatgtacaaaa

SEQ ID NO: 313143 - DNA, 120 bp, Artificial Sequence
  ENSG00000134709_16 (sequence is synthesized)
gatcaatgaacttgaagctgctcttcagaagaaagatgaagatatgaaagcaatggaggaaagatataaaatgtacttggagaaagccagaaatgtaataaaaactttggatcccaagtt

SEQ ID NO: 313144 - DNA, 120 bp, Artificial Sequence
  ENSG00000134709_17 (sequence is synthesized)
aaatccagcatcagctgaaataatgctactaagaaagcagttggcagagaaagagagaagaattgagattctggagagtgaatgcaaagtagcaaaattccgtgattatgaagaaaaact

SEQ ID NO: 313145 - DNA, 120 bp, Artificial Sequence
  ENSG00000134709_18 (sequence is synthesized)
cattgtttctgcgtggtataataagagtctagcattccagaaactggggatggaatctagacttgtgagcggcggtggtgcctgcagtgacactggtgcgtgcactcctgcgcggtcttt

SEQ ID NO: 313146 - DNA, 120 bp, Artificial Sequence
  ENSG00000134709_19 (sequence is synthesized)
cttagcgcagcaacggcacatcaccaacaccagaagaaatctctctgttaaagtccctgctacaacatctgattaaactgcaaaaaaaacaaaacaaaacaaaaaaaccacataaaatag

SEQ ID NO: 313147 - DNA, 120 bp, Artificial Sequence
  ENSG00000134709_20 (sequence is synthesized)
aagtgtccttaaaatattttgtacctttcaactaactaccagattgaaaaagagtttatgatgcgggatatcaggtattttaaaatcaacatgcatcaaattaattttgccagttgactt

SEQ ID NO: 313148 - DNA, 120 bp, Artificial Sequence
  ENSG00000134709_21 (sequence is synthesized)
taaaaacaaattatagaattagccatctctctgagggagcacatttgaataattggagatgcagttatacacacatttcaaacaaacatttgtcttttgagagtattataatttcaaatt

SEQ ID NO: 313149 - DNA, 120 bp, Artificial Sequence
  ENSG00000134709_22 (sequence is synthesized)
ggccttgtatattttagttaaatgttttcagttgtattagtaacttaattaattttcaatagctattcagtaatacttaatcttagaacattaattggatttgtttaatctttttttgtt

SEQ ID NO: 313150 - DNA, 120 bp, Artificial Sequence
  ENSG00000134709_23 (sequence is synthesized)
ttttgttgatttatatgaaaacagtcttgaggcagggacatggagaactatgcaagggtgatttctttgacttaatatatacaaggctttacttctgtcccctaattcttccattgaatg

SEQ ID NO: 313151 - DNA, 120 bp, Artificial Sequence
  ENSG00000134709_24 (sequence is synthesized)
gtacctctaccttgtcatgtcatggaagatacaacatttggaagatctgacaattggaatgactttggaataataaaattgactaattggaaattttgcatattctgaaaatctaatctc

SEQ ID NO: 313152 - DNA, 120 bp, Artificial Sequence
  ENSG00000134709_25 (sequence is synthesized)
atagttctaatttgtacctatggcaaataagggcttctggacatcatgtttaaaatgttaagcataagaaataaactgacatttgtaataggtgactttctgatggaaagcaagctatat

SEQ ID NO: 313153 - DNA, 120 bp, Artificial Sequence
  ENSG00000134709_26 (sequence is synthesized)
atatatactttttgtgaaatgtctatatactttttaaggtaattaatgaagatttcagttattgcttttaagcataaagttgtatttagcttctgctgaaaaattgtatcatataataat

SEQ ID NO: 313154 - DNA, 120 bp, Artificial Sequence
  ENSG00000134709_27 (sequence is synthesized)
ctgctgaaaaattgtatcatataataattttgcttcattgaaaagggatgttgcagtgatgaaacaaggtgggatcagtttgattttgtttacttattaaggagtttatcttgggctcag

SEQ ID NO: 313155 - DNA, 120 bp, Artificial Sequence
  ENSG00000134709_28 (sequence is synthesized)
tttgtggtattcagttcgtttctgcccaaagctcttattttcagaggtgttacttttgaacttttggggtcatttttaaaagttagcacttttgaattttagttgtgttaaatatgtgct

SEQ ID NO: 313156 - DNA, 120 bp, Artificial Sequence
  ENSG00000134709_29 (sequence is synthesized)
gtcgtatatcatagccatgagccatatatgacaatttaaatttaattaattataaactcagtctcttggttgcaccagccacatttcagatgctcaatagccacatgtggctagtgggta

SEQ ID NO: 313157 - DNA, 120 bp, Artificial Sequence
  ENSG00000134709_30 (sequence is synthesized)
ccatattggacagggcagctatagaatatttccatcattgcagaaagttctattggatagtaccataatctttttatagtaacttggaaatactatttgatattagatgttagaccacaa

SEQ ID NO: 313158 - DNA, 120 bp, Artificial Sequence
  ENSG00000134709_31 (sequence is synthesized)
aaagaagaaaaatgttaggactatttcagatataaaaaggaactgaattgtgacataattagcatcttacattccatacagttgaataccttatgctgtgacaaccatagttaatcattt

SEQ ID NO: 313159 - DNA, 120 bp, Artificial Sequence
  ENSG00000134709_32 (sequence is synthesized)
cagtgctgttcaacatacatacctatcagcagtgtgtttagaccaggggtctgcaaactttctgtgaatggacaaagagtaaatactttagtaaatgtcttaggctttgtggcctacatg

SEQ ID NO: 313160 - DNA, 120 bp, Artificial Sequence
  ENSG00000134709_33 (sequence is synthesized)
atctttgttgcaagtactcaactctgccattatagagttaaagcagccatacacaatatataaacaaaatgggcatagttgtatttcagtaaaactttatttacaaagacaggcggtagg

SEQ ID NO: 313161 - DNA, 120 bp, Artificial Sequence
  ENSG00000134709_34 (sequence is synthesized)
ccagatttggcttgcatgctgtagagctgtggtctaaattttattcatagactttctttgcaaatacagtgtgagtattgttccatttacagtattattattttttagatacctggtttt

SEQ ID NO: 313162 - DNA, 120 bp, Artificial Sequence
  ENSG00000134709_35 (sequence is synthesized)
tagattcttgcctggtaactttttactgaaaatacaagaatttcgtactgcatttgcatctccgagattagggagcacctgtcaggatatgttgttctatcagggttacttctgttgact

SEQ ID NO: 313163 - DNA, 120 bp, Artificial Sequence
  ENSG00000134709_36 (sequence is synthesized)
acctcttagattttgatacagttatattgttgagtttcattttcatatattcttgtagtgtctgcttgcctgtgacttctggtaaaataaaataagcctttgaaaatattttagcatggt

SEQ ID NO: 313164 - DNA, 120 bp, Artificial Sequence
  ENSG00000134709_37 (sequence is synthesized)
atttaacattttctaaatattatggcattttgacatattttagtcagcgaagacatctgcccctttggtgtttctacttgcttatgattgagattttacaagcccttcaaactccgtttt

SEQ ID NO: 313165 - DNA, 120 bp, Artificial Sequence
  ENSG00000134709_38 (sequence is synthesized)
aaaggaatttattgtaaaacattaactttaataaattagtgttttcacagatcagatcattatacttggaacttctaaatcatgcaatttctgaataaggacataaggctagattcattt

SEQ ID NO: 313166 - DNA, 120 bp, Artificial Sequence
  ENSG00000134709_39 (sequence is synthesized)
atttttcttaatagagaaaaaggaaatttctgatttatcacttttctagttgataagtaggattcaaaacgtttgatatgtaagtatttatataagactaatgtaatttaaagttctgta

SEQ ID NO: 313167 - DNA, 120 bp, Artificial Sequence
  ENSG00000134709_40 (sequence is synthesized)
tgtgattaatcatacagaaattcaggaactgatcagaagtgagattcttttccacatctggttaatgtagtgagttgacaccctgtgggtggtaaagcattataaacatttcatcttgaa

SEQ ID NO: 313168 - DNA, 120 bp, Artificial Sequence
  ENSG00000134709_41 (sequence is synthesized)
ccatgatttatacacatctgtgttataagggaggcttgagtacatataccaatgaagagatattcagcatttgtctatttgataaggaattaaatgtcctagtgattataaagtaaaacc

SEQ ID NO: 313169 - DNA, 120 bp, Artificial Sequence
  ENSG00000134709_42 (sequence is synthesized)
acagaccaatttgcaaatgatcttcaatgttaagcacttgctctaagattaaaattccttttctttttaaggttaagggtgtgtacgtatggcagtgatgtctatgttgagattaactta

SEQ ID NO: 313170 - DNA, 120 bp, Artificial Sequence
  ENSG00000134709_43 (sequence is synthesized)
tgtattgaggaaaatttgaagtttattttttcgatgaataaggctgtcaaatgatttagtatagattaatgacatcttttttagaaatattaaagtgagtattcctcattatgtcatcat

SEQ ID NO: 313171 - DNA, 120 bp, Artificial Sequence
  ENSG00000134709_44 (sequence is synthesized)
ttctgataattagagtgctaatttgaatgttagataatgtttccacatctatacctatttctttctagggcacttctgaccctggggcttggggatggcctttaggccacagtagtgtct

SEQ ID NO: 313172 - DNA, 120 bp, Artificial Sequence
  ENSG00000134709_45 (sequence is synthesized)
gtgttaagttcactaaatgtgtatttaatgagaaacattcctatgtaaaaatgtgtgtatgtgaacgtatgcatacatttttattgtgcacctgtacattgtgaagaagtagtttggaaa

SEQ ID NO: 313173 - DNA, 120 bp, Artificial Sequence
  ENSG00000134709_46 (sequence is synthesized)
tttgtaaagcacaaaccataaaagagtgtggagttattaaatgatgtagcacaaatgtaatgtttagcttataaaaggtcctttctattttctatggcaaagactttgacacttgaaaaa

SEQ ID NO: 313174 - DNA, 120 bp, Artificial Sequence
  ENSG00000134709_47 (sequence is synthesized)
tatggcaaagactttgacacttgaaaaataaaaccaatatttgatttatttttgtaagtatttaggatattattttaaataaatgattgtccattatcaatataatagttgtgaaatgat

SEQ ID NO: 313175 - DNA, 120 bp, Artificial Sequence
  ENSG00000134709_48 (sequence is synthesized)
gggcatgcatttgtgcttgattcagtttacatttgactacattgtgtgcctcacaagtgcaatctttagattctctcaataatgaacatagtgaagaaattattctatctttagtaattt

SEQ ID NO: 313176 - DNA, 120 bp, Artificial Sequence
  ENSG00000134709_49 (sequence is synthesized)
aattaaagcagaagttggaagctcatatgtaagtaaaactgatatttcttttcaaatatgagaagggaggggttgtaaaagcctctaaagttaatctccttttcggattttgtctagaaa

SEQ ID NO: 313177 - DNA, 120 bp, Artificial Sequence
  ENSG00000134709_50 (sequence is synthesized)
agcaaatatcctgatgctaattgatacacctgctgcaaaagtgaaaagcatgctaaagattcagcctccctactacccccgttccaaactcctacatctttccattgttaatatcatttg

SEQ ID NO: 313178 - DNA, 120 bp, Artificial Sequence
  ENSG00000134709_51 (sequence is synthesized)
aaaagtttaaaaaaacagattaactatcacaactagattatatgggatgttaaacctataaaatattttactttcttaggaagcaagggtggcaagggaaataatttaacctttttggca

SEQ ID NO: 313179 - DNA, 120 bp, Artificial Sequence
  ENSG00000134709_52 (sequence is synthesized)
cctgccgtgtgcctgactgtttacatcctcatgacaacccctgcagtcatgcagatagtattcccatttcacagatgaggaaccaagggtcagaaagcaacttgcccaaggtccacaaat

SEQ ID NO: 313180 - DNA, 120 bp, Artificial Sequence
  ENSG00000134709_53 (sequence is synthesized)
atgatctgggtgagtgcgaggaggcgagagggcgagggggccagggggccgaggcgaggagcctggggcgcccggttctcccaggtgagctggggctacctgcacagggtcccggcgcac

SEQ ID NO: 313181 - DNA, 120 bp, Artificial Sequence
  ENSG00000134716_0 (sequence is synthesized)
gcagaagagcaggaggacgtctgagccatgctcgcggcgatgggctctctggcggctgccctctgggcagtggtccatcctcggactctcctactgggcactgtcgcctttctgctcgct

SEQ ID NO: 313182 - DNA, 120 bp, Artificial Sequence
  ENSG00000134716_1 (sequence is synthesized)
gctgactttctcaaaagacggcgcccaaagaactacccgccggggccctggcgcctgcccttccttggcaacttcttccttgtggacttcgagcagtcgcacctggaggttcagctgttt

SEQ ID NO: 313183 - DNA, 120 bp, Artificial Sequence
  ENSG00000134716_2 (sequence is synthesized)
gtgaagaaatatgggaacctttttagcttggagcttggtgacatatctgcagttcttattactggcttgcccttaatcaaagaagcccttatccacatggaccaaaactttgggaaccgc

SEQ ID NO: 313184 - DNA, 120 bp, Artificial Sequence
  ENSG00000134716_3 (sequence is synthesized)
cccgtgacccctatgcgagaacatatctttaagaaaaatggattgattatgtcaagtggccaggcatggaaggagcaaagaaggttcactctgacagcactaaggaactttggtttagga

SEQ ID NO: 313185 - DNA, 120 bp, Artificial Sequence
  ENSG00000134716_4 (sequence is synthesized)
aagaagagcttagaggaacgcattcaggaggaggcccaacacctcactgaagcaataaaagaggagaacggacagccttttgaccctcatttcaagatcaacaatgcagtttccaatatc

SEQ ID NO: 313186 - DNA, 120 bp, Artificial Sequence
  ENSG00000134716_5 (sequence is synthesized)
atttgctccatcaccttcggagaacgctttgagtaccaggatagttggtttcagcagctgctgaagttactagatgaagtcacatacttggaggcttcaaagacatgccagctctacaat

SEQ ID NO: 313187 - DNA, 120 bp, Artificial Sequence
  ENSG00000134716_6 (sequence is synthesized)
gtctttccatggataatgaaattcctgcctggaccccaccaaactctcttcagcaactggaaaaaactgaaattgtttgtttctcatatgattgacaaacacagaaaggattggaatcct

SEQ ID NO: 313188 - DNA, 120 bp, Artificial Sequence
  ENSG00000134716_7 (sequence is synthesized)
aagaaaacctcatctgcagcaccctggacctcttctttgccggaaccgagacaacttccacaactctgcgatgggctctgctttatatggccctctacccagaaatccaagaaaaagtac

SEQ ID NO: 313189 - DNA, 120 bp, Artificial Sequence
  ENSG00000134716_8 (sequence is synthesized)
aagctgagattgacagagtgattggccaggggcagcagccgagcacagccgcccgggagtccatgccctacaccaatgctgtcatccatgaggtgcagagaatgggcaacatcatccccc

SEQ ID NO: 313190 - DNA, 120 bp, Artificial Sequence
  ENSG00000134716_9 (sequence is synthesized)
tgaacgttcccagggaagtgacagttgataccactttggctgggtaccacctgcccaagggtaccatgatcctgaccaatttgacggcgctgcacagggaccccacagagtgggccaccc

SEQ ID NO: 313191 - DNA, 120 bp, Artificial Sequence
  ENSG00000134716_10 (sequence is synthesized)
ctgacacattcaatccggaccattttctggagaatggacagtttaagaaaagggaagcctttatgcctttctcaataggaaagcgggcatgcctcggagaacagttggccaggactgagc

SEQ ID NO: 313192 - DNA, 120 bp, Artificial Sequence
  ENSG00000134716_11 (sequence is synthesized)
tgtttattttcttcacttcccttatgcaaaaatttaccttcaggcccccaaacaatgagaagctgagcctgaagtttagaatgggtatcaccatttccccagtcagtcaccgcctctgcg

SEQ ID NO: 313193 - DNA, 120 bp, Artificial Sequence
  ENSG00000134716_12 (sequence is synthesized)
ctgttcctcaggtgtaatattgttaagaaagaaaggggcaaggaaagtaagaagacatggcacgtgttctgaaaccactggtgtctgctcagatgtgttgggacaaaatgaaagtgactt

SEQ ID NO: 313194 - DNA, 120 bp, Artificial Sequence
  ENSG00000134716_13 (sequence is synthesized)
tcaagaaagatcagaggaatttgactcagagaaaactagatccaaatcccagctctactgtctcgtccgaattagccttgggaaaatcatttatatgctaaataatttacctttttatct

SEQ ID NO: 313195 - DNA, 120 bp, Artificial Sequence
  ENSG00000134716_14 (sequence is synthesized)
aggagatgaaaagaggataatgtttccttccataaagaaagttcttgtaagaatcaaaagaaatggtgagctttaagtggtttgtaaaccataaaacacatcataaaagttctatctata

SEQ ID NO: 313196 - DNA, 120 bp, Artificial Sequence
  ENSG00000134716_15 (sequence is synthesized)
atttaatagaagatgaaccagcaaaatatataggaagttgctggcagagaattaggacgaaaatctggagacagtggtatcctgagcaccactggaaggcagtatttcaagaaagaagtg

SEQ ID NO: 313197 - DNA, 120 bp, Artificial Sequence
  ENSG00000134716_16 (sequence is synthesized)
tctactgctgctgcaagtaagacgaggtcaaaaggtatccggaccaattcagtgggtgagcaggccatagtcagatattaaaaggtgttgaggagtgctctggaattgaagaaattgaaa

SEQ ID NO: 313198 - DNA, 120 bp, Artificial Sequence
  ENSG00000134716_17 (sequence is synthesized)
ggagtatggcattacctgtgttataaaacaaatgatggtctgtcaaacacaccaaaatttttttttctttgcttgtactcttctttctgtatggaactttcactcctccttgatctcttg

SEQ ID NO: 313199 - DNA, 120 bp, Artificial Sequence
  ENSG00000134716_18 (sequence is synthesized)
attccttacatcatcttttaatgtccaggttagataggacctctcctataaagcctttcttagccttagcctctttaagagtatgggcattgtcttaaccattagtgcattcctagtgtt

SEQ ID NO: 313200 - DNA, 120 bp, Artificial Sequence
  ENSG00000134716_19 (sequence is synthesized)
tagcataacataaatacttaactttacttatgtaactaataatcaaagcatgggctttggaataaggcagacctgaaattgaatacctgtttagttgcttacttactgtgagaccctgta

SEQ ID NO: 313201 - DNA, 120 bp, Artificial Sequence
  ENSG00000134716_20 (sequence is synthesized)
aaatgcattttatcctttatcccttgttcctcagttttttcattagtaaaatgtgtggggtggtaataattgtacctatcccagagagtttctatgagtactaaattatataatgcacaa

SEQ ID NO: 313202 - DNA, 120 bp, Artificial Sequence
  ENSG00000134716_21 (sequence is synthesized)
caaaatgcatattaaagtgcctgccattgcaagcaatcagtaaatattagccattatatccattgctttgggattatttctctgggcagttttcaagtgccttaatgatcttctcctgtc

SEQ ID NO: 313203 - DNA, 120 bp, Artificial Sequence
  ENSG00000134716_22 (sequence is synthesized)
cttcatctgatacacattcccatatcatttgctggatattcatattatggaatcagaatactgtaatgttgactttctttttcccaggattgattatgtcaagtggccaggcatggaagg

SEQ ID NO: 313204 - DNA, 120 bp, Artificial Sequence
  ENSG00000134716_23 (sequence is synthesized)
gttgataccactttggctgggtaccacctgcccaagaacatctcaccagactagggatctgccaaactttgggaaattctgcttcatgaacctggggttctagaatgctaaaatgtgaaa

SEQ ID NO: 313205 - DNA, 120 bp, Artificial Sequence
  ENSG00000134716_24 (sequence is synthesized)
ggacatttaagaccacctgggacaacatcatattaatgctggtgtttttaacataatatccccacagggtaccatgatcctgaccaatttgacggcgctgcacagggaccccacagagtg

SEQ ID NO: 313206 - DNA, 120 bp, Artificial Sequence
  ENSG00000134717_0 (sequence is synthesized)
gccgccgtcgtctttctctgtctcggctgaggcagccatctttctcttgccgcgtgctggtgttggaggaccctccctgcttcagatttaccaacagcatgaatcaagaaaagttagcca

SEQ ID NO: 313207 - DNA, 120 bp, Artificial Sequence
  ENSG00000134717_1 (sequence is synthesized)
aacttcaggctcaggtccggatagggggcaagggtacagctcgcagaaagaagaaggtggtacatagaacagccacagctgatgacaaaaagcttcagagttctctaaaaaaactggctg

SEQ ID NO: 313208 - DNA, 120 bp, Artificial Sequence
  ENSG00000134717_2 (sequence is synthesized)
tgaataatatagctggtattgaagaggtgaacatgattaaagatgatgggacagttattcatttcaacaatcccaaagtccaagcttccctttctgctaatacctttgcaattactggtc

SEQ ID NO: 313209 - DNA, 120 bp, Artificial Sequence
  ENSG00000134717_3 (sequence is synthesized)
atgcagaagccaaaccaatcacagaaatgcttcctggaatattaagtcagcttggtgctgacagtttaacaagccttaggaagttagctgaacagttcccacggcaagtcttggacagta

SEQ ID NO: 313210 - DNA, 120 bp, Artificial Sequence
  ENSG00000134717_4 (sequence is synthesized)
aagcaccaaaaccagaagacattgatgaggaagatgatgatgttccagatcttgtagaaaattttgatgaggcatcaaagaatgaagctaactaaaagtttggtttttggaagctggcat

SEQ ID NO: 313211 - DNA, 120 bp, Artificial Sequence
  ENSG00000134717_5 (sequence is synthesized)
ggactagatttaacaaatcagctatgtggttccaaagttttacagacatggagaacatcacctgttactagttcagtaatataaatattttgtatattaataatgctgtttgttcagcat

SEQ ID NO: 313212 - DNA, 120 bp, Artificial Sequence
  ENSG00000134717_6 (sequence is synthesized)
ttttcggtcatttgattttgcattttgcacttcctcccaggatatttttttggtcaaaatatgaagtattggtgcagtttgagggtgttttggtttttgattcctggtttttttgttttt

SEQ ID NO: 313213 - DNA, 120 bp, Artificial Sequence
  ENSG00000134717_7 (sequence is synthesized)
tgtttggggtatttttggtgtatgtatgtttatgtatgtgtgtgggtatgtgtgtatacagtggagagcaaattggaaaacagttctatttatcctcctccctccccagtagaaataaaa

SEQ ID NO: 313214 - DNA, 120 bp, Artificial Sequence
  ENSG00000134717_8 (sequence is synthesized)
aaaatctttacatttgttacttttcttttccccccgtaagacacagaattaatggaaagtgagtatcttggatttcaaatctgaagagatttttaccattagtggtttgattttaatttg

SEQ ID NO: 313215 - DNA, 120 bp, Artificial Sequence
  ENSG00000134717_9 (sequence is synthesized)
cttggttaactatcatatttttcatacacttctctggatttaaaatatcttgaggtattttgccactggcttcatgctggagtaatgggtaacatatctttggtatggttgccttagatt

SEQ ID NO: 313216 - DNA, 120 bp, Artificial Sequence
  ENSG00000134717_10 (sequence is synthesized)
aacttacctagtcagacccagaagaacttcttttactagcttgcttcctaaatgccttttttcctctccttttggtctccaaatggcctggtcagcttttggtaatattcttcctcatct

SEQ ID NO: 313217 - DNA, 120 bp, Artificial Sequence
  ENSG00000134717_11 (sequence is synthesized)
tccacctagcttgagaaggatgttctccatatagagtttagcgagtgcctaatccctccttttgtaagattttgttccctcagcttgaggaacaacttcatcttcaactttttatttctc

SEQ ID NO: 313218 - DNA, 120 bp, Artificial Sequence
  ENSG00000134717_12 (sequence is synthesized)
cctgatgttacagtttggtagatttcaaactggaatagctagcatgtgcttgctaaataattttatgccagccttatcctgtatcctagctgttcttaacagcaggtacaaaaatgcctg

SEQ ID NO: 313219 - DNA, 120 bp, Artificial Sequence
  ENSG00000134717_13 (sequence is synthesized)
tttttcagcaaggttgaaattgggaatgtccttttgaatcagaagaaaataggccatagactcatctcccagcacaaatgggcattctatgaaatggtactggccctaggaggatttcct

SEQ ID NO: 313220 - DNA, 120 bp, Artificial Sequence
  ENSG00000134717_14 (sequence is synthesized)
caaccactctcctactcttggccttgaacctacctctgggttggatcttactattgtagctgctcactataccctcctgcatgcttagaataatgctttgaggggagcactggtaaaaca

SEQ ID NO: 313221 - DNA, 120 bp, Artificial Sequence
  ENSG00000134717_15 (sequence is synthesized)
cagtatttatttttttacctcctttaagaggacttggaggtaagttgcattcattcactcaagtttccctcttgctgtctaatagaagcttactttttgctatatcagcatttgttacag

SEQ ID NO: 313222 - DNA, 120 bp, Artificial Sequence
  ENSG00000134717_16 (sequence is synthesized)
ccaatatttaaggacaaaatttagaaaatatatcatttcctggcccatcatcaaactaatacagcttaaccttgcagctaccaacttttgtgtcaagctagatatctttatttgatatct

SEQ ID NO: 313223 - DNA, 120 bp, Artificial Sequence
  ENSG00000134717_17 (sequence is synthesized)
aaggtgcaagaccaacaatatattaagagatctgtagacatgaaggcaaagctcttgtattttttttcatccaaacacctcaatttattttataaattcgttcatttttcctgttatgtt

SEQ ID NO: 313224 - DNA, 120 bp, Artificial Sequence
  ENSG00000134717_18 (sequence is synthesized)
ccttttatattattcctctaccctccacctgtaaatgaatgttagtgcagtaattgtttgaaataatgcctcatccagtgttaggtcagtagctccacagtctacacagtccagaattct

SEQ ID NO: 313225 - DNA, 120 bp, Artificial Sequence
  ENSG00000134717_19 (sequence is synthesized)
ttctctaattgtcccaaagggggacattgtggaggcagagttagggggaaccacttcaagtggttagggacagataaataataggcagtatagcacatgaaagaaaacacacacttggaa

SEQ ID NO: 313226 - DNA, 120 bp, Artificial Sequence
  ENSG00000134717_20 (sequence is synthesized)
gccaggagacttgtgtcctagtcaaaactctggcattatgtgaccttggacaggtcatctaactactctgaaatttatcatcagtcaaataagattttattctgttttgttttgtttgag

SEQ ID NO: 313227 - DNA, 120 bp, Artificial Sequence
  ENSG00000134717_21 (sequence is synthesized)
tcagtcaaataagattttattctgttttgttttgtttgagatggggatttgctcttgttgtccaggccgaactgcaatgttgtggtctcggctgactgcaacctccacctcccagattca

SEQ ID NO: 313228 - DNA, 64 bp, Artificial Sequence
  ENSG00000134717_22 (sequence is synthesized)
agatggggttttaccatgttgcccaggccggtcttgaattcctgtcctcaggtgattcattaat

SEQ ID NO: 313229 - DNA, 120 bp, Artificial Sequence
  ENSG00000134717_23 (sequence is synthesized)
ggcgtgagccactgcacccagcccaaatgagatgtttctaaatctaaagtttcttctgcttctgcatttctgtgaatctcatttgaaatttttcagggaagggattttatcatttgttca

SEQ ID NO: 313230 - DNA, 120 bp, Artificial Sequence
  ENSG00000134717_24 (sequence is synthesized)
gagatgtctttatttttattaatacccataaaacgtttgtgtatttgcttcttcctctttctccttttgatcacattttagctacttatctagaggatctctggccaagtattccctttt

SEQ ID NO: 313231 - DNA, 120 bp, Artificial Sequence
  ENSG00000134717_25 (sequence is synthesized)
attgtattgataacaattcttaatggctggcctctcttgtgtacaatgagccaatattcttttttgttctatatttttgtatcttcccctttcctgaacaaagcatatttagagtctcaa

SEQ ID NO: 313232 - DNA, 120 bp, Artificial Sequence
  ENSG00000134717_26 (sequence is synthesized)
agaaatcctctccacaaagacatgttcctccctctggtgtgggtagacatagggtaagagtttggatgaaacttttgtaaattgtagtgttcttggcataaatatgaattaaatcttttt

SEQ ID NO: 313233 - DNA, 120 bp, Artificial Sequence
  ENSG00000134717_27 (sequence is synthesized)
ttatatttaaataactagttaaatatgtgcttcttactaagattaggtattttttgccaagataacaatgataaaaacattttgggggggaaattgaccttaaaattttgggataattca

SEQ ID NO: 313234 - DNA, 120 bp, Artificial Sequence
  ENSG00000134717_28 (sequence is synthesized)
agaaatgtctgcagaaaattgatttatgatcttaatttttgtgttagtcctttgaggtttttttgtttttgtttttgttctttgtaaagcgccttatctgttttggacaagtccaaagta

SEQ ID NO: 313235 - DNA, 120 bp, Artificial Sequence
  ENSG00000134717_29 (sequence is synthesized)
aatggttgggctcttatatctgttttacccttatttttcccattaagtaatggtttaagaatatatcaagcaccttaatttgttgttaagtagctagtgcttacaggattccattaaatt

SEQ ID NO: 313236 - DNA, 120 bp, Artificial Sequence
  ENSG00000134717_30 (sequence is synthesized)
cactttaataagcctatgaagttcttatgaaaaacccatatctgcgatatgtttgatttgtttctttgttttaattcagtgtttaaccctaggtatgctacatacccataaataagatac

SEQ ID NO: 313237 - DNA, 120 bp, Artificial Sequence
  ENSG00000134717_31 (sequence is synthesized)
catggtaagagatagtatgttatagtgggaaaagcacaagtttttagatagagatcaattctgctatctacccttacattgtaacctttctgacagggctgctgcggtgcacaacttcgg

SEQ ID NO: 313238 - DNA, 120 bp, Artificial Sequence
  ENSG00000134717_32 (sequence is synthesized)
gagccatcacttatttttgttgtgttccagaaggtgtcattttcatagactgcagtgtgaatagtgtcctccattaataatgcaatgatggccttgctctctgagcctcagttttatcta

SEQ ID NO: 313239 - DNA, 120 bp, Artificial Sequence
  ENSG00000134717_33 (sequence is synthesized)
taaaatggtacctagaagagtcatgatttcttagaatcccctaaattattaaggtgaaggtagaagatgattaaagcgtgttatctcctaagctatggcttagattttccgaagctcatg

SEQ ID NO: 313240 - DNA, 120 bp, Artificial Sequence
  ENSG00000134717_34 (sequence is synthesized)
gttctaggcacagaaagtctccattctacactgcatttcaacctgtgttgaacaacactccagttcagcctgtattgctatgccacatagagtttgcctgaattattatagctttcttaa

SEQ ID NO: 313241 - DNA, 120 bp, Artificial Sequence
  ENSG00000134717_35 (sequence is synthesized)
tagttttgtttatgatccactctctccagcccattacacaggagccagctacctaaatttcctatctgagcatgtccttacatttacttccagcatactattcatttgccatagtagagt

SEQ ID NO: 313242 - DNA, 120 bp, Artificial Sequence
  ENSG00000134717_36 (sequence is synthesized)
attaagattatttgattttctttttactttctcgtagtgcccaatgtgtagtttactcaacatcataatatgtaatgtttttcaactacttactgttgaatacaaagttatctcatttaa

SEQ ID NO: 313243 - DNA, 120 bp, Artificial Sequence
  ENSG00000134717_37 (sequence is synthesized)
aaaaccagaagacattgatgaggaagatgatgatgttccaggtaagtgacatttccttagacttaagattttaagcatcctgtttatctcctttcagtcattgcatagataacttttagg

SEQ ID NO: 313244 - DNA, 120 bp, Artificial Sequence
  ENSG00000134717_38 (sequence is synthesized)
tttgtgttgattgtaagctcatgaatttaaattgattcacaataatgtggataggatctaatgaaaaacaacgtaagcacccaccttagaacctagaatcagaaattgtcacacaaagct

SEQ ID NO: 313245 - DNA, 120 bp, Artificial Sequence
  ENSG00000134717_39 (sequence is synthesized)
ctgctgcctggatttattaaattgaaatcactgtgattataaatttgcatagctattgttataacatttctgtatgaattataattgacatatgaaaatgctattcacctcagtaatttg

SEQ ID NO: 313246 - DNA, 120 bp, Artificial Sequence
  ENSG00000134717_40 (sequence is synthesized)
catagacaaaagatgaacatttccttaggattactgtcctaagcaaataattaaatcattgttagtaaaatgccaccagttcatttctgcctccttatgttttcaggctaattctggttg

SEQ ID NO: 313247 - DNA, 120 bp, Artificial Sequence
  ENSG00000134717_41 (sequence is synthesized)
gatctgctcccgccgccgccgccgccgccgtcgtctttctctgtctcggctgaggcagccatctttctcttgccgcgtgctggtgttggaggaccctccctgcttcagggtacagctcgc

SEQ ID NO: 313248 - DNA, 120 bp, Artificial Sequence
  ENSG00000134717_42 (sequence is synthesized)
tatgatcactttgcaagttgttaaattgtgtgggtacatgcacaaataattgtctggacctttcagatgtaaaatatcagcttagaaaaatctttgatattgtcactctgatgtctttga

SEQ ID NO: 313249 - DNA, 120 bp, Artificial Sequence
  ENSG00000134717_43 (sequence is synthesized)
aggactgtggcactttgatttttgtatgaaattaaatgatggtcaaaaaaataattttagtagacagttaaggattttcatcatacttttcaagctcaagatatttgcgtatatggcaaa

SEQ ID NO: 313250 - DNA, 120 bp, Artificial Sequence
  ENSG00000134717_44 (sequence is synthesized)
atggcaaaattatgtaagtgttcttgaatattaatataaaatatgtctctaataatgtagaaataaaccccaacatttcctcagatgagatagaccttttttttttttttttgagatgga

SEQ ID NO: 313251 - DNA, 120 bp, Artificial Sequence
  ENSG00000134717_45 (sequence is synthesized)
ggggcaaggttttcctcacaaattcttacctgttcttccatgttggtgaatatgaatatcagctttcttattccctgtactttttaaagcctaaggaagaactagttgtgagcaactgaa

SEQ ID NO: 313252 - DNA, 120 bp, Artificial Sequence
  ENSG00000134744_0 (sequence is synthesized)
agttcgcggcgcggcggacatggcggtggagtcctgagctagtcgtgtcccggcctccagcggcggcagcggcgacggcggcggcagcaggaggcggagggagagcaggagccactgaga

SEQ ID NO: 313253 - DNA, 120 bp, Artificial Sequence
  ENSG00000134744_1 (sequence is synthesized)
tgaggaggcgtcgcgcgcgcctgtagctcgcgggcctcgcagtttgcttgcctaaactggacttgaagcaatttaaactactggagatctgccattttataatatcacaattggaaagaa

SEQ ID NO: 313254 - DNA, 120 bp, Artificial Sequence
  ENSG00000134744_2 (sequence is synthesized)
acagattttcaaataatggaagagtctaaaaccttaaaaagtgaaaatcatgaaccaaagaagaatgttatttgtgaagaaagcaaagcagttcaagttataggtaatcaaacattgaaa

SEQ ID NO: 313255 - DNA, 120 bp, Artificial Sequence
  ENSG00000134744_3 (sequence is synthesized)
gctagaaatgataaatccgtaaaagaaattgagaacagctctccaaataggaatagtagtaaaaaaaataagcaaaatgatatttgtatagaaaaaacagaagttaaatcatgtaaagta

SEQ ID NO: 313256 - DNA, 120 bp, Artificial Sequence
  ENSG00000134744_4 (sequence is synthesized)
aatgctgccaaccttccaggtcctaaagatttggggttagtccttcgagatcaaagtcattgcaaagcaaaaaaatttcctaattcaccggtgaaagccgaaaaggcaaccatttcacag

SEQ ID NO: 313257 - DNA, 120 bp, Artificial Sequence
  ENSG00000134744_5 (sequence is synthesized)
gcaaaatcagaaaaggcaaccagtttacaggcaaaagcagaaaaatcaccaaagtcacctaattcagtgaaagcagaaaaagcatccagttatcagatgaagtcagaaaaagtaccaagt

SEQ ID NO: 313258 - DNA, 120 bp, Artificial Sequence
  ENSG00000134744_6 (sequence is synthesized)
tcaccagcagaagcagaaaagggacccagtttactgttgaaagacatgagacagaagacagaattacaacagattggaaaaaaaattccaagctcctttacttctgtggacaaagtgaat

SEQ ID NO: 313259 - DNA, 120 bp, Artificial Sequence
  ENSG00000134744_7 (sequence is synthesized)
attgaagctgtagggggagaaaaatgtgctctgcaaaactcaccacgatctcagaagcaacagacatgtacagataatactggtgattctgatgatagtgcttcaggaattgaagacgta

SEQ ID NO: 313260 - DNA, 120 bp, Artificial Sequence
  ENSG00000134744_8 (sequence is synthesized)
tcggacgatttaagtaaaatgaagaatgatgaatctaataaagaaaattcttcagagatggactacttagaaaatgccactgtgatagatgaatctgcattgacacctgagcagaggctg

SEQ ID NO: 313261 - DNA, 120 bp, Artificial Sequence
  ENSG00000134744_9 (sequence is synthesized)
gggttgaaacaagcagaagaacgcttagaaagagatcacatctttcgacttgaaaaacgatcaccagaatataccaattgtcggtatctatgcaaactttgcttaattcacattgaaaat

SEQ ID NO: 313262 - DNA, 120 bp, Artificial Sequence
  ENSG00000134744_10 (sequence is synthesized)
atccagggggctcataaacatataaaggagaaacgacataagaaaaatattttggaaaaacaagaagaaagtgagcttcgttctctgccacctccttcccctgcccacttggctgcttta

SEQ ID NO: 313263 - DNA, 120 bp, Artificial Sequence
  ENSG00000134744_11 (sequence is synthesized)
agtgttgcagtcattgaattagcaaaagaacatggaataacagatgatgacctcagagtccgtcaggaaattgtggaggaaatgtcaaaggttataacgacatttttaccagaatgttca

SEQ ID NO: 313264 - DNA, 120 bp, Artificial Sequence
  ENSG00000134744_12 (sequence is synthesized)
cttaggttgtatggctcatctctgactagatttgctctgaaaagtagtgatgttaatatagatataaaatttcctcccaagatgaatcatccagatcttctgataaaagtacttgggatt

SEQ ID NO: 313265 - DNA, 120 bp, Artificial Sequence
  ENSG00000134744_13 (sequence is synthesized)
ttaaagaaaaatgtattatatgtagatgtggaatctgattttcacgctaaagttcctgttgtggtgtgcagagatcgaaaaagtggtttactttgtagagtgagtgcaggaaacgatatg

SEQ ID NO: 313266 - DNA, 120 bp, Artificial Sequence
  ENSG00000134744_14 (sequence is synthesized)
gcatgtctcactactgatttacttactgcccttggcaaaatagaacctgtctttattcccttggtgttagcctttcgctactgggctaagttgtgctatattgactcccaaactgatggt

SEQ ID NO: 313267 - DNA, 120 bp, Artificial Sequence
  ENSG00000134744_15 (sequence is synthesized)
ggaatcccttcttactgttttgctttaatggtgatgttttttctacaacagagaaaaccccctcttcttccttgcttacttggaagttggattgaaggctttgacccaaaaagaatggat

SEQ ID NO: 313268 - DNA, 120 bp, Artificial Sequence
  ENSG00000134744_16 (sequence is synthesized)
gactttcagctgaagggcatagtagaagagaagtttgtgaagtgggaatgtaattcaagtagtgcaactgagaaaaactcaattgctgaggaaaacaaagctaaggcagaccaaccaaaa

SEQ ID NO: 313269 - DNA, 120 bp, Artificial Sequence
  ENSG00000134744_17 (sequence is synthesized)
gatgataccaagaagacagaaacagacaaccaaagtaatgccatgaaggaaaaacatggcaaatctcctttagcattggaaacaccaaatcgggtatccttgggacagttatggttagag

SEQ ID NO: 313270 - DNA, 120 bp, Artificial Sequence
  ENSG00000134744_18 (sequence is synthesized)
ctgcttaaattctacacactggattttgctttggaggaatatgtcatatgtgtacggatacaagatattttaacaagagaaaataaaaactggcctaaaaggcgaatagccattgaagat

SEQ ID NO: 313271 - DNA, 120 bp, Artificial Sequence
  ENSG00000134744_19 (sequence is synthesized)
ccattttcagtcaagaggaatgttgcacggagcttaaacagccagctggtttacgaatatgttgtggagagatttagggcagcttatcggtattttgcctgtcctcagacgaagggtgga

SEQ ID NO: 313272 - DNA, 120 bp, Artificial Sequence
  ENSG00000134744_20 (sequence is synthesized)
aataagtctacagtggatttcaagaaaagagagaaggggaaaataagcaataagaaaccagtcaagtcgaacaatatggcaaccaatggttgtattctgcttggggaaaccacagaaaaa

SEQ ID NO: 313273 - DNA, 120 bp, Artificial Sequence
  ENSG00000134744_21 (sequence is synthesized)
ataaatgcagaaagagagcaacctgttcaatgtgatgaaatggactgtacatcacagagatgtattattgacaacaacaatttgttggtaaatgaactagattttgctgaccacggacag

SEQ ID NO: 313274 - DNA, 120 bp, Artificial Sequence
  ENSG00000134744_22 (sequence is synthesized)
gactcttcatctctttctaccagcaaaagcagtgaaatagagccaaaattagataagaaacaagatgatttagcgccttcagaaacttgtttaaaaaaagagctcagccaatgtaattgc

SEQ ID NO: 313275 - DNA, 120 bp, Artificial Sequence
  ENSG00000134744_23 (sequence is synthesized)
attgatttgtctaagtcgcctgacccagataaatctactggaacagactgcaggtcaaatttagaaacagagagttcacatcagagtgtgtgcaccgacacatctgctacctcttgcaac

SEQ ID NO: 313276 - DNA, 120 bp, Artificial Sequence
  ENSG00000134744_24 (sequence is synthesized)
tctggcaagccaccaacgatagtatgcagcatctgcaaaaaggatggccattcaaagaatgattgcccagaggattttaggaaaattgatttaaaacctctaccaccaatgacaaaccga

SEQ ID NO: 313277 - DNA, 120 bp, Artificial Sequence
  ENSG00000134744_25 (sequence is synthesized)
tttcgggaaatacttgatttagtatgtaaaagatgttttgatgagttatcaccaccttgttctgaacaacacaacagggagcaaattttaattggcttggaaaagtttattcaaaaagaa

SEQ ID NO: 313278 - DNA, 120 bp, Artificial Sequence
  ENSG00000134744_26 (sequence is synthesized)
tatgatgaaaaggcaaggttgtgcttatttggctcttctaagaatggatttggatttcgtgatagtgatctggatatttgtatgaccctggaaggccatgaaaatgcagagaaattaaat

SEQ ID NO: 313279 - DNA, 120 bp, Artificial Sequence
  ENSG00000134744_27 (sequence is synthesized)
tgtaaggaaataattgaaaatttggcaaaaattcttaagagacatccaggtttaagaaacattttgcctataactactgccaaagtgcctatagtaaaatttgaacacaggcgaagtggg

SEQ ID NO: 313280 - DNA, 120 bp, Artificial Sequence
  ENSG00000134744_28 (sequence is synthesized)
ttagaaggcgatatcagtttatataatacgttggctcaacataacacaagaatgctagctacttatgcagctattgatcctagagtgcagtatttgggatatactatgaaagtgtttgct

SEQ ID NO: 313281 - DNA, 120 bp, Artificial Sequence
  ENSG00000134744_29 (sequence is synthesized)
aagcgatgtgacattggggatgcttccaggggaagtttatcttcatatgcatatatccttatggtgctgtactttctgcagcagagaaagccacctgttatcccagttctacaagagatc

SEQ ID NO: 313282 - DNA, 120 bp, Artificial Sequence
  ENSG00000134744_30 (sequence is synthesized)
tttgatggaaaacagattccacagagaatggttgatggatggaatgctttcttctttgataaaacagaagaactgaaaaagcgtttaccttcacttggaaagaacacagaatcattaggg

SEQ ID NO: 313283 - DNA, 120 bp, Artificial Sequence
  ENSG00000134744_31 (sequence is synthesized)
gagctttggctgggactgcttcgtttctatactgaagagtttgatttcaaggaatatgtaattagcattcggcagaaaaagctgttgacaacttttgagaagcagtggacttccaagtgc

SEQ ID NO: 313284 - DNA, 120 bp, Artificial Sequence
  ENSG00000134744_32 (sequence is synthesized)
attgcaattgaagacccttttgacttgaatcataaccttggtgctggagtttccagaaaaatgaccaatttcatcatgaaagcatttatcaatggaaggaaactttttggtacccctttt

SEQ ID NO: 313285 - DNA, 120 bp, Artificial Sequence
  ENSG00000134744_33 (sequence is synthesized)
tatccactcattggcagagaagctgagtacttctttgattccagagtattaacagatggagaactggctcccaatgatagatgttgccgtgtgtgtggaaaaataggccactacatgaaa

SEQ ID NO: 313286 - DNA, 120 bp, Artificial Sequence
  ENSG00000134744_34 (sequence is synthesized)
gactgccctaaaaggaaaagcagtttactgtttagactaaagaagaaagacagtgaagaagagaaggaagggaatgaagaagagaaagattcccgagatgttcttgacccccgagacctc

SEQ ID NO: 313287 - DNA, 120 bp, Artificial Sequence
  ENSG00000134744_35 (sequence is synthesized)
cacgatactcgagactttagagacccgagagacctcagatgttttatatgtggagatgctggacatgtacgaagggagtgcccagaggtcaagctggcccgtcagaggaatagcagtgtg

SEQ ID NO: 313288 - DNA, 120 bp, Artificial Sequence
  ENSG00000134744_36 (sequence is synthesized)
gcagcagcccagctggtccgcaaccttgtaaatgctcaacaggtggctggttcagctcagcaacagggtgatcagtccataaggactagacagtcatcagaatgttctgaatcaccatct

SEQ ID NO: 313289 - DNA, 120 bp, Artificial Sequence
  ENSG00000134744_37 (sequence is synthesized)
tattctcctcagcctcagccatttccacagaactcttcccagtcagctgctattactcagccttcatctcagccaggatcccaacctaagcttggcccacctcagcagggagcccaacct

SEQ ID NO: 313290 - DNA, 120 bp, Artificial Sequence
  ENSG00000134744_38 (sequence is synthesized)
ccccatcaggtccagatgccactgtataactttccccagtcaccaccagctcagtattctcccatgcacaatatgggattgttgccaatgcaccctctccagatccctgccccgtcctgg

SEQ ID NO: 313291 - DNA, 120 bp, Artificial Sequence
  ENSG00000134744_39 (sequence is synthesized)
cccatccatggcccagtgatccactctgcaccaggcagtgcccccagcaatattggcctaaatgatcccagcatcatctttgcacagcctgctgccagacctgtggcaatccctaacacg

SEQ ID NO: 313292 - DNA, 120 bp, Artificial Sequence
  ENSG00000134744_40 (sequence is synthesized)
tctcacgatggacactggccccgtactgtggctccaaattccctggtaaacagtggtgcagtggggaattcagagccaggctttcgaggactgactcctccaattccttgggaacatgca

SEQ ID NO: 313293 - DNA, 120 bp, Artificial Sequence
  ENSG00000134744_41 (sequence is synthesized)
ccgcgtccccatttcccccttgtcccagcttcgtggccttatggtttgcatcaaaacttcatgcatcagggaaatgcccgattccagcccaacaaacctttctatactcaagacagatgt

SEQ ID NO: 313294 - DNA, 120 bp, Artificial Sequence
  ENSG00000134744_42 (sequence is synthesized)
gccacccgtcggtgtagagagcgttgtccccacccaccaagaggaaacgtgtcggagtaatgcgagtccattttctttcagctggtctaccgatgcacagcaaccagccaatcctgctgt

SEQ ID NO: 313295 - DNA, 120 bp, Artificial Sequence
  ENSG00000134744_43 (sequence is synthesized)
ctcaagggtatccgtacctcaatgtcagttacattcagcagaaaaagtgacatttaatggaaagcaaaacaaatcaggtcctgatttaaaattttaacacgtttagatagcttatttaaa

SEQ ID NO: 313296 - DNA, 120 bp, Artificial Sequence
  ENSG00000134744_44 (sequence is synthesized)
ttctaagactgtttttacagactgtattatttgtatataaatatgaactatagtttttactagtatcaccaaattgagtgatacaaatttcatctattttattaccctatttttaaggga

SEQ ID NO: 313297 - DNA, 120 bp, Artificial Sequence
  ENSG00000134744_45 (sequence is synthesized)
attttatgttttgtttaaccttgatgaattgtataaagagagaatttaaaaaattacattctttattttctattagctgtattcatactttggttgcttcagactttatatattgttctt

SEQ ID NO: 313298 - DNA, 120 bp, Artificial Sequence
  ENSG00000134744_46 (sequence is synthesized)
aaaagttaggaaagaatttcatgtgttttaaattgtcacttctattctttacagaaccttgtagtgccaaaaactttttaaaaggtaaaaaaataaaataaaattacaacatgaagattc

SEQ ID NO: 313299 - DNA, 120 bp, Artificial Sequence
  ENSG00000134744_47 (sequence is synthesized)
agattttttttcttttccatacttgtatattgaacattcaaacttgaatggaaagttgattttgtctgtatttgaagtacttctattttaagttaataaatctttttgacaagagttaaa

SEQ ID NO: 313300 - DNA, 120 bp, Artificial Sequence
  ENSG00000134744_48 (sequence is synthesized)
tttataactcttgggattgatgtttatacccttcagctatttccagttaatttttaatgccataatcattatgtattatgattatcattaccataccaactctgctgtctctggttttta

SEQ ID NO: 313301 - DNA, 120 bp, Artificial Sequence
  ENSG00000134744_49 (sequence is synthesized)
caagagtaacacatttaaatttacagaggtaagaatttccttggagaaataggtgctggtgataataggagtatctttcttttccatatcaacataattataataaataactcacagatt

SEQ ID NO: 313302 - DNA, 120 bp, Artificial Sequence
  ENSG00000134744_50 (sequence is synthesized)
taaaggcttattttgtgccaggcattctgctgagtgctttacatacatgtctcatgtaatcctcccaacagctctgcaggacaggagtttatgattatcttgattttatagaatagtaat

SEQ ID NO: 313303 - DNA, 120 bp, Artificial Sequence
  ENSG00000134744_51 (sequence is synthesized)
gtaatgctcagagaggttaaacatctggttagtcacacagctaatcaatacttagtttaagatttgagactggattacaggcgtgagacaccatgccagccagttttgtgttttttttaa

SEQ ID NO: 313304 - DNA, 120 bp, Artificial Sequence
  ENSG00000134744_52 (sequence is synthesized)
atgaagaactgtttattgacaccgtctatgtgttgggaattgttctaggagaaataaaagtgaccaagacgttgggttcttgctgaggatctcacagtcatgcaaactgataattaaaat

SEQ ID NO: 313305 - DNA, 120 bp, Artificial Sequence
  ENSG00000134744_53 (sequence is synthesized)
acaattaatggaattcttgagataacatgctgtgagctatatttatagatcttggggaatgtacatcttctatactccctcaaaatatatctacgaattatagtctcccaggttctgtat

SEQ ID NO: 313306 - DNA, 120 bp, Artificial Sequence
  ENSG00000134744_54 (sequence is synthesized)
actgtagtaggtcaggaagatctctttcttttgtcatcaagtctggcctaaaataaaaacttggaacttttgagacagaacgaacttccagtttccatcactgctatttactattaaatt

SEQ ID NO: 313307 - DNA, 120 bp, Artificial Sequence
  ENSG00000134744_55 (sequence is synthesized)
tagtcaagacacttatcttctctaagcctcaatttctttttaaaactggagataataaatatcaacctctaaggattgttaaaggtttaagatttggtattttaaaaaatttaatataat

SEQ ID NO: 313308 - DNA, 120 bp, Artificial Sequence
  ENSG00000134744_56 (sequence is synthesized)
attgttttacaaaactactggaaaaccgagttcctgccaaatgagcaggtgtgccataaatgtttgttcccttgccttcaaaaagacgcatgaaatgatgggcatgttagtccttttgtt

SEQ ID NO: 313309 - DNA, 120 bp, Artificial Sequence
  ENSG00000134744_57 (sequence is synthesized)
actggctaatacaatcttccagattacacagtgctttgtatatatgtccttgctaggcacataaggtggaatgagcattccttttggaataatgtagatctgggtttctgtctacagaga

SEQ ID NO: 313310 - DNA, 120 bp, Artificial Sequence
  ENSG00000134744_58 (sequence is synthesized)
agctacttaatttatatgagcctactcttcaattgtacaataactacctaataagatggattaaaaataaggtaatgactttgaggtttcagactttgcttagtggaaaaatatcagtac

SEQ ID NO: 313311 - DNA, 120 bp, Artificial Sequence
  ENSG00000134744_59 (sequence is synthesized)
ggcatttagtgttgttagggcaatatatacatggcattttgcttgcatgaaacttctgtcttctcatagcttgacctgtggatacctagtgaaatacaccctgtaaaaaaacagtattga

SEQ ID NO: 313312 - DNA, 120 bp, Artificial Sequence
  ENSG00000134744_60 (sequence is synthesized)
ctgtaaaaaaacagtattgaatgagaattcagactcataagtttattttactatcttttctttttttttaagatggagtctcactccattgcctaggctggagtgcagtggcgtgttctc

SEQ ID NO: 313313 - DNA, 120 bp, Artificial Sequence
  ENSG00000134744_61 (sequence is synthesized)
gtgttctcggctcactgcaaccctacaatccacacccctgggatcatgcaattctgtctccatctcctgagtagctgaactgcaggcaatactatcacgcccagctaatttttgtatttt

SEQ ID NO: 313314 - DNA, 82 bp, Artificial Sequence
  ENSG00000134744_62 (sequence is synthesized)
gccttggctccagcccagactcataagtttaatattgtttgttgagttgctcttaacctttgtgtaaatctatattcacctt

SEQ ID NO: 313315 - DNA, 120 bp, Artificial Sequence
  ENSG00000134744_63 (sequence is synthesized)
tgagttgctcttaacctttgtgtaaatctatattcaccttgtacttcttaattaataatgactctaaataacactctaaatctgacataatattcagtgctttacacttagcaaatttaa

SEQ ID NO: 313316 - DNA, 120 bp, Artificial Sequence
  ENSG00000134744_64 (sequence is synthesized)
tccttggagtggccatgtgaagtggtaggtattagtatcatcaaattttacaaattgggaaactgagaataagagagtataaaaatcaaaccgaagtctttctagcatcaaatccattaa

SEQ ID NO: 313317 - DNA, 120 bp, Artificial Sequence
  ENSG00000134744_65 (sequence is synthesized)
ccgtttaacatgctaaatctaatgtgatttgtgttttagaaaaaacattcaagtatttgaagagtattagggagaatctttggaaaacatttaggaaattttccaccctcacctcaaaca

SEQ ID NO: 313318 - DNA, 120 bp, Artificial Sequence
  ENSG00000134744_66 (sequence is synthesized)
cttgaatacctattatgtgcttgatactttcataaacaacaataatcacatttaatgtagttaacatttgttgagtgtaaactatgtgctgtacatgcattcattctttgtgattataaa

SEQ ID NO: 313319 - DNA, 120 bp, Artificial Sequence
  ENSG00000134744_67 (sequence is synthesized)
atatttcaaaagtacagaaaagtatagaaaataaatctctatgtatcattaccaggctttaacagtttttaacattgttattttagctttattaaaaaatcaccctcagttgaacaccct

SEQ ID NO: 313320 - DNA, 120 bp, Artificial Sequence
  ENSG00000134744_68 (sequence is synthesized)
gtacattcttctttgatcccattcctatcttaaaagcttcctaccatccttcccttgctacagaaatgtatctgctatcttgaacttggtggttatatgttccacatgcattgttcagtt

SEQ ID NO: 313321 - DNA, 120 bp, Artificial Sequence
  ENSG00000134744_69 (sequence is synthesized)
aatcttctcaaaaacctgaggcaaattctgattatattttataggtaaagaaaccgaggtttcagtttcttgcctgaggtcaatagacacttggaatcagaacgcgaaccctcaggctct

SEQ ID NO: 313322 - DNA, 120 bp, Artificial Sequence
  ENSG00000134744_70 (sequence is synthesized)
ctgtcagcaaaacttatgctctaaccacttttctatgctgccctaattttcattttatgctactagtcctcacttttctctcacccgtgctttcggaaagagtctgtctaatggacattg

SEQ ID NO: 313323 - DNA, 120 bp, Artificial Sequence
  ENSG00000134744_71 (sequence is synthesized)
ctattctgatgtctaacaaagcacgtcaacatgcctaaaatatagttaatctttcctttcaacccccaggacttgcctcttcctcctgtgttttatatctcgttgaatgatcccattttc

SEQ ID NO: 313324 - DNA, 120 bp, Artificial Sequence
  ENSG00000134744_72 (sequence is synthesized)
tatctagtttccaaaacttttccctctccttcaacctctatgttcagtcactaagtcctgttgtttctgccttaaaaaaagctaggtgtttgcctcactcctgtaatcccagcactttag

SEQ ID NO: 313325 - DNA, 78 bp, Artificial Sequence
  ENSG00000134744_73 (sequence is synthesized)
ctacaaaaaattagctggatgtggtggcagggaacctgtcatcccagctagttgggagactgaggcaggagaatcact

SEQ ID NO: 313326 - DNA, 83 bp, Artificial Sequence
  ENSG00000134744_74 (sequence is synthesized)
tcatcccagctagttgggagaattgcaatgtgccgagattgcaccaccgcactccagcgtgggcaacacagcgagactgtctc

SEQ ID NO: 313327 - DNA, 72 bp, Artificial Sequence
  ENSG00000134744_75 (sequence is synthesized)
caggaggcggagggagagcaggagccactgagatgaggaggcgtcgcgcgcgcctgtagctcgcgggcctcg

SEQ ID NO: 313328 - DNA, 120 bp, Artificial Sequence
  ENSG00000134744_76 (sequence is synthesized)
cctcccacttcagcctcctgagactgggactacagagccagctgactatgcaacaagatgactatgcaacaagatgaatgaggagatatctacagcaggcttattgcttggaaatttcag

SEQ ID NO: 313329 - DNA, 120 bp, Artificial Sequence
  ENSG00000134744_77 (sequence is synthesized)
aaaaacagcctgaacgacagagcaagaccatgtctcaagaaagaagaagaagaaaaagattactcaaaatgaaaacctgtcaattttctgagcctgggactctccgggtacattgatcta

SEQ ID NO: 313330 - DNA, 120 bp, Artificial Sequence
  ENSG00000134744_78 (sequence is synthesized)
tttattttcgtttcttcccctgggttgctaaaacagaaaaacagtttttttccttctatctcccagacccttccccagtaacatttatggttttaaagtcagagaagtcaacaaataatg

SEQ ID NO: 313331 - DNA, 120 bp, Artificial Sequence
  ENSG00000134744_79 (sequence is synthesized)
aacaaactgtaagtaaaatttttagggtaaaaacttgaagatgttttcagattctgttttccttacttttctttttccttttttcttctttttataaacccagatgagttatcaccacct

SEQ ID NO: 313332 - DNA, 120 bp, Artificial Sequence
  ENSG00000134744_80 (sequence is synthesized)
agacctgagttcaagttcccatgctaccatttatggctgtgggaacatcatacatattgatcaactttcaaatatatcatcagtaaaactagaataaaacctatttacctcacaggatta

SEQ ID NO: 313333 - DNA, 120 bp, Artificial Sequence
  ENSG00000134744_81 (sequence is synthesized)
tccaggtatgaattttgaatcttatctgtaaaacaaaataaatttttttagcatatatgaaaattatttaacctactgaagtcttttttttttaaattaggtttaagaaacattttgcct

SEQ ID NO: 313334 - DNA, 120 bp, Artificial Sequence
  ENSG00000134744_82 (sequence is synthesized)
ctaatgtcagatttgtgaaaaattttgtctcagttttgtttatctgagcttttaaaaaagaaactttcagtattatatagcttgaatagatacctatcagagtagggtggctctgtcttt

SEQ ID NO: 313335 - DNA, 120 bp, Artificial Sequence
  ENSG00000134744_83 (sequence is synthesized)
gaaaaagactgattggacagggaagaagtgtcccaggccttctcaacagcaactagcaaaggagggtatccttgtagatgttcagtcctttaccagcctagctattgttatttatgtttc

SEQ ID NO: 313336 - DNA, 120 bp, Artificial Sequence
  ENSG00000134744_84 (sequence is synthesized)
aaaatgcgggactgtttgcaagattggggtgaggcccagcttctggcatctgtagtggtgtcagtatcgcctctgttacattataaaagaattcagcagaatagtgtgcttttctaaaat

SEQ ID NO: 313337 - DNA, 120 bp, Artificial Sequence
  ENSG00000134744_85 (sequence is synthesized)
cattcttttgaacggtggttttgaaattgttagacccggagtaaagatggcagtgatgacttaacttctggccataagaagttgcttctggtgtcttaacatcttgttttataaagaaac

SEQ ID NO: 313338 - DNA, 120 bp, Artificial Sequence
  ENSG00000134744_86 (sequence is synthesized)
tgaaaagttgcaagtattttatttgttctcctttacttaaattctgcttagagccacctacttggaaagtggctgcccttctccattctgaagagtaagaattgagggaataggaaatga

SEQ ID NO: 313339 - DNA, 120 bp, Artificial Sequence
  ENSG00000134744_87 (sequence is synthesized)
tttttatacccaggaaagaggttagagttttagatatcttctatgtaaaatttattaaacttctaatcactaagggtttgtatattatatataatctgtgccattcctactgggaagttg

SEQ ID NO: 313340 - DNA, 120 bp, Artificial Sequence
  ENSG00000134744_88 (sequence is synthesized)
aaacaatgaaaataataaatcattttctttcagatgagccataattgaaacttttaagattagcataattgtatcgttgaataataaagagaaaaattacctcctttgttaattttatca

SEQ ID NO: 313341 - DNA, 120 bp, Artificial Sequence
  ENSG00000134744_89 (sequence is synthesized)
tttattcacttattgaaaaccatattcttctcctgtctttgtgcttctcaaactttaatctgcatgtgaattaccttgggatcctgttaaaatgcagattatgatttagtagactgggga

SEQ ID NO: 313342 - DNA, 120 bp, Artificial Sequence
  ENSG00000134744_90 (sequence is synthesized)
gggtcctcagattctgcatttctatcaagtttccagattatgctgatactgtaggtctatgaatcacttacttggagtagcaaggttattatagagctttatggctggaaattgtaaatg

SEQ ID NO: 313343 - DNA, 120 bp, Artificial Sequence
  ENSG00000134744_91 (sequence is synthesized)
atgtgtgtttcataactgttttccccaagtacagctttttttatttttcttttattcataagacagaggttgcattcatctttccttacttccctcttctctacctttcttcttctttcc

SEQ ID NO: 313344 - DNA, 120 bp, Artificial Sequence
  ENSG00000134744_92 (sequence is synthesized)
ctcttttcttccttgcctctctttttcagcagttacttattatctgtgagtctgacttcattcatcccaagagttggcaaactatggtctatcccttgcttttgtttttgaatgggttaa

SEQ ID NO: 313345 - DNA, 120 bp, Artificial Sequence
  ENSG00000134744_93 (sequence is synthesized)
aatacacctagtctccccaccgtttttggtaaacattttattggaatatagccatgcctatttgtttacatgtcgtttatggctactttcatgctacgatgggaaatttgagttgagtag

SEQ ID NO: 313346 - DNA, 120 bp, Artificial Sequence
  ENSG00000134744_94 (sequence is synthesized)
ttgtcacagagcttatatggcttgaaaagcataaaatatttagtctttgccaaagcataaaatgtctaccaaaatatttattcgcccctttatagacgaaacttgctgacctctgattta

SEQ ID NO: 313347 - DNA, 120 bp, Artificial Sequence
  ENSG00000134744_95 (sequence is synthesized)
ggcactcatcaaatagacactgagcacttgttttgtgccaggtattctgataggcactggggatgtattggtgaaaatggcagtttcttcccattagaagttaaaagtccattcagattg

SEQ ID NO: 313348 - DNA, 120 bp, Artificial Sequence
  ENSG00000134744_96 (sequence is synthesized)
atggaaataaaatagcattttatttattgaacctgtatttattgaacattaactgcgtaataggaactatcctagccattggtatcttattcctgtgtattaatttcttaatctagaaat

SEQ ID NO: 313349 - DNA, 120 bp, Artificial Sequence
  ENSG00000134744_97 (sequence is synthesized)
ctgtgtattaatttcttaatctagaaatacacattcctggcctcaataaaaacactgctaggttttgaaggaaagaatcacaaatcacggccaggcccagtggctcacgcctgtaatccc

SEQ ID NO: 313350 - DNA, 120 bp, Artificial Sequence
  ENSG00000134744_98 (sequence is synthesized)
cctcctgagtagctgggattacaggtaagaaagctgcaattgtggaggtagaatgcagcagaagaaagacagctaaaatatggagacctgagttcaagttcccatgctaccatttatggc

SEQ ID NO: 313351 - DNA, 120 bp, Artificial Sequence
  ENSG00000134744_99 (sequence is synthesized)
ctatcatctcctaatcagtctcaacagccttttagcagtctcctaatcagtctcaacagccttttaatttttacttatctatttattcattcatttttgagacagcgtcttgctctgttg

SEQ ID NO: 313352 - DNA, 82 bp, Artificial Sequence
  ENSG00000134744_100 (sequence is synthesized)
acctcccaggctcgggtgattctcccatgtcagcctccagagtagctgggactccaggcatgcaccaccacacttggctaat

SEQ ID NO: 313353 - DNA, 120 bp, Artificial Sequence
  ENSG00000134744_101 (sequence is synthesized)
gagctcaagtgatctgcctgcctcagcctttgaaagtgctaggattacagtcttgagccactgttcctgtctctcatcagcctttaaaaaaattctctattttattcttattaaaccagg

SEQ ID NO: 313354 - DNA, 120 bp, Artificial Sequence
  ENSG00000134744_102 (sequence is synthesized)
cctttaaaaaaattctctattttattcttattaaaccaggataatctttctaaagttcagattgatcatgttccatacctgtttaaaacccttcagtggtttaccactgcatttaggata

SEQ ID NO: 313355 - DNA, 120 bp, Artificial Sequence
  ENSG00000134744_103 (sequence is synthesized)
tagtctaaattacaaggcttataagacacttcattgtcttgcccctatttagctcttcagcctcggccattcccctgccattatatatactccagtaatattaaacttctttcagattcc

SEQ ID NO: 313356 - DNA, 120 bp, Artificial Sequence
  ENSG00000134744_104 (sequence is synthesized)
aattactttaaaaagccatgtgttttcatacctctagaccttcaatcatattgaacactcttcctctccccttatctctcccttcttgtatcagactgatttctgtttaccctgagtctc

SEQ ID NO: 313357 - DNA, 120 bp, Artificial Sequence
  ENSG00000134744_105 (sequence is synthesized)
agctaaaagatcactttttctaggaagctttccctgatttctcttctctccttctcccaaagtgactttaggtgttcctgctctgggatttcattatgtagttgacccttgaacaaaaca

SEQ ID NO: 313358 - DNA, 120 bp, Artificial Sequence
  ENSG00000134744_106 (sequence is synthesized)
ggtttgaactgcgtgagtctacttatacatgaattttttccaacagattgtggttggaaagtacagtattcccaggatgcaaaacccaagtattcagagatccaactttttgtatatatg

SEQ ID NO: 313359 - DNA, 120 bp, Artificial Sequence
  ENSG00000134744_107 (sequence is synthesized)
ggttctgtagagctgactgtgggacttgagtacaggattgtgggggtcctggaaccaatcccctgcatatcctgagggacagctgtacactgtacattctttatcatagtactcattata

SEQ ID NO: 313360 - DNA, 120 bp, Artificial Sequence
  ENSG00000134744_108 (sequence is synthesized)
cttattatgattgcttatgtaatctttgtctgctcccttccttatcccccttaaacgttgagctccatgagggcatacatgttggtattacatttttattacctagaacaatacttagta

SEQ ID NO: 313361 - DNA, 120 bp, Artificial Sequence
  ENSG00000134744_109 (sequence is synthesized)
aattgacacaataaatacttgttgagggactgaatgaaagtgactatgagatatttagatggaagttttgagtttgcaataggaagtatgtgttctgcacgatgggaaccatgtctgggc

SEQ ID NO: 313362 - DNA, 120 bp, Artificial Sequence
  ENSG00000134744_110 (sequence is synthesized)
tctcgtttctttggacaataaaacgatttgtgaggcaatacctacttgaaaagggggtttgagtaccttgggaaaaactaattatttgttatgatatacatcatagagttctgttttata

SEQ ID NO: 313363 - DNA, 120 bp, Artificial Sequence
  ENSG00000134744_111 (sequence is synthesized)
aggcttgggtgggttttattctgggatagagagccttagtgaaggccaggatctgggagtgaaaattcatgaattcagtaaacatttactgagaaattatactgtgtgtcagatggtgct

SEQ ID NO: 313364 - DNA, 120 bp, Artificial Sequence
  ENSG00000134744_112 (sequence is synthesized)
aggtgcttgtaaaacaaaatctccattacttgatgcacactttattaggaaagccagacatgttaaatagaaaaggagtttagatgaatcagttaacattgccctagcaaatccaaacag

SEQ ID NO: 313365 - DNA, 120 bp, Artificial Sequence
  ENSG00000134744_113 (sequence is synthesized)
gatgtggatttaagattattacatcacaagattttgacagttgagctagatcttgaaagagatgcaggaattttttttttgcctagagatgagagaggaggaggagtatgcttagctgag

SEQ ID NO: 313366 - DNA, 120 bp, Artificial Sequence
  ENSG00000134744_114 (sequence is synthesized)
ggattaatatatgcagtcactgagttttgcctggcataatgaaaaagagtagaaaatattagggctagaggacggaggtatatgggaaagatggtgataaggctagagagggtaggctta

SEQ ID NO: 313367 - DNA, 120 bp, Artificial Sequence
  ENSG00000134744_115 (sequence is synthesized)
gaccatattatggagtttggacttggtttactgagcattggggacctaattaaaggtttttagtggaacgaagacataatcatatttgtttagtaaacgtaggacttgaatgaccttaaa

SEQ ID NO: 313368 - DNA, 120 bp, Artificial Sequence
  ENSG00000134744_116 (sequence is synthesized)
atttattatgttctgctggtgctattgtagtactaataatggctttgactgggtaatgaatattacaaacaaagaattcctagaaacttggagcattttatctaacctacttgcctcaga

SEQ ID NO: 313369 - DNA, 120 bp, Artificial Sequence
  ENSG00000134744_117 (sequence is synthesized)
ggtatttgttcttataggcattgtctgagtctggccttcagctctttgttaacttagttcagaacacttgggtcagagtcagtatagttaaactaggagttcaagaagttaaaacaggca

SEQ ID NO: 313370 - DNA, 120 bp, Artificial Sequence
  ENSG00000134744_118 (sequence is synthesized)
ctcaggaaatgctgattgaatgaaatgataacttaaaggggaagtgcctggtatggtctcaggcttgttatatttaagccttcttaaaccacccatatactactggggcatccctgtatt

SEQ ID NO: 313371 - DNA, 120 bp, Artificial Sequence
  ENSG00000134744_119 (sequence is synthesized)
gtagagtggcagagccttgactgtggttgagctcttctcttgagcaaagaactggggctgaaggaagttactattagtcataagcccttttaggaggggagagtctgcaactcttttcta

SEQ ID NO: 313372 - DNA, 120 bp, Artificial Sequence
  ENSG00000134744_120 (sequence is synthesized)
gtgggttttttccctttgattcctcctctccatctttcgtgtcctctccttttttcacatacaggtatttccttcccttcttcatttttctccccaccctctcaaatgttttgcagcatg

SEQ ID NO: 313373 - DNA, 120 bp, Artificial Sequence
  ENSG00000134744_121 (sequence is synthesized)
ctttatcacctcctattatataaatagaaaaaaagaaagctaactacaagttaattctaaggtgttgtcagataaacaggcacaagcctttcagtttcctgtctgtgttgtatccaacag

SEQ ID NO: 313374 - DNA, 120 bp, Artificial Sequence
  ENSG00000134748_0 (sequence is synthesized)
acactacggtgtttccggcttcaagatggtcgcctaagctgtttagtgaaacttcttccacctttctccattcctctaggtgctttttctgaacctggatgtgaggcattaaaggatccg

SEQ ID NO: 313375 - DNA, 120 bp, Artificial Sequence
  ENSG00000134748_1 (sequence is synthesized)
acggaaatagaattgaaggcattctaaaatggctaaccgtacagtgaaggatgcgcacagcatccatggcaccaaccctcaatatctggtggagaagatcattcgaacgcgaatctatga

SEQ ID NO: 313376 - DNA, 120 bp, Artificial Sequence
  ENSG00000134748_2 (sequence is synthesized)
gtccaagtactggaaagaggagtgctttggacttacagctgaacttgtagtcgataaagccatggagttaaggtttgtgggtggcgtctatggtggcaacataaaaccaacaccctttct

SEQ ID NO: 313377 - DNA, 120 bp, Artificial Sequence
  ENSG00000134748_3 (sequence is synthesized)
gtgtttaaccttgaagatgcttcaaattcaacccgagaaggatatcattgtagagtttatcaaaaatgaagatttcaagtatgtccgcatgctgggggcactttacatgaggctgacagg

SEQ ID NO: 313378 - DNA, 120 bp, Artificial Sequence
  ENSG00000134748_4 (sequence is synthesized)
cactgcaattgattgctacaagtacttggaacctttgtacaatgactatcgaaaaatcaagagccagaaccgaaatggggagtttgaattgatgcatgttgatgagtttattgatgaact

SEQ ID NO: 313379 - DNA, 120 bp, Artificial Sequence
  ENSG00000134748_5 (sequence is synthesized)
attgcacagtgagagagtctgtgatatcattctgccccgactacagaaacgctatgtattagaggaagctgagcaactggagcctcgagttagtgctctggaagaggacatggatgatgt

SEQ ID NO: 313380 - DNA, 120 bp, Artificial Sequence
  ENSG00000134748_6 (sequence is synthesized)
ggagtccagtgaagaggaagaagaggaggatgagaagttggaaagagtgccatcacctgatcaccgccggagaagctaccgagacttggacaagccccgtcgctctcccacactgcgcta

SEQ ID NO: 313381 - DNA, 120 bp, Artificial Sequence
  ENSG00000134748_7 (sequence is synthesized)
caggaggagtaggagccggtctcccagaaggcggagtcgatctcccaaaaggagaagcccctcccctcgccgagaaaggcatcggagcaagagtccaagacgtcaccgcagcaggtcccg

SEQ ID NO: 313382 - DNA, 120 bp, Artificial Sequence
  ENSG00000134748_8 (sequence is synthesized)
agatcggcggcacagatcccgttccaagtccccaggtcatcaccgtagtcacagacacaggagccactcaaagtctcccgaaaggtctaagaagagccacaagaagagccggagagggaa

SEQ ID NO: 313383 - DNA, 120 bp, Artificial Sequence
  ENSG00000134748_9 (sequence is synthesized)
tgagtaatggactcagtttggttttagtccacatggcctcctgtggatataaggatatctgtatgtggaaggattaagatctcccccaggcagctataagaatattttagtttttttctt

SEQ ID NO: 313384 - DNA, 120 bp, Artificial Sequence
  ENSG00000134748_10 (sequence is synthesized)
atcaagtttctcaacctttatttttaatgaaggaggtgctgagttttgtatctttttaatcataatcaacatcagtttttgacccaactaaccttgactgtattcaaacttatgagagta

SEQ ID NO: 313385 - DNA, 120 bp, Artificial Sequence
  ENSG00000134748_11 (sequence is synthesized)
taaaggatctggaggttggggatatgactgacaaggaaaggctgtggccacctgatgaccctttccctttttattaaaccggacacacctgtttcccatttcgctgtagtttagtttttg

SEQ ID NO: 313386 - DNA, 120 bp, Artificial Sequence
  ENSG00000134748_12 (sequence is synthesized)
gtttgttgtggttggaactgctttgagaatcctgggatttgtgctgctgctgttattcaaagatcaaaggagtaaaacatagttgctcctaacttttttccagcagcagcaagtggtaat

SEQ ID NO: 313387 - DNA, 120 bp, Artificial Sequence
  ENSG00000134748_13 (sequence is synthesized)
aaacatgaaaactggtttgtagcagttttgaaagaatagaatgcattcaaatgtaaggctgcttctggatcattaaagccagtttcatcaaacagttcaacagagagcagcacttaatac

SEQ ID NO: 313388 - DNA, 120 bp, Artificial Sequence
  ENSG00000134748_14 (sequence is synthesized)
cctttatacagcccattttttcatagtttcatttgttcttgcccacaagcttgaaatccaggttaaggtatccagcctttatcatataagcattgacattatccaggcctagtcagtagc

SEQ ID NO: 313389 - DNA, 120 bp, Artificial Sequence
  ENSG00000134748_15 (sequence is synthesized)
agtagggtaacgggattgaaaaagatttgatggagaggaaagtatctaatattagtcatggttttgacctaaattgctagacagtcgtgccattcacaaagtcagaaaatacagcaggaa

SEQ ID NO: 313390 - DNA, 120 bp, Artificial Sequence
  ENSG00000134748_16 (sequence is synthesized)
gagacagcttttagaggggcagagaattagaggatggtggtagtaatgaaaatgatgcattcagtttaacaagtttaatttgagacagctatggtatagctaaaaacaaaagcccataaa

SEQ ID NO: 313391 - DNA, 120 bp, Artificial Sequence
  ENSG00000134748_17 (sequence is synthesized)
gttggagatagggaccagagtttaacatagcgatctaggccagaattgacaatgtttaagtaatggtggaatctgtcaataagacttcccagagtgttaatatatatcagaaatgcacac

SEQ ID NO: 313392 - DNA, 120 bp, Artificial Sequence
  ENSG00000134748_18 (sequence is synthesized)
aacagaaccataggcaacaccaacacaggaagaaatagaagtcacctattgaaaactggaatggcccattcagaaagacaggagaattaggagagagtgagtgaaagaagccaagggtca

SEQ ID NO: 313393 - DNA, 120 bp, Artificial Sequence
  ENSG00000134748_19 (sequence is synthesized)
agaatgcagaagcaaaggaaggactaaaaagcctccacggacatcgataatcaagagattattaagatctttgctagaagagttcctttacctgtacttaactcccttaaaaagagaaaa

SEQ ID NO: 313394 - DNA, 120 bp, Artificial Sequence
  ENSG00000134748_20 (sequence is synthesized)
gtgatggaatgacttctgcaactgtagtcccagcaggaactgtgaagaccagctgccctgcaggatccagtttttcttgggaggttgtatctggtcataaggtaaacattctatatattc

SEQ ID NO: 313395 - DNA, 120 bp, Artificial Sequence
  ENSG00000134748_21 (sequence is synthesized)
ttcaatggttcctttcgtaatacctgagttaataaaagtggtctgaaagagctcttacggtttctgatagaactatataggactaccttttaagattaaatataagcatctgtacgtaaa

SEQ ID NO: 313396 - DNA, 120 bp, Artificial Sequence
  ENSG00000134748_22 (sequence is synthesized)
tgtattacagtgtcatagcagttatttctttatgaaagtgatctaggtagaaagaaatgtcttctggcatggacagaaatgacccatggaccaaccaagctgtcatccagtacactctta

SEQ ID NO: 313397 - DNA, 120 bp, Artificial Sequence
  ENSG00000134748_23 (sequence is synthesized)
aaataaaactttgtcttaaaatatgttttaaagtaaaaataaacccacgcacaaagcccaataaattttagtaacagaaataaacctccctaaacaaacattaaaacatacttgtttaga

SEQ ID NO: 313398 - DNA, 120 bp, Artificial Sequence
  ENSG00000134748_24 (sequence is synthesized)
catatggtaatatgtggaccaaaattgaggtaccacagccaatcaatagcaggaaagagaatgtccctattctttaattagaagaaggaggtaagagtaagacatgttgcatgtctgtag

SEQ ID NO: 313399 - DNA, 120 bp, Artificial Sequence
  ENSG00000134748_25 (sequence is synthesized)
atatcgttttgataaaattacacaggagatggagcttgaggacaaaccttgctgtaaggctctttctgtcatctatgtgcttgcctatggatgaagcattttaaactttttgactacagc

SEQ ID NO: 313400 - DNA, 120 bp, Artificial Sequence
  ENSG00000134748_26 (sequence is synthesized)
atacattttaaaaacgtattttacatcttacctctgtacacatctgtattctgtactgagacaaatttcaggaaagaatacttactatgcaaagtgaattctggtgtttcctacttgtta

SEQ ID NO: 313401 - DNA, 120 bp, Artificial Sequence
  ENSG00000134748_27 (sequence is synthesized)
acagtttttaatattggatgaaaccacttaatcgatttcacttccaataatttgaaatacactgacttaaaagctttgccatagggcacaatcgccttttaatactaagaaagtaaggga

SEQ ID NO: 313402 - DNA, 71 bp, Artificial Sequence
  ENSG00000134748_28 (sequence is synthesized)
atagggcacaatcgccttttaatactaagaaagtaagggagatgtgttccaaggggcaaaagaaataatgc

SEQ ID NO: 313403 - DNA, 120 bp, Artificial Sequence
  ENSG00000134748_29 (sequence is synthesized)
gagggttccaatattaacaacccaacttcaagctcattcctctaacctcttcctgtttgttattcttcagtagaccgaagtttaaataagcattatttagaaaagaacgatcacagattg

SEQ ID NO: 313404 - DNA, 120 bp, Artificial Sequence
  ENSG00000134748_30 (sequence is synthesized)
cccactccctcaaaaaggttaatgtgacagaaattctccacctgctcaaaaaagacagcagacatgatctctttaaaaaaaaaaagttcaaaagagattaagagatgaaaaataagattg

SEQ ID NO: 313405 - DNA, 120 bp, Artificial Sequence
  ENSG00000134748_31 (sequence is synthesized)
gtggagtttaaaggccttatactagaaaccacaaaacataaaacagcacagagaaaataggctggaggaaataaaaaatggaaaagagaaatatgtagaataaagaaatattctgatggt

SEQ ID NO: 313406 - DNA, 120 bp, Artificial Sequence
  ENSG00000134748_32 (sequence is synthesized)
tgagactccgtctcaaaaagaaaaaagaattaaatggggtcaggatggtctcagatcttataacaagaaggcaatgaagcaaaaggctccaaaggtttgagaaaaagtgccaggaatttt

SEQ ID NO: 313407 - DNA, 120 bp, Artificial Sequence
  ENSG00000134748_33 (sequence is synthesized)
aggtttgagaaaaagtgccaggaattttatactttgccaaagttgtcttaaaatacaaaggctatagatgttctcaagtttgtaagaacttaaaagtacaaatcatgagtctttgggaaa

SEQ ID NO: 313408 - DNA, 120 bp, Artificial Sequence
  ENSG00000134748_34 (sequence is synthesized)
aaaccgcccaataatgaaattcaactaaagaagaaatgaatcaaattaaggacttaggaacaaagaatcagtaaaaggagtgttagtaaacacttcagaaactttaaaaataatgggcaa

SEQ ID NO: 313409 - DNA, 120 bp, Artificial Sequence
  ENSG00000134748_35 (sequence is synthesized)
tgattataaagtcaaatattatgaacactgtctatatagaaataacaagtagagtgtgctggtttcatctttcatagcaggaatcacgtacagtctctaattaaaacatacatgaagcta

SEQ ID NO: 313410 - DNA, 120 bp, Artificial Sequence
  ENSG00000134748_36 (sequence is synthesized)
gaaaaaaaaatagcctctttattgttttccgtaattgtccttaattttaggagaaatcttacaagactagattctcttgtggggaaaaaagtatttaaattgagcattttttcagtttca

SEQ ID NO: 313411 - DNA, 120 bp, Artificial Sequence
  ENSG00000134748_37 (sequence is synthesized)
cacttgttttccttttgttaatttgctatatttgttaaatatagcatatgagcccacttttgtaaaactatttgtatatatgtgcctgtatgattaagagagatggttggaatgaatgaa

SEQ ID NO: 313412 - DNA, 120 bp, Artificial Sequence
  ENSG00000134748_38 (sequence is synthesized)
gttcaccagatagtacttctttctggctgatgaacttttgaatgatttttaaactttgtacttttatataatgcttattttctttttacaataaacatgttaatttctacaaggaagaaa

SEQ ID NO: 313413 - DNA, 120 bp, Artificial Sequence
  ENSG00000134748_39 (sequence is synthesized)
attgtcatttttaagccagtttttattttaccagtacttctacctttgcattgtcatagacagtgtgaatgctccttttcatctacattgttactgtctctatgcaggttttcccttgtc

SEQ ID NO: 313414 - DNA, 120 bp, Artificial Sequence
  ENSG00000134748_40 (sequence is synthesized)
cctcatgggagttttcagtctgactactagcttcgtgttggccttacccagcctgcctctgtctgtctccctttccaagtgcatcttatgttaatccctgccttgcatcatatgccccct

SEQ ID NO: 313415 - DNA, 120 bp, Artificial Sequence
  ENSG00000134748_41 (sequence is synthesized)
ttacatgtgctccatcccaaaagatctagctgcagaatggcttctccataaaaaccttccccagccctctcagacaaaattagttttccatattttacatcttcacagttctttctactg

SEQ ID NO: 313416 - DNA, 120 bp, Artificial Sequence
  ENSG00000134755_0 (sequence is synthesized)
agtcagggcttctgctgggcagggccggctgttaatctcgcctggcggagcggacaccggggcgtggtgggggagatgggccttataggtggcgtccgctggtgagaaacaccttgcgca

SEQ ID NO: 313417 - DNA, 120 bp, Artificial Sequence
  ENSG00000134755_1 (sequence is synthesized)
ggtaaaagggtggcggcgagagggagttcccacccgtggctttcttagagaaatgaagtcttaagtcttaaatagacaacaaggaggggccgatcggtgtcttttggacgcgtctggagc

SEQ ID NO: 313418 - DNA, 120 bp, Artificial Sequence
  ENSG00000134755_2 (sequence is synthesized)
ccctccctccgccaaaggaaaagccccttggatgagaggcaggcgcttcagagaagctaagaaaagcacctctccgcgcgccccacctcctccgcctcgcgctcctcctgagcagcgggc

SEQ ID NO: 313419 - DNA, 120 bp, Artificial Sequence
  ENSG00000134755_3 (sequence is synthesized)
ctcgccccgcggagccctcctaccccggcccgacgctcggcccgcgacctgccccgagccctctccatggaggcagcccgcccctccggctcctggaacggagccctctgccggctgctc

SEQ ID NO: 313420 - DNA, 120 bp, Artificial Sequence
  ENSG00000134755_4 (sequence is synthesized)
aacggagccctctgccggctgctcctgctgaccctcgcgatcttaatatttgccagtgatgcctgcaaaaatgtgacattacatgttccctccaaactagatgccgagaaacttgttggt

SEQ ID NO: 313421 - DNA, 120 bp, Artificial Sequence
  ENSG00000134755_5 (sequence is synthesized)
agagttaacctgaaagagtgctttacagctgcaaatctaattcattcaagtgatcctgacttccaaattttggaggatggttcagtctatacaacaaatactattctattgtcctcggag

SEQ ID NO: 313422 - DNA, 120 bp, Artificial Sequence
  ENSG00000134755_6 (sequence is synthesized)
aagagaagttttaccatattactttccaacactgagaaccaagaaaagaagaaaatatttgtctttttggagcatcaaacaaaggtcctaaagaaaagacatactaaagaaaaagttcta

SEQ ID NO: 313423 - DNA, 120 bp, Artificial Sequence
  ENSG00000134755_7 (sequence is synthesized)
aggcgcgccaagagaagatgggctccaattccttgttcgatgctagaaaactccttgggtccttttccacttttccttcaacaggttcaatctgacacggcccaaaactataccatatac

SEQ ID NO: 313424 - DNA, 120 bp, Artificial Sequence
  ENSG00000134755_8 (sequence is synthesized)
tattccataagaggtcctggagttgaccaagaacctcggaatttattttatgtggagagagacactggaaacttgtattgtactcgtcctgtagatcgtgagcagtatgaatcttttgag

SEQ ID NO: 313425 - DNA, 120 bp, Artificial Sequence
  ENSG00000134755_9 (sequence is synthesized)
ataattgcctttgcaacaactccagatgggtatactccagaacttccactgcccctaataatcaaaatagaggatgaaaatgataactacccaatttttacagaagaaacttatactttt

SEQ ID NO: 313426 - DNA, 120 bp, Artificial Sequence
  ENSG00000134755_10 (sequence is synthesized)
acaatttttgaaaattgcagagtgggcactactgtgggacaagtgtgtgctactgacaaagatgagcctgacacgatgcacacacgcctgaagtactccatcattgggcaggtgccacca

SEQ ID NO: 313427 - DNA, 120 bp, Artificial Sequence
  ENSG00000134755_11 (sequence is synthesized)
tcacccaccctattttctatgcatccaactacaggcgtgatcaccacaacatcatctcagctagacagagagttaattgacaagtaccagttgaaaataaaagtacaagacatggatggt

SEQ ID NO: 313428 - DNA, 120 bp, Artificial Sequence
  ENSG00000134755_12 (sequence is synthesized)
cagtattttggtctacagacaacttcaacttgtatcattaacattgatgatgtaaatgaccacttgccaacatttactcgtacttcttatgtgacatcagtggaagaaaatacagttgat

SEQ ID NO: 313429 - DNA, 120 bp, Artificial Sequence
  ENSG00000134755_13 (sequence is synthesized)
gtggaaatcttacgagttactgttgaggataaggacttagtgaatactgctaactggagagctaattataccattttaaagggcaatgaaaatggcaattttaaaattgtaacagatgcc

SEQ ID NO: 313430 - DNA, 120 bp, Artificial Sequence
  ENSG00000134755_14 (sequence is synthesized)
aaaaccaatgaaggagttctttgtgtagttaagcctttgaattatgaagaaaagcaacagatgatcttgcaaattggtgtagttaatgaagctccattttccagagaggctagtccaaga

SEQ ID NO: 313431 - DNA, 120 bp, Artificial Sequence
  ENSG00000134755_15 (sequence is synthesized)
tcagccatgagcacagcaacagttactgttaatgtagaagatcaggatgagggccctgagtgtaaccctccaatacagactgttcgcatgaaagaaaatgcagaagtgggaacaacaagc

SEQ ID NO: 313432 - DNA, 120 bp, Artificial Sequence
  ENSG00000134755_16 (sequence is synthesized)
aatggatataaagcatatgacccagaaacaagaagtagcagtggcataaggtataagaaattaactgatccaacagggtgggtcaccattgatgaaaatacaggatcaatcaaagttttc

SEQ ID NO: 313433 - DNA, 120 bp, Artificial Sequence
  ENSG00000134755_17 (sequence is synthesized)
agaagcctggatagagaggcagagaccatcaaaaatggcatatataatattacagtccttgcatcagaccaaggagggagaacatgtacggggacactgggcattatacttcaagacgtg

SEQ ID NO: 313434 - DNA, 120 bp, Artificial Sequence
  ENSG00000134755_18 (sequence is synthesized)
aatgataacagcccattcatacctaaaaagacagtgatcatctgcaaacccaccatgtcatctgcggagattgttgcggttgatcctgatgagcctatccatggcccaccctttgacttt

SEQ ID NO: 313435 - DNA, 120 bp, Artificial Sequence
  ENSG00000134755_19 (sequence is synthesized)
agtctggagagttctacttcagaagtacagagaatgtggagactgaaagcaattaatgatacagcagcacgtctttcctatcagaatgatcctccatttggctcatatgtagtacctata

SEQ ID NO: 313436 - DNA, 120 bp, Artificial Sequence
  ENSG00000134755_20 (sequence is synthesized)
acagtgagagatagacttggcatgtctagtgtcacttcattggatgttacactgtgtgactgcattaccgaaaatgactgcacacatcgtgtagatccaaggattggcggtggaggagta

SEQ ID NO: 313437 - DNA, 120 bp, Artificial Sequence
  ENSG00000134755_21 (sequence is synthesized)
caacttggaaagtgggccatccttgcaatattgttgggcatagcattgctcttttgcatcctgtttacgctggtctgtggggcttctgggacgtctaaacaaccaaaagtaattcctgat

SEQ ID NO: 313438 - DNA, 120 bp, Artificial Sequence
  ENSG00000134755_22 (sequence is synthesized)
gatttagcccagcagaacctaattgtatcaaacacagaagctcctggagatgacaaagtgtattctgcgaatggcttcacaacccaaactgtgggcgcttctgctcagggagtttgtggc

SEQ ID NO: 313439 - DNA, 120 bp, Artificial Sequence
  ENSG00000134755_23 (sequence is synthesized)
accgtgggatcaggaatcaaaaacggaggtcaggagaccatcgaaatggtgaaaggaggacaccagacctcggaatcctgccggggggctggccaccatcacaccctggactcctgcagg

SEQ ID NO: 313440 - DNA, 120 bp, Artificial Sequence
  ENSG00000134755_24 (sequence is synthesized)
ggaggacacacggaggtggacaactgcagatacacttactcggagtggcacagttttactcagccccgtcttggtgaaaaagtgtatctgtgtaatcaagatgaaaatcacaagcatgcc

SEQ ID NO: 313441 - DNA, 120 bp, Artificial Sequence
  ENSG00000134755_25 (sequence is synthesized)
caagactatgtcctgacatataactatgaaggaagaggatcggtggctgggtctgtaggttgttgcagtgaacgacaagaagaagatgggcttgaatttttggataatttggagcccaaa

SEQ ID NO: 313442 - DNA, 120 bp, Artificial Sequence
  ENSG00000134755_26 (sequence is synthesized)
tttaggacactagcagaagcatgcatgaagagatgagtgtgttctaataagtctctgaaagccagtggctttatgacttttaaaaaaaattacaaaccaagaattttttaaagcagaaga

SEQ ID NO: 313443 - DNA, 120 bp, Artificial Sequence
  ENSG00000134755_27 (sequence is synthesized)
tgctatttgtgggggtttttctctcattatttggatggaatctctttggtcaaatgcacatttacagagagacactataaacaagtacacaaatttttcaatttttacatatttttaaat

SEQ ID NO: 313444 - DNA, 120 bp, Artificial Sequence
  ENSG00000134755_28 (sequence is synthesized)
tacttatcttctatccaaggaggtctacagagaaattaaagtctgccttatttgttacatttgggtataatgacaacagccaatttatagtgcaataaaatgtaattaattcaagtcctt

SEQ ID NO: 313445 - DNA, 120 bp, Artificial Sequence
  ENSG00000134755_29 (sequence is synthesized)
attatagactatttgaagcacaacctaatggaaaattgtagagaccttgctttaacattatctccagttaattaagtgttcatgtggtgcttggaaactgttgttttcctgaacatctaa

SEQ ID NO: 313446 - DNA, 120 bp, Artificial Sequence
  ENSG00000134755_30 (sequence is synthesized)
agtgtgtagactgcattcttgctattattttattcttgtaatgtgaccttttcactgtgcaaagggagatttctagccaggcattgactattacaatttcattttggtggagtttagttt

SEQ ID NO: 313447 - DNA, 120 bp, Artificial Sequence
  ENSG00000134755_31 (sequence is synthesized)
taggttttattgtatataaaatcctgcactgaatctgtgtctcctctgttacctacttttgccagtgaaatttaagttttaaaatactttcagaatgtatttttactactgcaagttttt

SEQ ID NO: 313448 - DNA, 120 bp, Artificial Sequence
  ENSG00000134755_32 (sequence is synthesized)
ggtctttaaaatgtcaagtagcatctctctctttctctctgtctctttctgtttctctctccagttttttttttttttttaatttccatatgggctaaagaatccaaatattttaaaaat

SEQ ID NO: 313449 - DNA, 120 bp, Artificial Sequence
  ENSG00000134755_33 (sequence is synthesized)
ctgtctctcttttcttctctcataaagtgaattattccttttttttgttttatgtaagtgtatatattcttagtttttcttgaaatcattgtaatgttaactttgttgtttcaaatatct

SEQ ID NO: 313450 - DNA, 120 bp, Artificial Sequence
  ENSG00000134755_34 (sequence is synthesized)
tggtgattgcttcattatctcttcaacaaaaaaaacctttaattttgccattgaaactgtagaactatgccatgcttttattagaagcagtgctctgtgttaacaacaagaatggtgtaa

SEQ ID NO: 313451 - DNA, 120 bp, Artificial Sequence
  ENSG00000134755_35 (sequence is synthesized)
ttagaattgggatgtggatatttactgtatgacaacacatttacagttctgtaatgcaaggatgcagtttaaaaatgtgaagtagtgatggtttttgaaataagctttaaaatataggga

SEQ ID NO: 313452 - DNA, 120 bp, Artificial Sequence
  ENSG00000134755_36 (sequence is synthesized)
tcttgaaggctccctggggtaactattttataacttagataaaatggctagtcatatctgtgtgtttgtaaagttatttttttaatattttaagattacaattttaacaaatgtagaaat

SEQ ID NO: 313453 - DNA, 120 bp, Artificial Sequence
  ENSG00000134755_37 (sequence is synthesized)
gagccaaactatttaaattttaaaacagtaaaacaaaatgaaacttaatagctcacaaaattccagtccatgtttcatgacttattttagtcaatgaattttctatttatactaaacata

SEQ ID NO: 313454 - DNA, 120 bp, Artificial Sequence
  ENSG00000134755_38 (sequence is synthesized)
tggacattttaaatgtgtttctaatatttttgattatctataatgtgcctgtcttcaattcacaagattgggttataacaattatttgccagattaacactagggaattatttgataacc

SEQ ID NO: 313455 - DNA, 120 bp, Artificial Sequence
  ENSG00000134755_39 (sequence is synthesized)
agcttatcttatcagtagttttattgctgatcaggcaaaaatagttttccaaagttatttttaataaagtatatacaaaattcttatatattactagtcatgataaagtaaattaagcag

SEQ ID NO: 313456 - DNA, 120 bp, Artificial Sequence
  ENSG00000134755_40 (sequence is synthesized)
tttttaaaacttagtgtgagtttgttcatcacaggtctgatatgagtttaagggatttcgcactccctgaatcagagaagtaagaccccttccttagattcctgttatacattttttaaa

SEQ ID NO: 313457 - DNA, 120 bp, Artificial Sequence
  ENSG00000134755_41 (sequence is synthesized)
atgtagagtttgttttggagacattttcagtgcattgttattgccatatttatataatatgactattctaaaggctgtgaggccatggggtattggttaagttgcttgcttttgctttgt

SEQ ID NO: 313458 - DNA, 120 bp, Artificial Sequence
  ENSG00000134755_42 (sequence is synthesized)
ccattttcatcattttaaaatgggggataataacagaacttgtttcctagggccattgtaagtcacttgaataaaaaatagttttgaagcatgagagtcatacagagcggtccacctaaa

SEQ ID NO: 313459 - DNA, 120 bp, Artificial Sequence
  ENSG00000134755_43 (sequence is synthesized)
aggcactcctgataataataaatgattttaaacaagtcacatgtacaattcatttcatgttaacaaaaggtcaattaagacaataagatactgaaaagatttttcttttcactgtagaac

SEQ ID NO: 313460 - DNA, 120 bp, Artificial Sequence
  ENSG00000134755_44 (sequence is synthesized)
atgtctcttcataatgatcacctgatgactgggtcttgtatgttcagtttttcagaatacgtagtgcaaagattgctgaggcattcgtatgggattgcctggtttgaaacactgtgaaac

SEQ ID NO: 313461 - DNA, 120 bp, Artificial Sequence
  ENSG00000134755_45 (sequence is synthesized)
tgtaaggttcaaattggatgaaaagcagaacatctgcttcttaaaatgggcactaattctaacaccctatgaaaattatgtgtattttagattctccctgtcaatcccttccttggcttc

SEQ ID NO: 313462 - DNA, 120 bp, Artificial Sequence
  ENSG00000134755_46 (sequence is synthesized)
ttccctagctgtccagctagacattagcagtcacttgcctgggaggtcatggctgtttggcagtcgtcatagtaaccccaagtgctaagacttccaagtaagagtgtcttgatgcaaatt

SEQ ID NO: 313463 - DNA, 120 bp, Artificial Sequence
  ENSG00000134755_47 (sequence is synthesized)
ccggctctatccttactagctgtgggatttgagaagtcacttaagctttctgtgcttagtttccttacttataggacctgtactgaggagggtagaggagtctacttgacagggctttgt

SEQ ID NO: 313464 - DNA, 120 bp, Artificial Sequence
  ENSG00000134755_48 (sequence is synthesized)
cagagttaattcatgaaaagagttggcatagagttagcactcaatcatgtaccttagccactgctattgttctatgagcagagaacgcctgagttgggaacaatttagcttcagtctcca

SEQ ID NO: 313465 - DNA, 120 bp, Artificial Sequence
  ENSG00000134755_49 (sequence is synthesized)
ctctgctttactgctgacatcttgccatgatgctcttattcacctttcccagaagcccgaccagtatttcaccagtgatggcctttgggaatttcatggctcatagtagcttccaggtct

SEQ ID NO: 313466 - DNA, 120 bp, Artificial Sequence
  ENSG00000134755_50 (sequence is synthesized)
ctcatttgtggtattcagcaagttacatcttattcatccctagccagaagtcagtgtgataaatcttgatgcttaactgaaaaggcaggtaaaattctcgaggaggcaaaatcataaaga

SEQ ID NO: 313467 - DNA, 120 bp, Artificial Sequence
  ENSG00000134755_51 (sequence is synthesized)
atcattactttttctttattcccatcttaagactgtttttatcttggatcccaattctgttttgccaaatctgactttgactacgggcttcccttttgtctccatctccattcctggact

SEQ ID NO: 313468 - DNA, 120 bp, Artificial Sequence
  ENSG00000134755_52 (sequence is synthesized)
ccagattgaagtcttgacaactgactttgctctgatcagcccctttagtatcatctccaaaataaaatgctttcccttctttgtgcctagaatcatcttgtttttcacctccttaaatat

SEQ ID NO: 313469 - DNA, 120 bp, Artificial Sequence
  ENSG00000134755_53 (sequence is synthesized)
tcaaagccctaagaagttacctgatatccgtataaacctacagctcttatatcagctcccctgcgagccccctgttaacctagcacttcaaactcatgcaaaaagacaaacacatactac

SEQ ID NO: 313470 - DNA, 120 bp, Artificial Sequence
  ENSG00000134755_54 (sequence is synthesized)
cacatcaaatcaggttctcctgagttatttacacaatggtgcccttcttccacttacttaggcttgaaacagagaatccttgattcctctctcttctttccatagcatcctctatttttt

SEQ ID NO: 313471 - DNA, 120 bp, Artificial Sequence
  ENSG00000134755_55 (sequence is synthesized)
gccaaaaactgccaaacttttgagaattgtagacacaatttcattcattaaatactttgtttgtactgtagtcatttgatgccttcccagtgcagtcatatgtagccttttaaaacagag

SEQ ID NO: 313472 - DNA, 120 bp, Artificial Sequence
  ENSG00000134755_56 (sequence is synthesized)
actagaaggactgtgcttctatgagaaagtgcaagatgaatcagccactctccccacccacacacttgaatgcaagtcaagacacggtggatgtaaggagtgggctaatgcctgtaaaac

SEQ ID NO: 313473 - DNA, 120 bp, Artificial Sequence
  ENSG00000134755_57 (sequence is synthesized)
acatcacacaatgcctggcacatagtaagtgcataatgcatgtttttaaaaagcttcagatgatgtgaaagaacttcaggacactagtgagtgaacttctgcttctgctactcccaatcc

SEQ ID NO: 313474 - DNA, 120 bp, Artificial Sequence
  ENSG00000134755_58 (sequence is synthesized)
aagcattcatgaggttgaggtgtaccctatgtcagctgttcccactcttcacttcattcctgatcaatattcccccccgccagtaccccagattaaatcttcagcatcactcagctccaa

SEQ ID NO: 313475 - DNA, 120 bp, Artificial Sequence
  ENSG00000134755_59 (sequence is synthesized)
tggtgtttatgcttccaatttcttccctcttctcttttttcaagggccatcaaagagcagatatgatcatgccattctgcctaagagctttctatagggttttagaggataaattctaaa

SEQ ID NO: 313476 - DNA, 120 bp, Artificial Sequence
  ENSG00000134755_60 (sequence is synthesized)
cacaaaatcacttttaaatacagatgcttcttgacttatgatggggttacatcctgataaacccatggtaaattgaaaatattacaaatcaaaacagcattttccatttaccatatgttc

SEQ ID NO: 313477 - DNA, 120 bp, Artificial Sequence
  ENSG00000134755_61 (sequence is synthesized)
aacttaaaataagcttattgggatgtagtctcataagtgtaggagaatgctgaatgcatatttctttgacaccatcataaagttgaaatatcagatcgagccatcttaagttgaggacct

SEQ ID NO: 313478 - DNA, 120 bp, Artificial Sequence
  ENSG00000134755_62 (sequence is synthesized)
tctgtactaatttccccaatctccttgtatccttcatttttcaatttgtgccttgctcatgattagttctctttttacaatgtctttactcattgtctctttctttgtaaaaatattact

SEQ ID NO: 313479 - DNA, 120 bp, Artificial Sequence
  ENSG00000134755_63 (sequence is synthesized)
ttttgaggatctagtaaaaatactaccgcctagacatttgtgtgtctagagcacatggctgtaaagttttcatctacaggtttgtgtgtgtgtttcttttctttcatgtaggacactaag

SEQ ID NO: 313480 - DNA, 86 bp, Artificial Sequence
  ENSG00000134755_64 (sequence is synthesized)
tttgtgtgtgtgtttcttttctttcatgtaggacactaaggaccaagaaaggtgttcacaattgcatgcctatacaactctggcca

SEQ ID NO: 313481 - DNA, 66 bp, Artificial Sequence
  ENSG00000134755_65 (sequence is synthesized)
acctcaagtgatctgtcagaattttgattcatcaaattatattgcccaggtcataaaggaaaaaag

SEQ ID NO: 313482 - DNA, 120 bp, Artificial Sequence
  ENSG00000134755_66 (sequence is synthesized)
attcatcaaattatattgcccaggtcataaaggaaaaaagagaaataataaaagttaggttttttattctcagcacatactaattttctgtggcataaattttacatgatagacatggtg

SEQ ID NO: 313483 - DNA, 120 bp, Artificial Sequence
  ENSG00000134755_67 (sequence is synthesized)
tatgttagattctgcactgaattgtttttcctcagaagacattgaatgactagaacaattgtttgcattcacagcttaatacaggaaagtgaagtgttgagattttggaatcccttctcc

SEQ ID NO: 313484 - DNA, 120 bp, Artificial Sequence
  ENSG00000134755_68 (sequence is synthesized)
cttgggatagtgagaggggcagacagaaggggtagtgtctgaatattgtggttcaggccagctcaaatcctaccaccaataattgcacgaacctacttgtagccaccaataattgcccca

SEQ ID NO: 313485 - DNA, 120 bp, Artificial Sequence
  ENSG00000134755_69 (sequence is synthesized)
tattgaaatgtaacccccaagggttctcctctgtcttcttgaccactgtatgcctaacatgtagagcagtagacactgaatatatttggtgtgtgatgaataaatggatgaatgaataaa

SEQ ID NO: 313486 - DNA, 120 bp, Artificial Sequence
  ENSG00000134755_70 (sequence is synthesized)
tgcacatgtgtgttaggtacctggctaagatcagactgcatattgcctaaagaattctttttctcaacttgaaaatttttagccaatgtgaaaattatgtttgcgactgtcacttcatca

SEQ ID NO: 313487 - DNA, 120 bp, Artificial Sequence
  ENSG00000134755_71 (sequence is synthesized)
ttgccaggttcaaacactgcagtgaattttttttttttaaccaaaaggccactctctaaccacctgaggaaaagcaactaaaaaccacttatgtttagaaattcaagaaatgattcttat

SEQ ID NO: 313488 - DNA, 120 bp, Artificial Sequence
  ENSG00000134755_72 (sequence is synthesized)
gagtttgccaaaattcccattagttatttataaaatgttgtaagtcaggccttgcttcaaaaaatatcttgagaaaccacaaagcaaagaaagtggcatacatctacgagctttttccat

SEQ ID NO: 313489 - DNA, 120 bp, Artificial Sequence
  ENSG00000134755_73 (sequence is synthesized)
gttaggctgggagaacattctgtaacaggaaaccaccgtgctcatgtgtgccctgagagaagaaaatcttcacacaagaagtagagaatagggaaagaaatgcatagcaatgagcctcag

SEQ ID NO: 313490 - DNA, 120 bp, Artificial Sequence
  ENSG00000134755_74 (sequence is synthesized)
aggcaatgcctatattgtgctgtgaactgataatgtcacttggaagataacacgtaagaggtagttcccagccctgctcttctcacgtaggacatgtaggacagacctatgtgttttgct

SEQ ID NO: 313491 - DNA, 120 bp, Artificial Sequence
  ENSG00000134755_75 (sequence is synthesized)
ttctggggagaggggatcagttgtatgaccccctttattatttcctcttcaccagttctggttttctaggtttgaggactgaaatcttgagaagtaggatctgatctttcttccaagaag

SEQ ID NO: 313492 - DNA, 120 bp, Artificial Sequence
  ENSG00000134755_76 (sequence is synthesized)
ctcttctctccccacctgtccttgtgttctttatcccatcaatagctaagaagcagaacctattacttttgcttaaatgttttaaattaagcaaatagatacattatgaggctgcatttt

SEQ ID NO: 313493 - DNA, 120 bp, Artificial Sequence
  ENSG00000134755_77 (sequence is synthesized)
aaactttagatatttcaaataagacatgcaatatagagtcttaaggtaaaacaaaagagcataatgctaaaaaacaggcaacaaaaagaagctagagctttgaaatagctagtcaggtaa

SEQ ID NO: 313494 - DNA, 120 bp, Artificial Sequence
  ENSG00000134755_78 (sequence is synthesized)
acagagcactttaatttaaaagaacacaccctaaatcttgttttatagaggaattttactgtgtcatggatttggagcatattcttctcaagccatttggtatatcctaaattctaggta

SEQ ID NO: 313495 - DNA, 120 bp, Artificial Sequence
  ENSG00000134755_79 (sequence is synthesized)
tacgtgagattaaagaagagatactcactgatgtgcctccgtatggagtgatagttggtgcatgggaaatggcaagggctgttttgtttcattctctcttccctttgtgactgtaccttt

SEQ ID NO: 313496 - DNA, 120 bp, Artificial Sequence
  ENSG00000134755_80 (sequence is synthesized)
gtatccctacagaaaatctgggcatagctgagaggttagaattgtggagtttctgctagccacatcttttctgtttacttattttgttaggattcaagggagaggacagagcagaacact

SEQ ID NO: 313497 - DNA, 120 bp, Artificial Sequence
  ENSG00000134755_81 (sequence is synthesized)
cactgcttttcagttaacaaatatgaaggcaaacttgctgatatattcgcttgtataatttttagagtgtgtttcactgaccatcagcatcagaatcaccctggtgttgctgaaaataga

SEQ ID NO: 313498 - DNA, 120 bp, Artificial Sequence
  ENSG00000134755_82 (sequence is synthesized)
gatccctcatgaatcagtcacaggagtaacaggctagtaggggaaaagtatagaagccttcacttttcaatacattttctaggtcattttttcttactctaaagtttgacaatcgttagg

SEQ ID NO: 313499 - DNA, 120 bp, Artificial Sequence
  ENSG00000134755_83 (sequence is synthesized)
gttttagtaactgggtttattgattatttggtggtttatgaaacttaagtatttaaaatttgccttttcatataaaacatattaagcaaaatgctagaaatgtaccaaagagttgaaaca

SEQ ID NO: 313500 - DNA, 120 bp, Artificial Sequence
  ENSG00000134755_84 (sequence is synthesized)
cattgatgagtaaaatttcacaatgtctgcaaattaagcatttcagaatgtacattgttccctgtggtttctactttctacatgcatgtgaacgagagaaatagtcttaaggtaggaatg

SEQ ID NO: 313501 - DNA, 120 bp, Artificial Sequence
  ENSG00000134755_85 (sequence is synthesized)
cagaacaaagccacacagaaaacatttaataaaaattaacaagttttgccacataaatgctgctagtcaagaagatgtatgcaaagtaagttgcatatatttttaaaaatcagaattgcc

SEQ ID NO: 313502 - DNA, 120 bp, Artificial Sequence
  ENSG00000134755_86 (sequence is synthesized)
aaatctccagagataaatagaactagaaaggtcaacagcaggtggaacaagtgactgtccagaaggcagcaactgtttggcatcactgtgctgttgtgtggggacctgtgtcaggtgggg

SEQ ID NO: 313503 - DNA, 120 bp, Artificial Sequence
  ENSG00000134755_87 (sequence is synthesized)
taacaggtaatgctcactgactgtggcggccaggagcttcagaggggcctgtgaatcagggatgggagatgagggtagagacgagacttttcagcttaaggagtgttcccctgggaacag

SEQ ID NO: 313504 - DNA, 120 bp, Artificial Sequence
  ENSG00000134755_88 (sequence is synthesized)
ggccaattggaaaactcccaggcaccaaggacatgagttaaccaatagggaatgagaggctcagaaagccagaggtgaaaggagcagagggtgtcaatatacacaagatgtgatgcagaa

SEQ ID NO: 313505 - DNA, 120 bp, Artificial Sequence
  ENSG00000134755_89 (sequence is synthesized)
ttaccaatgaaatcaagtaaaagggatttatccaaaagaagtaagagaatagtgtaaagattctactcacatgcaaggatgtttgtctcagtggcattaaatatatgaataactgaaaat

SEQ ID NO: 313506 - DNA, 120 bp, Artificial Sequence
  ENSG00000134755_90 (sequence is synthesized)
aaactaaatgttccatgacagggaagtaattaaatgatgtatgatccattactgtgatacaatgtaccataattgaggacaatggaaacaatgatcacacacagacttcgcagtcagaaa

SEQ ID NO: 313507 - DNA, 120 bp, Artificial Sequence
  ENSG00000134755_91 (sequence is synthesized)
gacgtggatccaaatctcagctttgttcttgctgtgttaccttgggaaatcacagaaacctcaaatttctagcatatcaaataaggacaaattaggaataaattatataattcacataaa

SEQ ID NO: 313508 - DNA, 120 bp, Artificial Sequence
  ENSG00000134755_92 (sequence is synthesized)
gatcctagcttactgcttggctcatcagtatatcaataaccagcagctatcactattgtgatatgatgatggaatatcatgcaatcattttattttgaaaactttaattaaatgggaaaa

SEQ ID NO: 313509 - DNA, 120 bp, Artificial Sequence
  ENSG00000134755_93 (sequence is synthesized)
gacataaactatagtagtattttaaaactaggataggtttccaaattattataatctcacatttaaataaatatgagactatctgtaatacactaagatattgagtgataaatcctcggt

SEQ ID NO: 313510 - DNA, 120 bp, Artificial Sequence
  ENSG00000134755_94 (sequence is synthesized)
aaatgaaatatttattcattgtgtgtttccatgttttcattttaccacaagcatttataatttataacattgagggaaaagttcatgtaaatgaaatacagagcaagaaaaactcacagg

SEQ ID NO: 313511 - DNA, 120 bp, Artificial Sequence
  ENSG00000134755_95 (sequence is synthesized)
ctttagaatttggggagcttacaggcctgtgaagaaaagccttttcatcttagctttaataaataaagttttcactgaacatattatatttacagtaaatgattaaattgaaagcaaaaa

SEQ ID NO: 313512 - DNA, 120 bp, Artificial Sequence
  ENSG00000134755_96 (sequence is synthesized)
gaaaatactgtatcatctcacattatcataactgagtgcattcatgtgcttttggtcttaaaattttactttaacgcacttaggatttgtcgtcagtaatttgttatgcactatctagac

SEQ ID NO: 313513 - DNA, 120 bp, Artificial Sequence
  ENSG00000134755_97 (sequence is synthesized)
taagaataggtattaatttactagaattgtcaaatgaaatatttcaagcaaagtttgcataatgaatgcaagtttaaaccaattaaatgtgttcactttttagcaagctaagctgctcct

SEQ ID NO: 313514 - DNA, 120 bp, Artificial Sequence
  ENSG00000134755_98 (sequence is synthesized)
tatttctcctgtagtagacacaatcacagttaatctttgcacaatgcatcgcattctccatgcaacctaacagagcggtctgggatagagcctgaactttgggtcccttggggcccaaca

SEQ ID NO: 313515 - DNA, 120 bp, Artificial Sequence
  ENSG00000134755_99 (sequence is synthesized)
ggcaaggttcagatctgggctctaccacaaaccatctgtgtaacctgaacctccctagtcttcagtttcctcatctgctttaaaaaattgctagaacatagttctatgtaaatgttcggt

SEQ ID NO: 313516 - DNA, 120 bp, Artificial Sequence
  ENSG00000134755_100 (sequence is synthesized)
gttaaaatttatttggtatctactgtatgtaagatatggcctctgctctcaaaaatatgtagtcccagaagtgatataatatgttcacggagacgtactattaaaaagtgccacaaaaaa

SEQ ID NO: 313517 - DNA, 120 bp, Artificial Sequence
  ENSG00000134755_101 (sequence is synthesized)
gctctgtaattgaccccagggcagggaccacggccgtcgccgagggcagcgggcagggcggagccggggccgaccgcgcactcaggaatcttaatatttgccagtgatgcctgcaaaaat

SEQ ID NO: 313518 - DNA, 120 bp, Artificial Sequence
  ENSG00000134757_0 (sequence is synthesized)
ataacagaccatctgtagactccttcggaaagcagcagagacgctgcagagggcttttcttagacatcaactgcagacggctggcaggatagaagcagcggctcacttggactttttcac

SEQ ID NO: 313519 - DNA, 120 bp, Artificial Sequence
  ENSG00000134757_1 (sequence is synthesized)
cagggaaatcagagacaatgatggggctcttccccagaactacaggggctctggccatcttcgtggtggtcatattggttcatggagaattgcgaatagagactaaaggtcaatatgatg

SEQ ID NO: 313520 - DNA, 120 bp, Artificial Sequence
  ENSG00000134757_2 (sequence is synthesized)
aagaagagatgactatgcaacaagctaaaagaaggcaaaaacgtgaatgggtgaaatttgccaaaccctgcagagaaggagaagataactcaaaaagaaacccaattgccaagattactt

SEQ ID NO: 313521 - DNA, 120 bp, Artificial Sequence
  ENSG00000134757_3 (sequence is synthesized)
cagattaccaagcaacccagaaaatcacctaccgaatctctggagtgggaatcgatcagccgccttttggaatctttgttgttgacaaaaacactggagatattaacataacagctatag

SEQ ID NO: 313522 - DNA, 120 bp, Artificial Sequence
  ENSG00000134757_4 (sequence is synthesized)
tcgaccgggaggaaactccaagcttcctgatcacatgtcgggctctaaatgcccaaggactagatgtagagaaaccacttatactaacggttaaaattttggatattaatgataatcctc

SEQ ID NO: 313523 - DNA, 120 bp, Artificial Sequence
  ENSG00000134757_5 (sequence is synthesized)
cagtattttcacaacaaattttcatgggtgaaattgaagaaaatagtgcctcaaactcactggtgatgatactaaatgccacagatgcagatgaaccaaaccacttgaattctaaaattg

SEQ ID NO: 313524 - DNA, 120 bp, Artificial Sequence
  ENSG00000134757_6 (sequence is synthesized)
ccttcaaaattgtctctcaggaaccagcaggcacacccatgttcctcctaagcagaaacactggggaagtccgtactttgaccaattctcttgaccgagagcaagctagcagctatcgtc

SEQ ID NO: 313525 - DNA, 120 bp, Artificial Sequence
  ENSG00000134757_7 (sequence is synthesized)
tggttgtgagtggtgcagacaaagatggagaaggactatcaactcaatgtgaatgtaatattaaagtgaaagatgtcaacgataacttcccaatgtttagagactctcagtattcagcac

SEQ ID NO: 313526 - DNA, 120 bp, Artificial Sequence
  ENSG00000134757_8 (sequence is synthesized)
gtattgaagaaaatattttaagttctgaattacttcgatttcaagtaacagatttggatgaagagtacacagataattggcttgcagtatatttctttacctctgggaatgaaggaaatt

SEQ ID NO: 313527 - DNA, 120 bp, Artificial Sequence
  ENSG00000134757_9 (sequence is synthesized)
ggtttgaaatacaaactgatcctagaactaatgaaggcatcctgaaagtggtgaaggctctagattatgaacaactacaaagcgtgaaacttagtattgctgtcaaaaacaaagctgaat

SEQ ID NO: 313528 - DNA, 120 bp, Artificial Sequence
  ENSG00000134757_10 (sequence is synthesized)
ttcaccaatcagttatctctcgataccgagttcagtcaaccccagtcacaattcaggtaataaatgtaagagaaggaattgcattccgtcctgcttccaagacatttactgtgcaaaaag

SEQ ID NO: 313529 - DNA, 120 bp, Artificial Sequence
  ENSG00000134757_11 (sequence is synthesized)
gcataagtagcaaaaaattggtggattatatcctgggaacatatcaagccatcgatgaggacactaacaaagctgcctcaaatgtcaaatatgtcatgggacgtaacgatggtggatacc

SEQ ID NO: 313530 - DNA, 120 bp, Artificial Sequence
  ENSG00000134757_12 (sequence is synthesized)
taatgattgattcaaaaactgctgaaatcaaatttgtcaaaaatatgaaccgagattctactttcatagttaacaaaacaatcacagctgaggttctggccatagatgaatacacgggta

SEQ ID NO: 313531 - DNA, 120 bp, Artificial Sequence
  ENSG00000134757_13 (sequence is synthesized)
aaacttctacaggcacggtatatgttagagtacccgatttcaatgacaattgtccaacagctgtcctcgaaaaagatgcagtttgcagttcttcaccttccgtggttgtctccgctagaa

SEQ ID NO: 313532 - DNA, 120 bp, Artificial Sequence
  ENSG00000134757_14 (sequence is synthesized)
cactgaataatagatacactggcccctatacatttgcactggaagatcaacctgtaaagttgcctgccgtatggagtatcacaaccctcaatgctacctcggccctcctcagagcccagg

SEQ ID NO: 313533 - DNA, 120 bp, Artificial Sequence
  ENSG00000134757_15 (sequence is synthesized)
aacagatacctcctggagtataccacatctccctggtacttacagacagtcagaacaatcggtgtgagatgccacgcagcttgacactggaagtctgtcagtgtgacaacaggggcatct

SEQ ID NO: 313534 - DNA, 120 bp, Artificial Sequence
  ENSG00000134757_16 (sequence is synthesized)
gtggaacttcttacccaaccacaagccctgggaccaggtatggcaggccgcactcagggaggctggggcctgccgccatcggcctgctgctccttggtctcctgctgctgctgttggccc

SEQ ID NO: 313535 - DNA, 120 bp, Artificial Sequence
  ENSG00000134757_17 (sequence is synthesized)
cccttctgctgttgacctgtgactgtggggcaggttctactgggggagtgacaggtggttttatcccagttcctgatggctcagaaggaacaattcatcagtggggaattgaaggagccc

SEQ ID NO: 313536 - DNA, 120 bp, Artificial Sequence
  ENSG00000134757_18 (sequence is synthesized)
atcctgaagacaaggaaatcacaaatatttgtgtgcctcctgtaacagccaatggagccgatttcatggaaagttctgaagtttgtacaaatacgtatgccagaggcacagcggtggaag

SEQ ID NO: 313537 - DNA, 120 bp, Artificial Sequence
  ENSG00000134757_19 (sequence is synthesized)
gcacttcaggaatggaaatgaccactaagcttggagcagccactgaatctggaggtgctgcaggctttgcaacagggacagtgtcaggagctgcttcaggattcggagcagccactggag

SEQ ID NO: 313538 - DNA, 120 bp, Artificial Sequence
  ENSG00000134757_20 (sequence is synthesized)
ttggcatctgttcctcagggcagtctggaaccatgagaacaaggcattccactggaggaaccaataaggactacgctgatggggcgataagcatgaattttctggactcctacttttctc

SEQ ID NO: 313539 - DNA, 120 bp, Artificial Sequence
  ENSG00000134757_21 (sequence is synthesized)
agaaagcatttgcctgtgcggaggaagacgatggccaggaagcaaatgactgcttgttgatctatgataatgaaggcgcagatgccactggttctcctgtgggctccgtgggttgttgca

SEQ ID NO: 313540 - DNA, 120 bp, Artificial Sequence
  ENSG00000134757_22 (sequence is synthesized)
gttttattgctgatgacctggatgacagcttcttggactcacttggacccaaatttaaaaaacttgcagagataagccttggtgttgatggtgaaggcaaagaagttcagccaccctcta

SEQ ID NO: 313541 - DNA, 120 bp, Artificial Sequence
  ENSG00000134757_23 (sequence is synthesized)
tttgttaagtgccagactttgtcaggaagtcaaggagcttctgctttgtccacctctgggtctgtccagccagctgtttccatccctgaccctctgcagcatggtaactatttagtaacg

SEQ ID NO: 313542 - DNA, 120 bp, Artificial Sequence
  ENSG00000134757_24 (sequence is synthesized)
gagacttactcggcttctggttccctcgtgcaaccttccactgcaggctttgatccacttctcacacaaaatgtgatagtgacagaaagggtgatctgtcccatttccagtgttcctggc

SEQ ID NO: 313543 - DNA, 120 bp, Artificial Sequence
  ENSG00000134757_25 (sequence is synthesized)
aacctagctggcccaacgcagctacgagggtcacatactatgctctgtacagaggatccttgctcccgtctaatatgaccagaatgagctggaataccacactgaccaaatctggatctt

SEQ ID NO: 313544 - DNA, 120 bp, Artificial Sequence
  ENSG00000134757_26 (sequence is synthesized)
tggactaaagtattcaaaatagcatagcaaagctcactgtattgggctaataatttggcacttattagcttctctcataaactgatcacgattataaattaaatgtttgggttcataccc

SEQ ID NO: 313545 - DNA, 120 bp, Artificial Sequence
  ENSG00000134757_27 (sequence is synthesized)
caaaagcaatatgttgtcactcctaattctcaagtactattcaaattgtagtaaatcttaaagtttttcaaaaccctaaaatcatattcgccaggaaattttcctaaacattcttaagct

SEQ ID NO: 313546 - DNA, 120 bp, Artificial Sequence
  ENSG00000134757_28 (sequence is synthesized)
tctatttttcccctgccaaaggaaggtgtttatcattttaaaatgcaatgtgatttagtggattaagcaggagcgctggttcttgtctccattgccttttcttatatcattgataatgat

SEQ ID NO: 313547 - DNA, 74 bp, Artificial Sequence
  ENSG00000134757_29 (sequence is synthesized)
cacaaggtatttgctaaagcattttgagctgcttggaaaaagggaagtagttgcagtagagtttcttccatctt

SEQ ID NO: 313548 - DNA, 120 bp, Artificial Sequence
  ENSG00000134757_30 (sequence is synthesized)
ggaaaaagggaagtagttgcagtagagtttcttccatcttcttggtgctgggaagccatatatgtgtcttttactcaagctaaggggtataagcttatgtgttgaatttgctacatctat

SEQ ID NO: 313549 - DNA, 120 bp, Artificial Sequence
  ENSG00000134757_31 (sequence is synthesized)
atttcacatattctcacaataagagaattttgaaatagaaatatcatagaacatttaagaaagtttagtataaataatattttgtgtgttttaatccctttgaagggatctatccaaaga

SEQ ID NO: 313550 - DNA, 120 bp, Artificial Sequence
  ENSG00000134757_32 (sequence is synthesized)
aaatattttacactgagctccttcctacacgtctcagtaacagatcctgtgttagtctttgaaaatagctcattttttaaatgtcagtgagtagatgtagcatacatatgatgtataatg

SEQ ID NO: 313551 - DNA, 120 bp, Artificial Sequence
  ENSG00000134757_33 (sequence is synthesized)
acgtgtattatgttaacaatgtctgcagattttgtaggaatacaaaacatggccttttttataagcaaaacgggccaatgactagaataacacatagggcaatctgtgaatatgtattat

SEQ ID NO: 313552 - DNA, 120 bp, Artificial Sequence
  ENSG00000134757_34 (sequence is synthesized)
aagcagcattccagaaaagtagttggtgaaataattttcaagtcaaaaagggatatggaaagggaattatgagtaacctctattttttaagccttgcttttaaattaaacagctacagcc

SEQ ID NO: 313553 - DNA, 120 bp, Artificial Sequence
  ENSG00000134757_35 (sequence is synthesized)
atttaagccttgaggataataaagcttgagagtaataatgttaggttagcaaaggtttagatgtatcacttcatgcatgctaccatgatagtaatgcagctcttcgagtcatttctggtc

SEQ ID NO: 313554 - DNA, 120 bp, Artificial Sequence
  ENSG00000134757_36 (sequence is synthesized)
attcaagatattcacccttttgcccatagaaagcaccctacctcacctgcttactgacattgtcttagctgatcacaagatcattatcagcctccattattccttactgtatataaaata

SEQ ID NO: 313555 - DNA, 120 bp, Artificial Sequence
  ENSG00000134757_37 (sequence is synthesized)
cagagttttatattttcctttcttcgtttttcaccatattcaaaacctaaatttgtttttgcagatggaatgcaaagtaatcaagtgtttgtgctttcacctagaagggtgtggtcctga

SEQ ID NO: 313556 - DNA, 120 bp, Artificial Sequence
  ENSG00000134757_38 (sequence is synthesized)
aggaaagaggtcccctaaatatcccccaccctggtgctcctccctctccctggtaccctgactaccaggaagtcaggtgctagagcagctggagaagtgcaggcagcctgtgcttccaca

SEQ ID NO: 313557 - DNA, 120 bp, Artificial Sequence
  ENSG00000134757_39 (sequence is synthesized)
gatgggggtgctgctgcaacaaggctttcaatgtgcccatcttaggtgggagaagctagatcctgtgcagcagcctggtaagtcctgaggaggttccattgctcttcctgctgctgtcct

SEQ ID NO: 313558 - DNA, 120 bp, Artificial Sequence
  ENSG00000134757_40 (sequence is synthesized)
ttgcttctcaacggtggctcgctctacagtctagagcacatgcagctaacttgtgcctctgcttatgcatgagggttaaattaacaaccataaccttcatttgaagttcaaaggtgtatt

SEQ ID NO: 313559 - DNA, 120 bp, Artificial Sequence
  ENSG00000134757_41 (sequence is synthesized)
caggatcctcaaagcattttaaccttgccgcttaaaacccaatttaccgtgaaatgggaattttgctgcattgttaaactgtagtggaaaccatgctatagtaataaaggttatataaga

SEQ ID NO: 313560 - DNA, 120 bp, Artificial Sequence
  ENSG00000134757_42 (sequence is synthesized)
gagaaattgaaattaaatgtgtttttaaatttcaaaaaaaaatcaatctttaggatgacttaaaaattgatttgccatgtaaaatgtatctgcattttttacacaaaacttgttttaagc

SEQ ID NO: 313561 - DNA, 120 bp, Artificial Sequence
  ENSG00000134757_43 (sequence is synthesized)
aaaacttgttttaagcataaaattttaaaactgtactacttgatgtattatacattttgaaccatatgtattaaaccataaacagtataatgttgttataataaaacaggcaataaattt

SEQ ID NO: 313562 - DNA, 120 bp, Artificial Sequence
  ENSG00000134758_0 (sequence is synthesized)
gccgtgcgccggttgctatacaggccgcacttcacaccccgtgcctccccgcctctcctggctcctccgcccagatccccggcgctcccgcgttcggtgacggccgggtaggctgtaggc

SEQ ID NO: 313563 - DNA, 120 bp, Artificial Sequence
  ENSG00000134758_1 (sequence is synthesized)
agcgcaatgccaagacagagctgctggcggcggcgggcgaatctccctgcaccatgagcctcggctccggccccgttaggggccgataagcacagcgcacgccgccctccatttgccccg

SEQ ID NO: 313564 - DNA, 120 bp, Artificial Sequence
  ENSG00000134758_2 (sequence is synthesized)
gggcctcggctgcgaagatagcggcggccggacaggaagctcgaggaaagcgctgggccgggtctctacgaacacgtgaaggaaaagcagctccgtccacaacgccgcttcggggctcct

SEQ ID NO: 313565 - DNA, 120 bp, Artificial Sequence
  ENSG00000134758_3 (sequence is synthesized)
agggagtcgggccccgggccgccaccgtcacctcggccgctgccgctgtcgccatcgccttgtttccccatcccccgccatggccgaggacctctctgcggccacgtcctacaccgaaga

SEQ ID NO: 313566 - DNA, 120 bp, Artificial Sequence
  ENSG00000134758_4 (sequence is synthesized)
tgatttctactgccccgtctgtcaggaggtgctcaaaacgcccgtgcggaccacggcctgtcagcacgttttctgtagaaaatgtttcctgactgcaatgagggaaagcggagcacattg

SEQ ID NO: 313567 - DNA, 120 bp, Artificial Sequence
  ENSG00000134758_5 (sequence is synthesized)
tcccctatgtcgtggaaatgtgactagaagagagagagcatgtcctgaacgggccttagaccttgaaaatataatgaggaagttttctggtagctgcagatgctgtgcaaaacagattaa

SEQ ID NO: 313568 - DNA, 120 bp, Artificial Sequence
  ENSG00000134758_6 (sequence is synthesized)
attctatcgcatgagacatcattacaaatcttgtaagaagtatcaggatgaatatggtgtttcttctatcattccaaactttcagatctctcaagattcagtagggaacagcaataggag

SEQ ID NO: 313569 - DNA, 120 bp, Artificial Sequence
  ENSG00000134758_7 (sequence is synthesized)
tgaaacatccacatctgataacacagaaacttaccaagagaatacaagttcttctggtcatcctacttttaagtgtcccctgtgtcaagaatcaaattttaccagacagcgtttactgga

SEQ ID NO: 313570 - DNA, 120 bp, Artificial Sequence
  ENSG00000134758_8 (sequence is synthesized)
tcactgtaacagtaatcacctatttcagatagttcctgtgacatgtcctatttgtgtgtctcttccttggggagatcctagccagattaccagaaatttcgttagtcatctaaatcagag

SEQ ID NO: 313571 - DNA, 120 bp, Artificial Sequence
  ENSG00000134758_9 (sequence is synthesized)
acatcaatttgattatggagaatttgtgaatcttcagctagatgaagaaacccaataccaaactgctgttgaagaatcttttcaagtaaacatctgaaggctgtagacatctctgcatct

SEQ ID NO: 313572 - DNA, 120 bp, Artificial Sequence
  ENSG00000134758_10 (sequence is synthesized)
ttgtacctgcaagtgccatctttaagggggaaactacatgaagtcaccgttacagtaacttgatgtgtatattaataaaagtaattcagtcattttagtttttgattgaaaataaaggta

SEQ ID NO: 313573 - DNA, 120 bp, Artificial Sequence
  ENSG00000134758_11 (sequence is synthesized)
gggcttctaaaaacttcatcatcttgataagttaaaaaatgaaagttatgacattagctttaaaggtgtaaaaaagatgtttcactaatgtaacggtgaaagagaatccctgttgtactt

SEQ ID NO: 313574 - DNA, 120 bp, Artificial Sequence
  ENSG00000134758_12 (sequence is synthesized)
tatctttttgtaatattatttttgaatttttcattattatgttgcttttgaaatttgatgcattcctcccatttactttattattgtacacatttaacacacagtagcaaattttgaacg

SEQ ID NO: 313575 - DNA, 120 bp, Artificial Sequence
  ENSG00000134758_13 (sequence is synthesized)
atgtgattgatataacctaacaaatctgagccagttattattagagttgcagaatagaaacttgaagtgctaaatggaataatccaaaggaaattttttaaatgcaggttctagctgaaa

SEQ ID NO: 313576 - DNA, 120 bp, Artificial Sequence
  ENSG00000134758_14 (sequence is synthesized)
attttaattctttaaaaagtgaaagcttgttgtaaagatattttctttttgttattagaaggaaatacaaagagaaaaatttctttctttcatgggcatttgataatttcagtctttgac

SEQ ID NO: 313577 - DNA, 120 bp, Artificial Sequence
  ENSG00000134758_15 (sequence is synthesized)
tgatttgtaagcctagaatatactaagctgaataacagctctttggcctcagaattttcagtagccagtatttctgattaactaagttgaaactcttattagaaactttcagttggtgat

SEQ ID NO: 313578 - DNA, 120 bp, Artificial Sequence
  ENSG00000134758_16 (sequence is synthesized)
attgtattctagaagatataaatgagaggtttggcttcatctcagtttagaaatttattcaaagctaaagatgtatatatacatatacttttgtgtgtatatatacacatatgtgtgtat

SEQ ID NO: 313579 - DNA, 120 bp, Artificial Sequence
  ENSG00000134758_17 (sequence is synthesized)
gcagtttgtcaggttatatatagaatttctattaaggattttttaaatggacaagcaatagggggttgaagtgtttatctgatttgtttaaaattttgtatatcaccaaatttttaaaaa

SEQ ID NO: 313580 - DNA, 120 bp, Artificial Sequence
  ENSG00000134758_18 (sequence is synthesized)
gtgatagtcacagtgctaagttatctagttggctactattacaccttaaaaattgagtttacacacacacaattacctgtttatatggtgctcatttgttattctcaaatataatgtgtg

SEQ ID NO: 313581 - DNA, 120 bp, Artificial Sequence
  ENSG00000134758_19 (sequence is synthesized)
accgtgatatagtgagaaagattctaccaaccactgtttcactactttttagttaaaattgggtatgttcttaatattcattagtgagaatcacaaagtattttgtagaaggcccaaatc

SEQ ID NO: 313582 - DNA, 120 bp, Artificial Sequence
  ENSG00000134758_20 (sequence is synthesized)
acagaataaaggactaagagtggatttgctgacattccatactaatatacattgtttatgctttctttaaaataactagaagaacataaaagaaagagaatctcagaagtagtttgctgc

SEQ ID NO: 313583 - DNA, 120 bp, Artificial Sequence
  ENSG00000134758_21 (sequence is synthesized)
taatatatacatatattgtataaaaaggtatattttggttttgttaaaacccttgttgacttttctacactgaacattttttttaacttgatttaataaaaatgttaattttggaagtgc

SEQ ID NO: 313584 - DNA, 120 bp, Artificial Sequence
  ENSG00000134758_22 (sequence is synthesized)
agttttgtaaaaacctttttcagtcaaacagtaaagactttatttatggattgtaataacaaccacaagaaaagccatacatcttaatgaacatacgcctttgttctgtcattttaaaga

SEQ ID NO: 313585 - DNA, 120 bp, Artificial Sequence
  ENSG00000134758_23 (sequence is synthesized)
gtggtgtttactatgtgtgtgcttgagcattttctttcagttacatgggtgtaatttaaaaaacagctcctttttaagacttttgaccatagtgttttccagtttaaagcaataactttc

SEQ ID NO: 313586 - DNA, 120 bp, Artificial Sequence
  ENSG00000134758_24 (sequence is synthesized)
atagtttctttcaaagtttaatacatccaatatgtcaagttaaaccattctgggatttgcaaagtttaatacatccaatatgtcaagttaaaccattctgggatttgcaaagtttaatac

SEQ ID NO: 313587 - DNA, 120 bp, Artificial Sequence
  ENSG00000134758_25 (sequence is synthesized)
atccaatatgtcaagttaaaccattctgggatttgggaacttctttaaaggaaaattgtagtagaggtcatcttgatggaattgtgttttaaagttttgtgaatgagttaaatatcattg

SEQ ID NO: 313588 - DNA, 120 bp, Artificial Sequence
  ENSG00000134758_26 (sequence is synthesized)
atagtcttgtgtgtctcacatatcagctttttcataaggaaaatactttatttgcttttatctgagaatttctcagtatgaaaatgattgtttaaaatttcccctctttttgtcagtgca

SEQ ID NO: 313589 - DNA, 120 bp, Artificial Sequence
  ENSG00000134758_27 (sequence is synthesized)
ttgggaatagggatagactttacagatttatggaaattaaatttatggggaaaagtttatttttaatattacttatagctgagtcagaattaaaggagggaattgtattgatactccaat

SEQ ID NO: 313590 - DNA, 120 bp, Artificial Sequence
  ENSG00000134758_28 (sequence is synthesized)
acctaaatttcacaataccacttaggaaagctatttcaacaaattacagttttattgttaaaacagagtcttatttgagatgtattgctttatttttcaattaaaagtggttttctccta

SEQ ID NO: 313591 - DNA, 120 bp, Artificial Sequence
  ENSG00000134758_29 (sequence is synthesized)
ctgtcaggaggtgctcaaaacgcccgtgcggaccacggcctgtcagcacgtattaaattctatcgcatgagacatcattacaaatcttgtaagaagtatcaggatgaatatggtgtttct

SEQ ID NO: 313592 - DNA, 120 bp, Artificial Sequence
  ENSG00000134759_0 (sequence is synthesized)
gcgtctcttgtttgtgcggctgaccagttggcgacatggtggcacccgtgctggagacttctcacgtgttttgctgcccaaaccgggtgcggggagtcctgaactggagctctgggccca

SEQ ID NO: 313593 - DNA, 120 bp, Artificial Sequence
  ENSG00000134759_1 (sequence is synthesized)
gaggacttctggcctttggcacgtcctgctccgtggtgctctatgaccccctgaaaagggttgttgttaccaacttgaatggtcacaccgcccgagtcaattgcatacagtggatttgta

SEQ ID NO: 313594 - DNA, 120 bp, Artificial Sequence
  ENSG00000134759_2 (sequence is synthesized)
aacaggatggctccccttctactgaattagtttctggaggatctgataatcaagtgattcactgggaaatagaggataatcagcttttaaaagcagtgcatcttcaaggccatgaaggac

SEQ ID NO: 313595 - DNA, 120 bp, Artificial Sequence
  ENSG00000134759_3 (sequence is synthesized)
ctgtttatgcggtgcatgctgtttaccagaggaggacatcagatcctgcattatgtacactgatcgtttctgcagctgcagattctgctgttcgactctggtctaaaaagggtccagaag

SEQ ID NO: 313596 - DNA, 120 bp, Artificial Sequence
  ENSG00000134759_4 (sequence is synthesized)
taatgtgccttcagactttaaactttggaaatggatttgctttggctctctgcttatcttttttgccaaatactgatgtaccaatattagcatgtggcaatgatgattgcagaattcaca

SEQ ID NO: 313597 - DNA, 120 bp, Artificial Sequence
  ENSG00000134759_5 (sequence is synthesized)
tatttgctcaacaaaatgatcagtttcagaaagtgctttctctctgtggacatgaggattggattagaggagtggaatgggcagcctttggtagagatcttttcctagcaagctgttcac

SEQ ID NO: 313598 - DNA, 120 bp, Artificial Sequence
  ENSG00000134759_6 (sequence is synthesized)
aagattgcctgataagaatatggaagctgtatataaagtcaacatctttagaaactcaggatgacgataacataagactgaaagaaaatacttttaccatagaaaatgaaagtgttaaaa

SEQ ID NO: 313599 - DNA, 120 bp, Artificial Sequence
  ENSG00000134759_7 (sequence is synthesized)
tagcatttgctgttactctggagacagtgctagccggtcatgaaaactgggtaaatgcagttcactggcaacctgtgttttacaaagatggtgtcctacagcagccagtgagattattat

SEQ ID NO: 313600 - DNA, 120 bp, Artificial Sequence
  ENSG00000134759_8 (sequence is synthesized)
ctgcttccatggataaaaccatgattctctgggctccagatgaagagtcaggagtttggctagaacaggttcgagtaggtgaagtaggtgggaatactttgggattttatgattgccagt

SEQ ID NO: 313601 - DNA, 120 bp, Artificial Sequence
  ENSG00000134759_9 (sequence is synthesized)
tcaatgaagatggctccatgatcattgctcatgctttccacggagcgttgcacctttggaaacagaatacagttaacccaagagagtggactccagagattgtcatttcaggacactttg

SEQ ID NO: 313602 - DNA, 120 bp, Artificial Sequence
  ENSG00000134759_10 (sequence is synthesized)
atggtgtccaagacctagtctgggatccagaaggagaatttattatcactgttggtactgatcagacaactagactttttgctccatggaagagaaaagaccaatcacaggtgacttggc

SEQ ID NO: 313603 - DNA, 120 bp, Artificial Sequence
  ENSG00000134759_11 (sequence is synthesized)
atgaaattgcaaggcctcagatacatgggtatgacctgaaatgtttggcaatgattaatcggtttcagtttgtatctggagcagatgaaaaagttcttcgggttttttctgcacctcgga

SEQ ID NO: 313604 - DNA, 120 bp, Artificial Sequence
  ENSG00000134759_12 (sequence is synthesized)
attttgtggaaaatttttgtgccattacaggacaatcactgaatcatgtgctctgtaatcaagatagtgatcttccagaaggagccactgtccctgcattgggattatcaaataaagctg

SEQ ID NO: 313605 - DNA, 120 bp, Artificial Sequence
  ENSG00000134759_13 (sequence is synthesized)
tctttcagggagatatagcttctcagccttctgatgaagaggagctgttaactagtactggttttgagtatcagcaggtggcctttcagccctccatacttactgagcctcccactgagg

SEQ ID NO: 313606 - DNA, 120 bp, Artificial Sequence
  ENSG00000134759_14 (sequence is synthesized)
atcatcttctgcagaatactttgtggcctgaagttcaaaaactatatgggcacggttatgaaatattttgtgttacttgtaacagttcaaagactctgcttgcctcagcttgtaaggcag

SEQ ID NO: 313607 - DNA, 120 bp, Artificial Sequence
  ENSG00000134759_15 (sequence is synthesized)
ctaagaaagagcatgcagctatcattctttggaacactacatcttggaaacaggtgcagaatttagttttccacagtttgacagtcacgcagatggccttctcacctaatgagaagttct

SEQ ID NO: 313608 - DNA, 120 bp, Artificial Sequence
  ENSG00000134759_16 (sequence is synthesized)
tactagctgtttccagagatcgaacctggtcattgtggaaaaagcaggatacaatctcacctgagttcgagccagtttttagtctttttgccttcaccaacaaaattacttctgtgcaca

SEQ ID NO: 313609 - DNA, 120 bp, Artificial Sequence
  ENSG00000134759_17 (sequence is synthesized)
gtagaattatttggtcttgtgattggagtcctgacagcaagtatttcttcactgggagtcgagacaaaaaggtggttgtctggggtgagtgcgactccactgatgactgtattgagcaca

SEQ ID NO: 313610 - DNA, 120 bp, Artificial Sequence
  ENSG00000134759_18 (sequence is synthesized)
acattggcccctgctcctcagtcctggacgtgggtggggctgtgacagctgtcagcgtctgcccagtgctccacccttctcaacgatacgtggttgcagtaggattggagtgtggaaaga

SEQ ID NO: 313611 - DNA, 120 bp, Artificial Sequence
  ENSG00000134759_19 (sequence is synthesized)
tttgcttatatacctggaaaaagactgatcaagttccagaaataaatgactggacccactgtgtagaaacaagtcaaagccaaagtcatacactggctatcagaaaattatgctggaaga

SEQ ID NO: 313612 - DNA, 120 bp, Artificial Sequence
  ENSG00000134759_20 (sequence is synthesized)
attgcagtggaaaaactgaacagaaggaagcagaaggtgctgagtggttacactttgcaagctgtggtgaagatcacactgtgaagatacacagagtcaataaatgtgcactgtaatgga

SEQ ID NO: 313613 - DNA, 120 bp, Artificial Sequence
  ENSG00000134759_21 (sequence is synthesized)
cttaataactacatgcttgcagtcactggtatcttaaaatattatcatgtaaacaggtcatctttaccttcataactgaattgagtttctgggttttttttttttttgagatggagtctt

SEQ ID NO: 313614 - DNA, 120 bp, Artificial Sequence
  ENSG00000134759_22 (sequence is synthesized)
ttaagtcacatagcagtagtccttatttcagtgctagaccctttgaaatgcgatgaaagctatatggacccttcgctttgttatataacatatgcacacatacccagaattttgcacata

SEQ ID NO: 313615 - DNA, 120 bp, Artificial Sequence
  ENSG00000134759_23 (sequence is synthesized)
tgttcagagattcctagacctgcagacctgcctctgtgtgtcccaatttaagaacctctgttctttcttcatgactggatttgcccaattttgtgttattttgggacttaatttgtccct

SEQ ID NO: 313616 - DNA, 120 bp, Artificial Sequence
  ENSG00000134759_24 (sequence is synthesized)
ctttgggacatttccttatttattgccctcttcagagagtagatgtagaaaataaagagaggaaacctagattacttaattttattttaacattttctatagatagcataccacgccaag

SEQ ID NO: 313617 - DNA, 120 bp, Artificial Sequence
  ENSG00000134759_25 (sequence is synthesized)
tgtgctctgtcttgatccccttctttctagcatctgccagacattgtagagtttcgcaagcagttgtaggtttgagctgcagccagtcatttcttttattctttaaaagtacatagattt

SEQ ID NO: 313618 - DNA, 120 bp, Artificial Sequence
  ENSG00000134759_26 (sequence is synthesized)
gtctttttagggctttactgaaagtaaaatatcctgacatttaaactgacagatgtaggaggtaaaaaatagagttctgaaacatttgaatttatgtgacagctgaagtcacgagatgag

SEQ ID NO: 313619 - DNA, 120 bp, Artificial Sequence
  ENSG00000134759_27 (sequence is synthesized)
ggatatatgtcccccagggaggatgcagaaagaagaaaagggtactggaaacagcatgtcagtggtgccagctgagggctggaggcagccaggagagttgggagcctgggtgctgggtgg

SEQ ID NO: 313620 - DNA, 120 bp, Artificial Sequence
  ENSG00000134759_28 (sequence is synthesized)
agagaggttaacagggaagacatgggaagtattgtgaaggctggtgtgagcaggggactactccagccctgttggaacatagagccatttggcagattgacaatgcagtgacagctgtat

SEQ ID NO: 313621 - DNA, 120 bp, Artificial Sequence
  ENSG00000134759_29 (sequence is synthesized)
ataataaatgtgttgaaaggaggaaggtgaggattttcttggtgggagtttatgctgttatttaacatattttgcttccaaaggggttaagatgttttacctaaatggaggtttctaggt

SEQ ID NO: 313622 - DNA, 120 bp, Artificial Sequence
  ENSG00000134759_30 (sequence is synthesized)
cagtgctatacaatatttctaatctgtgttttatagtgtgagctacatatgtaattttaaaattttcaagtagccacataataaaggaaacaggtgaaatttaatgacatatttccttta

SEQ ID NO: 313623 - DNA, 120 bp, Artificial Sequence
  ENSG00000134759_31 (sequence is synthesized)
atacggtatatccaaaatattattatgtcaacctataatcagtataaaaacctgttactgaaatattttatagggcccatctcagttcagactagccacatttaagtgcttcatagccac

SEQ ID NO: 313624 - DNA, 120 bp, Artificial Sequence
  ENSG00000134759_32 (sequence is synthesized)
atgtggctcatggccatccatatttggacaatgtactttagactattgcatctgtatactcttgtgccgtcagctggggggtggggtgtgtgtgcgtgtataccaaggcagtgagcatct

SEQ ID NO: 313625 - DNA, 120 bp, Artificial Sequence
  ENSG00000134759_33 (sequence is synthesized)
cccattttcctgcttatcagctgaggaatctttacccacattgacacatgggcttgttctgacccaagtgcatgcaggcttccagagcagattcagaggcctaacttagtcctttagctt

SEQ ID NO: 313626 - DNA, 120 bp, Artificial Sequence
  ENSG00000134759_34 (sequence is synthesized)
tcctcccagcacagaactcccaaggttatctgcaagtaggccttgcctagagagactgagttttcaagttgtcagttttcccaaattgtcctcaagcatcttcctctggaatcaccttac

SEQ ID NO: 313627 - DNA, 120 bp, Artificial Sequence
  ENSG00000134759_35 (sequence is synthesized)
tgtttagtaaacattcagaggacttgctacacatctgggcagtctgcattgtaattcatatgtgtttacacatttgtgtcttcatctgctaaagcacctttgaaccatattgtaattcat

SEQ ID NO: 313628 - DNA, 120 bp, Artificial Sequence
  ENSG00000134759_36 (sequence is synthesized)
aatatctgaagcaattattatgaattgtagtaattcataatattgaagcgattcataatatctgaagcaatccccagatacgggttaggcatggccctgctctgagcaggatggcaaaag

SEQ ID NO: 313629 - DNA, 120 bp, Artificial Sequence
  ENSG00000134759_37 (sequence is synthesized)
tggcagtccgtgacgcagcccttgttaccccaggctattactaaatggtggtggtggttttatcttaattaaaatgacatcaccaacaatgggccctttcctgtctgccaggaaaagttt

SEQ ID NO: 313630 - DNA, 120 bp, Artificial Sequence
  ENSG00000134759_38 (sequence is synthesized)
tctgtagtgacgcacgtgttgtgtgtgtatgtgtgcgtttgaggctatattactcattgctacggcagttcaaaatgacttggaaaaaaacaatgaacgctggtcattgatatgtatact

SEQ ID NO: 313631 - DNA, 120 bp, Artificial Sequence
  ENSG00000134759_39 (sequence is synthesized)
gacatgtttgagggaagttactgtggtctgtaacttatgaaatacataaaaaatatgatgggtggagtgacggacacatggacagatatgaagcaagcactgtaaaatattagtggtagt

SEQ ID NO: 313632 - DNA, 120 bp, Artificial Sequence
  ENSG00000134759_40 (sequence is synthesized)
ttttgtatgcccatactcacggcaccattattcacagtagctaagagatggaagcaatatgtgcccatcagtgggtgaatgatcaacaaaatgtggtatattcatacagtggaatattat

SEQ ID NO: 313633 - DNA, 120 bp, Artificial Sequence
  ENSG00000134759_41 (sequence is synthesized)
tcagcctctaaaaggaagatacgctgacatgtgctgcaacatggatgaatcttgaggacatgatgctaagtgaagtaagccagtcactggaagacaaatactctatgcttccatttatgt

SEQ ID NO: 313634 - DNA, 120 bp, Artificial Sequence
  ENSG00000134759_42 (sequence is synthesized)
gaagtatctagagcagtcaaatgcatagaaacaagtagaatggtagttgccaaggactgggggaggaggaaatgaggagttgtttaatgggtatagtgtttcagttttgcaagataaaaa

SEQ ID NO: 313635 - DNA, 120 bp, Artificial Sequence
  ENSG00000134759_43 (sequence is synthesized)
gtcctgtggattggttgcacagttaagttatgtgaatgctgtatgccaactcaactgtacactctaaaatggttaagatggtaaatcttatctttattttaccacagttttttttaaagc

SEQ ID NO: 313636 - DNA, 120 bp, Artificial Sequence
  ENSG00000134759_44 (sequence is synthesized)
atggtaaacaccatttcccaggatgtaaatcggtactaaaaaaaaagtgctccaaagtaagatatatttgggaaacacagggataactaaggttagataggtgttctttattgcaggaat

SEQ ID NO: 313637 - DNA, 120 bp, Artificial Sequence
  ENSG00000134759_45 (sequence is synthesized)
tctaagagcatttaacaaattaatttacactgggaattttcagtgtggagggtctggctcatagcatttcacaaacattatacttcagagtcccaaagcctttaaataaaatgttaatgg

SEQ ID NO: 313638 - DNA, 120 bp, Artificial Sequence
  ENSG00000134759_46 (sequence is synthesized)
tagaaactccttaaggggtgttcactgtacaattctttcaacttttctgcatgctgggagtttttttggtaacaacgtgttggggaaaatggccttggaatatttcattcaaattggagc

SEQ ID NO: 313639 - DNA, 120 bp, Artificial Sequence
  ENSG00000134759_47 (sequence is synthesized)
caagctaacacaaagctgttgctgctagtgggaacagccctgatgtccatgtaacaagctgccctccccaactccctccttcctgtttctccctcctcggcacccacttctaggattaac

SEQ ID NO: 313640 - DNA, 120 bp, Artificial Sequence
  ENSG00000134759_48 (sequence is synthesized)
aggcagggagacgggagagcccagctctgggtacagttgggccacagcagaaggagggccagggtagaggtttgggccttggctctgatgcttgaacataaacacacctagtcagaagta

SEQ ID NO: 313641 - DNA, 120 bp, Artificial Sequence
  ENSG00000134759_49 (sequence is synthesized)
catcagtacaaagtgggccctacaaaattatagggtcagaaaacaggtaagtggttaccaggggctgggaatggggagaggagtgactacagagggacctagattcttcaacaaatacat

SEQ ID NO: 313642 - DNA, 120 bp, Artificial Sequence
  ENSG00000134759_50 (sequence is synthesized)
tacaagaggaaaagggaagggaagggaagcctggagattgaaagatacttgagacgtgtgaatccagtgcaatgtatgaaccttgtttgcctcttgatctgaactagccaatcaatcttg

SEQ ID NO: 313643 - DNA, 120 bp, Artificial Sequence
  ENSG00000134759_51 (sequence is synthesized)
taaaaatgtgcttaagggacaaagcaaatttgaactctggctggatatttgatgatattaaggaaacaacatttaaacatatgacagtggggctatggttatgattggttttgttttttt

SEQ ID NO: 313644 - DNA, 120 bp, Artificial Sequence
  ENSG00000134759_52 (sequence is synthesized)
tcttgaactcctgggctcaagcagttctcccacctcagccttggtttaagaaaaaaaaaaaaaaagttctcttgaatcataatttcagtatttatggatgaaatcaatttatgtcttggg

SEQ ID NO: 313645 - DNA, 120 bp, Artificial Sequence
  ENSG00000134759_53 (sequence is synthesized)
aatttcagtatttatggatgaaatcaatttatgtcttgggttgtttcataatgattgtgtgtgtgtcaaggactagatgggttttagatgtgtggattattaatgaagctgggcagtgtt

SEQ ID NO: 313646 - DNA, 120 bp, Artificial Sequence
  ENSG00000134759_54 (sequence is synthesized)
ggggtggtcatactattctaattttttaatatacttaaaatttccttataagaattgtttagaaagaatgagcatatccataagttaaatacaaaaattgttacattgtgaggagttctt

SEQ ID NO: 313647 - DNA, 120 bp, Artificial Sequence
  ENSG00000134759_55 (sequence is synthesized)
ccccttctagcatgtagtggatggtccagtattaaggctctgccatgcttaaacaagagactggcactccaaggacaatgaggctgaggccagaagagagacagcgtgttggatggctgc

SEQ ID NO: 313648 - DNA, 120 bp, Artificial Sequence
  ENSG00000134759_56 (sequence is synthesized)
gccagaagagagacagcgtgttggatggctgcatgtggttggtggatagaggactctgagccccactctggtggactcagagatctgggacccgggccgggcgtggtggctcatgcctgt

SEQ ID NO: 313649 - DNA, 120 bp, Artificial Sequence
  ENSG00000134759_57 (sequence is synthesized)
aaaaaaaaaaaaaaaaaaaaaaaatctgggacccagtactgagtgaagacaccagagtgaaggagagaggccatgctgtgtccgagaagctcctactggggtggaagggacagctccaca

SEQ ID NO: 313650 - DNA, 120 bp, Artificial Sequence
  ENSG00000134759_58 (sequence is synthesized)
aaggctgctcttgcaggggctctcctgcagcaaggtgcctgctgactgtccccagactgtctcccgacacagagggatgcaaaggcagcctcttcctgctcagtggaatagggaaattat

SEQ ID NO: 313651 - DNA, 120 bp, Artificial Sequence
  ENSG00000134759_59 (sequence is synthesized)
atcacctttcacttcccactctcacttctgcccctgctacccttagtctttggcttttgctgacattttcccctcttatcttttctcctgaccaagttctaggtatttcatagggcagtc

SEQ ID NO: 313652 - DNA, 120 bp, Artificial Sequence
  ENSG00000134759_60 (sequence is synthesized)
taggtgagggttggaaccccaatgagttgggcaacagaaacccagctcacactggctgtcactgtgggcaagctgttcccctcatctctaaaagtggagatgagattagtgtatgagtct

SEQ ID NO: 313653 - DNA, 120 bp, Artificial Sequence
  ENSG00000134759_61 (sequence is synthesized)
ggcttccattcaactgtgtgtgaaaaaaaattgtaaaattttctttctggtttacgcaagttaaaagtttatttctctcatatgaaaggagtcaaggcagacagaccaggatggggaggg

SEQ ID NO: 313654 - DNA, 120 bp, Artificial Sequence
  ENSG00000134759_62 (sequence is synthesized)
agatgtctacagggtcaaggacccaggctcttatttcgctgtctgacgtccttagtatgaggctttcaccttccaggatggctgcttggcctcctgccatggtctttgcgttccagccag

SEQ ID NO: 313655 - DNA, 120 bp, Artificial Sequence
  ENSG00000134759_63 (sequence is synthesized)
caaagaggaagaaggcatgaagaaaggcctgcccctgactttaaaaacatttcttggaagtcccatactattttgcttaatctcctcgggcagaatttagtgttgtggccataccgagct

SEQ ID NO: 313656 - DNA, 120 bp, Artificial Sequence
  ENSG00000134759_64 (sequence is synthesized)
tcaggagaagctgggaaattaaatctttattgcagatgcccatgtgctcagcagagaactggggtgcttcattctggaagaaagggagaacaacagtaaccagtgtgtaggattgttctg

SEQ ID NO: 313657 - DNA, 120 bp, Artificial Sequence
  ENSG00000134759_65 (sequence is synthesized)
agaattaaatgagccaatatatgaaaaacactagtttggtccctgggatataaataagacagcagtaatttgtatctggtactattatgattaaataaagctctgctcgtgtcaactcca

SEQ ID NO: 313658 - DNA, 120 bp, Artificial Sequence
  ENSG00000134759_66 (sequence is synthesized)
ttactgtgattagaaatctcaaatacatgacattttcaagttgacaaagtataatactgcattcctggtctgctggacactcagttccattgaacattgaactcctaagtgggaaaagtg

SEQ ID NO: 313659 - DNA, 120 bp, Artificial Sequence
  ENSG00000134759_67 (sequence is synthesized)
taattcctgccatgatgctgaaactaccacacccccagtaactttttatcttaaaagtttccacttgattattatgggattgaagaaaaactgactttcaagccaacttcactggatcct

SEQ ID NO: 313660 - DNA, 120 bp, Artificial Sequence
  ENSG00000134759_68 (sequence is synthesized)
tggaacgaggcagggcctggaagccaccagcctctctcgccctctgtagcaggagctgcgactctatggtttcatgttacgcttccattctgtgcaaggctctgtggaaggagaagctgc

SEQ ID NO: 313661 - DNA, 76 bp, Artificial Sequence
  ENSG00000134759_69 (sequence is synthesized)
tgggactagaggcacaccaccaattggccaggcgggtctcaaactcctcgtctcaggtgatctgcttgcctcggcc

SEQ ID NO: 313662 - DNA, 120 bp, Artificial Sequence
  ENSG00000134759_70 (sequence is synthesized)
atgtaatgatgcattttttaaaataccagagcaaatactttgttttatctttgccgatgaaactgtagtacatggctagaaaccttgcaaagagaaggctttacagtgtgtgatctgtct

SEQ ID NO: 313663 - DNA, 120 bp, Artificial Sequence
  ENSG00000134759_71 (sequence is synthesized)
agtctatttcaaaagtcagtgcatataaattgaatattaagtcatatggtgtatatggcacttaaacatcacttcctaacaggtaaaaacccagctttctctgctttgtgaatagtgtat

SEQ ID NO: 313664 - DNA, 120 bp, Artificial Sequence
  ENSG00000134759_72 (sequence is synthesized)
agggcatgcacattttgtgtgttgttaacatggtcagacagacttcttgaaaaattcttttcaacttagaggacctatttctggctcagccattttattggcacatttatccaattaaat

SEQ ID NO: 313665 - DNA, 120 bp, Artificial Sequence
  ENSG00000134759_73 (sequence is synthesized)
gtcagtacaaaagcattccctactagaaaaatagctgtgtccacagccttctggtgaggggttggttgcctggcttcagtctatttcaaaagtcagtgcatataaattgaatattaagtc

SEQ ID NO: 313666 - DNA, 120 bp, Artificial Sequence
  ENSG00000134759_74 (sequence is synthesized)
tataatcaagaaatgactttttttgttcatttgttttttaagaggtagagtttcactctgtcacccaggctgacgtgcagtggtgcgatcgtggctcacctcagcctcctaagtagctgg

SEQ ID NO: 313667 - DNA, 120 bp, Artificial Sequence
  ENSG00000134759_75 (sequence is synthesized)
gactacaggtgcctgacaccatgcctggctgatttctgtttgtttgtttgtttgtttttgtagagatggggtcttactttgttgcccaggctggtctcagaaatgacttttatatatact

SEQ ID NO: 313668 - DNA, 120 bp, Artificial Sequence
  ENSG00000134759_76 (sequence is synthesized)
ctccttgaggacacaggagagcagtgcagcatgtcctgggctgatgcctgcagagtcttttgtaaggcagggacagttgggacactgtgaagaactactttagagcaatgacgaagataa

SEQ ID NO: 313669 - DNA, 120 bp, Artificial Sequence
  ENSG00000134759_77 (sequence is synthesized)
actgcatttcctgtcagaccctgaaacccattgaaatgttatggttcgatgaggtccctttatggatgagaggatgcccgactttatggattgcatgggagttggaggcctgcaagatag

SEQ ID NO: 313670 - DNA, 120 bp, Artificial Sequence
  ENSG00000134759_78 (sequence is synthesized)
gagaaagataacagagtgaagggtagagcctcatgtctttgaagcctttcaaagttcttggataactgaggaagacttgaccttccttgtaagatttaaatggagatgatctttatttgg

SEQ ID NO: 313671 - DNA, 120 bp, Artificial Sequence
  ENSG00000134759_79 (sequence is synthesized)
gttgacctacttgtgattatgtagtcaagatggcatgcattcagatatctcagttcaagaaacataaacatctgtatgtaggaagttaggttttgcaaatggtgatagaatgctaccaca

SEQ ID NO: 313672 - DNA, 120 bp, Artificial Sequence
  ENSG00000134759_80 (sequence is synthesized)
aagcctaatggataacttatcctaagctaggattttatgggacaggaataatgaagatacaactaagaaaactcatggttgagtggtttcttctctctgaactattttattaatatagta

SEQ ID NO: 313673 - DNA, 120 bp, Artificial Sequence
  ENSG00000134759_81 (sequence is synthesized)
ctattttaaattatgaaatgtagaggaaaccattatccttagctttttcctaccctctccagtcacctccttcattgagaagggcatattaggcatccatctggataaatgacccctgag

SEQ ID NO: 313674 - DNA, 120 bp, Artificial Sequence
  ENSG00000134759_82 (sequence is synthesized)
gagcaactttaaaaatactataattctaatctaaatttttcttttgcacttatttaaaattctctataccaagactttttcatgtaagtcattttgctgtctgtaacatcattaaaattt

SEQ ID NO: 313675 - DNA, 120 bp, Artificial Sequence
  ENSG00000134759_83 (sequence is synthesized)
aatcaagtgattcactgggaaatagaggataatcagatatgggcacggttatgaaatattttgtgttacttgtaacagttcaaagactctgcttgcctcagcttgtaaggcagctaagaa

SEQ ID NO: 313676 - DNA, 120 bp, Artificial Sequence
  ENSG00000134760_0 (sequence is synthesized)
agaaacacctcaaagcctgcatgtaagaacatctactgagaaattattttaatcagacaccagctgagtgggagaaagaaaaagaacagagaagaacaaacaaaactcccttggtcttgg

SEQ ID NO: 313677 - DNA, 120 bp, Artificial Sequence
  ENSG00000134760_1 (sequence is synthesized)
atgtaagagaatccagcagagatggactggagtttcttcagagtagttgcaatgctgttcatttttctggtggtggtagaagttaacagtgaattccgaatccaggtaagagattataac

SEQ ID NO: 313678 - DNA, 120 bp, Artificial Sequence
  ENSG00000134760_2 (sequence is synthesized)
actaaaaatggcaccatcaaatggcattcaatccgaaggcagaaacgtgaatggatcaagttcgcagcagcctgtcgtgaaggtgaagacaactcaaagaggaacccaatcgccaaaatt

SEQ ID NO: 313679 - DNA, 120 bp, Artificial Sequence
  ENSG00000134760_3 (sequence is synthesized)
cactcagattgtgctgcaaaccagcaagttacataccgcatctctggagtaggaattgatcagccaccatatgggatctttgtcattaatcagaaaactggtgaaattaatataacatcc

SEQ ID NO: 313680 - DNA, 120 bp, Artificial Sequence
  ENSG00000134760_4 (sequence is synthesized)
atagttgatcgagaggtcactcctttcttcattatctactgccgagctctgaactcaatgggccaagatttagagaggcctctagagctcagagtcagggttttggatataaatgacaac

SEQ ID NO: 313681 - DNA, 120 bp, Artificial Sequence
  ENSG00000134760_5 (sequence is synthesized)
cctccagtgttttcaatggctacatttgcaggacaaatagaagaaaattctaatgcaaatacactggtgatgatactcaatgctactgacgcagatgaaccgaacaatttgaactcaaaa

SEQ ID NO: 313682 - DNA, 120 bp, Artificial Sequence
  ENSG00000134760_6 (sequence is synthesized)
atagccttcaagattataagacaagaaccttcagattcaccaatgtttattatcaacagaaatactggagaaattcgaacgatgaataattttctagacagagagcaatacggccagtat

SEQ ID NO: 313683 - DNA, 120 bp, Artificial Sequence
  ENSG00000134760_7 (sequence is synthesized)
gctcttgctgtaagaggctctgaccgagatggcggggcagatggcatgtcagcggaatgtgagtgcaacattaaaatcctcgatgtcaatgataatatcccttacatggaacagtcttca

SEQ ID NO: 313684 - DNA, 120 bp, Artificial Sequence
  ENSG00000134760_8 (sequence is synthesized)
tataccatagaaattcaagaaaatactctaaattcaaatttgctcgagattagagtaattgatttggatgaagagttctcagctaactggatggcagtaattttctttatctctggaaat

SEQ ID NO: 313685 - DNA, 120 bp, Artificial Sequence
  ENSG00000134760_9 (sequence is synthesized)
gaaggaaattggtttgagatagaaatgaatgaaagaacaaatgtgggaattttaaaggttgttaagcccttagattatgaagctatgcagagtctgcaactcagtattggtgtcagaaat

SEQ ID NO: 313686 - DNA, 120 bp, Artificial Sequence
  ENSG00000134760_10 (sequence is synthesized)
aaagctgaatttcatcattcaattatgtctcaatataaactgaaagcatctgcaatttctgtgactgtgttaaatgtaattgaaggcccagtgtttcgtccaggttcaaagacatatgtt

SEQ ID NO: 313687 - DNA, 120 bp, Artificial Sequence
  ENSG00000134760_11 (sequence is synthesized)
gtaactggtaatatgggatcaaatgataaagtgggagactttgtagctactgacctggacacaggtagaccttcaacgactgttaggtatgtaatgggaaataatccagctgacctgcta

SEQ ID NO: 313688 - DNA, 120 bp, Artificial Sequence
  ENSG00000134760_12 (sequence is synthesized)
gctgttgattcaagaacaggcaaactcactttgaaaaataaagttaccaaggaacagtacaatatgctcggaggaaaataccaaggaacgattctctctatagatgataatcttcaaaga

SEQ ID NO: 313689 - DNA, 120 bp, Artificial Sequence
  ENSG00000134760_13 (sequence is synthesized)
acttgcactggtacaattaatattaacattcaaagttttggtaatgacgacaggactaatacagagccgaacactaaaattactaccaatactggcagacaagaaagtacttcttccact

SEQ ID NO: 313690 - DNA, 120 bp, Artificial Sequence
  ENSG00000134760_14 (sequence is synthesized)
aactatgataccagcacaacttctactgactctagccaagtatattcttctgaacccggaaacggagccaaagatttgttatcagacaatgtacattttggtcctgctggcattggactc

SEQ ID NO: 313691 - DNA, 120 bp, Artificial Sequence
  ENSG00000134760_15 (sequence is synthesized)
ctcatcatgggattcttggtcttaggattggtcccatttttgatgatctgttgtgattgtggaggtgctcctcgtagtgcagctggctttgagcctgttcccgaatgttcagatggagca

SEQ ID NO: 313692 - DNA, 120 bp, Artificial Sequence
  ENSG00000134760_16 (sequence is synthesized)
attcattcatgggcagtagaaggaccacagcctgaacccagggatataaccactgtcataccacaaataccacctgataacgcaaatataattgaatgcattgacaactcaggagtttat

SEQ ID NO: 313693 - DNA, 120 bp, Artificial Sequence
  ENSG00000134760_17 (sequence is synthesized)
acaaatgagtatggtggcagagaaatgcaagatctgggaggaggagagagaatgacaggatttgaactaacagagggagttaaaacttcaggaatgcctgagatatgtcaagaatactct

SEQ ID NO: 313694 - DNA, 120 bp, Artificial Sequence
  ENSG00000134760_18 (sequence is synthesized)
ggaacattaagaagaaattctatgagggaatgtagagaaggaggtctgaatatgaatttcatggaaagctacttctgtcagaaagcatatgcttacgcagatgaagatgaaggacgccca

SEQ ID NO: 313695 - DNA, 120 bp, Artificial Sequence
  ENSG00000134760_19 (sequence is synthesized)
tctaatgactgtttgctcatatatgacatcgaaggtgtaggttcccctgctggctctgtgggttgttgtagcttcattggagaagacctggatgacagcttcttggataccctgggacct

SEQ ID NO: 313696 - DNA, 120 bp, Artificial Sequence
  ENSG00000134760_20 (sequence is synthesized)
aaatttaagaagttggcagacatcagcctaggaaaagaatcatatccagaccttgatccttcttggccaccacaaagcactgaaccagtttgccttcctcaggaaacagagcccgttgtt

SEQ ID NO: 313697 - DNA, 120 bp, Artificial Sequence
  ENSG00000134760_21 (sequence is synthesized)
agtggacacccaccaatctccccacatttcggcactaccacagtaatttctgagagcacctatccctcgggacctggtgtactgcatcctaagcctattctcgatcctctgggctatggt

SEQ ID NO: 313698 - DNA, 120 bp, Artificial Sequence
  ENSG00000134760_22 (sequence is synthesized)
aatgtcactgtgaccgagtcttacaccacctctgacactctgaagccctctgtgcacgttcacgataaccgaccagcatcaaacgtggtagtgacagagagagtggtcggcccaatctct

SEQ ID NO: 313699 - DNA, 120 bp, Artificial Sequence
  ENSG00000134760_23 (sequence is synthesized)
ggcgctgatttgcatggaatgttagagatgcctgacttgcgagatgggtcgaatgttatagtgacagaaagggtaatagcaccaagctctagtctacccacctctctgactatccatcat

SEQ ID NO: 313700 - DNA, 120 bp, Artificial Sequence
  ENSG00000134760_24 (sequence is synthesized)
cctagagagtcttcaaatgtggtagtgacagaaagagtaatccaaccaacttccggcatgataggtagtctgagtatgcaccccgagttagccaatgcccacaatgtcattgtgacagag

SEQ ID NO: 313701 - DNA, 120 bp, Artificial Sequence
  ENSG00000134760_25 (sequence is synthesized)
agggttgtttctggtgctggcgtaactggaattagtggcaccactgggatcagcggtggcataggcagcagtggcctggttggcaccagcatgggtgctgggagcggtgccctgagtgga

SEQ ID NO: 313702 - DNA, 120 bp, Artificial Sequence
  ENSG00000134760_26 (sequence is synthesized)
gctggcataagtggtggtggcattggcctgagcagcttgggagggacagccagcattggccacatgaggagttcctctgaccatcactttaaccaaaccattgggtccgcctcccctagc

SEQ ID NO: 313703 - DNA, 120 bp, Artificial Sequence
  ENSG00000134760_27 (sequence is synthesized)
acagctcgaagtcgaatcacaaagtatagtaccgtgcaatatagcaagtagtcaggaccccagctcactttttcatagtcattgtggtttagatccaattcccaccactaaaaaaccaac

SEQ ID NO: 313704 - DNA, 120 bp, Artificial Sequence
  ENSG00000134760_28 (sequence is synthesized)
aatgtgatttataacgcacaacttcgtgctcaggtcatctaggagcaaggtgagaaatcacaatgagaaaaataaatggaaacaccactgctaggggagagctctccttagcattcataa

SEQ ID NO: 313705 - DNA, 120 bp, Artificial Sequence
  ENSG00000134760_29 (sequence is synthesized)
ggcatcattctccttgctctgttttgcttttccatatagctcgagcaaaattcaaaaagaactaaatatgcaatatatgttcatatctatgggaaaaatctaaaatgtgtgccagatgcc

SEQ ID NO: 313706 - DNA, 120 bp, Artificial Sequence
  ENSG00000134760_30 (sequence is synthesized)
ctgttggtttcacagataacataaataaaaattcaaccacagatttatacaagggttaaccattttttttaagtttgactacatagtcaagtccacaagccatcaagcactcctacctta

SEQ ID NO: 313707 - DNA, 120 bp, Artificial Sequence
  ENSG00000134760_31 (sequence is synthesized)
attattgcactagagaaaataaattccaaattaggaagtgtttcctaggaggaaaattccattagagagtggcaataggatgaggtttcttcagggtaaactagcaatgcctgagcctga

SEQ ID NO: 313708 - DNA, 120 bp, Artificial Sequence
  ENSG00000134760_32 (sequence is synthesized)
accttaatgtggggcctcagttaaatctcctgtggagtcaaggattcttctgattctagtgtgtgtttagtgatagatgtagtcttgacgaatattgcttactggtgaggttgaggaata

SEQ ID NO: 313709 - DNA, 120 bp, Artificial Sequence
  ENSG00000134760_33 (sequence is synthesized)
tcacactcgtctttccctttaccactgtggttttgacttaagaaagcaaaactcactaagtttacttctcgaattgaagcaagtgaggcctgacatggttgtcatcactagtggcaaatg

SEQ ID NO: 313710 - DNA, 120 bp, Artificial Sequence
  ENSG00000134760_34 (sequence is synthesized)
accttccaagtaagcagatgggaactgaattgtgttttcaggttttgtttttagtaggtgatattcattcgtatccagctctttattacatagctctgaagttaaaatgatttacatagg

SEQ ID NO: 313711 - DNA, 120 bp, Artificial Sequence
  ENSG00000134760_35 (sequence is synthesized)
ccgagctgtggacaaaaaaaaaagaagcagcagcttgtagtatgcttaagctttggggaatttttttttaaggggatctaaaaaaatgtttttagaacatgtaaaatgtttaatggtgaa

SEQ ID NO: 313712 - DNA, 120 bp, Artificial Sequence
  ENSG00000134760_36 (sequence is synthesized)
agttggaaaagaattcttctgtaaagtaataccatgctaattattcgcttttagtaagtaaagtagtggttgctttagcaaacctctgctgccattttgcaggaatcaaccaggaacctt

SEQ ID NO: 313713 - DNA, 120 bp, Artificial Sequence
  ENSG00000134760_37 (sequence is synthesized)
tagcagaattgacaatatggtgttgataagcatgaaataataatagaaacctattctgctagtttatctcaccctctaatttttctcactagcataaattttaaattcctgatttgattt

SEQ ID NO: 313714 - DNA, 120 bp, Artificial Sequence
  ENSG00000134760_38 (sequence is synthesized)
gtcaataagatcttggcttatatatgctgatttataggtagtgtccaaattatatagtataacatatttttctagtttcaaaatttagtaatgtcctatttatgatatatcatttctgtg

SEQ ID NO: 313715 - DNA, 120 bp, Artificial Sequence
  ENSG00000134760_39 (sequence is synthesized)
tgtttgctatgtagtattacccaattaaaaatctctaaaaagaattaaagcattctaagaaaaaggtaaatttactattgcatggtacagaaattttttctttcttaaatacaatgttac

SEQ ID NO: 313716 - DNA, 120 bp, Artificial Sequence
  ENSG00000134760_40 (sequence is synthesized)
tataagctcactaaaatgaaactctatatgacaaaataaaattagaaaaaaatttgccctggagttgtgaattatatacaacttttaaagaatttaccccaattactcaaatttcccagg

SEQ ID NO: 313717 - DNA, 120 bp, Artificial Sequence
  ENSG00000134760_41 (sequence is synthesized)
aaattacaaagccaaagaatattcaacttcctccactggtcaaaagaggataggagtgaattactgaacctagagctattttgctctgtaacaacagataaggctaatattttaaaagcc

SEQ ID NO: 313718 - DNA, 120 bp, Artificial Sequence
  ENSG00000134760_42 (sequence is synthesized)
acagtatacatcttcttttaactctgtagaatatgtaaaattttgatagtctgtagtatgctaaatgcagaagtataaataaagtcattcaaagggagtcttttctttttctgacactta

SEQ ID NO: 313719 - DNA, 120 bp, Artificial Sequence
  ENSG00000134760_43 (sequence is synthesized)
gggggccacattaaggatgggtaatctttccaggaataaagtcaaaaggtatttattaagacatacttgagtatgcctgggtccaggagttttaaggaatagaaataagtattaatgaat

SEQ ID NO: 313720 - DNA, 120 bp, Artificial Sequence
  ENSG00000134760_44 (sequence is synthesized)
taattaagtaatttattaaagggaatggtagctgaccacaggaaacttgcttactgttttgatatgaaatatcatcacaagcttttcttaagacatctgatatcttccagagatattttt

SEQ ID NO: 313721 - DNA, 120 bp, Artificial Sequence
  ENSG00000134760_45 (sequence is synthesized)
taggttgtcttgcaaacaacaaaatcactgtctttaataactgttgctgtcaaaatccattggttgttaagatccccccaatttagttacatctgaactcctaaacactgttaaacgatg

SEQ ID NO: 313722 - DNA, 120 bp, Artificial Sequence
  ENSG00000134760_46 (sequence is synthesized)
ggaaaaacaagaaaaaacatggccatttgagtcattgagtcatctatctttctaggaagatactttctaaccaaacttttcttccaggattgcaaattgatgggaaaaacaagaaaaact

SEQ ID NO: 313723 - DNA, 120 bp, Artificial Sequence
  ENSG00000134760_47 (sequence is synthesized)
gaagtattagtcacctatctttctgggaagatactttccaactaattttttcttccaggattgcacactgattttccatttagtcctaaattttaaaattcccttttcaagacatcaacg

SEQ ID NO: 313724 - DNA, 120 bp, Artificial Sequence
  ENSG00000134760_48 (sequence is synthesized)
attttagtagttatttaaaggcatgtcatttttcaatgaagaagttttgggcagaacttcattcttcttcttagatgtttactctagatcatatacatcatgtcatagaccaagaagaga

SEQ ID NO: 313725 - DNA, 120 bp, Artificial Sequence
  ENSG00000134760_49 (sequence is synthesized)
tatggaaattattttataagtgaatactataattaggattcaagctgagtttcagatcaacttgctcttaacaaaaggaaaaagaaatagtaatttaatactatgtatgtatggtttgaa

SEQ ID NO: 313726 - DNA, 120 bp, Artificial Sequence
  ENSG00000134760_50 (sequence is synthesized)
aacaaaccacaatgtttataaaatatctatctgactgtctaaagaggtaatctttaggagcaaaaatcagtgtattataaatactttaccatttaatatcaaccaaaataccatctcaag

SEQ ID NO: 313727 - DNA, 120 bp, Artificial Sequence
  ENSG00000134760_51 (sequence is synthesized)
ctaattttgacactgaattacagatatatctgctacatattatttacttctaagcatgttgtctgatgtaattgcatttgcactgaaaaattaaaagaaaaagtacatatttagggttat

SEQ ID NO: 313728 - DNA, 120 bp, Artificial Sequence
  ENSG00000134760_52 (sequence is synthesized)
atatcttcatctagacatctgttctacatttgtgtataaagtttttagcatcataatttttattcaagaaaatgttctgacaaaattttaattatatgtcttcaaaaattacatttttta

SEQ ID NO: 313729 - DNA, 120 bp, Artificial Sequence
  ENSG00000134760_53 (sequence is synthesized)
tttactctagtaagtagatgtttttagttatctggcaatttatttctgaatttataccaatgtttgattgtcatggtacaaaatatatgacaccctttaacttttgctggagttgaaagg

SEQ ID NO: 313730 - DNA, 120 bp, Artificial Sequence
  ENSG00000134760_54 (sequence is synthesized)
cattataatctttagcataaatggccatgactattttggaaagacatttaagacccaaagcaaacttttaaaagtatttgccacattttcccatgcctatttcataaattccaacttttt

SEQ ID NO: 313731 - DNA, 120 bp, Artificial Sequence
  ENSG00000134760_55 (sequence is synthesized)
tttttacaatttctggatttttaagacccatttcacattgcactaggatacagcagtccacagtagagtgctactctccttgaaatcaaatctgtcttccacttccggattattcaattt

SEQ ID NO: 313732 - DNA, 120 bp, Artificial Sequence
  ENSG00000134760_56 (sequence is synthesized)
atgttaggacaaatcttgactagatcaacctgttttccatcagataattttaaaacaatgtgtaatcttgtttgtctacattctctccccagtttagctgtatttgaattactaaatgct

SEQ ID NO: 313733 - DNA, 120 bp, Artificial Sequence
  ENSG00000134760_57 (sequence is synthesized)
ttatcgtcaaactgtacctagtctaacttatttttcttttgctgtcgttttacaagcattttaaaattctaatattcatctctggtggtgtttaacacaaggttctcttattcaagtttc

SEQ ID NO: 313734 - DNA, 120 bp, Artificial Sequence
  ENSG00000134760_58 (sequence is synthesized)
aatataaaagtttttggattatttgggtgctagtttcttgcttggttatctgttcgtttttttaagttgatttgtaatttccaaagagttatgcatacagcaataaaattattaatatgc

SEQ ID NO: 313735 - DNA, 120 bp, Artificial Sequence
  ENSG00000134760_59 (sequence is synthesized)
agtctttacacatgaaccaagatggccgccatcactcacagtctatgctgttttttgtgctgagaaagctaatggagaaaatgaagaggaatcagaaacacaacaaaattagatggaagt

SEQ ID NO: 313736 - DNA, 120 bp, Artificial Sequence
  ENSG00000134760_60 (sequence is synthesized)
aaccagggaagattttctaagtgaagttcaaattttaaatggatttcagaatttcctaaatagtattttttttttaggaaatctgaggatataaccactgtcataccacaaataccacct

SEQ ID NO: 313737 - DNA, 120 bp, Artificial Sequence
  ENSG00000134762_0 (sequence is synthesized)
ctcggcaggtctcgctctcggcaccctcccggcgcccgcgttctcctggccctgcccggcatcccgatggccgccgctgggccccggcgctccgtgcgcggagccgtctgcctgcatctg

SEQ ID NO: 313738 - DNA, 120 bp, Artificial Sequence
  ENSG00000134762_1 (sequence is synthesized)
cgtctgcctgcatctgctgctgaccctcgtgatcttcagtcgtgctggtgaagcctgcaaaaaggtgatacttaatgtaccttctaaactagaggcagacaaaataattggcagagttaa

SEQ ID NO: 313739 - DNA, 120 bp, Artificial Sequence
  ENSG00000134762_2 (sequence is synthesized)
tttggaagagtgcttcaggtctgcagacctcatccggtcaagtgatcctgatttcagagttctaaatgatgggtcagtgtacacagccagggctgttgcgctgtctgataagaaaagatc

SEQ ID NO: 313740 - DNA, 120 bp, Artificial Sequence
  ENSG00000134762_3 (sequence is synthesized)
atttaccatatggctttctgacaaaaggaaacagacacagaaagaggttactgtgctgctagaacatcagaagaaggtatcgaagacaagacacactagagaaactgttctcaggcgtgc

SEQ ID NO: 313741 - DNA, 120 bp, Artificial Sequence
  ENSG00000134762_4 (sequence is synthesized)
caagaggagatgggcacctattccttgctctatgcaagagaattccttgggccctttcccattgtttcttcaacaagttgaatctgatgcagcacagaactatactgtcttctactcaat

SEQ ID NO: 313742 - DNA, 120 bp, Artificial Sequence
  ENSG00000134762_5 (sequence is synthesized)
aagtggacgtggagttgataaagaacctttaaatttgttttatatagaaagagacactggaaatctattttgcactcggcctgtggatcgtgaagaatatgatgtttttgatttgattgc

SEQ ID NO: 313743 - DNA, 120 bp, Artificial Sequence
  ENSG00000134762_6 (sequence is synthesized)
ttatgcgtcaactgcagatggatattcagcagatctgcccctcccactacccatcagggtagaggatgaaaatgacaaccaccctgttttcacagaagcaatttataattttgaagtttt

SEQ ID NO: 313744 - DNA, 120 bp, Artificial Sequence
  ENSG00000134762_7 (sequence is synthesized)
ggaaagtagtagacctggtactacagtgggggtggtttgtgccacagacagagatgaaccggacacaatgcatacgcgcctgaaatacagcattttgcagcagacaccaaggtcacctgg

SEQ ID NO: 313745 - DNA, 120 bp, Artificial Sequence
  ENSG00000134762_8 (sequence is synthesized)
gctcttttctgtgcatcccagcacaggcgtaatcaccacagtctctcattatttggacagagaggttgtagacaagtactcattgataatgaaagtacaagacatggatggccagttttt

SEQ ID NO: 313746 - DNA, 120 bp, Artificial Sequence
  ENSG00000134762_9 (sequence is synthesized)
tggattgataggcacatcaacttgtatcataacagtaacagattcaaatgataatgcacccactttcagacaaaatgcttatgaagcatttgtagaggaaaatgcattcaatgtggaaat

SEQ ID NO: 313747 - DNA, 120 bp, Artificial Sequence
  ENSG00000134762_10 (sequence is synthesized)
cttacgaatacctatagaagataaggatttaattaacactgccaattggagagtcaattttaccattttaaagggaaatgaaaatggacatttcaaaatcagcacagacaaagaaactaa

SEQ ID NO: 313748 - DNA, 120 bp, Artificial Sequence
  ENSG00000134762_11 (sequence is synthesized)
tgaaggtgttctttctgttgtaaagccactgaattatgaagaaaaccgtcaagtgaacctggaaattggagtaaacaatgaagcgccatttgctagagatattcccagagtgacagcctt

SEQ ID NO: 313749 - DNA, 120 bp, Artificial Sequence
  ENSG00000134762_12 (sequence is synthesized)
gaacagagccttggttacagttcatgtgagggatctggatgaggggcctgaatgcactcctgcagcccaatatgtgcggattaaagaaaacttagcagtggggtcaaagatcaacggcta

SEQ ID NO: 313750 - DNA, 120 bp, Artificial Sequence
  ENSG00000134762_13 (sequence is synthesized)
taaggcatatgaccccgaaaatagaaatggcaatggtttaaggtacaaaaaattgcatgatcctaaaggttggatcaccattgatgaaatttcagggtcaatcataacttccaaaatcct

SEQ ID NO: 313751 - DNA, 120 bp, Artificial Sequence
  ENSG00000134762_14 (sequence is synthesized)
ggatagggaggttgaaactcccaaaaatgagttgtataatattacagtcctggcaatagacaaagatgatagatcatgtactggaacacttgctgtgaacattgaagatgtaaatgataa

SEQ ID NO: 313752 - DNA, 120 bp, Artificial Sequence
  ENSG00000134762_15 (sequence is synthesized)
tccaccagaaatacttcaagaatatgtagtcatttgcaaaccaaaaatggggtataccgacattttagctgttgatcctgatgaacctgtccatggagctccattttatttcagtttgcc

SEQ ID NO: 313753 - DNA, 120 bp, Artificial Sequence
  ENSG00000134762_16 (sequence is synthesized)
caatacttctccagaaatcagtagactgtggagcctcaccaaagttaatgatacagctgcccgtctttcatatcagaaaaatgctggatttcaagaatataccattcctattactgtaaa

SEQ ID NO: 313754 - DNA, 120 bp, Artificial Sequence
  ENSG00000134762_17 (sequence is synthesized)
agacagggccggccaagctgcaacaaaattattgagagttaatctgtgtgaatgtactcatccaactcagtgtcgtgcgacttcaaggagtacaggagtaatacttggaaaatgggcaat

SEQ ID NO: 313755 - DNA, 120 bp, Artificial Sequence
  ENSG00000134762_18 (sequence is synthesized)
ccttgcaatattactgggtatagcactgctcttttctgtattgctaactttagtatgtggagtttttggtgcaactaaagggaaacgttttcctgaagatttagcacagcaaaacttaat

SEQ ID NO: 313756 - DNA, 120 bp, Artificial Sequence
  ENSG00000134762_19 (sequence is synthesized)
tatatcaaacacagaagcacctggagacgatagagtgtgctctgccaatggatttatgacccaaactaccaacaactctagccaaggtttttgtggtactatgggatcaggaatgaaaaa

SEQ ID NO: 313757 - DNA, 120 bp, Artificial Sequence
  ENSG00000134762_20 (sequence is synthesized)
tggagggcaggaaaccattgaaatgatgaaaggaggaaaccagaccttggaatcctgccggggggctgggcatcatcataccctggactcctgcaggggaggacacacggaggtggacaa

SEQ ID NO: 313758 - DNA, 120 bp, Artificial Sequence
  ENSG00000134762_21 (sequence is synthesized)
ctgcagatacacttactcggagtggcacagttttactcaaccccgtctcggtgaaaaattgcatcgatgtaatcagaatgaagaccgcatgccatcccaagattatgtcctcacttataa

SEQ ID NO: 313759 - DNA, 120 bp, Artificial Sequence
  ENSG00000134762_22 (sequence is synthesized)
ctatgagggaagaggatctccagctggttctgtgggctgctgcagtgaaaagcaggaagaagatggccttgactttttaaataatttggaacccaaatttattacattagcagaagcatg

SEQ ID NO: 313760 - DNA, 120 bp, Artificial Sequence
  ENSG00000134762_23 (sequence is synthesized)
cacaaagagataatgtcacagtgctacaattaggtctttgtcagacattctggaggtttccaaaaataatattgtaaagttcaatttcaacatgtatgtatatgatgatttttttctcaa

SEQ ID NO: 313761 - DNA, 120 bp, Artificial Sequence
  ENSG00000134762_24 (sequence is synthesized)
ttttgaattatgctactcaccaatttatatttttaaagcaagttgttgcttatcttttccaaaaagtgaaaaatgttaaaacagacaactggtaaatctcaaactccagcactggaatta

SEQ ID NO: 313762 - DNA, 120 bp, Artificial Sequence
  ENSG00000134762_25 (sequence is synthesized)
aggtctctaaagcatctgctcttttttttttttacggatattttagtaataaatatgctggataaatattagtccaacaatagctaagttatgctaatatcacattattatgtattcact

SEQ ID NO: 313763 - DNA, 120 bp, Artificial Sequence
  ENSG00000134762_26 (sequence is synthesized)
ttaagtgatagtttaaaaaataaacaagaaatattgagtatcactatgtgaagaaagttttggaaaagaaacaatgaagactgaattaaattaaaaatgttgcagctcataaagaattgg

SEQ ID NO: 313764 - DNA, 120 bp, Artificial Sequence
  ENSG00000134762_27 (sequence is synthesized)
gactcacccctactgcactaccaaattcatttgactttggaggcaaaatgtgttgaagtgccctatgaagtagcaattttctataggaatatagttggaaataaatgtgtgtgtgtatat

SEQ ID NO: 313765 - DNA, 120 bp, Artificial Sequence
  ENSG00000134762_28 (sequence is synthesized)
tattattaatcaatgcaatatttaaaatgaaatgagaacaaagaggaaaatggtaaaaacttgaaatgaggctggggtatagtttgtcctacaatagaaaaaagagagagcttcctaggc

SEQ ID NO: 313766 - DNA, 120 bp, Artificial Sequence
  ENSG00000134762_29 (sequence is synthesized)
ctgggctcttaaatgctgcattataactgagtctatgaggaaatagttcctgtccaatttgtgtaatttgtttaaaattgtaaataaattaaacttttctggtttctgtgggaaggaaat

SEQ ID NO: 313767 - DNA, 120 bp, Artificial Sequence
  ENSG00000134762_30 (sequence is synthesized)
agggaatccaatggaacagtagctttgctttgcagtctgtttcaagatttctgcatccacaagttagtagcaaactggggaatactcgctgcagctggggttccctgctttttggtagca

SEQ ID NO: 313768 - DNA, 120 bp, Artificial Sequence
  ENSG00000134762_31 (sequence is synthesized)
tttcggggagctaataacaaaaacattttaaaacttacctttactgaagttaaatcctctattgctgtttctattctctcttatagtgaccaacatctttttaatttagatccaaataac

SEQ ID NO: 313769 - DNA, 120 bp, Artificial Sequence
  ENSG00000134762_32 (sequence is synthesized)
catgtcctcctagagtttagaggctagagggagctgaggggaggatcttactgaaagcaccctggggagattgattgtccttaaacctaagccccacaaacttgacacctgatcaggtct

SEQ ID NO: 313770 - DNA, 120 bp, Artificial Sequence
  ENSG00000134762_33 (sequence is synthesized)
gggagctacaaaatttcatttttctcctcactgcccttcttctgagtggcattggcctgaatcaaggaaagccaggccttgtgggcccccttctttcggctttctgctaaagcaacacct

SEQ ID NO: 313771 - DNA, 120 bp, Artificial Sequence
  ENSG00000134762_34 (sequence is synthesized)
ccagcagagattcccttaagtgactccaggttttccaccatccttcagcgtgaattaatttttaatcagtttgctttctccagagaaattttaaaataatagaagaaatagaaattttga

SEQ ID NO: 313772 - DNA, 120 bp, Artificial Sequence
  ENSG00000134762_35 (sequence is synthesized)
atgtataaaagaaaaagatcaagttgtcattttagaacagagggaactttgggagaaagcagcccaagtaggttatttgtacagtcagagggcaacaggaagatgcaggccttcaagggc

SEQ ID NO: 313773 - DNA, 120 bp, Artificial Sequence
  ENSG00000134762_36 (sequence is synthesized)
aaggagaggccacaaggaatatgggtgggagtaaaagcaacatcgtctgcttcatactttttcctaggcttggcactgccttttcctttctcaggccaatggcaactgccatttgagtcc

SEQ ID NO: 313774 - DNA, 120 bp, Artificial Sequence
  ENSG00000134762_37 (sequence is synthesized)
ggtgagggatcagccaacctcttctctatggctcaccttatttggagtgagaaatcaaggagacagagctgactgcatgatgagtctgaaggcatttgcaggatgagcctgaactggttg

SEQ ID NO: 313775 - DNA, 120 bp, Artificial Sequence
  ENSG00000134762_38 (sequence is synthesized)
tgcagaacaaacaaggcattcatgggaattgttgtattccttctgcagccctccttctgggcactaagaaggtctatgaattaaatgcctatctaaaattctgatttattcctacatttt

SEQ ID NO: 313776 - DNA, 120 bp, Artificial Sequence
  ENSG00000134762_39 (sequence is synthesized)
aattctgatttattcctacattttctgttttctaatttgaccctaaaatctatgtgttttagacttagactttttattgccccccccccccccttttttttttgagacggagtctcgctc

SEQ ID NO: 313777 - DNA, 120 bp, Artificial Sequence
  ENSG00000134762_40 (sequence is synthesized)
cttgttttccgtttaaagtcgtcttcttttaatgtaatcattttgaacatgtgtgaaagttgatcatacgaattggatcaatcttgaaatactcaaccaaaagacagtcgagaagccagg

SEQ ID NO: 313778 - DNA, 120 bp, Artificial Sequence
  ENSG00000134762_41 (sequence is synthesized)
gggagaaagaactcagggcacaaaatattggtctgagaatggaattctctgtaagcctagttgctgaaatttcctgctgtatccagaagccagttttatctaacggctactgaaacaccc

SEQ ID NO: 313779 - DNA, 120 bp, Artificial Sequence
  ENSG00000134762_42 (sequence is synthesized)
actgtgttttgctcactccctcactcaccgatcaaaacctgctacctccccaagactttactagtgccgataaactttctcaaagagcaaccagtatcacttccctgtttataaaacctc

SEQ ID NO: 313780 - DNA, 120 bp, Artificial Sequence
  ENSG00000134762_43 (sequence is synthesized)
taaccatctctttgttctttgaacatgctgaaaaccacctggtctgcatgtatgcccgaatttgtaattcttttctctcaaatgaaaatttaattttagggattcatttctatattttca

SEQ ID NO: 313781 - DNA, 120 bp, Artificial Sequence
  ENSG00000134762_44 (sequence is synthesized)
catatgtagtattattatttccttatatgtgtaaggtgaaatttatggtatttgagtgtgcaagaaaatatatttttaaagctttcatttttcccccagtgaatgatttagaatttttta

SEQ ID NO: 313782 - DNA, 120 bp, Artificial Sequence
  ENSG00000134762_45 (sequence is synthesized)
tgtaaatatacagaatgttttttcttacttttataaggaagcagctgtctaaaatgcagtggggtttgttttgcaatgttttaaacagagttttagtattgctattaaaagaagttactt

SEQ ID NO: 313783 - DNA, 120 bp, Artificial Sequence
  ENSG00000134762_46 (sequence is synthesized)
tgcttttaaagaaacttggctgcttaaaataagcaaaaattggatgcgtaaagtaatatttacagatgtggggagatgtaataaaacaatattaacttggtttcttgtttttgctgtatt

SEQ ID NO: 313784 - DNA, 120 bp, Artificial Sequence
  ENSG00000134762_47 (sequence is synthesized)
tagagattaaataattctaagatgatcactttgcaaaattatgcttatggctggcatggaaatagaaataattatgtctttgttgtattaatggggaatattttggacaatgtttcatta

SEQ ID NO: 313785 - DNA, 120 bp, Artificial Sequence
  ENSG00000134762_48 (sequence is synthesized)
tcaaattgtcgacatcattaatatatattgtaatgttgggaagagatcactattttgaagcacagctttacagatgagtatctatgatacatatgtataataaattttgattgggtatta

SEQ ID NO: 313786 - DNA, 120 bp, Artificial Sequence
  ENSG00000134762_49 (sequence is synthesized)
aaagtattagaaggtggttataattgcagagtattccatgaatagtacactgacacaggggttttactttgaggaccagtgtagtcaagggaaaacatgagttaaaaagaaaagcaggcg

SEQ ID NO: 313787 - DNA, 120 bp, Artificial Sequence
  ENSG00000134762_50 (sequence is synthesized)
atattgcagtcttgattctgccacttacaggatagataacgcctgaactttaatgacaagatgatccaaccataaaggtgctctgtgcttcacagtgaatcttttccccatgcaggagtg

SEQ ID NO: 313788 - DNA, 120 bp, Artificial Sequence
  ENSG00000134762_51 (sequence is synthesized)
tgctcccctacaaacgttaagactgatcatttcaaaaatctattagctatatcaaaagccttacattttaatataggttgaaccaaaatttcaattccagtaacttctattgtaaccatt

SEQ ID NO: 313789 - DNA, 120 bp, Artificial Sequence
  ENSG00000134762_52 (sequence is synthesized)
atttttgtgtatgtcttcaagaatgttcattggatttttgtttgtaatagtaaaataccggatacatttcacgtgtccttcagtattgatttggttgaatattgggtcataatggttgag

SEQ ID NO: 313790 - DNA, 120 bp, Artificial Sequence
  ENSG00000134762_53 (sequence is synthesized)
aagcatggacactagagccagaatgcttggatatgaatcctggatctgtcacttacttctgtgtgacctttgaaaggctacttatttcctctcttagctttctcattaaaatcaatgaac

SEQ ID NO: 313791 - DNA, 120 bp, Artificial Sequence
  ENSG00000134762_54 (sequence is synthesized)
aatgccagcctcatggggttgttgaatgattaaatgagttactatacctaaagtacatagaacactgcctgcacatagtaaaagaattataagtgtgaggtagttggtaaaattatgtag

SEQ ID NO: 313792 - DNA, 120 bp, Artificial Sequence
  ENSG00000134762_55 (sequence is synthesized)
ttggatatactaccgaacaatatctcatctctttttagggaaataaagtttgtgcatatatataatcccgaaacatgatttccagacaatggaattgataatttattctttctgtgttga

SEQ ID NO: 313793 - DNA, 89 bp, Artificial Sequence
  ENSG00000134762_56 (sequence is synthesized)
tccagacaatggaattgataatttattctttctgtgttgattttttcacaatgaacattgataacacttattttattttaagttccagg

SEQ ID NO: 313794 - DNA, 120 bp, Artificial Sequence
  ENSG00000134762_57 (sequence is synthesized)
cctgataacatttttaatttaagaaaaaggttaataccagcttagacagtttattttggctcttatattatttagaattaggcttggtttcatgggcagaaaaattaaatagtattcaga

SEQ ID NO: 313795 - DNA, 120 bp, Artificial Sequence
  ENSG00000134762_58 (sequence is synthesized)
acatgtttacgggcttctgtattcgacagtttattttgattgcaaaggtttgaatctcagaaccttcttttccctttacttaaaaaatggtaaaattcataaaacatggctatgaatggt

SEQ ID NO: 313796 - DNA, 120 bp, Artificial Sequence
  ENSG00000134762_59 (sequence is synthesized)
taaaattcatcattttcaccattttaaagtgtataattcagtgactttagtacatttaaaatgttgtgaaactgttaccactatctagttctggaacattttcatcaccccaagaggaaa

SEQ ID NO: 313797 - DNA, 120 bp, Artificial Sequence
  ENSG00000134762_60 (sequence is synthesized)
ccttttaagcagtcattctcctcttcccctccctgcattatcccctggcaaccactgatatcttttctgtctctatggatttgcctactctggacattcatataaatgaaatcgtacata

SEQ ID NO: 313798 - DNA, 120 bp, Artificial Sequence
  ENSG00000134765_0 (sequence is synthesized)
acttgtaggaaagcctctttgcatttagacgtaattgaactggaaggaaggagactggccagggaatagggggaaagaaattctcccgttgctcctcctactgtttatcacttgcctccg

SEQ ID NO: 313799 - DNA, 120 bp, Artificial Sequence
  ENSG00000134765_1 (sequence is synthesized)
gactgtcttccaaaccaagctcagctgcatcaaggtggcagcagaataccctgtgcaagtgccagcgtcttcttagccgctctgtgcatcccaggctgccctgttatctggccaccgtcc

SEQ ID NO: 313800 - DNA, 120 bp, Artificial Sequence
  ENSG00000134765_2 (sequence is synthesized)
ctggccattgggactgcttctgatggctctggcctctgctgccccagggagcatcttctgtaagcagctccttttctctctcctggttttaacattactttgcgatgcttgtcagaaagt

SEQ ID NO: 313801 - DNA, 120 bp, Artificial Sequence
  ENSG00000134765_3 (sequence is synthesized)
ttatcttcgagttccttctcatcttcaggctgaaacacttgtaggcaaagtgaatctggaggagtgtctcaagtcggccagcctaatccggtccagtgaccctgccttcagaattctaga

SEQ ID NO: 313802 - DNA, 120 bp, Artificial Sequence
  ENSG00000134765_4 (sequence is synthesized)
agatggctcaatttacacaacacatgacctcattttgtcttctgaaaggaaaagtttttccattttcctttcagatggtcagagacgggaacaacaagagataaaagttgtactgtcagc

SEQ ID NO: 313803 - DNA, 120 bp, Artificial Sequence
  ENSG00000134765_5 (sequence is synthesized)
aagagaaaacaagtctcctaagaagagacataccaaagacacagccctcaagcgcagcaagagacgatgggctcctattccagcttcattgatggagaactcgttgggtccatttccaca

SEQ ID NO: 313804 - DNA, 120 bp, Artificial Sequence
  ENSG00000134765_6 (sequence is synthesized)
acacgttcagcagatccaatctgatgctgcacagaattacaccatcttttattccataagtgggccaggcgtggacaaagaacccttcaatttgttttacatagagaaagacactgggga

SEQ ID NO: 313805 - DNA, 120 bp, Artificial Sequence
  ENSG00000134765_7 (sequence is synthesized)
tatcttttgtacaaggagcattgaccgtgagaaatatgaacagtttgcgttatatggctatgcaacaactgcagatggctatgcaccagaatatccactccctttgatcatcaaaattga

SEQ ID NO: 313806 - DNA, 120 bp, Artificial Sequence
  ENSG00000134765_8 (sequence is synthesized)
agatgataatgataacgccccatattttgaacacagagtgactatctttactgtgcctgaaaattgccgatccggaacttcagtgggaaaagtgaccgccacagaccttgacgaacctga

SEQ ID NO: 313807 - DNA, 120 bp, Artificial Sequence
  ENSG00000134765_9 (sequence is synthesized)
cactctccatactcgtctgaaatataaaatcttacaacaaatcccagatcatccaaagcatttctccatacacccagataccggtgtcatcaccacaactacaccttttctggatagaga

SEQ ID NO: 313808 - DNA, 120 bp, Artificial Sequence
  ENSG00000134765_10 (sequence is synthesized)
aaaatgtgatacttaccagttaataatggaagtgcgagacatgggtggtcagcctttcggtttatttaatacaggaacaattactatttcacttgaggatgaaaatgacaatccaccatc

SEQ ID NO: 313809 - DNA, 120 bp, Artificial Sequence
  ENSG00000134765_11 (sequence is synthesized)
tttcacagaaacttcttatgttacagaagtagaagaaaacagaattgacgtggagattttacgaatgaaggtacaggatcaggatttgccaaacactcctcactcaaaggctgtatacaa

SEQ ID NO: 313810 - DNA, 120 bp, Artificial Sequence
  ENSG00000134765_12 (sequence is synthesized)
aatcctacaaggaaatgaaaatggaaacttcataattagcacagatccaaatacaaatgaaggagtgctgtgtgttgtcaagccattgaactatgaagtcaatcgccaagttattttgca

SEQ ID NO: 313811 - DNA, 120 bp, Artificial Sequence
  ENSG00000134765_13 (sequence is synthesized)
agttggtgtcattaacgaggcacaattctctaaagcagcgagctcacaaactcctacaatgtgcactacaactgtcaccgttaaaattatagacagtgatgagggccctgaatgccaccc

SEQ ID NO: 313812 - DNA, 120 bp, Artificial Sequence
  ENSG00000134765_14 (sequence is synthesized)
tccagtgaaagttattcagagtcaagatggcttcccagctggccaagaactccttggatacaaagcactggacccggaaatatccagtggtgaaggcttaaggtatcagaagttagggga

SEQ ID NO: 313813 - DNA, 120 bp, Artificial Sequence
  ENSG00000134765_15 (sequence is synthesized)
tgaagataactggtttgaaattaatcaacacactggcgacttgagaactctaaaagtactagatagagaatccaaatttgtaaaaaacaaccaatacaatatttcagttgttgcagtgga

SEQ ID NO: 313814 - DNA, 120 bp, Artificial Sequence
  ENSG00000134765_16 (sequence is synthesized)
tgcagttggccgatcttgcactggaacattagtagttcatttggatgattacaacgatcacgcacctcaaattgacaaagaagtgaccatttgtcagaataatgaggattttgctgttct

SEQ ID NO: 313815 - DNA, 120 bp, Artificial Sequence
  ENSG00000134765_17 (sequence is synthesized)
gaaaatggaccaccttttcaattctttctggataattctgccagtaaaaactggaacatagaagaaaaggatggtaaaactgccattcttcgtcaacggcaaaatcttgattataactat

SEQ ID NO: 313816 - DNA, 120 bp, Artificial Sequence
  ENSG00000134765_18 (sequence is synthesized)
tattctgtgcctattcaaataaaagacaggcatggtttagttgcaacacatatgttaacagtgagagtatgtgactgttcaactccatctgagtgtagaatgaaggataaaagtacaaga

SEQ ID NO: 313817 - DNA, 120 bp, Artificial Sequence
  ENSG00000134765_19 (sequence is synthesized)
gacgttagaccaaatgtaatacttggaagatgggctattcttgctatggtgttgggttctgtattgttattatgtattctgtttacatgtttctgtgtcactgctaagagaacagtcaag

SEQ ID NO: 313818 - DNA, 120 bp, Artificial Sequence
  ENSG00000134765_20 (sequence is synthesized)
aaatgttttccagaagacatagcccagcaaaatttaattgtatcaaatactgaaggacctggagaagaagtaacggaagcaaatattagactccccatgcagacatccaacatttgtgac

SEQ ID NO: 313819 - DNA, 120 bp, Artificial Sequence
  ENSG00000134765_21 (sequence is synthesized)
acaagcatgtctgttggtactgttggtggccagggaatcaaaacacagcaaagttttgagatggtcaaaggaggctacactttggattccaacaaaggaggtggacatcagaccttggag

SEQ ID NO: 313820 - DNA, 120 bp, Artificial Sequence
  ENSG00000134765_22 (sequence is synthesized)
tccgtcaagggagtggggcagggagatactggcagatatgcgtacacggactggcagagtttcacccaacctcggcttggcgaaaaggtgtatttgtgtggacaagatgaggagcataaa

SEQ ID NO: 313821 - DNA, 120 bp, Artificial Sequence
  ENSG00000134765_23 (sequence is synthesized)
cattgtgaagactacgtttgttcgtataactatgaaggcaaaggttctctggccggctcagtaggttgctgcagcgatcggcaggaagaagagggactggagtttctagatcacctggaa

SEQ ID NO: 313822 - DNA, 120 bp, Artificial Sequence
  ENSG00000134765_24 (sequence is synthesized)
cccaaatttaggacattagcaaagacatgcatcaagaaataaatgtgccttttaatagtgtaatatccacagatgcataagtaggaatttattacttgcagaatgttagcagcatctgct

SEQ ID NO: 313823 - DNA, 120 bp, Artificial Sequence
  ENSG00000134765_25 (sequence is synthesized)
aatgtttttgtttatggaggtaaactttgtcatgtataggtaagggtactataaatatgagattcccctacattctccttgtctggtataacttccatgttctctagaaatcaaggtttt

SEQ ID NO: 313824 - DNA, 120 bp, Artificial Sequence
  ENSG00000134765_26 (sequence is synthesized)
gtttgttaattctcttttatatgcatgtatatattgcccttttcacgactgtactgtacaccttcttgcaccttttatttgcaaactgatgttactttttgtgctgtggaagagcatttg

SEQ ID NO: 313825 - DNA, 120 bp, Artificial Sequence
  ENSG00000134765_27 (sequence is synthesized)
ggaaagctgggtattatagaggccaatgaaagatgaatttgcattgtagatgtacgaattaaatatgttcttcaaaatcttggggagaattatgttcttagaacatagttggtgccagat

SEQ ID NO: 313826 - DNA, 120 bp, Artificial Sequence
  ENSG00000134765_28 (sequence is synthesized)
aattgcattctctccacctgagtggtttaaaaaggacttttaagtattcttcagtgcaatcttcagttttgtgattaagttcatttctcttttacacttttgtactcctcagagcagtgc

SEQ ID NO: 313827 - DNA, 120 bp, Artificial Sequence
  ENSG00000134765_29 (sequence is synthesized)
tcccagcattgttttctttcaggatccttcagagctcagtccctggacctctgcccatgtggatttgttgttaggtcactccaacttctagggttcttggaaagataaggaccagaacaa

SEQ ID NO: 313828 - DNA, 120 bp, Artificial Sequence
  ENSG00000134765_30 (sequence is synthesized)
gctcatagcaaattgaggggcagagattttatgaagattacatgagaagatttccatgaaagaattgcagccctgaggtccatgggttgacttatgctcacaaatatgtttcgtttgctc

SEQ ID NO: 313829 - DNA, 120 bp, Artificial Sequence
  ENSG00000134765_31 (sequence is synthesized)
aacatggtttactactaacattttaaaaatataaatactttagcaaaaacattcactcttgagtttgacataggcctgccttatctgtggttgccacctgccatctccaagcatttggac

SEQ ID NO: 313830 - DNA, 120 bp, Artificial Sequence
  ENSG00000134765_32 (sequence is synthesized)
aactagccctgatgcattaggctgcaactctgatatacagagactagcaccttgaatatgccagaaattgaattaccatctgtattagaacttaagactcagcctaaatttacagttact

SEQ ID NO: 313831 - DNA, 120 bp, Artificial Sequence
  ENSG00000134765_33 (sequence is synthesized)
ttaagaaaatgggcagtcagaattagggactagaatgtatatgagaaacccccactctactaaaaatataagaaattagccggacatggtggcgaatgactgtaatcccagctactcagg

SEQ ID NO: 313832 - DNA, 120 bp, Artificial Sequence
  ENSG00000134769_0 (sequence is synthesized)
caggaaaccctggtactggcagcagccagcctctgctgtgcccacatgacccacaactctggcagcggacccggcacttccaacattattaaataataagaaagcggctcctactccagg

SEQ ID NO: 313833 - DNA, 120 bp, Artificial Sequence
  ENSG00000134769_1 (sequence is synthesized)
ctcaaacctccctgcagaccaatggacaccttctaagagtttggcgagtcagtgactgaagcgcccgtccattccaagataaataggatttaccaatccttggatgaagtgcttgggaag

SEQ ID NO: 313834 - DNA, 120 bp, Artificial Sequence
  ENSG00000134769_2 (sequence is synthesized)
tctttaagtgccataatcaactgccatttcaaagaatatagatggttttgaaaagttcatgctgtcccttcattgaattttagaatgattgaagatagtgggaaaagaggaaataccatg

SEQ ID NO: 313835 - DNA, 120 bp, Artificial Sequence
  ENSG00000134769_3 (sequence is synthesized)
gcagaaagaagacagctgtttgcagagatgagggctcaagatctggatcgcatccgactctccacctacagaacagcatgcaagcttaggtttgttcagaagaaatgcaatttgcacctg

SEQ ID NO: 313836 - DNA, 120 bp, Artificial Sequence
  ENSG00000134769_4 (sequence is synthesized)
gtggacatatggaatgtcatagaagcattgcgggaaaatgctctgaacaacctggacccaaacactgaactcaacgtgtcccgcttagaggctgtgctctccactattttttaccagctc

SEQ ID NO: 313837 - DNA, 120 bp, Artificial Sequence
  ENSG00000134769_5 (sequence is synthesized)
aacaaacggatgccaaccactcaccaaatccatgtggagcagtccatcagcctcctccttaacttcctgcttgcagcgtttgatccggaaggccatggtaaaatttcagtatttgctgtc

SEQ ID NO: 313838 - DNA, 120 bp, Artificial Sequence
  ENSG00000134769_6 (sequence is synthesized)
aaaatggctttagccacattgtgtggagggaagatcatggacaaattaagatatattttctcaatgatttctgactccagtggggtgatggtttatggacgatatgaccaattccttcgg

SEQ ID NO: 313839 - DNA, 120 bp, Artificial Sequence
  ENSG00000134769_7 (sequence is synthesized)
ttttgaaggtccttcatttggttacacagaacagtcagccagatcctgtttctcccaacagaaaaaagtcacgttaaatggtttcttggacacgcttatgtcagatcctcccccgcagtg

SEQ ID NO: 313840 - DNA, 120 bp, Artificial Sequence
  ENSG00000134769_8 (sequence is synthesized)
tctggtctggttgcctcttctgcatcgactagcaaatgtggaaaatgtcttccatccggttgagtgttcctactgccacagtgagagtatgatgggatttcgctaccgatgccaacagtg

SEQ ID NO: 313841 - DNA, 120 bp, Artificial Sequence
  ENSG00000134769_9 (sequence is synthesized)
tcacaattaccagctctgtcaggactgcttctggaggggacatgccggtggttctcatagcaaccagcaccaaatgaaagagtacacgtcatggaaatcacctgctaagaagctgactaa

SEQ ID NO: 313842 - DNA, 120 bp, Artificial Sequence
  ENSG00000134769_10 (sequence is synthesized)
tgcattaagcaagtccctgagctgtgcttccagccgtgaacctttgcaccccatgttcccagatcagcctgagaagccactcaacttggctcacatcgttgatacttggcctcccagacc

SEQ ID NO: 313843 - DNA, 120 bp, Artificial Sequence
  ENSG00000134769_11 (sequence is synthesized)
tgtaaccagcatgaacgacaccctgttctcccactctgttccctcctcaggaagtccttttattaccaggagctcggacggtgcttttggtggatgcgtctagatggataacatgacttc

SEQ ID NO: 313844 - DNA, 120 bp, Artificial Sequence
  ENSG00000134769_12 (sequence is synthesized)
ttctaccctaaaatattcctataatactttgagctgttctggttcctccagggtgcatggtacccattaacccaaaatatgattatttcccttttttcccattttcagtcattttggaat

SEQ ID NO: 313845 - DNA, 120 bp, Artificial Sequence
  ENSG00000134769_13 (sequence is synthesized)
gttctctgtgaaccacagttgtgttgtttaaagctcacatttctttctgtcaccacagagattggcctacggtttctgttttgagggtgctgttcaataaagctgtgtacactaaatgtc

SEQ ID NO: 313846 - DNA, 120 bp, Artificial Sequence
  ENSG00000134769_14 (sequence is synthesized)
gcttttctgaagggcaaagggatacagtacagcctgaatgtggcagacaggctagctgatgaacatgttctcatcgggttgtatgtcaacatgctccggaacaacccctcatgcatgctt

SEQ ID NO: 313847 - DNA, 120 bp, Artificial Sequence
  ENSG00000134769_15 (sequence is synthesized)
gagagttcaaaccggcttgatgaagaacacaggctaattgccaggtatgcggcaaggctggcagcagagtcctcttcgtctcagccacctcagcagagaagtgctcctgacatctctttc

SEQ ID NO: 313848 - DNA, 120 bp, Artificial Sequence
  ENSG00000134769_16 (sequence is synthesized)
accatcgatgcgaataagcagcaaaggcagctgattgctgagctagaaaacaagaacagagaaatcttacaggagatccagagacttcggctagagcatgaacaagcttctcagcccacg

SEQ ID NO: 313849 - DNA, 120 bp, Artificial Sequence
  ENSG00000134769_17 (sequence is synthesized)
ccagagaaggcacagcaaaaccccaccctgctggcagaactccggctcctcagacagcgcaaagatgagctggaacagagaatgtctgctctccaggagagccggagagagctaatggtc

SEQ ID NO: 313850 - DNA, 120 bp, Artificial Sequence
  ENSG00000134769_18 (sequence is synthesized)
cagttggagggtctcatgaagctactaaagactcagggggcaggctctccccgctcctcccccagccacaccatcagcaggccaattcccatgcccatccggtcagcgtcagcctgctcc

SEQ ID NO: 313851 - DNA, 120 bp, Artificial Sequence
  ENSG00000134769_19 (sequence is synthesized)
accccgacgcacacgccgcaggactccctcacaggagtagggggagatgtacaagaggcatttgcacaaagttcaagaagaaacttaaggaatgacttgctagtggctgcagattccatc

SEQ ID NO: 313852 - DNA, 120 bp, Artificial Sequence
  ENSG00000134769_20 (sequence is synthesized)
actaacactatgtcctctcttgtgaaagagctgaattctgaggttgggagtgaaacagagagtaatgtggattctgaatttgcacggactcagtttgaggatcttgttccctcaccaacc

SEQ ID NO: 313853 - DNA, 120 bp, Artificial Sequence
  ENSG00000134769_21 (sequence is synthesized)
tctgaaaaggcttttctagcgcaaatccatgcccgaaaacctgggtacattcacagtggagctaccacaagtaccatgcgtggcgacatggttacggaggatgcagatccctatgtgcag

SEQ ID NO: 313854 - DNA, 120 bp, Artificial Sequence
  ENSG00000134769_22 (sequence is synthesized)
cctgaagatgaaaactatgaaaatgactctgtccggcagctggagaatgagctccagatggaggaatacctgaaacagaagctgcaagatgaagcttatcaggtcagcttgcaaggttga

SEQ ID NO: 313855 - DNA, 120 bp, Artificial Sequence
  ENSG00000134769_23 (sequence is synthesized)
cagatgatgaaagtaacatgaaaactggtgatgatggagagccctgtggccacacagaggaggaagacagcagcctggcagcagcctcaccgaagagaggaaccaccacacccagcagct

SEQ ID NO: 313856 - DNA, 120 bp, Artificial Sequence
  ENSG00000134769_24 (sequence is synthesized)
cctgacagacccccacccctaaagatgtgtcctgatgactatagtgcagctaactttttgttctcagatttgtagtgcataggtgtgtgtttcaagaaggaaaaaaaaagacttctgttc

SEQ ID NO: 313857 - DNA, 120 bp, Artificial Sequence
  ENSG00000134769_25 (sequence is synthesized)
aaagttaacttatcagctacatcctctgtaacgtggttcatccctggttaaaaagcaaacaaacacaggctgaaaacccatgctgctgttatacacaatggcagtattaacaagcatttt

SEQ ID NO: 313858 - DNA, 120 bp, Artificial Sequence
  ENSG00000134769_26 (sequence is synthesized)
aaacctttgcacatgatattgaacctgttcagtttacaatgacaatattaatactgtttatagctagaagtttgatttctgaattctttgagattttagcaaaacagtttattatacact

SEQ ID NO: 313859 - DNA, 120 bp, Artificial Sequence
  ENSG00000134769_27 (sequence is synthesized)
gtacatttttttcacagcaattggaaaaaaacaaccacttgcaatcattcaataaccctgaagaatttggttcctgagtgtacaaactcagagcccggaagccaagaagggtccttggcc

SEQ ID NO: 313860 - DNA, 120 bp, Artificial Sequence
  ENSG00000134769_28 (sequence is synthesized)
tgcacggtctgtagttgactccaagtctctgtgagcagtgacttgaaccaaacacaccaggaataatccattctttggggcctctttccaactcgaggttgttttctttcaagatactct

SEQ ID NO: 313861 - DNA, 120 bp, Artificial Sequence
  ENSG00000134769_29 (sequence is synthesized)
aatcagccatagaatttagtgtaaatatttttttttccaaatagatatcatattcaaaaaaggcagcattcaaattatatagaatctagtttttaaaatcagcacagatcttcttaaaaa

SEQ ID NO: 313862 - DNA, 120 bp, Artificial Sequence
  ENSG00000134769_30 (sequence is synthesized)
ttgttcctctcgttttggctttaggaagcatgtctttaacagcaccgctcgttcacaagttcccccatcaagttgtttggaggccttcagctttaaatgtacaggcttaaagtgcgcttg

SEQ ID NO: 313863 - DNA, 120 bp, Artificial Sequence
  ENSG00000134769_31 (sequence is synthesized)
caaacgtttgctctcctttttttctgaatgttgattgccttagctggccacctggtgttctgcatgtagccttctgtggtcatgtgaaaggagacaggctcttctaagttgagttgggat

SEQ ID NO: 313864 - DNA, 120 bp, Artificial Sequence
  ENSG00000134769_32 (sequence is synthesized)
ttttgcactcagtgaaaagctgaagtgcaaaagagctatcaaagacaagaggataaaagactgggatagtcttttccaaggaccctctttagagggccctaaagacctcctttgggaatt

SEQ ID NO: 313865 - DNA, 120 bp, Artificial Sequence
  ENSG00000134769_33 (sequence is synthesized)
ctggggaaaaagaaaaagtaatcttctacttgcttcaagatttgatttttttaaaaaagcctgcgacctattcaatacattatgcttaaattagcagtttctctggaattcctgtctctc

SEQ ID NO: 313866 - DNA, 120 bp, Artificial Sequence
  ENSG00000134769_34 (sequence is synthesized)
ctttaaaagaaaggagagaacattttagaacaatagttctcaaagtgtgttccccggacaagcagcatctgcaacacttaggaaggtcttcgaaatactaatttgtaagccccacctcag

SEQ ID NO: 313867 - DNA, 120 bp, Artificial Sequence
  ENSG00000134769_35 (sequence is synthesized)
gcctactgaatcagaagctctgggggttgggtccagaagtctgttttagtcaaccctctaggtgattctgatgctcgctaaaggttgagaactactgctttagaatgaagtcgtataata

SEQ ID NO: 313868 - DNA, 120 bp, Artificial Sequence
  ENSG00000134769_36 (sequence is synthesized)
aagtctctgaaaaggccttattcagaataagcaagaaaggttctgtgattcacttttgcttctggggctggcaaaaaccttctctgaacccacacaccaagttcgtagttggtaggtgcc

SEQ ID NO: 313869 - DNA, 120 bp, Artificial Sequence
  ENSG00000134769_37 (sequence is synthesized)
cagccaagtcctgacatcttcatgccccctctgcagagggcggctgtacgatgttcacatgtctgcgtttggtcagacatcatctccttggctgccctttgaaaccaaatcacttgcctt

SEQ ID NO: 313870 - DNA, 120 bp, Artificial Sequence
  ENSG00000134769_38 (sequence is synthesized)
ggggataaagtgctcaattggcattagtgagaagcccatcctatcccttgacatacttaatcatatatctctccagagaactcacctgacaaatgtctctgagcacaggctgacaccaaa

SEQ ID NO: 313871 - DNA, 120 bp, Artificial Sequence
  ENSG00000134769_39 (sequence is synthesized)
gtggcacaactgcacagttctcagatttctttgcacagattgatttttattgcgggttttgttggggtgtcttaatgttcatctcttttccactgcccatcctctgtgaacccatacctc

SEQ ID NO: 313872 - DNA, 120 bp, Artificial Sequence
  ENSG00000134769_40 (sequence is synthesized)
tctagatggagcaggtggccactggtgcctcatactcagtattgaaaaccactacatcccagctacctataatgctgtcagctcaaaatcatagccaggtagttcttgaactcagaactt

SEQ ID NO: 313873 - DNA, 120 bp, Artificial Sequence
  ENSG00000134769_41 (sequence is synthesized)
aaatcctgcacgtggcactccaccactgactggaccgagctggcatatgttgtttctttgtgtttctacatcaaaatgttcgtctaagatttgaactgttctgctgataaccttccccgt

SEQ ID NO: 313874 - DNA, 120 bp, Artificial Sequence
  ENSG00000134769_42 (sequence is synthesized)
tgtcatagctatttcattgccaaccaactccatcacatggttgttgatatcgtcatataaagccattgcaaggactctggaaactgccgccaatgaccaatttctgactaaccagccacc

SEQ ID NO: 313875 - DNA, 120 bp, Artificial Sequence
  ENSG00000134769_43 (sequence is synthesized)
ttttctctctcttagctccacgtcagcactgagaccagactcgagcacccctgtcctgtaagcgagacaaaatggcgtgtgttattttggggttttgtgttttttggtgggtttctttcc

SEQ ID NO: 313876 - DNA, 120 bp, Artificial Sequence
  ENSG00000134769_44 (sequence is synthesized)
ttggctctccagatttacttttggggcctgttctaagtgcaaacccagcaagtttcacttgtcctgtccattagatacaactacatcttgcgggggttgtttctttcttgttccacaatg

SEQ ID NO: 313877 - DNA, 120 bp, Artificial Sequence
  ENSG00000134769_45 (sequence is synthesized)
aattgcacatccatctccatcagagctgatagcctgttaataagcactggtctaacacagccaaccctcctccacagcgccatattaatggaggaggggaggaaggtgaaatctactgca

SEQ ID NO: 313878 - DNA, 120 bp, Artificial Sequence
  ENSG00000134769_46 (sequence is synthesized)
tgggattcaggaaacagttgtggttggtcaggacggaagttggggtaagtttggttggtcagagggagttgtgctggagattgtgaaaaatgggttcttgaatgatctactataaggcag

SEQ ID NO: 313879 - DNA, 120 bp, Artificial Sequence
  ENSG00000134769_47 (sequence is synthesized)
ggaaggttcatttgtaagtagtaatgtgaactgaattgcattaagagtgtgtggcctttgttgtgatatactatgtattttcttatatgcatgagccaaactgttgcatcataatttagc

SEQ ID NO: 313880 - DNA, 120 bp, Artificial Sequence
  ENSG00000134769_48 (sequence is synthesized)
actgatgtctgcttttattttgatcatctttgtccacccttattagttcttggctgttaaccgtagatagatcttgtaaatccagcaacctttggttgctgcattccccttggttcgatt

SEQ ID NO: 313881 - DNA, 120 bp, Artificial Sequence
  ENSG00000134769_49 (sequence is synthesized)
ccacgcaaggagccacaagtgagaactccactgtccttagaagaaagggcatttttacttttgaaccaaaaagagaaaaaaaaatcagaagtgttgcatcttgaggcgaattaactgtaa

SEQ ID NO: 313882 - DNA, 120 bp, Artificial Sequence
  ENSG00000134769_50 (sequence is synthesized)
gacatttttaattatgactactgcaatttgacaccatttgaaataatcaattcagagacactaaagatttcacaatattcattggtattgtaaaaaaaaaatactattgtatggattttt

SEQ ID NO: 313883 - DNA, 120 bp, Artificial Sequence
  ENSG00000134769_51 (sequence is synthesized)
tgtgtgtgtgtgtgtgtgtgtgttggaacctcctggggacatgttatattttgaagtgattaaactatttaattgtgtgtctatattttggagtggaataatttcttcattaaaaaatgt

SEQ ID NO: 313884 - DNA, 120 bp, Artificial Sequence
  ENSG00000134769_52 (sequence is synthesized)
aataatttcttcattaaaaaatgtttttaaaaacactatatcttgggtggtttattcctttgtttcagtgaatctttcctaaagcaacgtggagtcagtctgttgaaagaaggaaggcag

SEQ ID NO: 313885 - DNA, 120 bp, Artificial Sequence
  ENSG00000134769_53 (sequence is synthesized)
gtacttgcagtttaaagcaggacccattgatggaatattgagccaccgaggcaaaatagctcaccttctcttgccttgggggatgcatggtttttaccattctactgttttattagcatc

SEQ ID NO: 313886 - DNA, 120 bp, Artificial Sequence
  ENSG00000134769_54 (sequence is synthesized)
tgtgagcatctaatagaaatactattctgctatttatggaaatccttattataattgatatggaagtgagtttgaaattctaacagctaacatatttcatgtttgtatcacacactgttc

SEQ ID NO: 313887 - DNA, 120 bp, Artificial Sequence
  ENSG00000134769_55 (sequence is synthesized)
ttaacactttatgtgacttcactcaattctttgaatcctctgcatctagccatgtattctgcaaatattaagtgctcaatggtttttttgttgaattactgaataaatgaattagtggtg

SEQ ID NO: 313888 - DNA, 120 bp, Artificial Sequence
  ENSG00000134769_56 (sequence is synthesized)
gaagaatgaacacagctttttattgaagttaaaggttactttggagtttgtttggaaatgtgtaaggtcaaatactatagttttcagcatatgtagtacttcagaggaagaattaagggg

SEQ ID NO: 313889 - DNA, 120 bp, Artificial Sequence
  ENSG00000134769_57 (sequence is synthesized)
aaggaagaagaactgaagcagggagtaagttatgtcccctactgcaggtcttaactaacagtggaggggcctgccgacctgcggttttctcattgcttttgctctaatgtatgttcatgc

SEQ ID NO: 313890 - DNA, 120 bp, Artificial Sequence
  ENSG00000134769_58 (sequence is synthesized)
ttcagtttggaaagagaaaaaagtcatactaatttgcttctttttcaatgtagtgcttgaattgagatatataaatttagcattttttataactatcactactatccacatcaaaagaag

SEQ ID NO: 313891 - DNA, 120 bp, Artificial Sequence
  ENSG00000134769_59 (sequence is synthesized)
acagtacacaccaggatctagaggctggatttcatactcatagctctccctagaatttcagagagttctgttatgatctctgttgtaattaccaatttggttcaagtttgttctttaaat

SEQ ID NO: 313892 - DNA, 120 bp, Artificial Sequence
  ENSG00000134769_60 (sequence is synthesized)
gaatatgcttagaattcacatatgttctggatgtactggaattaaaaggatttaagagatcatggtgtgcatgttctaggataaataggatttaccaatccttggatgaagtgcttggga

SEQ ID NO: 313893 - DNA, 120 bp, Artificial Sequence
  ENSG00000134769_61 (sequence is synthesized)
gtcatttattggaaacattttagatccccagaggtataagtttcaaaccagtcttagcttttcaagttgttgatcagacccttctcttaacagagagataccacagtcactagagatacc

SEQ ID NO: 313894 - DNA, 120 bp, Artificial Sequence
  ENSG00000134769_62 (sequence is synthesized)
ctgaggttcatgtcatcccaaaacccacagcactcagaagctaacctctacacccactcacactgtgagtattcagttcggtttcattttactgaaaacctgtgaaacctctttttataa

SEQ ID NO: 313895 - DNA, 120 bp, Artificial Sequence
  ENSG00000134769_63 (sequence is synthesized)
aaatcaggcaattaaatcccttttcatcacacaattattgagccttgttccccatggctcaccaaaatgtgctcaattttgtgagagaaagactgtactccataactgactattcacgtc

SEQ ID NO: 313896 - DNA, 120 bp, Artificial Sequence
  ENSG00000134769_64 (sequence is synthesized)
ccatctttttggctcttccccaaagcagaatccttactgttggttgacagtaatctctttttaaaaagtaactctcagctttttccttagcaccagagcctttcggctccgggagacgag

SEQ ID NO: 313897 - DNA, 120 bp, Artificial Sequence
  ENSG00000134769_65 (sequence is synthesized)
agggtcattacatacttttttttttttctggaaataggggcattgtgactttatagcctaaactggagctgtctgaacctgtggtcaggctcaagagccagcagggggagcagcaaactc

SEQ ID NO: 313898 - DNA, 120 bp, Artificial Sequence
  ENSG00000134769_66 (sequence is synthesized)
attatttttatactgtctttcatatatacaaatgatgctcttggaattgtttttctcctggtgatactattgactcagcctcagtggagagaattcagtcctatgtctgcttaggtataa

SEQ ID NO: 313899 - DNA, 120 bp, Artificial Sequence
  ENSG00000134769_67 (sequence is synthesized)
aaagcaaacgatgttttcagttctaaactagtttaataacacatttggcaagttctgtttcttcagatattagacatttattgagtgctcttttgtttcagtctcaaatgatatgatatt

SEQ ID NO: 313900 - DNA, 120 bp, Artificial Sequence
  ENSG00000134769_68 (sequence is synthesized)
ctgagggatgaagtagccatccctggaggacgggggcacccactggctgattaatgtaccatggtgggaggaaggaccatgctgacatgctggcaagcggggaagctccagtcacctggg

SEQ ID NO: 313901 - DNA, 120 bp, Artificial Sequence
  ENSG00000134769_69 (sequence is synthesized)
agtattcagtcccccttcctcccactctccaccctactgcgtgctcttacttattctgttggaacccagtgtagcttcctgagatttaaaatataggaagactcaaaactatgttacttc

SEQ ID NO: 313902 - DNA, 120 bp, Artificial Sequence
  ENSG00000134769_70 (sequence is synthesized)
aaattaaatagaagcaaaataaaagcagctttaatttcaagtgcatgtaccacgctatgtatgacaatatatcccactcactagcattatttaaaagtttcacattatttccatggatca

SEQ ID NO: 313903 - DNA, 120 bp, Artificial Sequence
  ENSG00000134769_71 (sequence is synthesized)
attagaaccacaacctgtccaatttcaacgtatctttcatttcttctgtatgctcttttctattattcattatgtgtgtttgtgtgtaacaaagaatgtttggaaaatgctggacacatt

SEQ ID NO: 313904 - DNA, 120 bp, Artificial Sequence
  ENSG00000134769_72 (sequence is synthesized)
tttacccttcattcccatggtctgtaaaaaaggaaagtgtaaaatcaatctgtaatgtcagacaataaagataatgtattacattattttgtattttgtgaaaaaaattactttactaaa

SEQ ID NO: 313905 - DNA, 120 bp, Artificial Sequence
  ENSG00000134769_73 (sequence is synthesized)
ttaaagtcaaattttaacagaagacagtccccctgggtgaaggacacataacacatacagcctgtataattgcccatgaatgcatacatggggtattgctattgtatttccaatacactt

SEQ ID NO: 313906 - DNA, 120 bp, Artificial Sequence
  ENSG00000134769_74 (sequence is synthesized)
agatcatggtaaagaaaaatgccttcttcatgatacttctctgcaaatggcttctttcctctcctgtctcttatttagcatgtgcatagaaaaaggaaataaggttcaattataacctcc

SEQ ID NO: 313907 - DNA, 120 bp, Artificial Sequence
  ENSG00000134769_75 (sequence is synthesized)
ctcctcctagcagagagagagggcaatcatcctgtcgtcatcagccttgctttagccatttcccttggggatactttccaggccatttcccaggcagcaggatcttgaaaggctcctatg

SEQ ID NO: 313908 - DNA, 120 bp, Artificial Sequence
  ENSG00000134769_76 (sequence is synthesized)
gaccaggaagttcgtaaacagatggatgcacagagccaaactgtggcagtgcccccaaggtggcgccactgccccctcaccttccagctcctctccaccaagcccctcagcagcttctgc

SEQ ID NO: 313909 - DNA, 120 bp, Artificial Sequence
  ENSG00000134769_77 (sequence is synthesized)
atctcagggggccaacagcgggtactgcggtgtcggtacccaaggaccagggcccacgtcacccagatgtcagcaatacatcgtctgggtagtggcagagtttgcctatttcacttattt

SEQ ID NO: 313910 - DNA, 120 bp, Artificial Sequence
  ENSG00000134769_78 (sequence is synthesized)
atcttttttgcttttatacacaagcctcttttcaaaaaggacctgaggcagcttacaacaaaagatataaacagtgacttcataaaattgaaatagaaaaatcaaaaactaaagaaaata

SEQ ID NO: 313911 - DNA, 120 bp, Artificial Sequence
  ENSG00000134769_79 (sequence is synthesized)
aaatgtgaatatgctaatcttaagggacaaggatgttactctgcatgttctggcaatgaagcaaaaaaaaaaaaaaaaggaaaattatcggtggttttatcagtacagaaataccacttc

SEQ ID NO: 313912 - DNA, 120 bp, Artificial Sequence
  ENSG00000134769_80 (sequence is synthesized)
tcaggggaacaaaatttctgttggcataaaatatgaaagaaagtcttcactgggagctttataggagtactggacgatagaaaaggaaaaaaagcagtcatagatttcatgtggctgttt

SEQ ID NO: 313913 - DNA, 120 bp, Artificial Sequence
  ENSG00000134769_81 (sequence is synthesized)
cttatactgacctcagtcaaaattaaaagcagaaccttatcaatcccagccctatagaggcggttctgcaaggaaataaacaaatgctgtccaaatatagacttctcatggtaaaacatg

SEQ ID NO: 313914 - DNA, 120 bp, Artificial Sequence
  ENSG00000134769_82 (sequence is synthesized)
atctaaggagagaatttagaggttttagactggcatctgcttctaaattctgtttttatttatgagtgtttctcccctttggggacattgtctttgtaaaaccaaacttagaacaccccc

SEQ ID NO: 313915 - DNA, 120 bp, Artificial Sequence
  ENSG00000134769_83 (sequence is synthesized)
acacaacaaattgtgctggatttaataacctctacttgctttatcataagtctgtgtggttcaatgtagtgttttattatactggcatatataatttctacttacattgtttcttgttag

SEQ ID NO: 313916 - DNA, 120 bp, Artificial Sequence
  ENSG00000134769_84 (sequence is synthesized)
aggtaatgcatgaatttatccctctcgaggagagaacatgaattaaaaaaaatagtgcctgtaatataatgtgatgattatgatatcacaagcaataaatttttttttacaaaacttgaa

SEQ ID NO: 313917 - DNA, 120 bp, Artificial Sequence
  ENSG00000134769_85 (sequence is synthesized)
ttcatttcatttccccacaggcatgattgaaaagggttgtaagattccaggaatgaactaaatgtttctctgagcccaaatcaactatcatctgaaatcgtggtgcagagaagaaaggtg

SEQ ID NO: 313918 - DNA, 120 bp, Artificial Sequence
  ENSG00000134769_86 (sequence is synthesized)
caattcctgtaaggctgtatttttccttcttctggttcatacttttgttttcttggtttttcttcacttacttcccccttagtcttccatccggttgagtgttcctactgccacagtgag

SEQ ID NO: 313919 - DNA, 62 bp, Artificial Sequence
  ENSG00000134769_87 (sequence is synthesized)
cagaccaatggacaccttctaagagtttggcgagtcagtgactgaagcgcccgtccattcca

SEQ ID NO: 313920 - DNA, 120 bp, Artificial Sequence
  ENSG00000134769_88 (sequence is synthesized)
tatgtacagttggatcacactgagcagctggagacaccactcccttgtcctcagggagcttacattctacttgggaggtgcaattaagaaacaatgaaacaacatgagatgaagaaagaa

SEQ ID NO: 313921 - DNA, 120 bp, Artificial Sequence
  ENSG00000134769_89 (sequence is synthesized)
aaaattgtatgaaacatgagaaaatatctaaacattctgagaagcaagaaggctatgaggagatatgtgacaacattttagtggctttcttgaatcaacaactgcatgaacaagtagatt

SEQ ID NO: 313922 - DNA, 61 bp, Artificial Sequence
  ENSG00000134769_90 (sequence is synthesized)
tgccgtttttaaagctggtccgagaagcgcaatattctggtgggagtgacccgattttcca

SEQ ID NO: 313923 - DNA, 120 bp, Artificial Sequence
  ENSG00000134769_91 (sequence is synthesized)
agtgctccctgagctctgccgagagtaatttcctaccagccctgctgggagtttcaccccaagagagcagccttcaacagagctgctgggtgtcatgaagatagagggtgtgggtgtgaa

SEQ ID NO: 313924 - DNA, 120 bp, Artificial Sequence
  ENSG00000134769_92 (sequence is synthesized)
tagcctggctctaagagctttgctgcttcccactcctccaaagaattagaacgtgatgcactgcaacgtaaaagtccatttcacagcctcccagacctgtaaccagcatgaacgacaccc

SEQ ID NO: 313925 - DNA, 120 bp, Artificial Sequence
  ENSG00000134769_93 (sequence is synthesized)
tctgttccctcctcaggaagtccttttattaccaggaggttacctgagggaataagtgcatccagccctgtggctgaagagcattccctcataaagctgtacgtaaatcagcttgatcac

SEQ ID NO: 313926 - DNA, 120 bp, Artificial Sequence
  ENSG00000134769_94 (sequence is synthesized)
taatgtactgtggttggactctgaaggacatgatgttccttctaccaacaattttcatctattcaaccaatgtcaatgttgaacctgcaatgcctaatttagaatcctttcagacaatgc

SEQ ID NO: 313927 - DNA, 120 bp, Artificial Sequence
  ENSG00000134769_95 (sequence is synthesized)
gcaaatgccatcatgaacagaatttctaaaactccttcatcatcctaaagctgggagacacagaatgattgaagatagtgggaaaagaggaaataccatggcagaaagaagacagctgtt

SEQ ID NO: 313928 - DNA, 120 bp, Artificial Sequence
  ENSG00000134769_96 (sequence is synthesized)
gcgcggcgcctccccgggcggcgggcggcgcctcaggcccgcggggcggcggtagcggctgctgcaggatgtccggcccgggggcgcggggccgcgcagataaataggatttaccaatcc

SEQ ID NO: 313929 - DNA, 120 bp, Artificial Sequence
  ENSG00000134769_97 (sequence is synthesized)
taataagaaagcggctcctactccaggctcaaacctccctgcagaccaatggacaccttctaagagtttggcgagtcagtgactgaagcgcccgtccattccaagagaatccatcggtct

SEQ ID NO: 313930 - DNA, 80 bp, Artificial Sequence
  ENSG00000134775_0 (sequence is synthesized)
agtccgcgagccagcgagctgcggctgcggcctcccctgcgcgcagctacccgggcgtcccggcccgcggccccgctaac

SEQ ID NO: 313931 - DNA, 120 bp, Artificial Sequence
  ENSG00000134775_1 (sequence is synthesized)
tcatggccacgctggcttgccgggtgcagttcttggacgacacggaccctttcaacagcaccaacttccccgagcccagccggccgccgctgttcacgttccgcgaggacctcgcgctcg

SEQ ID NO: 313932 - DNA, 120 bp, Artificial Sequence
  ENSG00000134775_2 (sequence is synthesized)
gcacccagctggcgggggtccataggctgctgcaggcgccgcacaagctggatgactgtactctgcagctctctcacaatggcgcctacctggatttggaggccaccctggcagagcagc

SEQ ID NO: 313933 - DNA, 120 bp, Artificial Sequence
  ENSG00000134775_3 (sequence is synthesized)
gggatgagttggaaggcttccaggatgacgccgggcggggcaagaagcacagcatcatcctaaggacgcagctgtctgtgagggtccatgcctgcatcgaaaaactatacaactccagcg

SEQ ID NO: 313934 - DNA, 120 bp, Artificial Sequence
  ENSG00000134775_4 (sequence is synthesized)
gacgagatttgagaagggccctcttctccctgaagcagatatttcaggatgacaaggatttggtgcatgaatttgtagtggctgaaggtctgacatgtttgatcaaggtgggagctgagg

SEQ ID NO: 313935 - DNA, 120 bp, Artificial Sequence
  ENSG00000134775_5 (sequence is synthesized)
ctgatcagaactatcagaactacatcttaagggctttgggccagattatgttgtatgtggatggaatgaatggagtaataaaccgcaatgaaaccattcagtggctgtacactctcattg

SEQ ID NO: 313936 - DNA, 120 bp, Artificial Sequence
  ENSG00000134775_6 (sequence is synthesized)
ggtcaaagttccgcctggtggtgaagacagccctgaagctgctgctcgtctttgtagagtactcggagtccaacgcacctctcctaattcaggctgtcactgctgttgacacgaaaagag

SEQ ID NO: 313937 - DNA, 120 bp, Artificial Sequence
  ENSG00000134775_7 (sequence is synthesized)
gggtcaaaccttggtcaaatatcatggaaatcctggaggaaaaagatggagttgatacggagctactggtttatgcaatgactttggtgaacaagacgttatcaggactaccagaccaag

SEQ ID NO: 313938 - DNA, 120 bp, Artificial Sequence
  ENSG00000134775_8 (sequence is synthesized)
acaccttctacgacgtcgtggactgcctggaggagctgggcattgctgctgtgtcccagaggcacttgaacaagaaagggactgacctggacttagtggagcaactcaacatttatgagg

SEQ ID NO: 313939 - DNA, 120 bp, Artificial Sequence
  ENSG00000134775_9 (sequence is synthesized)
tggcgctcaggcacgaggatggcgatgagaccacggagccaccccccagtgggtgccgggaccggaggagggccagcgtgtgttccagtggcggaggcgagcaccggggcctggaccgca

SEQ ID NO: 313940 - DNA, 120 bp, Artificial Sequence
  ENSG00000134775_10 (sequence is synthesized)
gaaggagccgcaggcactcggtgcagagcatcaagagcaccctgtcggcccccaccagtccctgctcccagtcagctcccagcttcaagcccaaccaagtgcgagatctgcgtgaaaaat

SEQ ID NO: 313941 - DNA, 120 bp, Artificial Sequence
  ENSG00000134775_11 (sequence is synthesized)
acagcaattttggcaataactcttatcactcctcaagaccctcatctggatccagtgtgcccaccacccccacatcatccgtctcacccccacaggaggccaggttggaaaggtcatcac

SEQ ID NO: 313942 - DNA, 120 bp, Artificial Sequence
  ENSG00000134775_12 (sequence is synthesized)
cgagtggtcttctcacatcatccttcaggcagcaccaagagtcactggcagcagagagagagaggcggcggcaggagagagaagaaaggttgcagagaatagagcgggaagaaagaaaca

SEQ ID NO: 313943 - DNA, 120 bp, Artificial Sequence
  ENSG00000134775_13 (sequence is synthesized)
aattcagccgagattatttagacaaaagagaggagcaaaggcaagcaagagaagaaagatacaaatacttggaacagttggcagctgaggagcacgagaaggagctgagaagccggagtg

SEQ ID NO: 313944 - DNA, 120 bp, Artificial Sequence
  ENSG00000134775_14 (sequence is synthesized)
tgagccggggcagagccgacctctccttggacctgacctcgccagcagccccagcctgcctggctcctctgagccatagcccctcatcttcagactctcaagaggctctcacggtgtctg

SEQ ID NO: 313945 - DNA, 120 bp, Artificial Sequence
  ENSG00000134775_15 (sequence is synthesized)
cctcctccccaggaacccctcaccatccccaagcaagtgccggggatcctgaacccgaatcagaggcagaaccggaagcagaggcaggggcggggcaggttgctgatgaagctggccagg

SEQ ID NO: 313946 - DNA, 120 bp, Artificial Sequence
  ENSG00000134775_16 (sequence is synthesized)
acatagcctctgcccacgagggtgcagagactgaagtggagcaggcactagagcaagagccggaagaaagagcctccctcagtgaaaaagagaggcagaacgagggggtgaacgagaggg

SEQ ID NO: 313947 - DNA, 120 bp, Artificial Sequence
  ENSG00000134775_17 (sequence is synthesized)
acaactgctctgcctccagcgtctcgtcctccagcagcacgttggagagggaggagaaggaggacaagctctccagggacaggacaactggtttgtggcccgcaggtgtccaggatgcag

SEQ ID NO: 313948 - DNA, 120 bp, Artificial Sequence
  ENSG00000134775_18 (sequence is synthesized)
gtgtaaatggacagtgtggcgacatcctcaccaacaaacggttcatgcttgacatgctgtatgcccataacaggaagtctccggatgatgaggagaagggggatggggaggctgggagga

SEQ ID NO: 313949 - DNA, 120 bp, Artificial Sequence
  ENSG00000134775_19 (sequence is synthesized)
cccagcaggaggcagaggcggtagccagccttgctaccaggatatccaccctgcaggccaactctcagacccaggatgagagtgtcaggagggtggatgtcggctgtttggacaatcggg

SEQ ID NO: 313950 - DNA, 120 bp, Artificial Sequence
  ENSG00000134775_20 (sequence is synthesized)
agaggttccatctcccctgatgctgagcccaatgacaaggtcccagaaacagcgccggtgcagccgaagacagagtctgattacatctgggaccagctcatggccaatccaagagagctc

SEQ ID NO: 313951 - DNA, 120 bp, Artificial Sequence
  ENSG00000134775_21 (sequence is synthesized)
agaatccaagacatggatttcactgacctgggggaggaggatgacattgatgtcctagatgtggacctgggtcacagggaggcccctgggccacctcccccacccccacccacctttctg

SEQ ID NO: 313952 - DNA, 120 bp, Artificial Sequence
  ENSG00000134775_22 (sequence is synthesized)
ggtttgccgcccccaccccctccgcccctgttggacagcattcctccccctcctgtccctggtaatttattggttcctcctcctccagtgttcaacgctcctcagggcttagggtggtcc

SEQ ID NO: 313953 - DNA, 120 bp, Artificial Sequence
  ENSG00000134775_23 (sequence is synthesized)
caggtacccaggggtcagcccacattcactaagaaaaagaagaccatccgtttgttctggaatgaagttcggccttttgactggccatgtaaaaacaaccgacgctgcagagaattcctg

SEQ ID NO: 313954 - DNA, 120 bp, Artificial Sequence
  ENSG00000134775_24 (sequence is synthesized)
tggtcaaaactggaacccattaaggtggacacttccagactggagcacctgtttgagtctaaatccaaggaactgtctgtctcaaagaaaactgctgcagatggaaaaaggcaagagatc

SEQ ID NO: 313955 - DNA, 120 bp, Artificial Sequence
  ENSG00000134775_25 (sequence is synthesized)
attgttctggattccaagaggagtaacgccatcaatattggtctgacggtgctgccccctccaaggacgattaagatcgccattttgaattttgatgagtatgccttaaacaaagaagga

SEQ ID NO: 313956 - DNA, 120 bp, Artificial Sequence
  ENSG00000134775_26 (sequence is synthesized)
atcgagaaaattctaacgatgattcccaccgatgaggagaagcagaaaatccaggaagctcagctggccaaccctgaaatccccctgggcagtgcagagcagttcctcctcaccctgtcc

SEQ ID NO: 313957 - DNA, 120 bp, Artificial Sequence
  ENSG00000134775_27 (sequence is synthesized)
tccatcagcgagctctctgcacgacttcacctctgggcattcaaaatggattatgaaactacagaaaaggaagtagcagaaccactcctggacctgaaggaaggaatagaccagttggag

SEQ ID NO: 313958 - DNA, 120 bp, Artificial Sequence
  ENSG00000134775_28 (sequence is synthesized)
aacaataaaaccttgggctttatcctgtctactctcttagccattgggaactttctaaatggaactaatgccaaagcgtttgagttaagctacctcgagaaggttccagaagtcaaagac

SEQ ID NO: 313959 - DNA, 120 bp, Artificial Sequence
  ENSG00000134775_29 (sequence is synthesized)
acagtgcacaagcagtcgcttctccaccatgtgtgcaccatggtggtagaaaacttcccagacagctccgatctgtactcggagatcggggccatcaccaggtcagccaaggttgacttt

SEQ ID NO: 313960 - DNA, 120 bp, Artificial Sequence
  ENSG00000134775_30 (sequence is synthesized)
gatcaacttcaggataatttatgtcagatggagagaagatgcaaagcttcatgggatcacctcaaggcaattgcaaaacatgaaatgaaaccagttttaaaacaacggatgtcagagttc

SEQ ID NO: 313961 - DNA, 120 bp, Artificial Sequence
  ENSG00000134775_31 (sequence is synthesized)
ctgaaagactgtgcagagcgaattataattttaaagattgtccatagaaggataatcaacagattccactcctttttactctttatgggccatccaccttatgcaattcgggaagtgaac

SEQ ID NO: 313962 - DNA, 120 bp, Artificial Sequence
  ENSG00000134775_32 (sequence is synthesized)
ataaacaaattctgcaggattattagtgaatttgcactagagtatcgcacaaccagggaaagggttttgcagcagaaacagaaacgggccaaccacagagagagaaataagaccagaggg

SEQ ID NO: 313963 - DNA, 120 bp, Artificial Sequence
  ENSG00000134775_33 (sequence is synthesized)
aagatgatcaccgattctggcaagttctccggcagttctccggcgcccccaagccagccgcagggtctgagctatgcggaggacgcggctgagcacgagaacatgaaggctgtgctgaaa

SEQ ID NO: 313964 - DNA, 120 bp, Artificial Sequence
  ENSG00000134775_34 (sequence is synthesized)
acctcgtccccctccgtggaggacgccacccccgcgctgggcgtccgcacacgcagccgagcaagccgaggatccactagttcctggactatgggaactgatgactcgcccaatgtcaca

SEQ ID NO: 313965 - DNA, 120 bp, Artificial Sequence
  ENSG00000134775_35 (sequence is synthesized)
gatgatgcagctgatgagatcatggaccgcatcgtcaagtcagccacccaagtgcccagtcagcgagtggtgccgagggagaggaaacgatcccgggccaaccggaaatctttgcgaaga

SEQ ID NO: 313966 - DNA, 120 bp, Artificial Sequence
  ENSG00000134775_36 (sequence is synthesized)
accctgaagagcggcctgaccccagaagaagccagagccctgggcttggttggcacctcggagttgcagctgtgacactcataggttactcccaggagtgtgctgagcagaaggcaagct

SEQ ID NO: 313967 - DNA, 120 bp, Artificial Sequence
  ENSG00000134775_37 (sequence is synthesized)
cttgctggatgaaacccctccaggtggggttggggagacttgatattcacatccaacagtttgaaaagggagagctcaattcccagcgtcaccccatggcttgtgttgcctgctacgcat

SEQ ID NO: 313968 - DNA, 120 bp, Artificial Sequence
  ENSG00000134775_38 (sequence is synthesized)
tgacttggatctccaggagtcccctgcacataccttctccatcgtgtcagctgtgtttctcttgattccgtgacacccggtttattagttcaaaagtgtgacaccttttctgggcaagga

SEQ ID NO: 313969 - DNA, 120 bp, Artificial Sequence
  ENSG00000134775_39 (sequence is synthesized)
acagcccctttaaggagcaaatcacttctgtcacagttattatggtaatatgaggcaatctgattagcttcacagactgagtctccacaacaccaaaatatccagatgtaaaccccaaac

SEQ ID NO: 313970 - DNA, 120 bp, Artificial Sequence
  ENSG00000134775_40 (sequence is synthesized)
ttgtacacaaaagaaagcacagattgtttacctgttgtggattttagatgtaacaaatgtttatacaaatacatacatgtacaccatgtttcaaatactaaataaatagagtttaatgcc

SEQ ID NO: 313971 - DNA, 120 bp, Artificial Sequence
  ENSG00000134775_41 (sequence is synthesized)
gaggaggaggaagaggagcagccaatcacggagcccagttccgaagaagagagagaggatgatgcttcctgtcagggcaaggacagcaaggtcggcgctgcctcagggcagagccccact

SEQ ID NO: 313972 - DNA, 120 bp, Artificial Sequence
  ENSG00000134775_42 (sequence is synthesized)
ggaagggatgctgctcccaagagctctgccctccctgctgtctcgaatgccagctcgcagggaaagccgcttctggttggcactgcaggcgggaccacctggcacagtgggtcctctggg

SEQ ID NO: 313973 - DNA, 120 bp, Artificial Sequence
  ENSG00000134775_43 (sequence is synthesized)
tctgaggccaccccatctgccctcctgtcaccccctgcctcagctgctcggccctcctccgccacaccaggctccctgaaggtgtcaccgaccatagacaagctgccctacgtgccccac

SEQ ID NO: 313974 - DNA, 120 bp, Artificial Sequence
  ENSG00000134775_44 (sequence is synthesized)
agccccttccacctcttctcctatgactttgaggactcctccctgtccaccaaggagaaggaagcagagtcccagaaggaaaacagttcctctgattctttctctttgagcacatattct

SEQ ID NO: 313975 - DNA, 120 bp, Artificial Sequence
  ENSG00000134775_45 (sequence is synthesized)
agtcggctccctcactgcctctggacttgccaaagttttgttgaggtggagaggtcgccacaggctgaaagcattaaggagaaccaccctggcatgcggagcagtcggtgtgctttggag

SEQ ID NO: 313976 - DNA, 120 bp, Artificial Sequence
  ENSG00000134775_46 (sequence is synthesized)
gtgtgatgctgccatttcccccaatttgcttggttatgagtgacgtgggatttttaatcattagcatcttggctttgctgggtgtttttggcaggctgactctccagccagccctgcact

SEQ ID NO: 313977 - DNA, 120 bp, Artificial Sequence
  ENSG00000134775_47 (sequence is synthesized)
gtgctgtgtgcatcaggaaaccggctcattctgcaggtgtttcatccataaacaagcatcagccacaggctcctctttcgtttgacggaaaccctttggaatttaactttcagatacaaa

SEQ ID NO: 313978 - DNA, 120 bp, Artificial Sequence
  ENSG00000134775_48 (sequence is synthesized)
gaggcctggggtgcaggggctggttctctaagagcttgtccacaggctggcctctgaggtgacctgggtcaacccactcatgtggctgtgtcacccagtgtctggggacaaggagtgtgg

SEQ ID NO: 313979 - DNA, 120 bp, Artificial Sequence
  ENSG00000134775_49 (sequence is synthesized)
ccacgctggcagccagccagcagccttctgccctgtagaaagacagcccccaaactgtctgccacaccatcacattcatcacctccacacctggggaaaagggccccgataaggagggct

SEQ ID NO: 313980 - DNA, 120 bp, Artificial Sequence
  ENSG00000134775_50 (sequence is synthesized)
tttcctgaggaataagccccagaagagaaacctctcacttccccctgactgttccattgtgaataatagtaaggttgataatagtaaggctttttccgtttttgatataagtttagaaac

SEQ ID NO: 313981 - DNA, 120 bp, Artificial Sequence
  ENSG00000134775_51 (sequence is synthesized)
tgtcacattgtcatctattcctttaaaaatgtgtttactgaagtgtgttaatcattttgactggacatttcagactgggaaagatttgtttaaatggattgaatgagtatttccaaaaaa

SEQ ID NO: 313982 - DNA, 120 bp, Artificial Sequence
  ENSG00000134775_52 (sequence is synthesized)
ttgtacacagtttactgaggtcaatttgatgtactggaatatagataatttgttttctatattacactcataactattcttttctttgtataaagtatatgcttttccttatggaagtat

SEQ ID NO: 313983 - DNA, 120 bp, Artificial Sequence
  ENSG00000134775_53 (sequence is synthesized)
atctttttgatgttacacttaatactcattcagttctcctatgaatggtaactttagaattagggaccaaatggaatgttagattataggtttggtttagcctgaaagaacctcaccaag

SEQ ID NO: 313984 - DNA, 120 bp, Artificial Sequence
  ENSG00000134775_54 (sequence is synthesized)
gacttgagaagggtgccacagagggttataggaatcgtgaataattcatatgatctgtgacaccacaggattacttttcctacccatgacttgtgtgctatcaaggtggtagaatgcctc

SEQ ID NO: 313985 - DNA, 120 bp, Artificial Sequence
  ENSG00000134775_55 (sequence is synthesized)
cttcctcaacaaacactcctaaccagtggagtcatgtcttatgggccagcctttcttaagctacatatgagtggcacccactcgagtcgatgtcttaggcccaaagggcaatatgacacc

SEQ ID NO: 313986 - DNA, 120 bp, Artificial Sequence
  ENSG00000134775_56 (sequence is synthesized)
tctacaaaggcctgccaaccagtgccatgacccatgaatggcttattcattcctagattaaaaatacattgtctcagaagcatggatgaacgaatgaatgaaaccagaatgtcttccaat

SEQ ID NO: 313987 - DNA, 120 bp, Artificial Sequence
  ENSG00000134775_57 (sequence is synthesized)
agacctgtcagtcaatggcgtagtctaaaatagttactatttggattttttcccagttagaatatactactagattttatgctttatattgctggtcactatgatgcagtaaaaacaaga

SEQ ID NO: 313988 - DNA, 120 bp, Artificial Sequence
  ENSG00000134775_58 (sequence is synthesized)
agataaaagactttattagtttacatcttaggaattattgcattgaaaatccagtgtcttcatttggttgaatatgtatgtgccaagaggtattatatatactgatatttacttaatttc

SEQ ID NO: 313989 - DNA, 120 bp, Artificial Sequence
  ENSG00000134775_59 (sequence is synthesized)
tttcaaagtcagattacagttagtcccccaaattcttcttatcattcatattaatgtaattattgtcataatactgggtgtagggtaagtcttattgatcagattggtcttaaatcatgt

SEQ ID NO: 313990 - DNA, 120 bp, Artificial Sequence
  ENSG00000134775_60 (sequence is synthesized)
tttatttattaggaatagctttaagaattattaatcataactgggtttagcaggcctaaaacatatcaagaaattggattagtaaaaatataccaggcgacagggctttcttggatcaga

SEQ ID NO: 313991 - DNA, 120 bp, Artificial Sequence
  ENSG00000134775_61 (sequence is synthesized)
ttgtccaatattcttccaaagaaggacaattttccaaaagtggaaaccgttcccagtgaagaaccactgactttctaccaaagtgggcaatgtccaagtatttagaagcagaaattaggg

SEQ ID NO: 313992 - DNA, 120 bp, Artificial Sequence
  ENSG00000134775_62 (sequence is synthesized)
ctttgcaatgatttttctgctttgcttcagtgctgttatgagagttggtcatgtttatttactgtagcttattggttcctaaaaaatctcactgctcacaggcatcatcagccactgtgg

SEQ ID NO: 313993 - DNA, 120 bp, Artificial Sequence
  ENSG00000134775_63 (sequence is synthesized)
agtccgggcagctatgtcattatagctcttgcttttcagagtgctgtcaaatcacagagcaaccttagagataaaaaattattctcaaacgtatttctaatgattatgtcaaaaatgaat

SEQ ID NO: 313994 - DNA, 120 bp, Artificial Sequence
  ENSG00000134775_64 (sequence is synthesized)
ttgtaggacttgaaaaagtctcattccagttatgtggtttaatttttctttgtttaatgtgttctactttagggcatgcatgtgagaagctttatcataacatacattttacttttttgt

SEQ ID NO: 313995 - DNA, 120 bp, Artificial Sequence
  ENSG00000134779_0 (sequence is synthesized)
gcgaaggggaagctacgtcccggaggtgcggtgtggggcaccgggcggggccgcgggaaccggcgccccacggagctgctgctgtcagaccaaccccgggcccccatcatcactgcgccg

SEQ ID NO: 313996 - DNA, 120 bp, Artificial Sequence
  ENSG00000134779_1 (sequence is synthesized)
cgctttcaggcgccgagaactaccgttcccggcatgccatgaaattggcctcggcgctgaggcggggtccggccctccacccgctcccgccgcgcgcgaatcgcggtcgcgagccatgga

SEQ ID NO: 313997 - DNA, 120 bp, Artificial Sequence
  ENSG00000134779_2 (sequence is synthesized)
ggaggaggcatcgtccccggggctgggctgcagcaagccgcacctggagaagctgaccctgggcatcacgcgcatcctagaatcttccccaggtgtgactgaggtgaccatcatagaaaa

SEQ ID NO: 313998 - DNA, 120 bp, Artificial Sequence
  ENSG00000134779_3 (sequence is synthesized)
gcctcctgctgaacgtcatatgatttcttcctgggaacaaaagaataactgtgtgatgcctgaagatgtgaagaacttttacctgatgaccaatggcttccacatgacatggagtgtgaa

SEQ ID NO: 313999 - DNA, 120 bp, Artificial Sequence
  ENSG00000134779_4 (sequence is synthesized)
gctggatgagcacatcattccactgggaagcatggcaattaacagcatctcaaaactgactcagctcacccagtcttccatgtattcacttcctaatgcacccactctggcagacctgga

SEQ ID NO: 314000 - DNA, 120 bp, Artificial Sequence
  ENSG00000134779_5 (sequence is synthesized)
ggacgatacacatgaagccagtgatgatcagccagagaagcctcactttgactctcgcagtgtgatatttgagctggattcatgcaatggcagtgggaaagtttgccttgtctacaaaag

SEQ ID NO: 314001 - DNA, 120 bp, Artificial Sequence
  ENSG00000134779_6 (sequence is synthesized)
tgggaaaccagcattagcagaagacactgagatctggttcctggacagagcgttatactggcattttctcacagacacctttactgcctattaccgcctgctcatcacccacctgggcct

SEQ ID NO: 314002 - DNA, 120 bp, Artificial Sequence
  ENSG00000134779_7 (sequence is synthesized)
gccccagtggcaatatgccttcaccagctatggcattagcccacaggccaagcaatggttcagcatgtataaacctatcacctacaacacaaacctgctcacagaagagaccgactcctt

SEQ ID NO: 314003 - DNA, 120 bp, Artificial Sequence
  ENSG00000134779_8 (sequence is synthesized)
tgtgaataagctagatcccagcaaagtgtttaagagcaagaacaagatcgtaatcccaaaaaagaaagggcctgtgcagcctgcaggtggccagaaagggccctcaggaccctccggtcc

SEQ ID NO: 314004 - DNA, 120 bp, Artificial Sequence
  ENSG00000134779_9 (sequence is synthesized)
ctccacttcctccacttctaaatcctcctctggctctggaaaccccacccggaagtgagcacccctccctccaactccctaccagctccagagtggtggtttccatgcacagatggccct

SEQ ID NO: 314005 - DNA, 120 bp, Artificial Sequence
  ENSG00000134779_10 (sequence is synthesized)
aggggtgacctccagttttgcgtgtggaccgtaggcctctttctagttgaatgaccaaaattgtaaggcttttagtcccaccgacattagccaggctcgtagtgaggcctccagagcagg

SEQ ID NO: 314006 - DNA, 120 bp, Artificial Sequence
  ENSG00000134779_11 (sequence is synthesized)
ttgtgctgtcccctgcctctggaagcaatggggaatttggaatcttgtgtaagtgcccaaataagtctgagtgctttcctcttcttcaacactcaaccctcaatcccttagcactgattg

SEQ ID NO: 314007 - DNA, 120 bp, Artificial Sequence
  ENSG00000134779_12 (sequence is synthesized)
attagagaggtcccccaaagaaaccactggttttgacccatgaagcattagaactgcattgttcattcaggagccactagtcacatatgactatttaaatttaaagtaaattgtatgaaa

SEQ ID NO: 314008 - DNA, 120 bp, Artificial Sequence
  ENSG00000134779_13 (sequence is synthesized)
aattcatttcttcaattgcattagccacattttgagtattcatgtggctggtagattctgtattagcacaaagatatggaacatttccatcaccacagaaagttctgttggacagcactg

SEQ ID NO: 314009 - DNA, 120 bp, Artificial Sequence
  ENSG00000134779_14 (sequence is synthesized)
cattagaatattttcatactgctcttcctcaattaatttttgttgttaatgttgatgtcttcattggatgggtcataatgttccatgaaacctctcaagtacacaattgtatgttctttg

SEQ ID NO: 314010 - DNA, 120 bp, Artificial Sequence
  ENSG00000134779_15 (sequence is synthesized)
ttgtacacgttccacaattatcttccttattaactttttaaagaaggtgtacttctgctatactttattcttaccatttaaaaacaaaaaattcccaaacattgttttgcacaactcttc

SEQ ID NO: 314011 - DNA, 120 bp, Artificial Sequence
  ENSG00000134779_16 (sequence is synthesized)
ataaagaaagagttttaatggtgccagacactgttaacagaagctttccacctgctctgcctgcctcttcacagctctgagttgtccagcctcactttgcctggtccctggccatcctta

SEQ ID NO: 314012 - DNA, 120 bp, Artificial Sequence
  ENSG00000134779_17 (sequence is synthesized)
ggacaagcagtctcctgcttagaacagggtgggcttccaagagttcctttggaagcaagttgcctgtaattcagaaatcattttcccattgacatatgggggaacctctagcccacatat

SEQ ID NO: 314013 - DNA, 120 bp, Artificial Sequence
  ENSG00000134779_18 (sequence is synthesized)
gcttaatatttgacacaagataaatctgacatacctactacatttaatgaaatttttacagagaaggttgctcagattttcaattaggaatgcctatttatttcctccctctacagtcct

SEQ ID NO: 314014 - DNA, 120 bp, Artificial Sequence
  ENSG00000134779_19 (sequence is synthesized)
ggctgtgggcagaagcaaggccttcaccctgcttcccaacagggaaagtggggagtcacccacctagccccaagttctttgggtggctgcagtttttgtactgaagtcccagaggttaga

SEQ ID NO: 314015 - DNA, 120 bp, Artificial Sequence
  ENSG00000134779_20 (sequence is synthesized)
gaattaggagttttgaggaatgaggtgcaggggcctctaccatctgcacacttcagtcccagctggctcattctctttcctgacttctctctaccccggtgattggccagacttccttcc

SEQ ID NO: 314016 - DNA, 120 bp, Artificial Sequence
  ENSG00000134779_21 (sequence is synthesized)
tttgcactgtctacctgctaatcgacccagggtttccctcttccaaacccactggggaactaagagcagtccacaggattctccacatgcacttttgctctgaaacatgtttattttgat

SEQ ID NO: 314017 - DNA, 120 bp, Artificial Sequence
  ENSG00000134779_22 (sequence is synthesized)
tgttgacaatagtgatagatattcatgagaaagcgccttcgatatctcctccacctaccactttccatagcccctgaggaaaaccaaggtgaagagttagccttcaaggatcagggcaag

SEQ ID NO: 314018 - DNA, 120 bp, Artificial Sequence
  ENSG00000134779_23 (sequence is synthesized)
ctctaactggctgcttccccatatttgtaatagttcaaagtcttgaaatatcagcgcttaagagtctttgggagcataaactgagcttcgtattaacagcttcttcatttgctttaaaat

SEQ ID NO: 314019 - DNA, 120 bp, Artificial Sequence
  ENSG00000134779_24 (sequence is synthesized)
cgtattaacagcttcttcatttgctttaaaatagcgagacctcttaccttttcaatcccaaaactaaccacttataattcagtgtggtcatttaaacgtgtgtgtgtgtgtgtgtgtgtg

SEQ ID NO: 314020 - DNA, 120 bp, Artificial Sequence
  ENSG00000134779_25 (sequence is synthesized)
ccataacatgactgtcacatattctctaggagacattttggcccttttagttgtttaggttattatacttcaaggatttataaatgtgcaacaattcatggagtggcagaaaaggatata

SEQ ID NO: 314021 - DNA, 120 bp, Artificial Sequence
  ENSG00000134779_26 (sequence is synthesized)
gagagaccaagttgttgaggacaatagctggagtttagtcttccagaagtatttttcttgccagaattgatcaaaggaagagccaacggcactggataggagattctagcatttggctgc

SEQ ID NO: 314022 - DNA, 120 bp, Artificial Sequence
  ENSG00000134779_27 (sequence is synthesized)
ttctccaagacaagcgaggttagaagggagttgagaagttatgtcatcttccactgcagcagataccccttttttagtacttggagatcccccgaatcacagcatttctaaatcagccct

SEQ ID NO: 314023 - DNA, 120 bp, Artificial Sequence
  ENSG00000134779_28 (sequence is synthesized)
ggattccacaagtgaagcagcggaggaaccaggaggtcagcggtgtcactcaaatctgtggcaatcaagtgggagttctcaaaaggctatcaaaggaagggggttatgataaggaaaggc

SEQ ID NO: 314024 - DNA, 120 bp, Artificial Sequence
  ENSG00000134779_29 (sequence is synthesized)
tcaagacctgcctcagaaggagtgagcagggaagagcaggactgactccactcagtgcaggatccagtacaaaatgaagatgtgaggcttttgtgcaaacagcaggaaaacattaccttt

SEQ ID NO: 314025 - DNA, 120 bp, Artificial Sequence
  ENSG00000134779_30 (sequence is synthesized)
acaggtactaaaatgtaatgtttttcctttcttccatagtgtctttctcaacttgttatggctgtgttttttatttgctacttaatgctgttctaactaaaaacttaaatgttaaattcc

SEQ ID NO: 314026 - DNA, 120 bp, Artificial Sequence
  ENSG00000134779_31 (sequence is synthesized)
agtcctccggtggatttaaataatccaagaggaagaacaggaatccggagcagaaggttctagagctcccgggactcactggcacaccccgactgctccttgacatttgtggacagggct

SEQ ID NO: 314027 - DNA, 120 bp, Artificial Sequence
  ENSG00000134779_32 (sequence is synthesized)
ccagtggcaatatgccttcaccagctatggcattagcccacaggccaaggtaagggaggaacacctgccattgtaaactatggtatattccaaaatctactgaggaaatggttacattgc

SEQ ID NO: 314028 - DNA, 120 bp, Artificial Sequence
  ENSG00000134779_33 (sequence is synthesized)
aggttcccaacttccctatctgattcaggagatctagggtggggcccaggaacctgcattttcaataagcaagacagatgattccaatggacagcctcactttactcatctagttaagtg

SEQ ID NO: 314029 - DNA, 120 bp, Artificial Sequence
  ENSG00000134779_34 (sequence is synthesized)
gttcccaaacttgactgattctcagaattaactggggagttttatttttaatgaaattctgttggatagtttatgtcccatgacttgttctgggttggcagtacatgcacccaggaagag

SEQ ID NO: 314030 - DNA, 120 bp, Artificial Sequence
  ENSG00000134779_35 (sequence is synthesized)
tgaaaagtcagattctcactcccctgttctccaagtgtgcatccccagtggcagctgctattacgagtttcctgtacgcccttcccaagatactcattgcacataaagcatgcatgcaca

SEQ ID NO: 314031 - DNA, 120 bp, Artificial Sequence
  ENSG00000134779_36 (sequence is synthesized)
agaaaatgtgttcactggaaactggctgttgagcccctccaatgggagctgaggagctgtgtctctgcaggcatggggactggccacaagcaaagagtcagcagcatgaagccccggagc

SEQ ID NO: 314032 - DNA, 120 bp, Artificial Sequence
  ENSG00000134779_37 (sequence is synthesized)
tgtagcgtgtgcagcaggcgccaatccaacagcatgggaacaacagtgtcgcaatcattcctcagttatggcaagaatgtgctatttttcactgttaggtgttgcttctgagaactacaa

SEQ ID NO: 314033 - DNA, 120 bp, Artificial Sequence
  ENSG00000134779_38 (sequence is synthesized)
ataaaactctccaaccaagtgaacagactctctgctggccaaggggactccagagaaccttagaaactgagtttctgaccataacaggatgggaggtcagacacacctcatcataccccc

SEQ ID NO: 314034 - DNA, 120 bp, Artificial Sequence
  ENSG00000134779_39 (sequence is synthesized)
tcccttttgtggttttagacacaacaactgatcagcattgatattaaaagagagatcataagactgacggaacaactttgtgacaataagataccaaataataaacaggatctaaagcca

SEQ ID NO: 314035 - DNA, 120 bp, Artificial Sequence
  ENSG00000134779_40 (sequence is synthesized)
gtcaggcgggcaaaggatacagtcccggctccagaacgccgcggcactggggcgggaggggcccgccacgtccgccatcttgaaacaaccgccactcggggcgtcgcgcctgggccgcca

SEQ ID NO: 314036 - DNA, 120 bp, Artificial Sequence
  ENSG00000134779_41 (sequence is synthesized)
ggacactgagaagagttttgccattctgaagaggcgagcctgtggaactgtttaaggtcctgttcccagaagaataaaagtttctcattatggcattaaactctatttatttagtatttg

SEQ ID NO: 314037 - DNA, 120 bp, Artificial Sequence
  ENSG00000134779_42 (sequence is synthesized)
tcgcggtcgcgagccatggaggaggaggcatcgtccccggggctgggctgcagcaagccgcacctggagaagctgaccctgggcatcacgcgcatcctaggactgtgaagatgatgagat

SEQ ID NO: 314038 - DNA, 120 bp, Artificial Sequence
  ENSG00000134779_43 (sequence is synthesized)
gcattagcccacaggccaaggtctgatgtggactctgctgaggagagactgtatcttctaggtgggatatgtcaagagagaagagtgtatatttgacagtattgacttcacatagaattc

SEQ ID NO: 314039 - DNA, 87 bp, Artificial Sequence
  ENSG00000134779_44 (sequence is synthesized)
aagagtgtatatttgacagtattgacttcacatagaattctcctttgtggacaagaattcccaagactcagagcacaatgtagacat

SEQ ID NO: 314040 - DNA, 120 bp, Artificial Sequence
  ENSG00000134779_45 (sequence is synthesized)
taatggacttacagtttcacgtggctggagaggcctcacaatcacggcagaaggcgaaaggcacatcttacatggtggcaggcaaagagagaatgagagccaggtgaaaggggaaacccc

SEQ ID NO: 314041 - DNA, 76 bp, Artificial Sequence
  ENSG00000134779_46 (sequence is synthesized)
ccttataaaatcagcagatcttgtgagacttattaactaccatgagaacagtagggtggaaaccaacgggaattat

SEQ ID NO: 314042 - DNA, 120 bp, Artificial Sequence
  ENSG00000134779_47 (sequence is synthesized)
ccaaaccatatcacatagtttcttagacattgtttgatcatcttgatggaggaaactgcagtccaaagcaattttatacaaaactaaatttaacataaaacttcctgtgtacaaaatgaa

SEQ ID NO: 314043 - DNA, 120 bp, Artificial Sequence
  ENSG00000134779_48 (sequence is synthesized)
taaacagcaacaaagtacatataaaggtatattctctcagacctgtgctaatacatagccataaactaaaataaaaatttaaaattcattcctcaatctccagccacatttcaagtattc

SEQ ID NO: 314044 - DNA, 120 bp, Artificial Sequence
  ENSG00000134779_49 (sequence is synthesized)
agtaatcacatatgtctagtggctaccatattagttatatatagaacatttccatcatcacagaacgttccaccaggcagccttagttagagcaagcacggcttgttttatattataatt

SEQ ID NO: 314045 - DNA, 120 bp, Artificial Sequence
  ENSG00000134779_50 (sequence is synthesized)
ttcagaataattctggtgaaaagccattttatactatgctatagtcaacaaagaataaggatatttacctaatcttaagacttttttttaacctaaaacacaacatccttttctacttta

SEQ ID NO: 314046 - DNA, 120 bp, Artificial Sequence
  ENSG00000134779_51 (sequence is synthesized)
catattacttttgcagccatggctcataggaaaagccaaggatgagttagcctgctgctacccattttagctgcagagtgggctgtgcaggttctgagctttccccatgtgatagtcaaa

SEQ ID NO: 314047 - DNA, 120 bp, Artificial Sequence
  ENSG00000134779_52 (sequence is synthesized)
gaccccaaggcagccccagcctctctaggtctctgcacagtctccagtgtggaaagctgtgggaaaggaaggagcaggttctaggtcttcaggattttctgcatcttaaagcagctcatc

SEQ ID NO: 314048 - DNA, 120 bp, Artificial Sequence
  ENSG00000134779_53 (sequence is synthesized)
tcctttgccctcctagggagcaggggggcctagctttgggatcgtcctcctagcctcagaaataattgttcaagaaataacatttctcacacaaaggataaatgtttgaggggatggata

SEQ ID NO: 314049 - DNA, 88 bp, Artificial Sequence
  ENSG00000134779_54 (sequence is synthesized)
catttctcacacaaaggataaatgtttgaggggatggataccccatcttccatgattatctcatatatacacctactatgtacccaca

SEQ ID NO: 314050 - DNA, 120 bp, Artificial Sequence
  ENSG00000134779_55 (sequence is synthesized)
gcactcacaggccaactccaaactcaagaagttggagaaatagactcacctctcaatgagaagtgctatgggcatgcagggaaggaaggaattgacagcacccacctttggagtaagcta

SEQ ID NO: 314051 - DNA, 120 bp, Artificial Sequence
  ENSG00000134779_56 (sequence is synthesized)
taaacaatctgtgctttcttttgtgtacaagtttggggtttacatctggatattttggtgttgtggagactcagtctgtgaagctaatcagattgcctcatattaccataataactgtga

SEQ ID NO: 314052 - DNA, 120 bp, Artificial Sequence
  ENSG00000134779_57 (sequence is synthesized)
cagaagtgatttgctccttaaaggggctgttccttgcccagaaaaggtgtcacacttttgaactaataaaccgggtgtcacggaatcaagagaaacacagctgacacgatggagaaggta

SEQ ID NO: 314053 - DNA, 120 bp, Artificial Sequence
  ENSG00000134779_58 (sequence is synthesized)
tgtgcaggggactcctggagatccaagtcaatgcgtagcaggcaacacaagccatggggtgacgctgggaattgagctctcccttttcaaactgttggatgtgaatatcaagtctcccca

SEQ ID NO: 314054 - DNA, 120 bp, Artificial Sequence
  ENSG00000134779_59 (sequence is synthesized)
accccacctggaggggtttcatccagcaagagcttgccttctgctcagcacactcctgggagtaacctatgagtgtcacagctgcaactccgaggtgccaaccaagcccagggctctggc

SEQ ID NO: 314055 - DNA, 120 bp, Artificial Sequence
  ENSG00000134779_60 (sequence is synthesized)
ttcttctggggtcaggccgctcttcagggttcttcgcactgcagtggtggtgcaggtcacacccaaagggatgagaagaaaaggaagtatgagcagcaaggcacagggcagtcaagactc

SEQ ID NO: 314056 - DNA, 120 bp, Artificial Sequence
  ENSG00000134779_61 (sequence is synthesized)
cagtccccccttctccccagggacttccagagaagccagagggttcacactctgtaccttcctgctcttgctgaagtgccctgcagtctgtctgccaggacaaaagtttggggctacaca

SEQ ID NO: 314057 - DNA, 120 bp, Artificial Sequence
  ENSG00000134779_62 (sequence is synthesized)
ggctggcctaacaatgccacaggtgctgatttggagggccgagaggagtgatgcgggcacttataaagaggagagaaaggaggagaggctcaccctcacgaggcttctgagaagggggtg

SEQ ID NO: 314058 - DNA, 120 bp, Artificial Sequence
  ENSG00000134779_63 (sequence is synthesized)
aactgcagaagtgcagagggcaggagagacctcagcatctacccagtatgaggagtgtatcagagctgggaaggtgattccagagcaggggaaaatgcaagctccactaatacaaatgag

SEQ ID NO: 314059 - DNA, 120 bp, Artificial Sequence
  ENSG00000134779_64 (sequence is synthesized)
caacaacctcacaaatccaacagacgaccaacaatagctggggacatgctcaagacccacagagcaagtgcatgaagccagggcaaggggcagcagtgaggacaaatctctccatgagta

SEQ ID NO: 314060 - DNA, 120 bp, Artificial Sequence
  ENSG00000134779_65 (sequence is synthesized)
ctgtgggtcttagcctcaactcactaaaaggcctctagagacaataattaaaataaccagtggctcctcgaggaatggaggctaaggagcaaactgccaaacttattctggctggaattg

SEQ ID NO: 314061 - DNA, 120 bp, Artificial Sequence
  ENSG00000134779_66 (sequence is synthesized)
gtggctgttttctatggaacacacaagactcaagaatggccaatgaccactctcactggggggttgcagttggcaactggagggatgctcatatttaactgacttagaattggcttgtgt

SEQ ID NO: 314062 - DNA, 120 bp, Artificial Sequence
  ENSG00000134779_67 (sequence is synthesized)
ttagcttggcatgatggtattcccattgtttagtatttcaatttcaacatcaaaataaaggctggataagggtgaatgaggaggtagctgcctcacccaagacaagtcttcatttgaaag

SEQ ID NO: 314063 - DNA, 120 bp, Artificial Sequence
  ENSG00000134779_68 (sequence is synthesized)
ggtggctaattacattttccttaatttacaaattgtatttgacccactgtgtatttctttaaagttcgcacagagtttggggtattcattttcagaagagaaacgttatggatctgcctt

SEQ ID NO: 314064 - DNA, 120 bp, Artificial Sequence
  ENSG00000134779_69 (sequence is synthesized)
caccctaaatccctaaatcagccagagttcctgagatgaccagggcaggctgttgatcaaagttcagagaaagtaagctcaccttaatgtctccccagttcctttgccaactcccctcat

SEQ ID NO: 314065 - DNA, 120 bp, Artificial Sequence
  ENSG00000134779_70 (sequence is synthesized)
ctactccccagaggccagggcccacctcatgcatctgcaggccacaccccatggtctatgccttcccatcatcccctaaatataagctcactcagcctgtggacaaaagatctgaaagac

SEQ ID NO: 314066 - DNA, 120 bp, Artificial Sequence
  ENSG00000134779_71 (sequence is synthesized)
ctatgtccatggcagaatcaatggggactaatacctattatgaaaataaagggctccttctcttccaggaatcagcacttggaacaggggtcaacataatatccatcaattggtcaacca

SEQ ID NO: 314067 - DNA, 120 bp, Artificial Sequence
  ENSG00000134779_72 (sequence is synthesized)
acaaatgatttattgagaacccattgtgtgctcagcatttaactcaaagaatcaaaacacagacatcaagtatgggtttttagagagacatgggatatgtggtgaggggttctctcaaat

SEQ ID NO: 314068 - DNA, 120 bp, Artificial Sequence
  ENSG00000134779_73 (sequence is synthesized)
cgtgttactgcaactactgtatttccaagcctacctttgggccctgaagcaatctatctgtagctgttcttgcactagctcctctttcccccacccctgatcccttggcctccagactga

SEQ ID NO: 314069 - DNA, 120 bp, Artificial Sequence
  ENSG00000134779_74 (sequence is synthesized)
atgtttggctcaacaagacaaaatgtttggctcctaagtctcagctggagacagattacattcaactgagcaacagaatttgttctatggggcagcaataaaaatactagtttgtaataa

SEQ ID NO: 314070 - DNA, 120 bp, Artificial Sequence
  ENSG00000134779_75 (sequence is synthesized)
caaatgaagaaacagaggctgaaagagtttaaagaatttggccggcacagtggctcatgcttgtaatctcagtgttttggaaggccagggcagaggattgcttgaggccaggagttcaag

SEQ ID NO: 314071 - DNA, 120 bp, Artificial Sequence
  ENSG00000134779_76 (sequence is synthesized)
agctctacaaaacaataatgttaattagccagaagaataactgtgtgatgcctgaagatgtgaagaacttttacctgatgaccaatggcttccacatgacatggagtgtgaagctggatg

SEQ ID NO: 314072 - DNA, 120 bp, Artificial Sequence
  ENSG00000134779_77 (sequence is synthesized)
ttcgacttttgagtctttgaatctggatggttttcatgggtgcccctcaagtgccatgtccagaagctgtgattatgtcccaaaactaacagatgccatcattgcttcacccaccacaaa

SEQ ID NO: 314073 - DNA, 120 bp, Artificial Sequence
  ENSG00000134779_78 (sequence is synthesized)
tcccacgacagtctagcagtatggaactggaagttcaatttagaggattcctgtaggaatagggtagagaaaaccattaattactacataaaaaaccctagccacctcaaacttaaagcc

SEQ ID NO: 314074 - DNA, 120 bp, Artificial Sequence
  ENSG00000134779_79 (sequence is synthesized)
ctacctcccatcaaagagaggtcagtgtaaatgtccctgagaaggaaagattaggggaggaagaatatttactcagaccacagctgctttcaaggtagagtttaccttttctatgttcct

SEQ ID NO: 314075 - DNA, 120 bp, Artificial Sequence
  ENSG00000134779_80 (sequence is synthesized)
gttcagcccacttaacagttcctttcattctatgccacttacccagcatggagtgtttcccctgagccccactctcctacagaagcagtggacattcaaagttgtgtacaacaaagctaa

SEQ ID NO: 314076 - DNA, 120 bp, Artificial Sequence
  ENSG00000134779_81 (sequence is synthesized)
aaatcaattaaggaaaagaaaggatatgtgttaataagtgtcatgctgtccagaacatgattaagtgttgcacataactactaagcagattaaaagctaatgctttccaactttcctctg

SEQ ID NO: 314077 - DNA, 120 bp, Artificial Sequence
  ENSG00000134780_0 (sequence is synthesized)
cggcgccggcgccctgcggaagcggcgttagtgaatcggggccttggggagcccaggatggaggtggcggtcgcggcggcgggccgagccctgcggcgggcgggaggaggtgagcaccag

SEQ ID NO: 314078 - DNA, 120 bp, Artificial Sequence
  ENSG00000134780_1 (sequence is synthesized)
agcaccaggcccactgagcctctgcagagccaccagccatgcccgggatcgtggtgttccggcggcgctggtctgtgggcagtgatgacctcgtcctaccggccatcttcctctttctcc

SEQ ID NO: 314079 - DNA, 120 bp, Artificial Sequence
  ENSG00000134780_2 (sequence is synthesized)
tgcataccacctggtttgtgatcctgtccgtggtgctcttcggcctggtctataacccgcacgaggcctgctccctgaacctggtggaccacggccgcggctacctgggcatcctgctga

SEQ ID NO: 314080 - DNA, 120 bp, Artificial Sequence
  ENSG00000134780_3 (sequence is synthesized)
gctgcatgatcgctgagatggccatcatctggctgagcatgcgcgggggcatcctctacacggagccccgtgactccatgcagtacgtgctctacgtgcgcctggccatcctggtgatcg

SEQ ID NO: 314081 - DNA, 120 bp, Artificial Sequence
  ENSG00000134780_4 (sequence is synthesized)
agttcatctacgccatcgtgggcatcgtctggctcactcagtactacacctcctgcaacgacctcactgccaagaatgtcaccctcggaatggttgtctgcaactgggtagtcatcctca

SEQ ID NO: 314082 - DNA, 120 bp, Artificial Sequence
  ENSG00000134780_5 (sequence is synthesized)
gtgtgtgcatcactgtcctctgcgtcttcgaccccacgggccgcacctttgtcaagctgagagccaccaagaggaggcagcgtaacctgcggacctacaacctgcggcaccgcttagagg

SEQ ID NO: 314083 - DNA, 120 bp, Artificial Sequence
  ENSG00000134780_6 (sequence is synthesized)
agggtcaagccaccagctggtcgcgccggctcaaagtgttcctctgctgcacgcggacgaaggactcccagtcagatgcctactcagaaatcgcctacctctttgcggagttcttccggg

SEQ ID NO: 314084 - DNA, 120 bp, Artificial Sequence
  ENSG00000134780_7 (sequence is synthesized)
accttgacattgtgccatccgacatcattgctggcctggtgctgctccggcagcggcagcgggccaagcgcaacgccgtgctggacgaggcaaacaatgacatcttggccttcctgtctg

SEQ ID NO: 314085 - DNA, 120 bp, Artificial Sequence
  ENSG00000134780_8 (sequence is synthesized)
ggatgccggtgaccagaaacaccaagtacctcgacctcaagaattcacaagagatgctccgctacaaagaggtctgctactacatgctctttgccctggctgcctacgggtggcccatgt

SEQ ID NO: 314086 - DNA, 120 bp, Artificial Sequence
  ENSG00000134780_9 (sequence is synthesized)
acctgatgcggaagcccgcctgcggcctctgccaactggctcggtcctgctcgtgttgcctgtgtcctgcgaggccgcggttcgcccctggagtcaccatcgaggaagacaactgctgtg

SEQ ID NO: 314087 - DNA, 120 bp, Artificial Sequence
  ENSG00000134780_10 (sequence is synthesized)
gctgtaatgccattgccatccggcgccacttcctggacgagaacatgactgcggtggacatcgtctatacctcctgccatgatgcggtctatgaaacgcccttctacgtggcggtggacc

SEQ ID NO: 314088 - DNA, 120 bp, Artificial Sequence
  ENSG00000134780_11 (sequence is synthesized)
atgacaagaagaaagtggtgatcagtatccgggggaccctgtcccccaaggatgccctgactgacctgacgggtgatgctgagcgcctccccgtggaggggcaccacggcacctggctgg

SEQ ID NO: 314089 - DNA, 120 bp, Artificial Sequence
  ENSG00000134780_12 (sequence is synthesized)
gccacaagggtatggtcctctcagctgagtacatcaagaagaaactggagcaggagatggtcctgtcccaggcctttgggcgagacctgggccgcggaaccaaacactacggcctgattg

SEQ ID NO: 314090 - DNA, 120 bp, Artificial Sequence
  ENSG00000134780_13 (sequence is synthesized)
tggtgggccactccctgggcgcgggcactgctgccatcctctccttccttctgcgcccacagtatccgaccctcaagtgctttgcctactccccgccagggggcctgctgagtgaggatg

SEQ ID NO: 314091 - DNA, 120 bp, Artificial Sequence
  ENSG00000134780_14 (sequence is synthesized)
cgatggagtattccaaggagttcgtgactgctgtggttctgggcaaagacctcgtccccaggattggcctctctcagctggaaggcttccgcagacagctcctggatgtcctgcagcgaa

SEQ ID NO: 314092 - DNA, 120 bp, Artificial Sequence
  ENSG00000134780_15 (sequence is synthesized)
gcaccaagcccaaatggcggatcatcgtgggggccaccaaatgcatccccaagtcggagctgcctgaggaggtagaggtgaccaccctggccagcacgcggctctggacccaccccagcg

SEQ ID NO: 314093 - DNA, 120 bp, Artificial Sequence
  ENSG00000134780_16 (sequence is synthesized)
acctaactatagccctctcagccagcactccactctacccgcccggccgcatcatccacgtggtccacaaccaccctgcagagcagtgctgctgctgtgagcaggaggagcccacatact

SEQ ID NO: 314094 - DNA, 120 bp, Artificial Sequence
  ENSG00000134780_17 (sequence is synthesized)
ttgccatctggggcgacaacaaggccttcaatgaggtgatcatctcgccagccatgctgcatgagcacctgccctatgtggtcatggaggggctcaacaaggtgctggagaactacaaca

SEQ ID NO: 314095 - DNA, 120 bp, Artificial Sequence
  ENSG00000134780_18 (sequence is synthesized)
aggggaagaccgctctgctctctgcagccaaggtcatggtgagccctaccgaggtggacctgactcctgagctcatcttccagcagcagccactccccacggggccgcccatgcccactg

SEQ ID NO: 314096 - DNA, 120 bp, Artificial Sequence
  ENSG00000134780_19 (sequence is synthesized)
gccttgccctggagctgccgactgcagaccaccgcaacagcagcgtcaggagcaagtcccagtctgagatgagcctggagggcttctcggaggggcggctgctgtcgccagtggttgcgg

SEQ ID NO: 314097 - DNA, 120 bp, Artificial Sequence
  ENSG00000134780_20 (sequence is synthesized)
cggcggcccgccaggacccggtggagctgctgctgctgtctacccaggagcggctggcggcggagctgcaggcccggcgggcaccactggccaccatggagagcctctcggacactgagt

SEQ ID NO: 314098 - DNA, 120 bp, Artificial Sequence
  ENSG00000134780_21 (sequence is synthesized)
ccctgtacagcttcgactcgcgccgctcctcaggcttccgcagcatccggggctcccccagcctccacgctgtgctggagcgtgatgaaggccacctcttctacattgaccctgccatcc

SEQ ID NO: 314099 - DNA, 120 bp, Artificial Sequence
  ENSG00000134780_22 (sequence is synthesized)
ccgaggaaaacccatccctgagctcgcgcactgagctgctggcggccgacagcctgtccaagcactcacaggacacgcagcccctggaggcggccctgggcagtggcggcgtcactcctg

SEQ ID NO: 314100 - DNA, 120 bp, Artificial Sequence
  ENSG00000134780_23 (sequence is synthesized)
agcggccccccagtgctgcggccaatgacgaggaggaagaggttggcggtgggggtggcgggccggcctcccgcggggagctggcgctgcacaatgggcgcctgggggactcgcccagtc

SEQ ID NO: 314101 - DNA, 120 bp, Artificial Sequence
  ENSG00000134780_24 (sequence is synthesized)
tcaacctggacagcaagagcagctccttccaagacctctactgcatggtggtgcccgagagccccaccagtgactacgctgagggccccaagtcccccagccagcaagagatcctgctcc

SEQ ID NO: 314102 - DNA, 120 bp, Artificial Sequence
  ENSG00000134780_25 (sequence is synthesized)
gtgcccagttcgagcccaacctggtgcccaagcccccacggctctttgccggctcagccgacccctcctcgggcatctcactctcgccctccttcccgctcagctcctcgggtgagctca

SEQ ID NO: 314103 - DNA, 120 bp, Artificial Sequence
  ENSG00000134780_26 (sequence is synthesized)
tggacctgacgcccacgggcctcagtagccaggaatgcctggcggctgacaagatccggacttctacccccactggccacggagccagccccgccaagcaagatgagctggtcatctcag

SEQ ID NO: 314104 - DNA, 120 bp, Artificial Sequence
  ENSG00000134780_27 (sequence is synthesized)
cacgctagcaccccagttgcgtggccagccgggcccaggcaggagcaggtggccctgtgggcacctggtgcctgccccctgccgggcagctttaaggacagacccccaggggcagtttag

SEQ ID NO: 314105 - DNA, 120 bp, Artificial Sequence
  ENSG00000134780_28 (sequence is synthesized)
cctcaggcacaggcatcgctgctgagctgggggtccgcatccctacctcagcttaggacccccagagccaaggtggctgggatctggccccacagatggggaaagatggggaagggtgtg

SEQ ID NO: 314106 - DNA, 120 bp, Artificial Sequence
  ENSG00000134780_29 (sequence is synthesized)
gagtggggaggagcctgggcagcctgctgggtgggccacactcagcctgactgccctccatgggggcattctggcaccccctgctccaggacaggccatgggcaagctgcctcccatcac

SEQ ID NO: 314107 - DNA, 120 bp, Artificial Sequence
  ENSG00000134780_30 (sequence is synthesized)
tgcctgctggctgctctcccaggggccaggtggagagcagtgccccccgacacatgtattctcatctgtggtccaggccggcatcgtcctggccaccccccagatctggtgcctgctggc

SEQ ID NO: 314108 - DNA, 120 bp, Artificial Sequence
  ENSG00000134780_31 (sequence is synthesized)
cggccccctggggtgcccctgccgaggtggcctgcagtgctgtacatgtttacagaagctgctgggcttggctcaggatgtgttctgggcttgcaagccccccgcccaatcatgtgttca

SEQ ID NO: 314109 - DNA, 120 bp, Artificial Sequence
  ENSG00000134780_32 (sequence is synthesized)
gtagccgtcctctgagcagggcccaaggcagccaggggcctggaggggccagaggagggtggggtcagggccgccccttctctgccttgtgcctctcatgctgcctcctctgcccatggg

SEQ ID NO: 314110 - DNA, 120 bp, Artificial Sequence
  ENSG00000134780_33 (sequence is synthesized)
tcctgggcacccaggcctgccctgcctgctggctacttcctggcttaccttctacccccaaggatcctcaccacccaaagggtggtgggcactgctgtgaccaccccagctgcagagtca

SEQ ID NO: 314111 - DNA, 120 bp, Artificial Sequence
  ENSG00000134780_34 (sequence is synthesized)
gtgccctgggtggaaggaaggcactgagagcccccttcctctgagggccccacctcaccccttggtgtcacccccaccacgcctaggcagctctgggccctgggatctggaaccaacaca

SEQ ID NO: 314112 - DNA, 120 bp, Artificial Sequence
  ENSG00000134780_35 (sequence is synthesized)
cccctgttcccctcagctttccctcctcgctggcctgggcaccctcctgggagcaggccttcctccctcccacccccaatgtcctgttggtaggaggtggggccaagagtggggtatggt

SEQ ID NO: 314113 - DNA, 120 bp, Artificial Sequence
  ENSG00000134780_36 (sequence is synthesized)
gggccttggctggagacctctgtccactgcccagggaggggcctggggctgggagcagtcccggtttagcctgaggtccccatagggcttcctcccctgctgggtttgggaagcagttag

SEQ ID NO: 314114 - DNA, 120 bp, Artificial Sequence
  ENSG00000134780_37 (sequence is synthesized)
ggagatagcgacccggagtttccccagaagcggggtgggagggtgtgcatgctagtgttggcgcgtatgcatgtgcatgagtgtgcaccgttcctaaggaaggggcctctggggctgccc

SEQ ID NO: 314115 - DNA, 120 bp, Artificial Sequence
  ENSG00000134780_38 (sequence is synthesized)
accctacctgccctgcctgcctgctgcccctcccagcctgccaagaaaacggtaggggagcatgatggggcctttgaggcagggtcgcagggacaagctcagctttaggcaccatctgtt

SEQ ID NO: 314116 - DNA, 120 bp, Artificial Sequence
  ENSG00000134780_39 (sequence is synthesized)
cccatcgcgcctgctgctgtgacccgttttggaaaactggtgtgtaccgaggcgctgactgcacggctgaccgcctgctcgtgccttcattctgcagcggcatggtccctcccattctgg

SEQ ID NO: 314117 - DNA, 120 bp, Artificial Sequence
  ENSG00000134780_40 (sequence is synthesized)
ctccacctgcagcctccctgggtggcctaggctcccccgaccaagagacctccctctcatgatcactggtacctgggggcctgaattctggcccccggctccccacacagctgggactgg

SEQ ID NO: 314118 - DNA, 120 bp, Artificial Sequence
  ENSG00000134780_41 (sequence is synthesized)
cctggatggctgtcctgggagcccctgcccaccctgacagagggagctgggcctcccctcatcctctgtaactcccgccttcaccagactcaaggacaccctggccctgctgaggcatac

SEQ ID NO: 314119 - DNA, 120 bp, Artificial Sequence
  ENSG00000134780_42 (sequence is synthesized)
agagcttcagcccagcacagaagcaagacaaaatcagtggctcttagagtttagaaaacaagacagactctcagatgaaagatctgacaagcaccgtggccagtcacagggagagacttg

SEQ ID NO: 314120 - DNA, 120 bp, Artificial Sequence
  ENSG00000134780_43 (sequence is synthesized)
atgtctggccttttaattcctcctctgccagggtgggtcctgggacctctaatgtgggcatgtcgtccaccccaggacgagccatcagggacagaccccccacccccaaggctgcagcca

SEQ ID NO: 314121 - DNA, 120 bp, Artificial Sequence
  ENSG00000134780_44 (sequence is synthesized)
caccatgtttcaggcttggggctggggcaggcttgggctcaatcctgggcacccaggggcagcccacccctaacctggctcctacccacctcgcccttgaaggatgggcctgctgcacgt

SEQ ID NO: 314122 - DNA, 120 bp, Artificial Sequence
  ENSG00000134780_45 (sequence is synthesized)
ctccctcctccaccccataccacactggggggtctgagccacccccctcagccccgttcggctcagaccgacccccactccatccccagacctgcagcacaagtgcgcgggcctgtcctc

SEQ ID NO: 314123 - DNA, 120 bp, Artificial Sequence
  ENSG00000134780_46 (sequence is synthesized)
ccaggggcctgggcgactccatatgcaatcagtagcgagcagccgggccccacagaccctcatgcactctcttacgtgccattctccccagactttttttgtacttaatgtatgaaagat

SEQ ID NO: 314124 - DNA, 120 bp, Artificial Sequence
  ENSG00000134780_47 (sequence is synthesized)
ccaaactaatattgctgtaaaaaggagagacaaattaatatagcttattctataaatatatctgtatataaaggtttctgtatattgtatagagctgtgtataaactggatgtagaagca

SEQ ID NO: 314125 - DNA, 120 bp, Artificial Sequence
  ENSG00000134802_0 (sequence is synthesized)
gctctgggagtgtgaaactgggagagacggttaagctggggacggtattcagaattcgagcgcaggagctccgcttctccacctgctcccggggagctattgggatccagagaatcaccc

SEQ ID NO: 314126 - DNA, 120 bp, Artificial Sequence
  ENSG00000134802_1 (sequence is synthesized)
gctgatggtttttgcccaggcctgaaacaaccagagagctacgggaaaggaagggcttggcttgccagaggaattttccaagtgctcaaacgccaggcttacggcgcctgtgatccgtcc

SEQ ID NO: 314127 - DNA, 120 bp, Artificial Sequence
  ENSG00000134802_2 (sequence is synthesized)
aggaggacaaagtgggatttgaagatccactccacttctgctcatggcgggccagggcctgcccctgcacgtggccacactgctgactgggctgctggaatgcctgggctttgctggcgt

SEQ ID NO: 314128 - DNA, 120 bp, Artificial Sequence
  ENSG00000134802_3 (sequence is synthesized)
cctctttggctggccttcactagtgtttgtcttcaagaatgaagattactttaaggatctgtgtggaccagatgctgggccgattggcaatgccacagggcaggctgactgcaaagccca

SEQ ID NO: 314129 - DNA, 120 bp, Artificial Sequence
  ENSG00000134802_4 (sequence is synthesized)
ggatgagaggttctcactcatcttcaccctggggtccttcatgaacaacttcatgacattccccactggctacatctttgaccggttcaagaccaccgtggcacgcctcatagccatatt

SEQ ID NO: 314130 - DNA, 120 bp, Artificial Sequence
  ENSG00000134802_5 (sequence is synthesized)
tttctacaccaccgccacactcatcatagccttcacctctgcaggctcagccgtgctgctcttcctggccatgccaatgctcaccattgggggaatcctgtttctcatcaccaacctgca

SEQ ID NO: 314131 - DNA, 120 bp, Artificial Sequence
  ENSG00000134802_6 (sequence is synthesized)
gattgggaacctatttggccaacaccgttcgaccatcatcactctgtacaatggagcatttgactcttcctcggcagtcttccttattattaagcttctttatgaaaaaggcatcagcct

SEQ ID NO: 314132 - DNA, 120 bp, Artificial Sequence
  ENSG00000134802_7 (sequence is synthesized)
cagggcctccttcatcttcatctctgtctgcagtacctggcatgtagcacgcactttcctcctgatgccccgggggcacatcccatacccactgccccccaactacagctatggcctgtg

SEQ ID NO: 314133 - DNA, 120 bp, Artificial Sequence
  ENSG00000134802_8 (sequence is synthesized)
ccctgggaatggcaccacaaaggaagagaaggaaacagctgagcatgaaaacagggagctacagtcaaaggagttcctttcagcgaaggaagagaccccaggggcagggcagaagcagga

SEQ ID NO: 314134 - DNA, 120 bp, Artificial Sequence
  ENSG00000134802_9 (sequence is synthesized)
actccgctccttctggagctacgctttctctcggcgctttgcctggcacctggtgtggctgtctgtgatacagttgtggcactacctcttcattggcactctcaactccttgctgaccaa

SEQ ID NO: 314135 - DNA, 120 bp, Artificial Sequence
  ENSG00000134802_10 (sequence is synthesized)
tgccccctggaatggcctgctcatggaccggcttaaacagaagtaccagaaggaagcaagaaagacaggttcctccactttggcggtggccctctgctcgacggtgccttcgctggccct

SEQ ID NO: 314136 - DNA, 120 bp, Artificial Sequence
  ENSG00000134802_11 (sequence is synthesized)
gacatccctgctgtgcctgggcttcgccctctgtgcctcagtccccatcctccctctccagtacctcaccttcatcctgcaagtgatcagccgctccttcctctatgggagcaacgcggc

SEQ ID NO: 314137 - DNA, 120 bp, Artificial Sequence
  ENSG00000134802_12 (sequence is synthesized)
cttcctcacccttgctttcccttcagagcactttggcaagctctttgggctggtgatggccttgtcggctgtggtgtctctgctccagttccccatcttcaccctcatcaaaggctccct

SEQ ID NO: 314138 - DNA, 120 bp, Artificial Sequence
  ENSG00000134802_13 (sequence is synthesized)
tcagaatgacccattttacgtgaatgtgatgttcatgcttgccattcttctgacattcttccacccctttctggtatatcgggaatgccgtacttggaaagaaagtccctctgcaattgc

SEQ ID NO: 314139 - DNA, 120 bp, Artificial Sequence
  ENSG00000134802_14 (sequence is synthesized)
atagttcagaagccctcacttttcagccccgaggatggttttgttcatcttccaccacctttgaggacctcgtgtcccaaaagactttgcctatcccagcaaaacacacacacacacaca

SEQ ID NO: 314140 - DNA, 120 bp, Artificial Sequence
  ENSG00000134802_15 (sequence is synthesized)
cacacacacaaaataaagacacacaaggacgtctgcgcagcaagaaaagaatctcagttgccaagcagattgatatcacacagactcaaagcaaaggcatgtggaacttctttatttcaa

SEQ ID NO: 314141 - DNA, 120 bp, Artificial Sequence
  ENSG00000134802_16 (sequence is synthesized)
aacagaagtgtctccttgcacttagccttggcagacccttgactccaggggagatgacctgggggaggaagtgtgtcaactatttctttaggcctgtttggctccgaagcctatatgtgc

SEQ ID NO: 314142 - DNA, 120 bp, Artificial Sequence
  ENSG00000134802_17 (sequence is synthesized)
ctggatcctctgccacgggttaaattttcaggtgaagagtgaggttgtcatggcctcagctatgcttcctggctctccctcaagagtgcagccttggctagagaactcacagctctggga

SEQ ID NO: 314143 - DNA, 120 bp, Artificial Sequence
  ENSG00000134802_18 (sequence is synthesized)
aaaagaggagcagacagggttccctgggcccagtctcagcccagccactgatgctggatgaccttggcctgaccctggtctggtctcagaatcacttttcccatctgtaaaattgagatg

SEQ ID NO: 314144 - DNA, 120 bp, Artificial Sequence
  ENSG00000134802_19 (sequence is synthesized)
aattttggtgttgaaagttcttcctggagcagatgtcctagaaggttttaggaatagtgacagagtcaggccaccccaagggccatgggagccagctgacctgcttgaccgaaggatttc

SEQ ID NO: 314145 - DNA, 120 bp, Artificial Sequence
  ENSG00000134802_20 (sequence is synthesized)
tgacagactatctttggggatgttttcaagaagggatataagttatttactttgggcatttaaaagaaaatttctctcgggaataattttatagaaaaataaagcttctgtgtctaaggc

SEQ ID NO: 314146 - DNA, 120 bp, Artificial Sequence
  ENSG00000134802_21 (sequence is synthesized)
agtaaactgaagataacaccaacttggcagcgggagtttgtgtcttctgtatgaaatctccctgcctctgcacctggttgagttgctgtcattattttaggggacggtattcagaattcg

SEQ ID NO: 314147 - DNA, 120 bp, Artificial Sequence
  ENSG00000134802_22 (sequence is synthesized)
ttgatctgggaagtgcctgggagggaggcaccagctcctgaggggtaattaggggcagccacatttcaactcagcttaagggacaagtttgcgaccgacaagctgtctgaggtggagggg

SEQ ID NO: 314148 - DNA, 120 bp, Artificial Sequence
  ENSG00000134802_23 (sequence is synthesized)
gggaggctgaaaggcagcgaggagggagggaaagacaccgctggggttctagggggttctagagggagaagtttcaagagggagaggggacggtattcagaattcgagcgcaggagctcc

SEQ ID NO: 314149 - DNA, 120 bp, Artificial Sequence
  ENSG00000134802_24 (sequence is synthesized)
gcggaaagggcgcggagagccccggcgcggagcaggcgggggacggtattcagaattcgagcgcaggagctccgcttctccacctgctcccggggagctattgggcctgaaacaaccaga

SEQ ID NO: 314150 - DNA, 120 bp, Artificial Sequence
  ENSG00000134802_25 (sequence is synthesized)
gcaaaatgcacaaatagagtgtgtgtgtccctatgccctcatgtgctgtctgtgtgtcctctgggtgctgggtgtgacattttccctaggggacggtattcagaattcgagcgcaggagc

SEQ ID NO: 314151 - DNA, 120 bp, Artificial Sequence
  ENSG00000134802_26 (sequence is synthesized)
aggttacttacgtgttcagaggcaccagctaaggagcaaaagtcaactttgaattctgtgttttgactactgcacagctctatttgcctcattttttatttttaaagcagcaaatcttag

SEQ ID NO: 314152 - DNA, 120 bp, Artificial Sequence
  ENSG00000134802_27 (sequence is synthesized)
tttaaagcagcaaatcttagaataggagtttaaatccatcacttggagaaaagaaagactaaatgttttttgtttttgttttggagacacgatcttgctttgtcacccaggctggagtgc

SEQ ID NO: 314153 - DNA, 120 bp, Artificial Sequence
  ENSG00000134802_28 (sequence is synthesized)
ctctcatctcagcctcctgagtagctgacactacaggcatgtgccaccatgccaagcttattttattttatttttttgatagacactggggtttcgctatgttgcctgggctggttttga

SEQ ID NO: 314154 - DNA, 120 bp, Artificial Sequence
  ENSG00000134802_29 (sequence is synthesized)
gggtttcgctatgttgcctgggctggttttgaattcctggcctcaagcgatccacccgtctctgccttccaaaatgctgtgattacaggcgtgaaccactgtgcatggccaaaagagtaa

SEQ ID NO: 314155 - DNA, 120 bp, Artificial Sequence
  ENSG00000134802_30 (sequence is synthesized)
acttgaaatctgaggcgaatgacttgattgtgacatcaggtgacctagtaatcagctgtgtattctagctggtgcctctaccagcttcccatgtgaccttgaacatgtcattgaatgctc

SEQ ID NO: 314156 - DNA, 120 bp, Artificial Sequence
  ENSG00000134802_31 (sequence is synthesized)
gctaggcctctgtttctttatctgtgaaatgggcttgatattcctcctctaccccaaccgatagtgcagaatgaaaagtaactgaaagtccttcctccagggcaccatagtgtctgggtg

SEQ ID NO: 314157 - DNA, 120 bp, Artificial Sequence
  ENSG00000134802_32 (sequence is synthesized)
aaaagtagaatataaactcggtagacttctggtcccttcattggtcatggaatggaccagtgcttgcttcattgagcaacagttctgttgttcagaattcctggatttcacctcacttct

SEQ ID NO: 314158 - DNA, 120 bp, Artificial Sequence
  ENSG00000134802_33 (sequence is synthesized)
gcgccgagcgcggcctggcccctcgggctcctctgcggggagggcaggccgcaggctggagcggggtgcggaggctggcggggagcggcccccggaggctttcctggtagaagttgatgc

SEQ ID NO: 314159 - DNA, 120 bp, Artificial Sequence
  ENSG00000134802_34 (sequence is synthesized)
attccccacatttgctgccagcggccatgatcatcctgcctcttaatgcacctcacaaataactctagtctacctttccctttcccgcaggcctcctcttccagcagcctctatctttat

SEQ ID NO: 314160 - DNA, 120 bp, Artificial Sequence
  ENSG00000134802_35 (sequence is synthesized)
tagagaagaacacagagggtcatccaaggtggtagggccagcatgacaaagcagggaggtggggatgtgtgagtccgaggcaggtgcagagcacgccgggtgagttctgggagccaaggg

SEQ ID NO: 314161 - DNA, 120 bp, Artificial Sequence
  ENSG00000134809_0 (sequence is synthesized)
acgtgcttccgctggagcctctcgggaggcgggtaacgttatagtatttgtcagaagttggggtctccgtgggcattgtgatccgtcccaggcagtggattaggaggccagaaggagatc

SEQ ID NO: 314162 - DNA, 120 bp, Artificial Sequence
  ENSG00000134809_1 (sequence is synthesized)
ccttccacggtgctaggctgagatggatcctctcagggcccaacagctggctgcggagctggaggtggagatgatggccgatatgtacaacagaatgaccagtgcctgccaccggaagtg

SEQ ID NO: 314163 - DNA, 120 bp, Artificial Sequence
  ENSG00000134809_2 (sequence is synthesized)
ctaagtacctggacatccatgagcggatgggcaaaaagttgacagagttgtctatgcaggatgaagagctgatgaagagggtgcagcagagctctgggcctgcatgaggtccctgtcagt

SEQ ID NO: 314164 - DNA, 120 bp, Artificial Sequence
  ENSG00000134809_3 (sequence is synthesized)
atacaccctggggtgtaccccaccccttcccactttaataaacgtgctccctgttgggtgtcatctgtgaagactgccaggcctaggctctctgtagagagtcttcaagatcccggagtg

SEQ ID NO: 314165 - DNA, 88 bp, Artificial Sequence
  ENSG00000134809_4 (sequence is synthesized)
gcctaggctctctgtagagagtcttcaagatcccggagtggtagcgctgtctcctggtgaaggagtatttgtcacactggaatgtgac

SEQ ID NO: 314166 - DNA, 120 bp, Artificial Sequence
  ENSG00000134809_5 (sequence is synthesized)
ctcgggaggcgggtaacgttatagtatttgtcagaagttggggtctccgtgggcattgtgatccgtcccaggcagtgccccaggggtaggagagtgaacggcggcggtgggtgctgatgg

SEQ ID NO: 314167 - DNA, 120 bp, Artificial Sequence
  ENSG00000134812_0 (sequence is synthesized)
gcaaatcgcggtacctgtggatgagagacatagacgagagagtgagatggcctggtttgccctctacctcctgagccttctctgggctacagctgggactagtacccagacccagagttc

SEQ ID NO: 314168 - DNA, 120 bp, Artificial Sequence
  ENSG00000134812_1 (sequence is synthesized)
atgctccgttccctcagcacaggagcccttggtcaatggaatacaagtactcatggagaactcggtgacttcatcagcctacccaaaccccagcatcctgattgccatgaatctggccgg

SEQ ID NO: 314169 - DNA, 120 bp, Artificial Sequence
  ENSG00000134812_2 (sequence is synthesized)
agcctacaacttgaaggcccagaagctcctgacttaccagctcatgtccagcgacaacaacgatctaaccattgggcagctcggcctcaccatcatggccctcacctcctcctgccgaga

SEQ ID NO: 314170 - DNA, 120 bp, Artificial Sequence
  ENSG00000134812_3 (sequence is synthesized)
ccctggggataaagtatccattctacaaagacaaatggagaactgggcaccttccagccccaacgctgaagcatcagccttctatgggcccagtctagcgatcttggcactgtgccagaa

SEQ ID NO: 314171 - DNA, 120 bp, Artificial Sequence
  ENSG00000134812_4 (sequence is synthesized)
gaactctgaggcgaccttgccgatagccgtccgctttgccaagaccctgctggccaactcctctcccttcaatgtagacacaggagcaatggcaaccttggctctgacctgtatgtacaa

SEQ ID NO: 314172 - DNA, 120 bp, Artificial Sequence
  ENSG00000134812_5 (sequence is synthesized)
caagatccctgtaggttcagaggaaggttacagatccctgtttggtcaggtactaaaggatattgtggagaaaatcagcatgaagatcaaagataatggcatcattggagacatctacag

SEQ ID NO: 314173 - DNA, 120 bp, Artificial Sequence
  ENSG00000134812_6 (sequence is synthesized)
ctacggatatgatactcaatgagattaagcaggggaaattccacaaccccatgtccattgctcaaatcctcccttccctgaaaggcaagacatacctagatgtgccccaggtcacttgta

SEQ ID NO: 314174 - DNA, 120 bp, Artificial Sequence
  ENSG00000134812_7 (sequence is synthesized)
gtcctgatcatgaggtacaaccaactctacccagcaaccctggccctggccccacctctgcatctaacatcactgtcatatacaccataaataaccagctgaggggggttgagctgctct

SEQ ID NO: 314175 - DNA, 120 bp, Artificial Sequence
  ENSG00000134812_8 (sequence is synthesized)
tcaacgagaccatcaatgttagtgtgaaaagtgggtcagtgttacttgttgtcctagaggaagcacagcgcaaaaatcctatgttcaaatttgaaaccacaatgacatcttggggccttg

SEQ ID NO: 314176 - DNA, 120 bp, Artificial Sequence
  ENSG00000134812_9 (sequence is synthesized)
tcgtctcttctatcaacaatatcgcggaaaatgttaatcacaagacatactggcagtttcttagtggtgtaacacctttgaatgaaggggttgctgactacatacccttcaaccacgagc

SEQ ID NO: 314177 - DNA, 120 bp, Artificial Sequence
  ENSG00000134812_10 (sequence is synthesized)
acatcacagccaatttcacacagtactaacgaagaggtgggttcagcttctatcaaacatctccaaaggatgggtgaaattttttccacttcattttaaatctatgcaaaaaagcgaatg

SEQ ID NO: 314178 - DNA, 120 bp, Artificial Sequence
  ENSG00000134812_11 (sequence is synthesized)
cctgtgatgctaccatattcctggtaaaaacatggagaaccactatgtagaataaaaatgcaaagttcactggagtctcaacatctatgactcatgaaaataaaattttcatcttctcaa

SEQ ID NO: 314179 - DNA, 120 bp, Artificial Sequence
  ENSG00000134812_12 (sequence is synthesized)
ccctggggataaagtatccattctacaaagacaaatggagaactgggcaccttccagtaagacctgactggaagggagaaaagagtcaggcatatggttttacctaagaattttaaaccc

SEQ ID NO: 314180 - DNA, 120 bp, Artificial Sequence
  ENSG00000134812_13 (sequence is synthesized)
gggtggagagaaaggcaagttagggaagagacaatgtatccttcactctggtccttctgataatccagaccagaaagattcatttccaatccaaaatgaactagaaaaggtcatgatccc

SEQ ID NO: 314181 - DNA, 120 bp, Artificial Sequence
  ENSG00000134812_14 (sequence is synthesized)
aaggacacaagcttgtccagccatcacctgtctaaagacacagagtcatcccttttattctttgcagatgcctgatgacattcttttgaaaaacactgaagttgctctttgcctatgctg

SEQ ID NO: 314182 - DNA, 120 bp, Artificial Sequence
  ENSG00000134812_15 (sequence is synthesized)
tgtctctctttgggggcaggttttctagcaatttccttttcaaaggcttggcttttccttctttgcaaatgtcctcatcgtggtgactgtgagtctgatgaaggttctctatccccttcg

SEQ ID NO: 314183 - DNA, 120 bp, Artificial Sequence
  ENSG00000134812_16 (sequence is synthesized)
gaggccccaacgctgaagcatcagccttctatgggcccagtctagcgatcttggcactgtgccagaagaactctgaggcgaccttgccgatagccgtccgctttgccaagaccctgctgg

SEQ ID NO: 314184 - DNA, 120 bp, Artificial Sequence
  ENSG00000134812_17 (sequence is synthesized)
aggcgttatcttccatagtctgaaggctacattctttaattattttttcatttaatttattcattcattcacttaattaataattatgagatcatgtgtatatacaataattctataaac

SEQ ID NO: 314185 - DNA, 120 bp, Artificial Sequence
  ENSG00000134812_18 (sequence is synthesized)
agaggccaggcttctactaacatctctgtgaaagtccagctagtatgacctgagatatattctttgtggtgcctgggcctcagtttctctactggtaaaatgcaggctctctctgtaaca

SEQ ID NO: 314186 - DNA, 120 bp, Artificial Sequence
  ENSG00000134812_19 (sequence is synthesized)
atgctgtgagtatgatgtttttccaaggaggtcagggaagcagttgccctggggaaggggctgtgacctctgacactgagtggttgaaaatagcaatcactataggaattccaaaatggc

SEQ ID NO: 314187 - DNA, 120 bp, Artificial Sequence
  ENSG00000134815_0 (sequence is synthesized)
gctcttgggaccggaagttaaggcgttcgcggcgtgtgaatccagggcctgaaaacccagaatgaacttgtgtccatcccagagatcactgcagatgtcatgaggtaccctttgtgtcac

SEQ ID NO: 314188 - DNA, 120 bp, Artificial Sequence
  ENSG00000134815_1 (sequence is synthesized)
cagctcaagcaggcctctggccactttatcatctgtggtggtcctgtgccgtgaccaggaggaaaaattagctctttgaagagaaagtagttctctattgcaggcactggcctcttaaat

SEQ ID NO: 314189 - DNA, 120 bp, Artificial Sequence
  ENSG00000134815_2 (sequence is synthesized)
tgttgcaggtggggaatggatgagaatatttgttttgggtgatcagaactgagactcctattgtggattagtaacatgcctcctcctagaacaagggagggcagggatcgccgagaccac

SEQ ID NO: 314190 - DNA, 120 bp, Artificial Sequence
  ENSG00000134815_3 (sequence is synthesized)
caccgggctcccagcgaggaagaggccttggagaaatgggactggaattgtccagagacgcgtcgcctcttggaagatgccttcttccgtgaagaggattacatccgtcagggttctgag

SEQ ID NO: 314191 - DNA, 120 bp, Artificial Sequence
  ENSG00000134815_4 (sequence is synthesized)
gaatgtcagaagttttggaccttctttgaacgcctgcagagattccagaatctcaagacctccaggaaggaggagaaagaccctggacagcccaagcacagcatcccagcgctggccgac

SEQ ID NO: 314192 - DNA, 120 bp, Artificial Sequence
  ENSG00000134815_5 (sequence is synthesized)
ctacctcgcacttacgacccacgttaccgcatcaacctctctgttcttggccctgccacgcggggctctcagggactgggcaggcacttgcccgcggagagagtggctgagttccgccga

SEQ ID NO: 314193 - DNA, 120 bp, Artificial Sequence
  ENSG00000134815_6 (sequence is synthesized)
gccctgttgcactacctggactttggccagaagcaggcatttgggcgtctggccaagctgcagcgtgagcgggcagccctccccatcgcccagtatgggaaccgcatcctgcagacgctg

SEQ ID NO: 314194 - DNA, 120 bp, Artificial Sequence
  ENSG00000134815_7 (sequence is synthesized)
aaggagcaccaggtggtggtagtggccggtgacaccggctgtggcaagtccactcaggtgccccagtacctgctggctgctggcttcagtcatgtggcgtgcacccagccccggcggatc

SEQ ID NO: 314195 - DNA, 120 bp, Artificial Sequence
  ENSG00000134815_8 (sequence is synthesized)
gcctgcatctcactggccaagcgtgtgggctttgagagcctcagtcagtatggctcacaggtcggctaccagatccgctttgagagcacacgttcggcggccaccaagattgtattcctg

SEQ ID NO: 314196 - DNA, 120 bp, Artificial Sequence
  ENSG00000134815_9 (sequence is synthesized)
acagtggggctgctcctgcgacaaatccagcgggaacccagcctgccccagtatgaggtcctgattgtggatgaagtccatgagcggcatctccacaacgatttcctcctgggcgtcctc

SEQ ID NO: 314197 - DNA, 120 bp, Artificial Sequence
  ENSG00000134815_10 (sequence is synthesized)
cagcgcctgttgcccacgcggcctgacctcaaggtcatcctcatgtcggccaccatcaacatctcgctcttctccagctatttcagcaatgcccctgtggtacaggtgcctgggaggctg

SEQ ID NO: 314198 - DNA, 120 bp, Artificial Sequence
  ENSG00000134815_11 (sequence is synthesized)
ttccccatcacggttgtgtaccagccgcaggaggcggagccgaccacgtccaagtcagagaagctggacccgcggcctttcctgagggtgctggagtccattgaccacaagtacccgcct

SEQ ID NO: 314199 - DNA, 120 bp, Artificial Sequence
  ENSG00000134815_12 (sequence is synthesized)
gaggagcggggtgacctcctcgtcttcctcagcggcatggcggagatcagcgccgtgctggaggctgcccagacctatgccagccacacccagcgctgggtggtactgccactgcacagc

SEQ ID NO: 314200 - DNA, 120 bp, Artificial Sequence
  ENSG00000134815_13 (sequence is synthesized)
gccctgtctgtggccgaccaggacaaggtatttgatgtggcaccccctggagtccggaaatgcatcctctccaccaacattgctgagacctcagtcaccattgacgggatccgcttcgta

SEQ ID NO: 314201 - DNA, 120 bp, Artificial Sequence
  ENSG00000134815_14 (sequence is synthesized)
gtagattccggaaaggtgaaggagatgagctacgatccgcaggccaagctgcaacggctgcaggagttctggattagtcaggccagcgcagagcagcggaagggccgggcgggccgcacg

SEQ ID NO: 314202 - DNA, 120 bp, Artificial Sequence
  ENSG00000134815_15 (sequence is synthesized)
ggccccggagtctgcttccgcctctatgccgaatcggactatgatgccttcgccccctaccccgtcccagaaattcggagggtggccctggactcgttggtgctgcagatgaagagcatg

SEQ ID NO: 314203 - DNA, 120 bp, Artificial Sequence
  ENSG00000134815_16 (sequence is synthesized)
agtgtgggggacccccgaaccttccccttcatcgagcccccaccaccagccagcctggaaaccgccatcctctacctccgggaccagggggccctggacagctcagaggccctcacaccc

SEQ ID NO: 314204 - DNA, 120 bp, Artificial Sequence
  ENSG00000134815_17 (sequence is synthesized)
attgggtccctgctagcccagctgcctgtggacgttgtgattgggaagatgctgatcctgggctccatgttcagcctggtggagcctgtgctcaccatcgcagccgcacttagcgtccag

SEQ ID NO: 314205 - DNA, 120 bp, Artificial Sequence
  ENSG00000134815_18 (sequence is synthesized)
gcccagagcagcccagagtgcgcggcagcacggcggccgctggagagcgaccagggtgaccccttcacgctcttcaacgtcttcaacgcctgggtgcaggtgaaatctgaacggagcaga

SEQ ID NO: 314206 - DNA, 120 bp, Artificial Sequence
  ENSG00000134815_19 (sequence is synthesized)
aactctcgcaagtggtgccgccgccggggcatagaggagcatcgactgtacgaaatggccaaccttcggcgccagttcaaggagctgttggaggaccacgggctgctggctggggcccag

SEQ ID NO: 314207 - DNA, 120 bp, Artificial Sequence
  ENSG00000134815_20 (sequence is synthesized)
gccgcgcaggtaggggacagctacagtcggttgcagcagcgccgggagcgccgggccctgcaccagctgaaacgccagcacgaggagggcgcggggcgcaggcgcaaggtgctgcggctg

SEQ ID NO: 314208 - DNA, 120 bp, Artificial Sequence
  ENSG00000134815_21 (sequence is synthesized)
caggaggagcaggacggcggctccagtgacgaggacagggctggcccagcccccccaggggccagtgatggcgtggacatccaggatgtgaagttcaagcttcggcatgacctggcgcag

SEQ ID NO: 314209 - DNA, 120 bp, Artificial Sequence
  ENSG00000134815_22 (sequence is synthesized)
ctgcaggccgctgccagctcagcccaggacctgagccgcgagcagctggctctgctgaagctggtgctgggccggggcctgtacccacagctggccgtccccgacgccttcaacagcagc

SEQ ID NO: 314210 - DNA, 120 bp, Artificial Sequence
  ENSG00000134815_23 (sequence is synthesized)
cgaaaggactcagaccagattttccacacgcaggccaagcagggcgccgtgctgcaccccacctgcgtcttcgctggcagccccgaggtgctgcacgcacaggagctggaggccagcaac

SEQ ID NO: 314211 - DNA, 120 bp, Artificial Sequence
  ENSG00000134815_24 (sequence is synthesized)
tgcgacggaagccgagacgacaaggacaagatgagcagcaaacaccagctcctcagcttcgtgtccctgctggagaccaacaagccgtacctggtgaactgcgtccgcatccctgccctc

SEQ ID NO: 314212 - DNA, 120 bp, Artificial Sequence
  ENSG00000134815_25 (sequence is synthesized)
cagtccctcctgctttttagccggtctttggacaccaatggtgactgctcccgcctggtggccgatggctggctggagctgcagctagcagacagtgaaagtgccatccgactcctggcg

SEQ ID NO: 314213 - DNA, 120 bp, Artificial Sequence
  ENSG00000134815_26 (sequence is synthesized)
gcttccctgcggctccgtgcccgctgggaaagtgccctggaccggcagctggcgcaccaggcccagcagcagctggaggaggaggaggaggatacgccagtcagccccaaggaggtggcc

SEQ ID NO: 314214 - DNA, 120 bp, Artificial Sequence
  ENSG00000134815_27 (sequence is synthesized)
accctgagcaaggaactcctgcaattcacggcatccaagattccttacagcctccggcggctcacagggctagaagtccagaacatgtatgtgggaccccagaccatcccagccaccccc

SEQ ID NO: 314215 - DNA, 120 bp, Artificial Sequence
  ENSG00000134815_28 (sequence is synthesized)
catcttcctggcctctttggcagctccaccctgtccccccaccccacaaaggggggctacgcagtcactgacttcctcacctacaactgcctcacgaatgacacagacctgtacagcgac

SEQ ID NO: 314216 - DNA, 120 bp, Artificial Sequence
  ENSG00000134815_29 (sequence is synthesized)
tgtctccgaaccttctggacctgcccccactgtggcctgcatgcgcccctcacgcccctggagcgcatcgcccatgagaacacctgcccccaggccccacaggatgggcccccaggggct

SEQ ID NO: 314217 - DNA, 120 bp, Artificial Sequence
  ENSG00000134815_30 (sequence is synthesized)
gaggaagctgccctcgaaaccctccagaagacatctgtcctgcagaggccctaccactgcgaggcctgcgggaaggacttcctctttacacccacagaggtgctgcgccaccggaagcag

SEQ ID NO: 314218 - DNA, 120 bp, Artificial Sequence
  ENSG00000134815_31 (sequence is synthesized)
cacgtgtgagctgggccaggagccctgcccacctccgtgcagctgacctgccctccagcccaggactaggggcaggactcttgcctgaacccccagcctgggcttagccctgtggtcctg

SEQ ID NO: 314219 - DNA, 120 bp, Artificial Sequence
  ENSG00000134815_32 (sequence is synthesized)
tcccagtgcagagggcctggagcacggattgtgaataaagcctcacatgctgatacacactgttaggcctgcacctgcccatccagaaagcagcagctgccttgttagtcctccccaggg

SEQ ID NO: 314220 - DNA, 120 bp, Artificial Sequence
  ENSG00000134815_33 (sequence is synthesized)
tctagctttccttcttcctgctgcagggtgctgcctgaggggtcctgggtaggaggggcgttagagccagcagggacctcccatgtctccagattccaggtgcaggttcttagcacctcc

SEQ ID NO: 314221 - DNA, 120 bp, Artificial Sequence
  ENSG00000134815_34 (sequence is synthesized)
gcagccgctctctcttgagtccatcctcagtctctcctaccccttgaagtagggggaccctgaatttgcccatccacctgggtcactttgagagttgtgcaggggggctgggagcactgg

SEQ ID NO: 314222 - DNA, 120 bp, Artificial Sequence
  ENSG00000134815_35 (sequence is synthesized)
tgttcacgtgggaccacaggctgcaccataagacccactcacaataaaaaaataaaaggccgagccgggcatggttgctcactcccgtaataaaaaaataaaagaacaggctgagccggg

SEQ ID NO: 314223 - DNA, 120 bp, Artificial Sequence
  ENSG00000134815_36 (sequence is synthesized)
gactgaaacaaccctggttctgtccccatggggctcacaacccagtgggaggacagacccatccccagacaacccagagtgggcagggcttggggagtcaagagcactataggagcccac

SEQ ID NO: 314224 - DNA, 120 bp, Artificial Sequence
  ENSG00000134815_37 (sequence is synthesized)
agggggcatctgccccagatttggaggagtcagggagggcttcctggaggagggaacctgggccagagggtggaggagaggcatcctgggcagaggagagagcagataggagggcttgtg

SEQ ID NO: 314225 - DNA, 120 bp, Artificial Sequence
  ENSG00000134815_38 (sequence is synthesized)
ggctggtattgacgggggcccacaggaggggaagttccagggccaggcctccctgggtagccttgggtgactcacccctgctgggcctcaccttccgcatggtggtgatagtcaacctaa

SEQ ID NO: 314226 - DNA, 120 bp, Artificial Sequence
  ENSG00000134815_39 (sequence is synthesized)
cagagagtgagcaccggtcagggggcctgtcctatggactctgtgagctcccaggtgggtcctgcagagggaggcccccctggcacccgtgtgcatggaagggtgtctcgctgcaggcat

SEQ ID NO: 314227 - DNA, 120 bp, Artificial Sequence
  ENSG00000134815_40 (sequence is synthesized)
ggctgcgtgctgggagtcacattcagatttggctgaccttcttgtctgagccaggccaccaaagccatgccgtaagcatactctttctatcgatgtgtactttgaccgggtgggacaggc

SEQ ID NO: 314228 - DNA, 120 bp, Artificial Sequence
  ENSG00000134815_41 (sequence is synthesized)
ctcacctacaactgcctcacggtaagcatgaaccctccttccctgaaggtgggatttcaggaagaccccaccaccccgtttcaccttagtccagggacatagttcccaagtggggcccgt

SEQ ID NO: 314229 - DNA, 120 bp, Artificial Sequence
  ENSG00000134815_42 (sequence is synthesized)
caggactgtggggacccggccacctctgcccagccgtctgcccatcccatgatggtctcctgtgcgtgtgagcacttgctagagcttcgaggactgacgacctccacccgctggccctgg

SEQ ID NO: 314230 - DNA, 120 bp, Artificial Sequence
  ENSG00000134815_43 (sequence is synthesized)
ctggtgccacacacaggccttgtcctgaagatcaggagcccaaggcagggagagcctggagcgccacctctttctgtctgcctgtcccctgtggtgtctctgtgttgctgtctttgtctc

SEQ ID NO: 314231 - DNA, 120 bp, Artificial Sequence
  ENSG00000134817_0 (sequence is synthesized)
aggagacaggcttcctccagggtctggagaacccagaggcagctcctcctgagtgctgggaaggactctgggcatcttcagcccttcttactctctgaggctcaagccagaaattcaggc

SEQ ID NO: 314232 - DNA, 120 bp, Artificial Sequence
  ENSG00000134817_1 (sequence is synthesized)
tgcttgcagagtgggtgacagagccacggagctggtgtccctgggaccctctgcccgtcttctctccactccccagcatggaggaaggtggtgattttgacaactactatggggcagaca

SEQ ID NO: 314233 - DNA, 120 bp, Artificial Sequence
  ENSG00000134817_2 (sequence is synthesized)
accagtctgagtgtgagtacacagactggaaatcctcgggggccctcatccctgccatctacatgttggtcttcctcctgggcaccacgggcaacggtctggtgctctggaccgtgtttc

SEQ ID NO: 314234 - DNA, 120 bp, Artificial Sequence
  ENSG00000134817_3 (sequence is synthesized)
ggagcagccgggagaagaggcgctcagctgatatcttcattgctagcctggcggtggctgacctgaccttcgtggtgacgctgcccctgtgggctacctacacgtaccgggactatgact

SEQ ID NO: 314235 - DNA, 120 bp, Artificial Sequence
  ENSG00000134817_4 (sequence is synthesized)
ggccctttgggaccttcttctgcaagctcagcagctacctcatcttcgtcaacatgtacgccagcgtcttctgcctcaccggcctcagcttcgaccgctacctggccatcgtgaggccag

SEQ ID NO: 314236 - DNA, 120 bp, Artificial Sequence
  ENSG00000134817_5 (sequence is synthesized)
tggccaatgctcggctgaggctgcgggtcagcggggccgtggccacggcagttctttgggtgctggccgccctcctggccatgcctgtcatggtgttacgcaccaccggggacttggaga

SEQ ID NO: 314237 - DNA, 120 bp, Artificial Sequence
  ENSG00000134817_6 (sequence is synthesized)
acaccactaaggtgcagtgctacatggactactccatggtggccactgtgagctcagagtgggcctgggaggtgggccttggggtctcgtccaccaccgtgggctttgtggtgcccttca

SEQ ID NO: 314238 - DNA, 120 bp, Artificial Sequence
  ENSG00000134817_7 (sequence is synthesized)
ccatcatgctgacctgttacttcttcatcgcccaaaccatcgctggccacttccgcaaggaacgcatcgagggcctgcggaagcggcgccggctgctcagcatcatcgtggtgctggtgg

SEQ ID NO: 314239 - DNA, 120 bp, Artificial Sequence
  ENSG00000134817_8 (sequence is synthesized)
tgacctttgccctgtgctggatgccctaccacctggtgaagacgctgtacatgctgggcagcctgctgcactggccctgtgactttgacctcttcctcatgaacatcttcccctactgca

SEQ ID NO: 314240 - DNA, 120 bp, Artificial Sequence
  ENSG00000134817_9 (sequence is synthesized)
cctgcatcagctacgtcaacagctgcctcaaccccttcctctatgcctttttcgacccccgcttccgccaggcctgcacctccatgctctgctgtggccagagcaggtgcgcaggcacct

SEQ ID NO: 314241 - DNA, 120 bp, Artificial Sequence
  ENSG00000134817_10 (sequence is synthesized)
cccacagcagcagtggggagaagtcagccagctactcttcggggcacagccaggggcccggccccaacatgggcaagggtggagaacagatgcacgagaaatccatcccctacagccagg

SEQ ID NO: 314242 - DNA, 120 bp, Artificial Sequence
  ENSG00000134817_11 (sequence is synthesized)
agacccttgtggttgactagggctgggagcagagagaagcctggcgccctcggccctccccggcctttgcccttgctttctgaaaatcaggtagtgtggctactccttgtcctatgcaca

SEQ ID NO: 314243 - DNA, 120 bp, Artificial Sequence
  ENSG00000134817_12 (sequence is synthesized)
tcctttaactgtcccctgattctgccccgccctgtcctcctctactgctttattctttctcagaggtttgtggtttaggggaaagagactgggctctacagacctgaccctgcacaagcc

SEQ ID NO: 314244 - DNA, 120 bp, Artificial Sequence
  ENSG00000134817_13 (sequence is synthesized)
atttaatctcactcagcctcagtttctccattggtatgaaatgggggaaagtcatattgatcctaaaatgttgaagcctgagtctggacgcagtaaaagcttgtttccctctgctgcttt

SEQ ID NO: 314245 - DNA, 120 bp, Artificial Sequence
  ENSG00000134817_14 (sequence is synthesized)
cttagatctgcaatcgtctttcctcccttctttccttgtagtttttcccccaccactctctgcagctgccgctccttatccctgccttctggcaccaatcccctcctacagctcgtcccc

SEQ ID NO: 314246 - DNA, 120 bp, Artificial Sequence
  ENSG00000134817_15 (sequence is synthesized)
tccatccttctcccctgtctactttcttgttctgaagggctactaagggttaaggatcccaaagcttgcagagactgaccctgtttaagctttctatcctgttttctgagtgtgaggcag

SEQ ID NO: 314247 - DNA, 120 bp, Artificial Sequence
  ENSG00000134817_16 (sequence is synthesized)
ggaatgggctggggccgggggtgggctgtgtgtcagcagataattagtgctccagcccttagatctgggagctccagagcttgccctaaaattggatcacttccctgtcattttgggcat

SEQ ID NO: 314248 - DNA, 120 bp, Artificial Sequence
  ENSG00000134817_17 (sequence is synthesized)
tggggctagtgtgattcctgcagttcccccatggcaccatgacactgactagatatgctttctccaaattgtccgcagaccctttcatccttcctctattttctatgagaattggaaggc

SEQ ID NO: 314249 - DNA, 120 bp, Artificial Sequence
  ENSG00000134817_18 (sequence is synthesized)
agcagggctgatgaatggatgtactccttggtttcattatgtgagtggggagttgggaagggcaactagagagagaggatggaggggtgtctgcatttagtccagacactgcttggctcg

SEQ ID NO: 314250 - DNA, 120 bp, Artificial Sequence
  ENSG00000134817_19 (sequence is synthesized)
ctccccgagtcctcctgtttctgacttcctgcataactgtgagctgaagggtttcctcatctccccatcttaccccatcatactgatttctttcttgggcactggtgctacttggtgcca

SEQ ID NO: 314251 - DNA, 120 bp, Artificial Sequence
  ENSG00000134817_20 (sequence is synthesized)
agaatcatgttgtttgggatggagatgcctgcctcttgtctgtgtgtgttgtacttatatgtctatatggatgagcctggcatgaacagcagtgtgcctgggtcatttggacaaacctcc

SEQ ID NO: 314252 - DNA, 120 bp, Artificial Sequence
  ENSG00000134817_21 (sequence is synthesized)
tcccaccccccaatccactgcaactctgctgttcacacattacccttggcagggggtggtggggggcagggacacactgaggcaatgaaaaatgtagaataaaaatgagtccacccccta

SEQ ID NO: 314253 - DNA, 120 bp, Artificial Sequence
  ENSG00000134817_22 (sequence is synthesized)
ctggatttgggggctccaacggctggtccgtgctttaggagcgaagttaatgtttgcaccaggcttcctgtagggagatccctccccaaagcagctggcgccaaggcttgggggcgtcct

SEQ ID NO: 314254 - DNA, 120 bp, Artificial Sequence
  ENSG00000134817_23 (sequence is synthesized)
actgagctgggttcctgctccttcttgggctccatgaaggaagtaagaggctagttgagagcctcccttggcccctttccggtgcctccccgcctggcttcaaatttatgagcattgccc

SEQ ID NO: 314255 - DNA, 120 bp, Artificial Sequence
  ENSG00000134817_24 (sequence is synthesized)
tcatcgtcctttcttgttccagggtcagtggccctcttcctaaggaggcctcctgcttgccatgggccaaaaggcacggggtgggttttttctctccctaccctcaggattggacctctt

SEQ ID NO: 314256 - DNA, 120 bp, Artificial Sequence
  ENSG00000134817_25 (sequence is synthesized)
ggcttctgctggattggggatctgggaatagggactggagcaagtgtgcagatagcatgatgtctacactgccagagagaccgtgaggatgaaattaatagtggggcctttgtgagctag

SEQ ID NO: 314257 - DNA, 120 bp, Artificial Sequence
  ENSG00000134817_26 (sequence is synthesized)
aggctgggagtgtctattccgggttttgttcttggaggactatgaaagtgaaggacaagacatgagcgatggagataagaaaagcccagcttgatgtgaatggacatcttgaccctccct

SEQ ID NO: 314258 - DNA, 120 bp, Artificial Sequence
  ENSG00000134817_27 (sequence is synthesized)
ggaatgacgccagctctgggggcagagggaggaggagaggggaaggggctcctcacagcctagtctccccatcttaagatagcatctttcacagagtcacctcctctgcccagagctgtc

SEQ ID NO: 314259 - DNA, 120 bp, Artificial Sequence
  ENSG00000134817_28 (sequence is synthesized)
ctcaaagcatccagtgaacactggaagaggcttctagaagggaagaaattgtccctctgaggccgccgtgggtgacctgcagagacttcctgcctggaactcatctgtgaactgggacag

SEQ ID NO: 314260 - DNA, 120 bp, Artificial Sequence
  ENSG00000134817_29 (sequence is synthesized)
aagcagaggaggctgcctgctgtgatacccccttacctcccccagtgccttcttcagaatatctgcactgtcttctgatcctgttagtcactgtggttcatcaaataaaactgtttgtgc

SEQ ID NO: 314261 - DNA, 120 bp, Artificial Sequence
  ENSG00000134824_0 (sequence is synthesized)
tgcacacaccggctgggaggcagccgtctgtgcagcgagcagccggcgcggggaggccgcagtgcacggggcgtcacagtcggcaggcagcatggggaagggagggaaccagggcgaggg

SEQ ID NO: 314262 - DNA, 120 bp, Artificial Sequence
  ENSG00000134824_1 (sequence is synthesized)
ggccgccgagcgcgaggtgtcggtgcccaccttcagctgggaggagattcagaagcataacctgcgcaccgacaggtggctggtcattgaccgcaaggtttacaacatcaccaaatggtc

SEQ ID NO: 314263 - DNA, 120 bp, Artificial Sequence
  ENSG00000134824_2 (sequence is synthesized)
catccagcacccggggggccagcgggtcatcgggcactacgctggagaagatgcaacggatgccttccgcgccttccaccctgacctggaattcgtgggcaagttcttgaaacccctgct

SEQ ID NO: 314264 - DNA, 120 bp, Artificial Sequence
  ENSG00000134824_3 (sequence is synthesized)
gattggtgaactggccccggaggagcccagccaggaccacggcaagaactcaaagatcactgaggacttccgggccctgaggaagacggctgaggacatgaacctgttcaagaccaacca

SEQ ID NO: 314265 - DNA, 120 bp, Artificial Sequence
  ENSG00000134824_4 (sequence is synthesized)
cgtgttcttcctcctcctcctggcccacatcatcgccctggagagcattgcatggttcactgtcttttactttggcaatggctggattcctaccctcatcacggcctttgtccttgctac

SEQ ID NO: 314266 - DNA, 120 bp, Artificial Sequence
  ENSG00000134824_5 (sequence is synthesized)
ctctcaggcccaagctggatggctgcaacatgattatggccacctgtctgtctacagaaaacccaagtggaaccaccttgtccacaaattcgtcattggccacttaaagggtgcctctgc

SEQ ID NO: 314267 - DNA, 120 bp, Artificial Sequence
  ENSG00000134824_6 (sequence is synthesized)
caactggtggaatcatcgccacttccagcaccacgccaagcctaacatcttccacaaggatcccgatgtgaacatgctgcacgtgtttgttctgggcgaatggcagcccatcgagtacgg

SEQ ID NO: 314268 - DNA, 120 bp, Artificial Sequence
  ENSG00000134824_7 (sequence is synthesized)
caagaagaagctgaaatacctgccctacaatcaccagcacgaatacttcttcctgattgggccgccgctgctcatccccatgtatttccagtaccagatcatcatgaccatgatcgtcca

SEQ ID NO: 314269 - DNA, 120 bp, Artificial Sequence
  ENSG00000134824_8 (sequence is synthesized)
taagaactgggtggacctggcctgggccgtcagctactacatccggttcttcatcacctacatccctttctacggcatcctgggagccctccttttcctcaacttcatcaggttcctgga

SEQ ID NO: 314270 - DNA, 120 bp, Artificial Sequence
  ENSG00000134824_9 (sequence is synthesized)
gagccactggtttgtgtgggtcacacagatgaatcacatcgtcatggagattgaccaggaggcctaccgtgactggttcagtagccagctgacagccacctgcaacgtggagcagtcctt

SEQ ID NO: 314271 - DNA, 120 bp, Artificial Sequence
  ENSG00000134824_10 (sequence is synthesized)
cttcaacgactggttcagtggacaccttaacttccagattgagcaccacctcttccccaccatgccccggcacaacttacacaagatcgccccgctggtgaagtctctatgtgccaagca

SEQ ID NO: 314272 - DNA, 120 bp, Artificial Sequence
  ENSG00000134824_11 (sequence is synthesized)
tggcattgaataccaggagaagccgctactgagggccctgctggacatcatcaggtccctgaagaagtctgggaagctgtggctggacgcctaccttcacaaatgaagccacagcccccg

SEQ ID NO: 314273 - DNA, 120 bp, Artificial Sequence
  ENSG00000134824_12 (sequence is synthesized)
ctgctcacggaccccatgttggatctttctccctttctcctctcctttttctcttcacatctcccccatagcaccctgccctcatgggacctgccctccctcagccgtcagccatcagcc

SEQ ID NO: 314274 - DNA, 120 bp, Artificial Sequence
  ENSG00000134824_13 (sequence is synthesized)
atggccctcccagtgcctcctagccccttcttccaaggagcagagaggtggccaccgggggtggctctgtcctacctccactctctgcccctaaagatgggaggagaccagcggtccatg

SEQ ID NO: 314275 - DNA, 120 bp, Artificial Sequence
  ENSG00000134824_14 (sequence is synthesized)
ggtctggcctgtgagtctccccttgcagcctggtcactaggcatcacccccgctttggttcttcagatgctcttggggttcataggggcaggtcctagtcgggcagggcccctgaccctc

SEQ ID NO: 314276 - DNA, 120 bp, Artificial Sequence
  ENSG00000134824_15 (sequence is synthesized)
ccggcctggcttcactctccctgacggctgccattggtccaccctttcatagagaggcctgctttgttacaaagctcgggtctccctcctgcagctcggttaagtacccgaggcctctct

SEQ ID NO: 314277 - DNA, 120 bp, Artificial Sequence
  ENSG00000134824_16 (sequence is synthesized)
taagatgtccagggccccaggcccgcgggcacagccagcccaaaccttgggccctggaagagtcctccaccccatcactagagtgctctgaccctgggctttcacgggccccattccacc

SEQ ID NO: 314278 - DNA, 120 bp, Artificial Sequence
  ENSG00000134824_17 (sequence is synthesized)
gcctccccaacttgagcctgtgaccttgggaccaaagggggagtccctcgtctcttgtgactcagcagaggcagtggccacgttcagggaggggccggctggcctggaggctcagcccac

SEQ ID NO: 314279 - DNA, 120 bp, Artificial Sequence
  ENSG00000134824_18 (sequence is synthesized)
cctccagcttttcctcagggtgtcctgaggtccaagattctggagcaatctgacccttctccaaaggctctgttatcagctgggcagtgccagccaatccctggccatttggccccaggg

SEQ ID NO: 314280 - DNA, 120 bp, Artificial Sequence
  ENSG00000134824_19 (sequence is synthesized)
gacgtgggccctgcaggctgcaggagggcactggagctgggaggtctcgtcccagccctccccatctcggggctgctgtgtggacggcgctgcctcaggcactctcctgtctgaacctgc

SEQ ID NO: 314281 - DNA, 120 bp, Artificial Sequence
  ENSG00000134824_20 (sequence is synthesized)
ccttactgtgtttaacctgttgctccaggatgcattctgataggagggggcggcagggctgggccttgtgacaatctgcctttcaccacatggccttgcctcggtggccctgactgtcag

SEQ ID NO: 314282 - DNA, 120 bp, Artificial Sequence
  ENSG00000134824_21 (sequence is synthesized)
ggagggccagggaggcagagcgggagggagtctcaggaggaggctgccctgaggggctggggagggggtacctcatgaggaccagggtggagctgagaagaggaggaggtgggggctgga

SEQ ID NO: 314283 - DNA, 120 bp, Artificial Sequence
  ENSG00000134824_22 (sequence is synthesized)
ggtgctggtagctgaggggacgggcaagtgagaggggagggagggaagtcctgggaggatcctgagctgctgttgcagtctaacccactaatcagttcttagattcaggggaagggcagg

SEQ ID NO: 314284 - DNA, 120 bp, Artificial Sequence
  ENSG00000134824_23 (sequence is synthesized)
caccaacaactcagaatgggggctttcggggagggcgcctagtccccccagctctaagcagccaggagggacctgcatctaagcatctgggttgccatggcaatggcatgccccccagct

SEQ ID NO: 314285 - DNA, 120 bp, Artificial Sequence
  ENSG00000134824_24 (sequence is synthesized)
actgtatgcccccgacccccgcagaggcagaatgaacccatagggagctgatcgtaatgtttatcatgttacttccccacccctacattttttgaaataaaataaggaattttattctca

SEQ ID NO: 314286 - DNA, 120 bp, Artificial Sequence
  ENSG00000134824_25 (sequence is synthesized)
aaccccgaaccaagctttagccgccgaggccgcgtgtcccaaaggccagtttctcccgtacatcccagtccagccccagcctctggagttatctttctacaccatggatctgatcacagt

SEQ ID NO: 314287 - DNA, 120 bp, Artificial Sequence
  ENSG00000134824_26 (sequence is synthesized)
ctcctccatggacctaccctggctggtactgtgctgggagccgctggggaccccaggccctggccggtccacgcttctcagccaccctacacaggccacccatacgtgctcccttttagg

SEQ ID NO: 314288 - DNA, 120 bp, Artificial Sequence
  ENSG00000134824_27 (sequence is synthesized)
gcctgaaccttcaaagcctctgtgagatactccctggttctgcctttcagctatcactccctgctccgagctccacaccctttacaaatgttcattaaagttatctatatggtatgttaa

SEQ ID NO: 314289 - DNA, 120 bp, Artificial Sequence
  ENSG00000134824_28 (sequence is synthesized)
ggcattttttgcaaacccttagccaaagcattgatccggcaacagttcaccaggatagtcgtgatgccaaagggtcaggaaagtgtgttttctttcatctgtcgctgggcaactgtcgag

SEQ ID NO: 314290 - DNA, 120 bp, Artificial Sequence
  ENSG00000134824_29 (sequence is synthesized)
ggccataactctgagctgaggagacggacacctgtggcctcaaaagaaatatccatgttatgtgtcttgtctcatgggatcctatttgagtgttagaaacaggaaagttcttcttgttca

SEQ ID NO: 314291 - DNA, 120 bp, Artificial Sequence
  ENSG00000134824_30 (sequence is synthesized)
tgttagcagttgtttgttgagccctccctccagccttcctggtgtgacacgaatctcaggacccaccctcagcatagcagcacaactgcgctctccaaatcgtttattgagatacagttc

SEQ ID NO: 314292 - DNA, 69 bp, Artificial Sequence
  ENSG00000134824_31 (sequence is synthesized)
cacaactgcgctctccaaatcgtttattgagatacagttctcacttttttttttttttaactcccgggt

SEQ ID NO: 314293 - DNA, 120 bp, Artificial Sequence
  ENSG00000134824_32 (sequence is synthesized)
ggtgtgagccaccacgcccagccagttttcccatttaaagtagacaaatcaatgacttttggtatattcacagatttatgcaaccatcatcatagtcgattttagagcatcttcatgatg

SEQ ID NO: 314294 - DNA, 120 bp, Artificial Sequence
  ENSG00000134824_33 (sequence is synthesized)
tttagagcatcttcatgatgctcaaaagaaaccccacgtttcttagccatcacatcccaaccccctcactccctcccctaccccaatcctagccctacacaactgctcagctttctgtct

SEQ ID NO: 314295 - DNA, 120 bp, Artificial Sequence
  ENSG00000134824_34 (sequence is synthesized)
ctatagatttccctattctgggcgtttcatgtcggtggaatcatgtgatatgtggtcttttgtggctccttccttcccttagcatgttctccaggctcatccgtgttgtagcaagggtca

SEQ ID NO: 314296 - DNA, 120 bp, Artificial Sequence
  ENSG00000134824_35 (sequence is synthesized)
acccactcatctgttgatgaacatttgtgttgcttttgctcttctggttcttttgaagaatgctgctgtgaacactgctctatgagttggtgtgtggacatgttttcatttctcttggat

SEQ ID NO: 314297 - DNA, 120 bp, Artificial Sequence
  ENSG00000134824_36 (sequence is synthesized)
atacgctcaggagggagatttctgggccacatagtagggaccacttctcactgtccctgaaacctcggctttaccttgcacagctctggttccacacctggtgacggagaggcagagact

SEQ ID NO: 314298 - DNA, 120 bp, Artificial Sequence
  ENSG00000134824_37 (sequence is synthesized)
ggctgccacacctgctggagcgctcaccgtgtggtccctcagcagcacgcctcatctgccaccatcgtcttatgatcagggaaactgaagcctagagagataaagtgacttcactccatc

SEQ ID NO: 314299 - DNA, 120 bp, Artificial Sequence
  ENSG00000134824_38 (sequence is synthesized)
tggggctggcgcatgctctgagctcagtcatggcagggctggattctggccttgtgggggcctgaagtgctatccccgagggttgaaggttccgggaactgctcctaagaagggcctgtt

SEQ ID NO: 314300 - DNA, 120 bp, Artificial Sequence
  ENSG00000134824_39 (sequence is synthesized)
ttatttggagaatcatcatcctgtacactgggaggagcctcaacgtggcttggtccaatctgcttcaccagtggataagaaattgaaggccagctgtggtggctcacacctgtaatccca

SEQ ID NO: 314301 - DNA, 120 bp, Artificial Sequence
  ENSG00000134824_40 (sequence is synthesized)
caacatgattatggccacctgtctgtctacagaaaacccaagtggaaccaccttgtccacaaattcgtcattggccacttaaagctctggttccacacctggtgacggagaggcagagac

SEQ ID NO: 314302 - DNA, 120 bp, Artificial Sequence
  ENSG00000134824_41 (sequence is synthesized)
tgcgctcaccgtggcatcctgcccggcgtagtggctgatgacccgggagccccctggatgccggcgggtgaactcgctgatgttgtacaccttacggtcgatcactagccaccgctcctc

SEQ ID NO: 314303 - DNA, 120 bp, Artificial Sequence
  ENSG00000134824_42 (sequence is synthesized)
gtcgtttgaagtgagacagggcagtcccttggcctcaccttccacctcggacacctgtgctgagcctgtggcatgtcaccatacctaaactcatggcaggatgagcgccctggcagtggg

SEQ ID NO: 314304 - DNA, 120 bp, Artificial Sequence
  ENSG00000134824_43 (sequence is synthesized)
aacaggccatgcagaggccccggggagggagtaagctaggtcagggggctgagtaaagacaggttcttaaccccatgaggctccgtgggtgactgggtgggatgggggctttagcagggg

SEQ ID NO: 314305 - DNA, 120 bp, Artificial Sequence
  ENSG00000134824_44 (sequence is synthesized)
agagttgggacctgcttggagcgaaggccactctggttgccatggccacgaggacaagcaggagactgtgggaagctgatgctgtggtccagttgagacaagacttgggtggcagagaga

SEQ ID NO: 314306 - DNA, 120 bp, Artificial Sequence
  ENSG00000134824_45 (sequence is synthesized)
cagtggacagggtggagccgtgaagtcaccctcccagtacatgagagaagacgtccaagcccagtccctgacaccagtccagccagaggcagggaggagagcagagtggagggacacagg

SEQ ID NO: 314307 - DNA, 120 bp, Artificial Sequence
  ENSG00000134824_46 (sequence is synthesized)
atgacagtggggcgtggggaggccagcctctgctgtgagagctctgagatagggacgatggtacctctgaccttccctacccctccaagccctctgtcctgctggaaggagatgccagga

SEQ ID NO: 314308 - DNA, 120 bp, Artificial Sequence
  ENSG00000134824_47 (sequence is synthesized)
ggagacccaggtgctgaggaggagggacaggactgggggacggttggggacctggccccgggttgggggcgcaccttcagaatcgcccttgccccacgagagggctgctgacccccaccc

SEQ ID NO: 314309 - DNA, 120 bp, Artificial Sequence
  ENSG00000134824_48 (sequence is synthesized)
tagaaacaaaggcagccatgcaaaccccgagcaagcaggtggcgtgtagttgcccattgcatttcagtgggctgcggtccagcttctagaggcctgagtgtgaggtgtgtgcacatctgg

SEQ ID NO: 314310 - DNA, 120 bp, Artificial Sequence
  ENSG00000134824_49 (sequence is synthesized)
ggcacgcacttggtgccagggcagaggagagggcaggttgcacctaacttcatctttccccgcaggacctggcctgggccgtcagctactacatccggttcttcatcacctacatccctt

SEQ ID NO: 314311 - DNA, 120 bp, Artificial Sequence
  ENSG00000134824_50 (sequence is synthesized)
tctacggcatcctgggagccctccttttcctcaacttcatcaggtgcctgggctttgctgattcatccctgggccctccactggcactgatgatggctttggcatgagaagaggctcgga

SEQ ID NO: 314312 - DNA, 120 bp, Artificial Sequence
  ENSG00000134824_51 (sequence is synthesized)
cggctccactttgcctggggacctcccatcctggccccttggcaggggctgtcctgggctggttgggagagtggatctgttcccactgtggctgggcccccggaggcccctgcgctgagc

SEQ ID NO: 314313 - DNA, 120 bp, Artificial Sequence
  ENSG00000134824_52 (sequence is synthesized)
agagacctgaggctcggggctgcagatggaatgcacggcagggaggcgggaccctttgtttgtgtgtgcgtgttgttggcctccatccccactccccagactccacttctccaggcctct

SEQ ID NO: 314314 - DNA, 120 bp, Artificial Sequence
  ENSG00000134824_53 (sequence is synthesized)
caacgactggttcagtggacaccttaacttccagattgagcaccagtgagcgcggggctgcggggaggcggggagacccacagcgggagggaagtggccgctatcccactgggcagaatg

SEQ ID NO: 314315 - DNA, 120 bp, Artificial Sequence
  ENSG00000134824_54 (sequence is synthesized)
cagaatgtgggggccacctctttgtctctctgacaaggtctctgcccaatatagagcaaggctcccagccagccccgctgaggtcaggagaggggctcccctattccatctccctgaggg

SEQ ID NO: 314316 - DNA, 120 bp, Artificial Sequence
  ENSG00000134824_55 (sequence is synthesized)
tcatcctgtgcccctcatgctgtgccacttggtcatagtggttaccacctccctccatgtgggcctgggactttgtagttatggagcctgcacacgcacctcatgaccctgtgaggctag

SEQ ID NO: 314317 - DNA, 120 bp, Artificial Sequence
  ENSG00000134824_56 (sequence is synthesized)
cagggcagggctacgtagcttgcctggaacatcggccgagggactgccctgctgccccttgtccttgcttcacctcttgtcactgtttttttttttttttattaaaaaataaaaaatgta

SEQ ID NO: 314318 - DNA, 120 bp, Artificial Sequence
  ENSG00000134824_57 (sequence is synthesized)
gacacccaatcaccgggcaacaggtatgatcaggcgcctccgggctttcctccgaattagtcggtgtttggctcggagtgcgtaactctgtctcccctgcactcagcctccggtcccgcc

SEQ ID NO: 314319 - DNA, 120 bp, Artificial Sequence
  ENSG00000134824_58 (sequence is synthesized)
gtgacggggactcctctggaggaggagatgtgtggggtcctccactccccacacttggggctctgagcccccagttgggaagaagcctgactcttgttgagtgagtctgtggaccgggca

SEQ ID NO: 314320 - DNA, 120 bp, Artificial Sequence
  ENSG00000134824_59 (sequence is synthesized)
ctgtgatgggcagtgtgcgtgcacaacgtcacttaatccttgcttaacccgtgaggcgggagctgtcatcgacccatttcatggatggaacagctaaggccaagagacatgaagtgactt

SEQ ID NO: 314321 - DNA, 120 bp, Artificial Sequence
  ENSG00000134824_60 (sequence is synthesized)
gttcaaggtaacagcaaggaaaaggcaacaccactgtccgaacccaaaccatctggctgcaaaccacagcttcggagtcctgggggcccttgtgaaatatgtttgttgggtagccccagc

SEQ ID NO: 314322 - DNA, 120 bp, Artificial Sequence
  ENSG00000134824_61 (sequence is synthesized)
tttctgatcaattaaacagccaggcactcacccccctagcttgctacattctaaaatacctctccctcccttccctggtcccatgacttaaacggcaaagctctggcaaagaactgagcg

SEQ ID NO: 314323 - DNA, 120 bp, Artificial Sequence
  ENSG00000134824_62 (sequence is synthesized)
tgggaaagatgagagcagagagttagccacagggcagggcttcgtatcccaaacccacagttgtactttctggtttgggaggggagtattggccatcccccagcagagccgctgcagctg

SEQ ID NO: 314324 - DNA, 120 bp, Artificial Sequence
  ENSG00000134824_63 (sequence is synthesized)
aggccatcgagatgggcacagatgtgtagtggtatgtcaccatacgcatgtacatacacgtgcgtgactgtgatgagcattttgctcaccgtcccacagaggcccactctgaggcctgct

SEQ ID NO: 314325 - DNA, 120 bp, Artificial Sequence
  ENSG00000134824_64 (sequence is synthesized)
gctgcctggcaagcaggaccccctggctcccgagggtcattctggggcattgaagggacgcacactaaagccagcagtgcttaccagcagaggcagcccctgtaacctgtgttgtccacc

SEQ ID NO: 314326 - DNA, 120 bp, Artificial Sequence
  ENSG00000134824_65 (sequence is synthesized)
cacaggccaccatcacccatgagaacagggtgcctactgtgcacatgcagctccaaacagactccccaggtgcctcccaggcccccacaacagcgtggccagccctcagtccctccatag

SEQ ID NO: 314327 - DNA, 120 bp, Artificial Sequence
  ENSG00000134824_66 (sequence is synthesized)
gatgccctggcccctgctgacctgcctgggttgccctctgtgctcacttccgagtacagccggcccagcccgagagggatgggatgctctgtgggacagagatgcggtggggaggagctc

SEQ ID NO: 314328 - DNA, 120 bp, Artificial Sequence
  ENSG00000134824_67 (sequence is synthesized)
ttgagcagagctggagacactgcatgccaaggctggggctatgagcctgctccctggcctctgggagaagcttagagcaggactcaggggcctgttctgtgggccactgcaggccccgag

SEQ ID NO: 314329 - DNA, 120 bp, Artificial Sequence
  ENSG00000134824_68 (sequence is synthesized)
actggccacctcgagagcaacgtctgcagtgctggctcctccagcaactccgtccactggagactcatgaaaggctcctgtgaggcctccctggctcggacctctccatggccggcctca

SEQ ID NO: 314330 - DNA, 120 bp, Artificial Sequence
  ENSG00000134824_69 (sequence is synthesized)
gccctggccttaataatagtcttcctgcaagtggccgtcctttctgggaatgagtgagatccttgccaaggctcaggaggccacacagaacaaagggactgtttctgggggttcttcagc

SEQ ID NO: 314331 - DNA, 120 bp, Artificial Sequence
  ENSG00000134824_70 (sequence is synthesized)
tggttgtgccgtgaccatggccattggcgccaagatgcaagccttggggacagggtggacctggttcccacccacagcctcttccctcaggaatccatgctctccctgtgatttggacaa

SEQ ID NO: 314332 - DNA, 120 bp, Artificial Sequence
  ENSG00000134824_71 (sequence is synthesized)
tcattttactcacctggatgagaggggcactggcctaggcatcatccaaggtcccttccctctgtaactcactttgacctcctgactgcaataagtatgactggacactataggaggagg

SEQ ID NO: 314333 - DNA, 120 bp, Artificial Sequence
  ENSG00000134824_72 (sequence is synthesized)
catctctggccttcggatccaggggtatagggagggtgacgggcagtgtcctggggtcagcacttggcattatgcccatgttctcattggctcctcttaccaaccactgattcaaatgcc

SEQ ID NO: 314334 - DNA, 120 bp, Artificial Sequence
  ENSG00000134824_73 (sequence is synthesized)
agacaaggctcagcaaggctaagcgactcacatagtctcagcactggtgagaggcagagtcggctcaagcgcatctgctggctgcaagcccagcctccccacactgcaagggagaggagc

SEQ ID NO: 314335 - DNA, 120 bp, Artificial Sequence
  ENSG00000134824_74 (sequence is synthesized)
aggtgtcactcagtgagcggcatcttttggtctcagtcctggaagtgcagggtgggctggtccctaggggctggaccatggaattaagggctccagggatcccctggggccgtggttcct

SEQ ID NO: 314336 - DNA, 120 bp, Artificial Sequence
  ENSG00000134824_75 (sequence is synthesized)
atgcctggcattggacaatgacgatgcccaggacccagcccagccctcctccattagagcctctgggcatcaggctgcccaaggtgcaggctctgatggggaagaaaccggtgccgtcat

SEQ ID NO: 314337 - DNA, 120 bp, Artificial Sequence
  ENSG00000134824_76 (sequence is synthesized)
ggggacctcaggtagccagatgtggcctgaggagtctgtgctgtggcctcctctgtcctcaaggttaggctccagctggggaggagtgattcactcttgtaaattacagggaggctccag

SEQ ID NO: 314338 - DNA, 120 bp, Artificial Sequence
  ENSG00000134824_77 (sequence is synthesized)
ggaggcagatgctcccagcctgatgactggcagcaattctggggcccttacctaggttctccctgccactgcgggctccgggagctctccatggtgacctaggaactcccctgggtgctt

SEQ ID NO: 314339 - DNA, 120 bp, Artificial Sequence
  ENSG00000134824_78 (sequence is synthesized)
atgctccgccgagagttgctctgttgcacattcattcaacaaacatttgtttagtgcctgtcacatgggctcagagtcagctttttgggttctgatcccagtcagggccacttcctgtgg

SEQ ID NO: 314340 - DNA, 120 bp, Artificial Sequence
  ENSG00000134824_79 (sequence is synthesized)
tcagaagtgccggccttgtagaggatcgatgccatcgggccagtgctcggctagggctgaggaagcgttggccgctgctggctgtagcatggggagcccagagggctggaggggccccag

SEQ ID NO: 314341 - DNA, 120 bp, Artificial Sequence
  ENSG00000134824_80 (sequence is synthesized)
gcttggtgggcccagggtgcagattgacaggaaagggacagtggtgtgccctgagcagatagaagggatggtggctgcaggatgggttggggaacatgggaggctgggagctgaggctac

SEQ ID NO: 314342 - DNA, 120 bp, Artificial Sequence
  ENSG00000134825_0 (sequence is synthesized)
cttccggtggcggagcggcggattagccttcgcggggcaaaatggagctcgaggccatgagcagatataccagcccagtgaacccagctgtcttcccccatctgaccgtggtgcttttgg

SEQ ID NO: 314343 - DNA, 120 bp, Artificial Sequence
  ENSG00000134825_1 (sequence is synthesized)
ccattggcatgttcttcaccgcctggttcttcgtttacgaggtcacctctaccaagtacactcgtgatatctataaagagctcctcatctccttagtggcctcactcttcatgggctttg

SEQ ID NO: 314344 - DNA, 120 bp, Artificial Sequence
  ENSG00000134825_2 (sequence is synthesized)
tttttactgttgctggaagtgtcccacctgctgctcataataaatgcagatgtatagcagtcctgtctggggcccattctgcaggggtggtgggtgctgggacctacattgcttccccaa

SEQ ID NO: 314345 - DNA, 120 bp, Artificial Sequence
  ENSG00000134825_3 (sequence is synthesized)
tctcttccctttcccatttctcatctgcctttcacagttcctgctgctgatctacttaagggggatgagatttgtgtagcaccggtgttttgtcattggaatttaaggcttacctgtgga

SEQ ID NO: 314346 - DNA, 120 bp, Artificial Sequence
  ENSG00000134825_4 (sequence is synthesized)
cgcctggttcttcgtgtatcctttcactgagcagccagaggaccagcattagtgatgtgggaagctcagggagaaaccacgctagattgccgtgggctgggctctctgcactccacagtc

SEQ ID NO: 314347 - DNA, 120 bp, Artificial Sequence
  ENSG00000134825_5 (sequence is synthesized)
acccaaggctcctgtgcctgtctccgagcaacacctccacctctgcaccttcacctgggctgtcccacctgcctgaatggccctccccactccctgccagagctctcctctcctaagcct

SEQ ID NO: 314348 - DNA, 120 bp, Artificial Sequence
  ENSG00000134825_6 (sequence is synthesized)
cctattacatgcctccttggcgcccagactcaggacagcttcagatagaagcagtcgaggggcttgaggccctcgggcgtcttgacgtacttgggctcgcccagcatgccgatgtacact

SEQ ID NO: 314349 - DNA, 120 bp, Artificial Sequence
  ENSG00000134825_7 (sequence is synthesized)
gtcacctggaagtggttcttcttctggcacacaaaggcgtcgtcgcccaccgaaaagttgaagcccttgtccgcatccacgcggtaggtttcacttttatcagtgttcaggaaaaagaac

SEQ ID NO: 314350 - DNA, 120 bp, Artificial Sequence
  ENSG00000134825_8 (sequence is synthesized)
aaactcaacccaagaggtcaacacgtcctgcgtgaaccctgtgctcacccagcaagtggaaggctgtggccatatgggatccagctctttggccatccctggtccccacatctggagcaa

SEQ ID NO: 314351 - DNA, 120 bp, Artificial Sequence
  ENSG00000134825_9 (sequence is synthesized)
ctccccattcccatgcccagggaactgccagagaggccatggccctgttgtggacacagccctggggctggctccagagtccccctgcatccctgtgccagccacccacccaccttcggg

SEQ ID NO: 314352 - DNA, 120 bp, Artificial Sequence
  ENSG00000134825_10 (sequence is synthesized)
ctccccagagtcaggtaacaaccagatggcttcactgaaacctgcttttgtaaattacttttttttactgttgctggaagtgtcccacctgctgctcataataaatgcagatgtatagca

SEQ ID NO: 314353 - DNA, 120 bp, Artificial Sequence
  ENSG00000134825_11 (sequence is synthesized)
gttatagccttatttcccaagttcaggtgagctcagtttgttctttggatttccaggacagtgagcaggggacctggctggagtggaggtggggaataggggtgctacagttggaaaggt

SEQ ID NO: 314354 - DNA, 120 bp, Artificial Sequence
  ENSG00000134825_12 (sequence is synthesized)
ggtataaggaagggtgcactcaggtgtcaggaggtctgagggctagtcccagctccggccctcatgagctgtgtgacctggggcaagtgacctaactcctctgggtctcattttcttcat

SEQ ID NO: 314355 - DNA, 120 bp, Artificial Sequence
  ENSG00000134825_13 (sequence is synthesized)
ggggctgagagaaggtaacaaccagatggcttcactgaaacctgcttttgtaaattacttttttttactgttgctggaagtgtcccacctgctgctcataataaatgcagatgtatagca

SEQ ID NO: 314356 - DNA, 120 bp, Artificial Sequence
  ENSG00000134825_14 (sequence is synthesized)
gtccctccagggagaacagagtctctcagcgaccctggcgtacccttctccaccgcttgtccccactccacccacaccaggtccccgcaggcccctgctccctctacacccgaaatcgca

SEQ ID NO: 314357 - DNA, 120 bp, Artificial Sequence
  ENSG00000134825_15 (sequence is synthesized)
ggactacaagtccctcaatgccacttgcgccggaggcacttccttttccggttgtgctaggcgcctgctcctgccgacgtgttcttccggtggcggagcggcggattagccttcgcgggg

SEQ ID NO: 314358 - DNA, 120 bp, Artificial Sequence
  ENSG00000134825_16 (sequence is synthesized)
caaaatggtgagagcgttgaggggagttccagacggagatgcgaggacccctcggggtctgacccacaccgcgcttatctcctcagacgccggagatccagagggctagacgctcctgga

SEQ ID NO: 314359 - DNA, 120 bp, Artificial Sequence
  ENSG00000134825_17 (sequence is synthesized)
acctccggcttgggctgaagggtggggaagggggaagccccttgccatgaactccttaggtttctcagctcgcgatttctaagggcgagaggcgtggggcgaattttgaataccttccag

SEQ ID NO: 314360 - DNA, 120 bp, Artificial Sequence
  ENSG00000134825_18 (sequence is synthesized)
tttgtatatctctgttatcggtggtgtgttatctttatttggaaagttcttctgccgaacccgtgcccatcctacaatgccctgggcaaatgtttattggtgaagcacttccaactctca

SEQ ID NO: 314361 - DNA, 120 bp, Artificial Sequence
  ENSG00000134825_19 (sequence is synthesized)
ggcacttggccagactttcctaggagcgcccacagcctctgtacagatctctggccacgttccatggacttctttgttttcggccacgcctcctagtgaccaccgtctgacgcgcatcta

SEQ ID NO: 314362 - DNA, 120 bp, Artificial Sequence
  ENSG00000134825_20 (sequence is synthesized)
gctctgggatgatgtctattcatctttgtattctcagtgccaaacagagggcccgtaattggaagctcaataaatggcagtgattgtctttatcattttgggggaagggggccgtgattg

SEQ ID NO: 314363 - DNA, 120 bp, Artificial Sequence
  ENSG00000134825_21 (sequence is synthesized)
aattccagtgtctcagaacaatgggggcagtttacttctctagagttgttatgttctggattttagaagcattggctgaccggtgacaatgaagttaacatttgtacagatctttacgtt

SEQ ID NO: 314364 - DNA, 120 bp, Artificial Sequence
  ENSG00000134825_22 (sequence is synthesized)
tacagccctctttcataaaagacattatctcatcatcttccctacagccttaggaaggaagcaaatacctgttgagcaaaatactccctgctaggcactagatgctttgattcatcatct

SEQ ID NO: 314365 - DNA, 120 bp, Artificial Sequence
  ENSG00000134825_23 (sequence is synthesized)
ttcttatttttcagttctgtgaaatagatattacagtcgctttactcagactcagattactcagaaccagaacttgaatgtcttgaccatagctcacaagattccataatagcataggta

SEQ ID NO: 314366 - DNA, 74 bp, Artificial Sequence
  ENSG00000134825_24 (sequence is synthesized)
tcttgaccatagctcacaagattccataatagcataggtagtgaggaaaatactgaattagaaattgagggcca

SEQ ID NO: 314367 - DNA, 120 bp, Artificial Sequence
  ENSG00000134827_0 (sequence is synthesized)
ggtacactgttggagagatgagacagtcacaccagctgcccctagtggggctcttactgttttcttttattccaagccaactatgcgagatttgtgaggtaagtgaagaaaactacatcc

SEQ ID NO: 314368 - DNA, 120 bp, Artificial Sequence
  ENSG00000134827_1 (sequence is synthesized)
gcctaaaacctctgttgaatacaatgatccagtcaaactataacaggggaaccagcgctgtcaatgttgtgttgtccctcaaacttgttggaatccagatccaaaccctgatgcaaaaga

SEQ ID NO: 314369 - DNA, 120 bp, Artificial Sequence
  ENSG00000134827_2 (sequence is synthesized)
tgatccaacaaatcaaatacaatgtgaaaagcagattgtcagatgtaagctcgggagagcttgccttgattatactggctttgggagtatgtcgtaacgctgaggaaaacttaatatatg

SEQ ID NO: 314370 - DNA, 120 bp, Artificial Sequence
  ENSG00000134827_3 (sequence is synthesized)
attaccacctgatcgacaagctagaaaataaattccaagcagaaattgaaaatatggaagcacacaatggcactcccctgactaactactaccagctcagcctggacgttttggccttgt

SEQ ID NO: 314371 - DNA, 120 bp, Artificial Sequence
  ENSG00000134827_4 (sequence is synthesized)
gtctgttcaatgggaactactcaaccgccgaagttgtcaaccacttcactcctgaaaataaaaactattattttggtagccagttctcagtagatactggtgcaatggctgtcctggctc

SEQ ID NO: 314372 - DNA, 120 bp, Artificial Sequence
  ENSG00000134827_5 (sequence is synthesized)
tgacctgtgtgaagaagagtctaataaatgggcagatcaaagcagatgaaggcagtttaaagaacatcagtatttatacaaagtcactggtagaaaagattctgtctgagaaaaaagaaa

SEQ ID NO: 314373 - DNA, 120 bp, Artificial Sequence
  ENSG00000134827_6 (sequence is synthesized)
cctctttgtatcatcagactattataatgaaaatgactggaattgccaacaaactctgaatacagtgctcacggaaatttctcaaggagcattcagcaatccaaacgctgcagcccaggt

SEQ ID NO: 314374 - DNA, 120 bp, Artificial Sequence
  ENSG00000134827_7 (sequence is synthesized)
cttacctgccctgatgggaaagaccttcttggatattaacaaagactcttcttgcgtctctgcttcaggtaacttcaacatctccgctgatgagcctataactgtgacacctcctgactc

SEQ ID NO: 314375 - DNA, 120 bp, Artificial Sequence
  ENSG00000134827_8 (sequence is synthesized)
acaatcatatatctccgtcaattactctgtgagaatcaatgaaacatatttcaccaatgtcactgtgctaaatggttctgtcttcctcagtgtgatggagaaagcccagaaaatgaatga

SEQ ID NO: 314376 - DNA, 120 bp, Artificial Sequence
  ENSG00000134827_9 (sequence is synthesized)
tactatatttggtttcacaatggaggagcgctcatgggggccctatatcacctgtattcagggcctatgtgccaacaataatgacagaacctactgggaacttctgagtggaggcgaacc

SEQ ID NO: 314377 - DNA, 120 bp, Artificial Sequence
  ENSG00000134827_10 (sequence is synthesized)
actgagccaaggagctggtagttacgttgtccgcaatggagaaaacttggaggttcgctggagcaaatactaataagcccaaactttcctcagctgcataaaatccatttgcagtggagt

SEQ ID NO: 314378 - DNA, 120 bp, Artificial Sequence
  ENSG00000134827_11 (sequence is synthesized)
tccatgtttattgtccttatgccttcttcttcatttatcccagtacgagcaggagagttaataacctccccttctctctctacatgttcaataaaagttgttgaaagattaacaactata

SEQ ID NO: 314379 - DNA, 120 bp, Artificial Sequence
  ENSG00000134827_12 (sequence is synthesized)
gtcaattactctgtgagaatcaatgaaacatatttcaccaatgtcactgtgctaaatggttctgtcttcctcagtgtgatggagaaagcccagaaaatgaatgatactatatttgggtag

SEQ ID NO: 314380 - DNA, 120 bp, Artificial Sequence
  ENSG00000134830_0 (sequence is synthesized)
ggcagtgctcagcagcatccgacaggagccctggcaaacaggacggatttccaggactctaccagctgccagacacggcagggagagaccccagacctcctgggtcctggctgtgggccc

SEQ ID NO: 314381 - DNA, 120 bp, Artificial Sequence
  ENSG00000134830_1 (sequence is synthesized)
ggattgggctcccaagtggcgtttgactcacgtggggacactcttggaagagacgacaccaggagcctgaatggggaacgattctgtcagctacgagtatggggattacagcgacctctc

SEQ ID NO: 314382 - DNA, 120 bp, Artificial Sequence
  ENSG00000134830_2 (sequence is synthesized)
ggaccgccctgtggactgcctggatggcgcctgcctggccatcgacccgctgcgcgtggccccgctcccactgtatgccgccatcttcctggtgggggtgccgggcaatgccatggtggc

SEQ ID NO: 314383 - DNA, 120 bp, Artificial Sequence
  ENSG00000134830_3 (sequence is synthesized)
ctgggtggctgggaaggtggcccgccggagggtgggtgccacctggttgctccacctggccgtggcggatttgctgtgctgtttgtctctgcccatcctggcagtgcccattgcccgtgg

SEQ ID NO: 314384 - DNA, 120 bp, Artificial Sequence
  ENSG00000134830_4 (sequence is synthesized)
aggccactggccgtatggtgcagtgggctgtcgggcgctgccctccatcatcctgctgaccatgtatgccagcgtcctgctcctggcagctctcagtgccgacctctgcttcctggctct

SEQ ID NO: 314385 - DNA, 120 bp, Artificial Sequence
  ENSG00000134830_5 (sequence is synthesized)
cgggcctgcctggtggtctacggttcagcgggcgtgcggggtgcaggtggcctgtggggcagcctggacactggccttgctgctcaccgtgccctccgccatctaccgccggctgcacca

SEQ ID NO: 314386 - DNA, 120 bp, Artificial Sequence
  ENSG00000134830_6 (sequence is synthesized)
ggagcacttcccagcccggctgcagtgtgtggtggactacggcggctcctccagcaccgagaatgcggtgactgccatccggtttctttttggcttcctggggcccctggtggccgtggc

SEQ ID NO: 314387 - DNA, 120 bp, Artificial Sequence
  ENSG00000134830_7 (sequence is synthesized)
cagctgccacagtgccctcctgtgctgggcagcccgacgctgccggccgctgggcacagccattgtggtggggttttttgtctgctgggcaccctaccacctgctggggctggtgctcac

SEQ ID NO: 314388 - DNA, 120 bp, Artificial Sequence
  ENSG00000134830_8 (sequence is synthesized)
tgtggcggccccgaactccgcactcctggccagggccctgcgggctgaacccctcatcgtgggccttgccctcgctcacagctgcctcaatcccatgctcttcctgtattttgggagggc

SEQ ID NO: 314389 - DNA, 120 bp, Artificial Sequence
  ENSG00000134830_9 (sequence is synthesized)
tcaactccgccggtcactgccagctgcctgtcactgggccctgagggagtcccagggccaggacgaaagtgtggacagcaagaaatccaccagccatgacctggtctcggagatggaggt

SEQ ID NO: 314390 - DNA, 120 bp, Artificial Sequence
  ENSG00000134830_10 (sequence is synthesized)
gtaggctggagagacattgtgggtgtgtatcttcttatctcatttcacaagactggcttcaggcatagctggatccaggagctcaatgatgtcttcattttattccttccttcattcaac

SEQ ID NO: 314391 - DNA, 120 bp, Artificial Sequence
  ENSG00000134830_11 (sequence is synthesized)
agatatccatcatgcacttgctatgtgcaaggcctttttaggcactagagatatagcagtgaccaaaacagacacaaatcctgccctcagggagctgatattcttctagtggaggaagac

SEQ ID NO: 314392 - DNA, 120 bp, Artificial Sequence
  ENSG00000134830_12 (sequence is synthesized)
cctcagggagctgatattcttctagtggaggaagacagactataaacaaagatatatagggccatttgcggtggctcacgcctgtaattccagggctttgggaggctgaggcaggtagat

SEQ ID NO: 314393 - DNA, 62 bp, Artificial Sequence
  ENSG00000134830_13 (sequence is synthesized)
gaggctgaggcagaagaatcgttttgaacccgggaggcagaggtgacagtgagccaagattg

SEQ ID NO: 314394 - DNA, 120 bp, Artificial Sequence
  ENSG00000134830_14 (sequence is synthesized)
ggcgtgagccaccgcacccggccaaaagattttaataggatccctctggttgctggtggaggtgagagtatggtgtaggggcagtgaagatcccagagaggaggctactgtaatggtcca

SEQ ID NO: 314395 - DNA, 120 bp, Artificial Sequence
  ENSG00000134830_15 (sequence is synthesized)
atggtccaagcaggaggtgatagcgatttggatcagggtaacagagctgaggtggtgagaggctgacaggtcatgcatctattttgaaggaaaggccaagtccaggctccttagctcggc

SEQ ID NO: 314396 - DNA, 120 bp, Artificial Sequence
  ENSG00000134830_16 (sequence is synthesized)
attcaaggcttctctccaccactggacacacttactctctagcttctcagaccctgtagcaatcagaatcatgacccccggtgatgtccacatcttaatcccctgaacctgtgaagaggt

SEQ ID NO: 314397 - DNA, 120 bp, Artificial Sequence
  ENSG00000134830_17 (sequence is synthesized)
gaccttccatggcaaaagggactttgcaggtgagattaagtaaaggatcttgagaaggggtggttatcctggattgtctgggtgggctcaatggagtcacgagggtccttttaagaggga

SEQ ID NO: 314398 - DNA, 120 bp, Artificial Sequence
  ENSG00000134830_18 (sequence is synthesized)
ggcaggagggtcagggtcagtcacaggaggtgacaacggaagcagatgtcatagtgacgtgaggaggtgccaagaaatgcaggcagcttccagaagctgaaacagacaaggaaacagatt

SEQ ID NO: 314399 - DNA, 120 bp, Artificial Sequence
  ENSG00000134830_19 (sequence is synthesized)
ctctctgaagctcccagaaggaacacagacctcctgacacttttagacctctgatccgcagacctttaagaaaatacatttgtattgttttaagtcactatgtttggggtgatttgttat

SEQ ID NO: 314400 - DNA, 120 bp, Artificial Sequence
  ENSG00000134830_20 (sequence is synthesized)
agcagccgtgggaagctaatacacacccttcgggctatattcacgcttctgcatctttcctgaagctgtgccactggctggaatgtccttctgatctatgttgtgcagttcaacaatcaa

SEQ ID NO: 314401 - DNA, 120 bp, Artificial Sequence
  ENSG00000134830_21 (sequence is synthesized)
gaatgtccttctgatctatgttgtgcagttcaacaatcaagagccatctgtggctattcaaattcgaatcaattggccaggcctggtggctcctgcctataatctcagcactttgggagg

SEQ ID NO: 314402 - DNA, 120 bp, Artificial Sequence
  ENSG00000134830_22 (sequence is synthesized)
aaatacaaaaattagccagacgtggtggggcgtgcctgtagttccagctactgaggagggagttgcttgaatccttctgcttcaatcctccttaaagcaggtagattgcttgagcccggg

SEQ ID NO: 314403 - DNA, 120 bp, Artificial Sequence
  ENSG00000134830_23 (sequence is synthesized)
ttcaatcctccttaaagcaggtagattgcttgagcccgggaagtggagtttgcagtgagcttagatcacaccgctgcactccagcctggatgtcagaatgagactccatctcaaaaaaaa

SEQ ID NO: 314404 - DNA, 120 bp, Artificial Sequence
  ENSG00000134830_24 (sequence is synthesized)
aaagaaagaataaattttcatttcaaatttagttcctcgggcacactggccatagttcaagtgctcagtagccacatatggctggtgactgccatattcgacagcacagctatagaacat

SEQ ID NO: 314405 - DNA, 120 bp, Artificial Sequence
  ENSG00000134830_25 (sequence is synthesized)
acattgccatcataacagagatttctgttacaaaatgctgttctagaatttacttttgaactctacctgctcagatcttttaaattacatggtaggccaggcatggtggctcacgcctgt

SEQ ID NO: 314406 - DNA, 83 bp, Artificial Sequence
  ENSG00000134830_26 (sequence is synthesized)
gctcacgcctgtgatcccagcactttcggaggcccagtcgggaggatcccttgagcccagaagctggagaccttaaaaaaaag

SEQ ID NO: 314407 - DNA, 120 bp, Artificial Sequence
  ENSG00000134830_27 (sequence is synthesized)
tctacaaaaataaaaaaaagaaaattagcctggtttggtggcacatgcctgtagtgccagctactagggagactgaagtgggaggattgcttcagcctgggaggttgaggctgcagtgag

SEQ ID NO: 314408 - DNA, 120 bp, Artificial Sequence
  ENSG00000134830_28 (sequence is synthesized)
gagcgggaccctgccgctaaataaataaataaataaataacatagtagtgatacctgtgtctgcggtcattactccagaacagcacttcacatatagtttctcctttaaggtcattctca

SEQ ID NO: 314409 - DNA, 120 bp, Artificial Sequence
  ENSG00000134830_29 (sequence is synthesized)
caacagcccagggagatagggtggcatgcttcattttataagctgaggtcctgggaggggaggtcatttacccaagatcacacagcaagaacaccagacagctggaatttgatcccagtt

SEQ ID NO: 314410 - DNA, 120 bp, Artificial Sequence
  ENSG00000134830_30 (sequence is synthesized)
ttgactccaatgctcttgctcttcatcatcaataatttccttcaaggcgtccctcaaatgtcacttcctccaggaagccctccctgatttatgctccttccagaaagaatgggctcttcc

SEQ ID NO: 314411 - DNA, 120 bp, Artificial Sequence
  ENSG00000134830_31 (sequence is synthesized)
tttctctgagtctctggaacacaaggtcccagctaaactgtaaattccccaagggtaacaactggactaattttttttaatttaatttaattttatttttttgagatgaagtcttgctct

SEQ ID NO: 314412 - DNA, 120 bp, Artificial Sequence
  ENSG00000134830_32 (sequence is synthesized)
ggcatgagccaccgttcccggccttatccttgacttagaatacctaacctcctgggaatgcagcccataggtctcagccttatttcacccagctcctgttcaagatggagtcactctggt

SEQ ID NO: 314413 - DNA, 120 bp, Artificial Sequence
  ENSG00000134830_33 (sequence is synthesized)
tcacatgcctctgacatttccccgctcccttttataagagaacctttaatcctaagggttgtagagggaggaagatacaacttctgtgacttcttcaggctggacaggggtgacgatata

SEQ ID NO: 314414 - DNA, 120 bp, Artificial Sequence
  ENSG00000134830_34 (sequence is synthesized)
acttcttcaggctggacaggggtgacgatatacctgcctaactcttaggatctattggattcagggtagacaggagctcagtcagaaagcactggtatcacttttttttttttttttttt

SEQ ID NO: 314415 - DNA, 120 bp, Artificial Sequence
  ENSG00000134830_35 (sequence is synthesized)
gacatgagccaccacgcccggcctgatattttattacttagtattttactctgaattatcatgcgtgaattaagaccaaggctgtcttgtaaaataaaatttgttgtggaacaatttata

SEQ ID NO: 314416 - DNA, 120 bp, Artificial Sequence
  ENSG00000134830_36 (sequence is synthesized)
cagctcctttgaggtaggaggcaggactcaactctggagatggggctcggctcgaatattggaccaaattgaggaccagctaaaacagggaggaggctgaagcaacttattatttttatt

SEQ ID NO: 314417 - DNA, 120 bp, Artificial Sequence
  ENSG00000134830_37 (sequence is synthesized)
tacaggtgtgggccaccacgcctggcccgaagcaactttctatgacacgcctaccagtgtgccatgtcagtttgccattgccatggcaacacacccaggagttactgccccttcccatgg

SEQ ID NO: 314418 - DNA, 120 bp, Artificial Sequence
  ENSG00000134830_38 (sequence is synthesized)
acacacccaggagttactgccccttcccatggcaatgaccccatgacccagaagttactgccccttccctagatatttctgcataaactgccccttaatctacatgtaattaaaaatagg

SEQ ID NO: 314419 - DNA, 120 bp, Artificial Sequence
  ENSG00000134830_39 (sequence is synthesized)
gcataaactgccccttaatctacatgtaattaaaaataggtataggctatttttatacctatataaataggtataggctaaaaataggtataggctgggcgtggtggctcatgtctgtaa

SEQ ID NO: 314420 - DNA, 120 bp, Artificial Sequence
  ENSG00000134830_40 (sequence is synthesized)
gaaagacacaaagacagaaagaaggaaggaaagaaagcaagctgttttcccctgccttgcccctgctcacctttgaattcttttctgggcaaagccaagaaccctcgtgggctaaaaccc

SEQ ID NO: 314421 - DNA, 120 bp, Artificial Sequence
  ENSG00000134830_41 (sequence is synthesized)
cgctttggggcttaaagtttgcaaaatcctcccattaatctattgggaccagttgccacttaggagcattctttgataacttttacaaaacatcttttgtggtttttgaaatgttttcat

SEQ ID NO: 314422 - DNA, 120 bp, Artificial Sequence
  ENSG00000134830_42 (sequence is synthesized)
tttgtagatcattagcccttcttttttgaactggaatacatttcacgggaattttcaaatttaagtctgtgcaatgttacataaaatacctttgattattaaaagccatctgttttgcta

SEQ ID NO: 314423 - DNA, 120 bp, Artificial Sequence
  ENSG00000134830_43 (sequence is synthesized)
taacttcccttttttgttctaaagtttgtctatttctgctatttgtttttttaccatagaaatattgatttccttaagttttcaaagaaccaagttattaataatttctctaagaactag

SEQ ID NO: 314424 - DNA, 120 bp, Artificial Sequence
  ENSG00000134830_44 (sequence is synthesized)
tctcaagcttgctatacaatcctatggttgatagactgtggctttcttgttgatttccatttgttgttcatttcctccaattttccttttttaaaaattataattattgtttggattatt

SEQ ID NO: 314425 - DNA, 120 bp, Artificial Sequence
  ENSG00000134851_0 (sequence is synthesized)
gactccagtttagccgccgccggagaggacgggcgccgagccggggctgcggacttcggcctgcccctcacctcactcccgctgcttgcacctcccggatggtgctgactgctccctaag

SEQ ID NO: 314426 - DNA, 120 bp, Artificial Sequence
  ENSG00000134851_1 (sequence is synthesized)
taagcggcggcggcggcgagtcgtgaggacgcgccgcggaggctgttcggggtcgaggcttcccgtcgccggcacttcctcttgcggcgcccgtgcgcggccggcccggcaggcgggatg

SEQ ID NO: 314427 - DNA, 120 bp, Artificial Sequence
  ENSG00000134851_2 (sequence is synthesized)
ccgcggctccagggaacggccgcgcatcggcgccccggctgcttctgctctttctggttccgctgctgtgggccccggctgcggtccgggccggcccagatgaagaccttagccaccgga

SEQ ID NO: 314428 - DNA, 120 bp, Artificial Sequence
  ENSG00000134851_3 (sequence is synthesized)
acaaagaaccgccggcgccggcccagcagctgcagccgcagcctgtggctgtgcagggccccgagccggcccgggtcgagaaaatatttacaccagcagctccagttcataccaataaag

SEQ ID NO: 314429 - DNA, 120 bp, Artificial Sequence
  ENSG00000134851_4 (sequence is synthesized)
aagatcctgctacccaaactaatttgggatttatccatgcatttgtcgctgccatatcagttattattgtatctgaattgggtgataagacattttttatagcagccatcatggcaatgc

SEQ ID NO: 314430 - DNA, 120 bp, Artificial Sequence
  ENSG00000134851_5 (sequence is synthesized)
gctataaccgcctgaccgtgctggctggtgcaatgcttgccttgggactaatgacatgcttgtcagttttgtttggctatgccaccacagtcatccccagggtctatacatactatgttt

SEQ ID NO: 314431 - DNA, 120 bp, Artificial Sequence
  ENSG00000134851_6 (sequence is synthesized)
caactgtattatttgccatttttggcattagaatgcttcgggaaggcttaaagatgagccctgatgagggtcaagaggaactggaagaagttcaagctgaattaaagaagaaagatgaag

SEQ ID NO: 314432 - DNA, 120 bp, Artificial Sequence
  ENSG00000134851_7 (sequence is synthesized)
aatttcaacgaaccaaacttttaaatggaccgggagatgttgaaacgggtacaagcataacagtacctcagaaaaagtggttgcattttatttcacccatttttgttcaagctcttacat

SEQ ID NO: 314433 - DNA, 120 bp, Artificial Sequence
  ENSG00000134851_8 (sequence is synthesized)
gcagaatggggtgatcgctctcaactaactacaattgtattggcagctagagaggacccctatggtgtagccgtgggtggaactgtggggcactgcctgtgcacgggattggcagtaatt

SEQ ID NO: 314434 - DNA, 120 bp, Artificial Sequence
  ENSG00000134851_9 (sequence is synthesized)
ggaggaagaatgatagcacagaaaatctctgtcagaactgtgacaatcataggaggcatcgtttttttggcgtttgcattttctgcactatttataagccctgattctggtttttaacaa

SEQ ID NO: 314435 - DNA, 120 bp, Artificial Sequence
  ENSG00000134851_10 (sequence is synthesized)
gctgtttgttcatctatatttagtttaaaataggtagtattatctttctgtacatagtgtacattacaactaaaagtgatggaaaaatactgtattttgtagcactgattttgtgagttt

SEQ ID NO: 314436 - DNA, 120 bp, Artificial Sequence
  ENSG00000134851_11 (sequence is synthesized)
gacccattattatgtctgagatataatcattgattctatttgtaacaaggagttttaaaagaaacctgacttctaagtgtgggtttttcttctctccaacataattatgttaatatggtc

SEQ ID NO: 314437 - DNA, 120 bp, Artificial Sequence
  ENSG00000134851_12 (sequence is synthesized)
ctcatttttcttttggtgcagaaccgttgtgcagtggggtctaccatgcaattttctttcagcactgacccctttttaaggaatacaaattttctccttcatcacttaggtgttttaaga

SEQ ID NO: 314438 - DNA, 120 bp, Artificial Sequence
  ENSG00000134851_13 (sequence is synthesized)
tgtttaccttaaagtttttcttggggaaagaatgaattaatttctatttcttaaaacatttccctgagccagtaaacagtagtttaatcattggtcttttcaaaactaggtgtttaaaaa

SEQ ID NO: 314439 - DNA, 120 bp, Artificial Sequence
  ENSG00000134851_14 (sequence is synthesized)
aagagacatatatgatattgctgttatatcaataacatggcacaacaagaactgtctgccaggtcattcttcctcttttttttttaattgggtaggacacccaatataaaaacagtcaat

SEQ ID NO: 314440 - DNA, 120 bp, Artificial Sequence
  ENSG00000134851_15 (sequence is synthesized)
atttgacaatgtggaattaccaaattaaaagagaatactatgaatgtattcatattttttctatattgaataaacaatgtaacatagataacaatataaataaaagtggtatgaccagtg

SEQ ID NO: 314441 - DNA, 120 bp, Artificial Sequence
  ENSG00000134851_16 (sequence is synthesized)
cagtgtggcactcaaacccccactcccacccaggccacatccagcccatctccacgtaactaatcttcccgaacattgaattctgccatcttgtcagaagtcgtcggtgagttgcctcca

SEQ ID NO: 314442 - DNA, 120 bp, Artificial Sequence
  ENSG00000134851_17 (sequence is synthesized)
ctaatttcagtccagcctttttaggagagtgatgttcaggtttcttctgatctggctccagctcacctccaggctttttagccaccgctttcttgctcatatgctaaagggatatgctca

SEQ ID NO: 314443 - DNA, 120 bp, Artificial Sequence
  ENSG00000134851_18 (sequence is synthesized)
attaaagggtgttagctttgattatttaaatttctgctgctgaagtatacttggtttttctaattacctaccatctcttatagaggtattaatcctggtattgcaaatacggactttttt

SEQ ID NO: 314444 - DNA, 120 bp, Artificial Sequence
  ENSG00000134851_19 (sequence is synthesized)
agtttttttcttggtagcaagctgtagattttgtttcaaggaaagcatcttcatcttctctagtttcatcatgtatagatggagattccgatgcagaaaatatttacaccagcagctcca

SEQ ID NO: 314445 - DNA, 120 bp, Artificial Sequence
  ENSG00000134851_20 (sequence is synthesized)
gctggtgcaatgcttgccttgggactaatgacatgcttgtcaggtgagtgtgcttttccctctcatgagttcgctgaattaaagggaaagcgtgttgtgtgacatggagtcactgagtca

SEQ ID NO: 314446 - DNA, 120 bp, Artificial Sequence
  ENSG00000134851_21 (sequence is synthesized)
ttaacctagtcttatgggaatttggcttacaccttatttgtggtcttccaaccttttccttgtgtatcctttccttgtgtatcctctaaaataattttgtaccccctctcgcatagttgt

SEQ ID NO: 314447 - DNA, 120 bp, Artificial Sequence
  ENSG00000134851_22 (sequence is synthesized)
ttgtctgaaatttttcatcttcaatttaaggaattgcaaagatctaatttctgttatattgtgtaaagtaagacagttagggctgggcacagtcactcacgcctgtaatcccagcacttt

SEQ ID NO: 314448 - DNA, 120 bp, Artificial Sequence
  ENSG00000134851_23 (sequence is synthesized)
ggaaatacttgaggttattacatactagattagcttctaatgtgaaccatttttcttttaacagtgataaattattatttccgaagttaactgttcccttggtcgtgatacacactcgat

SEQ ID NO: 314449 - DNA, 120 bp, Artificial Sequence
  ENSG00000134851_24 (sequence is synthesized)
ccacagcattccttcatatgcaagactgttttacatctgataattcagctgctctctaaaattggccttctcccagttcctgctacctgcaggacccctatggtgtagccgtgggtggaa

SEQ ID NO: 314450 - DNA, 120 bp, Artificial Sequence
  ENSG00000134851_25 (sequence is synthesized)
attaacattcttagcagaatggggtgatcgctctcaactaactacaattgtattggcagctagagaggtgagtgatatttgagaggagactgtttaaaatgaaacgtaattattattact

SEQ ID NO: 314451 - DNA, 120 bp, Artificial Sequence
  ENSG00000134851_26 (sequence is synthesized)
gaaaatctctgtcagaactggtagtttctctccctggctcatcttgcatgcttgctctgatggaaaaggtcacctggaaaggaactgaggatagccttcagccagcaagaaaccaaggcc

SEQ ID NO: 314452 - DNA, 120 bp, Artificial Sequence
  ENSG00000134851_27 (sequence is synthesized)
ctcagtccaactgcccatgaggaactgaagtgtgccagcaaccactaagtgaggtggaaacagatgccacctcagttgaactttgagatgactgtggctcccaccaacaccttgattaca

SEQ ID NO: 314453 - DNA, 120 bp, Artificial Sequence
  ENSG00000134851_28 (sequence is synthesized)
aaattttggagtaagttgttacacagctatagataactaatatactatacttctgacctgatataacaaaaaagaaaccagagttccaattctgactataatttcccagccagtgtcttt

SEQ ID NO: 314454 - DNA, 120 bp, Artificial Sequence
  ENSG00000134851_29 (sequence is synthesized)
agggaagatttttttttcccctcttgaaaccccaatttcagtattttcaaagtggggatattacctacccgataaaaatatctgatgtgtaaattatatttcataattcatataaataac

SEQ ID NO: 314455 - DNA, 120 bp, Artificial Sequence
  ENSG00000134851_30 (sequence is synthesized)
ctagccagagactagtacatcactgggaataaatggtagttttgagatcagacacatctctcatccaattttctttttagaggcaggtgagactctaaaatattaaattaaaaataagta

SEQ ID NO: 314456 - DNA, 120 bp, Artificial Sequence
  ENSG00000134851_31 (sequence is synthesized)
gtaaagtataatcacatccccgttataagtgaggaaataaagtatttttgaaaaatagttttcctattaattattgagtttcatcttttattggggagaaattaaaaataatttttttta

SEQ ID NO: 314457 - DNA, 120 bp, Artificial Sequence
  ENSG00000134851_32 (sequence is synthesized)
attataagaaacatactttgtcagcagctgtctcaggaagagactcttcaatgccaagttctcgtcgtctttcagccctaacttctgcataactacaaatggaaaaaataatcaaatttt

SEQ ID NO: 314458 - DNA, 120 bp, Artificial Sequence
  ENSG00000134851_33 (sequence is synthesized)
agtgtctggtcattcgtttaaaatactgcacagctgtaactattcagtgttgttacgtgtctcatctgttcatctagactatttgctatgtgctacacaaacctaaaatatacctataat

SEQ ID NO: 314459 - DNA, 120 bp, Artificial Sequence
  ENSG00000134851_34 (sequence is synthesized)
gtcttaatttaacttgcatttttctaggtatcttaaagtttcatacactgctgtaaacgatccataaccacacaatacttaaattaagaaaaataaataaaggaagtgtatgcttatcta

SEQ ID NO: 314460 - DNA, 87 bp, Artificial Sequence
  ENSG00000134851_35 (sequence is synthesized)
agcctcctgagtggctggctccactctgcttggctctgatatttttccataaagcctatcattcatttatcatggaggtatgttaat

SEQ ID NO: 314461 - DNA, 120 bp, Artificial Sequence
  ENSG00000134851_36 (sequence is synthesized)
cataaagcctatcattcatttatcatggaggtatgttaattttgccttcttaatttctctcaaattcacctgctctttgcctacagtcatctgccccgatctggggcaacgcagtttctt

SEQ ID NO: 314462 - DNA, 120 bp, Artificial Sequence
  ENSG00000134851_37 (sequence is synthesized)
cccagggctgttgccatagcatcgcagtggatcacccttccttcagtcttgttcccctctggttctttctctccactagactttaaaaaatttttgagatagggtcttgctctgttgccc

SEQ ID NO: 314463 - DNA, 73 bp, Artificial Sequence
  ENSG00000134851_38 (sequence is synthesized)
ctttaaaaaatttttgagatagggtcttgctctgttgcccaggatggagaacaatcatagctcactgcagcca

SEQ ID NO: 314464 - DNA, 87 bp, Artificial Sequence
  ENSG00000134851_39 (sequence is synthesized)
taggatgcctggctaatttttaattaggctagtctcaaactgccaggctcaagcaatcctcttgcttcagcctcccaaagtgttggg

SEQ ID NO: 314465 - DNA, 120 bp, Artificial Sequence
  ENSG00000134851_40 (sequence is synthesized)
cacctggcctagcggatttctgaagcattaatctgttctgttactttccagctaaaaaccaacaagtgtctgaggacacagtttaaactccaagatgatagggtcctccctcacctggac

SEQ ID NO: 314466 - DNA, 120 bp, Artificial Sequence
  ENSG00000134851_41 (sequence is synthesized)
tcccacctaccctcatgacctccttttgtgaaatgctgaagggctctgcagctggttgtctggtactgctggcctttgctttctatttagcatgttccttctcccacaaaacaaaatcac

SEQ ID NO: 314467 - DNA, 120 bp, Artificial Sequence
  ENSG00000134851_42 (sequence is synthesized)
ttcactggataaatccttgattcctggcactgaggcagggtttctgttcccaggaagcagaggcatactattctgtgaaggattgactgagtttctcctaataccaagcagtatctgagg

SEQ ID NO: 314468 - DNA, 120 bp, Artificial Sequence
  ENSG00000134851_43 (sequence is synthesized)
gaacagatgtctagcttaaaatcctccctagcacttgtcatagcagtgctacgtattgcctgtgaaggaagtttaataactgctgaaaggttcgattagctttatttcatcaggatttgt

SEQ ID NO: 314469 - DNA, 120 bp, Artificial Sequence
  ENSG00000134851_44 (sequence is synthesized)
ttgactttacaaattgatttgggttatttcaacttttaggtctagtcttaagtataactggtacatattccttcaagcagccattacacctctcataaatttattatacacctgcatttt

SEQ ID NO: 314470 - DNA, 120 bp, Artificial Sequence
  ENSG00000134851_45 (sequence is synthesized)
tataactattatgctttttaattgttggccaccatttttagtgcttctgaattgttatggttctcaagcagcagttgtcaccttggttttgaattaatgctgtgacgcttgcttccagga

SEQ ID NO: 314471 - DNA, 120 bp, Artificial Sequence
  ENSG00000134851_46 (sequence is synthesized)
ttttttttttaagttgcaagggatccaccagatggaattaagagaactaagcttttatcatctgctggatataatgtgattttgtaaccattattggattggtgttggtttagacagttt

SEQ ID NO: 314472 - DNA, 120 bp, Artificial Sequence
  ENSG00000134851_47 (sequence is synthesized)
attttcagctgactatatagttaattccgggactcttataaagttttttttaaaaagagaaaaagagaagatcaaaagcactggaactcaacgagtaaataacccatggtaacagagaga

SEQ ID NO: 314473 - DNA, 120 bp, Artificial Sequence
  ENSG00000134851_48 (sequence is synthesized)
tataatgcagtgatgtcagaggtgtacaagaagtgtgaatcatttaacatgtgaagccagggtctttagtccacttggggagagcaaagagaaaatatttacaccagcagctccagttca

SEQ ID NO: 314474 - DNA, 120 bp, Artificial Sequence
  ENSG00000134851_49 (sequence is synthesized)
atggtttataattaattatttaactattttgctgcttaaattatccgatgttaggccagtgagagcctctccaaactgtgtcctgtgtctttgtggcatgctcccatttgattttgctcc

SEQ ID NO: 314475 - DNA, 120 bp, Artificial Sequence
  ENSG00000134851_50 (sequence is synthesized)
tcactttctagtacaacaagatattacaggttcatcatgcacctgctctgcccagtcctggaactggccatttctcggcggagctttgaggagctttttaggggagaatggtattagaac

SEQ ID NO: 314476 - DNA, 120 bp, Artificial Sequence
  ENSG00000134851_51 (sequence is synthesized)
ccaagatctaggtgcaaggttactgagctccttgttactgagatgtctttgcctcttgtctttttcagtggacagagctagaaaatatatgcttgtatcctgtgtgtacacatacatata

SEQ ID NO: 314477 - DNA, 120 bp, Artificial Sequence
  ENSG00000134851_52 (sequence is synthesized)
tacaaatatacatccatacatatatacacacacaataatttaaatacagatgtgcacacaaacataggtttgctgcatttctaaccatgattttaagatcttttcagttttgtaatgtag

SEQ ID NO: 314478 - DNA, 120 bp, Artificial Sequence
  ENSG00000134851_53 (sequence is synthesized)
gtagggaattatttacatacaggttatacatttacaggcagatttgtaagtgttgcacccgttttataaaaagagctggtgaattaaagagtaattgtatttttctttctttcttttttt

SEQ ID NO: 314479 - DNA, 90 bp, Artificial Sequence
  ENSG00000134851_54 (sequence is synthesized)
taaagagtaactgagatgggatctcactctgttgcccaagctgggatgcagtggcatgatcgcagctcactgcagctttgacctcctggg

SEQ ID NO: 314480 - DNA, 72 bp, Artificial Sequence
  ENSG00000134851_55 (sequence is synthesized)
tgtttggctatgccaccacagtcatccccagggtctatacatactatgtttcaactgtattatttgccattt

SEQ ID NO: 314481 - DNA, 120 bp, Artificial Sequence
  ENSG00000134852_0 (sequence is synthesized)
agctgattctatcacattgtaagatgcctttggataattctacagtcctcttaaatgaatctttagaacttggcaagtctcactagataccttcaatcatcattttgagctcaaagaatt

SEQ ID NO: 314482 - DNA, 120 bp, Artificial Sequence
  ENSG00000134852_1 (sequence is synthesized)
ctgagacttatggttggtcatatagaagagtaccttgaacctatagtttcctgaagaatcagtttaaaagatccaaggagtacaaaaggagaagtacaaatgtctactacaagacgaaaa

SEQ ID NO: 314483 - DNA, 120 bp, Artificial Sequence
  ENSG00000134852_2 (sequence is synthesized)
cgtagtatgttatgttgtttaccgtaagctgtagtaaaatgagctcgattgttgacagagatgacagtagtatttttgatgggttggtggaagaagatgacaaggacaaagcgaaaagag

SEQ ID NO: 314484 - DNA, 120 bp, Artificial Sequence
  ENSG00000134852_3 (sequence is synthesized)
tatctagaaacaaatctgaaaagaaacgtagagatcaatttaatgttctcattaaagaactgggatccatgcttcctggtaatgctagaaagatggacaaatctactgttctgcagaaaa

SEQ ID NO: 314485 - DNA, 120 bp, Artificial Sequence
  ENSG00000134852_4 (sequence is synthesized)
gcattgattttttacgaaaacataaagaaatcactgcacagtcagatgctagtgaaattcgacaggactggaaacctacattccttagtaatgaagagtttacacaattaatgttagagg

SEQ ID NO: 314486 - DNA, 120 bp, Artificial Sequence
  ENSG00000134852_5 (sequence is synthesized)
ctcttgatggtttttttttagcaatcatgacagatggaagcataatatatgtgtctgagagtgtaacttcattacttgaacatttaccatctgatcttgtggatcaaagtatatttaatt

SEQ ID NO: 314487 - DNA, 120 bp, Artificial Sequence
  ENSG00000134852_6 (sequence is synthesized)
ttatcccagaaggggaacattcagaggtttataaaatactctctactcatctgctggaaagtgattcattaaccccagaatatttaaaatcaaaaaatcagttagaattctgttgtcaca

SEQ ID NO: 314488 - DNA, 120 bp, Artificial Sequence
  ENSG00000134852_7 (sequence is synthesized)
tgctgcgaggaacaatagacccaaaggagccatctacctatgaatatgtaaaatttataggaaatttcaaatctttaaacagtgtatcctcttcagcacacaatggttttgaaggaacta

SEQ ID NO: 314489 - DNA, 120 bp, Artificial Sequence
  ENSG00000134852_8 (sequence is synthesized)
tacaacgcacacataggccatcttatgaagatagagtttgttttgtagctactgtcaggttagctacacctcagttcatcaaggaaatgtgcactgttgaagaacccaatgaagagttta

SEQ ID NO: 314490 - DNA, 120 bp, Artificial Sequence
  ENSG00000134852_9 (sequence is synthesized)
catctagacatagtttagaatggaagtttctgtttctagatcacagggcaccacccataatagggtatttgccatttgaagttctgggaacatcaggctatgattactatcatgtggatg

SEQ ID NO: 314491 - DNA, 120 bp, Artificial Sequence
  ENSG00000134852_10 (sequence is synthesized)
acctagaaaatttggcaaaatgtcatgagcacttaatgcaatatgggaaaggcaaatcatgttattataggttcctgactaaggggcaacagtggatttggcttcagactcattattata

SEQ ID NO: 314492 - DNA, 120 bp, Artificial Sequence
  ENSG00000134852_11 (sequence is synthesized)
tcacttaccatcagtggaattcaaggccagagtttattgtttgtactcacactgtagtaagttatgcagaagttagggctgaaagacgacgagaacttggcattgaagagtctcttcctg

SEQ ID NO: 314493 - DNA, 120 bp, Artificial Sequence
  ENSG00000134852_12 (sequence is synthesized)
agacagctgctgacaaaagccaagattctgggtcagataatcgtataaacacagtcagtctcaaggaagcattggaaaggtttgatcacagcccaaccccttctgcctcttctcggagtt

SEQ ID NO: 314494 - DNA, 120 bp, Artificial Sequence
  ENSG00000134852_13 (sequence is synthesized)
caagaaaatcatctcacacggccgtctcagacccttcctcaacaccaaccaagatcccgacggatacgagcactccacccaggcagcatttaccagctcatgagaagatggtgcaaagaa

SEQ ID NO: 314495 - DNA, 120 bp, Artificial Sequence
  ENSG00000134852_14 (sequence is synthesized)
ggtcatcatttagtagtcagtccataaattcccagtctgttggttcatcattaacacagccagtgatgtctcaagctacaaatttaccaattccacaaggcatgtcccagtttcagtttt

SEQ ID NO: 314496 - DNA, 120 bp, Artificial Sequence
  ENSG00000134852_15 (sequence is synthesized)
cagctcaattaggagccatgcaacatctgaaagaccaattggaacaacggacacgcatgatagaagcaaatattcatcggcaacaagaagaactaagaaaaattcaagaacaacttcaga

SEQ ID NO: 314497 - DNA, 120 bp, Artificial Sequence
  ENSG00000134852_16 (sequence is synthesized)
tggtccatggtcaggggctgcagatgtttttgcaacaatcaaatcctgggttgaattttggttccgttcaactttcttctggaaattcatctaatatccagcaacttgcacctataaata

SEQ ID NO: 314498 - DNA, 120 bp, Artificial Sequence
  ENSG00000134852_17 (sequence is synthesized)
tgcaaggccaagttgttcctactaaccagattcaaagtggaatgaatactggacacattggcacaactcagcacatgatacaacaacagactttacagagtacatcaactcagagtcaac

SEQ ID NO: 314499 - DNA, 120 bp, Artificial Sequence
  ENSG00000134852_18 (sequence is synthesized)
aaaatgtactgagtgggcacagtcagcaaacatctctacccagtcagacacagagcactcttacagccccactgtataacactatggtgatttctcagcctgcagccggaagcatggtcc

SEQ ID NO: 314500 - DNA, 120 bp, Artificial Sequence
  ENSG00000134852_19 (sequence is synthesized)
agattccatctagtatgccacaaaacagcacccagagtgctgcagtaactacattcactcaggacaggcagataagattttctcaaggtcaacaacttgtgaccaaattagtgactgctc

SEQ ID NO: 314501 - DNA, 120 bp, Artificial Sequence
  ENSG00000134852_20 (sequence is synthesized)
ctgtagcttgtggggcagtcatggtacctagtactatgcttatgggccaggtggtgactgcatatcctacttttgctacacaacagcaacagtcacagacattgtcagtaacgcagcagc

SEQ ID NO: 314502 - DNA, 120 bp, Artificial Sequence
  ENSG00000134852_21 (sequence is synthesized)
agcagcagcagagctcccaggagcagcagctcacttcagttcagcaaccatctcaggctcagctgacccagccaccgcaacaatttttacagacttctaggttgctccatgggaatccct

SEQ ID NO: 314503 - DNA, 120 bp, Artificial Sequence
  ENSG00000134852_22 (sequence is synthesized)
caactcaactcattctctctgctgcatttcctctacaacagagcaccttccctcagtcacatcaccagcaacatcagtctcagcaacagcagcaactcagccggcacaggactgacagct

SEQ ID NO: 314504 - DNA, 120 bp, Artificial Sequence
  ENSG00000134852_23 (sequence is synthesized)
tgcccgacccttccaaggttcaaccacagtagcacacgtgcttcctctcttgacatcaagggaggaaggggatggcccattaagagttactcagatgacctgaggaaaggagggaaagtt

SEQ ID NO: 314505 - DNA, 120 bp, Artificial Sequence
  ENSG00000134852_24 (sequence is synthesized)
ccagcagtttcatgagatgcagtattgagtgttctagttcctggaattagttggcagagaaaatgctgcctagtgctacagatgtacattaaataccagccagcaggaggtgatcatagg

SEQ ID NO: 314506 - DNA, 120 bp, Artificial Sequence
  ENSG00000134852_25 (sequence is synthesized)
ggcatagccagttctgacagtgttttaggtgcctggatattttttgatggaaaaagaatatattgccaaatattaagaagctcagctatgaaatgacctccagggaatcagaaaggcact

SEQ ID NO: 314507 - DNA, 120 bp, Artificial Sequence
  ENSG00000134852_26 (sequence is synthesized)
aatgatgttagtaacttttagtggttctgtgcctcttatcaagtgttacagaggacataccactgccatgtcaggggtttgcttacagtgatgccatgaagacagtccagtagacttggt

SEQ ID NO: 314508 - DNA, 120 bp, Artificial Sequence
  ENSG00000134852_27 (sequence is synthesized)
agcgaccccctcccccaacccctctcccttttcagataatgatggaacagtaattactttcagaatgttgtgtgggttcaaattctctatgtacagatgatgtaaaaatatgtatatgtc

SEQ ID NO: 314509 - DNA, 120 bp, Artificial Sequence
  ENSG00000134852_28 (sequence is synthesized)
tagataaaaggagagaaagcaaaacattttgtatgctgcatgaaagcgttatctcttccttacaggtgtgagcacctttcctgaaattctgacaccatgtgcaaactgatccatcctgtt

SEQ ID NO: 314510 - DNA, 120 bp, Artificial Sequence
  ENSG00000134852_29 (sequence is synthesized)
tttccttttgtttacaacacagtagtgttctgttcacttttccggggcacaagtttttttgttcatactttggctgtgatgtcacagtttgttcagtgaggtatgatgtgctgctgggaa

SEQ ID NO: 314511 - DNA, 120 bp, Artificial Sequence
  ENSG00000134852_30 (sequence is synthesized)
tggattttttttttcaggttaaattattgatacaacaggattttcaagttattcagaaatatccctcatttcattatttttcaattatgtttgaaaataggatttgcactgctttatttt

SEQ ID NO: 314512 - DNA, 120 bp, Artificial Sequence
  ENSG00000134852_31 (sequence is synthesized)
aggtggctgggagttttgattgcatattttgttatagttcatagttggaaatatttgcgtaaatggttttcaacaagcctgaaagtaatttcaagaatgtttcagttatagaggtaaaat

SEQ ID NO: 314513 - DNA, 120 bp, Artificial Sequence
  ENSG00000134852_32 (sequence is synthesized)
ttgcacacaaaacatcttaggcactttttaacattctcaatcatgggaattttaacttttgggatttgttgaaatcttttttattatccttcacaatttcaatgcttcttttagtcagaa

SEQ ID NO: 314514 - DNA, 120 bp, Artificial Sequence
  ENSG00000134852_33 (sequence is synthesized)
atgattcagggttatttgaggggaaaaaaccccatagtgccttgattttaattcaggtgataactcaccatcttgaagtcattgtccggtttccgtagcagttttgaaaccttagtacct

SEQ ID NO: 314515 - DNA, 120 bp, Artificial Sequence
  ENSG00000134852_34 (sequence is synthesized)
ttttaacagcatgtgggtgtcagtgtcattattagtctcctaataagttcctctgaagactgctatcagtctcttggactggaggtacaaataatttagaaataaaagatgataacctaa

SEQ ID NO: 314516 - DNA, 120 bp, Artificial Sequence
  ENSG00000134852_35 (sequence is synthesized)
cactatcatagttattaatgtgatcctaaaattgtttcctaaatcagcatttttctttagtcatttaagaatttaccagaaatatttgctcaatatgatcttgatattcctacaaagaaa

SEQ ID NO: 314517 - DNA, 120 bp, Artificial Sequence
  ENSG00000134852_36 (sequence is synthesized)
aaagaaggggtagggatttggctatgccttcactacaacattagaatattgtaactcacatgccttctaaacgtgaactaagatttcctttggcaatatcatattctaaaagtaataaat

SEQ ID NO: 314518 - DNA, 120 bp, Artificial Sequence
  ENSG00000134852_37 (sequence is synthesized)
tccaatacaagttacatacatttaaaaaacattttacagattttatggtactaatgaaatttacagtgatagaacaaaagaggattagtagaaaatacattattagaatataaaaaatgt

SEQ ID NO: 314519 - DNA, 120 bp, Artificial Sequence
  ENSG00000134852_38 (sequence is synthesized)
tattactgaggaaagggaggagaggacaagtgtaataaatcaaaattgacctcaaaagaaaatgtgtaacagagttgaggttgttaaaacagaaaaggttctgaataatgaagattaacc

SEQ ID NO: 314520 - DNA, 120 bp, Artificial Sequence
  ENSG00000134852_39 (sequence is synthesized)
taatgcagaattgctaggtaaagaggtcaggggaatgctaagccagttcttaagacttctctgtcctctgctttgctgttatccttaaggcatatactttgtctttctgcagaaaattct

SEQ ID NO: 314521 - DNA, 120 bp, Artificial Sequence
  ENSG00000134852_40 (sequence is synthesized)
acctggctacaattactttgaacattaatgttgaaaaagaaaacaaccaaagaaaattggtacttacccttctacaaaagaagtgtgactagatatcaatcagtaattaacatatcaagg

SEQ ID NO: 314522 - DNA, 120 bp, Artificial Sequence
  ENSG00000134852_41 (sequence is synthesized)
agctcttctagctaaatgaccatccagtagagatttcccacattcccatgaatatcaagaatagttgtcagaatatgtatgtacctgagcatatgtacacagacaagggggatgttgtgg

SEQ ID NO: 314523 - DNA, 120 bp, Artificial Sequence
  ENSG00000134852_42 (sequence is synthesized)
ctagtgatacggatttagctaacaaaagatatgaagaactattatattgaggcctgtcctctacataccacacttaaaagatggtgaactgtgagtactacttaggttgacagcaacaaa

SEQ ID NO: 314524 - DNA, 120 bp, Artificial Sequence
  ENSG00000134852_43 (sequence is synthesized)
gcataagacaagccccaggtaaacgtctaaactgtttactcacattgtcctactccagccccttcaattatttcccatctccacaaatagtcgggggaaaaaattaaaattttcctttat

SEQ ID NO: 314525 - DNA, 120 bp, Artificial Sequence
  ENSG00000134852_44 (sequence is synthesized)
gattcttactgttcttcgcagctcatcttttcctgcttagaattaaccattgctaatttaaaggagcagctagctgcttttctgtcagtctgaagcgtagtagtggaagaggtagtaagc

SEQ ID NO: 314526 - DNA, 120 bp, Artificial Sequence
  ENSG00000134852_45 (sequence is synthesized)
accagctgcctctttgctgctttgttttcctcctgattctcttaaatttgggttgcaaagctatcccgccccccaccctgccccatgaaacttgagcattcaaatgaagattcagcagtg

SEQ ID NO: 314527 - DNA, 120 bp, Artificial Sequence
  ENSG00000134852_46 (sequence is synthesized)
tctgttcttcatttctatagccaaagctgttagttaaaatcccaaatctatagcatttaaagataccaaatagaaacaccttccagctttaaaaaaaaaaaaaaaaaagtcttccctctg

SEQ ID NO: 314528 - DNA, 120 bp, Artificial Sequence
  ENSG00000134852_47 (sequence is synthesized)
ctttattctcactttcttaaaaacacttattctgggtggtactttttaggtaagaaactactgagtttcaggaaaaatgctagctactctgcagttaccgtgctttggacttgcagttat

SEQ ID NO: 314529 - DNA, 120 bp, Artificial Sequence
  ENSG00000134852_48 (sequence is synthesized)
catagttttgggagagtcagtattgtttaacaaatgcaagtgagaactagaagggttaataaagttgctccttagagtggtgtcaaaccagaaccgagacacttaaaaagtacttcattt

SEQ ID NO: 314530 - DNA, 120 bp, Artificial Sequence
  ENSG00000134852_49 (sequence is synthesized)
tttgaatggaaaatattggagaaaagtatgggagatgcaggtagcatgtgagtaaatactacggtctagccttcgagcatcccaaattccgggggtaacttgacagtgctgtgctctcct

SEQ ID NO: 314531 - DNA, 120 bp, Artificial Sequence
  ENSG00000134852_50 (sequence is synthesized)
ttgtcatttatatctggcttaggaatggaatagtaataacaagatgccagtgatttggaatagtttgttatagaacattcagtgcaaaatagtgaaaatgtttggtcttcagaagtgctg

SEQ ID NO: 314532 - DNA, 120 bp, Artificial Sequence
  ENSG00000134852_51 (sequence is synthesized)
tagttgttggtcattgccttaaagcagtctgcttgacgctaggagcactgaagcagtccagctccatcaagagcactgttgaagggagaagaacccttgttcaggaagccttagaaaggg

SEQ ID NO: 314533 - DNA, 120 bp, Artificial Sequence
  ENSG00000134852_52 (sequence is synthesized)
atccttaaaatagtactctacgcagacaagtgaaaattcttttaaactggatattactcaacatgttttcagatgtttccactacattgaggcaaactttttaaaagtggaatgcaaata

SEQ ID NO: 314534 - DNA, 120 bp, Artificial Sequence
  ENSG00000134852_53 (sequence is synthesized)
gcattttactttagtatttctgcttttttctttctgtttctttggtaattgaaagtttgttgatgaatatttgtgtaaaacgcattcaagtctataacctttccaattacctgtggccct

SEQ ID NO: 314535 - DNA, 120 bp, Artificial Sequence
  ENSG00000134852_54 (sequence is synthesized)
tagtcccacaggagtccctgttggaagggggtaaacactggatattaatgttgctgagtgagtctttctagccaggacaagctgattggaatttttgaatggtagagaagaaacagcaca

SEQ ID NO: 314536 - DNA, 120 bp, Artificial Sequence
  ENSG00000134852_55 (sequence is synthesized)
aaggcacttgccattttaagtgtttggagaaagagaaccttttaagtttggattgggtgagctttcttctaaaaggagcttctgaagtaattgcaaaggaatagaatcgactatttttat

SEQ ID NO: 314537 - DNA, 120 bp, Artificial Sequence
  ENSG00000134852_56 (sequence is synthesized)
agtatatttaatatatttgtatataactataataggaaccctctacatgcctcccacttttctaatttacttccccttttgccatagcactagtatagcctcatccgcatgggtaatgtg

SEQ ID NO: 314538 - DNA, 120 bp, Artificial Sequence
  ENSG00000134852_57 (sequence is synthesized)
cctattgtcagcctaccaaaagatagtgctgctgctttatgagacaggtgagaagacccaactctcatgcctggggatcctttacggaaggaatagcacacacttttaaaacaacatacc

SEQ ID NO: 314539 - DNA, 120 bp, Artificial Sequence
  ENSG00000134852_58 (sequence is synthesized)
acagtctaaaagcatcattttgaaatgtaacaagcactttattgcaattactcattttgataaagtttattcttaggcgttaaccatttctaaaggatccccaaatcatcacttacttag

SEQ ID NO: 314540 - DNA, 120 bp, Artificial Sequence
  ENSG00000134852_59 (sequence is synthesized)
gtgaaattatataaaatgacacatttctgagaaatgtttaggtccagtgaaccgtagttggtttatgggagtgatttcaagatagccaaatgaactttgatttttgttttgaatgtggtg

SEQ ID NO: 314541 - DNA, 120 bp, Artificial Sequence
  ENSG00000134852_60 (sequence is synthesized)
gagtcaagagattgtagatgcctagtttgatttaaacactattgtaaacctatcttgcctattgtgtggacaccaaaagagaccaatgagcctgtttatttttcagaggtctaggaaaat

SEQ ID NO: 314542 - DNA, 120 bp, Artificial Sequence
  ENSG00000134852_61 (sequence is synthesized)
tgcatccgtgtgagtagatgtacagaactaatctaaaagtgattgctagtaacattttagaatataataatttcaagaattattctgagtgttttaaatgtgccctgaaatgttggcatg

SEQ ID NO: 314543 - DNA, 120 bp, Artificial Sequence
  ENSG00000134852_62 (sequence is synthesized)
tcatttcagcatttccatttgaattgctcttgtaatatttttgcacaaaaaggactgagaaaaagaatactttggttaaaggaaaaaaatagtataatttggtctttaattttaatgtct

SEQ ID NO: 314544 - DNA, 120 bp, Artificial Sequence
  ENSG00000134852_63 (sequence is synthesized)
cctgtggaaacactggggatgaattttgttggcacagttattcaggatatttaaaacagtgttgaacagttcacaagaaattaagcaaacttggattttaaaaattaaaatactttcttt

SEQ ID NO: 314545 - DNA, 120 bp, Artificial Sequence
  ENSG00000134852_64 (sequence is synthesized)
ccatgtgactgttttgcatagttttttccccctatgtcataacactacattccttgtttttcttaaataaaatactctgcaggttttgttgtgagtgtttataacagtattttgtaagct

SEQ ID NO: 314546 - DNA, 120 bp, Artificial Sequence
  ENSG00000134852_65 (sequence is synthesized)
gcctgggtttcctcagggaaacattatttagtggaataggatatagtttatggagagacaactaagtgaaattccatcaccaccaccagcaaacactgaggtgctgcattaagtgacaat

SEQ ID NO: 314547 - DNA, 120 bp, Artificial Sequence
  ENSG00000134852_66 (sequence is synthesized)
caaactagtaagtatttatgaaagaatttagaaaggggttcaaagaagcaattgcttttaaagcagttctctggggttcttgaataaaaatggctaaatgtatttatttatattttaaaa

SEQ ID NO: 314548 - DNA, 120 bp, Artificial Sequence
  ENSG00000134852_67 (sequence is synthesized)
tacctgtgtgttctgttttctcatcaaagtgatttcggtgtcatgtatttaatgtgtggtttgttttgttttgcaccatattcttcttagggaactggctctgatttggggtgcagtcac

SEQ ID NO: 314549 - DNA, 120 bp, Artificial Sequence
  ENSG00000134852_68 (sequence is synthesized)
caactctcatgataatctttacggacagtctgaatctactttacttcaggacggcagtggaggggccaactccagatgcccctgcacttccctcctcaagtcatctaagaaagaatttta

SEQ ID NO: 314550 - DNA, 120 bp, Artificial Sequence
  ENSG00000134852_69 (sequence is synthesized)
gaaataactcctttcaaatctgattcatacagttccaacctttttctagtttcacttgctgccttctttgttttatgggcactttttgtgtgattacttccccaacacagtcaaaggcca

SEQ ID NO: 314551 - DNA, 120 bp, Artificial Sequence
  ENSG00000134852_70 (sequence is synthesized)
gtatgacagaaccaatggcacatgatgcctctattttgcccatttggggaaatgttagtaaaagaaatagcatcttttaatggctgtcattatcatatccatattaaaatccatttaaag

SEQ ID NO: 314552 - DNA, 120 bp, Artificial Sequence
  ENSG00000134852_71 (sequence is synthesized)
ttcttaaatttggcggaataatgtatacaggctgtaaacttctacaaaaaatgtttgctgtctttaatatggtgtcaagttacttggtcctttgaaaacaaaacaaaacttccatacaca

SEQ ID NO: 314553 - DNA, 120 bp, Artificial Sequence
  ENSG00000134852_72 (sequence is synthesized)
gcactgcccagtaaagcagtgttggaatattggaaacctagacatttgaggatccttcttgctcacaagcattggaacagaatcctccactttaggactcagagaagctatggagtccca

SEQ ID NO: 314554 - DNA, 120 bp, Artificial Sequence
  ENSG00000134852_73 (sequence is synthesized)
caggctaggtatagcacacaacttagagaacggtagttaaagcacgtcaaccacaattgaatttaatgatctaaaaaatatttcttaactctgagggttaaactgaagatacgttttcaa

SEQ ID NO: 314555 - DNA, 120 bp, Artificial Sequence
  ENSG00000134852_74 (sequence is synthesized)
ataaaagcttttaaatttcttaggaaacaaactgtgacatcgcttttaaaaatgacattcaaatgtttataatgtgtgtttttgagttggcttggactagtgcaagttcactgctggcaa

SEQ ID NO: 314556 - DNA, 120 bp, Artificial Sequence
  ENSG00000134852_75 (sequence is synthesized)
tggttatgccagtagttaagttaaaataagttgttaccttcagattgatgtcttgtataaccagacaatcatcttcaagcaaaaaaattggccaggaaatgtctttttaaaaaaaaaaaa

SEQ ID NO: 314557 - DNA, 120 bp, Artificial Sequence
  ENSG00000134852_76 (sequence is synthesized)
aaaaaaaaagatgtgtcagccagaacagttaccattcagaccatactggaatgattttgaaatctttactatggtttaagttggggaaggcctcagtatggcattttcatattcactcta

SEQ ID NO: 314558 - DNA, 120 bp, Artificial Sequence
  ENSG00000134852_77 (sequence is synthesized)
tgtaaagattgaagcccaaagatgagttaaattcagtgctgtattgaaaccagtcagtgcaaaaaaaaaaaaaaagttttacctttgtaaatttttcattgttaacatcagttggtagtt

SEQ ID NO: 314559 - DNA, 120 bp, Artificial Sequence
  ENSG00000134852_78 (sequence is synthesized)
gttaaaacatgcaccaaattctttataatgttctgtgtggttctcaatgtgatattcttgacattgctgtccttactgcttggttcttggttttaaattaaaaagtagatgtagctcatc

SEQ ID NO: 314560 - DNA, 120 bp, Artificial Sequence
  ENSG00000134852_79 (sequence is synthesized)
atttttacttccaaaacggtggagctaaaaacggctaattgatcttgagataagaataccctttactaaggcaaagatttaattgaaatccaaaatgatttatagaaacgaaaggcattt

SEQ ID NO: 314561 - DNA, 120 bp, Artificial Sequence
  ENSG00000134852_80 (sequence is synthesized)
tccatttgttgtcttctgccgaaattctgaattgcatacacacatgaaggataatgaatggtttcaacggtgctatattaggttctctgattttcatgacctatgtatgtttggaaatac

SEQ ID NO: 314562 - DNA, 120 bp, Artificial Sequence
  ENSG00000134852_81 (sequence is synthesized)
aatattgtataaaatgtggatcgttttgttaccgatttaatattgccattttaatttggtgtaacaattggttacacttgtttttcaaagctatcctttgaggagaaagtcaaaatgtgt

SEQ ID NO: 314563 - DNA, 120 bp, Artificial Sequence
  ENSG00000134852_82 (sequence is synthesized)
tgttagcctacctccactcaggcctcttgctgtgtaatcattattccaggttatgatgtgcatagcttttaaaactgcgtgtactattattctgctctttcccatactcttgtcatgtat

SEQ ID NO: 314564 - DNA, 120 bp, Artificial Sequence
  ENSG00000134852_83 (sequence is synthesized)
tcagaacctaaacttatagcaaaagagccaagcagtagcagtttttgtaaatgtaaaaataattagatccagactttgtttccttcaattttaaaaataaaaaatacctcagtgctatgt

SEQ ID NO: 314565 - DNA, 120 bp, Artificial Sequence
  ENSG00000134852_84 (sequence is synthesized)
ttttcagttatcacctgcatttctcaaaaaataacacctgcttcatgtggcacataacttgtaagaatcacattttggattttaaagaaagactattaaatattttaagatcactatcaa

SEQ ID NO: 314566 - DNA, 120 bp, Artificial Sequence
  ENSG00000134852_85 (sequence is synthesized)
gtctgactccagcgaccgcgcgcgggttcgagggttggcggcgaggcgctcggtttctcttcttccgtccacccgcgcttcccgttccccgtcaccgccgctggcgtttgtagatttctt

SEQ ID NO: 314567 - DNA, 120 bp, Artificial Sequence
  ENSG00000134852_86 (sequence is synthesized)
tccgccagtgaagctgggttttctggagttggctctggcgctctggcccctggagtgtaatttcctacacgcagcgccgcagagtttatattctttgaaagtgtttgtagctttgtagag

SEQ ID NO: 314568 - DNA, 120 bp, Artificial Sequence
  ENSG00000134852_87 (sequence is synthesized)
gtcctcttgttgatggtaggtgagcctaattctgcaagataaaagcctagtctctgacctggcagatgaaagatcaaatcagattgtggtttcctgctattagaatgccgtgctattaga

SEQ ID NO: 314569 - DNA, 120 bp, Artificial Sequence
  ENSG00000134852_88 (sequence is synthesized)
ctttaaggctttttagccttctttaaaaaataaaaaaatttttacagtggaagaaaagcacaagaagtaaacttttacagtcgttgatttgactataacgctgatccccccaaatcaaag

SEQ ID NO: 314570 - DNA, 120 bp, Artificial Sequence
  ENSG00000134852_89 (sequence is synthesized)
caaaaggcagttattggaggaattactcaacaaaaataaagaagtaaactaaaaaagatgaaggcataggatacaagtaacagggaatatgacctaactagagacccagggaatcaccag

SEQ ID NO: 314571 - DNA, 120 bp, Artificial Sequence
  ENSG00000134852_90 (sequence is synthesized)
gctgacgacgcatgcgccgggagggggcgcaatcacggactcggcttgcggctgccggtttaaaaaaggaaaccccggagagcgagagcgcgaaggaaatctggccgccgccgccgcgag

SEQ ID NO: 314572 - DNA, 120 bp, Artificial Sequence
  ENSG00000134852_91 (sequence is synthesized)
gcaatcacggactcggcttgcggctgccggtttaaaaaaggaaaccccggagagcgagagcgcgaaggaaatctggccgccgccgccgcgagcgctcccgaattctgagacttatggttg

SEQ ID NO: 314573 - DNA, 120 bp, Artificial Sequence
  ENSG00000134852_92 (sequence is synthesized)
aggagcggcgaatttttgggggggtgggtggggggcgccactcacagccccaggtgctgctggaggtgggagccgcggcgcctcctggacacaggcggggtagtggttccgagtcaccgc

SEQ ID NO: 314574 - DNA, 120 bp, Artificial Sequence
  ENSG00000134852_93 (sequence is synthesized)
tgtaaaccgattgattagaaaacaataatttgatttcttaatcaaattttttaatgtgattttaatgagatgctcactgcagccaatgttcttaaatttgaaataaaaacactgaatgta

SEQ ID NO: 314575 - DNA, 120 bp, Artificial Sequence
  ENSG00000134853_0 (sequence is synthesized)
attactgttggagctacagggagagaaacagaggaggagactgcaagagatcattggaggccgtgggcacgctctttactccatgtgtgggacattcattgcggaataacatcggaggag

SEQ ID NO: 314576 - DNA, 120 bp, Artificial Sequence
  ENSG00000134853_1 (sequence is synthesized)
aagtttcccagagctatggggacttcccatccggcgttcctggtcttaggctgtcttctcacagggctgagcctaatcctctgccagctttcattaccctctatccttccaaatgaaaat

SEQ ID NO: 314577 - DNA, 120 bp, Artificial Sequence
  ENSG00000134853_2 (sequence is synthesized)
gaaaaggttgtgcagctgaattcatccttttctctgagatgctttggggagagtgaagtgagctggcagtaccccatgtctgaagaagagagctccgatgtggaaatcagaaatgaagaa

SEQ ID NO: 314578 - DNA, 120 bp, Artificial Sequence
  ENSG00000134853_3 (sequence is synthesized)
aacaacagcggcctttttgtgacggtcttggaagtgagcagtgcctcggcggcccacacagggttgtacacttgctattacaaccacactcagacagaagagaatgagcttgaaggcagg

SEQ ID NO: 314579 - DNA, 120 bp, Artificial Sequence
  ENSG00000134853_4 (sequence is synthesized)
cacatttacatctatgtgccagacccagatgtagcctttgtacctctaggaatgacggattatttagtcatcgtggaggatgatgattctgccattataccttgtcgcacaactgatccc

SEQ ID NO: 314580 - DNA, 120 bp, Artificial Sequence
  ENSG00000134853_5 (sequence is synthesized)
gagactcctgtaaccttacacaacagtgagggggtggtacctgcctcctacgacagcagacagggctttaatgggaccttcactgtagggccctatatctgtgaggccaccgtcaaagga

SEQ ID NO: 314581 - DNA, 120 bp, Artificial Sequence
  ENSG00000134853_6 (sequence is synthesized)
aagaagttccagaccatcccatttaatgtttatgctttaaaagcaacatcagagctggatctagaaatggaagctcttaaaaccgtgtataagtcaggggaaacgattgtggtcacctgt

SEQ ID NO: 314582 - DNA, 120 bp, Artificial Sequence
  ENSG00000134853_7 (sequence is synthesized)
gctgtttttaacaatgaggtggttgaccttcaatggacttaccctggagaagtgaaaggcaaaggcatcacaatgctggaagaaatcaaagtcccatccatcaaattggtgtacactttg

SEQ ID NO: 314583 - DNA, 120 bp, Artificial Sequence
  ENSG00000134853_8 (sequence is synthesized)
acggtccccgaggccacggtgaaagacagtggagattacgaatgtgctgcccgccaggctaccagggaggtcaaagaaatgaagaaagtcactatttctgtccatgagaaaggtttcatt

SEQ ID NO: 314584 - DNA, 120 bp, Artificial Sequence
  ENSG00000134853_9 (sequence is synthesized)
gaaatcaaacccaccttcagccagttggaagctgtcaacctgcatgaagtcaaacattttgttgtagaggtgcgggcctacccacctcccaggatatcctggctgaaaaacaatctgact

SEQ ID NO: 314585 - DNA, 120 bp, Artificial Sequence
  ENSG00000134853_10 (sequence is synthesized)
ctgattgaaaatctcactgagatcaccactgatgtggaaaagattcaggaaataaggtatcgaagcaaattaaagctgatccgtgctaaggaagaagacagtggccattatactattgta

SEQ ID NO: 314586 - DNA, 120 bp, Artificial Sequence
  ENSG00000134853_11 (sequence is synthesized)
gctcaaaatgaagatgctgtgaagagctatacttttgaactgttaactcaagttccttcatccattctggacttggtcgatgatcaccatggctcaactgggggacagacggtgaggtgc

SEQ ID NO: 314587 - DNA, 120 bp, Artificial Sequence
  ENSG00000134853_12 (sequence is synthesized)
acagctgaaggcacgccgcttcctgatattgagtggatgatatgcaaagatattaagaaatgtaataatgaaacttcctggactattttggccaacaatgtctcaaacatcatcacggag

SEQ ID NO: 314588 - DNA, 120 bp, Artificial Sequence
  ENSG00000134853_13 (sequence is synthesized)
atccactcccgagacaggagtaccgtggagggccgtgtgactttcgccaaagtggaggagaccatcgccgtgcgatgcctggctaagaatctccttggagctgagaaccgagagctgaag

SEQ ID NO: 314589 - DNA, 120 bp, Artificial Sequence
  ENSG00000134853_14 (sequence is synthesized)
ctggtggctcccaccctgcgttctgaactcacggtggctgctgcagtcctggtgctgttggtgattgtgatcatctcacttattgtcctggttgtcatttggaaacagaaaccgaggtat

SEQ ID NO: 314590 - DNA, 120 bp, Artificial Sequence
  ENSG00000134853_15 (sequence is synthesized)
gaaattcgctggagggtcattgaatcaatcagcccagatggacatgaatatatttatgtggacccgatgcagctgccttatgactcaagatgggagtttccaagagatggactagtgctt

SEQ ID NO: 314591 - DNA, 120 bp, Artificial Sequence
  ENSG00000134853_16 (sequence is synthesized)
ggtcgggtcttggggtctggagcgtttgggaaggtggttgaaggaacagcctatggattaagccggtcccaacctgtcatgaaagttgcagtgaagatgctaaaacccacggccagatcc

SEQ ID NO: 314592 - DNA, 120 bp, Artificial Sequence
  ENSG00000134853_17 (sequence is synthesized)
agtgaaaaacaagctctcatgtctgaactgaagataatgactcacctggggccacatttgaacattgtaaacttgctgggagcctgcaccaagtcaggccccatttacatcatcacagag

SEQ ID NO: 314593 - DNA, 120 bp, Artificial Sequence
  ENSG00000134853_18 (sequence is synthesized)
tattgcttctatggagatttggtcaactatttgcataagaatagggatagcttcctgagccaccacccagagaagccaaagaaagagctggatatctttggattgaaccctgctgatgaa

SEQ ID NO: 314594 - DNA, 120 bp, Artificial Sequence
  ENSG00000134853_19 (sequence is synthesized)
agcacacggagctatgttattttatcttttgaaaacaatggtgactacatggacatgaagcaggctgatactacacagtatgtccccatgctagaaaggaaagaggtttctaaatattcc

SEQ ID NO: 314595 - DNA, 120 bp, Artificial Sequence
  ENSG00000134853_20 (sequence is synthesized)
gacatccagagatcactctatgatcgtccagcctcatataagaagaaatctatgttagactcagaagtcaaaaacctcctttcagatgataactcagaaggccttactttattggatttg

SEQ ID NO: 314596 - DNA, 120 bp, Artificial Sequence
  ENSG00000134853_21 (sequence is synthesized)
ttgagcttcacctatcaagttgcccgaggaatggagtttttggcttcaaaaaattgtgtccaccgtgatctggctgctcgcaacgtcctcctggcacaaggaaaaattgtgaagatctgt

SEQ ID NO: 314597 - DNA, 120 bp, Artificial Sequence
  ENSG00000134853_22 (sequence is synthesized)
gactttggcctggccagagacatcatgcatgattcgaactatgtgtcgaaaggcagtacctttctgcccgtgaagtggatggctcctgagagcatctttgacaacctctacaccacactg

SEQ ID NO: 314598 - DNA, 120 bp, Artificial Sequence
  ENSG00000134853_23 (sequence is synthesized)
agtgatgtctggtcttatggcattctgctctgggagatcttttcccttggtggcaccccttaccccggcatgatggtggattctactttctacaataagatcaagagtgggtaccggatg

SEQ ID NO: 314599 - DNA, 120 bp, Artificial Sequence
  ENSG00000134853_24 (sequence is synthesized)
gccaagcctgaccacgctaccagtgaagtctacgagatcatggtgaaatgctggaacagtgagccggagaagagaccctccttttaccacctgagtgagattgtggagaatctgctgcct

SEQ ID NO: 314600 - DNA, 120 bp, Artificial Sequence
  ENSG00000134853_25 (sequence is synthesized)
ggacaatataaaaagagttatgaaaaaattcacctggacttcctgaagagtgaccatcctgctgtggcacgcatgcgtgtggactcagacaatgcatacattggtgtcacctacaaaaac

SEQ ID NO: 314601 - DNA, 120 bp, Artificial Sequence
  ENSG00000134853_26 (sequence is synthesized)
gactgggagggtggtctggatgagcagagactgagcgctgacagtggctacatcattcctctgcctgacattgaccctgtccctgaggaggaggacctgggcaagaggaacagacacagc

SEQ ID NO: 314602 - DNA, 120 bp, Artificial Sequence
  ENSG00000134853_27 (sequence is synthesized)
tcgcagacctctgaagagagtgccattgagacgggttccagcagttccaccttcatcaagagagaggacgagaccattgaagacatcgacatgatggatgacatcggcatagactcttca

SEQ ID NO: 314603 - DNA, 120 bp, Artificial Sequence
  ENSG00000134853_28 (sequence is synthesized)
gacctggtggaagacagcttcctgtaactggcggattcgaggggttccttccacttctggggccacctctggatcccgttcagaaaaccactttattgcaatgcagaggttgagaggagg

SEQ ID NO: 314604 - DNA, 120 bp, Artificial Sequence
  ENSG00000134853_29 (sequence is synthesized)
acttggttgatgtttaaagagaagttcccagccaagggcctcggggagcgttctaaatatgaatgaatgggatattttgaaatgaactttgtcagtgttgcctcttgcaatgcctcagta

SEQ ID NO: 314605 - DNA, 120 bp, Artificial Sequence
  ENSG00000134853_30 (sequence is synthesized)
gcatctcagtggtgtgtgaagtttggagatagatggataagggaataataggccacagaaggtgaactttgtgcttcaaggacattggtgagagtccaacagacacaatttatactgcga

SEQ ID NO: 314606 - DNA, 120 bp, Artificial Sequence
  ENSG00000134853_31 (sequence is synthesized)
cagaacttcagcattgtaattatgtaaataactctaaccaaggctgtgtttagattgtattaactatcttctttggacttctgaagagaccactcaatccatccatgtacttccctcttg

SEQ ID NO: 314607 - DNA, 120 bp, Artificial Sequence
  ENSG00000134853_32 (sequence is synthesized)
aaacctgatgtcagctgctgttgaactttttaaagaagtgcatgaaaaaccatttttgaaccttaaaaggtactggtactatagcattttgctatcttttttagtgttaaagagataaag

SEQ ID NO: 314608 - DNA, 120 bp, Artificial Sequence
  ENSG00000134853_33 (sequence is synthesized)
aataataattaaccaaccttgtttaatagatttgggtcatttagaagcctgacaactcattttcatattgtaatctatgtttataatactactactgttatcagtaatgctaaatgtgta

SEQ ID NO: 314609 - DNA, 120 bp, Artificial Sequence
  ENSG00000134853_34 (sequence is synthesized)
ataatgtaacatgatttccctccagagaaagcacaatttaaaacaatccttactaagtaggtgatgagtttgacagtttttgacatttatattaaataacatgtttctctataaagtatg

SEQ ID NO: 314610 - DNA, 120 bp, Artificial Sequence
  ENSG00000134853_35 (sequence is synthesized)
gtaatagctttagtgaattaaatttagttgagcatagagaacaaagtaaaagtagtgttgtccaggaagtcagaatttttaactgtactgaataggttccccaatccatcgtattaaaaa

SEQ ID NO: 314611 - DNA, 120 bp, Artificial Sequence
  ENSG00000134853_36 (sequence is synthesized)
acaattaactgccctctgaaataatgggattagaaacaaacaaaactcttaagtcctaaaagttctcaatgtagaggcataaacctgtgctgaacataacttctcatgtatattacccaa

SEQ ID NO: 314612 - DNA, 120 bp, Artificial Sequence
  ENSG00000134853_37 (sequence is synthesized)
tggaaaatataatgatcagcaaaaagactggatttgcagaagttttttttttttttttcttcatgcctgatgaaagctttggcgaccccaatatatgtattttttgaatctatgaacctg

SEQ ID NO: 314613 - DNA, 120 bp, Artificial Sequence
  ENSG00000134853_38 (sequence is synthesized)
aaaagggtcagaaggatgcccagacatcagcctccttctttcaccccttaccccaaagagaaagagtttgaaactcgagaccataaagatattctttagtggaggctggatgtgcattag

SEQ ID NO: 314614 - DNA, 120 bp, Artificial Sequence
  ENSG00000134853_39 (sequence is synthesized)
cctggatcctcagttctcaaatgtgtgtggcagccaggatgactagatcctgggtttccatccttgagattctgaagtatgaagtctgagggaaaccagagtctgtatttttctaaactc

SEQ ID NO: 314615 - DNA, 120 bp, Artificial Sequence
  ENSG00000134853_40 (sequence is synthesized)
cctggctgttctgatcggccagttttcggaaacactgacttaggtttcaggaagttgccatgggaaacaaataatttgaactttggaacagggttggcattcaaccacgcaggaagccta

SEQ ID NO: 314616 - DNA, 120 bp, Artificial Sequence
  ENSG00000134853_41 (sequence is synthesized)
ctatttaaatccttggcttcaggttagtgacatttaatgccatctagctagcaattgcgaccttaatttaactttccagtcttagctgaggctgagaaagctaaagtttggttttgacag

SEQ ID NO: 314617 - DNA, 120 bp, Artificial Sequence
  ENSG00000134853_42 (sequence is synthesized)
gttttccaaaagtaaagatgctacttcccactgtatgggggagattgaactttccccgtctcccgtcttctgcctcccactccataccccgccaaggaaaggcatgtacaaaaattatgc

SEQ ID NO: 314618 - DNA, 120 bp, Artificial Sequence
  ENSG00000134853_43 (sequence is synthesized)
aattcagtgttccaagtctctgtgtaaccagctcagtgttttggtggaaaaaacattttaagttttactgataatttgaggttagatgggaggatgaattgtcacatctatccacactgt

SEQ ID NO: 314619 - DNA, 120 bp, Artificial Sequence
  ENSG00000134853_44 (sequence is synthesized)
caaacaggttggtgtgggttcattggcattctttgcaatactgcttaattgctgataccatatgaatgaaacatgggctgtgattactgcaatcactgtgctatcggcagatgatgcttt

SEQ ID NO: 314620 - DNA, 120 bp, Artificial Sequence
  ENSG00000134853_45 (sequence is synthesized)
ggaagatgcagaagcaataataaagtacttgactacctactggtgtaatctcaatgcaagccccaactttcttatccaactttttcatagtaagtgcgaagactgagccagattggccaa

SEQ ID NO: 314621 - DNA, 120 bp, Artificial Sequence
  ENSG00000134853_46 (sequence is synthesized)
ttaaaaacgaaaacctgactaggttctgtagagccaattagacttgaaatacgtttgtgtttctagaatcacagctcaagcattctgtttatcgctcactctcccttgtacagccttatt

SEQ ID NO: 314622 - DNA, 120 bp, Artificial Sequence
  ENSG00000134853_47 (sequence is synthesized)
ttgttggtgctttgcattttgatattgctgtgagccttgcatgacatcatgaggccggatgaaacttctcagtccagcagtttccagtcctaacaaatgctcccacctgaatttgtatat

SEQ ID NO: 314623 - DNA, 120 bp, Artificial Sequence
  ENSG00000134853_48 (sequence is synthesized)
gactgcatttgtgtgtgtgtgtgtgttttcagcaaattccagatttgtttccttttggcctcctgcaaagtctccagaagaaaatttgccaatctttcctactttctatttttatgatga

SEQ ID NO: 314624 - DNA, 120 bp, Artificial Sequence
  ENSG00000134853_49 (sequence is synthesized)
caatcaaagccggcctgagaaacactatttgtgactttttaaacgattagtgatgtccttaaaatgtggtctgccaatctgtacaaaatggtcctatttttgtgaagagggacataagat

SEQ ID NO: 314625 - DNA, 120 bp, Artificial Sequence
  ENSG00000134853_50 (sequence is synthesized)
aaaatgatgttatacatcaatatgtatatatgtatttctatatagacttggagaatactgccaaaacatttatgacaagctgtatcactgccttcgtttatatttttttaactgtgataa

SEQ ID NO: 314626 - DNA, 120 bp, Artificial Sequence
  ENSG00000134853_51 (sequence is synthesized)
tccccacaggcacattaactgttgcacttttgaatgtccaaaatttatattttagaaataataaaaagaaagatacttacatgttcccaaaacaatggtgtggtgaatgtgtgagaaaaa

SEQ ID NO: 314627 - DNA, 120 bp, Artificial Sequence
  ENSG00000134853_52 (sequence is synthesized)
ctaacttgatagggtctaccaatacaaaatgtattacgaatgcccctgttcatgtttttgttttaaaacgtgtaaatgaagatctttatatttcaataaatgatatataatttaaagtta

SEQ ID NO: 314628 - DNA, 120 bp, Artificial Sequence
  ENSG00000134853_53 (sequence is synthesized)
ttccagtggtttaatatgatacttaaagtatttagagggaagtgtatagggatggtaagtgaacctggcagcccacgtggtctctaaatgcaggtctgcacaaccagttctgtgacatgt

SEQ ID NO: 314629 - DNA, 120 bp, Artificial Sequence
  ENSG00000134853_54 (sequence is synthesized)
ttccaggtttgtggcctgtaaattgaaaagaataaaagctgacaatgtaacaaattttttaaactttaaatttaatagttttaaagaattttcttggtgtgttcctgcagtaaacatttt

SEQ ID NO: 314630 - DNA, 120 bp, Artificial Sequence
  ENSG00000134853_55 (sequence is synthesized)
catttggccctgagtgaagaagtcgtcgtcgcctcgcattccagcaactgggatttgaggaatttcgaaccgcacaccaaggggccctcattgtgctccgtggcccccgcccccgcctgt

SEQ ID NO: 314631 - DNA, 120 bp, Artificial Sequence
  ENSG00000134853_56 (sequence is synthesized)
cttcccgcgccccctcctcggtggaatcatttctgcattgcccgggggctctgctttcgctcagttctggccgcaggcaggaagagaggaaaggtctccaggaaggtgccgaacttcttg

SEQ ID NO: 314632 - DNA, 120 bp, Artificial Sequence
  ENSG00000134853_57 (sequence is synthesized)
agctctggccagggatgcttgagttctggaaccttgcaagaactgtctgtggatctccaagctcgaggtccttgctgaacctggacctataaatgacgtcaatgatagtgatccctactg

SEQ ID NO: 314633 - DNA, 120 bp, Artificial Sequence
  ENSG00000134853_58 (sequence is synthesized)
ctgagtcatgctcaggcccaagccctgttggcaggcagaccactgctttctggccttccgtgactatctgaaaaaaatcgtgaatggctagagctactcttcacttgctgaacattttca

SEQ ID NO: 314634 - DNA, 120 bp, Artificial Sequence
  ENSG00000134853_59 (sequence is synthesized)
aaaagaattgagaacttctggattaaattgccttcttcctcgaaaaccctgggacccttccagatgggactaactggggaaagtggacaagttacaaacaaagaaactcaaaggaaagtc

SEQ ID NO: 314635 - DNA, 120 bp, Artificial Sequence
  ENSG00000134853_60 (sequence is synthesized)
attggcactgatctctaagatgctatcacatgtgattggtggttgattttattaacaaattataagcaaagtactacaaaggtggctttaaaaagaaaataaagcaattcacagaaacta

SEQ ID NO: 314636 - DNA, 120 bp, Artificial Sequence
  ENSG00000134853_61 (sequence is synthesized)
tgcaagtgttattcgacaaaagcaattatgctaatttccttccctgtgggctcaattccttttttgacacgatgacttggaggagtcattatgattactccaaacaggaaagacactcgc

SEQ ID NO: 314637 - DNA, 120 bp, Artificial Sequence
  ENSG00000134853_62 (sequence is synthesized)
gtgggctcactgacctggagtgaggattttcactggacacatgtggttgtgaaaactgttcaatcaggcttaaatcctccactctccatccccacacatggcagggaatagaagtccctt

SEQ ID NO: 314638 - DNA, 120 bp, Artificial Sequence
  ENSG00000134853_63 (sequence is synthesized)
gaatggagctgactggtcccttgaattgatggaagctcattggtttttgagcaaaatctgttgccagtccagtcatagccattcatggctctttattaaaaaaaaaaaaaaaaaaaaaaa

SEQ ID NO: 314639 - DNA, 120 bp, Artificial Sequence
  ENSG00000134853_64 (sequence is synthesized)
ggatttttttttttttttaaatcatcatcactggtgatcctaaattctgatttggggatttaggaccccagctaatacaatgtctgtggctataataataagcttaaaattactaaaggc

SEQ ID NO: 314640 - DNA, 120 bp, Artificial Sequence
  ENSG00000134853_65 (sequence is synthesized)
caaagcttgattacccatgcaagatttcatgtttcatcagttgacttcaaaatactgtaaggaattcttttcttacataagcctcttactttcattcacattcctgactatggcggccct

SEQ ID NO: 314641 - DNA, 120 bp, Artificial Sequence
  ENSG00000134853_66 (sequence is synthesized)
tttagtaacttaagaaaagtgatttgaagaaagtagtttagacttcaaccctttgatgtccacagttagtacgcttggggaagtataatacatgctgaggtcaacagatatttcctgaac

SEQ ID NO: 314642 - DNA, 120 bp, Artificial Sequence
  ENSG00000134853_67 (sequence is synthesized)
actatattacatggaggaatgggtagcagcaagagtacactgttttaaaatcagagcacagctaattttgtgccaggcactgtgctaggttctgggaaagtactgagaataactgaggag

SEQ ID NO: 314643 - DNA, 120 bp, Artificial Sequence
  ENSG00000134853_68 (sequence is synthesized)
cagagtggaagagaagaagagaagaaacaattggatagaaacaaagtgtctagagcagtgtggatcagcaaatgttggttgattaaatgaataaatttattagtcaaggagattgtggac

SEQ ID NO: 314644 - DNA, 120 bp, Artificial Sequence
  ENSG00000134853_69 (sequence is synthesized)
gagtataaccataactaacccactgctgaggaatgcggtgttctgtttgattggaatttatttttattgttattattttgtaattctgtattataactatatgcctaattgttgtacacc

SEQ ID NO: 314645 - DNA, 120 bp, Artificial Sequence
  ENSG00000134853_70 (sequence is synthesized)
atctcacaatcaagccttgtgagattttccaaattttatcttgatcaaactggtttgcaaattatttttcagggttttcttaaaaaaaaaaaaaaaaacccaaactttataagatcctgg

SEQ ID NO: 314646 - DNA, 120 bp, Artificial Sequence
  ENSG00000134853_71 (sequence is synthesized)
gagctcggtctgtcactgatgggcacatcactgagtttctctagaccttagcttcccacctctgggatgaacacatttgattaaatggcctttaggactccttgatcaatgggagagttt

SEQ ID NO: 314647 - DNA, 120 bp, Artificial Sequence
  ENSG00000134853_72 (sequence is synthesized)
gaaatgatagttcctggaccaggcccttcagaatacataaagagtgtgccgtaagccttctttttcagaagtcagacagaaataggaaggttctctggctacaagatatcaaccaaaaaa

SEQ ID NO: 314648 - DNA, 120 bp, Artificial Sequence
  ENSG00000134864_0 (sequence is synthesized)
gactgaaaactggatatttggtccccatggactttctggtcaccctgtgaagtggacttaactttttcttgaatcatgtggaaggattctgaagtcaaaagtttttaagactctcaggct

SEQ ID NO: 314649 - DNA, 120 bp, Artificial Sequence
  ENSG00000134864_1 (sequence is synthesized)
tactgtggatctggattctaaggcaacacttccttgaagaaacaagcttacagtctgtggcccagacccaggcaagtggtaaatatttaccttcacgctggagccaagatcgctgcgggg

SEQ ID NO: 314650 - DNA, 120 bp, Artificial Sequence
  ENSG00000134864_2 (sequence is synthesized)
agtcccgtgaagcaccactgccctctaagaccttggaaggggaaacaccagaaggtgtgggtgctgagctccgctgcgtcagactgccaggacctgagtggaactcagtgctgaaacctg

SEQ ID NO: 314651 - DNA, 120 bp, Artificial Sequence
  ENSG00000134864_3 (sequence is synthesized)
ggttctcactgcagctggatagcagctctgcccggatggccctagtcttcgtgtacggcaccctgaagcggggtcagcccaaccacagggtcctgcgggacggcgcccacggctccgcag

SEQ ID NO: 314652 - DNA, 120 bp, Artificial Sequence
  ENSG00000134864_4 (sequence is synthesized)
cctttcgggcgcgcggccgcacgctggagccctacccgttggtgatcgcgggggagcacaacatcccgtggctgctgcacctgcccggctcggggcgcctcgtggagggcgaggtctacg

SEQ ID NO: 314653 - DNA, 120 bp, Artificial Sequence
  ENSG00000134864_5 (sequence is synthesized)
cggtagacgagcggatgctgcgctttctggatgacttcgagagttgcccggccctgtaccagcgcacggtgctgcgggtacagctgctggaggaccgggccccgggcgcagaggagccgc

SEQ ID NO: 314654 - DNA, 120 bp, Artificial Sequence
  ENSG00000134864_6 (sequence is synthesized)
cagcgcccaccgcggtgcagtgcttcgtgtacagcagggccaccttcccgccggagtgggcccagctcccgcaccatgacagctacgactccgaggggccgcacgggctgcgctacaacc

SEQ ID NO: 314655 - DNA, 120 bp, Artificial Sequence
  ENSG00000134864_7 (sequence is synthesized)
cccgggagaacagataagggggacgggcagggtgggcctaggtttgagagccctggggctccaagatgcgcccagcccatgctgggtgaaggcggaagccgaacagggccctttccaatg

SEQ ID NO: 314656 - DNA, 120 bp, Artificial Sequence
  ENSG00000134864_8 (sequence is synthesized)
aatctgccggaaaggaaccaatctttcagtggcagctgattttacaaataatgttgagatacgaatagcaaggtgcttccctcccatctttctacctggtaagaaaaatttaggatttta

SEQ ID NO: 314657 - DNA, 120 bp, Artificial Sequence
  ENSG00000134864_9 (sequence is synthesized)
actcccctaaatgacatttagagaactcgtgttatgcctaattcttcttcctcctcgtgttgtttctgctgttggctctgctttgagctcaagataataataaatatttaggatcagtgt

SEQ ID NO: 314658 - DNA, 120 bp, Artificial Sequence
  ENSG00000134864_10 (sequence is synthesized)
aaagacttggtgttgccgctagattttagcagccctactatactgattctggcctgtaacccctgagaaagccgattttacacggctgggtagaatttgtagaaaagatccacagggcaa

SEQ ID NO: 314659 - DNA, 120 bp, Artificial Sequence
  ENSG00000134864_11 (sequence is synthesized)
ttcagatcaagcttcacagcaaatattaaagattatttaaatttgaagtcgatgttttgggaaatcagatataaaagtgttggtactgtgtttgacccccacgttttttggtatacttat

SEQ ID NO: 314660 - DNA, 120 bp, Artificial Sequence
  ENSG00000134864_12 (sequence is synthesized)
ttggtagaaggttctttacattctgatctagcaaaataatgaacacccacttgctggtagacacagctgagcgcccggacttcaagtggaagtttatctgagcccagatctcagtagcca

SEQ ID NO: 314661 - DNA, 120 bp, Artificial Sequence
  ENSG00000134864_13 (sequence is synthesized)
gaccccgtccctgccccctgaagggagagcatttgggggtgagtcctttcaaagaagagccaatgcattagtaatttgttcttcaggcctgacagaagcttagcttccaaatacaaacag

SEQ ID NO: 314662 - DNA, 120 bp, Artificial Sequence
  ENSG00000134864_14 (sequence is synthesized)
cacttaaaataattttagcaaggcacgaagtaccaattactacccacctccatctgataattgtcagcatcgattcaactcggtgcacggctcttgcttctgcttcccagcaaagtctga

SEQ ID NO: 314663 - DNA, 120 bp, Artificial Sequence
  ENSG00000134864_15 (sequence is synthesized)
aatgtattccaaggatttcagaaccaaatgaaaatgcagctgctgtgatctttagtaacctcattctctgttgggagagctcacttactcttcaacttaatggcagactgtgatcgctaa

SEQ ID NO: 314664 - DNA, 120 bp, Artificial Sequence
  ENSG00000134864_16 (sequence is synthesized)
ctgcatctggcacaaaaacatgatcattatttttagcttcttttgcttaattggaaacttgcttcacaaaaaacacaaaaaggctacgctgggtctcagctgatgagctcgtggcggccc

SEQ ID NO: 314665 - DNA, 120 bp, Artificial Sequence
  ENSG00000134864_17 (sequence is synthesized)
tgtgcttgatgagggcggtgaggcagcccaagctccttgtgactgccctggcttgtgcaatggggaagggaccaggcagcgcgctcatcctcaaaacaaacaaaaacagtggagacagca

SEQ ID NO: 314666 - DNA, 120 bp, Artificial Sequence
  ENSG00000134864_18 (sequence is synthesized)
cccccggccaaccaggaagcttcagggtgacctccaggggagtcagccaccaacagtacacccacatagagacacagcaggaaagggattgccaaaatctgcatttgcagtctctggtcc

SEQ ID NO: 314667 - DNA, 120 bp, Artificial Sequence
  ENSG00000134864_19 (sequence is synthesized)
ttaggaagttttgaaaatcagcaccaggagtgagggcctcacttctagaagtagtaaggcaatcagatgaaaaaatggcaagtgctaatttaataaagcaaggcagagaactgactgaca

SEQ ID NO: 314668 - DNA, 120 bp, Artificial Sequence
  ENSG00000134864_20 (sequence is synthesized)
tttatatcaatctcttaaaaggatcacaaagaaatgctggtagtctactggcagagcctgtcgcctatgtgtacattgtcttcattcaaagaaagggcaaactaatatttagacaaatgc

SEQ ID NO: 314669 - DNA, 120 bp, Artificial Sequence
  ENSG00000134864_21 (sequence is synthesized)
tcagttttattgatttaattttgacactagggaatctcacagcagaagtacaaatcatatgtacaagtatttatatcaatgaaaatttccattggtgattttttggcagaatattggtct

SEQ ID NO: 314670 - DNA, 120 bp, Artificial Sequence
  ENSG00000134864_22 (sequence is synthesized)
tgactctgtggaataaatgacgacgtaaacgtagctgcacaggggtgttcctgtataatgcttgaatcaattgtgtgtgaaagcatcatgcaaatggctaattaaattgggtgatgactg

SEQ ID NO: 314671 - DNA, 120 bp, Artificial Sequence
  ENSG00000134864_23 (sequence is synthesized)
gtgtgggtgctgagctccgctgcgtcagactgccaggacctgagtggaactcagtgctgaaacctgggttctcactgcagctggatagcaggtggttacaaaattatatgtatttttagg

SEQ ID NO: 314672 - DNA, 120 bp, Artificial Sequence
  ENSG00000134864_24 (sequence is synthesized)
tcaggtagcagggcaggctgttgggacaggtttgacagactgtcctaatacaaggagcgccttttcccagatcagcagctctagagggtggcggccttgcctggaacctccgcaacctcc

SEQ ID NO: 314673 - DNA, 120 bp, Artificial Sequence
  ENSG00000134864_25 (sequence is synthesized)
gcgcccaccacacaagggctgagaacagtaagctctgcccggatggccctagtcttcgtgtacggcaccctgaagcggggtcagcccaaccacagggtcctgcgggacggcgcccacggc

SEQ ID NO: 314674 - DNA, 120 bp, Artificial Sequence
  ENSG00000134864_26 (sequence is synthesized)
gagacagaagtgtcactctctccatagctgtaccattcctaccacctggcccccaagtggcattgctttaacccattgtctctagggaaaatgttctctttcgattttggttctcagtcc

SEQ ID NO: 314675 - DNA, 120 bp, Artificial Sequence
  ENSG00000134864_27 (sequence is synthesized)
aacaagcttacagctctgcccggatggccctagtcttcgtgtacggcaccctgaagcggggtcagcccaaccacagggtcctgcgggacggcgcccacggctccgcagcctttcgggcgc

SEQ ID NO: 314676 - DNA, 120 bp, Artificial Sequence
  ENSG00000134864_28 (sequence is synthesized)
ctgctccgccccccaggcggggtgtcctggcgcccgcgggaacctggggcgtcgctccctgcgcggcgtccgggtcgaggccgcagcactcggcgtccccgcgggactgaaaactggata

SEQ ID NO: 314677 - DNA, 120 bp, Artificial Sequence
  ENSG00000134864_29 (sequence is synthesized)
ggggaaacaccagaaggtgtgggtgctgagctccgctgcgtcagactgccaggacctgagtggaactcagtgctgaaacctgggttctcactgcagctggatagcagatcagcagctcta

SEQ ID NO: 314678 - DNA, 120 bp, Artificial Sequence
  ENSG00000134871_0 (sequence is synthesized)
gagtgtggctgcagtgcgccgggacaccagggctccgcgctccgcactcaagaggctcccgcgtcccaacccctcgcgcccgcgcgttcgcggatccaggccgaggaccgaaaggggccg

SEQ ID NO: 314679 - DNA, 120 bp, Artificial Sequence
  ENSG00000134871_1 (sequence is synthesized)
gggccggcgcccagagagcccagcaaggccggccgccctgccggtgtgccgccggcgggtgcttctggaagggccaatgcgttcgggcagcagcccctgaagccgagcccgaggctaagt

SEQ ID NO: 314680 - DNA, 120 bp, Artificial Sequence
  ENSG00000134871_2 (sequence is synthesized)
ccgaggctaagtgggactgaccggggcccagagtggacgaaccgccagcatggggagagaccagcgcgcggtggccggccctgccctacggcggtggctgctgctggggacagtgaccgt

SEQ ID NO: 314681 - DNA, 120 bp, Artificial Sequence
  ENSG00000134871_3 (sequence is synthesized)
ggggttcctcgcccagagcgtcttggcgggtgtgaagaagtttgatgtgccgtgtggaggaagagattgcagtgggggctgccagtgctaccctgagaaaggtggacgtggtcagcctgg

SEQ ID NO: 314682 - DNA, 120 bp, Artificial Sequence
  ENSG00000134871_4 (sequence is synthesized)
gccagtgggcccccaggggtacaatgggccaccaggattacaaggattcccgggactgcagggacgtaaaggagacaagggtgaaaggggagcccccggagtaacgggacccaagggcga

SEQ ID NO: 314683 - DNA, 120 bp, Artificial Sequence
  ENSG00000134871_5 (sequence is synthesized)
cgtgggagcaagaggcgtttctggattccctggtgccgatggaattcctggacacccggggcaaggtgggcccaggggaaggccgggctacgatggctgcaacggaacccagggagactc

SEQ ID NO: 314684 - DNA, 120 bp, Artificial Sequence
  ENSG00000134871_6 (sequence is synthesized)
aggtccacaggggccccccggctctgaggggttcaccgggcctcccgggccccaaggaccaaaagggcagaaaggtgagccttatgcactgcctaaagaggagcgcgacagatatcgggg

SEQ ID NO: 314685 - DNA, 120 bp, Artificial Sequence
  ENSG00000134871_7 (sequence is synthesized)
tgaacctggagagcctggattggtcggtttccagggacctcccggccgccctgggcatgtgggacagatgggtccagttggagctccagggagaccaggaccacctggaccccctggacc

SEQ ID NO: 314686 - DNA, 120 bp, Artificial Sequence
  ENSG00000134871_8 (sequence is synthesized)
aaaaggacagcaaggcaacagaggacttggtttctacggagttaagggtgaaaagggtgacgtagggcagccgggacccaacgggattccatcagacaccctccaccccatcatcgcgcc

SEQ ID NO: 314687 - DNA, 120 bp, Artificial Sequence
  ENSG00000134871_9 (sequence is synthesized)
cacaggagtcaccttccacccagatcagtacaagggtgaaaaaggcagtgagggggaaccaggaataagaggcatttccttgaagggagaagaaggaatcatgggctttcctggactgag

SEQ ID NO: 314688 - DNA, 120 bp, Artificial Sequence
  ENSG00000134871_10 (sequence is synthesized)
gggttaccctggcttgagtggtgaaaaaggatcaccaggacagaagggaagccgaggcctggatggctatcaagggcctgatggaccccggggacccaagggagaagccggagacccagg

SEQ ID NO: 314689 - DNA, 120 bp, Artificial Sequence
  ENSG00000134871_11 (sequence is synthesized)
gccccctggactacctgcctactcccctcacccttccctagcaaaaggtgccagaggtgacccgggattcccaggggcccaaggggagccaggaagccagggtgagccaggagacccggg

SEQ ID NO: 314690 - DNA, 120 bp, Artificial Sequence
  ENSG00000134871_12 (sequence is synthesized)
cctcccaggtccccctggcctctccatcggagatggagatcagaggagaggcctgccgggtgagatgggacccaagggcttcatcggagaccccggcatccctgcgctctacgggggccc

SEQ ID NO: 314691 - DNA, 120 bp, Artificial Sequence
  ENSG00000134871_13 (sequence is synthesized)
acctggacctgatggaaagcgagggcctccaggaccccccgggctccctggaccacctggacctgatggcttcctgtttgggctgaaaggagcaaaaggaagagcaggcttccctgggct

SEQ ID NO: 314692 - DNA, 120 bp, Artificial Sequence
  ENSG00000134871_14 (sequence is synthesized)
tcccggctcccctggagcccgcggaccaaaggggtggaaaggtgacgctggggaatgcagatgtacagaaggcgacgaagctatcaaaggtcttccgggactgccaggacccaagggctt

SEQ ID NO: 314693 - DNA, 120 bp, Artificial Sequence
  ENSG00000134871_15 (sequence is synthesized)
cgcaggcatcaacggggagccggggaggaaaggggacagaggagaccccggccaacacggcctccctgggttcccagggctcaagggagtgcctggcaacattggtgctcccggacccaa

SEQ ID NO: 314694 - DNA, 120 bp, Artificial Sequence
  ENSG00000134871_16 (sequence is synthesized)
aggagcaaaaggagattccagaacaatcacaaccaaaggtgagcggggacagcccggcgtcccaggtgtgcccgggatgaaaggtgacgatggcagcccaggccgcgatgggctcgatgg

SEQ ID NO: 314695 - DNA, 120 bp, Artificial Sequence
  ENSG00000134871_17 (sequence is synthesized)
attccccggcctcccaggccctcccggtgatggcatcaagggccctccaggggacccaggctatccaggaatacctggaacgaagggtactccaggagaaatgggccccccaggactggg

SEQ ID NO: 314696 - DNA, 120 bp, Artificial Sequence
  ENSG00000134871_18 (sequence is synthesized)
ccttcccggcctcaaaggccaacgtggtttccctggagacgccggcttacctggaccaccaggcttcctgggccctcctggccccgcagggaccccaggacaaatagattgtgacacaga

SEQ ID NO: 314697 - DNA, 120 bp, Artificial Sequence
  ENSG00000134871_19 (sequence is synthesized)
tgtgaaaagggccgttggaggtgacagacaggaggccatccagccaggttgcataggagggcccaagggattgccaggcctgccaggacccccaggccccacaggtgccaaaggcctccg

SEQ ID NO: 314698 - DNA, 120 bp, Artificial Sequence
  ENSG00000134871_20 (sequence is synthesized)
aggaatcccaggcttcgcaggagctgatggaggaccagggcccaggggcttgccaggagacgcaggtcgtgaagggttcccaggacccccagggttcataggaccccgaggatccaaagg

SEQ ID NO: 314699 - DNA, 120 bp, Artificial Sequence
  ENSG00000134871_21 (sequence is synthesized)
tgcagtgggcctccctggcccagatggatccccaggtcccatcggcctgccagggccagatgggccccctggggaaaggggcctccctggagaagtcctgggagctcagcccgggccacg

SEQ ID NO: 314700 - DNA, 120 bp, Artificial Sequence
  ENSG00000134871_22 (sequence is synthesized)
gggagatgctggtgtgcctggacagcctgggcttaaaggccttcccggagacagaggcccccctggattcagaggaagccaagggatgcctgggatgccagggctgaagggccagccagg

SEQ ID NO: 314701 - DNA, 120 bp, Artificial Sequence
  ENSG00000134871_23 (sequence is synthesized)
cctcccaggaccttccggccagccaggcctgtatgggcctccaggactgcatggattcccaggagctcctggccaagaggggcccttggggctgccaggaatcccaggccgtgaaggtct

SEQ ID NO: 314702 - DNA, 120 bp, Artificial Sequence
  ENSG00000134871_24 (sequence is synthesized)
gcctggtgatagaggggaccctggggacacaggcgctcctggccctgtgggcatgaaaggtctctctggtgacagaggagatgctggcttcacaggggagcaaggccatccaggaagccc

SEQ ID NO: 314703 - DNA, 120 bp, Artificial Sequence
  ENSG00000134871_25 (sequence is synthesized)
tggatttaaaggaattgatggaatgcctgggacccccgggctaaaaggagatagaggctcacctgggatggatggtttccaaggcatgcctggactcaaagggagacccgggtttccagg

SEQ ID NO: 314704 - DNA, 120 bp, Artificial Sequence
  ENSG00000134871_26 (sequence is synthesized)
ctgggcccccaggaccacctcctgtcatcctgccaggaatgaaagacattaaaggagagaaaggagatgaagggcctatggggctgaaaggatacctgggcgcaaaaggtatccaaggaa

SEQ ID NO: 314705 - DNA, 120 bp, Artificial Sequence
  ENSG00000134871_27 (sequence is synthesized)
tgccaggcatcccagggctgtcaggaatccctgggctgcctgggaggcccggccacatcaaaggagtcaagggagacatcggagtccccggcatccccggtttgccaggattccctgggg

SEQ ID NO: 314706 - DNA, 120 bp, Artificial Sequence
  ENSG00000134871_28 (sequence is synthesized)
tggctggcccccctggaattacgggattcccaggattcataggaagccggggtgacaaaggtgccccagggagagcaggcctgtatggcgagattggcgcgactggtgatttcggtgaca

SEQ ID NO: 314707 - DNA, 120 bp, Artificial Sequence
  ENSG00000134871_29 (sequence is synthesized)
tcggggacactataaatttaccaggaagaccaggcctgaagggggagcggggcaccactggaataccaggtctgaagggattctttggagagaagggaacagaaggtgacatcggcttcc

SEQ ID NO: 314708 - DNA, 120 bp, Artificial Sequence
  ENSG00000134871_30 (sequence is synthesized)
ctgggataacaggcgtgactggagtccaaggccctcctggacttaaaggacaaacaggctttccagggctgactgggcctccagggtcgcagggagagctggggcggattggactgcctg

SEQ ID NO: 314709 - DNA, 120 bp, Artificial Sequence
  ENSG00000134871_31 (sequence is synthesized)
gtggcaaaggagatgatggctggccgggagctccgggcttaccaggttttccgggactccgtgggatccgcggcttacacggcttgccaggcaccaagggctttccaggatccccaggtt

SEQ ID NO: 314710 - DNA, 120 bp, Artificial Sequence
  ENSG00000134871_32 (sequence is synthesized)
ctgacatccacggagacccaggcttcccaggccctcctggggaaagaggtgacccaggagaggccaacacccttccaggccctgtgggagtcccaggacagaaaggagaccaaggagctc

SEQ ID NO: 314711 - DNA, 120 bp, Artificial Sequence
  ENSG00000134871_33 (sequence is synthesized)
caggggaacgaggcccacctgggagcccaggacttcaggggttccctggtatcacacccccttccaacatctctggggcacctggtgacaaaggggcgccagggatatttggcctgaaag

SEQ ID NO: 314712 - DNA, 120 bp, Artificial Sequence
  ENSG00000134871_34 (sequence is synthesized)
gttatcggggcccaccagggccaccaggttctgctgctcttcctggaagcaaaggtgacacagggaacccaggagctccaggaaccccagggaccaaaggatgggccggggactccgggc

SEQ ID NO: 314713 - DNA, 120 bp, Artificial Sequence
  ENSG00000134871_35 (sequence is synthesized)
cccagggcaggcctggtgtgtttggtctcccaggagaaaaagggcccaggggtgaacaaggcttcatggggaacactggacccactggggcggtgggcgacagaggccccaagggaccca

SEQ ID NO: 314714 - DNA, 120 bp, Artificial Sequence
  ENSG00000134871_36 (sequence is synthesized)
agggagacccaggattccctggtgcccccgggactgtgggagcccccgggattgcaggaatcccccagaagattgccgtccaaccagggacagtgggtccccaggggaggcgaggccccc

SEQ ID NO: 314715 - DNA, 120 bp, Artificial Sequence
  ENSG00000134871_37 (sequence is synthesized)
ctggggcaccgggggagatggggccccagggcccccccggagaaccaggtttccgtggggctccagggaaagctgggccccaaggaagaggtggtgtgtctgctgttcccggcttccggg

SEQ ID NO: 314716 - DNA, 120 bp, Artificial Sequence
  ENSG00000134871_38 (sequence is synthesized)
gagatgaaggacccataggccaccaggggccgattggccaagaaggtgcaccaggccgtccagggagcccgggcctgccgggtatgccaggccgcagcgtcagcatcggctacctcctgg

SEQ ID NO: 314717 - DNA, 120 bp, Artificial Sequence
  ENSG00000134871_39 (sequence is synthesized)
tgaagcacagccagacggaccaggagcccatgtgcccagtgggcatgaacaaactctggagtggatacagcctgctgtacttcgagggccaggagaaggcgcacaaccaggacctggggc

SEQ ID NO: 314718 - DNA, 120 bp, Artificial Sequence
  ENSG00000134871_40 (sequence is synthesized)
tggcgggctcctgcctggcgcggttcagcaccatgcccttcctgtactgcaaccctggtgatgtctgctactatgccagccggaacgacaagtcctactggctctctaccactgcgccgc

SEQ ID NO: 314719 - DNA, 120 bp, Artificial Sequence
  ENSG00000134871_41 (sequence is synthesized)
tgcccatgatgcccgtggccgaggacgagatcaagccctacatcagccgctgttctgtgtgtgaggccccggccatcgccatcgcggtccacagtcaggatgtctccatcccacactgcc

SEQ ID NO: 314720 - DNA, 120 bp, Artificial Sequence
  ENSG00000134871_42 (sequence is synthesized)
cagctgggtggcggagtttgtggatcggatattccttcctcatgcacacggcggcgggagacgaaggcggtggccaatcactggtgtcaccgggcagctgtctagaggacttccgcgcca

SEQ ID NO: 314721 - DNA, 120 bp, Artificial Sequence
  ENSG00000134871_43 (sequence is synthesized)
caccattcatcgaatgcaatggaggccgcggcacctgccactactacgccaacaagtacagcttctggctgaccaccattcccgagcagagcttccagggctcgccctccgccgacacgc

SEQ ID NO: 314722 - DNA, 120 bp, Artificial Sequence
  ENSG00000134871_44 (sequence is synthesized)
tcaaggccggcctcatccgcacacacatcagccgctgccaggtgtgcatgaagaacctgtgagccggcgcgtgccaggaagggccattttggtgcttattcttaacttattacctcaggt

SEQ ID NO: 314723 - DNA, 120 bp, Artificial Sequence
  ENSG00000134871_45 (sequence is synthesized)
gccaacccaaaaattggttttatttttttcttaaaaaaaaaaaagtctaccaaaggaatttgcatccagcagcagcacttagacctgccagccactgtcaccgagcgggtgcaagcactc

SEQ ID NO: 314724 - DNA, 120 bp, Artificial Sequence
  ENSG00000134871_46 (sequence is synthesized)
ggggtccctggagggcaagccctgcccacagaaagccaggagcagccctggcccccatcagccctgctagacgcaccgcctgaaggcacagctaaccacttcgcacacacccatgtaacc

SEQ ID NO: 314725 - DNA, 120 bp, Artificial Sequence
  ENSG00000134871_47 (sequence is synthesized)
actgcactttccaatgccacagacaactcacattgttcaactcccttctcggggtgggacagacgagacaacagcacacaggcagccagccgtggccagaggctcgaggggctcagggcc

SEQ ID NO: 314726 - DNA, 120 bp, Artificial Sequence
  ENSG00000134871_48 (sequence is synthesized)
tcaggcacccgtccccacacgagggccccgtgggtgggcctggccctgctttctacgccaatgttatgccagctccatgttctcccaaataccgttgatgtgaattattttaaaggcaaa

SEQ ID NO: 314727 - DNA, 120 bp, Artificial Sequence
  ENSG00000134871_49 (sequence is synthesized)
accgtgctctttattttaaaaaacactgataatcacactgcggtaggtcattcttttgccacatccctatagaccactgggtttggcaaaactcaggcagaagtggagacctttctagac

SEQ ID NO: 314728 - DNA, 120 bp, Artificial Sequence
  ENSG00000134871_50 (sequence is synthesized)
atcattgtcagccttgctacttgaaggtacaccccatagggtcggaggtgctgtccccactgccccacgttgtccctgagatttaacccctccactgctgggggtgagctgtactcttct

SEQ ID NO: 314729 - DNA, 120 bp, Artificial Sequence
  ENSG00000134871_51 (sequence is synthesized)
gactgccccctcctgtgtaacgactacaaaataaaacttggttctgaatatttttaaaccccgagttgttgaccgccttaatctcgtgtccatagagcaaaacgtctgctcagatggatg

SEQ ID NO: 314730 - DNA, 120 bp, Artificial Sequence
  ENSG00000134871_52 (sequence is synthesized)
cgaggcacagcgtccgcccacgctgctgtttttaatccatctcagtagagttgaacccattcgtggtattacagccatttctcggggaatgtgtttgtttataactcactaatgcttaca

SEQ ID NO: 314731 - DNA, 120 bp, Artificial Sequence
  ENSG00000134871_53 (sequence is synthesized)
tgctatctgaagcaaatgcggtgcaagctgagatttgtgtccatcgagcattttactgtctttctctgtctcatcccttggtttcatgaaatatgaaaatagaacagcgcacttttcaga

SEQ ID NO: 314732 - DNA, 120 bp, Artificial Sequence
  ENSG00000134871_54 (sequence is synthesized)
atgagtgtgtggagggagatgctgtctgtgatgaacagtccagagttggcccccacagctcttgtctctgattcctgcaggaagccaagggatgcctgggatgccagggctgaagggcca

SEQ ID NO: 314733 - DNA, 120 bp, Artificial Sequence
  ENSG00000134871_55 (sequence is synthesized)
gaacaatttcacctgcatagttcagcatcgcatacacattctctcctgttagggacacagagctatgaactttcaagacagatattctaagcaaccctaaaacttaaagtataataataa

SEQ ID NO: 314734 - DNA, 120 bp, Artificial Sequence
  ENSG00000134871_56 (sequence is synthesized)
tgagaaatcccctccgttggggaattctttcacttctgcttaacttgtagagttctagttctgccgtctggactatcgctgaagatatccagggcagcagccccagccgccttcggattt

SEQ ID NO: 314735 - DNA, 120 bp, Artificial Sequence
  ENSG00000134871_57 (sequence is synthesized)
tttctccaaatgcaccaaggttcttaagccctctgcttgccagcccgacacctggaattgatcataactcataaccagtgaacagtcacatgctttcaggcttcaaggcaactaaattcc

SEQ ID NO: 314736 - DNA, 120 bp, Artificial Sequence
  ENSG00000134871_58 (sequence is synthesized)
cagatatttacacataacaaccactccccactgtcacagttgaccttggagtgtaaacgaaggactttgcgcatgtcgtcactaatgctcatcttgttattaaggctcggcttccaaatt

SEQ ID NO: 314737 - DNA, 120 bp, Artificial Sequence
  ENSG00000134871_59 (sequence is synthesized)
ggcgagatcatatggaaatctgatcctagtcctgcaactagagcacttggctctgaaccttgtagaatgcgcatccttctaggttaaaaaaaaaatgtttcgagaacctcctcctgataa

SEQ ID NO: 314738 - DNA, 120 bp, Artificial Sequence
  ENSG00000134871_60 (sequence is synthesized)
tcgtgcgtatatatctttgcggatcattggcccatgttatagtcagctctgtgaggacagacatttcagcccatcttgttcactgctgtattcccaatgcctggaacaggacaggcacag

SEQ ID NO: 314739 - DNA, 120 bp, Artificial Sequence
  ENSG00000134871_61 (sequence is synthesized)
agttggagctcagcaaacgcctgactgagtgacgacgtgcagaaacatatcagacaggcattgtgaagggtagggttttttaaatacagacgctctggtgtttacctcttgaactcagca

SEQ ID NO: 314740 - DNA, 120 bp, Artificial Sequence
  ENSG00000134871_62 (sequence is synthesized)
ggtcacctggtctccctgtcctctaagcctaggtgtcaagaattcacctccctgcttcgaagcgagccctctgtcagtttaataatggctttgcatgtcttcatccaatgctgatcaaaa

SEQ ID NO: 314741 - DNA, 120 bp, Artificial Sequence
  ENSG00000134871_63 (sequence is synthesized)
cgcaggacagaacagggccatgggcagtgcctccaggagcccctgagatgtctgtctggggaggcgtggagccgtgaatggggatattttgaaatccatgctcagcttccatgatgcccg

SEQ ID NO: 314742 - DNA, 120 bp, Artificial Sequence
  ENSG00000134871_64 (sequence is synthesized)
taactacgaagctggcatttcctgcctcatccatggcgcacacctggctaccaaacctgagacccactaaaaagagccatgagcccactttgacttgactcattattaataattttggta

SEQ ID NO: 314743 - DNA, 120 bp, Artificial Sequence
  ENSG00000134871_65 (sequence is synthesized)
aaaaggaaatatgctgtttgagattttaagaacataatttttaagttaatgctggcgatgtttcttttgcattttttaaaaatgttgctgactgagaacccaactctcaccaacccctcc

SEQ ID NO: 314744 - DNA, 120 bp, Artificial Sequence
  ENSG00000134871_66 (sequence is synthesized)
cttctcaccgtactatattcctggaattcacactgcaaaggcgggtgctttcaaaattcactttttcccacaagcggattcagaaatgcggaggttgcctgccgccttttctaccggaca

SEQ ID NO: 314745 - DNA, 120 bp, Artificial Sequence
  ENSG00000134871_67 (sequence is synthesized)
acattcccgagttattggtgagctggaatgtgactgacttgcattccagggtttcttaaagtcaaaggttgactaaccagcagattccctcagggaaaagaggcagtaaatgtatctttt

SEQ ID NO: 314746 - DNA, 120 bp, Artificial Sequence
  ENSG00000134871_68 (sequence is synthesized)
tcaaggtaacattgcatgaacttgtcaaaagacaaaaaggatagaggggtttgtattaaaagaaatgattccaaggtacctagaaataaaagtaatcttgctattcttccaaacaagtga

SEQ ID NO: 314747 - DNA, 120 bp, Artificial Sequence
  ENSG00000134871_69 (sequence is synthesized)
aaggtgaggagcaatttcatcatgaagctggcaagacactctgaggcctccccaggtgtcccgttcttgccttttatctcctaagtttacacagcttcagaccggcaacactcatggacc

SEQ ID NO: 314748 - DNA, 120 bp, Artificial Sequence
  ENSG00000134871_70 (sequence is synthesized)
caaggcatggctaaaccattctaaaaacccacataccccaaggcggactttctacatgtccactggtgagactgagaaggggcgctgctgtgggaaccgcagccgacagctcttgaaaga

SEQ ID NO: 314749 - DNA, 120 bp, Artificial Sequence
  ENSG00000134871_71 (sequence is synthesized)
gttcaatagggggtcaccacgtgacccagaaatgccactcctggtgtatccccaagagacttgaaagcacgtgtccacacaaacacacatacaccaatgttcacagcagcattcttcaaa

SEQ ID NO: 314750 - DNA, 120 bp, Artificial Sequence
  ENSG00000134871_72 (sequence is synthesized)
ataggcagaaggtgaaactatccaaatgtgcgtcacctgatgaatggatcagctaaatctatacagcatctataccacagaatagccctgaccttcacgtgggagcaaggtgctgagcca

SEQ ID NO: 314751 - DNA, 120 bp, Artificial Sequence
  ENSG00000134871_73 (sequence is synthesized)
taccacactgtggatgaacctggaacatgttatgccatggggattgagacccacacagaaggacacatgctatcacatggtctctcattctattcttatgaaatgtccacacaggcaacc

SEQ ID NO: 314752 - DNA, 120 bp, Artificial Sequence
  ENSG00000134871_74 (sequence is synthesized)
tagaaacaggaagtcgattggtggctgccacaggtggaggtgggggtgggggtggggagtacctgcttaatgggaatggggtttctttttgatataatgaagatgttctgaaattagata

SEQ ID NO: 314753 - DNA, 120 bp, Artificial Sequence
  ENSG00000134871_75 (sequence is synthesized)
agagtgatggttgcacaaccttgtgaaaatactaaaaatcactgaattttatgctttaaaacagtgaactttgtgctatatgaattatatctcaaaaaaacctatcatttttaatgtaaa

SEQ ID NO: 314754 - DNA, 120 bp, Artificial Sequence
  ENSG00000134871_76 (sequence is synthesized)
gggaaacctgcttagctgcagcattcgttgtggccaggagataaaggctatcttagtctccagaagcaataaagctacatggaagggagaagggccaggactccttctggggtggctcct

SEQ ID NO: 314755 - DNA, 120 bp, Artificial Sequence
  ENSG00000134871_77 (sequence is synthesized)
cacagcgcctgtgctccagggacgggcagacccctgctaagccctgcctttataacctgggggagcctcccgctcactgtggccagaacggaagcataactgtatgttgacgcccaagac

SEQ ID NO: 314756 - DNA, 120 bp, Artificial Sequence
  ENSG00000134871_78 (sequence is synthesized)
atgacgtttctggattcaagtaacttcatttttcgtattctttaaatgttagatagaaaatcattgttgtggttgatgttgttcactctcagtctcccaagtgtcacttcattttctccc

SEQ ID NO: 314757 - DNA, 120 bp, Artificial Sequence
  ENSG00000134871_79 (sequence is synthesized)
aaattctcatgcgtaatagtggaatcgtaaacgcaaattaaaaagctgaaaccttgacaaaattctgtccatcaccatctttatcagattatgaaatactttgtgacgtgggagtgcagt

SEQ ID NO: 314758 - DNA, 120 bp, Artificial Sequence
  ENSG00000134871_80 (sequence is synthesized)
tattctccagcagatacgatgcaggagtttgttttttaatggaggaacttttatataatcatctgttttgtggcctcatttattttttaaggtcttggtaaaacatcctgaaatgtgtct

SEQ ID NO: 314759 - DNA, 120 bp, Artificial Sequence
  ENSG00000134871_81 (sequence is synthesized)
gtttagactaaaattttgtttggtgagactttttatttaaaaacaaaaactttaaagtggggagggaagaacagtcattaatcaccttcatcacgttttcacctgaagcaaatggagttc

SEQ ID NO: 314760 - DNA, 120 bp, Artificial Sequence
  ENSG00000134871_82 (sequence is synthesized)
tcctactcagttccacctccacctgctagttcacctttcctcggctgtttctgttttatgtggttcaatttttcaataaactacgtcatcttctactctatatatcatcaatttcattat

SEQ ID NO: 314761 - DNA, 120 bp, Artificial Sequence
  ENSG00000134871_83 (sequence is synthesized)
caagaaacatatctattactttaagtgattcttatagtagatgttgaaagatatttacacatgcacatatgtattatgtatatgcctactgtttatatttgacacaattccaattttaaa

SEQ ID NO: 314762 - DNA, 120 bp, Artificial Sequence
  ENSG00000134871_84 (sequence is synthesized)
gaatgacccagtatctattctgcaaatgggtgcttgtgttaatatgttcagtacactaatgccaaagaaagcacgtaatagtattatcagaaataaaaataacattggcatactagaggg

SEQ ID NO: 314763 - DNA, 120 bp, Artificial Sequence
  ENSG00000134871_85 (sequence is synthesized)
ttggttgacagagcattcatttgggttttgaaaataatttaaatcctaaagtatttctgttttaactctaggaaagatatgattgggtcaataggaaattaaaggtcttacccttgttgc

SEQ ID NO: 314764 - DNA, 120 bp, Artificial Sequence
  ENSG00000134871_86 (sequence is synthesized)
tgaatatagggttggtgttcagaataacccccatcagccataagaacaattagaccttgcccacaaaagtcaatgttcagtcatccacattaccatagctgcaccgaatgttaatggact

SEQ ID NO: 314765 - DNA, 120 bp, Artificial Sequence
  ENSG00000134871_87 (sequence is synthesized)
caggtggtatgaagaaaagatgggccctggccatgcttagtcagaggtgaagaaggaaaatagaaataatctggaatgcaattctattggtgtaaaaattaatacattttttaaaatgtc

SEQ ID NO: 314766 - DNA, 120 bp, Artificial Sequence
  ENSG00000134871_88 (sequence is synthesized)
cagctgtgtgagatgaaaaagcttgccagccatcttctcagatgccctcacagtacaaagaaggaagatatttttttgtctgttttccacagggagtgcctggcaacattggtgctcccg

SEQ ID NO: 314767 - DNA, 120 bp, Artificial Sequence
  ENSG00000134871_89 (sequence is synthesized)
ccttcctcatggtatgtggtatttgcccagttcccctccccaaccacaccctgctggggacacagcaagaacagctgcctttgtgagaagaatcagacacggcagtccagggtgtgcact

SEQ ID NO: 314768 - DNA, 120 bp, Artificial Sequence
  ENSG00000134871_90 (sequence is synthesized)
ttgcttgaacatactggagagtactcacacaaacctagatggccgggcctactacacacccggctgtgtgataaagcctgttgctactaggctacaaacctgtacgtaggcagttgcgac

SEQ ID NO: 314769 - DNA, 120 bp, Artificial Sequence
  ENSG00000134871_91 (sequence is synthesized)
acagtactatttgtatatctaaatacagaaaaggtacagtaaaaagaaagtaaaaagatgtaaaatgggactcctgtgtagggcatttaccatgaacggagcttgcgggacttggaagtt

SEQ ID NO: 314770 - DNA, 120 bp, Artificial Sequence
  ENSG00000134871_92 (sequence is synthesized)
gctctgtctgcgttggggagtgcggggtgcgtggatgtgaaggcctggggcgtgaccgcgcaccactgtagatccatcaacactgggtcttaggcggccctaaacttacgttttcaatat

SEQ ID NO: 314771 - DNA, 120 bp, Artificial Sequence
  ENSG00000134871_93 (sequence is synthesized)
ttttctttcttcagtaataaattaaccttagtttactataacttttttactttataaactgttaaactttttaaactttttgactgtttttgcaataacacttagcttaaaacacacatt

SEQ ID NO: 314772 - DNA, 120 bp, Artificial Sequence
  ENSG00000134871_94 (sequence is synthesized)
gtacagctgtacaaacatattttctttttctacgtttttattcgatgtttttttctattaaaaaaatttttttttactttttaaacttttttgttaaaaacaaagaaacaaacagacatg

SEQ ID NO: 314773 - DNA, 120 bp, Artificial Sequence
  ENSG00000134871_95 (sequence is synthesized)
ggagcctgggcctacacgggctcaggataatcaatatcactgtctttcacctccacatcttgtcccaccagaaggtcttcggggcaataacacgcatggagccgtcatcccctctgggaa

SEQ ID NO: 314774 - DNA, 120 bp, Artificial Sequence
  ENSG00000134871_96 (sequence is synthesized)
caatgcctgcttctggattcttcctgaagcacctgcctgaggctattttacagttaacatatgtacacatataaataggagtacactccaaaataacaataaaaagtagagtatagtaaa

SEQ ID NO: 314775 - DNA, 120 bp, Artificial Sequence
  ENSG00000134871_97 (sequence is synthesized)
tgcagaaaacagtgacgcagttgcttgtcaccaagtgtcatacactgcatgtaactgcatgtccacactttgatgcaaccagcaacacagcaggtttgtccccaccagcaccaccacaaa

SEQ ID NO: 314776 - DNA, 120 bp, Artificial Sequence
  ENSG00000134871_98 (sequence is synthesized)
catgtgggttatgcgctgggcagatccggtgtcatcttagggcaccactatcttcagtgcagtctgttgttgaccaaaaagtcatgatgcggtgcctgattgtacttccatttgaaatga

SEQ ID NO: 314777 - DNA, 120 bp, Artificial Sequence
  ENSG00000134871_99 (sequence is synthesized)
gagtgtcttaaattttctgagtaagtcattgcatactttgctaagaaatttaatcaattgtattctgttccactagaacaaacaataatataatgcaaaattgggtcaatgtataccact

SEQ ID NO: 314778 - DNA, 120 bp, Artificial Sequence
  ENSG00000134871_100 (sequence is synthesized)
ttcctacaaaattgagagcaattttaattttcataagcatcttttctttcattcattgttcattataagtacgtacgtgtgtttgcatgtgtgtatatatgtgcatatataaagcaatga

SEQ ID NO: 314779 - DNA, 120 bp, Artificial Sequence
  ENSG00000134871_101 (sequence is synthesized)
tgttttatagttataataagcagaaatgtcataaaaatattctgtaaagaaaaaagtagttgcatttatactgcaatatagttatacaaactagggagcactggcagttgtatcattgct

SEQ ID NO: 314780 - DNA, 120 bp, Artificial Sequence
  ENSG00000134871_102 (sequence is synthesized)
aacaattctcactttgaaaatatttactccctgaatgtctttgatgtggtccgtctgatagataagtaagaggaaaaaagggtaccccaaatcatcaccattacatctggcagaatttga

SEQ ID NO: 314781 - DNA, 120 bp, Artificial Sequence
  ENSG00000134871_103 (sequence is synthesized)
aatattgccctgatattggatttaatatgttcaatcaaagtgattgatctctgattctgttgcctttaaaactgatatctttaaaactgagtcttggtgttacttggtttaaaagtatta

SEQ ID NO: 314782 - DNA, 120 bp, Artificial Sequence
  ENSG00000134871_104 (sequence is synthesized)
tttatatgtgcacctttaagtccatcttgcatgtgtgaaggtgtggggagtagtattttgttttatgacacagcctccttgcctttattccctggactcatgtatctaccctaggacaca

SEQ ID NO: 314783 - DNA, 120 bp, Artificial Sequence
  ENSG00000134871_105 (sequence is synthesized)
tgcttgtctacaccttcgtttggcaaatgccaggttgtcaaggcaactggaaactcttccctgaattgccctgatgttgttggaatcagaaattataacagcccttgggtgtccaaatga

SEQ ID NO: 314784 - DNA, 120 bp, Artificial Sequence
  ENSG00000134871_106 (sequence is synthesized)
gcctcctctcctgtgtcccctccacaaaatcaaatgggcacagttcgtgatagggaacctctttataaatactgtcttcctatttcctgacctgtgactgatcattatttcactgtcaaa

SEQ ID NO: 314785 - DNA, 120 bp, Artificial Sequence
  ENSG00000134871_107 (sequence is synthesized)
aatcacaactgaggaggcttcctgcccctttgatcaaagctcccatctctccacctgctgcattcatcattagttgcacttctcaaaacagttatttttgtttcggttaagcattcctct

SEQ ID NO: 314786 - DNA, 120 bp, Artificial Sequence
  ENSG00000134871_108 (sequence is synthesized)
gcctgctgtggggactttatggtttagaaattgctggttgaagatcatttatcagcacttaacaaggctaaataatttttaagtttatggaagccatttcacaagatgtaaaattcccct

SEQ ID NO: 314787 - DNA, 120 bp, Artificial Sequence
  ENSG00000134871_109 (sequence is synthesized)
gggtctcatgctatggattttcccaacgacacttctgtggcagtgatgagaatgcctgactgcagactctccaccccgcagcccttgactggctcagccttatatgggcatggatagaat

SEQ ID NO: 314788 - DNA, 120 bp, Artificial Sequence
  ENSG00000134871_110 (sequence is synthesized)
tggtggtatacacatatctgtgagactagctgtgtgggacggagttcgtgtctagagcgactctgcattcttctccatgtcatcagataaacagaacccaaacaaactgagtagaggtga

SEQ ID NO: 314789 - DNA, 120 bp, Artificial Sequence
  ENSG00000134871_111 (sequence is synthesized)
ccggatctgttcttttcactttctatgattatttaatgcagaatcaacatagtaacattttccataatgcctttaggagaatttgattcttcagtaaacatagctagttcagattatttc

SEQ ID NO: 314790 - DNA, 120 bp, Artificial Sequence
  ENSG00000134871_112 (sequence is synthesized)
agtatataatggcatctgcatagcagtgtactgttacacgatgccagaggtcttttcagtgaggttattaggaggggatttctaaggatccccaagactctgtgatttcacgaattcaca

SEQ ID NO: 314791 - DNA, 120 bp, Artificial Sequence
  ENSG00000134871_113 (sequence is synthesized)
gcacaggcattgagacctttttatttcccagcgtccctagtgaaggaaacaccttgagtctctttctatactttgccaagtaaaatgaaaaatcgacaccttctggttaatctgattaac

SEQ ID NO: 314792 - DNA, 120 bp, Artificial Sequence
  ENSG00000134871_114 (sequence is synthesized)
ttgagtaatccaaaactccgtgtgggcttggctgtcctctagttatccagacgggttatcaacactgatccaattaagctgtgattggcagctgtctgaagggttgtacaaaagacagag

SEQ ID NO: 314793 - DNA, 120 bp, Artificial Sequence
  ENSG00000134871_115 (sequence is synthesized)
gcaaacgatacccgccccccaccccggggcctggactgtgggatccactgtgcacgcgcagcactcatgtggcctgaaatctggctgtacctgtacctctgggtgctgcgtgatgcttga

SEQ ID NO: 314794 - DNA, 120 bp, Artificial Sequence
  ENSG00000134871_116 (sequence is synthesized)
cactgtcatttcacctgggccgaggcccgtgctgccaagggaccacacagccagtcactggagtgtgttaacaatcagcacacagggctgctctgttaattcaggtgagaccctgaacat

SEQ ID NO: 314795 - DNA, 120 bp, Artificial Sequence
  ENSG00000134871_117 (sequence is synthesized)
tcactgataaagtgatagaaatagctgatgataaaaggtaagaaagagatcagtgatgccatttaccattttcttattcctggagatattcttctgtgtgttacaggagacaattactct

SEQ ID NO: 314796 - DNA, 120 bp, Artificial Sequence
  ENSG00000134871_118 (sequence is synthesized)
caggactgctgcatctactgtattaaaacatttttaagatagagcatctgtttcaatactacaaatccggtgcatgtggcttaactatttattaattaacagattttcccaaatgtgctc

SEQ ID NO: 314797 - DNA, 120 bp, Artificial Sequence
  ENSG00000134871_119 (sequence is synthesized)
ttgcagaagcattgctctgtctgccctacttttggactgatagtatttttttaaagtaagataatacataaaaatagcagctggacagagcttgctgtcgaaagggctgtgtgcatagtt

SEQ ID NO: 314798 - DNA, 120 bp, Artificial Sequence
  ENSG00000134871_120 (sequence is synthesized)
tgttctttcccacagcttcccctggggtggctcccgtctctcttccctgtggtgctactgtaacagccctggaaatgcctggctgcagactcgccacaccccagcacttggctagctcag

SEQ ID NO: 314799 - DNA, 120 bp, Artificial Sequence
  ENSG00000134871_121 (sequence is synthesized)
ccttttatgggcatggtaccccagttcatctgtgcgtcaccatggtgacagccaacatcggaagttgtacgtcactggataacttttggacacgaagcagaaatcacaagcatactatgg

SEQ ID NO: 314800 - DNA, 120 bp, Artificial Sequence
  ENSG00000134871_122 (sequence is synthesized)
attccagttccaaatggattctcatgtgaccagtgaatgagctttgggtcaatttgcagagctttgttcatccttgggcggtgagtggtagactctcccagcagggagagaattgcttca

SEQ ID NO: 314801 - DNA, 120 bp, Artificial Sequence
  ENSG00000134871_123 (sequence is synthesized)
cccagacagaaccacccagtcccatagataattccagcaagccacagagttgaggcctgaagaggcaaggcaggagctgtgtaccggctgcttggcactgcccacttcccctccctgggc

SEQ ID NO: 314802 - DNA, 120 bp, Artificial Sequence
  ENSG00000134871_124 (sequence is synthesized)
agagctgggaggagctgagccaggagccagcccatgtcctgtagttcacgtacgagcacactgacttcaggagggaaatggcctctgcaaatctcacacccagattgtggcagagtccaa

SEQ ID NO: 314803 - DNA, 120 bp, Artificial Sequence
  ENSG00000134871_125 (sequence is synthesized)
aacaaaactcaagtctggggacttagacaaattctttttccagcataatcatcttctgtgtccgtactcctcttcccatatgtcagcctagaagagtgaggctctccgggatgcagggaa

SEQ ID NO: 314804 - DNA, 120 bp, Artificial Sequence
  ENSG00000134871_126 (sequence is synthesized)
gaacataggcagcgtgagaagagagtttcccctcgttatgcaagagttatggttccctagttaactctctaaccacttcttcagttgttttgtggattaaaaaataactttaacaaatga

SEQ ID NO: 314805 - DNA, 120 bp, Artificial Sequence
  ENSG00000134871_127 (sequence is synthesized)
atcagcaagtacagatttaaaaaaaaaaataaaaccactcatctttcctccctgatcatcagcattttcagagaaggagctgggaggcctggctgggtgattatttttaacttattagcc

SEQ ID NO: 314806 - DNA, 120 bp, Artificial Sequence
  ENSG00000134871_128 (sequence is synthesized)
tcagatgccagcctacatcttaattttatttttttcttctaaaaagagtaaacattgtgttatctcttctgccaggtatttttctttgaatggatgattaggcagatgttttgttttgtt

SEQ ID NO: 314807 - DNA, 120 bp, Artificial Sequence
  ENSG00000134871_129 (sequence is synthesized)
actgaaatgcagtggattatatctaccgctcgtatctgctgtcacggctctagttcttaccgaacggccagcctggctgtgaattagtgtccatgcagctgcctctgcagcacgtcctgg

SEQ ID NO: 314808 - DNA, 120 bp, Artificial Sequence
  ENSG00000134871_130 (sequence is synthesized)
tgcctggggctgcctcctgcagggggcccatgtgtatttcaccagccccctcttgctgaaggcgcattcgcgaggatgcctcatgtccgtattgacactcatggtttgctgttcagtaaa

SEQ ID NO: 314809 - DNA, 120 bp, Artificial Sequence
  ENSG00000134871_131 (sequence is synthesized)
aacaaatgcacagaagagggctatgccctgaccccgtgccacctgcaggctgtgattcctaaccctgtcctgcccccctctctgtgcagcacacggcggcgggagacgaaggcggtggcc

SEQ ID NO: 314810 - DNA, 120 bp, Artificial Sequence
  ENSG00000134871_132 (sequence is synthesized)
agttaacaatttctatacagttaagtggatttagtgagtatcattcttccaggagagaagtaaaatttttttttaaagaggaaaacaaagaacaagattaagaacagtaaaagaataagt

SEQ ID NO: 314811 - DNA, 120 bp, Artificial Sequence
  ENSG00000134871_133 (sequence is synthesized)
tttttcggaatacccggtctgaagggtctggctggtgagccaggttttaaaggtatgtccctctcttaacatcctccttacctggtcatggtggcatcctccttaccctttcttggtggc

SEQ ID NO: 314812 - DNA, 120 bp, Artificial Sequence
  ENSG00000134871_134 (sequence is synthesized)
ataacattgcccagaatgaatttttgaaaacccatgcatccaggaaccctaaagctagacaaaacaaacaaaatgagctaacaaaaactcaaaggctttatccctgcctcaacacactga

SEQ ID NO: 314813 - DNA, 120 bp, Artificial Sequence
  ENSG00000134871_135 (sequence is synthesized)
ccatgtgataagggaataatcctaaccaaaggaaactcttgagaaccaaaatgatggcatcgctaagaaccaaatatgtcatgaaacatattccaccatgattataccgtggtaaacatg

SEQ ID NO: 314814 - DNA, 120 bp, Artificial Sequence
  ENSG00000134871_136 (sequence is synthesized)
aagagggggcggtgaaaagcaggggacaggtgagttcccagagaagggagtaccaccaggcacaggaggacacagctttccaggtggaaggacataacacggtgccagagagaacgtggt

SEQ ID NO: 314815 - DNA, 120 bp, Artificial Sequence
  ENSG00000134871_137 (sequence is synthesized)
ggcccctcgttcattgagtttattactaacaagtcacattttcatgacttctgttcagatgcttttgttctgaaataatcacagtggtctctaaaaacgtaatgactaagagtgtgtgtt

SEQ ID NO: 314816 - DNA, 120 bp, Artificial Sequence
  ENSG00000134871_138 (sequence is synthesized)
ggtgaggaggtggagaaatgggaaccttcacaggctgccagcaggagtgtaaaacgctgcggccagtgtgccaaacagtttggcagttcattaagaaactaagcatagagttacccagaa

SEQ ID NO: 314817 - DNA, 120 bp, Artificial Sequence
  ENSG00000134871_139 (sequence is synthesized)
gttctactcctagatgaagatcattgaaaacataggtacagacaaaaatgtggacacaaatctcatggcagcatcctttatagcagccataattggaaacagcctgaaaatgcatcgact

SEQ ID NO: 314818 - DNA, 120 bp, Artificial Sequence
  ENSG00000134871_140 (sequence is synthesized)
gatgaatggatgagtaaaatatggcagagctgtgcaagggcacattcagtgctgaggaaggatggggctctcagacatggcgcgtgggcgagccttgagaacactatgccacgtgtcgtc

SEQ ID NO: 314819 - DNA, 120 bp, Artificial Sequence
  ENSG00000134871_141 (sequence is synthesized)
gagaacactatgccacgtgtcgtctgactgcatgtatatgagatgtccccagtaagcaagtttacagaaatgaaaagtggattcgcagtttcctacacttgatcttagccaaaaggccga

SEQ ID NO: 314820 - DNA, 120 bp, Artificial Sequence
  ENSG00000134871_142 (sequence is synthesized)
aaagctgaagggttaggggagaattagggcatggctgccagcggctccagggtttcattttctgggataaagtgttctcaagttagacggtgctgcttgctcacagctctgtgagtacac

SEQ ID NO: 314821 - DNA, 120 bp, Artificial Sequence
  ENSG00000134871_143 (sequence is synthesized)
taaagttatgtaattgttctgtttactggagcgagttgtagggtatataaattatacatcaataagctgttttggaaaaccttaattactcttcagacttacagcttttacaaattttca

SEQ ID NO: 314822 - DNA, 120 bp, Artificial Sequence
  ENSG00000134871_144 (sequence is synthesized)
gcaaaataaaaattgcaatctagggtgctcattttttttaagatttttactcacacttgtgctttcaaatagtcttcctgttagcagagatttcaggctatttcaggcaaaaaaaaaaaa

SEQ ID NO: 314823 - DNA, 120 bp, Artificial Sequence
  ENSG00000134871_145 (sequence is synthesized)
tgaatgtactgaaggcatgcctagaatggcggcataatctaaaagtcatcttacttccgatcaggatgttttcaatcttatttttaattgtgtgtttatctctttcccatattcacaata

SEQ ID NO: 314824 - DNA, 120 bp, Artificial Sequence
  ENSG00000134871_146 (sequence is synthesized)
attaatattactaaaatatattctgactaaataacaatattagtaaaaattaatattagtaaattaacattactaggtcctgatagggctgatctgtttgatatgcttatttccaactct

SEQ ID NO: 314825 - DNA, 120 bp, Artificial Sequence
  ENSG00000134871_147 (sequence is synthesized)
tgatagggctgatctgtttgatatgcttatttccaactctgcaataaaaggtaagtaaatctaaagatggttaaaagctatcactcttaaaattatttcttctccattagggtgaacctg

SEQ ID NO: 314826 - DNA, 120 bp, Artificial Sequence
  ENSG00000134871_148 (sequence is synthesized)
gattggtcggtttccagggacctcccggccgccctgggcatgtgggacagatgggtccagttggagctccagggagaccagtaagtacctggacacaggtgcccactctgggaccatcgt

SEQ ID NO: 314827 - DNA, 120 bp, Artificial Sequence
  ENSG00000134871_149 (sequence is synthesized)
ccggtcatcccttccagatgccacttcttcaatggttgactccagatgagagctttaagaacaactatgatgcttataggcgtagcagagaacatcaagacaaaacggaccattccttgc

SEQ ID NO: 314828 - DNA, 120 bp, Artificial Sequence
  ENSG00000134871_150 (sequence is synthesized)
acactttgctgctgttaaggttgaagaataagggcttaaaattatggtcaccagctctctgccagttatgtcaaattttgacttggttccggcagggtgcccttccatccccaccccata

SEQ ID NO: 314829 - DNA, 120 bp, Artificial Sequence
  ENSG00000134871_151 (sequence is synthesized)
cctacccagtgacagacagcccatcatccctgggcaaggcaaaccaaagtcccacaggttcataaggaggaaatggaggtctgcctgtgccacacccatgctagcaggcatatcacacct

SEQ ID NO: 314830 - DNA, 120 bp, Artificial Sequence
  ENSG00000134871_152 (sequence is synthesized)
ccagaaaagccagaaatgaggcgctgccccaccctcctgctcctaatctgggcgtagcagctacactcctatgcccagcagaacacctggccccgagtcctgggacagcctccctccttt

SEQ ID NO: 314831 - DNA, 120 bp, Artificial Sequence
  ENSG00000134871_153 (sequence is synthesized)
tcctgggacacctgcggtgctgtggagtgggcggcagggatcagtagacttcaagggtcaggattagacaaggagccaaaagaaaccgactattaaaatgtacaagagccgcactgcgaa

SEQ ID NO: 314832 - DNA, 120 bp, Artificial Sequence
  ENSG00000134873_0 (sequence is synthesized)
gagccggagagcgagcgcggctgcagccggcggcatggctagcacggcttcggagatcatcgccttcatggtctccatctcaggctgggtactggtgtcctccacgctgcccaccgacta

SEQ ID NO: 314833 - DNA, 120 bp, Artificial Sequence
  ENSG00000134873_1 (sequence is synthesized)
ctggaaggtgtctaccatcgacggcacggtcatcacaaccgccacctattgggccaacctgtggaaggcgtgcgttaccgactccacgggcgtctccaactgcaaggacttcccctccat

SEQ ID NO: 314834 - DNA, 120 bp, Artificial Sequence
  ENSG00000134873_2 (sequence is synthesized)
gctggcgctggacggttatatacaggcatgtagaggacttatgatcgctgctgtcagcctgggcttctttggttccatatttgcgctctttggaatgaagtgtaccaaagtcggaggctc

SEQ ID NO: 314835 - DNA, 120 bp, Artificial Sequence
  ENSG00000134873_3 (sequence is synthesized)
cgataaagccaaagctaaaattgcttgtttggctgggattgtattcatactgtcagggctgtgctcaatgactggatgttccctatatgcaaacaaaatcacaacggaattctttgatcc

SEQ ID NO: 314836 - DNA, 120 bp, Artificial Sequence
  ENSG00000134873_4 (sequence is synthesized)
tctctttgttgagcaaaagtatgaattaggagccgctctgtttattggatgggcaggagcctcactgtgcataattggtggtgtcatattttgcttttcaatatctgacaacaacaaaac

SEQ ID NO: 314837 - DNA, 120 bp, Artificial Sequence
  ENSG00000134873_5 (sequence is synthesized)
acccagatacacatacaacggggccacatctgtcatgtcttctcggacaaagtatcatggtggagaagattttaaaacaacaaacccttcaaaacagtttgataaaaatgcttatgtcta

SEQ ID NO: 314838 - DNA, 120 bp, Artificial Sequence
  ENSG00000134873_6 (sequence is synthesized)
aaagagctcgctggcaagctgcctcttgagtttgttataaaagcgaactgttcacaaaatgatcccatcaaggccctcccataattaacactcaaaactatttttaaaatatgcatttga

SEQ ID NO: 314839 - DNA, 120 bp, Artificial Sequence
  ENSG00000134873_7 (sequence is synthesized)
agcatctgttgattgtatggatgtaagtgttcttacatagttagttatatactaatcattttctgttgtggctttctataaaaaataaacagtttatttacaggatttgtaaaatgtttt

SEQ ID NO: 314840 - DNA, 120 bp, Artificial Sequence
  ENSG00000134873_8 (sequence is synthesized)
ctacatttatatagaacatgaaaagcatttagtaccaaaggttcaagaagtattcgtactctagcctttttaatcattcatagatagaagtctttgtacccactccttatgtttcttttc

SEQ ID NO: 314841 - DNA, 120 bp, Artificial Sequence
  ENSG00000134873_9 (sequence is synthesized)
attcataaacaggtgtataaggaacaatgtcttataaacagcatgggggcaatctgagaatattcctcaaaaggtgtccaggttaaatagacatgttactggctgcacacaggcaaattc

SEQ ID NO: 314842 - DNA, 120 bp, Artificial Sequence
  ENSG00000134873_10 (sequence is synthesized)
aagttatctggtagaacttaacttctacaggatcagagaggatcttgctcattcatggccatatccacatgcccatggccactcagtagattgttgaaaaagcaaagccacaccattctc

SEQ ID NO: 314843 - DNA, 120 bp, Artificial Sequence
  ENSG00000134873_11 (sequence is synthesized)
tttgatgtatgcagagagttacgtagcaggggatgttctctgatttattccactggcaccattagtgaatatttagttgttttcataaacgatgctgtgatgaagactcatgtacatatt

SEQ ID NO: 314844 - DNA, 120 bp, Artificial Sequence
  ENSG00000134873_12 (sequence is synthesized)
tagcaaattttggtttcttacatgtgcctgtcatgactgtaattcattatgactgctccaggaagggctaatggggccaatatattattgcctgtcatgtggcacatccatgttaagggg

SEQ ID NO: 314845 - DNA, 120 bp, Artificial Sequence
  ENSG00000134873_13 (sequence is synthesized)
ctgaggcgtccctggcacggaatgcagagccctgagctagggcatcagcagaagctgagatagagatattggtcatggttgactgaggagccaattaaaacctgtttatgcctagtgttc

SEQ ID NO: 314846 - DNA, 77 bp, Artificial Sequence
  ENSG00000134873_14 (sequence is synthesized)
tactgctcaaggtcatcgccaaggtgtgattggacatcccaagcccaagtggtacgtgcctcactcagaactgacgg

SEQ ID NO: 314847 - DNA, 120 bp, Artificial Sequence
  ENSG00000134873_15 (sequence is synthesized)
cccaagcccaagtggtacgtgcctcactcagaactgacgggccgagttctatctaggtgtgtcttccagaacctgtttacggctaactggataactgagagacttgtcatttctaaagac

SEQ ID NO: 314848 - DNA, 120 bp, Artificial Sequence
  ENSG00000134873_16 (sequence is synthesized)
atttaagttgctccagggatttctgaaaaaagacacaggcttcttcctagagccagccctatataacatgcccacaagggcaacagttatcacagttcatacacacctttcatgtcctgt

SEQ ID NO: 314849 - DNA, 120 bp, Artificial Sequence
  ENSG00000134873_17 (sequence is synthesized)
ctcactcactcctcacagccatcctaggagatacatattgttttcatcctgcatttacagaaaaagaaatgaaaacagagagcttaaataatttgccacagtaatgtcgaaactaggcct

SEQ ID NO: 314850 - DNA, 120 bp, Artificial Sequence
  ENSG00000134873_18 (sequence is synthesized)
ttgaaccaaggcagtctagggtaaaatatagtttcaaagtatgaataagaattggtatttgtgttatctttgagtaagaaactgtccgatatgaatcacaacgtgggtgaatgtagtatt

SEQ ID NO: 314851 - DNA, 120 bp, Artificial Sequence
  ENSG00000134873_19 (sequence is synthesized)
ttcctgaagtgtgaaagacttaaaaaaaagaatcacattgttcagaggtgctcaatggaaagaaaaggaaatgaacaagtttgttaaaagataaaaaataaaaaaaattccataccttga

SEQ ID NO: 314852 - DNA, 120 bp, Artificial Sequence
  ENSG00000134873_20 (sequence is synthesized)
atatccgtgtagaaaatcagaacgactctttcaggccatctttaaaatgtcattggtaaaccatacttgatcctaaattcctgtacttcctcaggccatccgagcatgaaacgctgtcac

SEQ ID NO: 314853 - DNA, 120 bp, Artificial Sequence
  ENSG00000134873_21 (sequence is synthesized)
ctacccacatccgctggctgtgacgcttgtcaaagtgttctctatcggctgcatgcctagaccaccaaagcgttctgaccggacagtgtcactggagaaggcggcgcgacatgtccaggg

SEQ ID NO: 314854 - DNA, 120 bp, Artificial Sequence
  ENSG00000134873_22 (sequence is synthesized)
cgcagatctgggctctggtgtctggtgtcggagggtttggagctctcgttgctgctaccacgtccaatgagtggaaagtgaccacgcgagcctcctcggtgataacagccacttgggttt

SEQ ID NO: 314855 - DNA, 120 bp, Artificial Sequence
  ENSG00000134873_23 (sequence is synthesized)
tggtaactgatgacatcattcaagattaaatgtgtcatatgccacatacgcaaaatatgcatttaattagtttgctagtgttgcagtgtcttgtctcgaaacagttcaaggcatcaaatt

SEQ ID NO: 314856 - DNA, 120 bp, Artificial Sequence
  ENSG00000134873_24 (sequence is synthesized)
tagaactataaacttcatcgtttgctgtacatcatgaaactgaggtcaagtagaggaaacgtgaaaggtgtcagacggagaggaaagaatgatgcggtgtgcgaatagaaaattaaaacc

SEQ ID NO: 314857 - DNA, 120 bp, Artificial Sequence
  ENSG00000134873_25 (sequence is synthesized)
ttgccttgattgttgcccactcaaaatgatatttgccagatgctagtttctgggtcttttaaatttgctgtattaactactgtcttaacaagctcctcctaataaacctttataaagaaa

SEQ ID NO: 314858 - DNA, 120 bp, Artificial Sequence
  ENSG00000134874_0 (sequence is synthesized)
tgttaggaaagaaaaaaaaattcctgatgtctggtccaagcaggaattccccggtggattggggaatgtctggcttttcctcagcttattgatctctgtggtaaccactggaggccccca

SEQ ID NO: 314859 - DNA, 120 bp, Artificial Sequence
  ENSG00000134874_1 (sequence is synthesized)
gaagacccatagaaatgagaggcctgaggtctacaagtcgctgctagaaatattttagcctctccaaagcccagaatgcagccccgacccaagtttgtaagggttctgggtgcacgctga

SEQ ID NO: 314860 - DNA, 120 bp, Artificial Sequence
  ENSG00000134874_2 (sequence is synthesized)
ccctgcgcgggcagacgcgccctttgctccaggtccggacctgggcgctgctatagcaacgtcctggacgcccagaccttaggccgccgccgccgcggaagcgaggaacccggccttctc

SEQ ID NO: 314861 - DNA, 120 bp, Artificial Sequence
  ENSG00000134874_3 (sequence is synthesized)
ccgctcctgagggctgtggcggcggcggcccgggaggcggcccaggctgggtaaagaccgcccggctcctcctatgcaagctgaggcagcggattggttttcaagcatgcccttccagaa

SEQ ID NO: 314862 - DNA, 120 bp, Artificial Sequence
  ENSG00000134874_4 (sequence is synthesized)
ttccagaagcatgtctactacccgctcgccagcggcccagaggggcccgacgtcgctgtggccgccgccgccgcgggtgcggcctccatggcctgtgcgccccccagcgcggcttcgggg

SEQ ID NO: 314863 - DNA, 120 bp, Artificial Sequence
  ENSG00000134874_5 (sequence is synthesized)
cttcttccagttcaggccgcggctggagagtgtggactggcggcggctgagcgccatcgacgtggacaaggtggcgggggctgtggacgtgctgacgctgcaggagaacatcatgaacat

SEQ ID NO: 314864 - DNA, 120 bp, Artificial Sequence
  ENSG00000134874_6 (sequence is synthesized)
caccttctgcaagctggaagacgagaagtgcccacactgccagtcgggggtggacccggtgctgctgaagctcatccgtctggcgcagttcaccatcgagtacttgctgcactcacaaga

SEQ ID NO: 314865 - DNA, 120 bp, Artificial Sequence
  ENSG00000134874_7 (sequence is synthesized)
gttcctcacctcgcagctgcacaccctggaggagcggctgcgcctgagccactgcgacggcgagcagagcaagaagctgctcaccaagcaggcgggggagatcaagacgctcaaggaaga

SEQ ID NO: 314866 - DNA, 120 bp, Artificial Sequence
  ENSG00000134874_8 (sequence is synthesized)
gtgcaaacgccggaagaagatgatctccacccagcagctgatgatcgaggccaaagccaactattaccagtgccatttttgtgacaaggcctttatgaaccaagcttttctacaaagtca

SEQ ID NO: 314867 - DNA, 120 bp, Artificial Sequence
  ENSG00000134874_9 (sequence is synthesized)
cattcaacgccgccacactgaagaaaattctcattttgagtatcagaaaaatgcacagattgagaagctccggagtgagatcgtcgtattgaaggaagagctgcagctcaccaggtctga

SEQ ID NO: 314868 - DNA, 120 bp, Artificial Sequence
  ENSG00000134874_10 (sequence is synthesized)
gctagaggctgcacaccatgccagtgcagtcagattctccaaggaatatgaaatgcagaaaacaaaagaggaagactttttgaagttatttgacaggtggaaagaagaagaaaaggagaa

SEQ ID NO: 314869 - DNA, 120 bp, Artificial Sequence
  ENSG00000134874_11 (sequence is synthesized)
actagttgatgaaatggaaaaagtcaaggagatgtttatgaaggaatttaaagaattaacttcgaagaattcagcattagaatatcaactgtcagaaatccagaagtccaatatgcagat

SEQ ID NO: 314870 - DNA, 120 bp, Artificial Sequence
  ENSG00000134874_12 (sequence is synthesized)
caagtccaacataggcacattaaaagatgcacacgagtttaaagaagaccgttctccatatccccaggatttccataatgtcatgcagcttcttgatagtcaggaaagcaaatggacagc

SEQ ID NO: 314871 - DNA, 120 bp, Artificial Sequence
  ENSG00000134874_13 (sequence is synthesized)
tcgagttcaagctattcatcaagaacacaagaaagagaagggtcggctcctgtcacatatagagaaacttcgaacctcaatgatagatgatctaaatgcaagcaatgttttctataagaa

SEQ ID NO: 314872 - DNA, 120 bp, Artificial Sequence
  ENSG00000134874_14 (sequence is synthesized)
aaggatagaagagctagggcagagactccaggagcagaatgagctgattataactcagagacagcagattaaagactttacctgtaatccattaaacagtatcagtgaacccaaaggaaa

SEQ ID NO: 314873 - DNA, 120 bp, Artificial Sequence
  ENSG00000134874_15 (sequence is synthesized)
tcctttagcctggcaggcttttgaatctcagccagctgctccagctgtgcctatgaatgccccagccctgcacactttggaaactaaatcaagtctgccaatggtgcatgaacaggcatt

SEQ ID NO: 314874 - DNA, 120 bp, Artificial Sequence
  ENSG00000134874_16 (sequence is synthesized)
ctcgtcgcacatactggaaccaatagaagaactttcagaggaagaaaaaggaagggaaaatgaacagaaattaaataacaacaaaatgcatttaaggaaagctttgaagagtaactcctc

SEQ ID NO: 314875 - DNA, 120 bp, Artificial Sequence
  ENSG00000134874_17 (sequence is synthesized)
cctcactaagggactaagaacaatggtggagcagaacttgatggagaaactggaaaccttggggattaatgcagatatacgtggcatttcaagtgatcagttgcatagagtactaaaaag

SEQ ID NO: 314876 - DNA, 120 bp, Artificial Sequence
  ENSG00000134874_18 (sequence is synthesized)
tgtggaatcagaaagacataagcaagaaagagaaatacctaactttcatcaaattcgagaattccttgaacatcaagtcagctgtaaaattgaggagaaagcactactctcttcagatca

SEQ ID NO: 314877 - DNA, 120 bp, Artificial Sequence
  ENSG00000134874_19 (sequence is synthesized)
gtgcagtgtttctcaaatggataccctttcaactggagaagtacccaaaatgatacaacttccttccaaaaacagacaactgattagacaaaaagctgtttctactgataggacatctgt

SEQ ID NO: 314878 - DNA, 120 bp, Artificial Sequence
  ENSG00000134874_20 (sequence is synthesized)
tccaaaaattaagaaaaatgtcatggaagatccttttcccagaaagtcttcaactattacgacccctccttttagttcagaggaggagcaggaggacgacgacctcatccgggcatacgc

SEQ ID NO: 314879 - DNA, 120 bp, Artificial Sequence
  ENSG00000134874_21 (sequence is synthesized)
atccccaggcccacttcctgtgccgccaccacaaaacaagggcagcttcgggaagaacacagtgaaaagtgacgcggacgggaccgagggaagcgaaatcgaggacactgatgattctcc

SEQ ID NO: 314880 - DNA, 120 bp, Artificial Sequence
  ENSG00000134874_22 (sequence is synthesized)
caagcccgcaggagtcgccgttaaaacacctactgaaaaagttgaaaagatgtttccacatcgcaaaaatgtgaacaaaccagtcggtggaactaatgtccctgagatgtttatcaaaaa

SEQ ID NO: 314881 - DNA, 120 bp, Artificial Sequence
  ENSG00000134874_23 (sequence is synthesized)
agaagaattacaagaactaaagtgtgcggatgtggaggatgaagactgggacatatcatccctagaggaagagatatctttgggaaaaaaatctgggaaagaacagaaggaacctccacc

SEQ ID NO: 314882 - DNA, 120 bp, Artificial Sequence
  ENSG00000134874_24 (sequence is synthesized)
tgcgaaaaatgaaccacattttgctcatgtgctaaatgcctggggcgcatttaatcctaaggggccaaagggagaaggacttcaagaaaatgaatcaagcacattaaaaagcagcttagt

SEQ ID NO: 314883 - DNA, 120 bp, Artificial Sequence
  ENSG00000134874_25 (sequence is synthesized)
aactgtgactgattggagcgacacttcagatgtctaattccacatgtcagaagattattccagaagccagcagtatttcagtatcacagtgtttcagtaatttgcctccatgattctagt

SEQ ID NO: 314884 - DNA, 120 bp, Artificial Sequence
  ENSG00000134874_26 (sequence is synthesized)
gcttctgccttaccgtgtttcccacagcaacacagagactgattcaaagaacaatggtctctttaatggcacccaatacagtattgaaaatcagatcatcaacagtatttcgaagcatgt

SEQ ID NO: 314885 - DNA, 120 bp, Artificial Sequence
  ENSG00000134874_27 (sequence is synthesized)
aaaggtgtttaagacttccgctgctgcttaaaaataacatgtcattgaagtcataaaaagttttttcttcagaaaggtactctagtgttaagtgtatttttttcaactaattttttagtg

SEQ ID NO: 314886 - DNA, 120 bp, Artificial Sequence
  ENSG00000134874_28 (sequence is synthesized)
aattttttttaaacttacagcatgttttggtttgaattactaaaactttaaaaaatatttttcttatgtatgctgtcgtatcgtaggcgtttatattataaaattctgttagtagtctta

SEQ ID NO: 314887 - DNA, 120 bp, Artificial Sequence
  ENSG00000134874_29 (sequence is synthesized)
tgggaggctgaggtgggaggataacttgagcacaggagttcaagaccagcgtgggcaatatagcaagactccacccctccacaccccaaaaaagtaagtttaggattagaatatagctag

SEQ ID NO: 314888 - DNA, 120 bp, Artificial Sequence
  ENSG00000134874_30 (sequence is synthesized)
gtccaatgttaaatacattttcctggagtacatttgtcacattcagctttgagccactgtaagcatgttactattaaatggttggttattttatatagcatattctttatcttggatatt

SEQ ID NO: 314889 - DNA, 120 bp, Artificial Sequence
  ENSG00000134874_31 (sequence is synthesized)
ttatgaataaagtatagttattttaagtgccaattaatttatcagactaaatagaaaatatttgagccattactgaattcacatatgtatgtttttttttactatttaaaatacccaaca

SEQ ID NO: 314890 - DNA, 120 bp, Artificial Sequence
  ENSG00000134874_32 (sequence is synthesized)
tgtattatgaaatacctcaaaagtaatttagttacattcttaaacaatgacattgtcgaaagaaagttcttataagctgttttttgcatttttataacttggttatactatattctgttt

SEQ ID NO: 314891 - DNA, 120 bp, Artificial Sequence
  ENSG00000134874_33 (sequence is synthesized)
ccaagtaaccttttaactaaaagatttgttgggttttagatctcttttcatttgtcaaccttttcagtaaagccctctgttacatcactgtgactgtggctgtgttattagagatgaatt

SEQ ID NO: 314892 - DNA, 120 bp, Artificial Sequence
  ENSG00000134874_34 (sequence is synthesized)
ctgagttaaatttgtacttattaggggtcttacagagggagaatctggccttgattgctatgccatatgacattctgtcctaatggttagaacaaatctttatctgtttccacccaccct

SEQ ID NO: 314893 - DNA, 120 bp, Artificial Sequence
  ENSG00000134874_35 (sequence is synthesized)
gggatcctttttacttgtagcccattcctgccctctaaaagaatccttccaacttcctataggggccatttcatgcagatatactcactttatatgtatgtttctaaaagctttagtgaa

SEQ ID NO: 314894 - DNA, 120 bp, Artificial Sequence
  ENSG00000134874_36 (sequence is synthesized)
ggctgaatccaagtttcatgtagtaggacagagaacagaaggccgaatccaagtttcatgtggtaggacagagaacggcaatctacaaaactacaccaagcctaagatggcccatgtgcc

SEQ ID NO: 314895 - DNA, 120 bp, Artificial Sequence
  ENSG00000134874_37 (sequence is synthesized)
actttgttcattcatttatttattcagcagatatttattgaaccacttggtctggtttggttttgaacacgcactaattcatttaattacaacaactttgcgatgtagttattgttataa

SEQ ID NO: 314896 - DNA, 120 bp, Artificial Sequence
  ENSG00000134874_38 (sequence is synthesized)
tcctcatcctaaaggtgtgagaaacagagttattaagtaagttgccagaagccatacaagtacaaagtgtcaaggggagactttaagccaggtctctattccatgttttgtgtctgccat

SEQ ID NO: 314897 - DNA, 120 bp, Artificial Sequence
  ENSG00000134874_39 (sequence is synthesized)
gttttcattcctgagcagaagagcttggggaaatgaacttttgctaagtaaacccagtatttaaattaagtcactatatctgtgtcttttaagagcccctcctttagcttacatggttag

SEQ ID NO: 314898 - DNA, 60 bp, Artificial Sequence
  ENSG00000134874_40 (sequence is synthesized)
tgtgtcttttaagagcccctcctttagcttacatggtgagcgcagtggcaccatctcggc

SEQ ID NO: 314899 - DNA, 120 bp, Artificial Sequence
  ENSG00000134874_41 (sequence is synthesized)
tgggattataggcgtgagccatcgcgccctgctgcatttcatttttttgtataaaatttggtttgttcgtttttgaggggaaccattcctttatgttgccccttactgatgcccaactaa

SEQ ID NO: 314900 - DNA, 120 bp, Artificial Sequence
  ENSG00000134874_42 (sequence is synthesized)
attcctttatgttgccccttactgatgcccaactaatgtgtttctggttactaacagaccttcatcccccaccctccctaaattcttcggtgtaatctaagcgttatctgcaccacttct

SEQ ID NO: 314901 - DNA, 120 bp, Artificial Sequence
  ENSG00000134874_43 (sequence is synthesized)
gaataataaatgtgtttgaaatgcacacctacacaaccctgtcccacactggcctgtaggacctaatctaccttcatgtctttcagttgatttgtatttctgcaaaagatatttcaagga

SEQ ID NO: 314902 - DNA, 120 bp, Artificial Sequence
  ENSG00000134874_44 (sequence is synthesized)
ttatcaaggtatggaattttttttattttttatcttttaacaaacttgttcatttccttttctttccattgagcacctctgaacaatgtgattcttttttttaagtctttcacacttcag

SEQ ID NO: 314903 - DNA, 120 bp, Artificial Sequence
  ENSG00000134874_45 (sequence is synthesized)
gaaaatactacattcacccacgttgtgattcatatcggacagtttcttactcaaagataacacaaataccaattcttattcatactttgaaactatattttaccctagactgccttggtt

SEQ ID NO: 314904 - DNA, 120 bp, Artificial Sequence
  ENSG00000134874_46 (sequence is synthesized)
caaaggcctagtttcgacattactgtggcaaattatttaagctctctgttttcatttctttttctgtaaatgcaggatgaaaacaatatgtatctcctaggatggctgtgaggagtgagt

SEQ ID NO: 314905 - DNA, 120 bp, Artificial Sequence
  ENSG00000134874_47 (sequence is synthesized)
gagacaggacatgaaaggtgtgtatgaactgtgataactgttgcccttgtgggcatgttatatagggctggctctaggaagaagcctgtgtcttttttcagaaatccctggagcaactta

SEQ ID NO: 314906 - DNA, 120 bp, Artificial Sequence
  ENSG00000134874_48 (sequence is synthesized)
aatgtctttagaaatgacaagtctctcagttatccagttagccgtaaacaggttctggaagacacacctagatagaactcggcccgtcagttctgagtgaggcacgtaccacttgggctt

SEQ ID NO: 314907 - DNA, 77 bp, Artificial Sequence
  ENSG00000134874_49 (sequence is synthesized)
ggcccgtcagttctgagtgaggcacgtaccacttgggcttgggatgtccaatcacaccttggcgatgaccttgagca

SEQ ID NO: 314908 - DNA, 120 bp, Artificial Sequence
  ENSG00000134874_50 (sequence is synthesized)
atggaacactaggcataaacaggttttaattggctcctcagtcaaccatgaccaatatctctatctcagcttctgctgatgccctagctcagggctctgcattccgtgccagggacgcct

SEQ ID NO: 314909 - DNA, 120 bp, Artificial Sequence
  ENSG00000134874_51 (sequence is synthesized)
cagccccttaacatggatgtgccacatgacaggcaataatatattggccccattagcccttcctggagcagtcataatgaattacagtcatgacaggcacatgtaagaaaccaaaatttg

SEQ ID NO: 314910 - DNA, 120 bp, Artificial Sequence
  ENSG00000134874_52 (sequence is synthesized)
ctaaatatgtacatgagtcttcatcacagcatcgtttatgaaaacaactaaatattcactaatggtgccagtggaataaatcagagaacatcccctgctacgtaactctctgcatacatc

SEQ ID NO: 314911 - DNA, 120 bp, Artificial Sequence
  ENSG00000134874_53 (sequence is synthesized)
aaagagaatggtgtggctttgctttttcaacaatctactgagtggccatgggcatgtggatatggccatgaatgagcaagatcctctctgatcctgtagaagttaagttctaccagataa

SEQ ID NO: 314912 - DNA, 120 bp, Artificial Sequence
  ENSG00000134874_54 (sequence is synthesized)
cttgctgcttcaacaaaaagatttacctttttaaataaatgttgtagaatacttaaaaaaaacaaactagaatttgcctgtgtgcagccagtaacatgtctatttaacctggacaccttt

SEQ ID NO: 314913 - DNA, 120 bp, Artificial Sequence
  ENSG00000134874_55 (sequence is synthesized)
tgaggaatattctcagattgcccccatgctgtttataagacattgttccttatacacctgtttatgaatgaaaagaaacataaggagtgggtacaaagacttctatctatgaatgattaa

SEQ ID NO: 314914 - DNA, 120 bp, Artificial Sequence
  ENSG00000134874_56 (sequence is synthesized)
aaaggctagagtacgaatacttcttgaacctttggtactaaatgcttttcatgttctatataaatgtagaaaacattttacaaatcctgtaaataaactgtttattttttatagaaagcc

SEQ ID NO: 314915 - DNA, 120 bp, Artificial Sequence
  ENSG00000134874_57 (sequence is synthesized)
ggagccgggacaccgagggaagaggccggagggagatcgcggaggggagggggcgggaggggggtggggtatcctgagtcgtccgtggtccggagtctggaaggccctagagcggcgcca

SEQ ID NO: 314916 - DNA, 120 bp, Artificial Sequence
  ENSG00000134874_58 (sequence is synthesized)
gtcgacccgcctcgccacaacttgcccagaccagacacgtttcatcctgcgccctgcaagaaggagccggcctgcctctctccgctttgctgctcctcggcctccgcgggcccggcccgc

SEQ ID NO: 314917 - DNA, 120 bp, Artificial Sequence
  ENSG00000134874_59 (sequence is synthesized)
gtcagcagcgaccctggggtctgggtcccctgtgtcgcccccgcccgcctgcagcgcccggcacccgcccaggagcgcgcagctggggttctagggacgtatacttgagcaagagagacc

SEQ ID NO: 314918 - DNA, 120 bp, Artificial Sequence
  ENSG00000134874_60 (sequence is synthesized)
ttcttattagttgtgtttcatctttataaatatctaattaacttatgctggtatatcatcagacaaaaaagctgtcagtgctttctttatgttatttaaataaggattggatatgcataa

SEQ ID NO: 314919 - DNA, 120 bp, Artificial Sequence
  ENSG00000134874_61 (sequence is synthesized)
tgtaaaagctctttgcaagaaggtgcagtataaagaagctgtaagtaatgacacaattttaaaacatggagtggttttactgaggaaatgtttttcttaggtgtgtgaaaaccaaaatta

SEQ ID NO: 314920 - DNA, 120 bp, Artificial Sequence
  ENSG00000134874_62 (sequence is synthesized)
ttaagaatatatacacatttgggtttagaggagacaggccccggcttcagcccattttgataaacatgccccgtggctggcagagatctgggcgtgggaggatgctacagccgtgggtat

SEQ ID NO: 314921 - DNA, 120 bp, Artificial Sequence
  ENSG00000134874_63 (sequence is synthesized)
aacctctggcctcgccgccatcttggccatagccccaaaggcacttgtgcccactgagaattacctgagaaaggtgccaccactttaagaggcacatctcttaatattataaatcctaaa

SEQ ID NO: 314922 - DNA, 120 bp, Artificial Sequence
  ENSG00000134874_64 (sequence is synthesized)
atgcaagctgaggcagcggattggttttcaagcatggtaagaggcgggaggccggggcgcccccgacggggatgccgggctggggagaaccggggcttccccggacccccagctccccag

SEQ ID NO: 314923 - DNA, 120 bp, Artificial Sequence
  ENSG00000134874_65 (sequence is synthesized)
ttcttcaactctatcaagtttgaaagacatattggatgaagaatattcttagtcacactttccctctgaactttttgatgtggttcctttgtcttctggcagtaaatgttgctgtgagaa

SEQ ID NO: 314924 - DNA, 120 bp, Artificial Sequence
  ENSG00000134882_0 (sequence is synthesized)
gcacttcagcttcccctcccccggcgccctctggggctccgagcccggcgggaccatgttcaccagcaccggctccagtgggctctacaaggcgcctctgtcgaagagccttctgctggt

SEQ ID NO: 314925 - DNA, 120 bp, Artificial Sequence
  ENSG00000134882_1 (sequence is synthesized)
ccccagtgccctctccctcctgctcgccctcctcctgcctcactgccagaagctctttgtgtatgaccttcacgcagtcaagaacgacttccagatttggaggttgatatgtggaagaat

SEQ ID NO: 314926 - DNA, 120 bp, Artificial Sequence
  ENSG00000134882_2 (sequence is synthesized)
aatttgccttgatttgaaagatactttctgcagtagtctgcttatttataattttaggatatttgaaagaagatatggaagcagaaaatttgcatcctttttgctgggttcctgggtttt

SEQ ID NO: 314927 - DNA, 120 bp, Artificial Sequence
  ENSG00000134882_3 (sequence is synthesized)
gtcagccttatttgactttctcctcattgaagctatgcagtatttctttggcatcactgcagctagtaatttgccttctggattcctggcacctgtgtttgctctgtttgtaccatttta

SEQ ID NO: 314928 - DNA, 120 bp, Artificial Sequence
  ENSG00000134882_4 (sequence is synthesized)
ctgctccataccaagagtccaagtggcacaaattctgggtccgttgtccatcacaaacaagacattgatttatatattgggactgcagcttttcacctctggttcctacatctggattgt

SEQ ID NO: 314929 - DNA, 120 bp, Artificial Sequence
  ENSG00000134882_5 (sequence is synthesized)
agccataagtggacttatgtccggtctgtgctacgacagcaaaatgttccaggtgcatcaggtgctctgcatccccagctggatggcaaaattcttttcttggacacttgaacccatctt

SEQ ID NO: 314930 - DNA, 120 bp, Artificial Sequence
  ENSG00000134882_6 (sequence is synthesized)
ctcttcttcagaacccaccagcgaagccagaattgggatgggagccacgctggacatccagagacagcagagaatggagctgctggaccggcagctgatgttctctcagtttgcacaagg

SEQ ID NO: 314931 - DNA, 120 bp, Artificial Sequence
  ENSG00000134882_7 (sequence is synthesized)
gaggcgacagagacagcagcagggaggaatgatcaattggaatcgtctttttcctcctttacgtcagcgacaaaacgtaaactatcagggcggtcggcagtctgagccagcagcgccccc

SEQ ID NO: 314932 - DNA, 120 bp, Artificial Sequence
  ENSG00000134882_8 (sequence is synthesized)
tctagaagtttctgaggaacaggtcgcccggctcatggagatgggattttccagaggtgatgctttggaagccctgagagcttcaaacaatgacctcaatgtcgccaccaacttcctgct

SEQ ID NO: 314933 - DNA, 120 bp, Artificial Sequence
  ENSG00000134882_9 (sequence is synthesized)
tggtgctgatgttcttgtgggaagagggaggttccaccgcacccctgccctcaaccgcaagactgttgccgttttagtgtggagataagtttgccattacattagcatgtattttctatc

SEQ ID NO: 314934 - DNA, 120 bp, Artificial Sequence
  ENSG00000134882_10 (sequence is synthesized)
tatattttttattgggcattttccctaggttggagagtcagcactcgttttgaatgtgtttaaaatgcattaaaatggaagatttctgcaggcagttgaatggcactccagatggggaat

SEQ ID NO: 314935 - DNA, 120 bp, Artificial Sequence
  ENSG00000134882_11 (sequence is synthesized)
tgctgtaaccctcttactgtaacatgtcatctcctgcgtcgtgatggggagagggtaatgttacttcacaaaggacatgtcagatccttcttcatggacttttttagttactgttttttc

SEQ ID NO: 314936 - DNA, 120 bp, Artificial Sequence
  ENSG00000134882_12 (sequence is synthesized)
tctcaaacttgttttcgaatctcctgggagtgagggagaaacagggagctgaatcctcccccaagctgttccaggccagaggactctgcagtaccttctcctacatctagtaacaaagaa

SEQ ID NO: 314937 - DNA, 120 bp, Artificial Sequence
  ENSG00000134882_13 (sequence is synthesized)
tggtgataaccatgcactggttcaaggttctggagttctccatgaaacttgggttaattttgctcagagtatccagagttagccactaggctgcgggtgaaatgggatggagaagaacaa

SEQ ID NO: 314938 - DNA, 120 bp, Artificial Sequence
  ENSG00000134882_14 (sequence is synthesized)
cagcaggcttcctggagccacatgggctgactagggcactctgtggctggcctggcatgggctcagcccaggaagaggagaaacgatcccttgcctgcccctccctgtggcagggctaac

SEQ ID NO: 314939 - DNA, 120 bp, Artificial Sequence
  ENSG00000134882_15 (sequence is synthesized)
tgcctggccctcctggctcgcagccagccagccccctggcagcaggttctcctcagggcttgggtcttcaacctgtggcgacaggaggcagggcagactgtggaggacaggatgcaggtc

SEQ ID NO: 314940 - DNA, 120 bp, Artificial Sequence
  ENSG00000134882_16 (sequence is synthesized)
agggagagggaaggcaggggtggaccgccatgagcatgaaaagacccgaagcaagttgactcttgcaatgtgcaactgttatgttctgcaaaatgagcaacgatgtatcaaattgatgca

SEQ ID NO: 314941 - DNA, 120 bp, Artificial Sequence
  ENSG00000134882_17 (sequence is synthesized)
aatttagatgttgatacttacaataaagtttttaatgtgttttactcttcagtatttttctatcagacttgtacaaataaagccttgttccaggctatacatatttaccagtcaaccaaa

SEQ ID NO: 314942 - DNA, 120 bp, Artificial Sequence
  ENSG00000134882_18 (sequence is synthesized)
gtggatttttgagagggccttgtgtgtgttgggccagatgaggggaagcagagaggaggacagtggtggcagactccagtgatgaaagcgaactggggagctttgccatcacatctttat

SEQ ID NO: 314943 - DNA, 81 bp, Artificial Sequence
  ENSG00000134882_19 (sequence is synthesized)
gatgaaagcgaactggggagctttgccatcacatctttatgaagcattttatctttggatactggagcctatggaaggaag

SEQ ID NO: 314944 - DNA, 120 bp, Artificial Sequence
  ENSG00000134882_20 (sequence is synthesized)
cgtgagacactacgcccggccggaaggaagggtttttaagcaagggagtgttgtgatcagagttgtattttaggaagagagtactgccaacaatgttaagaaatggattagagagaagca

SEQ ID NO: 314945 - DNA, 120 bp, Artificial Sequence
  ENSG00000134882_21 (sequence is synthesized)
ccagcaccggctccagtgggctctgtgagtaccggcctccgccatcctggctgccccctacacgccaccctaggcacctctttgaggaggctggggcagcggggaccctcgggtttgccg

SEQ ID NO: 314946 - DNA, 120 bp, Artificial Sequence
  ENSG00000134882_22 (sequence is synthesized)
gaggtggtggggccgaccctccagacccgcgtccgaaccctgctagttcccggtcttgggggtcagcggaaaccgcccccatttcggcctggaggggcgaatggggacaaagccccgccg

SEQ ID NO: 314947 - DNA, 120 bp, Artificial Sequence
  ENSG00000134882_23 (sequence is synthesized)
ctgtgatggtagcgtcaccatttgctaaatggtttgctgtgaagactactagagtactactgtccaggttacatttgaaaagcttctttgccaatcctcagcgaatgtcaattgctccct

SEQ ID NO: 314948 - DNA, 80 bp, Artificial Sequence
  ENSG00000134882_24 (sequence is synthesized)
ccgagcccggcgggaccatgttcaccagcaccggctccagtgggctctatggagtttctccctgtcggtctctgtctcct

SEQ ID NO: 314949 - DNA, 120 bp, Artificial Sequence
  ENSG00000134882_25 (sequence is synthesized)
accaatgaatgactgcaagcccatgaagccaacactgacgaagttgcagtatgcagcgccgtgcctcgcctcgcctcgcctcaccattgcctccactcacgccagaacaagtgtctatcc

SEQ ID NO: 314950 - DNA, 120 bp, Artificial Sequence
  ENSG00000134882_26 (sequence is synthesized)
tagcacagtcttttccagagtctcagtgtcctaccagcattctcattttgtcctccacatgtttattggtcacttttgatcttcacattcagccttctctaactggtgctgggcaccggg

SEQ ID NO: 314951 - DNA, 120 bp, Artificial Sequence
  ENSG00000134882_27 (sequence is synthesized)
gtgttggggggaagcaagccaggcctggtgccagccctcaagggagctcaccgtctatgagggagaccagatccatgcaaggccctaacccagtacccaactcatgcaagtacctagtgc

SEQ ID NO: 314952 - DNA, 120 bp, Artificial Sequence
  ENSG00000134882_28 (sequence is synthesized)
cagtccttagagcagaggagacctgtaaacattcattcctgtactttaacaacttgacatcaggagattttacattgaaactttctcttcctgtggatgttagatcggatcaggtgctca

SEQ ID NO: 314953 - DNA, 120 bp, Artificial Sequence
  ENSG00000134882_29 (sequence is synthesized)
tggtgagttctgatgcttctcatcccagtagctggactacagagacaggaagcagcctgcagagaaaatgaagtagtccagggtttcagtgtgagttaatgtgtgttgtggctaaaatgt

SEQ ID NO: 314954 - DNA, 120 bp, Artificial Sequence
  ENSG00000134882_30 (sequence is synthesized)
ggtgctttcgatagggagagagatgggctgaccatctataataccattatttatatagtcatcagagttgtgtatttgctaaactttataaatacataaagtgtattttagaacaacaca

SEQ ID NO: 314955 - DNA, 120 bp, Artificial Sequence
  ENSG00000134882_31 (sequence is synthesized)
gagcgtgtgccgcgctgaaggaaggggccgtcccccttaccatgccccattcttttaggcttgggggaccgaactaactccccccgcccccacttgcaaagttcagcctccgctttagaa

SEQ ID NO: 314956 - DNA, 120 bp, Artificial Sequence
  ENSG00000134882_32 (sequence is synthesized)
gctgacctctcagtttcacttggatgtgtttcttcttcagtctccaagaagagtttttagacaaacacacactgatgagagtgctttcaagtggagggaagttaggaagtcgtggcgagg

SEQ ID NO: 314957 - DNA, 120 bp, Artificial Sequence
  ENSG00000134882_33 (sequence is synthesized)
gtcgagaggctgcctgagtcagaggctgtatgtcattaggttcttctaacgtctaaagtgctgtgagtatggaggaacattgtcagacacaagaaagagcatcaagcaagtcagctgaat

SEQ ID NO: 314958 - DNA, 120 bp, Artificial Sequence
  ENSG00000134884_0 (sequence is synthesized)
gcagctgccatcttaggggcgcctggcgctacgggtttctcgttggaggcggccttcgtggcagctgtagacgccgggaaaaggcataaagtccgttggccgacacctttctttcctccg

SEQ ID NO: 314959 - DNA, 120 bp, Artificial Sequence
  ENSG00000134884_1 (sequence is synthesized)
gcctcggtagaaccgccagcccgcgtccgaaggcggaggcgaggggaactggccgcgtgaggggcctgaggcgagcggttagagcgtctcccggaaggatgggccggtctcggagccgga

SEQ ID NO: 314960 - DNA, 120 bp, Artificial Sequence
  ENSG00000134884_2 (sequence is synthesized)
gctcgtcccgctccaagcacaccaagagcagcaagcacaacaagaagcgcagccggtcccggtcgcgatcccgggacaaggagcgcgtgcggaagcgttccaaatctcgggaaagtaaac

SEQ ID NO: 314961 - DNA, 120 bp, Artificial Sequence
  ENSG00000134884_3 (sequence is synthesized)
ggaaccggcggcgggagtcgcggtcccgttcgcgctccaccaacacggccgtgtcccggcgcgagcgggaccgggagcgcgcctcgtccccgcccgaccgcatcgacatcttcgggcgca

SEQ ID NO: 314962 - DNA, 120 bp, Artificial Sequence
  ENSG00000134884_4 (sequence is synthesized)
cggtgagcaagcgcagcagcctggacgagaagcagaagcgagaggaggaggagaagaaagcggagttcgagcggcagcgaaaaattcgacagcaagaaatagaagaaaaactcatcgagg

SEQ ID NO: 314963 - DNA, 120 bp, Artificial Sequence
  ENSG00000134884_5 (sequence is synthesized)
aagaaacagcacgaagagtagaagaattggtagcaaaaagggtggaggaagaactggagaaaaggaaggatgaaattgaacgagaagttctccgaagggtggaggaagccaaacgcatca

SEQ ID NO: 314964 - DNA, 120 bp, Artificial Sequence
  ENSG00000134884_6 (sequence is synthesized)
tggaaaagcagttgctcgaagaactcgagcgacagagacaagctgagcttgccgcacaaaaagctagagaggaggaagaacgtgcaaaacgtgaggagctagagcgaatactggaagaga

SEQ ID NO: 314965 - DNA, 120 bp, Artificial Sequence
  ENSG00000134884_7 (sequence is synthesized)
ataaccgaaaaattgcagaagcacaagccaaactggccgaagaacagttgagaattgttgaagaacaaagaaagattcatgaggaaaggatgaaactagaacaagaacgacaacgtcaac

SEQ ID NO: 314966 - DNA, 120 bp, Artificial Sequence
  ENSG00000134884_8 (sequence is synthesized)
aaaaagaagaacaaaaaattatcctgggcaaggggaagtccaggccaaaactgtccttctcattaaaaacccaggattaaattgcaaactctgaactttttacaaagaaaaatggaaaaa

SEQ ID NO: 314967 - DNA, 120 bp, Artificial Sequence
  ENSG00000134884_9 (sequence is synthesized)
tttgtttttgtttttgtttttttaatttgtaaaatctggaaagttagcttgttctaataggggctatgctctgcaattccctttttttttttttttttccttccactaagtcaaatcctt

SEQ ID NO: 314968 - DNA, 120 bp, Artificial Sequence
  ENSG00000134884_10 (sequence is synthesized)
ttttttttttccttccactaagtcaaatccttatcagatcattgttgtattctaaggagtgacgtatttttcacctgtttggattctatattagtggtctgaggaagagcagatcacatt

SEQ ID NO: 314969 - DNA, 120 bp, Artificial Sequence
  ENSG00000134884_11 (sequence is synthesized)
gtaaaactatggatggtctgataaggcttttactgaccccactgacttcagagttatactctgtttgctacatcataatgctggttttgctgactttttgtttttttatatatttataaa

SEQ ID NO: 314970 - DNA, 120 bp, Artificial Sequence
  ENSG00000134884_12 (sequence is synthesized)
aaaagaaaaagttggtgattgcattgggaaattcccagggtattactggacctatgtggtgtattgttaaaccagtgtccttgtgatactgttgctcttgatgttcctgatacaggtaag

SEQ ID NO: 314971 - DNA, 120 bp, Artificial Sequence
  ENSG00000134884_13 (sequence is synthesized)
gaaacagttggtcaactctgatacaaagtatatatacagttcagtattgtctctgttcattttgtttttatttcattgacaaaatcaaaccagcattccccattgtgtaaataaatgatt

SEQ ID NO: 314972 - DNA, 120 bp, Artificial Sequence
  ENSG00000134884_14 (sequence is synthesized)
ctgaataaagtaaagtcttaaattcatatgttgaagcaattttttttaatgttatgttaagtcttaaagagggtggttcactttttgatggtcaaccatttagaagtcttagaactatat

SEQ ID NO: 314973 - DNA, 120 bp, Artificial Sequence
  ENSG00000134884_15 (sequence is synthesized)
ttcctcttgtttatacttttaacatagggtttatatgtacattaaatatacttgtgaattagtatttaatggctatttttacaaatatcaactttatgctgatagagcaaatggcatcag

SEQ ID NO: 314974 - DNA, 120 bp, Artificial Sequence
  ENSG00000134884_16 (sequence is synthesized)
tgttacctttaagaaagactaacaacatccagaagatttaaattctcaaacctgtgcctctgttttaggatataagtattatcacaaagtatacttaataaaggctagaaaaatgctttt

SEQ ID NO: 314975 - DNA, 120 bp, Artificial Sequence
  ENSG00000134884_17 (sequence is synthesized)
aaattatggaatctgagatcgttttcagagtgggccatcagaaagaacttagctttatactgtcaaaaaaaggctaagatggtcgagtcattttcattgtgtagtgtacttgcacgttta

SEQ ID NO: 314976 - DNA, 120 bp, Artificial Sequence
  ENSG00000134884_18 (sequence is synthesized)
tttttaggacaaacacatttgaactttatgaattttttttttttttttgcatgtgaaatcttatgaatggctttcattttatacactagaatctgcctcatttactcttaacatatgttt

SEQ ID NO: 314977 - DNA, 120 bp, Artificial Sequence
  ENSG00000134884_19 (sequence is synthesized)
aagtatactggtattaaaacattcaagaaaaggatattgatctaaaatgctacctgagatgcataaacatgtcatcaagtagagaaaatatttttatttttgcccaatattttttagaca

SEQ ID NO: 314978 - DNA, 120 bp, Artificial Sequence
  ENSG00000134884_20 (sequence is synthesized)
gtttgattattcttaaaaattgaaaacataagctaaagagatgactaaatggtagattattttgtgtgtgcatgctaggaaaaatgctgttgctttagttttgagctcttcaatgagtct

SEQ ID NO: 314979 - DNA, 120 bp, Artificial Sequence
  ENSG00000134884_21 (sequence is synthesized)
aattgtggtaaggaacaatataaaatcagtttaaagatctttaaaggtagaattttaaataggcatgaaatatagtgagaacttttagtaaacatactacttactctaaaatcaaacatt

SEQ ID NO: 314980 - DNA, 120 bp, Artificial Sequence
  ENSG00000134884_22 (sequence is synthesized)
ttattttcctaaagaatataggttgccaaaaaatattttatctctaaatataggttagctgtaattatttcatgaatttttttttttttcaatgtaactttttttggtgaagattcatgg

SEQ ID NO: 314981 - DNA, 120 bp, Artificial Sequence
  ENSG00000134884_23 (sequence is synthesized)
ttcctaagttctgtattcaagtttttggaaatgtttatttaaaaactgttctatacaagtgttcaaaacattgtatctaaagagagtagcctggacttaaaatatttgaaatcagcttat

SEQ ID NO: 314982 - DNA, 120 bp, Artificial Sequence
  ENSG00000134884_24 (sequence is synthesized)
gcgtgccttttaattttttttttaagtttcttactgccacatatggtgtgaagtgacagtaagttgcttaatgacatcctgcagtatctgcttgcttttggagactccagtgagatgttg

SEQ ID NO: 314983 - DNA, 120 bp, Artificial Sequence
  ENSG00000134884_25 (sequence is synthesized)
aaattgttcctgtgcttggtaactactttcctctgccaggctatgggaaagaggatgtaattgtgaataatatacaccatccagtctttaatgtgctgcaacaatgtagtaatttgtttt

SEQ ID NO: 314984 - DNA, 120 bp, Artificial Sequence
  ENSG00000134884_26 (sequence is synthesized)
tttcatttgttcccactgcctttgtgtacatagaaaacttaaaaatttcccccagtctattagaagttaagatgttccctaatttattaaatatgcctttattcacaatttgttttttta

SEQ ID NO: 314985 - DNA, 120 bp, Artificial Sequence
  ENSG00000134884_27 (sequence is synthesized)
ggttattcttaatgcattatagaattaagtatgactttgtttatttttattacagtatgtagttattgacatattgtggtttgcagaattatcaattgtataaactaaacctttaaatta

SEQ ID NO: 314986 - DNA, 120 bp, Artificial Sequence
  ENSG00000134884_28 (sequence is synthesized)
agtgttgggttctgcctcctgctcagttcagaaagagatggaatacagactatctaattcctttctcgtctaaacttaacattgctgcgaaagttaattttttagcctattcagaagtgc

SEQ ID NO: 314987 - DNA, 120 bp, Artificial Sequence
  ENSG00000134884_29 (sequence is synthesized)
tgactgataacttaaaagttggaagcttttataaaacatattcaaggatactttttgatttaatggaactggctatttgagaagtgtttgaaacttttgccatggctgcaggacttacat

SEQ ID NO: 314988 - DNA, 120 bp, Artificial Sequence
  ENSG00000134884_30 (sequence is synthesized)
tcttttttgggaggacggtggggagacagggagtggtaaagggaaaaggttaaaaatccacctgtggttgtatattcttctattctgtcactctgttacctagactgtgagaggcttttg

SEQ ID NO: 314989 - DNA, 120 bp, Artificial Sequence
  ENSG00000134884_31 (sequence is synthesized)
ccttcagtcagattaaaaagagcagggcctaacattgagtgatagcacctgctttgataaataggttttctcactcttctttttttccttcttttatccctcactccctcccctaaaccc

SEQ ID NO: 314990 - DNA, 120 bp, Artificial Sequence
  ENSG00000134884_32 (sequence is synthesized)
tgcttcagcacaatggactaattctagcattctgatcataaggccctccattttcctaatgtgtttcaaggaatctttttaggaaaaatatccagattattcatccactttttttagtat

SEQ ID NO: 314991 - DNA, 120 bp, Artificial Sequence
  ENSG00000134884_33 (sequence is synthesized)
ctactaacaactcctttttttctctagagagttatgaaggaacaggttgtccttgtctggagtcaagctaaacacatgatttgttttatcagcagctggagcagaagttgaaaatgtctt

SEQ ID NO: 314992 - DNA, 120 bp, Artificial Sequence
  ENSG00000134884_34 (sequence is synthesized)
tctgtgagacagtaatttgctactgaagctttatggcttgtttgcactgattactccaggatccaaaaacttggtgaaagtcactgaaacactcaaggcaaattactttacagccctgag

SEQ ID NO: 314993 - DNA, 120 bp, Artificial Sequence
  ENSG00000134884_35 (sequence is synthesized)
tgtctgtcaccatagtttgcataatgaatatgaatcccattggtgtgtgatgtaggaaatcctgtagttgtattttcttgaactgaaatatttgactcaaaataattaagactcattgtc

SEQ ID NO: 314994 - DNA, 120 bp, Artificial Sequence
  ENSG00000134884_36 (sequence is synthesized)
atttttcatcttggcattattgtggacaagttgacatattaaatctctttgctttctggtaagcttagcttttaaaatgcattttcccttgtcctgtctttaactagatatacatgctta

SEQ ID NO: 314995 - DNA, 120 bp, Artificial Sequence
  ENSG00000134884_37 (sequence is synthesized)
atttatatcagtgcttttaataatgaagatatttttggagtaatggtgctgtcttgtagcgagttattaatcatagtaagatttttttctcttcatttgctttttttgtttcatattaac

SEQ ID NO: 314996 - DNA, 120 bp, Artificial Sequence
  ENSG00000134884_38 (sequence is synthesized)
aattttttttttacacggacacaaccctctgacagtctttccaaatattaaaatcatttgaatatgtatgctgtgatctgaacactgctcaagccatcaagcagtcttcatacagtttgc

SEQ ID NO: 314997 - DNA, 120 bp, Artificial Sequence
  ENSG00000134884_39 (sequence is synthesized)
attataaaatctcattaaattctccaagaaaaaataagttgaagaattttatttcctgaccatgcatcccctggatttctgagtttcagttcagattgtagatgacaatataagctgcct

SEQ ID NO: 314998 - DNA, 120 bp, Artificial Sequence
  ENSG00000134884_40 (sequence is synthesized)
tccgaaattgtcaacatctgaatgttaagtccattttccccatggaagaagcccgtagttccatgaagtatggattaccatttgtatttttcactaacagtaaatgtatttttcttatta

SEQ ID NO: 314999 - DNA, 120 bp, Artificial Sequence
  ENSG00000134884_41 (sequence is synthesized)
attgtttgccttaggaatgatgaattacattttttgttccttcttaccataaacatctgcattcctcagctcagccttccttgtatgttgtttctttataaatggttgagctgctgatgc

SEQ ID NO: 315000 - DNA, 120 bp, Artificial Sequence
  ENSG00000134884_42 (sequence is synthesized)
aggtattgccaagctaacagtacaaatcattttaaagaggaagctggcgcgtatggcagccgaggagcacactctgcaggacactggacaagacagtaaatattcaacttttaatgctga

SEQ ID NO: 315001 - DNA, 120 bp, Artificial Sequence
  ENSG00000134884_43 (sequence is synthesized)
aggagtataggtaaagaatacgtaggtatacataattggtgagacaaatattcactttatttatattttatatattatttttttaatttggtaaatactatccagttttgtagttgtcct

SEQ ID NO: 315002 - DNA, 120 bp, Artificial Sequence
  ENSG00000134884_44 (sequence is synthesized)
tccttgttgatttgtgtgatattaaagtattagtaataattgccaggaaactatcattagggagggtttagttggttgctgtttggactgggagggatgatttaaatttagtgctagaaa

SEQ ID NO: 315003 - DNA, 120 bp, Artificial Sequence
  ENSG00000134884_45 (sequence is synthesized)
ccaattttagtgactgcacagtttatcatttgtcagacagaaggtagctataaagctaccctgtaagtcatatcaaaaaagttcagaggaagattagtaaatatttatcaataaaaataa

SEQ ID NO: 315004 - DNA, 120 bp, Artificial Sequence
  ENSG00000134884_46 (sequence is synthesized)
agacaagctgagcttgccgcacaaaaagctagagagaggaagctggcgcgtatggcagccgaggagcacactctgcaggacactggacaagacagaggaagaacgtgcaaaacgtgagga

SEQ ID NO: 315005 - DNA, 120 bp, Artificial Sequence
  ENSG00000134884_47 (sequence is synthesized)
gactccttagcagcggagcagcccacggcctgcctgtactgcctgttacatgggccctctggtttgatgtcatcagtggaaatagaagcagggaactgacattctgatttggcatttgct

SEQ ID NO: 315006 - DNA, 120 bp, Artificial Sequence
  ENSG00000134897_0 (sequence is synthesized)
agttcgcgacaggacgagcggaaatactgccaggattttaccacctctcgcccatttatttacttctcggtcaccgctttcgggggacagataaacaccacagatgcccatcaaaggggc

SEQ ID NO: 315007 - DNA, 120 bp, Artificial Sequence
  ENSG00000134897_1 (sequence is synthesized)
gcacgggtctggaggcgcagctcaggtttttgcgttggtcaccctgccctccgcacgtggagagggcaggcataaagcaccttgaaaggaaggtgctgtcaatgctatccgacgacctgt

SEQ ID NO: 315008 - DNA, 120 bp, Artificial Sequence
  ENSG00000134897_2 (sequence is synthesized)
cgccgggcaccgcagcatcctcgctcgctccgatgggacgagggacgccggccccagggtaacaggaggcgcctcgccggccgcgcgctggatgctgtgatccaggtccggagccgggtt

SEQ ID NO: 315009 - DNA, 120 bp, Artificial Sequence
  ENSG00000134897_3 (sequence is synthesized)
ccgccgcggccgcagcgacccgaccccacccgacaggccagaggaatcagtttagacttgaaattcagtttttcctgaaactgatcagaagttagtgacaccttgattggatccgttttt

SEQ ID NO: 315010 - DNA, 120 bp, Artificial Sequence
  ENSG00000134897_4 (sequence is synthesized)
ctgtcaggagctcattttgcagctctcaagcttttatagcatgctgtaaacaattgtcaaagttgtttatcaagaaacagatagagttgcaacttgtttctagtaatagaaacttttaca

SEQ ID NO: 315011 - DNA, 120 bp, Artificial Sequence
  ENSG00000134897_5 (sequence is synthesized)
ctgcattcaatgcctaacgttgcagaaacagaaaggtcaaatgattctggaaatggtgagcacaaatctgagagaaagtcacctgaagagaatctacaaggtgctgtaaaatctttctgc

SEQ ID NO: 315012 - DNA, 120 bp, Artificial Sequence
  ENSG00000134897_6 (sequence is synthesized)
acaagtgcctcaggagcacccttgggtcccaaaggagatggtcattatccatggagttgtccagtgactcatacacgggaaaaaatttatgccatctgttcggactatgcctttctcaac

SEQ ID NO: 315013 - DNA, 120 bp, Artificial Sequence
  ENSG00000134897_7 (sequence is synthesized)
caggcgacctcaatctataaaactccaaatccatcccgctctccttgcctccctgatagtacctctttatctgctggaaataattcatcaagatacattggtatcccgactagtacatcg

SEQ ID NO: 315014 - DNA, 120 bp, Artificial Sequence
  ENSG00000134897_8 (sequence is synthesized)
gaaattatctacaatgaagaaaatagcttggaaaacttatccaacagcctgggcaagctacctctcgcatgggaaattgataaatctgaatttgatggggtgaccacaaattcgaaacac

SEQ ID NO: 315015 - DNA, 120 bp, Artificial Sequence
  ENSG00000134897_9 (sequence is synthesized)
aaatcaggcaatgcaaagaaacaagtttccaagagaaaaacttcagataaaaagggaagatatcagaaggaatgtcctcagcattctcctcttgaagatattaaacagcggaaagtatta

SEQ ID NO: 315016 - DNA, 120 bp, Artificial Sequence
  ENSG00000134897_10 (sequence is synthesized)
gacctcagacgatggtactgcataagccgaccacagtataagacttcttgtggcatctcttcattaatttcttgttggaatttcttatacagcacaatgggagctggaaaccttccacct

SEQ ID NO: 315017 - DNA, 120 bp, Artificial Sequence
  ENSG00000134897_11 (sequence is synthesized)
attacccaagaagaagctttacatattctgggctttcaacctccatttgaagatattaggtttggtcctttcacggggaatacaacacttatgaggtggtttagacaaattaatgaccac

SEQ ID NO: 315018 - DNA, 120 bp, Artificial Sequence
  ENSG00000134897_12 (sequence is synthesized)
ttccatgtaaaaggatgctcttatgttctatataagcctcatgggaagaataaaacagcaggagaaactgcttcaggggccctgtcaaagttaacccgtggattgaaagatgaatcgctg

SEQ ID NO: 315019 - DNA, 120 bp, Artificial Sequence
  ENSG00000134897_13 (sequence is synthesized)
gcttatatctatcattgccaaaatcattatttttgtccaattggcttcgaagcaacccctgttaaagctaataaagcattcagcaggggacctctctcaccacaggaagttgaatattgg

SEQ ID NO: 315020 - DNA, 120 bp, Artificial Sequence
  ENSG00000134897_14 (sequence is synthesized)
atcttaattggagaatcaagtagaaaacatcctgccattcactgtaaaaaatgggcagatattgttactgatctaaacactcaaaatccagaatacctggatatccggcacttagagagg

SEQ ID NO: 315021 - DNA, 120 bp, Artificial Sequence
  ENSG00000134897_15 (sequence is synthesized)
aactggcaaagatttggcctttggaactttccatttggaaccattagacaagaatcacaacctccaacacatgcccagggaattgccaaatctgagagtgaagacaatatttccaagaag

SEQ ID NO: 315022 - DNA, 120 bp, Artificial Sequence
  ENSG00000134897_16 (sequence is synthesized)
cagcatgggcgtctgggccggtctttcagtgctagtttccatcaggactcggcatggaaaaagatgtctagtatccatgagagaaggaacagtggttaccagggttacagtgattacgat

SEQ ID NO: 315023 - DNA, 120 bp, Artificial Sequence
  ENSG00000134897_17 (sequence is synthesized)
gggaatgattgactatgcttgctactgaacagctggcattatatatgaaactgctatatacaggactgtataaagacagtagaagattttagtaagcctacattaaataggagcagatct

SEQ ID NO: 315024 - DNA, 120 bp, Artificial Sequence
  ENSG00000134897_18 (sequence is synthesized)
tgtggtataaaaaataaccttgtagttctccagatactaagcttgtatatgattatggtgggtgatttcagatatataagcagataagcacagattattgtcctttcaagttaagagtat

SEQ ID NO: 315025 - DNA, 120 bp, Artificial Sequence
  ENSG00000134897_19 (sequence is synthesized)
ataatctggacagaaaatttcacaaaattcaataaaattacaactgttgtctaaataagtgaaacacaaattcacttaatagcatcaagatttgaaatacttaagcatgaagtgactttt

SEQ ID NO: 315026 - DNA, 120 bp, Artificial Sequence
  ENSG00000134897_20 (sequence is synthesized)
ataatgactcgatccctagacatttgttacagatagttttatgcctaagaccaagatgtaaagtaccatctgcccttaaaaaaaattggggctgtcaatttctagttttcactcatggtt

SEQ ID NO: 315027 - DNA, 120 bp, Artificial Sequence
  ENSG00000134897_21 (sequence is synthesized)
aacacgcatttaaaattatttcatgagtctagtagttctttgatttatagcaggatcttgcttgcctcatttgtttcctggttatgttcttaggattctgactaagaggcaaaagagaaa

SEQ ID NO: 315028 - DNA, 120 bp, Artificial Sequence
  ENSG00000134897_22 (sequence is synthesized)
aaaaaaaaaaagacggatccttttttttggtgcaaatgggtgacttagtgcattgattcagatttttaaaatttcttgatgtggtttgtaataatcaaatattgacaagaaccttaggtc

SEQ ID NO: 315029 - DNA, 120 bp, Artificial Sequence
  ENSG00000134897_23 (sequence is synthesized)
tcgaaagacttttataagtctagatgacgtttgccttaggggtaaagtaaaagaacaattggcaccttaagtttctatacccaaggttatctgtgaaatgagatctcctgatatttgatt

SEQ ID NO: 315030 - DNA, 120 bp, Artificial Sequence
  ENSG00000134897_24 (sequence is synthesized)
gctttctcagtatggagtcatatgttgataacagtactgaagatgcataagaaatgcccaagtcactcagaggacaactacccatattccagactctgagctgtttcctttttaaaaatc

SEQ ID NO: 315031 - DNA, 120 bp, Artificial Sequence
  ENSG00000134897_25 (sequence is synthesized)
atatagacaattagctgtttgaagtgagtattaaatatttcagaagtgtgaatttcatgtatttgagctcctctagttgctgttggtttttcttctgctgccaacctgtgactcacaaat

SEQ ID NO: 315032 - DNA, 120 bp, Artificial Sequence
  ENSG00000134897_26 (sequence is synthesized)
gactaggatctcttgttctttaattttagggtcttgttccaggactcaaatcagtaacttggtgattacaaggtgctgaatgtgttggtaaccatatcgcaatacacctcaaggaaaagg

SEQ ID NO: 315033 - DNA, 120 bp, Artificial Sequence
  ENSG00000134897_27 (sequence is synthesized)
ttcagatttttatttttaaaatattttcatttttttcttgaattttatatccgtttgttcactcgtacatgcctagcctacagaaggggatatatattatgaaatggtcatttttctgaa

SEQ ID NO: 315034 - DNA, 120 bp, Artificial Sequence
  ENSG00000134897_28 (sequence is synthesized)
gagaatattttgcttgaaatgcaaaggactgaaagagatttgtaggttgttgattttgttacttcatactggaacttttaaaaagatttcatcaaataaagttttgttttctacttttaa

SEQ ID NO: 315035 - DNA, 120 bp, Artificial Sequence
  ENSG00000134897_29 (sequence is synthesized)
gcgggctggaggctggcgccaggcgcggaggactcccggtatcttttgacaggctggcgcctcggctctggggacccgcaggccctggggatacaataatctggaaaaccagacttgcag

SEQ ID NO: 315036 - DNA, 120 bp, Artificial Sequence
  ENSG00000134897_30 (sequence is synthesized)
cgggctggggactcggggtgcccgcgacacgcgcggaggcgcgggctgggttggccacgggcagggagcgcagccgcgctccttcctctctgcccgcgtcgcctccgcgcgcactggttc

SEQ ID NO: 315037 - DNA, 120 bp, Artificial Sequence
  ENSG00000134897_31 (sequence is synthesized)
ccgcgcgcactggttctgcgcggcggggcttggcctgcgcgactgtctactccgtcccggcggcctcggagcccggccgagcggcgagcttgtcagaggacggtggtggaaacgctcccg

SEQ ID NO: 315038 - DNA, 120 bp, Artificial Sequence
  ENSG00000134897_32 (sequence is synthesized)
ggattacaggtgtgagccaccacgccggcttagtaaatcttaatatagcaacacctcacttgcctggaagagggaaccgcaatcaatcaaaatgagggcctacagtaatgcctggcatga

SEQ ID NO: 315039 - DNA, 120 bp, Artificial Sequence
  ENSG00000134897_33 (sequence is synthesized)
aacagcggtgtgatcatggctcactaaagcctcgacctcctgggttcaagtgatcctcccatctcagtctcctgagtagctgagaccacagatgtgtgcccccatgccctactaatttta

SEQ ID NO: 315040 - DNA, 120 bp, Artificial Sequence
  ENSG00000134897_34 (sequence is synthesized)
acttttttgtagagacagagtcttgctgtgttgtccaggctggtttcaaactcctggactcaagtgatcttacttccttggcctcccaaagggccgggattacagatgtgagccaccatg

SEQ ID NO: 315041 - DNA, 120 bp, Artificial Sequence
  ENSG00000134897_35 (sequence is synthesized)
cctggccttaattaccttttgtgtgtggtatgtggtagagctcaactttgattttttcccccagtgtttatctagttattctagcactatttgtttacaaagattttcctttccgtattt

SEQ ID NO: 315042 - DNA, 120 bp, Artificial Sequence
  ENSG00000134897_36 (sequence is synthesized)
aacttctttggtgcctctgctgaaaactgtatgtgtgggctgtttctggaccctgtcctactaatctgtctgtccttttaccgatgccacactctcaattgttgtttatactaaatcctg

SEQ ID NO: 315043 - DNA, 120 bp, Artificial Sequence
  ENSG00000134897_37 (sequence is synthesized)
aaattagatagcacgaattctctgaatttttctttttcttaaagattgttttggctcttctaggaccttggcttttccataaaaattttagaatttgtccttttaattagagtttgtaaa

SEQ ID NO: 315044 - DNA, 86 bp, Artificial Sequence
  ENSG00000134897_38 (sequence is synthesized)
gcttaggtgggaggatcacttcagctcaggagttcgagaccagccttggcactatggcgaaaccccatctctactaaaacgacaaa

SEQ ID NO: 315045 - DNA, 89 bp, Artificial Sequence
  ENSG00000134897_39 (sequence is synthesized)
gtgggaggatcacttcagctcaggagttcgagaccagccttggcactatggcgaaaccccatctctactaaaacggtgtagtttcagct

SEQ ID NO: 315046 - DNA, 120 bp, Artificial Sequence
  ENSG00000134897_40 (sequence is synthesized)
agtgagctgagattgcaccactgcactcctccctaagtgataaggtgagaccctgtctcataaagaaagaaagaattcatagtttagttttggaagaattgacatcataacaacatggac

SEQ ID NO: 315047 - DNA, 120 bp, Artificial Sequence
  ENSG00000134897_41 (sequence is synthesized)
aacaacatggactatatctttacttaattagagctttaatttcaactttttaaaaaaattttttcagtatggagttttatgtcttttattaaacattttttctctatgtgttctattaca

SEQ ID NO: 315048 - DNA, 120 bp, Artificial Sequence
  ENSG00000134897_42 (sequence is synthesized)
tgagtatctgcccaaaggaaaataagtcatatgaaaaacacacaggcacacacgtttatagtggtacaattcgcagttgcaaagatggagaatcaacctaagtgcccatcaaccaatgag

SEQ ID NO: 315049 - DNA, 87 bp, Artificial Sequence
  ENSG00000134897_43 (sequence is synthesized)
atgtggtatgtatattaccacgatgtcttttgcaacaacttgggtggagccggaggccgttattctaagtgaagtaactcaggaatg

SEQ ID NO: 315050 - DNA, 76 bp, Artificial Sequence
  ENSG00000134897_44 (sequence is synthesized)
tctaagtgaagtaactcaggaatggaaagccaaatatcatatgttttcactttaagtgggagctaagctatgctga

SEQ ID NO: 315051 - DNA, 120 bp, Artificial Sequence
  ENSG00000134897_45 (sequence is synthesized)
aaagactacatattggattcagtgtacactgcttggatgatgggtgcactaaaatctcagaaatcaccaccgaagaacttattggtataaccaaaacccagctgtaccccaaaaacaatt

SEQ ID NO: 315052 - DNA, 120 bp, Artificial Sequence
  ENSG00000134897_46 (sequence is synthesized)
aatatgtaatatatgttggcaataacgtagcagtttacaaattaatacattatatgtatcataaatatttttatttctaaaattattaccaggatttctgaatatttaaagtcaccacaa

SEQ ID NO: 315053 - DNA, 120 bp, Artificial Sequence
  ENSG00000134897_47 (sequence is synthesized)
atgtagatttaacaatgattaaccttttgatgtagttaaatacttagcttttcattgctgaagaattttcaagtaagtgactgatttttattatatttcatctcaagttacctaagtatg

SEQ ID NO: 315054 - DNA, 120 bp, Artificial Sequence
  ENSG00000134897_48 (sequence is synthesized)
catctctaaaaaatgacttttttctacttaaccacaatacttttgtcatacttaataagattaacgatatttccctagtgtctaattcccaggctaaattcacgtttcccagattgttct

SEQ ID NO: 315055 - DNA, 120 bp, Artificial Sequence
  ENSG00000134897_49 (sequence is synthesized)
aaattatctgttgaatgagacgtctacaaatcctaggccctggggatacaataatctggaaaaccagacttgcaggatgcagacgttgatcatatgaacagatatgcacagaataagcaa

SEQ ID NO: 315056 - DNA, 120 bp, Artificial Sequence
  ENSG00000134897_50 (sequence is synthesized)
atgggcagagatattaactggtaaaagtccaactgatcacccagggtggactgaatctctcaactgatgctctgttgctggagccctgagaaacccgcataccctgcccgggcacctgcc

SEQ ID NO: 315057 - DNA, 120 bp, Artificial Sequence
  ENSG00000134897_51 (sequence is synthesized)
cgtatttcttcttaaaacagaataaataaatagtctgtctctttctccttctgttcacatttgccccagtttcttctcttgaatcatgacagtttggaaaattgtctggattgcttagtg

SEQ ID NO: 315058 - DNA, 120 bp, Artificial Sequence
  ENSG00000134897_52 (sequence is synthesized)
ccactgaatcatgccatggaaggattttgtatttcacttttaaacttctctgtgacaggagaagcactgcttcatggcttcttgcccaaggattttagatggacacagtgggtaataaat

SEQ ID NO: 315059 - DNA, 120 bp, Artificial Sequence
  ENSG00000134897_53 (sequence is synthesized)
ggatgaatttttgtttgggttgaagaatctctctgagaagttgacacgtgggggcaatggtttgtttctcttgtatttctgaagttgcaaataatcatgtaagcagttcaaccaggagtt

SEQ ID NO: 315060 - DNA, 120 bp, Artificial Sequence
  ENSG00000134897_54 (sequence is synthesized)
tacaccaaacttttaataggcgatatatcattattttttttcccattggtttggataacatccactttaactggcagttagtcatacttagctatttttgttaaagcaggtgatttattg

SEQ ID NO: 315061 - DNA, 120 bp, Artificial Sequence
  ENSG00000134897_55 (sequence is synthesized)
ttattttatatttatgacatgattaataagtgaatatggaagattttacattgacttaggggatcaaagttttcattatattaacacctttaattgccatgagttttctatttctagcat

SEQ ID NO: 315062 - DNA, 88 bp, Artificial Sequence
  ENSG00000134897_56 (sequence is synthesized)
ccgcgcgctggatgctgtgatccaggtccggagccgggttccgccgcggccgcagcgacccgaccccacccgacaggctagtggcgcg

SEQ ID NO: 315063 - DNA, 63 bp, Artificial Sequence
  ENSG00000134897_57 (sequence is synthesized)
ggatttgcctgttcttgacatttcgtataaatggtgtcatacagtatgtagcattttgtacct

SEQ ID NO: 315064 - DNA, 120 bp, Artificial Sequence
  ENSG00000134899_0 (sequence is synthesized)
atttttcatgggtttgcggacccaccagcgaaggcgggaggtgtcgcagggacatcttctggctgtttccgtcgcctgcgtggcccttgcaccccggtcttccattagcggcgcagacgt

SEQ ID NO: 315065 - DNA, 120 bp, Artificial Sequence
  ENSG00000134899_1 (sequence is synthesized)
ttgggcctaagcgctgggcgaggcgaggccctgcccctccccgccaacggccattctctggacctgtctttcttccgggaggcggtgacagctgctgagacgtgttgcagccagagtctc

SEQ ID NO: 315066 - DNA, 120 bp, Artificial Sequence
  ENSG00000134899_2 (sequence is synthesized)
tccgctttaatgcgctcccattagtgccgtcccccactggaaaaccgtggcttctgtattatttgccatctttgttgtgtaggagcagggagggcttcctcccggggtcctaggcggcgg

SEQ ID NO: 315067 - DNA, 120 bp, Artificial Sequence
  ENSG00000134899_3 (sequence is synthesized)
tgcagtccgtcgtagaagaattagagtagaagttgtcggggtccgctcttaggacgcagccgcctcatgggggtccaggggctctggaagctgctggagtgctccgggcggcaggtcagc

SEQ ID NO: 315068 - DNA, 120 bp, Artificial Sequence
  ENSG00000134899_4 (sequence is synthesized)
cccgaagcgctggaagggaagatcctggctgttgatattagcatttggttaaaccaagcacttaaaggagtccgggatcgccatgggaactcaatagaaaatcctcatcttctcactttg

SEQ ID NO: 315069 - DNA, 120 bp, Artificial Sequence
  ENSG00000134899_5 (sequence is synthesized)
tttcatcggctctgcaaactcttattttttcgaattcgtcctatttttgtgtttgatggggatgctccactattgaagaaacagactttggtgaagagaaggcagagaaaggacttagcg

SEQ ID NO: 315070 - DNA, 120 bp, Artificial Sequence
  ENSG00000134899_6 (sequence is synthesized)
tccagtgactccaggaaaacgacagagaagcttctgaaaacatttttgaaaagacaagccatcaaaactgccttcagaagcaaaagagatgaagcactacccagtcttacccaagttcga

SEQ ID NO: 315071 - DNA, 120 bp, Artificial Sequence
  ENSG00000134899_7 (sequence is synthesized)
agagaaaacgacctctatgttttgcctcctttacaagaggaagaaaaacacagttcagaagaggaagatgaaaaagaatggcaagaaagaatgaatcaaaaacaagcattacaggaagag

SEQ ID NO: 315072 - DNA, 120 bp, Artificial Sequence
  ENSG00000134899_8 (sequence is synthesized)
ttctttcataatcctcaagcgatagatattgagtctgaggacttcagcagcctgccccctgaagtaaagcatgaaatcttgactgatatgaaagagttcaccaagcgcagaagaacatta

SEQ ID NO: 315073 - DNA, 120 bp, Artificial Sequence
  ENSG00000134899_9 (sequence is synthesized)
tttgaagcaatgccagaggagtctgatgacttttcacagtaccaactcaaaggcttgcttaaaaagaactatctgaaccagcatatagaacatgtccaaaaggaaatgaatcagcaacat

SEQ ID NO: 315074 - DNA, 120 bp, Artificial Sequence
  ENSG00000134899_10 (sequence is synthesized)
tcaggacacatccgaaggcagtatgaagatgaagggggctttctgaaggaggtagagtcaaggagagtggtctctgaagacacttcacattacatcttgataaaaggtattcaagctaag

SEQ ID NO: 315075 - DNA, 120 bp, Artificial Sequence
  ENSG00000134899_11 (sequence is synthesized)
acagttgcagaagtggattcagagtctcttccttcttccagcaaaatgcacggcatgtcttttgacgtgaagtcatctccatgtgaaaaactgaagacagagaaagagcctgatgctacc

SEQ ID NO: 315076 - DNA, 120 bp, Artificial Sequence
  ENSG00000134899_12 (sequence is synthesized)
cctccttctccaagaactttactagctatgcaagctgccctgctgggaagtagctcagaagaggagctggagagtgaaaatcgaaggcaggcccgtgggaggaacgcacctgctgctgta

SEQ ID NO: 315077 - DNA, 120 bp, Artificial Sequence
  ENSG00000134899_13 (sequence is synthesized)
gacgaaggctccatatcaccccggactctttcagccattaagagagctcttgacgatgacgaagatgtaaaagtgtgtgctggggatgatgtgcagacgggagggccaggagcagaagaa

SEQ ID NO: 315078 - DNA, 120 bp, Artificial Sequence
  ENSG00000134899_14 (sequence is synthesized)
atgcgtataaacagctccaccgagaacagtgatgaaggacttaaagtgagagatggaaaaggaataccgtttactgcaacacttgcgtcatctagtgtgaactctgcagaggagcacgta

SEQ ID NO: 315079 - DNA, 120 bp, Artificial Sequence
  ENSG00000134899_15 (sequence is synthesized)
gccagcactaatgaggggagagagcccacagactcagttccaaaagaacaaatgtcacttgttcacgtggggactgaagcctttccgataagtgatgagtctatgattaaggacagaaaa

SEQ ID NO: 315080 - DNA, 120 bp, Artificial Sequence
  ENSG00000134899_16 (sequence is synthesized)
gatcggctgcctctggagagtgcagtggttagacatagtgacgcacctgggctcccgaatggaagggaactgacaccggcatctccaacttgtacaaattctgtgtcaaagaatgaaaca

SEQ ID NO: 315081 - DNA, 120 bp, Artificial Sequence
  ENSG00000134899_17 (sequence is synthesized)
tgaagtgcttgagcagcagaacgaactttgcccatatgagagtaaattcgattcttctcttctttcaagtgatgatgaaacaaaatgtaaaccgaattctgcttctgaagtcattggccc

SEQ ID NO: 315082 - DNA, 120 bp, Artificial Sequence
  ENSG00000134899_18 (sequence is synthesized)
tgtcagtttgcaagaaacaagtagcatagtaagtgtcccttcagaggcagtagataatgtggaaaatgtggtgtcatttaatgctaaagagcatgagaattttctggaaaccatccaaga

SEQ ID NO: 315083 - DNA, 120 bp, Artificial Sequence
  ENSG00000134899_19 (sequence is synthesized)
acagcagaccactgaatctgcaggccaggatttaatttccattccaaaggccgtggaaccaatggaaattgactcggaagaaagtgaatctgatggaagtttcattgaagtgcaaagtgt

SEQ ID NO: 315084 - DNA, 120 bp, Artificial Sequence
  ENSG00000134899_20 (sequence is synthesized)
gattagtgatgaggaacttcaagcagaattccctgaaacttccaaacctccctcagaacaaggcgaagaggaactggtaggaactagggagggagaagcccctgctgagtccgagagcct

SEQ ID NO: 315085 - DNA, 120 bp, Artificial Sequence
  ENSG00000134899_21 (sequence is synthesized)
cctgagggacaactctgagagggacgacgtggatggtgagccacaggaagctgagaaagatgcggaagattcgctccatgaatggcaagatattaatttggaggagttggaaactctgga

SEQ ID NO: 315086 - DNA, 120 bp, Artificial Sequence
  ENSG00000134899_22 (sequence is synthesized)
gagcaacctcttagcacagcagaattcactgaaagctcaaaaacagcagcaagaacggatcgctgctactgtcaccggacagatgttcctggaaagccaggaactcctgcgcctgttcgg

SEQ ID NO: 315087 - DNA, 120 bp, Artificial Sequence
  ENSG00000134899_23 (sequence is synthesized)
cattccctacatccaggctcccatggaagcagaggcgcagtgcgccatcctggacctgactgatcagacttccggaaccatcactgatgacagtgatatctggctgtttggagcgcggca

SEQ ID NO: 315088 - DNA, 120 bp, Artificial Sequence
  ENSG00000134899_24 (sequence is synthesized)
tgtctatagaaacttttttaataaaaacaagtttgtagaatattatcaatatgtggactttcacaatcaattgggattggaccggaataagttaataaatttggcttatttgcttggaag

SEQ ID NO: 315089 - DNA, 120 bp, Artificial Sequence
  ENSG00000134899_25 (sequence is synthesized)
tgattataccgaaggaataccaactgtgggttgtgtaaccgccatggaaattctcaatgaattccctgggcatggcctggaacctctcctaaaattctcagaatggtggcatgaagctca

SEQ ID NO: 315090 - DNA, 120 bp, Artificial Sequence
  ENSG00000134899_26 (sequence is synthesized)
aaaaaatccaaagataagacctaatcctcatgacaccaaagtgaaaaaaaaattacggacattgcaactcacccctggctttcctaacccagctgttgccgaggcctacctcaaacccgt

SEQ ID NO: 315091 - DNA, 120 bp, Artificial Sequence
  ENSG00000134899_27 (sequence is synthesized)
ggtggatgactcgaagggatcctttctgtgggggaaacctgatctcgacaaaattagagaattttgtcagcggtatttcggctggaacagaacgaagacagatgaatctctgtttcctgt

SEQ ID NO: 315092 - DNA, 120 bp, Artificial Sequence
  ENSG00000134899_28 (sequence is synthesized)
attaaagcaactcgatgcccagcagacacagctccgaattgattccttctttagattagcacaacaggagaaagaagatgctaaacgtattaagagccagagactaaacagagctgtgac

SEQ ID NO: 315093 - DNA, 120 bp, Artificial Sequence
  ENSG00000134899_29 (sequence is synthesized)
atgtatgctaaggaaagagaaagaagcagcagccagcgaaatagaagcagtttctgttgccatggagaaagaatttgagctacttgataaggcaaaaggaaaaacccagaagagaggcat

SEQ ID NO: 315094 - DNA, 120 bp, Artificial Sequence
  ENSG00000134899_30 (sequence is synthesized)
aacaaataccttagaagagtcatcaagcctgaaaagaaagaggctttcagattctaaaggaaagaatacatgcggtggatttttgggggagacctgcctctcagaatcatctgatggatc

SEQ ID NO: 315095 - DNA, 120 bp, Artificial Sequence
  ENSG00000134899_31 (sequence is synthesized)
ttcaagtgaagatgctgaaagttcatctttaatgaatgtacaaaggagaacagctgcgaaagagccaaaaaccagtgcttcagattcgcagaactcagtgaaggaagctcccgtgaagaa

SEQ ID NO: 315096 - DNA, 120 bp, Artificial Sequence
  ENSG00000134899_32 (sequence is synthesized)
tggaggtgcgaccaccagcagctctagtgatagtgatgacgatggagggaaagagaagatggtcctcgtgaccgccagatctgtgtttgggaagaaaagaaggaaactaagacgtgcgag

SEQ ID NO: 315097 - DNA, 120 bp, Artificial Sequence
  ENSG00000134899_33 (sequence is synthesized)
gggaagaaaaaggaaaacctaattaaaaaatatgtatcctctataattagttatgacagccatttgtaatgaatttgtcgcaaagacgtaataaaattaactggtggcacggtctttgta

SEQ ID NO: 315098 - DNA, 120 bp, Artificial Sequence
  ENSG00000134899_34 (sequence is synthesized)
caccacaagctggatgtgagtgtgcttatggatcctgaggtataactgtctcaggccttttcagcaacagtgccaggaagtatatttatgtatacatatacatgcacacacacatctata

SEQ ID NO: 315099 - DNA, 120 bp, Artificial Sequence
  ENSG00000134899_35 (sequence is synthesized)
tttatttctatgtctatctgtactaaaatccatgagtttatactgacatctgcaattccatggggttcagtctagcctcctgcttctttatagtttccctaacaatgagaaacattgctc

SEQ ID NO: 315100 - DNA, 120 bp, Artificial Sequence
  ENSG00000134899_36 (sequence is synthesized)
cccttatcctcaatacatttacatctgcttattctccctggatatgtaaccatctccccctcccactggcctcctccttggccctgctctcttctttgcttcagctgtgtccttggtgcc

SEQ ID NO: 315101 - DNA, 120 bp, Artificial Sequence
  ENSG00000134899_37 (sequence is synthesized)
agctcccagtccctgagagccccctcctctgttctgattgtctccttaaacccagctggacaggccttgccagccctctccacctacagggaaggaaggcaaccattaaatatattttaa

SEQ ID NO: 315102 - DNA, 120 bp, Artificial Sequence
  ENSG00000134899_38 (sequence is synthesized)
ggagaaggaaagacagtaagacagtaagagaggagagaagggaagtggaagaggaagaactatttcttagtcacagctttattctgtgctgtgtaaatagcataaaaacatactgagcaa

SEQ ID NO: 315103 - DNA, 120 bp, Artificial Sequence
  ENSG00000134899_39 (sequence is synthesized)
cttccatgattgtttatatactttgataatcctcctttttgaatttttaaaacaatgtcagttaacttagaacatatttatataaagcgaatatacaaatcttaagagagtttcctactt

SEQ ID NO: 315104 - DNA, 120 bp, Artificial Sequence
  ENSG00000134899_40 (sequence is synthesized)
tcaaagacagtgccagtttacctaattgaaaaggcttgttttgaagttacaggcatttgtgattacatttatttattaataacgctactattacatgtattctgttatagtcatatcttt

SEQ ID NO: 315105 - DNA, 120 bp, Artificial Sequence
  ENSG00000134899_41 (sequence is synthesized)
cctttttaggatgtagcatttttcaggttcctccagaaagctcttgatgattgcaggatcattttaatgttttgattgtagatgaagtgaccttttaattttggtacaggaagtttcatt

SEQ ID NO: 315106 - DNA, 120 bp, Artificial Sequence
  ENSG00000134899_42 (sequence is synthesized)
ccgtaacattgtgtttcgacttcttgctgaggaagccaggttaagtaggttttgagttttaaggagttggtggatgagtatttagtagctatttgcagtacatcttgtggttgctgatgg

SEQ ID NO: 315107 - DNA, 120 bp, Artificial Sequence
  ENSG00000134899_43 (sequence is synthesized)
cttcatttttgtgtaggttactggctgggatagactccgttttccatgtggtttagtgatgaatctctaaagatattacagagtcttggttagacatccagtggagtacttcctaaggag

SEQ ID NO: 315108 - DNA, 80 bp, Artificial Sequence
  ENSG00000134899_44 (sequence is synthesized)
ctcccagagaatatcttcttaaaagtgaatttactgaataaaagacacagctccgaattgattccttctttagattagca

SEQ ID NO: 315109 - DNA, 120 bp, Artificial Sequence
  ENSG00000134899_45 (sequence is synthesized)
tttcagattgtctcatttttcatatttcttgtctaacaatttatgtgaatattttcaggtcgtctaattttacatatttcatctctaagaattcaagccaaaattctcaaccctagctga

SEQ ID NO: 315110 - DNA, 120 bp, Artificial Sequence
  ENSG00000134899_46 (sequence is synthesized)
gaattggcattacctgtagttaattgaaaaataaaaaataaaagaagtcctacctcagtctctatgatttagaattttaggcccatggggtttaataatccgtatgtttcagaagcttca

SEQ ID NO: 315111 - DNA, 120 bp, Artificial Sequence
  ENSG00000134899_47 (sequence is synthesized)
tatcctattctaatggatagcagggatgagagccactgatctgaaactagatttcctcactgaagttaaagtttaaagtagtgggccaagtagaaactaatttaatcctatgtaatagtg

SEQ ID NO: 315112 - DNA, 120 bp, Artificial Sequence
  ENSG00000134899_48 (sequence is synthesized)
agcttcatggcttttccagactatacttgtagcaagcagaaacatcgatctaatacaagacagatgcacatcaacaccaagttctacctctgagatatattagcatttggttaaaccaag

SEQ ID NO: 315113 - DNA, 120 bp, Artificial Sequence
  ENSG00000134899_49 (sequence is synthesized)
gagctcattttgcagctctcaagcttttatagcatgctgtaaacaattgtcaaagttgtttatcaagaaacagatagagttgcaacttgtttctagtaatagaaacttttacactgcatt

SEQ ID NO: 315114 - DNA, 120 bp, Artificial Sequence
  ENSG00000134899_50 (sequence is synthesized)
caatgcctaacgttgcagaaacagaaaggtcaaatgattctggaaatggtgagcacaaatctgagagaaagtcacctgaagagaatctacaaggtgctgtaaaatctttctgcacaagtg

SEQ ID NO: 315115 - DNA, 120 bp, Artificial Sequence
  ENSG00000134899_51 (sequence is synthesized)
cctcaggagcacccttgggtcccaaaggagatggtcattatccatggagttgtccagtgactcatacacgggaaaaaatttatgccatctgttcggactatgcctttctcaaccaggcga

SEQ ID NO: 315116 - DNA, 120 bp, Artificial Sequence
  ENSG00000134899_52 (sequence is synthesized)
cctcaatctataaaactccaaatccatcccgctctccttgcctccctgatagtacctctttatctgctggaaataattcatcaagatacattggtatcccgactagtacatcggaaatta

SEQ ID NO: 315117 - DNA, 120 bp, Artificial Sequence
  ENSG00000134899_53 (sequence is synthesized)
tctacaatgaagaaaatagcttggaaaacttatccaacagcctgggcaagctacctctcgcatgggaaattgataaatctgaatttgatggggtgaccacaaattcgaaacacaaatcag

SEQ ID NO: 315118 - DNA, 120 bp, Artificial Sequence
  ENSG00000134899_54 (sequence is synthesized)
gcaatgcaaagaaacaagtttccaagagaaaaacttcagataaaaagggaagatatcagaaggaatgtcctcagcattctcctcttgaagatattaaacagcggaaagtattagacctca

SEQ ID NO: 315119 - DNA, 120 bp, Artificial Sequence
  ENSG00000134899_55 (sequence is synthesized)
gacgatggtactgcataagccgaccacagtataagacttcttgtggcatctcttcattaatttcttgttggaatttcttatacagcacaatgggagctggaaaccttccacctattaccc

SEQ ID NO: 315120 - DNA, 120 bp, Artificial Sequence
  ENSG00000134899_56 (sequence is synthesized)
aagaagaagctttacatattctgggctttcaacctccatttgaagatattaggtttggtcctttcacggggaatacaacacttatgaggtggtttagacaaattaatgaccacttccatg

SEQ ID NO: 315121 - DNA, 120 bp, Artificial Sequence
  ENSG00000134899_57 (sequence is synthesized)
taaaaggatgctcttatgttctatataagcctcatgggaagaataaaacagcaggagaaactgcttcaggggccctgtcaaagttaacccgtggattgaaagatgaatcgctggcttata

SEQ ID NO: 315122 - DNA, 120 bp, Artificial Sequence
  ENSG00000134899_58 (sequence is synthesized)
tctatcattgccaaaatcattatttttgtccaattggcttcgaagcaacccctgttaaagctaataaagcattcagcaggggacctctctcaccacaggaagttgaatattggatcttaa

SEQ ID NO: 315123 - DNA, 120 bp, Artificial Sequence
  ENSG00000134899_59 (sequence is synthesized)
ttggagaatcaagtagaaaacatcctgccattcactgtaaaaaatgggcagatattgttactgatctaaacactcaaaatccagaatacctggatatccggcacttagagaggggactgc

SEQ ID NO: 315124 - DNA, 120 bp, Artificial Sequence
  ENSG00000134899_60 (sequence is synthesized)
agtatagaaaaacaaagaaggttgggggaaatttgcattgcatcatagcattccagagacttaactggcaaagatttggcctttggaactttccatttggaaccattagacaagaatcac

SEQ ID NO: 315125 - DNA, 120 bp, Artificial Sequence
  ENSG00000134899_61 (sequence is synthesized)
aacctccaacacatgcccagggaattgccaaatctgagagtgaagacaatatttccaagaagcagcatgggcgtctgggccggtctttcagtgctagtttccatcaggactcggcatgga

SEQ ID NO: 315126 - DNA, 120 bp, Artificial Sequence
  ENSG00000134899_62 (sequence is synthesized)
ggttccagcccctcctccgtataccacgatgttcaagttccttcaactcccttatataatggcgtggtatttgcatataaactacccacttccgtaatcttttaaatcgtttctagctta

SEQ ID NO: 315127 - DNA, 120 bp, Artificial Sequence
  ENSG00000134899_63 (sequence is synthesized)
tcctttctctcggctgcatttattttccacagcagtggcctgagagcagccaggtcaggtccctgttcaccatcctgagcagggtctgcataatctgtttaaagatttgtgtactttcca

SEQ ID NO: 315128 - DNA, 120 bp, Artificial Sequence
  ENSG00000134900_0 (sequence is synthesized)
gcagtttgccgcttcctcgtcctccatcctgcgtccatggccaccgctgcgactgaggagcccttcccttttcacggtctcctgccgaagaaggagaccggagccgcctccttcctctgc

SEQ ID NO: 315129 - DNA, 120 bp, Artificial Sequence
  ENSG00000134900_1 (sequence is synthesized)
cgctacccggagtatgatgggcggggggtgctcatcgcagtcctggacacgggggtcgacccgggggctccgggcatgcaggttacaactgatggaaaaccaaaaatcgttgatatcatt

SEQ ID NO: 315130 - DNA, 120 bp, Artificial Sequence
  ENSG00000134900_2 (sequence is synthesized)
gatacaacaggaagtggcgatgtgaatactgctacagaagtagagccaaaggatggtgagattgttggcctttcaggaagagtgcttaagattcctgcaagctggacaaatccctcaggc

SEQ ID NO: 315131 - DNA, 120 bp, Artificial Sequence
  ENSG00000134900_3 (sequence is synthesized)
aaatatcatattggcataaaaaatggctatgacttctatcctaaggcactcaaggaaaggatacagaaagaacggaaggaaaaaatctgggaccctgttcacagagtggcccttgcagaa

SEQ ID NO: 315132 - DNA, 120 bp, Artificial Sequence
  ENSG00000134900_4 (sequence is synthesized)
gcctgtagaaaacaggaagaatttgatgttgccaacaacggctcttctcaagcaaataaactaatcaaggaggaacttcaaagtcaagtggaattgctaaattcttttgagaagaaatac

SEQ ID NO: 315133 - DNA, 120 bp, Artificial Sequence
  ENSG00000134900_5 (sequence is synthesized)
agcgatcctggccctgtatatgactgcttggtatggcatgatggcgaagtctggagagcctgcattgattctaatgaagatggggacttgagtaaatctaccgtgttgagaaactacaaa

SEQ ID NO: 315134 - DNA, 120 bp, Artificial Sequence
  ENSG00000134900_6 (sequence is synthesized)
gaagcccaagaatatggctcttttggcacagctgagatgttgaattactccgttaatatatacgatgatggaaacctgctctccattgtgaccagtggaggagctcatgggacacatgta

SEQ ID NO: 315135 - DNA, 120 bp, Artificial Sequence
  ENSG00000134900_7 (sequence is synthesized)
gctagtatagctgctggacactttccagaagaacctgaacggaatggggtagctcctggtgctcaaattctttccatcaagattggtgatacaagactaagcacaatggaaacaggcaca

SEQ ID NO: 315136 - DNA, 120 bp, Artificial Sequence
  ENSG00000134900_8 (sequence is synthesized)
ggcctcataagagctatgatagaagttataaatcataagtgtgatcttgtcaactacagttacggagaagcaactcactggccaaattctgggagaatttgtgaagtaattaatgaagca

SEQ ID NO: 315137 - DNA, 120 bp, Artificial Sequence
  ENSG00000134900_9 (sequence is synthesized)
gtatggaagcataatataatttatgtttcaagtgctggaaataatggtccatgcctgtctacagttggttgtccaggtggaactacatcaagtgtgataggtgttggtgcttatgtttct

SEQ ID NO: 315138 - DNA, 120 bp, Artificial Sequence
  ENSG00000134900_10 (sequence is synthesized)
cctgatatgatggttgctgagtattcactgagagagaaattacctgcaaatcaatatacttggtcttctagaggacctagtgctgacggggcccttggtgtgagtatcagtgcgccagga

SEQ ID NO: 315139 - DNA, 120 bp, Artificial Sequence
  ENSG00000134900_11 (sequence is synthesized)
ggagccattgcttctgttcctaactggacactgagagggacgcagctgatgaatggaacatctatgtcttcccccaatgcatgtggaggcattgccctgatcctttcaggtctgaaagct

SEQ ID NO: 315140 - DNA, 120 bp, Artificial Sequence
  ENSG00000134900_12 (sequence is synthesized)
aataacattgactacacagttcattcagtcagaagagctctagaaaacactgcagtgaaggctgacaatatagaagtatttgctcaaggacatggtattattcaggttgataaagcctat

SEQ ID NO: 315141 - DNA, 120 bp, Artificial Sequence
  ENSG00000134900_13 (sequence is synthesized)
gactacctcgttcagaatacatcatttgctaataaattaggttttactgttactgttggaaataaccgtggcatctacctccgagatcctgttcaggtggctgcaccttcagatcatggc

SEQ ID NO: 315142 - DNA, 120 bp, Artificial Sequence
  ENSG00000134900_14 (sequence is synthesized)
gttggcattgaacctgtatttccggagaacacagaaaactctgaaaaaatatcccttcagcttcatttagctctgacttcaaattcatcttgggttcagtgtcccagccatttggaactc

SEQ ID NO: 315143 - DNA, 120 bp, Artificial Sequence
  ENSG00000134900_15 (sequence is synthesized)
atgaatcaatgtagacacataaacatacgtgtggatcccaggggcttaagagaaggattgcattatacagaggtatgtggctatgatatagcatcccctaacgcaggtccgctcttcaga

SEQ ID NO: 315144 - DNA, 120 bp, Artificial Sequence
  ENSG00000134900_16 (sequence is synthesized)
ttcgaaggcattttattgaggttcctgagggtgcaacatgggctgaagtgacagtgtgttcgtgttcttctgaggtgtcagcaaagtttgttctacatgcagtccagcttgtgaagcaaa

SEQ ID NO: 315145 - DNA, 120 bp, Artificial Sequence
  ENSG00000134900_17 (sequence is synthesized)
gagcatatcgaagccatgaattctataagttttgttctcttccagagaaaggaacactgactgaagcttttcctgtcctaggtggaaaagcaattgaattttgcattgctcgttggtggg

SEQ ID NO: 315146 - DNA, 120 bp, Artificial Sequence
  ENSG00000134900_18 (sequence is synthesized)
caagtctcagtgatgtcaacattgattataccatttctttccatgggatagtgtgtactgctcctcagttaaacattcatgcatcggaaggaatcaaccgctttgatgttcagtcctcct

SEQ ID NO: 315147 - DNA, 120 bp, Artificial Sequence
  ENSG00000134900_19 (sequence is synthesized)
tgaaatacgaagatctggctccctgcataactttgaagaactgggtccaaacactgcgcccagtgagtgcaaaaacaaaacctttaggatcaagagatgttttgccaaataaccgtcaac

SEQ ID NO: 315148 - DNA, 120 bp, Artificial Sequence
  ENSG00000134900_20 (sequence is synthesized)
tttatgagatggtcctgacatataactttcatcaacccaagagtggggaagtaactccaagctgcccactactttgtgaactattatatgaatctgaatttgacagccaactgtggatta

SEQ ID NO: 315149 - DNA, 120 bp, Artificial Sequence
  ENSG00000134900_21 (sequence is synthesized)
tttttgaccagaacaaaagacagatgggttcaggcgatgcctatccacatcagtattctttgaaactggagaaaggagattatacaattcgactacagattcgccatgagcaaatcagtg

SEQ ID NO: 315150 - DNA, 120 bp, Artificial Sequence
  ENSG00000134900_22 (sequence is synthesized)
atttggaacgccttaaagaccttccatttattgtttctcatagattgtctaataccttgagcttagatattcatgaaaatcatagttttgcacttctagggaagaagaaatcaagcaatt

SEQ ID NO: 315151 - DNA, 120 bp, Artificial Sequence
  ENSG00000134900_23 (sequence is synthesized)
tgacattaccacccaaatataaccagccattctttgttacttccttacctgatgataaaatacctaaaggggcaggacctggatgctatcttgcaggatccttaacattgtcaaagactg

SEQ ID NO: 315152 - DNA, 120 bp, Artificial Sequence
  ENSG00000134900_24 (sequence is synthesized)
aactaggaaagaaagctgatgtaatccctgttcattactacttaatacctccaccaacaaagactaagaatggcagcaaagataaggaaaaagattcagaaaaagagaaagatttaaaag

SEQ ID NO: 315153 - DNA, 120 bp, Artificial Sequence
  ENSG00000134900_25 (sequence is synthesized)
aagagtttactgaagcattacgagatcttaaaattcagtggatgacaaagctggattctagtgacatttataacgaattgaaagaaacatatcctaattatcttcctctgtacgttgcac

SEQ ID NO: 315154 - DNA, 120 bp, Artificial Sequence
  ENSG00000134900_26 (sequence is synthesized)
gacttcatcaattggatgctgaaaaggaacgaatgaaaagacttaatgaaattgttgatgcggcaaatgctgttatttctcatatagatcaaacagccctagcagtttatattgcaatga

SEQ ID NO: 315155 - DNA, 120 bp, Artificial Sequence
  ENSG00000134900_27 (sequence is synthesized)
agactgatcccaggcctgatgcagctactataaaaaatgacatggacaaacaaaaatccaccctcgtagatgccctttgtaggaaaggttgtgccctggcagaccatcttcttcacaccc

SEQ ID NO: 315156 - DNA, 120 bp, Artificial Sequence
  ENSG00000134900_28 (sequence is synthesized)
aggctcaagacggagccatttccactgatgcagaaggaaaggaggaggaaggagaaagtcctttggattctctggcagaaacattttgggaaactactaaatggactgatctctttgaca

SEQ ID NO: 315157 - DNA, 120 bp, Artificial Sequence
  ENSG00000134900_29 (sequence is synthesized)
ataaggttttgacatttgcatataaacatgcattagtaaataaaatgtatgggagaggccttaaatttgcaactaaacttgtggaagaaaaaccaacaaaagaaaactggaaaaattgta

SEQ ID NO: 315158 - DNA, 120 bp, Artificial Sequence
  ENSG00000134900_30 (sequence is synthesized)
ttcaactgatgaagttacttggatggacccattgtgcatcttttactgaaaactggctccccatcatgtatcctcccgattattgcgtattctaaaataggaaacaagactttaaatttt

SEQ ID NO: 315159 - DNA, 120 bp, Artificial Sequence
  ENSG00000134900_31 (sequence is synthesized)
aaaaaaggaagttttatagtgaatgggtataaaaacaaatttgtggcatttttagtctaatgcatgttttcatccactatccagtactgattattaaaatgacatgtatttatcagagaa

SEQ ID NO: 315160 - DNA, 120 bp, Artificial Sequence
  ENSG00000134900_32 (sequence is synthesized)
cttaatgcctcacattgctggcacggggatgtgccctgcctgccagcacctaggacttcgagttgggttgcagcttatgacatgcatgataggttttggaaggtaacttttaactgcaaa

SEQ ID NO: 315161 - DNA, 120 bp, Artificial Sequence
  ENSG00000134900_33 (sequence is synthesized)
cctataaagtactattttttattttataaatgaacagggttttaacgtgctcaactttaatttttttcaattgtatgaaggccttaaaaaagctacattaagcgtagctaaaattattta

SEQ ID NO: 315162 - DNA, 120 bp, Artificial Sequence
  ENSG00000134900_34 (sequence is synthesized)
ttggactaaaaactaacagaacttcatttccagaattttttttttttttttttttttttggcaaatgtttacattcaattaaggggaaaaagtagaaccagcacaaatgagtggcagttg

SEQ ID NO: 315163 - DNA, 120 bp, Artificial Sequence
  ENSG00000134900_35 (sequence is synthesized)
ctggagcataactgcttcaataaatcttcatcttggggtaattacaggcaagtcattttcacatcctcttgaggttcagagcatcagaatgaactctatgaatacatgtgtaagtgccag

SEQ ID NO: 315164 - DNA, 120 bp, Artificial Sequence
  ENSG00000134900_36 (sequence is synthesized)
acagctgaatctttatcaggtattgtaaagatacacatatgatatgtttattaaaattgaaataatgtaaaacacatgaataaatttgcaaaaccaagatcacagtacaccatatgcact

SEQ ID NO: 315165 - DNA, 120 bp, Artificial Sequence
  ENSG00000134900_37 (sequence is synthesized)
tatgcactctggtaccttaatttttttttataaataataaaagtgaatattgaagcttcttaaagttggtcttaatttttcataaataaaatttggggttataacagaaataatacatta

SEQ ID NO: 315166 - DNA, 120 bp, Artificial Sequence
  ENSG00000134900_38 (sequence is synthesized)
gacaaaaaaagttaaacataagataatctattttacagtgtttcttataggcttacaattatttgaatgtatttccagttcttgtatgattaacttttgtgcatatctaactttttatta

SEQ ID NO: 315167 - DNA, 120 bp, Artificial Sequence
  ENSG00000134900_39 (sequence is synthesized)
tttttatctttggctactgcacgtgcatctctcgtcattcctccaccaaataaacagacaaaagtagtattgaaaagtttacagtcccttatctaatggcaaattgtgtgtatgtatgat

SEQ ID NO: 315168 - DNA, 120 bp, Artificial Sequence
  ENSG00000134900_40 (sequence is synthesized)
ttttttatcttgttctcttaagatttactgctgcttaaaattactaccagtaatccttagtcactcccaactgtttctgctgtatctcatgaagtgttagagcgtttatgagaaacataa

SEQ ID NO: 315169 - DNA, 120 bp, Artificial Sequence
  ENSG00000134900_41 (sequence is synthesized)
atacatgtataagcatattggtcacaccttctgggctagctagggtccaaagtctatccatgaaagctacatgcatgttctctctcacacactcatggactttcacctgcacacacatac

SEQ ID NO: 315170 - DNA, 120 bp, Artificial Sequence
  ENSG00000134900_42 (sequence is synthesized)
aggtccccatttgtataggtttagtccagtaagagaatggagaagctcagtaaaggtaggatgacttcccaaggttatacggctgatcaactgttggaaattaattacagaccttgcttt

SEQ ID NO: 315171 - DNA, 120 bp, Artificial Sequence
  ENSG00000134900_43 (sequence is synthesized)
ctttacaacccaggttttgctatttcaggtaagtactacctacagcaggaatcagtaacgtttggccctttaacccaaactggactgctgcctgtttttgtaaataaagttttattggaa

SEQ ID NO: 315172 - DNA, 120 bp, Artificial Sequence
  ENSG00000134900_44 (sequence is synthesized)
taaaaaataaacttatcttagtagcttattataaagtgtcattgaaaacaaccaggccgtggatatccacatggatcagaaagctttgctttgcgctgtcattgtagactgcccctgcca

SEQ ID NO: 315173 - DNA, 120 bp, Artificial Sequence
  ENSG00000134900_45 (sequence is synthesized)
gcccagctaaagacactcaataagagtggcttaggagaagagccaaaagtcagcaaagcttgatgtgtttttgttcagttaataaaagtgtaaaattattaaacttattctcttctaaaa

SEQ ID NO: 315174 - DNA, 120 bp, Artificial Sequence
  ENSG00000134900_46 (sequence is synthesized)
atagttttgcacttctagggaagaagaaatcaagcaatttgacattaccacccaaatataaccagccattctttgttacttccttacctgatgataagtaagtgataacattgcttatac

SEQ ID NO: 315175 - DNA, 120 bp, Artificial Sequence
  ENSG00000134900_47 (sequence is synthesized)
ttactgcccatcgtatacactgtagtccttttaatgtcagtttatgacatctaggctaaatttagaggatgtagtcattttttttttggctgaagtatttcttcctttgatttttgaagt

SEQ ID NO: 315176 - DNA, 120 bp, Artificial Sequence
  ENSG00000134900_48 (sequence is synthesized)
gtgtggaattgttttcatgtttttccccttacttgtctttgtgaaactttctcttttgttgctttttttctctttgaattctcttgtttagaatacctaaaggggcaggacctggatgct

SEQ ID NO: 315177 - DNA, 120 bp, Artificial Sequence
  ENSG00000134900_49 (sequence is synthesized)
aaatagctgcagtaatcccggctttagataaaccacatgaactaataatatcactagtgttcaaaggtagaattatatgtgtaccatatgtattgctattaaataaagtcaaaaaaatta

SEQ ID NO: 315178 - DNA, 120 bp, Artificial Sequence
  ENSG00000134900_50 (sequence is synthesized)
agtgtagtacaacttaggtgcagcccatgttacatgacatgtagctgttgaagatgattttgatgtatgtaaaattaagcatattaatctaagaatctctctccacattcgtaggatgta

SEQ ID NO: 315179 - DNA, 120 bp, Artificial Sequence
  ENSG00000134900_51 (sequence is synthesized)
ttgaagaactgggtccaaacactgcggtatcattcaatgttttaggaactacagatattgaatatagattggggggatctcttacactcttaaaaaagggccttttttttttttaatcca

SEQ ID NO: 315180 - DNA, 120 bp, Artificial Sequence
  ENSG00000134900_52 (sequence is synthesized)
agccaggatccatcaggcagcatttgccgagtctgccctgcagactctggccgagcgacggatgaaaggagtgctcagacacagtgacatggacaaacaaaaatccaccctcgtagatgc

SEQ ID NO: 315181 - DNA, 120 bp, Artificial Sequence
  ENSG00000134900_53 (sequence is synthesized)
acttagagaatcttttcttagtttgaacttatttcatccccttctcagatttaaaatgtgaaaggtcagtgtacttttgtcatctgtctgccaagtaaagccaagaataccaaatatact

SEQ ID NO: 315182 - DNA, 120 bp, Artificial Sequence
  ENSG00000134900_54 (sequence is synthesized)
tagaggtgagaattttatccttgccagcagatctctgcaaggcagccccagtatcagcttctagcttcactgtcccacctgaccagcaaagtcaaggatggtggatagccgatcccagtc

SEQ ID NO: 315183 - DNA, 120 bp, Artificial Sequence
  ENSG00000134900_55 (sequence is synthesized)
atgactagttaggatcagtggacattaacctttttatttcttgctgtaaaatagcaagttaacattctctctgatattattttgtgaatcctaatgcagtcatttttagaaactgcaata

SEQ ID NO: 315184 - DNA, 120 bp, Artificial Sequence
  ENSG00000134900_56 (sequence is synthesized)
cagggcaccttgacctgtgttcacatactcactgtgttataaagatacctggtttcttttgtttaatctgaccttaactcatcggcatgaagcctagtcttaagtgtattaaaataacca

SEQ ID NO: 315185 - DNA, 120 bp, Artificial Sequence
  ENSG00000134900_57 (sequence is synthesized)
attagggacaatagtcagtgacacggtgatgtctaaagatatactgcttcctagaattatcaataaaaattaaaacatccagcttttgaagatatatccaacttatatcatcctgatgtt

SEQ ID NO: 315186 - DNA, 120 bp, Artificial Sequence
  ENSG00000134900_58 (sequence is synthesized)
ttcttcctaaatctaaaaaattggagctaaatttagagtagattatgtttcactgacattttaaactatatttaaaacttactcttcagtgtcagttttctcctttataaaatctgtaca

SEQ ID NO: 315187 - DNA, 120 bp, Artificial Sequence
  ENSG00000134900_59 (sequence is synthesized)
ttagcaacttccttcagaggactactaaaaatatgaaataacattccctcggccaggaggagggctgagtgtggcccctgccatctggtgagcagcaggggtctggggaggtctgtgctg

SEQ ID NO: 315188 - DNA, 120 bp, Artificial Sequence
  ENSG00000134900_60 (sequence is synthesized)
cacacaacacagtactgtcaacagtttgcacaaggggtacaaatcagaacctgtcttgcaacacttttagttgtcaccctagtgttaggatttggttgtattgagagctgtttgttcaca

SEQ ID NO: 315189 - DNA, 120 bp, Artificial Sequence
  ENSG00000134900_61 (sequence is synthesized)
tttgaaaatgtttttgccatgaaaagattgcctttgtcatatttattgcaaaatctaaactgtatgtattgatatgattcaatcaaataattatgtaagttagtgattaaaatattgtag

SEQ ID NO: 315190 - DNA, 120 bp, Artificial Sequence
  ENSG00000134900_62 (sequence is synthesized)
agtatactgaaaaggatagctctcaggaaggttcatctgcactttttgcaatatgttacagattttgttgcatatggttttatttgtctcattcaatgaactcttgaatcaaaccagtta

SEQ ID NO: 315191 - DNA, 120 bp, Artificial Sequence
  ENSG00000134900_63 (sequence is synthesized)
gtagcagagtaatgtgtattctttttatcatgattaataatatgcaaattgaattgaataaactttcagtccatgagaatgttttgtcatttccccacctttgtgtctctaggagctcat

SEQ ID NO: 315192 - DNA, 120 bp, Artificial Sequence
  ENSG00000134900_64 (sequence is synthesized)
cagagtaaagcattacatttatttgtcctagtcatgaactgaaagttttaagacataacctctgggtatacacatagacaaatgtgtaatgattactatttataagaaaactgaaaactc

SEQ ID NO: 315193 - DNA, 120 bp, Artificial Sequence
  ENSG00000134900_65 (sequence is synthesized)
aaaagtcgtttacctgattaagagttatatagctaaaaaaatttagaatagtgattaacctttcaactctgttgcttctggcattccgtttcaaccaggtgcagctaccctaactcattt

SEQ ID NO: 315194 - DNA, 120 bp, Artificial Sequence
  ENSG00000134900_66 (sequence is synthesized)
aatctatatgtgtaatatagtagctcatttgatgtttattaataaggcatcatatttgatgtacaatacaattgtacgtacctggatatacagtatttctgcattataaatcttaggcaa

SEQ ID NO: 315195 - DNA, 120 bp, Artificial Sequence
  ENSG00000134901_0 (sequence is synthesized)
aaatgatgctccagtggcaggagcaactcaagttcatcattgtcctgagagagaggagcagcgcggttctcggccgggacagcagaacgccaggggaccctcacctgggcgcgccggggc

SEQ ID NO: 315196 - DNA, 120 bp, Artificial Sequence
  ENSG00000134901_1 (sequence is synthesized)
acgggctttgattgtcctggggtcgcggagacccgcgcgcctgccctgcacgccgggcggcaacctttgcagtcgcgttggctgctgcgatcggccggcgggtccctgccgaaggctcgg

SEQ ID NO: 315197 - DNA, 120 bp, Artificial Sequence
  ENSG00000134901_2 (sequence is synthesized)
ctgcttctgtccacctcttacacttcttcatttatcggtggatcatttcgagagtccgtcttgtaaatgtttggcactttgctactttattgcttctttctggcgacagttccagcactc

SEQ ID NO: 315198 - DNA, 120 bp, Artificial Sequence
  ENSG00000134901_3 (sequence is synthesized)
gccgagaccggcggagaaaggcagctgagcccggagaagagcgaaatatggggacccgggctaaaagcagacgtcgtccttcccgcccgctatttctatattcaggcagtggatacatca

SEQ ID NO: 315199 - DNA, 120 bp, Artificial Sequence
  ENSG00000134901_4 (sequence is synthesized)
gggaataaattcacatcttctccaggcgaaaaggtcttccaggtgaaagtctcagcaccagaggagcaattcactagagttggagtccaggttttagaccgaaaagatgggtccttcata

SEQ ID NO: 315200 - DNA, 120 bp, Artificial Sequence
  ENSG00000134901_5 (sequence is synthesized)
gtaagatacagaatgtatgcaagctacaaaaatctgaaggtggaaattaaattccaagggcaacatgtggccaaatccccatatattttaaaagggccggtttaccatgagaactgtgac

SEQ ID NO: 315201 - DNA, 120 bp, Artificial Sequence
  ENSG00000134901_6 (sequence is synthesized)
tgtcctctgcaagatagtgcagcctggctacgggagatgaactgccctgaaaccattgctcagattcagagagatctggcacatttccctgctgtggatccagaaaagattgcagtagaa

SEQ ID NO: 315202 - DNA, 120 bp, Artificial Sequence
  ENSG00000134901_7 (sequence is synthesized)
atcccaaaaagatttggacagaggcagagcctatgtcactacaccttaaaggataacaaggtttatatcaagactcatggtgaacatgtaggttttagaattttcatggatgccatacta

SEQ ID NO: 315203 - DNA, 120 bp, Artificial Sequence
  ENSG00000134901_8 (sequence is synthesized)
cctggtgtggctccacagattccaaggatatcgtgatgcctacgtacgatttgactgattctgttctggaaaccatgggccgggtaagtctggatatgatgtccgtgcaagctaacacgg

SEQ ID NO: 315204 - DNA, 120 bp, Artificial Sequence
  ENSG00000134901_9 (sequence is synthesized)
gtcctccctgggaaagcaaaaattccactgccgtctggagagggcgagacagccgcaaagagagactcgagctggttaaactcagtagaaaacacccagaactcatagacgctgctttca

SEQ ID NO: 315205 - DNA, 120 bp, Artificial Sequence
  ENSG00000134901_10 (sequence is synthesized)
ccaactttttcttctttaaacacgatgaaaacctgtatggtcccattgtgaaacatatttcattttttgatttcttcaagcataagtatcaaataaatatcgatggcactgtagcagctt

SEQ ID NO: 315206 - DNA, 120 bp, Artificial Sequence
  ENSG00000134901_11 (sequence is synthesized)
atcgcctgccatatttgctagttggtgacagtgttgtgctgaagcaggattccatctactatgaacatttttacaatgagctgcagccctggaaacactacattccagttaagagcaacc

SEQ ID NO: 315207 - DNA, 120 bp, Artificial Sequence
  ENSG00000134901_12 (sequence is synthesized)
tgagcgatctgctagaaaaacttaaatgggcgaaagatcacgatgaagaggccaaaaagatagcaaaagcaggacaagaatttgcaagaaataatctcatgggcgatgacatattctgtt

SEQ ID NO: 315208 - DNA, 120 bp, Artificial Sequence
  ENSG00000134901_13 (sequence is synthesized)
attatttcaaacttttccaggaatatgccaatttacaagtgagtgagccccaaatccgagagggcatgaaaagggtagaaccacagactgaggacgacctcttcccttgtacttgccata

SEQ ID NO: 315209 - DNA, 120 bp, Artificial Sequence
  ENSG00000134901_14 (sequence is synthesized)
ggaaaaagaccaaagatgaactctgatatgcaaaataacttctattagaataatggtgctctgaagactcttcttaactaaaaagaagaatttttttaagtattaattccatggacaata

SEQ ID NO: 315210 - DNA, 120 bp, Artificial Sequence
  ENSG00000134901_15 (sequence is synthesized)
taaaatctgtgtgattgtttgcagtatgaagacacatttctacttatgcagtattctcatgactgtactttaaagtacatttttagaattttataataaaaccacctttattttaaagga

SEQ ID NO: 315211 - DNA, 120 bp, Artificial Sequence
  ENSG00000134901_16 (sequence is synthesized)
gttttctttctttggtgagttcttttgcaacaacctttgtgatatgatgatttgggaggaaaatctgttgcactttgtcttctagggtaagtctggatatgatgtccgtgcaagctaaca

SEQ ID NO: 315212 - DNA, 120 bp, Artificial Sequence
  ENSG00000134901_17 (sequence is synthesized)
aatacaaattatacactatcagggtattctcttctggagccttatgataatactattctgaagctttctgttatttcaggtacctgcgtttgtttcctagggctgccgtaacaaagtgct

SEQ ID NO: 315213 - DNA, 80 bp, Artificial Sequence
  ENSG00000134905_0 (sequence is synthesized)
agtcgtaggcgctggccgctgacatgttgaggactacgcgcggcccaggcctgggccccccgctgctccaggccgcgctg

SEQ ID NO: 315214 - DNA, 120 bp, Artificial Sequence
  ENSG00000134905_1 (sequence is synthesized)
cggcgagcggggggcgcgggcgggcctggctgcagcccacgggccgggagacgggtgtgcaggtgtacaacagcctcaccgggaggaaggaacccctaatcgtggcgcacgccgaagccg

SEQ ID NO: 315215 - DNA, 120 bp, Artificial Sequence
  ENSG00000134905_2 (sequence is synthesized)
cctcctggtatagctgtggaccaactgtatatgatcatgcgcaccttggccatgcttgctcatatgttagatttgatatcattcgaaggatcctaaccaaggtttttggatgcagcatag

SEQ ID NO: 315216 - DNA, 120 bp, Artificial Sequence
  ENSG00000134905_3 (sequence is synthesized)
tcatggtgatgggtattacagatgtagatgataaaatcatcaaaagagccaatgagatgaatatttcccccgcttccctcgccagtctttatgaggaagacttcaagcaggacatggcag

SEQ ID NO: 315217 - DNA, 120 bp, Artificial Sequence
  ENSG00000134905_4 (sequence is synthesized)
ccctgaaggttctcccacccacggtgtacctgagggtaaccgaaaatattcctcagataatttctttcattgaaggaatcattgctcgtgggaacgcttattcaacggcaaaaggcaatg

SEQ ID NO: 315218 - DNA, 120 bp, Artificial Sequence
  ENSG00000134905_5 (sequence is synthesized)
tctacttcgatctgaagtctagaggagacaagtatggcaaattggtcggcgtggtccctggtccagtcggagagccagcggactctgacaagcgtcatgccagtgacttcgccctgtgga

SEQ ID NO: 315219 - DNA, 120 bp, Artificial Sequence
  ENSG00000134905_6 (sequence is synthesized)
aggcggccaaaccccaggaggtgttctgggcctctccctggggacccgggaggccgggctggcacatcgagtgctctgccatcgctagtatggtatttggaagtcaactggatatccatt

SEQ ID NO: 315220 - DNA, 120 bp, Artificial Sequence
  ENSG00000134905_7 (sequence is synthesized)
gaaattgcacagtgcgaagtctttcatcagtgcgagcagtggggaaattattttctgcattctgggcatttgcacgccaaaggcaaagaagaaaaaatgtccaaatcattaaagaactac

SEQ ID NO: 315221 - DNA, 120 bp, Artificial Sequence
  ENSG00000134905_8 (sequence is synthesized)
attactattaaggactttctgaagaccttttcccccgatgtcttccggttcttctgcctgcggagcagctaccgctcagccatcgactacagtgacagcgccatgctccaagctcagcag

SEQ ID NO: 315222 - DNA, 120 bp, Artificial Sequence
  ENSG00000134905_9 (sequence is synthesized)
ctgctcctggggctgggctctttcctggaggacgcacgtgcctacatgaaggggcagctggcctgcggctccgtcagggaagcgatgctgtgggagaggctctccagcaccaagagggcc

SEQ ID NO: 315223 - DNA, 120 bp, Artificial Sequence
  ENSG00000134905_10 (sequence is synthesized)
gtgaaggcggccttggcagatgattttgacacacccagggtggttgatgccatcctgggccttgcacaccacgggaatggacagctcagggcgtccctgaaggaacctgaagggccgaga

SEQ ID NO: 315224 - DNA, 120 bp, Artificial Sequence
  ENSG00000134905_11 (sequence is synthesized)
agtcctgctgtgtttggtgccatcatctcttactttgaacagttttttgaaactgttggaatttctctggcaaatcaacagtacgtttcaggagacggcagcgaggctaccttgcatggt

SEQ ID NO: 315225 - DNA, 120 bp, Artificial Sequence
  ENSG00000134905_12 (sequence is synthesized)
gtggtggacgagctggtgcggttccggcagaaggtccggcagtttgcgctggccatgcccgaggccacgggggacgcccggcggcagcagctcctagaaaggcagcccctgctggaagca

SEQ ID NO: 315226 - DNA, 120 bp, Artificial Sequence
  ENSG00000134905_13 (sequence is synthesized)
tgcgacaccctgcgccggggcctgactgcccacggcatcaacatcaaggacagaagcagtacaacatccacgtgggaactgctggatcaaaggacaaaagaccaaaaatcagcgggctga

SEQ ID NO: 315227 - DNA, 120 bp, Artificial Sequence
  ENSG00000134905_14 (sequence is synthesized)
ggatggagcacagccatgaacctgctcacgacaagacgcacccatgcttctcagggtcaaggctttatgttaaagcttcctgtcggggctgctaggtcagcattaaagtaaggcaaccaa

SEQ ID NO: 315228 - DNA, 120 bp, Artificial Sequence
  ENSG00000134905_15 (sequence is synthesized)
gtaagaggcccgcctagcacccggcgtggcacccctcctgtggcctgctgggtgctgctggtgggctcttgaaggggaagaggggcccccaggagacagggcgctggacaggaggtttgg

SEQ ID NO: 315229 - DNA, 120 bp, Artificial Sequence
  ENSG00000134905_16 (sequence is synthesized)
ggtcagggactgcccagagaggccccaggagacagggtgctgggcaggaggtgcaggtgtggggtcaggggctccccagaggccacaggggactgggagctggacaggaggtgtggggtc

SEQ ID NO: 315230 - DNA, 120 bp, Artificial Sequence
  ENSG00000134905_17 (sequence is synthesized)
ggccttgcctgtcactttttccagaggcgagggtcgcggaggggacagcgtcagggccgctggggtgtggacggcgggcgaggcgcaaactttactaggagtttttggcacttggaggca

SEQ ID NO: 315231 - DNA, 120 bp, Artificial Sequence
  ENSG00000134905_18 (sequence is synthesized)
gagcctgttgggcggcacagcacgcccgctgggaaacgcaggggagcggcctgcttcgctgaaaacccgaccaggacctaacgggccgcgggacagaaacctccgagaccatggtacaca

SEQ ID NO: 315232 - DNA, 120 bp, Artificial Sequence
  ENSG00000134905_19 (sequence is synthesized)
gcaactaccgcaactcgctcctcagcccctgactcttcgtccccgccccacagagcagtataagtagggcccgaaacagaactggcaaccgcagtagccaatctacttgccaacatcact

SEQ ID NO: 315233 - DNA, 87 bp, Artificial Sequence
  ENSG00000134905_20 (sequence is synthesized)
cactttgacagcccaatcacgatgaagaggaggcggggagaccgcggagtctcccctcagctcactgtgagctctgcctcctgggtt

SEQ ID NO: 315234 - DNA, 75 bp, Artificial Sequence
  ENSG00000134905_21 (sequence is synthesized)
tagaggcacgtttgtcaagctattgtatagctgtggaccaactgtatatgatcatgcgcaccttggccatgcttg

SEQ ID NO: 315235 - DNA, 120 bp, Artificial Sequence
  ENSG00000134905_22 (sequence is synthesized)
caggcacacccacggagggctctggctgacatagtttgaactcctcctttgtcttctggcctgtctttaaagccagatttaatttaattgcaaaataaatggagaagaatagtatccaga

SEQ ID NO: 315236 - DNA, 120 bp, Artificial Sequence
  ENSG00000134905_23 (sequence is synthesized)
cttcgttcagggctcagttcagcgctccctgaactgtctgaggagctggagttgctccctccgcaggcacgtttctgtctgcaggtttatcctgttcagtaggtcagggtttgttactga

SEQ ID NO: 315237 - DNA, 120 bp, Artificial Sequence
  ENSG00000134905_24 (sequence is synthesized)
caaccatgacctgctgtgagcccttctgcgagtgtggagctggggggcaagaagggcagccttagctgtgccaacgcttcgtcctgtcagggcatttgcacgccaaaggcaaagaagaaa

SEQ ID NO: 315238 - DNA, 120 bp, Artificial Sequence
  ENSG00000134905_25 (sequence is synthesized)
tggacaggaggtgtggggtcaggggctcccgagacatcccagggagacggcgctggcaggaagtgtgcctggggccctcgggctctgagccccctgctcagagtggctttgggctcgggt

SEQ ID NO: 315239 - DNA, 120 bp, Artificial Sequence
  ENSG00000134905_26 (sequence is synthesized)
tccctgtgcgaggagcggagctgctcatccctcccagtcctgactgtgaggagccaaaatctataaaacacacaggcctgggcccacagcatcgcctccactccccacccacgggtgtcc

SEQ ID NO: 315240 - DNA, 120 bp, Artificial Sequence
  ENSG00000134905_27 (sequence is synthesized)
tgggcagcgctgcacattcatcccggcatgcagagtcttccggatggtcttggtgataacccacccctgccacttcagcagggtaggcagccagtggccacgggaggctgagatccggga

SEQ ID NO: 315241 - DNA, 120 bp, Artificial Sequence
  ENSG00000134905_28 (sequence is synthesized)
ccagagatgagtccatctcagcaacagaatgtcgccagctctgcacacacgtttatgttcaaagactctcagaatgtgcagaagtcacaggcacagacgggctccccgacaggcacgagt

SEQ ID NO: 315242 - DNA, 120 bp, Artificial Sequence
  ENSG00000134905_29 (sequence is synthesized)
atctattgatttttaaaaccatcatgaaaatgcccacgtgtgtcttgtattttaagtgtcacaggtgacctctgctctgggactttttcttggggtaacatgacagtttgcagttgatgt

SEQ ID NO: 315243 - DNA, 120 bp, Artificial Sequence
  ENSG00000134905_30 (sequence is synthesized)
tacataattttctgctactcaggaactcaagtctttgggaatatgacctagagaaagtccccagattagagcccccagcgtctctccctggggaaggactggtgtgggggccgcctgggg

SEQ ID NO: 315244 - DNA, 120 bp, Artificial Sequence
  ENSG00000134905_31 (sequence is synthesized)
tttctgagacgtggtctgaacctctcccctgggtggaactgcagtgcatcggcccaggggacctgcgctcacgggcgcacgagcttgagaaagaagtgtggccagcctcgtgctcgcctg

SEQ ID NO: 315245 - DNA, 120 bp, Artificial Sequence
  ENSG00000134905_32 (sequence is synthesized)
gcctcgtgcagcatctgtgtgtggtgtgcacttacgcgtgatgaaagcagcccagccgtgccgtgagaggaagagtcggggaggcgaatgggctggagaaactgtttccgcctggctccg

SEQ ID NO: 315246 - DNA, 120 bp, Artificial Sequence
  ENSG00000134905_33 (sequence is synthesized)
tgttgctggaaacgggcagaggcggcggagatgaatcccgtgtgcgagcgcagagctctcttcccggctcgtgcttgctcccctcgtggctgggggctgtggtcctttcaaagctgttcc

SEQ ID NO: 315247 - DNA, 120 bp, Artificial Sequence
  ENSG00000134905_34 (sequence is synthesized)
ctgcggatcccttcccaggggcactttgccctcggaagccccgcctcccttctcgcagattgtggcaggattaggggcagcatcttgtatgactgtcctaattgtgtgcagttctttttg

SEQ ID NO: 315248 - DNA, 120 bp, Artificial Sequence
  ENSG00000134905_35 (sequence is synthesized)
agctttgaatacgaagtttggtctgaaaagaggctttctcaagcctgggcagctctttcaggaacacattcccagtgggaattttgggtgggattcaggaggcaccgatctgccagtgag

SEQ ID NO: 315249 - DNA, 120 bp, Artificial Sequence
  ENSG00000134905_36 (sequence is synthesized)
ggatttctaggaacacaaggttagtcaggacgtggatccccacagtggacacgactgccccaccccgccgaggtcggaggtggccttgaggagctgggccgtcgcttgctgtctgagctt

SEQ ID NO: 315250 - DNA, 120 bp, Artificial Sequence
  ENSG00000134905_37 (sequence is synthesized)
ccatccacgaatggtgtgggagttcgggatcttcccagacattctttcttcacctttgggaagatggagggggacggtggtggcatcccttgcagtctgtgctgcgctgacactttggag

SEQ ID NO: 315251 - DNA, 120 bp, Artificial Sequence
  ENSG00000134905_38 (sequence is synthesized)
aagtgtctcccatctgtagagcagaatcctctttggagaaatgcagctgtccttgaccttgaggcagaaggcgtctccatcctgggcatctgtctgcccctccccatctggatgcctcat

SEQ ID NO: 315252 - DNA, 120 bp, Artificial Sequence
  ENSG00000134905_39 (sequence is synthesized)
atacattggatatgtgcaggttcccattcgtttcctggggagccatgtgtccctgaggccagagagtctcctcacccagctcagactgaatgcttttgtttttgtttcagggcatttgca

SEQ ID NO: 315253 - DNA, 120 bp, Artificial Sequence
  ENSG00000134905_40 (sequence is synthesized)
ttgtgcacttcccgcctggctctctggttccggggcggcctcggcttcggcctccgccccgctgcggccgccgcgggtcccctccggggtggccccgagagctgtgttcgccacgcttgg

SEQ ID NO: 315254 - DNA, 120 bp, Artificial Sequence
  ENSG00000134905_41 (sequence is synthesized)
ctgcctgcttttctctgattttcttccgccttggaccctgctctatttgcattgtctttttttcagcaagtcggagaacggtgccttgtcagttttcacctttctcactggactttctct

SEQ ID NO: 315255 - DNA, 120 bp, Artificial Sequence
  ENSG00000134905_42 (sequence is synthesized)
agattcctcatgcacctatagttgtatggtctgcagtgaggtagccgatgccagagctgtgtcctccctccatagaagccaggagaaaggccagactgaagtgacctgctgaagcctttg

SEQ ID NO: 315256 - DNA, 120 bp, Artificial Sequence
  ENSG00000134905_43 (sequence is synthesized)
tcttttgacattgaattccgtttgcccactgccatcaagactgcttttaaggagcttctgcgacatgatctcttacaggaacctgaagggccgagaagtcctgctgtgtttggtgccatc

SEQ ID NO: 315257 - DNA, 120 bp, Artificial Sequence
  ENSG00000134905_44 (sequence is synthesized)
gtagatgataaaatcatcaaaagagccaatgaggtaagtggagaagagttacatctattgataatgccattgattagtgttctgagcccttcctgaaagtggttcttggccgggcgtggt

SEQ ID NO: 315258 - DNA, 120 bp, Artificial Sequence
  ENSG00000134905_45 (sequence is synthesized)
ttgtacggacaggacgggctccccgacaggcacgagtcacctgcaccttcccagcgaggctcaccctggctgtgcagtgaaggtggacgctgccaggcttctccacattccttctcttcc

SEQ ID NO: 315259 - DNA, 120 bp, Artificial Sequence
  ENSG00000134905_46 (sequence is synthesized)
gttgtaactcaagagcatttttgcaaagagacttggatcctatgaaaatgtcctcttccttatcaggctcacctgaaactcgtttattctatcaatacagatttgaggtttcctgcctta

SEQ ID NO: 315260 - DNA, 120 bp, Artificial Sequence
  ENSG00000134905_47 (sequence is synthesized)
tctgcctgcggagcagctaccgctcaggtgagccgagcacacgtggagtggactccccccccagctcggagacagtcattctgacaggactgaaaacagcaaaatgcaggccagagaata

SEQ ID NO: 315261 - DNA, 120 bp, Artificial Sequence
  ENSG00000134905_48 (sequence is synthesized)
agcagaaccttgttgagtgaggctgctgtgtgccttacggttcgggttgagagtgaacccagaggacgagggatcccagtgctggtctgggcccggcccacagtggatgtgggcttcctc

SEQ ID NO: 315262 - DNA, 120 bp, Artificial Sequence
  ENSG00000134905_49 (sequence is synthesized)
gtcaagctcgagtcctctccactccttctctctgggtctggacaagtcgtgaacccgcagcacctcggcttcctgctgtgtgaactgggagattggaaggggccagcctggcacggcccc

SEQ ID NO: 315263 - DNA, 120 bp, Artificial Sequence
  ENSG00000134905_50 (sequence is synthesized)
ggaggcggggagaccgtatagctgtggaccaactgtatatgatcatgcgcaccttggccatgcttgctcatatgttagatttgatatcattcgaaggatcctaaccaaggtttttggatg

SEQ ID NO: 315264 - DNA, 120 bp, Artificial Sequence
  ENSG00000134905_51 (sequence is synthesized)
gtgatgacggttcctcccatgctgcacagttacctgctgccccgggctaggctcttggccaggagttgtctagcactggcctggcatggtggctcacgtgtatgatcccagcactttggg

SEQ ID NO: 315265 - DNA, 120 bp, Artificial Sequence
  ENSG00000134905_52 (sequence is synthesized)
aggccgaggctggcagatgttttgagtccaggagtttgagacccgcctgggcaacatagtgagatcttatctctacaaaaaatacaaaaggcctggcacgatggctcacacctgtaatct

SEQ ID NO: 315266 - DNA, 120 bp, Artificial Sequence
  ENSG00000134905_53 (sequence is synthesized)
gaattcagtatctctgaattacaggagaggagaaaatagatgaaatactgctgtcagtaccacggttgctggctcttgtttagcttctgagtcagctggggcacccctgccatctgctct

SEQ ID NO: 315267 - DNA, 120 bp, Artificial Sequence
  ENSG00000134905_54 (sequence is synthesized)
ctgtgcgctggtgcatctgaggtgaaagcgttgccggtgctcctgtccctcacgtgggtgaaacaggagtgaacgagaagccaaggctccttcgaagagacacagcctggggcgtgctgc

SEQ ID NO: 315268 - DNA, 120 bp, Artificial Sequence
  ENSG00000134905_55 (sequence is synthesized)
aacaggccagggcccggcaacagaagcttgcactgtaaacgctcctcccgcgcggcggacacagctccaggctggtaccgcgcgcacacggacgcctcgcaggacctgggctaataagga

SEQ ID NO: 315269 - DNA, 120 bp, Artificial Sequence
  ENSG00000134905_56 (sequence is synthesized)
tgattctcctgcctcagccacctgagtctctgggattacagatgaatatttcccccgcttccctcgccagtctttatgaggaagacttcaagcaggacatggcagccctgaaggttctcc

SEQ ID NO: 315270 - DNA, 120 bp, Artificial Sequence
  ENSG00000134905_57 (sequence is synthesized)
tttttaaggaaagacccatttaccccaaggcactgttatgcaatctgcaccccagtgtgatgaccacaccaagcacccaggggtctgagcctggactcgtgggtcactgcaagtgtttgg

SEQ ID NO: 315271 - DNA, 120 bp, Artificial Sequence
  ENSG00000134905_58 (sequence is synthesized)
caggtgggacaaagaccgtgaaggcggcggcaggctttggttcctgcacgtctgagggtcccctgccaggccctgggaggcgctgcgtcaggagccccgtgacctttgatgacccgggaa

SEQ ID NO: 315272 - DNA, 120 bp, Artificial Sequence
  ENSG00000134905_59 (sequence is synthesized)
gccgaggctgtttgtgcctctcccacctctggaaacacctgggggttctggccacatgctctgttagttgagcatctctgtggaggtctccatccctggctgcgtgcagtgttgggtttc

SEQ ID NO: 315273 - DNA, 120 bp, Artificial Sequence
  ENSG00000134905_60 (sequence is synthesized)
agagcaccagcaggtggggcagggtgccatgtgcccttgccgggtgccttcggtccaaatactgcagacgcgcagggctcgcctctgaggggggcgggcatttgagtcacagccggctgc

SEQ ID NO: 315274 - DNA, 120 bp, Artificial Sequence
  ENSG00000134905_61 (sequence is synthesized)
aggaacaggctgccccgcactgaaggcagccaggccgggctggggcaggtcccgcagccaggctgctcctgcacgggagctcctcctcctcagcccgtccgcggcctcctgccttcaccg

SEQ ID NO: 315275 - DNA, 120 bp, Artificial Sequence
  ENSG00000134905_62 (sequence is synthesized)
cagctgctgccggcactaccaggctggcccagctctagggcaacaggggcctcttgtggcaaggggcgggacaagtaaagaggctggcttttgtcctgcgcttttccttcccaagctttg

SEQ ID NO: 315276 - DNA, 120 bp, Artificial Sequence
  ENSG00000134905_63 (sequence is synthesized)
caattctggggcacctgcaaactaaggctagtgtcacccaagggtctctgtgcttggtaactgatgtgagccacgtaccaggatttccccgttttctgagaaacccagcccagtgcccac

SEQ ID NO: 315277 - DNA, 120 bp, Artificial Sequence
  ENSG00000134905_64 (sequence is synthesized)
ctttgaacagttttttgaaactgttggaatttctctggcaaatcaacaggtaggtcctattattttaaatgcttaattctggaattttctccatgttgggacaataacctttaccctttt

SEQ ID NO: 315278 - DNA, 120 bp, Artificial Sequence
  ENSG00000134905_65 (sequence is synthesized)
aacttggaatagagcattatgatgccacactaatgtatttacctgtttaaaaacatgttactttcctggaaaaataaacacactcagagccaatacttattaattggaattgcacaattc

SEQ ID NO: 315279 - DNA, 120 bp, Artificial Sequence
  ENSG00000134905_66 (sequence is synthesized)
ccctgtcattctttggacacccttgtagaattctcagcacaaggcgctctggctcttttggggtgtggctcggctgctgctgcctggacgggggctgccactctagaccagctgcccagc

SEQ ID NO: 315280 - DNA, 120 bp, Artificial Sequence
  ENSG00000134905_67 (sequence is synthesized)
accccgagggtcccgccgcttgggactggggcccaagcaggtgtgctgaaggcctggctctgggccaaacatgtctcgctggctctcaacagagaactatagtgtcttttccaagtttgg

SEQ ID NO: 315281 - DNA, 120 bp, Artificial Sequence
  ENSG00000134905_68 (sequence is synthesized)
ctcatttgtatacctgttgatcacctggtagacttagttcccctttccagcagtccggcgtctgttgccaatcacataaaagtcgactggtgtgagatgacccaagtttttgcaatgtac

SEQ ID NO: 315282 - DNA, 120 bp, Artificial Sequence
  ENSG00000134905_69 (sequence is synthesized)
atgttcatttttaggggtggctttccggagtctgttttgagtaagaaaagtgggatctggccaagctctgcctagcccttgtcaaagatatctcattcaccttcctctggccgcaaggcc

SEQ ID NO: 315283 - DNA, 120 bp, Artificial Sequence
  ENSG00000134905_70 (sequence is synthesized)
caatgtctgggcccactctgggctcatatttctgtaataacaaaaactgtcttttatcatggaagcaataactgaggggtgtgtgaggtttaagtagtttgacaccaaggtcaaatgttg

SEQ ID NO: 315284 - DNA, 120 bp, Artificial Sequence
  ENSG00000134905_71 (sequence is synthesized)
tgtctgtttcttattttacacacatggatttaacaaataggtacagctgccccttccacaccgccccaggatctgttctcagtgggaggacagcgcgaggccttctgcgcaaatcccgtc

SEQ ID NO: 315285 - DNA, 120 bp, Artificial Sequence
  ENSG00000134905_72 (sequence is synthesized)
ctcagcacctgaggctgtgaatctcagaccatttgccgaaacacacgtgtgcaagcgctcagtcgctgccccccagcctcatcctcaggttgctcctgatacctcggccacaattgcgtg

SEQ ID NO: 315286 - DNA, 120 bp, Artificial Sequence
  ENSG00000134905_73 (sequence is synthesized)
aggtctggaagccagggagcgtttgtgttcagggcggggcggcatgcagcccccagccctttcttccaactcccgagtgaggatcactcagccttgcttggacgacagatgctcagagtt

SEQ ID NO: 315287 - DNA, 120 bp, Artificial Sequence
  ENSG00000134905_74 (sequence is synthesized)
gagtggagccttgcccagagcccagcgctcgcgggctgtacccatccctgccagacccagaaagaggcccagctgcagggaatcagggaagcccagggctgggtgggtgtcggcccagag

SEQ ID NO: 315288 - DNA, 120 bp, Artificial Sequence
  ENSG00000134905_75 (sequence is synthesized)
tgataaaatcatcaaaagagccaatgaggcatgagtcaaaggaatggtgtgaggtccttgaggaacattttcactgagatgaatatttcccccgcttccctcgccagtctttatgaggaa

SEQ ID NO: 315289 - DNA, 120 bp, Artificial Sequence
  ENSG00000134905_76 (sequence is synthesized)
gggctcggggagggcgtttaggaagctgcatggagggcgccgttctagaagctgggggtgcgcggtgcttttgcaggtttgggtgtgaattgagcaagtatgaaaaccccggctattcat

SEQ ID NO: 315290 - DNA, 120 bp, Artificial Sequence
  ENSG00000134905_77 (sequence is synthesized)
tccctgaaggctaccttgcatggtgtggtggacgagctggtgcggttccggcagaaggtccggcagtttgcgctggccatgcccgaggccacgggggacgcccggcggcagcagctccta

SEQ ID NO: 315291 - DNA, 120 bp, Artificial Sequence
  ENSG00000134909_0 (sequence is synthesized)
atggagactgaaagtgagagtagcactttaggggatgacagtgtcttctggttggagtctgaagttataatccaggtgactgactgtgaagaggaagaaagggaagagaagttcaggaag

SEQ ID NO: 315292 - DNA, 120 bp, Artificial Sequence
  ENSG00000134909_1 (sequence is synthesized)
atgaagtcctcagtacattctgaagaagatgattttgttccagagctacatagaaatgtacaccctcgagagcggcctgattgggaagaaactcttagcgcaatggcaagaggcgcagat

SEQ ID NO: 315293 - DNA, 120 bp, Artificial Sequence
  ENSG00000134909_2 (sequence is synthesized)
gttccagagattcctggagatcttactcttaagacgtgtggcagtacagccagtatgaaggttaagcatgtgaaaaagttacccttcactaaaggtcactttccgaagatggctgaatgt

SEQ ID NO: 315294 - DNA, 120 bp, Artificial Sequence
  ENSG00000134909_3 (sequence is synthesized)
gcgcatttccattatgagaatgttgagttcggcagcatacagctttcactttcagaagaacagaatgaagtaatgaaaaatggctgtgaatctaaagagctggtctacctcgtgcagatt

SEQ ID NO: 315295 - DNA, 120 bp, Artificial Sequence
  ENSG00000134909_4 (sequence is synthesized)
gcttgtcagggaaaaagttggattgttaaaagaagttatgaagattttcgggtacttgataaacatcttcatctgtgtatttatgaccgaagattttcccagctctcagaacttccccgt

SEQ ID NO: 315296 - DNA, 120 bp, Artificial Sequence
  ENSG00000134909_5 (sequence is synthesized)
tctgacaccctgaaggacagtccagagtcggtcactcagatgcttatggcttacctgtcacgcctttcagctatcgctggcaacaagatcaactgtgggcccgcccttacctggatggag

SEQ ID NO: 315297 - DNA, 120 bp, Artificial Sequence
  ENSG00000134909_6 (sequence is synthesized)
attgataataagggaaatcaccttttggttcatgaggagtcatccatcaacactcctgctgtcggtgctgcccatgttatcaagaggtacactgctcgggcccctgacgaactgacctta

SEQ ID NO: 315298 - DNA, 120 bp, Artificial Sequence
  ENSG00000134909_7 (sequence is synthesized)
gaggtgggagacattgtttctgttattgacatgcccccgaaagtgttaagcacatggtggagaggcaagcacggattccaggtgggactcttccctggacactgtgttgagttaattaac

SEQ ID NO: 315299 - DNA, 120 bp, Artificial Sequence
  ENSG00000134909_8 (sequence is synthesized)
caaaaagttccccagtcagtgaccaactcagtgccaaaaccagtgtctaaaaagcacggcaagctcattacgttcttacgaacattcatgaagtctcgtccaacaaaacagaagctgaag

SEQ ID NO: 315300 - DNA, 120 bp, Artificial Sequence
  ENSG00000134909_9 (sequence is synthesized)
cagcggggaatcttgaaagagagggtgtttggttgtgacctgggggaacaccttctaaattctggttttgaagtgccgcaggttcttcaaagctgcacagcattcattgagagatatggc

SEQ ID NO: 315301 - DNA, 120 bp, Artificial Sequence
  ENSG00000134909_10 (sequence is synthesized)
atcgtggatggaatctatcgcctttctggtgttgcctccaatatccagagactacgccatgaatttgactctgagcacgtccccgacctgacgaaagaaccgtatgttcaggacatccat

SEQ ID NO: 315302 - DNA, 120 bp, Artificial Sequence
  ENSG00000134909_11 (sequence is synthesized)
tctgtgggttccctatgtaagctgtacttccgggaactcccaaaccctctgcttacctaccagctgtatgagaaattttctgatgcagtttcagcagcaacagatgaagaaaggctgata

SEQ ID NO: 315303 - DNA, 120 bp, Artificial Sequence
  ENSG00000134909_12 (sequence is synthesized)
aaaatccacgatgtcatccagcagctccccccaccacactacagaacactggagttcctgatgagacacttgtctcttctagctgactattgttccatcacaaatatgcatgcaaaaaat

SEQ ID NO: 315304 - DNA, 120 bp, Artificial Sequence
  ENSG00000134909_13 (sequence is synthesized)
ctagcaattgtttgggctccaaacctgttaagatcaaaacagatagaatctgcctgcttcagtggaacagcagctttcatggaagtgaggattcagtctgtggttgttgagttcatcctg

SEQ ID NO: 315305 - DNA, 120 bp, Artificial Sequence
  ENSG00000134909_14 (sequence is synthesized)
aatcacgttgatgtgctgttcagcggcagaatcagcatggccatgcaagagggggcagcttctctatcaaggcccaagtccctcctggtatcctctccatccaccaaactgctgacattg

SEQ ID NO: 315306 - DNA, 120 bp, Artificial Sequence
  ENSG00000134909_15 (sequence is synthesized)
gaagaggcccaggcacgaacacaagctcaggtcaattctccaattgtgacggaaaataaatatatcgaagtaggagaaggacctgctgcacttcaggggaaatttcataccataattgag

SEQ ID NO: 315307 - DNA, 120 bp, Artificial Sequence
  ENSG00000134909_16 (sequence is synthesized)
ttcccacttgaaagaaagaggcctcaaaataagatgaaaaagtctcctgtgggtagctggcgttcctttttcaacttggggaaatcatcatctgtttctaaacgaaagctgcagcggaat

SEQ ID NO: 315308 - DNA, 120 bp, Artificial Sequence
  ENSG00000134909_17 (sequence is synthesized)
gagagtgagccttcagagatgaaagccatggctctgaaaggtggcagggcagaaggaaccctccgttcagctaaaagtgaggagtctcttacatctctccatgcagttgatggtgattct

SEQ ID NO: 315309 - DNA, 120 bp, Artificial Sequence
  ENSG00000134909_18 (sequence is synthesized)
aagctcttccgacccagaagacccagatcttccagtgatgcactgtctgcctcttttaatggagaaatgctggggaaccgctgtaactcctatgataatctgcctcatgacaatgagagt

SEQ ID NO: 315310 - DNA, 120 bp, Artificial Sequence
  ENSG00000134909_19 (sequence is synthesized)
gaggaggaaggagggctgcttcatatcccagcccttatgtctcctcattcagctgaggatgttgacttgagcccaccagacattggagtagccagcctggattttgatccaatgtcattt

SEQ ID NO: 315311 - DNA, 120 bp, Artificial Sequence
  ENSG00000134909_20 (sequence is synthesized)
caatgtagtcctcctaaggccgaatcagaatgtctggagagtggtgcttcctttttagattcaccaggatactccaaggataaaccaagtgccaataaaaaggatgcagaaacaggtagt

SEQ ID NO: 315312 - DNA, 120 bp, Artificial Sequence
  ENSG00000134909_21 (sequence is synthesized)
agccaatgtcagactccaggaagcacagcaagctctgaacctgtctctcctcttcaggagaaactgagtccattctttaccctggacttgagcccaactgaagataaatcatctaagcca

SEQ ID NO: 315313 - DNA, 120 bp, Artificial Sequence
  ENSG00000134909_22 (sequence is synthesized)
tcctcctttactgaaaaggtcgtctatgctttctctccgaagataggacggaaattaagcaaatcaccttctatgagcatatctgagccaatttcagtgaccctaccaccacgggtgtca

SEQ ID NO: 315314 - DNA, 120 bp, Artificial Sequence
  ENSG00000134909_23 (sequence is synthesized)
gaagtcattggtacagtctcaaataccacagctcagaatgcatcatcttcaacctgggacaaatgcgttgaagaaagggatgccacaaatagatcccccacccagatagtaaagatgaaa

SEQ ID NO: 315315 - DNA, 120 bp, Artificial Sequence
  ENSG00000134909_24 (sequence is synthesized)
acaaatgagacagttgcccaagaagcatatgaatctgaagtccagcccctggaccaggtggctgctgaagaagtagaattgccagggaaagaggatcagtctgtctcaagcagtcagagt

SEQ ID NO: 315316 - DNA, 120 bp, Artificial Sequence
  ENSG00000134909_25 (sequence is synthesized)
aaggctgtagcttctggacagactcagacaggagcagttacccatgacccccctcaggattccgttcctgtcagttcagtctctcttatcccaccaccaccgcctccgaaaaatgttgcc

SEQ ID NO: 315317 - DNA, 120 bp, Artificial Sequence
  ENSG00000134909_26 (sequence is synthesized)
cgaatgttggcgctagcattagctgagtccgcacagcaagcctcaactcagtcattgaagagaccagggacctctcaggctgggtatacaaattatggagacatagcggtggctacaact

SEQ ID NO: 315318 - DNA, 120 bp, Artificial Sequence
  ENSG00000134909_27 (sequence is synthesized)
gaagataatctgtccagttcttactctgcagttgctctagataaggcctatttccaaaccgatcgaccagcagagcagttccacctccagaataatgcaccaggaaactgtgaccatcct

SEQ ID NO: 315319 - DNA, 120 bp, Artificial Sequence
  ENSG00000134909_28 (sequence is synthesized)
ctaccagagacaacagctactggggatcctacccattccaacacaactgaatctggggagcaacatcaccaagtagacttaacagggaatcagccacatcaagcatatttatctggggac

SEQ ID NO: 315320 - DNA, 120 bp, Artificial Sequence
  ENSG00000134909_29 (sequence is synthesized)
ccagaaaaggccagaattacttcagttcccttagactcagagaagtctgatgatcatgtaagtttccctgaagaccagtctgggaagaacagtatgccaactgtctccttcttggatcag

SEQ ID NO: 315321 - DNA, 120 bp, Artificial Sequence
  ENSG00000134909_30 (sequence is synthesized)
gaccagtctccaccccgtttctacagtggagatcagcctccttcttatcttggtgcaagtgtggataaactccatcaccctttagaatttgcagacaaatctcccacacctcctaattta

SEQ ID NO: 315322 - DNA, 120 bp, Artificial Sequence
  ENSG00000134909_31 (sequence is synthesized)
cctagcgataaaatctaccctccttctgggtcccccgaagagaataccagcacagccaccatgacttacatgacaactactccagcaacagcccaaatgagcaccaaggaagccagctgg

SEQ ID NO: 315323 - DNA, 120 bp, Artificial Sequence
  ENSG00000134909_32 (sequence is synthesized)
gatgtggctgaacaacccaccactgctgattttgctgctgccacacttcagcgcacgcacagaactaatcgtccccttccccctccgccttcccagagatctgcagagcagccaccagtt

SEQ ID NO: 315324 - DNA, 120 bp, Artificial Sequence
  ENSG00000134909_33 (sequence is synthesized)
gtggggcaggtacaagcagcaaccaatataggattaaataattcccacaaggttcaaggagtagttccagttccagagaggccacctgaacctcgagccatggatgaccctgcgtctgcc

SEQ ID NO: 315325 - DNA, 120 bp, Artificial Sequence
  ENSG00000134909_34 (sequence is synthesized)
ttcatcagtgacagtggtgctgctgctgctcagtgtcccatggctacagctgtccagccaggcctgcctgagaaagtgcgggacggtgcccgggtcccgctgctgcacctgcgcgccgag

SEQ ID NO: 315326 - DNA, 120 bp, Artificial Sequence
  ENSG00000134909_35 (sequence is synthesized)
tctgtccctgcgcatccctgtggctttcctgcaccactgccccccaccaggatgatggagagtaagatgattgctgccatacactccagcagtgcagatgccaccagcagttcaaattat

SEQ ID NO: 315327 - DNA, 120 bp, Artificial Sequence
  ENSG00000134909_36 (sequence is synthesized)
cattcctttgtcactgcttcatccacctctgtggacgatgcattgcctttaccacttcctgtcccacaacctaagcatgcttctcagaaaacagtttactcctcctttgctaggcccgat

SEQ ID NO: 315328 - DNA, 120 bp, Artificial Sequence
  ENSG00000134909_37 (sequence is synthesized)
gtcaccactgaaccctttggtccagataactgtttgcatttcaatatgactccaaactgccagtaccgtccccagagtgtacctccccatcacaataaattggagcagcaccaagtgtat

SEQ ID NO: 315329 - DNA, 120 bp, Artificial Sequence
  ENSG00000134909_38 (sequence is synthesized)
ggtgccaggtcagagccaccagcctccatgggtcttcgttataacacatatgtggccccaggaagaaacgcatctggacaccactccaagccatgcagccgggtcgagtatgtgtcttct

SEQ ID NO: 315330 - DNA, 120 bp, Artificial Sequence
  ENSG00000134909_39 (sequence is synthesized)
ttgagctcctctgtcaggaatacctgttaccccgaagacattccaccgtaccctaccatccggagagtgcagtctctccatgctccgccgtcttccatgattcgctctgttcccatttca

SEQ ID NO: 315331 - DNA, 120 bp, Artificial Sequence
  ENSG00000134909_40 (sequence is synthesized)
cggacagaagttcccccagatgatgagccagcctactgcccaagacctctgtaccaatataagccatatcagtcctcccaggcccgctcagattatcatgtcactcagcttcagccttac

SEQ ID NO: 315332 - DNA, 120 bp, Artificial Sequence
  ENSG00000134909_41 (sequence is synthesized)
tttgagaatggccgggtccactacaggtatagcccatattccagttcttctagttcctattacagtccagatggggccctgtgtgatgtggatgcctatggcacagtccagttgagaccc

SEQ ID NO: 315333 - DNA, 120 bp, Artificial Sequence
  ENSG00000134909_42 (sequence is synthesized)
tctacaatcctaggctgcaaggaaagagcttgtacagttatgctggtttggctccacgtccccgggccaacgtgactggctatttctctcccaacgaccataatgtagtcagcatgcctc

SEQ ID NO: 315334 - DNA, 120 bp, Artificial Sequence
  ENSG00000134909_43 (sequence is synthesized)
cggctgctgatgtgaagcacacctacacctcatgggatcttgaggacatggaaaaataccgcatgcagtccatccggagagagagccgtgctcggcagaaggtgaaagggcctgtcatgt

SEQ ID NO: 315335 - DNA, 120 bp, Artificial Sequence
  ENSG00000134909_44 (sequence is synthesized)
cccaatatgataacatgaccccggcggtgcaggacgacttgggtgggatctatgtcatccatctgcgtagtaaatcagatcctgggaaaactggacttctctcagtggcagaaggaaagg

SEQ ID NO: 315336 - DNA, 120 bp, Artificial Sequence
  ENSG00000134909_45 (sequence is synthesized)
agagccgccatgcagccaaggccatcagtcccgagggagaggaccgcttctataggaggcatcccgaggcagagatggacagagcccaccatcacggaggccatggtagcacgcagccgg

SEQ ID NO: 315337 - DNA, 120 bp, Artificial Sequence
  ENSG00000134909_46 (sequence is synthesized)
agaagccatccctgcctcagaagcagagcagcctgaggagcaggaagcttcctgacatgggctgcagtcttcctgagcacagggcacaccaagaagcaagccataggcagttctgtgagt

SEQ ID NO: 315338 - DNA, 120 bp, Artificial Sequence
  ENSG00000134909_47 (sequence is synthesized)
caaagaatgggcccccttatccccagggagctggccagttagattatgggtccaaagggattccagacacttctgagccagtcagctaccacaactctggagtaaaatatgctgcatccg

SEQ ID NO: 315339 - DNA, 120 bp, Artificial Sequence
  ENSG00000134909_48 (sequence is synthesized)
ggcaagaatctttaagactgaaccacaaagaggtaaggctctccaaagagatggagcgaccctgggttaggcagccttctgccccagagaaacactccagagactgctacaaggaggaag

SEQ ID NO: 315340 - DNA, 120 bp, Artificial Sequence
  ENSG00000134909_49 (sequence is synthesized)
aacacctcactcagtcaatcgtcccaccccctaaaccagagaggagtcatagcctcaaactccatcatacccagaacgtggagagggaccccagtgtgctgtaccagtaccaaccacacg

SEQ ID NO: 315341 - DNA, 120 bp, Artificial Sequence
  ENSG00000134909_50 (sequence is synthesized)
gcaagcgccagagcagtgtgactgttgtgtcccagtatgataacctggaagattaccactccctgcctcagcaccagcgaggagtctttggagggggcggcatggggacgtatgtgcccc

SEQ ID NO: 315342 - DNA, 120 bp, Artificial Sequence
  ENSG00000134909_51 (sequence is synthesized)
ctggctttccccatccacagagcaggacctatgctacagcgttgggtcaaggggccttcctgcccgcagagttgtccttgcagcatcctgaaacacagatccatgcagaatgagccctgc

SEQ ID NO: 315343 - DNA, 120 bp, Artificial Sequence
  ENSG00000134909_52 (sequence is synthesized)
gagcaatagagttgaagcagcctctgctggacagtggactgttctatttttttcaataaccaaaaagattaaacaaaaaatactataaaacccctgaccacatttaaaaaatgataataa

SEQ ID NO: 315344 - DNA, 120 bp, Artificial Sequence
  ENSG00000134909_53 (sequence is synthesized)
aagtaaacaaatcagcatctttttccccttccctgcttcattaccccctcttccatctatagactttgtcatttttgtctttagaaaagatctgaaggatggtaaagccccgtgctgaaa

SEQ ID NO: 315345 - DNA, 120 bp, Artificial Sequence
  ENSG00000134909_54 (sequence is synthesized)
cccagtagagaaacctgtctcaggacacacttgccatctagggctagcttgaaagagcctgaggactgcctttaactgaatttgaattcagcattgtcctttcttcttagtatttgctgc

SEQ ID NO: 315346 - DNA, 120 bp, Artificial Sequence
  ENSG00000134909_55 (sequence is synthesized)
ataattgagagcagttcacatcgatttcctggtaggcgtctgcattccctgttgtgttcctgcttctccttcagtagctgcacaacttgcgcagatcgacacactgttgtcacttcattc

SEQ ID NO: 315347 - DNA, 120 bp, Artificial Sequence
  ENSG00000134909_56 (sequence is synthesized)
tccccgtctgagaaggatcttgtgttcagttagagtcgtggaaaaatccctgatccttcaaggtcagtcagacagttggcaacattataattaaaaataagaaattaagactttaaatta

SEQ ID NO: 315348 - DNA, 120 bp, Artificial Sequence
  ENSG00000134909_57 (sequence is synthesized)
aacatttggtagagtcatcataaaacaccagaccacttagactcaggctgaaccatactctttctattcttatttttcatccttgttcctcacggttcagtgaacaggctcatatcatga

SEQ ID NO: 315349 - DNA, 120 bp, Artificial Sequence
  ENSG00000134909_58 (sequence is synthesized)
cagaatggacttttaaaagttagtacttaaggaaacttctttaggtggaagaaagtaaagttcttattgtcagtgaactttattagcaccagaaatctctattgatgcttttaatgcatt

SEQ ID NO: 315350 - DNA, 120 bp, Artificial Sequence
  ENSG00000134909_59 (sequence is synthesized)
gcctgccttcaggttttcttcttaccccacccctcaataagatttggtgaattgtaattctagtaaaacatgtcataccattggttttcctaaattatcaactttctttcattaaaaaaa

SEQ ID NO: 315351 - DNA, 120 bp, Artificial Sequence
  ENSG00000134909_60 (sequence is synthesized)
aaaaaaaaaaaaaaagcccagcatggtttgactggatagacacgcataatttattatgaatataaatttccatgtttgtttctgttcctaaaccagagtacgaggtccctgggaatttaa

SEQ ID NO: 315352 - DNA, 120 bp, Artificial Sequence
  ENSG00000134909_61 (sequence is synthesized)
gtagctacgcattatctattattagactgcaagttcctgcaataactgcttagttcacagccccgtttcaccagtggagttctgggcagttattgctgtcctaaggcattactgtcgttt

SEQ ID NO: 315353 - DNA, 120 bp, Artificial Sequence
  ENSG00000134909_62 (sequence is synthesized)
gcttactctatacttgtgtggtcacagtcttcttgtaattaccatctacaccagcatttcaggtatagctctttataactctggagacatgtaaaacatgtttaacacccacgagttttg

SEQ ID NO: 315354 - DNA, 120 bp, Artificial Sequence
  ENSG00000134909_63 (sequence is synthesized)
aaagttgcattccttattagagtaggaactctctagcccaactccattctatgttctcagctccctccaccccccaaaatacatcagactagcaaggcagtcctatgtttacaaaacgag

SEQ ID NO: 315355 - DNA, 120 bp, Artificial Sequence
  ENSG00000134909_64 (sequence is synthesized)
tttagattgtcatttcattccataactcttaataatactcaagttttatacattcacgtattttaaatgctcggtctgtagaagacactaggagaattgcattccaattactggatggtt

SEQ ID NO: 315356 - DNA, 120 bp, Artificial Sequence
  ENSG00000134909_65 (sequence is synthesized)
gctgctctggctttttagaacttgaaattaatttttatttagagcaaaggaggaaatcttttaagaggctaaaatcatgctgctattattgctgtgaaattgtataaagattaggattca

SEQ ID NO: 315357 - DNA, 120 bp, Artificial Sequence
  ENSG00000134909_66 (sequence is synthesized)
tgccagtttttattttaaaaaataatgtgcattttaagggtttatatttagaaaaaaataaaatgtttcaagaacaacacattgatatgtggaaatattctataaggttttcttttgttc

SEQ ID NO: 315358 - DNA, 120 bp, Artificial Sequence
  ENSG00000134909_67 (sequence is synthesized)
ccttagaattcattggagggatgcagtaaaaactgtagtagaaaccttgaaacacccatatgtgaaaaggtctgtggaaattgaggcctctacattaaaagtgcagaaccaactgtttta

SEQ ID NO: 315359 - DNA, 120 bp, Artificial Sequence
  ENSG00000134909_68 (sequence is synthesized)
cagtcaaagtgctaggaaacctgataggatacttccctttggcacaaaaacaccctgggtgctacatacaggagtatgacctttggtgaatatgtggcactaattttttttaccttaatc

SEQ ID NO: 315360 - DNA, 120 bp, Artificial Sequence
  ENSG00000134909_69 (sequence is synthesized)
atattcttgtcaagtaggcaacccattgccccttggagaccacaccagccctgtaagttctcaccagcagcatggagattaggaagaggggctgctgtgaccaggagatacacacggctt

SEQ ID NO: 315361 - DNA, 120 bp, Artificial Sequence
  ENSG00000134909_70 (sequence is synthesized)
taagtaactgagagcctaaagaaagtaacccagggagtccggtccagttttaatatttgtggatttgttgtcacacacattgtttagtcctgaaactaaaacctattttataaatagtag

SEQ ID NO: 315362 - DNA, 120 bp, Artificial Sequence
  ENSG00000134909_71 (sequence is synthesized)
ggttaattcctcgaaacaatttctttattaataaatgtcctgtgggtttagaaatatcaggtaaatatttgaatacagaatgatgattgcaattactgttacaagcgtgaaacacaaact

SEQ ID NO: 315363 - DNA, 120 bp, Artificial Sequence
  ENSG00000134909_72 (sequence is synthesized)
tcagatcaaatctagagttgcttcatttaatgcatgctagcaacagccttaactttggattcagttatttgaaacacttttccggcatctttccctttctaatgttgtggggtggaaacc

SEQ ID NO: 315364 - DNA, 120 bp, Artificial Sequence
  ENSG00000134909_73 (sequence is synthesized)
ggatggcaaatcactgtgagccggatacctcagcacagtccaccttgtgtgtgacttcacaaatgggggacttcacaaatggggtaactgaatgttattactttcaaattttgacatgga

SEQ ID NO: 315365 - DNA, 120 bp, Artificial Sequence
  ENSG00000134909_74 (sequence is synthesized)
gcattatgatcaaggaaatggagctgccttatacattaaacccgtgatttaatcctattgacattttcatagccatgcctccagattttatctttttggcaaaattctgattccacagtt

SEQ ID NO: 315366 - DNA, 120 bp, Artificial Sequence
  ENSG00000134909_75 (sequence is synthesized)
tggtctgattgaaataaatattccctggacgtctggctaaaaattttgctaacaatcccagaggtgccattttcttattaataaatttcattggagccttatttcttactatattcaatt

SEQ ID NO: 315367 - DNA, 120 bp, Artificial Sequence
  ENSG00000134909_76 (sequence is synthesized)
tcgtttcaaacctgcaagtccctgggatggtcccacgactagggcctgcacatttcttacaatggcaaagcattttttaaaatttagggtcaggttgaaaaattctaggactaattctgt

SEQ ID NO: 315368 - DNA, 120 bp, Artificial Sequence
  ENSG00000134909_77 (sequence is synthesized)
agagaggagggactgttaactaacgtgagtggggacggaggagtaggttaccacatttggagcagtaatagatgcaaacgatgtaaatttgaaatttgcccctttagttaaagaaggagc

SEQ ID NO: 315369 - DNA, 120 bp, Artificial Sequence
  ENSG00000134909_78 (sequence is synthesized)
ctgcaaagtccatttctctgttttcagccctgtcagtcacccatttaggatgttggcaaagtactgcttgagcagaatgtgtaagaaagtaataatgaaagcaaaagtatgtcagacagt

SEQ ID NO: 315370 - DNA, 120 bp, Artificial Sequence
  ENSG00000134909_79 (sequence is synthesized)
tacttcttccacatggttagaggcatgtgattttcagcactgtgtgttacagaaatgtcaggaatggtgtattataacgtgtgcaagataatgtcagtgtgcacagagggtcttttttcc

SEQ ID NO: 315371 - DNA, 120 bp, Artificial Sequence
  ENSG00000134909_80 (sequence is synthesized)
ttatctgattagtactgttaatgttcaaagaataaaaatggttttacagtttagattctgagatagcaaaacctgatttttcaaccatgacctgcatgagagaagcatcctaggaagtct

SEQ ID NO: 315372 - DNA, 120 bp, Artificial Sequence
  ENSG00000134909_81 (sequence is synthesized)
tcatacttttgagtttttaattttaatttatatagtgtttttttatgtcttaatatttttgtgaactggtgtaaattgttaatgcatataagcttgtgtatttttgtaaatagttttgtg

SEQ ID NO: 315373 - DNA, 120 bp, Artificial Sequence
  ENSG00000134909_82 (sequence is synthesized)
tgtgatttatttcttgccccatatgtaaatatttagagtctcatttcttgcaaacttatttgaagctgagttgtgggtttgggttttgtttgtttctttggttgcagggtggggtggggg

SEQ ID NO: 315374 - DNA, 120 bp, Artificial Sequence
  ENSG00000134909_83 (sequence is synthesized)
gtggcaggggagggaggaagggatttttgtacctggagatggagatatcttgtggtttaaagcaaatgtcccactgaaagtgattcaaatatcaacagaattatttcaggttaaaacaga

SEQ ID NO: 315375 - DNA, 120 bp, Artificial Sequence
  ENSG00000134909_84 (sequence is synthesized)
caatcctgtgtgccatctgtgccttttaagagagaaatttgtccacagctagcctttaatcaaagagaatgcttttctgggtggtgctgatggctcagagccctaaattaaaagcagtcc

SEQ ID NO: 315376 - DNA, 120 bp, Artificial Sequence
  ENSG00000134909_85 (sequence is synthesized)
aacaaaactccccaaaagggccaatggtcctgcttcaaatcttcacaaaagtccccttatctctttggacggtgagaattcgtggataatttttgcacaactgcgtagctcttgattctg

SEQ ID NO: 315377 - DNA, 120 bp, Artificial Sequence
  ENSG00000134909_86 (sequence is synthesized)
tttttctcttctaataaaatatctttattgtagccttccaagttaacaagccagctacaccatcaaatgtaaaaactgttcataataacagtctacaagcacttgaagcttgttttctaa

SEQ ID NO: 315378 - DNA, 120 bp, Artificial Sequence
  ENSG00000134909_87 (sequence is synthesized)
gcaatcttttctgagccaggtgagggacatgctttttttcccccccatctctgtaacaattcaagaagagattgcagtctttatacactgtttgttttagttttccttctgaaccagatg

SEQ ID NO: 315379 - DNA, 120 bp, Artificial Sequence
  ENSG00000134909_88 (sequence is synthesized)
tgttttcaacagcatttgcatgtgggatagaagatcatggattgccattttgaaatatggaaggcacctattttttaatgatcacatggggagtgtttggctttccatttaggataacgt

SEQ ID NO: 315380 - DNA, 120 bp, Artificial Sequence
  ENSG00000134909_89 (sequence is synthesized)
accaatataggattaaataattcccacaaggtaagaaggggaagatatcagtgagatgaaatatactattaccaaaggtatgtcacttttcagcagggtgtgttgttatctttgagtcag

SEQ ID NO: 315381 - DNA, 120 bp, Artificial Sequence
  ENSG00000134909_90 (sequence is synthesized)
acacaacaattacttttaagccctgtggctggtttccatgagatagttcccatttgaggttggagtctgccattaccttgatgctggcttttccccaggaaaggagtagctcctagatga

SEQ ID NO: 315382 - DNA, 120 bp, Artificial Sequence
  ENSG00000134909_91 (sequence is synthesized)
ctatagcttaactgtacctgctcccttttcttcctaaagtgtctcggtagtttattccagtaacacaaagagatcaggatcaaatgagacaaagtgggctttacggttgtgggttgcttt

SEQ ID NO: 315383 - DNA, 120 bp, Artificial Sequence
  ENSG00000134909_92 (sequence is synthesized)
ttcttatttttttccaactccatcactgactcattgtgactttgggcaagtcatttacctaccctctgccaattattcacagttacacaatgaaaatacttcattctcaaaacattcgta

SEQ ID NO: 315384 - DNA, 120 bp, Artificial Sequence
  ENSG00000134909_93 (sequence is synthesized)
agactgtctgccttgcagactttttggaagtataagagattatagtgccttgggattttttgttactttcctagcattcaccagcagtttgtcccatagtcaggtgcctgtttcaatgag

SEQ ID NO: 315385 - DNA, 120 bp, Artificial Sequence
  ENSG00000134909_94 (sequence is synthesized)
agaatgtagtatgcagaatgctaaggtttcttcctgaatttcctcatattttaagaaagtgccacaggttgtttttcttctatatggtcaccttgaactattaataggacttaagatttt

SEQ ID NO: 315386 - DNA, 120 bp, Artificial Sequence
  ENSG00000134909_95 (sequence is synthesized)
agaccttagtggaggatgctgtgtttactgcttctcaaggatagcatgttttcagtatgaggattatctttggccagactaaggtggaatcaaaggtaggagagaggcagtagcttctga

SEQ ID NO: 315387 - DNA, 120 bp, Artificial Sequence
  ENSG00000134909_96 (sequence is synthesized)
tttgaatattgcctttccctatgtttgaagccctaaaactgctaactgtgtacaactgtgaatttcaaaagtctccccagatgatagaattaactcttaatttaacaagatgtcctttgt

SEQ ID NO: 315388 - DNA, 120 bp, Artificial Sequence
  ENSG00000134909_97 (sequence is synthesized)
gttgagactgagctagactaatagaccgggtatgtatttttaagctctacagcattacttgactaaacctctcttttggtttgtatattaaaattatgccataggcaacctcatctcgca

SEQ ID NO: 315389 - DNA, 120 bp, Artificial Sequence
  ENSG00000134909_98 (sequence is synthesized)
tttaaaacctctcataaattagaaaactttgaatggttctccaaagataatactgggtgttgtacaaaatagcagcacaagccttcttttcctagaaatgggtacagattcattgcaacc

SEQ ID NO: 315390 - DNA, 120 bp, Artificial Sequence
  ENSG00000134909_99 (sequence is synthesized)
acatggcttgggaaagttcaagctgctacccaaccagccttaatttgtgagttacaaatttaatagtacttgattcatagagggaacaaaaaatagacccatagtattatcatctttcaa

SEQ ID NO: 315391 - DNA, 120 bp, Artificial Sequence
  ENSG00000134909_100 (sequence is synthesized)
aaagcagtatgtgctgagagaggaggattaagctcctggaggcagagctctcccacacacttgctggcttgctgggctccactgactggactgaaaacagggccaagaaaactgctgctg

SEQ ID NO: 315392 - DNA, 120 bp, Artificial Sequence
  ENSG00000134909_101 (sequence is synthesized)
cagggggtcctgaaaacagctggaacccggcagtgatgtgggacctaacttgaagttaacctgtggtggtgaggttggaaccagttggattatgatttattttctacactcttgtacgga

SEQ ID NO: 315393 - DNA, 120 bp, Artificial Sequence
  ENSG00000134909_102 (sequence is synthesized)
atgcagagctgttgtatcctgatgaatctactgctaaatatagtcatttggaataattttaagtattgatcttaaaacttgtaccacaacaagagtgtctaaaaagcacggcaagctcat

SEQ ID NO: 315394 - DNA, 120 bp, Artificial Sequence
  ENSG00000134909_103 (sequence is synthesized)
gccacagtgggtaaataccaggcagaggtagaagtcggttgacctgtaaacgtttttttttcctttggatttctatttaaacttccttggagttctaattaaacttccatttcatatata

SEQ ID NO: 315395 - DNA, 120 bp, Artificial Sequence
  ENSG00000134910_0 (sequence is synthesized)
agggttgggtgcgccgctgaacggatggctgagggagccccgcggatcgtttaggaaagccggccagctgatcgtcgtgtgttgccacccattcatgtcaagatgactaagtttggattt

SEQ ID NO: 315396 - DNA, 120 bp, Artificial Sequence
  ENSG00000134910_1 (sequence is synthesized)
ttgcgattgtcctatgagaagcaggacacacttttgaagcttctcattctgtcaatggctgctgtattatccttctccactcgtctgtttgctgtcctgagatttgaaagtgttatccat

SEQ ID NO: 315397 - DNA, 120 bp, Artificial Sequence
  ENSG00000134910_2 (sequence is synthesized)
gagtttgatccgtactttaattatcggactaccaggttcctggctgaggaggggttttataaattccataactggtttgatgaccgagcctggtaccctttgggacgaatcattggagga

SEQ ID NO: 315398 - DNA, 120 bp, Artificial Sequence
  ENSG00000134910_3 (sequence is synthesized)
acaatttacccaggtttaatgatcacctctgctgcaatctaccatgtactccattttttccacatcaccatcgacattcggaatgtctgtgtgttcctggcccctctcttctcctccttc

SEQ ID NO: 315399 - DNA, 120 bp, Artificial Sequence
  ENSG00000134910_4 (sequence is synthesized)
accaccatcgtcacgtaccaccttaccaaagagctcaaggatgcaggggctgggcttcttgctgctgccatgattgctgtagttcctggatatatctcccgatctgtggctggctcctat

SEQ ID NO: 315400 - DNA, 120 bp, Artificial Sequence
  ENSG00000134910_5 (sequence is synthesized)
gataatgaagggattgccatcttttgcatgctactcacctactacatgtggatcaaggcagtaaagactggttccatctgttgggcagctaagtgtgcccttgcttatttctacatggtc

SEQ ID NO: 315401 - DNA, 120 bp, Artificial Sequence
  ENSG00000134910_6 (sequence is synthesized)
tcgtcatggggaggttatgtgttcctgatcaacttaattcctctccacgtcctcgtgctgatgctcacaggccgtttctctcaccggatctatgtggcctactgtactgtttactgcctg

SEQ ID NO: 315402 - DNA, 120 bp, Artificial Sequence
  ENSG00000134910_7 (sequence is synthesized)
ggcactatactttctatgcagatctcctttgtgggtttccagcctgtcctttcatcagagcacatggcagcctttggggtctttggtctctgccagatccatgcctttgtggattacctg

SEQ ID NO: 315403 - DNA, 120 bp, Artificial Sequence
  ENSG00000134910_8 (sequence is synthesized)
cgcagcaagttgaatccacaacaatttgaagttcttttccggagcgtcatctctctggtaggctttgtccttctcaccgtgggagctctcctcatgctgacaggaaaaatatctccctgg

SEQ ID NO: 315404 - DNA, 120 bp, Artificial Sequence
  ENSG00000134910_9 (sequence is synthesized)
acggggcgtttctactcgctgctggatccctcttatgctaagaacaacatccccatcattgcttctgtgtctgagcatcagcccacaacctggtcctcatactattttgacctgcagctc

SEQ ID NO: 315405 - DNA, 120 bp, Artificial Sequence
  ENSG00000134910_10 (sequence is synthesized)
ctcgtcttcatgtttccagttggcctctattactgctttagcaacctgtctgatgcccggatttttatcatcatgtatggtgtgaccagcatgtacttttcagctgtaatggtgcgtcta

SEQ ID NO: 315406 - DNA, 120 bp, Artificial Sequence
  ENSG00000134910_11 (sequence is synthesized)
atgctagtgttggcacctgttatgtgcattctctctggcattggagtctcccaggtgctgtccacatacatgaagaatctggacataagtcgtccagacaagaagagcaagaagcaacag

SEQ ID NO: 315407 - DNA, 120 bp, Artificial Sequence
  ENSG00000134910_12 (sequence is synthesized)
gattccacctaccctattaagaatgaagtggcaagtgggatgatactggtcatggctttctttctcatcacctacacctttcattcaacctgggtgaccagtgaggcctactcttctccg

SEQ ID NO: 315408 - DNA, 120 bp, Artificial Sequence
  ENSG00000134910_13 (sequence is synthesized)
tccattgtactatctgcccgtggtggggatggcagtaggatcatatttgatgacttccgagaagcatattattggcttcgtcataatactccagaggatgcgaaggtcatgtcctggtgg

SEQ ID NO: 315409 - DNA, 120 bp, Artificial Sequence
  ENSG00000134910_14 (sequence is synthesized)
gattatggctatcagattacagctatggcaaaccgaacaattttagtggacaataacacatggaataatacccatatttctcgagtagggcaggcaatggcgtccacagaggaaaaagcc

SEQ ID NO: 315410 - DNA, 120 bp, Artificial Sequence
  ENSG00000134910_15 (sequence is synthesized)
tatgagatcatgagggagctcgatgtcagctatgtgctggtcatttttggaggcctcactgggtattcctctgatgatatcaacaagtttctttggatggtccggattggagggagcaca

SEQ ID NO: 315411 - DNA, 120 bp, Artificial Sequence
  ENSG00000134910_16 (sequence is synthesized)
gatacaggcaaacatatcaaggagaatgactattatactccaactggggagttccgtgtggaccgtgaaggttctccagtgctgctcaactgcctcatgtacaagatgtgttactatcgc

SEQ ID NO: 315412 - DNA, 120 bp, Artificial Sequence
  ENSG00000134910_17 (sequence is synthesized)
tttggacaggtttacacagaagccaagcgtcctccaggctttgaccgtgtccgaaatgctgagattgggaataaagactttgagcttgatgtcctggaggaagcatataccacagaacat

SEQ ID NO: 315413 - DNA, 120 bp, Artificial Sequence
  ENSG00000134910_18 (sequence is synthesized)
tgtcacgtccagctctgatatgcttcgcactgagcacatcacatttaggacgttgaagatttttttttttttttttttttaatatgcagtttgtaagaacaaaactggatggcatcagaa

SEQ ID NO: 315414 - DNA, 120 bp, Artificial Sequence
  ENSG00000134910_19 (sequence is synthesized)
ttgtctggaagttttgtcttgggcagtatgggctgggccaaatgaaatgatttttataattctaaacaggttaccaaatgaaatgtcatggctttactttggtcaattaaaggggggaat

SEQ ID NO: 315415 - DNA, 120 bp, Artificial Sequence
  ENSG00000134910_20 (sequence is synthesized)
ttttttaaaaaatgtgccttatttgttttgacttataactgatttgagggaggcaaaagctatgctaggctgccagaaggacataagcagaccttgtccattctcttagctccctaaatt

SEQ ID NO: 315416 - DNA, 120 bp, Artificial Sequence
  ENSG00000134910_21 (sequence is synthesized)
agccaaatagagacttctttctcaaatcaggaaaactatcaaagaccaattcagatcctacatttacagacagttttgtcataaccctttgcattgcagcacctagtacaattccttgga

SEQ ID NO: 315417 - DNA, 120 bp, Artificial Sequence
  ENSG00000134910_22 (sequence is synthesized)
aacagcgtggctcaataaatttttattgaatgaataaatgtgggaccagaagagtgctagaagagtgcctttctgggctactatgtctctgttctcaatgtcttttatccttagacgctc

SEQ ID NO: 315418 - DNA, 120 bp, Artificial Sequence
  ENSG00000134910_23 (sequence is synthesized)
tttgactttataaatcagcagttttgaagactcaagacaaacagtgaaattattggtttatcaatggagaggaagaaactcttccagcattacatatagagcttgatggtcagtaggtgt

SEQ ID NO: 315419 - DNA, 120 bp, Artificial Sequence
  ENSG00000134910_24 (sequence is synthesized)
ttttgaatcagcttaaatataatcatacatatcaatttgaaatggagcttttcagtactctcacttattcatgacacaggaatgaccctttactcaaaactcttgtggttgttcaaaggt

SEQ ID NO: 315420 - DNA, 120 bp, Artificial Sequence
  ENSG00000134910_25 (sequence is synthesized)
gagcttctttttcccttagtcttagcctatgtgttgctgttgtatattgttaccaagttcaactacctaattttgaagctctttccaaataagatacaaattaaaaggggaagcattgcc

SEQ ID NO: 315421 - DNA, 120 bp, Artificial Sequence
  ENSG00000134910_26 (sequence is synthesized)
agtaacaggtccctagagagcagtgccagcctgcctgcaagaaaagaggagaaacttcttaaaaagttttaagcctgggcaacataaggagattgtttctatgaaaaataaaaattagcc

SEQ ID NO: 315422 - DNA, 120 bp, Artificial Sequence
  ENSG00000134910_27 (sequence is synthesized)
tggtgtacacctgtagtcccagctactcgggaagatgagattggaggatcacttgggcctgggaggttgaggctacagtgaactgtgattgtgccactgtactccagtctgggcgacagt

SEQ ID NO: 315423 - DNA, 120 bp, Artificial Sequence
  ENSG00000134910_28 (sequence is synthesized)
gcgacagtgaaatcttgtctaaacaaaaacaatttaactgggaagcacagtggtccttgaggacatttaatatcaggacaaagagcctatgaatatatcactgatgtatataaaccctaa

SEQ ID NO: 315424 - DNA, 120 bp, Artificial Sequence
  ENSG00000134910_29 (sequence is synthesized)
ggcgttaataaaagctaactgtttagtgttatccatttaagggaacaggaggaattgcataacttttagattagtcatagtggtgctcctaagggatatgctgttgtatatttgtatagc

SEQ ID NO: 315425 - DNA, 120 bp, Artificial Sequence
  ENSG00000134910_30 (sequence is synthesized)
cagggcacttagccttccaaaccaatttatataccatgttcttcaactgtgggtgagatttagcctcaagatttgatttactatatgtaagtacattacttgatttctataaagaatctt

SEQ ID NO: 315426 - DNA, 120 bp, Artificial Sequence
  ENSG00000134910_31 (sequence is synthesized)
tagtggaagaggttattctgaattatttatcaatatgattaataccagttagaaattattaatgatcttcctttatactatacataggataacttttaacttgtcgctacagttgttgct

SEQ ID NO: 315427 - DNA, 120 bp, Artificial Sequence
  ENSG00000134910_32 (sequence is synthesized)
ctgaggatcttaattttgttactttctaggctacatgaagctatctttttaaaaagtgtactcttcattttcactgttattgtgtacttagcataaaaaactcaaatctaggccaggtgc

SEQ ID NO: 315428 - DNA, 70 bp, Artificial Sequence
  ENSG00000134910_33 (sequence is synthesized)
agcaaatgaacactaagcatagttttgatgtctttcatattaaagactttctcaaattcttgctagtctg

SEQ ID NO: 315429 - DNA, 120 bp, Artificial Sequence
  ENSG00000134910_34 (sequence is synthesized)
tgaacactaagcatagttttgatgtctttcatattaaagactttctcaaattcttgctagtctgctcctctttaagagtgggaccctaggcagggcgcagtggatcatgcctgtaatccc

SEQ ID NO: 315430 - DNA, 73 bp, Artificial Sequence
  ENSG00000134910_35 (sequence is synthesized)
tcacttgaggccaggagtttgagaccggcctggcaacgtggtacacaccctgtaatctcagctactggggagg

SEQ ID NO: 315431 - DNA, 120 bp, Artificial Sequence
  ENSG00000134910_36 (sequence is synthesized)
ggacccggctcctgccagggttgggtgcgccgctgaacggatggctgagggagccccgcggatcgtttaggaaagccggccaggcattccagaaaacagctgcaaaccctgagagatatg

SEQ ID NO: 315432 - DNA, 120 bp, Artificial Sequence
  ENSG00000134910_37 (sequence is synthesized)
gggtgcgccgctgaacggatggctgagggagccccgcggatcgtttaggaaagccggccagatagctagaagagtggattttgaatattcctaagacaaaaaaaataagctgatcgtcgt

SEQ ID NO: 315433 - DNA, 120 bp, Artificial Sequence
  ENSG00000134910_38 (sequence is synthesized)
accctcattcgtgttttgtttttctttgcctgtttatgttgtgtaatacagaggacggctaagcaaattttctcatgtatgaagctgagcagaagtcagaagttcaacagttgtagatat

SEQ ID NO: 315434 - DNA, 120 bp, Artificial Sequence
  ENSG00000134910_39 (sequence is synthesized)
tggcaagttcagcctcacagttttctgttcatttgtcatttgtgttataagttaaaatttaacggtaatttttactccggttttgttttgttttgtttgagtacttctgtcgtactcctt

SEQ ID NO: 315435 - DNA, 120 bp, Artificial Sequence
  ENSG00000134910_40 (sequence is synthesized)
agcagtgatttaaataatgacctttcaataagtggtgggttccgttcatgggagaataggaaactgcgtgagtggtagaggcaacaagttcgaagagctgcgagacgttcccactctctc

SEQ ID NO: 315436 - DNA, 120 bp, Artificial Sequence
  ENSG00000134910_41 (sequence is synthesized)
catcgtatcatgtgatttgagtttccaccccatctttatagtaagtgatttttgcaattctgttaaaaggttatttaagaaaattgtctaatgacactaggctattgatgtggctacatt

SEQ ID NO: 315437 - DNA, 120 bp, Artificial Sequence
  ENSG00000134910_42 (sequence is synthesized)
gcacagtctcccacacctcccaccccattatgttagtataaagtgacctgggatgaagtgttgggaatgttggtttgttatttgtgctgagattttataattgtatataaatggaagacc

SEQ ID NO: 315438 - DNA, 120 bp, Artificial Sequence
  ENSG00000134910_43 (sequence is synthesized)
aggtgccaggatttattttctggtttgacatgcattactttgtgaagaaattgattagttagccaggtgtcacttctgtcagaccaaagatgccttctctgttgcatttgatttttagag

SEQ ID NO: 315439 - DNA, 120 bp, Artificial Sequence
  ENSG00000134910_44 (sequence is synthesized)
cagttacagagaagccttgagacagatgattggaagcgggtatagatctgagcagtcgttacagtctgatatatgggatgagaacacagtggatctgtgtttgggtacctccacctcttt

SEQ ID NO: 315440 - DNA, 120 bp, Artificial Sequence
  ENSG00000134910_45 (sequence is synthesized)
ataatgcgcgcacacacccatacccacacacacccatacccacacacacacacatacacacatataaaataaataaaattagctgggcatggtagtgtgcacctttagtcccagctactt

SEQ ID NO: 315441 - DNA, 120 bp, Artificial Sequence
  ENSG00000134910_46 (sequence is synthesized)
ggaaggctgaggtggaaggattacttgagcccgggagtttgagaccagcctcggttatacagcaagacccccatctcaaaaaaggtacatattcaggagttctcactacccatctctagc

SEQ ID NO: 315442 - DNA, 120 bp, Artificial Sequence
  ENSG00000134910_47 (sequence is synthesized)
cactgttaacattttgatgtatatttatcaaataagaatgagatcatagttttttccctgatttttttcacttcataaagaatcaaatttctctgttacttagtattattttatagaaat

SEQ ID NO: 315443 - DNA, 120 bp, Artificial Sequence
  ENSG00000134910_48 (sequence is synthesized)
acttaaaatgtatcatttattagttttttaaagtacagagatgtgtcaagatgtgtaagaaggcaagtagtacataatctcatgcagcaatattttaatatattccattttataaatata

SEQ ID NO: 315444 - DNA, 120 bp, Artificial Sequence
  ENSG00000134910_49 (sequence is synthesized)
cttgtttttggacatttgggttgtttctgatttttttgctactttaaagtgtgctgtagtaaacatctttgcatgtttctatgattgtttttttaggataaattcctggaagtggaattg

SEQ ID NO: 315445 - DNA, 120 bp, Artificial Sequence
  ENSG00000134910_50 (sequence is synthesized)
caggctggtcctgaactcctggcctcaagccattctcctgcctcgccttcccaaagtgctggaattacaggcaggagccactgcgcccggccagtgctggagaatgtaatggagatgatc

SEQ ID NO: 315446 - DNA, 120 bp, Artificial Sequence
  ENSG00000134910_51 (sequence is synthesized)
ctgcgcccggccagtgctggagaatgtaatggagatgatcctgcctatccctgagttccagtctagtttactgtcagagaatacttatttccatttttcctattttgttcttgagtctct

SEQ ID NO: 315447 - DNA, 120 bp, Artificial Sequence
  ENSG00000134910_52 (sequence is synthesized)
ttcctcagaatttacttttccacttaaatgacgtacgcagcttttaaatttgcgttgtaagatttattttggctctccccgcctgttctttgcacattaaaaatgaaaaagtttgtagaa

SEQ ID NO: 315448 - DNA, 120 bp, Artificial Sequence
  ENSG00000134910_53 (sequence is synthesized)
gcttccgtagtagactccataatgctgactctgtttttccaggtttcagcattgctgaccttggctccctgggtgctattcttagtttgtgctgcggtgttagagagatacctgagagga

SEQ ID NO: 315449 - DNA, 120 bp, Artificial Sequence
  ENSG00000134910_54 (sequence is synthesized)
atggaggggaaggcgcgtaggatgctggggtgatgagtgtcccgcgctgaggggtatcagaggtggtcagttctttgagggtgggaagaagagggaggtgggacccgctggaacgaccgg

SEQ ID NO: 315450 - DNA, 120 bp, Artificial Sequence
  ENSG00000134910_55 (sequence is synthesized)
aagggagaagagagtaaaagatcgtgagagggtgtggaaacgtgtgtaggaaaacggggctggggaaattgcagtctgggaaactagaggcagggtggcaggagatgccacagcttgcag

SEQ ID NO: 315451 - DNA, 77 bp, Artificial Sequence
  ENSG00000134910_56 (sequence is synthesized)
taggctttgtccttctcaccgtgggagctctcctcatgctgacaggtagggaaggctcacagcttttttcctttttt

SEQ ID NO: 315452 - DNA, 120 bp, Artificial Sequence
  ENSG00000134917_0 (sequence is synthesized)
cgcgggaggagcgggctgcgccagccagaggggccgccgggggagcgctcccgccgccgggccccgcgggccgagtcggccttgcacccgattgattccgcttttcctggagagagcggc

SEQ ID NO: 315453 - DNA, 120 bp, Artificial Sequence
  ENSG00000134917_1 (sequence is synthesized)
tgattccgcttttcctggagagagcggccgggccgcgctcgggccgccagcacctgcccgcgcctggcgggcttcttccctctcctgcgcgcagccaccgccgcagcccccatgctcccc

SEQ ID NO: 315454 - DNA, 80 bp, Artificial Sequence
  ENSG00000134917_2 (sequence is synthesized)
gcccgcagccggggggcaggcctcggagctggtggtgcccacgcggttgcccggcagcgcgggcgagctcgcgctccacc

SEQ ID NO: 315455 - DNA, 120 bp, Artificial Sequence
  ENSG00000134917_3 (sequence is synthesized)
tcgcgctccacctgtccgccttcggcaagggcttcgtgctgcgcctggcgcccgacgacagcttcctagcgcccgagttcaagatcgagcgcctcgggggctccggccgggcgaccgggg

SEQ ID NO: 315456 - DNA, 120 bp, Artificial Sequence
  ENSG00000134917_4 (sequence is synthesized)
gcgagcgggggctgcgcggctgcttcttctccggcaccgtgaatggggagcccgagtcgctggcggcggtcagcctgtgccgcgggctgagcggctccttcctgctggacggcgaggagt

SEQ ID NO: 315457 - DNA, 120 bp, Artificial Sequence
  ENSG00000134917_5 (sequence is synthesized)
gagttcaccatccagccgcagggcgcggggggctccctggctcagccgcaccgcctgcagcgctggggtcccgccggagcccgccccctcccgcgaggacccgagtgggaggtggagacg

SEQ ID NO: 315458 - DNA, 120 bp, Artificial Sequence
  ENSG00000134917_6 (sequence is synthesized)
agggtcagaggcaggagagaggagaccaccaggaggacagcgaggaggagagccaagaagaggaggcagaaggcgctagcgagccgccaccgcccctgggggccacgagtaggaccaagc

SEQ ID NO: 315459 - DNA, 120 bp, Artificial Sequence
  ENSG00000134917_7 (sequence is synthesized)
ggtttgtgtctgaggcgcgcttcgtggagacgctgctggtggccgatgcgtccatggctgccttctacggggccgacctgcagaaccacatcctgacgttaatgtctgtggcagcccgaa

SEQ ID NO: 315460 - DNA, 120 bp, Artificial Sequence
  ENSG00000134917_8 (sequence is synthesized)
tctacaagcaccccagcatcaagaattccatcaacctgatggtggtaaaagtgctgatcgtagaagatgaaaaatggggcccagaggtgtccgacaatggggggcttacactgcgtaact

SEQ ID NO: 315461 - DNA, 120 bp, Artificial Sequence
  ENSG00000134917_9 (sequence is synthesized)
tctgcaactggcagcggcgtttcaaccagcccagcgaccgccacccagagcactacgacacggccatcctgctcaccagacagaacttctgtgggcaggaggggctgtgtgacaccctgg

SEQ ID NO: 315462 - DNA, 120 bp, Artificial Sequence
  ENSG00000134917_10 (sequence is synthesized)
gtgtggcagacatcgggaccatttgtgaccccaacaaaagctgctccgtgatcgaggatgaggggctccaggcggcccacaccctggcccatgaactagggcacgtcctcagcatgcccc

SEQ ID NO: 315463 - DNA, 120 bp, Artificial Sequence
  ENSG00000134917_11 (sequence is synthesized)
acgacgactccaagccctgcacacggctcttcgggcccatgggcaagcaccacgtgatggcaccgctgttcgtccacctgaaccagacgctgccctggtccccctgcagcgccatgtatc

SEQ ID NO: 315464 - DNA, 120 bp, Artificial Sequence
  ENSG00000134917_12 (sequence is synthesized)
tcacagagcttctggacggcgggcacggagactgtctcctggatgcccctgctgcggccctgcccctccccacaggcctcccgggccgcatggccctgtaccagctggaccagcagtgca

SEQ ID NO: 315465 - DNA, 120 bp, Artificial Sequence
  ENSG00000134917_13 (sequence is synthesized)
ggcagatctttgggccggatttccgccactgccccaacacctctgctcaggacgtctgcgcccagctttggtgccacactgatggggctgagcccctgtgccacacgaagaatggcagcc

SEQ ID NO: 315466 - DNA, 120 bp, Artificial Sequence
  ENSG00000134917_14 (sequence is synthesized)
gcctgggcacctctgctcagaaggcagctgtctacctgaggaggaagtggagaggcccaagcccgtggcagatggaggctgggcaccgtggggaccctggggagaatgttctcggacctg

SEQ ID NO: 315467 - DNA, 120 bp, Artificial Sequence
  ENSG00000134917_15 (sequence is synthesized)
tggaggaggagtacagttttcacaccgtgagtgcaaggaccccgagcctcagaatggaggaagatactgcctgggtcggagagccaagtaccagtcatgccacacggaggaatgcccccc

SEQ ID NO: 315468 - DNA, 120 bp, Artificial Sequence
  ENSG00000134917_16 (sequence is synthesized)
tgacgggaaaagcttcagggagcagcagtgtgagaagtataatgcctacaattacactgacatggacgggaatctcctgcagtgggtccccaagtatgctggggtgtccccccgggaccg

SEQ ID NO: 315469 - DNA, 120 bp, Artificial Sequence
  ENSG00000134917_17 (sequence is synthesized)
ctgcaagttgttctgccgagcccgggggaggagcgagttcaaagtgttcgaggccaaggtgattgatggcaccctgtgtgggccagaaacactggccatctgtgtccgtggccagtgtgt

SEQ ID NO: 315470 - DNA, 120 bp, Artificial Sequence
  ENSG00000134917_18 (sequence is synthesized)
caaggccggctgtgaccatgtggtggactcgcctcggaagctggacaaatgcggggtgtgtgggggcaaaggcaactcctgcaggaaggtctccgggtccctcacccccaccaattatgg

SEQ ID NO: 315471 - DNA, 120 bp, Artificial Sequence
  ENSG00000134917_19 (sequence is synthesized)
ctacaatgacattgtcaccatcccagctggtgccactaatattgacgtgaagcagcggagccacccgggtgtgcagaacgatgggaactacctggcgctgaagacggctgatgggcagta

SEQ ID NO: 315472 - DNA, 120 bp, Artificial Sequence
  ENSG00000134917_20 (sequence is synthesized)
cctgctcaacggcaacctggccatctctgccatagagcaggacatcttggtgaaggggaccatcctgaagtacagcggctccatcgccaccctggagcgcctgcagagcttccggccctt

SEQ ID NO: 315473 - DNA, 120 bp, Artificial Sequence
  ENSG00000134917_21 (sequence is synthesized)
gccagagcctctgacagtgcagctcctgacagtccctggcgaggtcttccccccaaaagtcaaatacaccttctttgttcctaatgacgtggactttagcatgcagagcagcaaagagag

SEQ ID NO: 315474 - DNA, 120 bp, Artificial Sequence
  ENSG00000134917_22 (sequence is synthesized)
agcaaccaccaacatcatccagccgctgctccacgcacagtgggtgctgggggactggtctgagtgctctagcacctgcggggccggctggcagaggcgaactgtagagtgcagggaccc

SEQ ID NO: 315475 - DNA, 120 bp, Artificial Sequence
  ENSG00000134917_23 (sequence is synthesized)
ctccggccaggcctctgccacctgcaacaaggctctgaaacccgaggatgccaagccctgcgaaagccagctgtgccccctgtgattcaggggggcaggggccagtcttgtgctcctgga

SEQ ID NO: 315476 - DNA, 120 bp, Artificial Sequence
  ENSG00000134917_24 (sequence is synthesized)
catgcggtactgaggtgcagacaagggtctccactgtggtgactgggtcccttggccatatcaaggcagcacggcccacccaggcctcccattgccgcaacccctccagtactgcacaaa

SEQ ID NO: 315477 - DNA, 120 bp, Artificial Sequence
  ENSG00000134917_25 (sequence is synthesized)
ttcctaagggggaagaggagagggtatggggcggcagaccctatcatcaactgtccagtggactggaccttgctcgggttcaagtagagggcataggttaaaaggtaaaagtgcacttat

SEQ ID NO: 315478 - DNA, 120 bp, Artificial Sequence
  ENSG00000134917_26 (sequence is synthesized)
tgactcagacaggacactcagcgtcagtctgtttgcaaaggactagcaaacttaaatgaaaaaaaaaattctatctggtttccccgataaataatctacctcacaggggaaaaaattagt

SEQ ID NO: 315479 - DNA, 120 bp, Artificial Sequence
  ENSG00000134917_27 (sequence is synthesized)
acaagagaggcgtggggcagggagtcaatggtgaatgtcaaagcaggctccaaagctggaccccaagctgtcttcaagaatgaccacgactgtcttcagtgttaaaatccatcacctaaa

SEQ ID NO: 315480 - DNA, 120 bp, Artificial Sequence
  ENSG00000134917_28 (sequence is synthesized)
gggccgcagcgtcgcagggtttggagagccacatgttctcaggctgccacctgcaggggtggatccatttcaagtatttatgcaaatgtgtctctgaactaaagtgtgatcttatgccaa

SEQ ID NO: 315481 - DNA, 120 bp, Artificial Sequence
  ENSG00000134917_29 (sequence is synthesized)
ttggcactagggacacttaggactggataattgttaccgtggggcctgtgcattgctggatgtggagcagcatcactggcctctacccactagatgtggtcacgtacaccctccacagct

SEQ ID NO: 315482 - DNA, 120 bp, Artificial Sequence
  ENSG00000134917_30 (sequence is synthesized)
gtagccaccagagtatctccagacattgccaaatgtcccctggagggcagaattcgccccaacggagaaccactgcattatatgcaaccttattcccataaaagggtgtcattcattcat

SEQ ID NO: 315483 - DNA, 120 bp, Artificial Sequence
  ENSG00000134917_31 (sequence is synthesized)
tcagcagatagcctattgagcaccttactaagcataaggcactgttttagacactgaggagtcagtagtgaatgagtccagcctggtctctgtgctcacaaagccatgcaggccacacag

SEQ ID NO: 315484 - DNA, 120 bp, Artificial Sequence
  ENSG00000134917_32 (sequence is synthesized)
tcattaaacaaatgattgaggcagtttacggcactccatgcaccaagatgataatgactagatgaggaagccagggcattggccacccagtgacacagatactgaagcctcctggccttt

SEQ ID NO: 315485 - DNA, 120 bp, Artificial Sequence
  ENSG00000134940_0 (sequence is synthesized)
agtttgcttcatagctctgtgaagaagctgtggcccacactggggtcccctcttttcctaaatccagatgaacaggtttctcttgctaatgagtctttatctgcttggatctgccagagg

SEQ ID NO: 315486 - DNA, 120 bp, Artificial Sequence
  ENSG00000134940_1 (sequence is synthesized)
aacatcaagtcagcctaatgagctttctggctccatagatcatcaaacttcagttcagcaacttccaggtgagttcttttcacttgaaaacccttctgatgctgaggctttatatgagac

SEQ ID NO: 315487 - DNA, 120 bp, Artificial Sequence
  ENSG00000134940_2 (sequence is synthesized)
ttcttcaggcctgaacactttaagtgagcatggttccagtgagcatggttcaagcaagcacactgtggccgagcacacttctggagaacatgctgagagtgagcatgcttcaggtgagcc

SEQ ID NO: 315488 - DNA, 120 bp, Artificial Sequence
  ENSG00000134940_3 (sequence is synthesized)
cgctgcgactgaacatgctgaaggtgagcatactgtaggtgagcagccttcaggagaacagccttcaggtgaacacctctccggagaacagcctttgagtgagcttgagtcaggtgaaca

SEQ ID NO: 315489 - DNA, 120 bp, Artificial Sequence
  ENSG00000134940_4 (sequence is synthesized)
gccttcagatgaacagccttcaggtgaacatggctccggtgaacagccttctggtgagcaggcctcgggtgaacagccttcaggtgagcacgcttcaggggaacaggcttcaggtgcacc

SEQ ID NO: 315490 - DNA, 120 bp, Artificial Sequence
  ENSG00000134940_5 (sequence is synthesized)
aatttcaagcacatctacaggcacaatattaaattgctacacatgtgcttatatgaatgatcaaggaaaatgtcttcgtggagagggaacctgcatcactcagaattcccagcagtgcat

SEQ ID NO: 315491 - DNA, 120 bp, Artificial Sequence
  ENSG00000134940_6 (sequence is synthesized)
gttaaagaagatctttgaaggtggaaaactccaattcatggttcaagggtgtgagaacatgtgcccatctatgaacctcttctcccatggaacgaggatgcaaattatatgctgtcgaaa

SEQ ID NO: 315492 - DNA, 120 bp, Artificial Sequence
  ENSG00000134940_7 (sequence is synthesized)
tcaatctttctgcaataagatctagaagcctgggcccttgcttgttttgactcaggcagtaaaaagcctccatcactctatttggctcattttatatttagttccttccccagtcaacaa

SEQ ID NO: 315493 - DNA, 120 bp, Artificial Sequence
  ENSG00000134940_8 (sequence is synthesized)
ctgcctgagcattaggatgctcaaacatcctatctttcttcttctattcatgcttttatccattcttctctgtcctgtcttccctgctccaactctttctctcaatattcctgatttttt

SEQ ID NO: 315494 - DNA, 120 bp, Artificial Sequence
  ENSG00000134940_9 (sequence is synthesized)
tttcaataaatttcacatggttaaagcacacaggctcaagacagacctttttttcccccattaatctagttgcagggtcaacatgagcttccttccacaccgacactaaactgggtgcat

SEQ ID NO: 315495 - DNA, 120 bp, Artificial Sequence
  ENSG00000134940_10 (sequence is synthesized)
tgtttaagcattccatatttatgaaagtaaaggagtctccaagggcagagacaacaaagaggaatgcaaagtaggtattaatcttttacagggtgtaaacgtgcaggtacttctgacacc

SEQ ID NO: 315496 - DNA, 120 bp, Artificial Sequence
  ENSG00000134940_11 (sequence is synthesized)
cccccttttccatccctacacactcttccatttattatggcatacaaaaactcaactcttctttggctcttgagagtttctagtcttcagtagtccactactaacataatgataatagta

SEQ ID NO: 315497 - DNA, 120 bp, Artificial Sequence
  ENSG00000134940_12 (sequence is synthesized)
taatgattccttatttgctatatattgcagcagttcataatgcttaaatcatttttttcacacacaatgttactgaatcatctatacaggataggagggcaaatggaaatactaaacggt

SEQ ID NO: 315498 - DNA, 120 bp, Artificial Sequence
  ENSG00000134940_13 (sequence is synthesized)
ccctcatataagtgttatgttcttcaagatgttttcacatacacggtctcatctgatcctcaggaaagatcccagagtggtagacaggaaagatggcatcatccttttttgcaaataagg

SEQ ID NO: 315499 - DNA, 120 bp, Artificial Sequence
  ENSG00000134940_14 (sequence is synthesized)
aaatgtgacacagagatgttttctttattcatactccatgttgttccaaatttaccaaggttacagagctacagagagctataggcagattccacaaccaaatctgcaagatctaaatct

SEQ ID NO: 315500 - DNA, 120 bp, Artificial Sequence
  ENSG00000134940_15 (sequence is synthesized)
gagctgtttccaccacaatgaaagtagccagaatggttctaagaactcttagaacagtacaacaagaagtcaattttactgtatataaaatttaaaatttcaacatatatacacatcatg

SEQ ID NO: 315501 - DNA, 120 bp, Artificial Sequence
  ENSG00000134954_0 (sequence is synthesized)
gagagcgaacgaggcagccgccggcggagaggagggagcgggcgagggccgggcaggaggagcgggcgcggcgcgggcgaggctgggacccgagcgcgctcacttcgccgcaaagtgcca

SEQ ID NO: 315502 - DNA, 120 bp, Artificial Sequence
  ENSG00000134954_1 (sequence is synthesized)
acttcccctggagtgccgggcgcgcaccgtccgggcgcgggggaaagaaaggcagcgggaatttgagatttttgggaagaaagtcggatttcccccgtccccttccccctgttactaatc

SEQ ID NO: 315503 - DNA, 120 bp, Artificial Sequence
  ENSG00000134954_2 (sequence is synthesized)
ctcattaaaaagaaaaacaacagtaactgcaaacttgctaccatcccgtacgtcccccactcctggcaccatgaaggcggccgtcgatctcaagccgactctcaccatcatcaagacgga

SEQ ID NO: 315504 - DNA, 120 bp, Artificial Sequence
  ENSG00000134954_3 (sequence is synthesized)
aaaagtcgatctggagcttttcccctccccggatatggaatgtgcagatgtcccactattaactccaagcagcaaagaaatgatgtctcaagcattaaaagctactttcagtggtttcac

SEQ ID NO: 315505 - DNA, 120 bp, Artificial Sequence
  ENSG00000134954_4 (sequence is synthesized)
taaagaacagcaacgactggggatcccaaaagacccccggcagtggacagaaacccatgttcgggactgggtgatgtgggctgtgaatgaattcagcctgaaaggtgtagacttccagaa

SEQ ID NO: 315506 - DNA, 120 bp, Artificial Sequence
  ENSG00000134954_5 (sequence is synthesized)
gttctgtatgaatggagcagccctctgcgccctgggtaaagactgctttctcgagctggccccagactttgttggggacatcttatgggaacatctagagatcctgcagaaagaggatgt

SEQ ID NO: 315507 - DNA, 120 bp, Artificial Sequence
  ENSG00000134954_6 (sequence is synthesized)
gaaaccatatcaagttaatggagtcaacccagcctatccagaatcccgctatacctcggattacttcattagctatggtattgagcatgcccagtgtgttccaccatcggagttctcaga

SEQ ID NO: 315508 - DNA, 120 bp, Artificial Sequence
  ENSG00000134954_7 (sequence is synthesized)
gcccagcttcatcacagagtcctatcagacgctccatcccatcagctcggaagagctcctctccctcaagtatgagaatgactacccctcggtcattctccgagaccctctccagacaga

SEQ ID NO: 315509 - DNA, 120 bp, Artificial Sequence
  ENSG00000134954_8 (sequence is synthesized)
caccttgcagaatgactactttgctatcaaacaagaagtcgtcaccccagacaacatgtgcatggggaggaccagtcgtggtaaactcgggggccaggactcttttgaaagcatagagag

SEQ ID NO: 315510 - DNA, 120 bp, Artificial Sequence
  ENSG00000134954_9 (sequence is synthesized)
cctcctatgacagcttcgactcagaggactatccggctgccctgcccaaccacaagcccaagggcaccttcaaggactatgtgcgggaccgtgctgacctcaataaggacaagcctgtca

SEQ ID NO: 315511 - DNA, 120 bp, Artificial Sequence
  ENSG00000134954_10 (sequence is synthesized)
ttcctgctgctgccctagctggctacacaggcagtggaccaatccagctatggcagtttcttctggaattactcactgataaatcctgtcagtcttttatcagctggacaggagatggct

SEQ ID NO: 315512 - DNA, 120 bp, Artificial Sequence
  ENSG00000134954_11 (sequence is synthesized)
gggaattcaaactttctgacccagatgaggtggccaggagatggggaaagaggaaaaacaaacctaagatgaattatgagaaactgagccgtggcctacgctactattacgacaaaaaca

SEQ ID NO: 315513 - DNA, 120 bp, Artificial Sequence
  ENSG00000134954_12 (sequence is synthesized)
tcatccacaagacagcggggaaacgctacgtgtaccgctttgtgtgtgacctgcagagcctgctggggtacacccctgaggagctgcacgccatgctggacgtcaagccagatgccgacg

SEQ ID NO: 315514 - DNA, 120 bp, Artificial Sequence
  ENSG00000134954_13 (sequence is synthesized)
agtgatggcactgaaggggctggggaaaccctgctgagaccttccaaggacagccgtgttggttggactctgaattttgaattgttattctattttttattttccagaactcatttttta

SEQ ID NO: 315515 - DNA, 120 bp, Artificial Sequence
  ENSG00000134954_14 (sequence is synthesized)
ccttcaggggtgggagctaagtcagttgcagctgtaatcaattgtgcgcagttgggaaaggaaagccaggacttgtggggtgggtgggaccagaaattcttgagcaaattttcaggagag

SEQ ID NO: 315516 - DNA, 120 bp, Artificial Sequence
  ENSG00000134954_15 (sequence is synthesized)
ggagaagggccttctcagaagcttgaaggctctggcttaacagagaaagagactaatgtgtccaatcatttttaaaaatcatccatgaaaaagtgtcttgagttgtggacccattagcaa

SEQ ID NO: 315517 - DNA, 120 bp, Artificial Sequence
  ENSG00000134954_16 (sequence is synthesized)
gtgacattgtcacatcagaactcatgaaactgatgtaaggcaattaatttgcttctgtttttaggtctgggagggcaaaaaagaggtgggtgggatgaaacatgttttggggggggatgc

SEQ ID NO: 315518 - DNA, 120 bp, Artificial Sequence
  ENSG00000134954_17 (sequence is synthesized)
actgaaaatctgagaactatttacctatcactctagttttgaagcaaagatggacttcagtggggaggggccaaaaccgttgttgtgttaaaatttattttattaaattttgtgccagta

SEQ ID NO: 315519 - DNA, 120 bp, Artificial Sequence
  ENSG00000134954_18 (sequence is synthesized)
agttggaaagagaccacagactttgagggaagctcactcaggatctgctctccggcaaagtagtaagtgaggtgctgagagcagaatgagctactttgtggattctgctgggagcagccc

SEQ ID NO: 315520 - DNA, 120 bp, Artificial Sequence
  ENSG00000134954_19 (sequence is synthesized)
cgtcccttactcagcgcctcgtcctgcagtggtgaggcaaggacctagcaacacttatgaagatcctcgaatgaactgtggtttccagtccaattatcaccagcaaagaccttgctaccc

SEQ ID NO: 315521 - DNA, 120 bp, Artificial Sequence
  ENSG00000134954_20 (sequence is synthesized)
taagctctaaggtggtctcagtattgcaatatcatgtaagtttgtttttatttgccggctgaggattctgtcacaatgaaagaaaactgtttatatagaccccattggaaaagcaaaacg

SEQ ID NO: 315522 - DNA, 120 bp, Artificial Sequence
  ENSG00000134954_21 (sequence is synthesized)
ctctcactgagatcagggatcccaaattcatgggacttatataagaaggacaattaatgctgatttgggtacaggggaattatgtgtgtgaatgtcatctacaattaaaaaaaattagca

SEQ ID NO: 315523 - DNA, 120 bp, Artificial Sequence
  ENSG00000134954_22 (sequence is synthesized)
catccctttacttacttgttatcagtggattctcggggtttggacttaatgttgagctaagaagcattaagtctttgaactgaatgtattttgcatccctggttttggacgacagtaaac

SEQ ID NO: 315524 - DNA, 120 bp, Artificial Sequence
  ENSG00000134954_23 (sequence is synthesized)
aagctgtatgcatgggcattacccctcaggtcctaagaaataagtcctgaatgcatgtcgttccaaactaacactctgtaatttttcttttatgtcttattttccaagagtcctccattt

SEQ ID NO: 315525 - DNA, 120 bp, Artificial Sequence
  ENSG00000134954_24 (sequence is synthesized)
tttgcaccccctcaccgccaactctgttattcagtagagagaagtgtacggctttctgattggtgagtgaaaaagtaacttgagacacgacctaagttgaagagtttagacttgctgagt

SEQ ID NO: 315526 - DNA, 120 bp, Artificial Sequence
  ENSG00000134954_25 (sequence is synthesized)
tttagaagtgatggaaattaagagagcatttcaataaaatgtgacttggctgtctttggaagagaagtgcaaggctttcctttgaagaatttaaattagtccggtaggatgtcaggtgag

SEQ ID NO: 315527 - DNA, 120 bp, Artificial Sequence
  ENSG00000134954_26 (sequence is synthesized)
actgtgtatgcaaaatgaatggcacaggtgatgccagggcctcttgcttgggtctgatgtcttggcacagggtaagtgaaggttaattccagaagagaggaatgacttgaaggcaaagga

SEQ ID NO: 315528 - DNA, 120 bp, Artificial Sequence
  ENSG00000134954_27 (sequence is synthesized)
aactaaggaaggaggttcagtgaggaaaataaggttgtccatgagatttgaatagatttttagttcccccaaggtttaaatacaaacatagtcaagcaaggtagtcatctttctgctggt

SEQ ID NO: 315529 - DNA, 120 bp, Artificial Sequence
  ENSG00000134954_28 (sequence is synthesized)
tgtgagggggaatctgaaaatggagttttagaggaaaagtcaacatctaactagtgaggaaaagtgcctaatacaattagaatctccctcactctatagttgcccagttgaaaggataag

SEQ ID NO: 315530 - DNA, 120 bp, Artificial Sequence
  ENSG00000134954_29 (sequence is synthesized)
gaggaggggtggcttttatggacttccatgagagaaggaaagaaatatttcaggtaagcttctcagggctggccctttttgggatttggatgagaaattggaagtactaactactttcta

SEQ ID NO: 315531 - DNA, 120 bp, Artificial Sequence
  ENSG00000134954_30 (sequence is synthesized)
gcatatctttaagaaaattgattgttatttactcccagatcctcttgcagacccagaattatcaggaacatagctctgtgattcatgagtgtccccatactgatgaattggagcatccat

SEQ ID NO: 315532 - DNA, 120 bp, Artificial Sequence
  ENSG00000134954_31 (sequence is synthesized)
atggaaagcaaaggcagaattatcccagctgtattattttgatcttttggatgcaggtgccttaatgaagctctcaaaatattttaggagctgctcagggagtgttgggtggaactgttt

SEQ ID NO: 315533 - DNA, 120 bp, Artificial Sequence
  ENSG00000134954_32 (sequence is synthesized)
gtggaactgtttggactacattgttttctcttagattatgtgatttttgttgggcactggcaaaaggtgtgtgtgtgaatgtgtgcatgtgtgtgaatgttgtgtgtgtgtgtgtgtgtg

SEQ ID NO: 315534 - DNA, 120 bp, Artificial Sequence
  ENSG00000134954_33 (sequence is synthesized)
tgtgtgtgtgtgtttgcagacatgcaaaactgcagctgaaataataccttagatttctaggtaagtctttccacatttcaataatgggtaagagtagaaccagggccgggtatcaattat

SEQ ID NO: 315535 - DNA, 120 bp, Artificial Sequence
  ENSG00000134954_34 (sequence is synthesized)
tgcttgctgtttgcaaccaggcataaaatcactttctcaaatcatccaccgttcctattaaatttatgccggaaactctccttctgtgagtataactcctgcagttcctatagcagataa

SEQ ID NO: 315536 - DNA, 120 bp, Artificial Sequence
  ENSG00000134954_35 (sequence is synthesized)
gatataagaaagtgcctcctagtgctcctccgcccgcttgtttgctaaaattccctttctctctaagtccaccattttcaagatttgtagatagtgtattagttaagacagctttgtcga

SEQ ID NO: 315537 - DNA, 120 bp, Artificial Sequence
  ENSG00000134954_36 (sequence is synthesized)
tctggccagatgttttttctcctttgtccaaaggccagagaccatcccaggaagagtggtgggtggtttatacactggaaatgttgcgtttatgctttttaaaaacacacgttaacttca

SEQ ID NO: 315538 - DNA, 120 bp, Artificial Sequence
  ENSG00000134954_37 (sequence is synthesized)
gaggaaggatgggcaaatctggtctagctgggtgaaacccttattttcccagagatgccttaacctttgttggttttggctttagggttcagagtcacttttgttcccttctccattctg

SEQ ID NO: 315539 - DNA, 120 bp, Artificial Sequence
  ENSG00000134954_38 (sequence is synthesized)
gagagggacttcccctacatagagccctgatttttgtggctgtggggattggaggtagcattcaaagatcagatgtgcttttcctcactttggagatgaacactctgggttttacagcat

SEQ ID NO: 315540 - DNA, 120 bp, Artificial Sequence
  ENSG00000134954_39 (sequence is synthesized)
taacctgcctaaccttcatggtgagaaatacaccatctctcttctagtcatgctgtgcatgccgcttactctgttggggtctatataaatttgttgaactcttacctacattccaaagaa

SEQ ID NO: 315541 - DNA, 120 bp, Artificial Sequence
  ENSG00000134954_40 (sequence is synthesized)
aactcttacctacattccaaagaagtttcaaggaaccataaatatatgtatacatatacatatataaaatatatatattaaaataaaattatcaggaatactgcctcagttattgaactt

SEQ ID NO: 315542 - DNA, 120 bp, Artificial Sequence
  ENSG00000134954_41 (sequence is synthesized)
taagctgagaagtatagggatgaaaaagatgttatattgtgtttgactattttccaacttgtattttcatataatttatattttttaaaagctgaaaatttagaagcaagatgaaaaaaa

SEQ ID NO: 315543 - DNA, 120 bp, Artificial Sequence
  ENSG00000134954_42 (sequence is synthesized)
ggaaaagcaggtgctttttaaaaatcagaactgaggtagcttagagatgtagcgatgtaagtgtcgatgtttttttaaaaaaaaatgcaaaaaaattcttatggcggagttttttgtttg

SEQ ID NO: 315544 - DNA, 120 bp, Artificial Sequence
  ENSG00000134954_43 (sequence is synthesized)
tttattttagtagctgatgctggcacatcattttgctggagagttttttatatactgtagcctgatttcatattgtattttaaactgtgtgaaattaaaaacaaagaatttcattcataa

SEQ ID NO: 315545 - DNA, 120 bp, Artificial Sequence
  ENSG00000134954_44 (sequence is synthesized)
aactagagctgcttgtgttacttcaggccatggcctttctgggggtcaacagatagcttcattaattagatagatcagattcaacttactggccagtgcccctgatattaagttctggct

SEQ ID NO: 315546 - DNA, 120 bp, Artificial Sequence
  ENSG00000134954_45 (sequence is synthesized)
ttgtcagtggggtttgttgtattccctcaaccctatcaccatggctcagtgaccctatttggaataccagcaggactagaagggtagtggtgtaaaacctttaaatgatatgaggcactc

SEQ ID NO: 315547 - DNA, 120 bp, Artificial Sequence
  ENSG00000134954_46 (sequence is synthesized)
tctggattgacaggaatagcaccctcaaatttcagagccatcagacaccatggtatcatgctatcggagttgactgttgaaagttgcttaatatccctgatatggaatgtgcagatgtcc

SEQ ID NO: 315548 - DNA, 120 bp, Artificial Sequence
  ENSG00000134954_47 (sequence is synthesized)
tgccttagaatatcccagaggataggcacagtgttctctttctagaatttgtttagcaataaaaatgaaccgatccttaagttaatcaaaataaagcacttgacacattttcttccatgc

SEQ ID NO: 315549 - DNA, 120 bp, Artificial Sequence
  ENSG00000134954_48 (sequence is synthesized)
actcaggatctgctctccggcaaagtagtaagtgaggtgtgctgagagcagaatgagctactttgtggattctgctgggagcagccccgtcccttactcagcgcctcgtcctgcagtggt

SEQ ID NO: 315550 - DNA, 76 bp, Artificial Sequence
  ENSG00000134954_49 (sequence is synthesized)
gcagccccgtcccttactcagcgcctcgtcctgcagtggtgtgaaatacggacagataagactcaggctggagtgc

SEQ ID NO: 315551 - DNA, 84 bp, Artificial Sequence
  ENSG00000134954_50 (sequence is synthesized)
cgaactcatgacctcaagtgatctttctttgagatttgatctctgctcactgcaacctgtgcctcccgtgttcaagcgattctc

SEQ ID NO: 315552 - DNA, 120 bp, Artificial Sequence
  ENSG00000134954_51 (sequence is synthesized)
agcttagcctgaagtcattgcttaaataacctgctaactggaatgtattgacatgaactgtcaacacggctgctcccttcaaccaattccaagctctttctcctcctaatgagaggcttc

SEQ ID NO: 315553 - DNA, 120 bp, Artificial Sequence
  ENSG00000134954_52 (sequence is synthesized)
ttgtgtgtcttgatttggctgttatgcctcttaacattgctcacagtctcaattggatcagaaaacagctttttctagaccacagaatgtatgctattctctgaaatcttaagctcttaa

SEQ ID NO: 315554 - DNA, 120 bp, Artificial Sequence
  ENSG00000134954_53 (sequence is synthesized)
gatctctacagtctgtttacccaatgtattgaattcttgtacccaatatctcatgataatgttcatttatgatacatatttcttctcttcttactatttgaataaattatattgactata

SEQ ID NO: 315555 - DNA, 120 bp, Artificial Sequence
  ENSG00000134955_0 (sequence is synthesized)
gtcgactcagccttaggtaccggtcaggcaaaatgcggtcctccctggctccgggagtctggttcttccgggccttctccagggacagctggttccgaggcctcatcctgctgctgacct

SEQ ID NO: 315556 - DNA, 120 bp, Artificial Sequence
  ENSG00000134955_1 (sequence is synthesized)
tcctaatttacgcctgctatcacatgtccaggaagcctatcagtatcgtcaagagccgtctgcaccagaactgctcggagcagatcaaacccatcaatgatactcacagtctcaatgaca

SEQ ID NO: 315557 - DNA, 120 bp, Artificial Sequence
  ENSG00000134955_2 (sequence is synthesized)
ccatgtggtgcagctgggccccatttgacaaggacaactataaggagttactagggggcgtggacaacgccttcctcatcgcctatgccatcggcatgttcatcagtggggtttttgggg

SEQ ID NO: 315558 - DNA, 120 bp, Artificial Sequence
  ENSG00000134955_3 (sequence is synthesized)
agcggcttccgctccgttactacctctcagctggaatgctgctcagtggccttttcacctcgctctttggcctgggatatttctggaacatccacgagctctggtactttgtggtcatcc

SEQ ID NO: 315559 - DNA, 120 bp, Artificial Sequence
  ENSG00000134955_4 (sequence is synthesized)
aggtctgtaatggactcgtccagaccacaggctggccctctgtggtgacctgtgttggcaactggttcgggaaggggaagcgggggttcatcatgggcatctggaattcccacacatctg

SEQ ID NO: 315560 - DNA, 120 bp, Artificial Sequence
  ENSG00000134955_5 (sequence is synthesized)
tgggcaacatcctgggctccctgatcgccggcatctgggtgaacgggcagtggggcctgtcgttcatcgtgcctggcatcattactgccgtcatgggcgtcatcaccttcctcttcctca

SEQ ID NO: 315561 - DNA, 120 bp, Artificial Sequence
  ENSG00000134955_6 (sequence is synthesized)
tcgaacacccagaagatgtggactgcgcccctcctcagcaccacggtgagccagctgagaaccaggacaaccctgaggaccctgggaacagtccctgctctatcagggagagcggccttg

SEQ ID NO: 315562 - DNA, 120 bp, Artificial Sequence
  ENSG00000134955_7 (sequence is synthesized)
agactgtggccaaatgctccaaggggccatgcgaagagcctgctgccatcagcttctttggggcgctccggatcccaggcgtggtcgagttctctctgtgtctgctgtttgccaagctgg

SEQ ID NO: 315563 - DNA, 120 bp, Artificial Sequence
  ENSG00000134955_8 (sequence is synthesized)
tcagttacaccttcctctactggctgcccctctacatcgccaatgtggctcactttagtgccaaggaggctggggacctgtctacactcttcgatgttggtggcatcataggcggcatcg

SEQ ID NO: 315564 - DNA, 120 bp, Artificial Sequence
  ENSG00000134955_9 (sequence is synthesized)
tggcagggctcgtctctgactacaccaatggcagggccaccacttgctgtgtcatgctcatcttggctgcccccatgatgttcctgtacaactacattggccaggacgggattgccagct

SEQ ID NO: 315565 - DNA, 120 bp, Artificial Sequence
  ENSG00000134955_10 (sequence is synthesized)
ccatagtgatgctgatcatctgtgggggcctggtcaatggcccatacgcgctcatcaccactgctgtctctgctgatctggggactcacaagagcctgaagggcaacgccaaagccctgt

SEQ ID NO: 315566 - DNA, 120 bp, Artificial Sequence
  ENSG00000134955_11 (sequence is synthesized)
ctgctggctgggctcatctcccccacgggctggaacaatgtcttctacatgctcatctctgccgacgtcctagcctgcttgctcctttgccggttagtatacaaagagatcttggcctgg

SEQ ID NO: 315567 - DNA, 120 bp, Artificial Sequence
  ENSG00000134955_12 (sequence is synthesized)
aaggtgtccctgagcagaggcagcggctctagtatggtcctaacccaccagtgatagtattttcctcaagtcccatgacttttgtataaagaaatatgaggccccaattggaacagcagc

SEQ ID NO: 315568 - DNA, 120 bp, Artificial Sequence
  ENSG00000134955_13 (sequence is synthesized)
atggagggtcccagttgggtccccaacgtgctccccatgggcaagacaatggaaacttccacaagcagggaaggcaaaccctctttattgaacattagccagcccagcccagaccccagg

SEQ ID NO: 315569 - DNA, 120 bp, Artificial Sequence
  ENSG00000134955_14 (sequence is synthesized)
gctgcctaaggacacagagattctccatgggaaggggactgccaagcatgaggaaatagaagattcaggggcctgagctctggaagctgcaagcaaaagggatgggactagggctgagtt

SEQ ID NO: 315570 - DNA, 120 bp, Artificial Sequence
  ENSG00000134955_15 (sequence is synthesized)
gtgtctccattttgataaggaaaggatatgctcagactcttgcttgttcagattccaagacagaaggcttcacaaggccaacgcctggaaaatgggcatctctccttcccatgttaagct

SEQ ID NO: 315571 - DNA, 120 bp, Artificial Sequence
  ENSG00000134955_16 (sequence is synthesized)
ttaacctctgtaatctgcctgtatctataggtgggcatctcactccaccaaaggagcccagcctctctttgtccctctatccatgcaacagtcttctctgtgcatttccccaagctgggc

SEQ ID NO: 315572 - DNA, 120 bp, Artificial Sequence
  ENSG00000134955_17 (sequence is synthesized)
cctcttctactctccatttaggcctgttgataactccattacccgcccatcactgctgttcctccagggccagcactcgggcgaggcaggggagctgccttcggtacataatttgaaggg

SEQ ID NO: 315573 - DNA, 120 bp, Artificial Sequence
  ENSG00000134955_18 (sequence is synthesized)
gcactccctcttgggcacatgccggccctgagtgcctcccttgcctcactctgatcctggccccataatgtcctcagtggaaggtgatgggggccggtgctgtggggagagtagaaagag

SEQ ID NO: 315574 - DNA, 120 bp, Artificial Sequence
  ENSG00000134955_19 (sequence is synthesized)
gggttggcatgactaaaaataccagtatgtgtattaagtattttgagaatgaaatgccaaggagtgcctactatatgccagctctaggaatggagtagacagtggacacaagaaggactt

SEQ ID NO: 315575 - DNA, 120 bp, Artificial Sequence
  ENSG00000134955_20 (sequence is synthesized)
acgccctgagcacaggtgccaatggtgacaagactggcaagacgtgagggcatgaatggttcattcaggcagctgctgcagatgtggtcacctggtgccatctgctgctcccttttccac

SEQ ID NO: 315576 - DNA, 120 bp, Artificial Sequence
  ENSG00000134955_21 (sequence is synthesized)
ttttctatgtcctccttccaccccaagtcccggatcactcgctgttttctggctagctcttggcatctccatctgagcctaaagttgcccactggcaccaatagattctgtttgacctgc

SEQ ID NO: 315577 - DNA, 120 bp, Artificial Sequence
  ENSG00000134955_22 (sequence is synthesized)
agaaagtgcagggcggaatgaggagccccagcacctcagagctgtcgggcagtggcggggaagcaaagcacaggagcgctgtggtgccagcggccgggctagggacgactggcgggtttg

SEQ ID NO: 315578 - DNA, 120 bp, Artificial Sequence
  ENSG00000134955_23 (sequence is synthesized)
gcgcaagggggcgggcgctgccgtactcaggccgcggggccagggcgggccggccggcggggcatttaaaccccgctgacagccagtccagcccgggacacgcgcccagctctgtagcct

SEQ ID NO: 315579 - DNA, 67 bp, Artificial Sequence
  ENSG00000134955_24 (sequence is synthesized)
ctccctcagcttgcagggaggtgtggagcgagaggcgcgagcgggaaccggggctgcatgcactcgg

SEQ ID NO: 315580 - DNA, 78 bp, Artificial Sequence
  ENSG00000134955_25 (sequence is synthesized)
tccgggtgggcatgggcttggcgggcctgcactcggagcagccggccggcccttccggccccgggcagtgagggactt

SEQ ID NO: 315581 - DNA, 120 bp, Artificial Sequence
  ENSG00000134955_26 (sequence is synthesized)
cggggcagggctcgggacctgcagcccgcggtgcctgagcctcccacccgctccatgggctcctgtggggcccgagcctccccgacgagtaccaccccctgctccagggcgcccagtccc

SEQ ID NO: 315582 - DNA, 79 bp, Artificial Sequence
  ENSG00000134955_27 (sequence is synthesized)
atctagctgctctggtggggcctcatcggcactgtgtatctagctcaaggtttataaacacaccaatcaacaccctgtg

SEQ ID NO: 315583 - DNA, 120 bp, Artificial Sequence
  ENSG00000134955_28 (sequence is synthesized)
agtccggggagctgaagctgcccctctaccaacctcatttctcgtgggaatcagcccagcgctcagtttctccaaacgcaggctgaggctcgaccagcccagacctgaggagcactgagc

SEQ ID NO: 315584 - DNA, 120 bp, Artificial Sequence
  ENSG00000134955_29 (sequence is synthesized)
cagtccctgggtggccctcaccctgctaacctgtcctctgttgtccccgtgtatctctatagctctagtatggtcctaacccaccagtgatagtattttcctcaagtcccatgacttttg

SEQ ID NO: 315585 - DNA, 120 bp, Artificial Sequence
  ENSG00000134955_30 (sequence is synthesized)
tgagtatttacttcgagtctgtgactcgagtgccatttgagtgggggctgcatgcaaatcctctgtcctgcagtatgactttttccaactttctctttcttcttgtgggccagttgtaaa

SEQ ID NO: 315586 - DNA, 120 bp, Artificial Sequence
  ENSG00000134955_31 (sequence is synthesized)
gactttcaacctcagcagagcatggtgcttgggaagtgttttccaaggggtctgagatgccacagaggttggtggcctcttccctgagggacagtgtgagaactttggacatgccctcgg

SEQ ID NO: 315587 - DNA, 120 bp, Artificial Sequence
  ENSG00000134955_32 (sequence is synthesized)
ggacagaggaggcagaaatagggaaaccagtttccctctgagctgcgactgagctgcaagtgcctcctgaagttcagaaaccaaggtcatctggcccctctgcctggggtatgcagaaca

SEQ ID NO: 315588 - DNA, 120 bp, Artificial Sequence
  ENSG00000134955_33 (sequence is synthesized)
aaagcaactaccaatcaaagtctctgaaacaaatgtgaatcaagcatgggtggctggcctggtgtgctctctgcctactgtctggtggtggtggatgtggtggtggcatcagcaggtcag

SEQ ID NO: 315589 - DNA, 120 bp, Artificial Sequence
  ENSG00000134955_34 (sequence is synthesized)
tggctgaggctacacagtgctggtggtctgatggtcgggcgaccctctcccgctggccgtcctgagcaggagcctcgtgctaacaaggaggccgctaatgagctggccggagctgtggac

SEQ ID NO: 315590 - DNA, 120 bp, Artificial Sequence
  ENSG00000134955_35 (sequence is synthesized)
ggggagagaaagtgagagcaggaagacacacaacacaggaagcacgcagagcacctgtcctgccctgccctgccctgccctggaagaggggagcagggggctggactgcatgacccaaag

SEQ ID NO: 315591 - DNA, 120 bp, Artificial Sequence
  ENSG00000134955_36 (sequence is synthesized)
ttcctgtgcctgtgctccttggagccaggcctgagggtgggaagggaagaagagcagcagaaagcgaggaggatttagtgagcaactgctctgtcctggaattgtgtctggctttagacg

SEQ ID NO: 315592 - DNA, 120 bp, Artificial Sequence
  ENSG00000134955_37 (sequence is synthesized)
tgtgagcttgcctcgcagcagcctctcattgaaggtgagagacagaggctcagagctcgggcacagcctaacactgaaactgggcctggggtttgtttgcttttctctggactgccaccg

SEQ ID NO: 315593 - DNA, 120 bp, Artificial Sequence
  ENSG00000134955_38 (sequence is synthesized)
ctgtcccaggctggtcctgctccatgggaggcctgtgtgtgaggtgtgcagtgatttatcagagcagacagagcactgtgcttggaatccaaaaacccctggacagtcctgctttctcca

SEQ ID NO: 315594 - DNA, 120 bp, Artificial Sequence
  ENSG00000134955_39 (sequence is synthesized)
ctcactccatgagaccttgggcatagcactccatcagacccagattctctgaaccaccacatctttatgtatgaatggggatgcttatccctgaatacctggcagaattgacccaaggct

SEQ ID NO: 315595 - DNA, 120 bp, Artificial Sequence
  ENSG00000134955_40 (sequence is synthesized)
gaatacctggcagaattgacccaaggctgagataaatgggatatgtgatattgctttgtaaagctgtcaaatgtggcatgaacattgtaaggttttatttaatttctttttttttttttt

SEQ ID NO: 315596 - DNA, 120 bp, Artificial Sequence
  ENSG00000134955_41 (sequence is synthesized)
gccaccgcgcccggccaggttttaaatattaatctagcttgctatttcctgcctgagaggtgaaagggaggcctcattacagagaactgagatgaaagcaatgatgaagggaccctggga

SEQ ID NO: 315597 - DNA, 120 bp, Artificial Sequence
  ENSG00000134955_42 (sequence is synthesized)
ccctgcctttcctctccctactcagcaggagcttatgaagtcatctcactttctcttctgtcccccctctcctcttcatgcaggtataaagaaatatgaggccccaattggaacagcagc

SEQ ID NO: 315598 - DNA, 120 bp, Artificial Sequence
  ENSG00000134955_43 (sequence is synthesized)
actgtaggaattagtcatggccaagttcaagccatagcttgccccgcagctctgtcggggcctctctcgtgacagtgtggagcactagggcagctttgtggacaccgtgactctttgttt

SEQ ID NO: 315599 - DNA, 120 bp, Artificial Sequence
  ENSG00000134955_44 (sequence is synthesized)
tgtggccttggtgctgacttcagagtatgaggcaccctcgagggtggggctacaatctcagcttctggacattccttttttaaaacatggagccaaggcctgtgacctgaggcccctgtg

SEQ ID NO: 315600 - DNA, 120 bp, Artificial Sequence
  ENSG00000134962_0 (sequence is synthesized)
agtccagcagttggtggcaaatgaagccaggctgtgcggcaggatctccagggaatgaatggattttcttcagcactgatgaaataaccacacgctataggaatacaatgtccaacgggg

SEQ ID NO: 315601 - DNA, 120 bp, Artificial Sequence
  ENSG00000134962_1 (sequence is synthesized)
gattgcaaagatctgtcatcctgtcagcacttattctgctacgagctgttactggattctctggagatggaagagctatatggtctaaaaatcctaattttactccggtaaatgaaagtc

SEQ ID NO: 315602 - DNA, 120 bp, Artificial Sequence
  ENSG00000134962_2 (sequence is synthesized)
agctgtttctctatgacactttccctaaaaactttttctggggtattgggactggagcattgcaagtggaagggagttggaagaaggatggaaaaggaccttctatatgggatcatttca

SEQ ID NO: 315603 - DNA, 120 bp, Artificial Sequence
  ENSG00000134962_3 (sequence is synthesized)
tccacacacaccttaaaaatgtcagcagcacgaatggttccagtgacagttatatttttctggaaaaagacttatcagccctggattttataggagtttctttttatcaattttcaattt

SEQ ID NO: 315604 - DNA, 120 bp, Artificial Sequence
  ENSG00000134962_4 (sequence is synthesized)
cctggccaaggcttttccccgatggaatagtaacagttgccaacgcaaaaggtctgcagtactacagtactcttctggacgctctagtgcttagaaacattgaacctatagttactttat

SEQ ID NO: 315605 - DNA, 120 bp, Artificial Sequence
  ENSG00000134962_5 (sequence is synthesized)
accactgggatttgcctttggcactacaagaaaaatatggggggtggaaaaatgataccataatagatatcttcaatgactatgccacatactgtttccagatgtttggggaccgtgtca

SEQ ID NO: 315606 - DNA, 120 bp, Artificial Sequence
  ENSG00000134962_6 (sequence is synthesized)
aatattggattacaattcacaacccatatctagtggcttggcatgggtatgggacaggtatgcatgcccctggagagaagggaaatttagcagctgtctacactgtgggacacaacttga

SEQ ID NO: 315607 - DNA, 120 bp, Artificial Sequence
  ENSG00000134962_7 (sequence is synthesized)
tcaaggctcactcgaaagtttggcataactacaacacacatttccgcccacatcagaagggttggttatcgatcacgttgggatctcattggatcgagccaaaccggtcggaaaacacga

SEQ ID NO: 315608 - DNA, 120 bp, Artificial Sequence
  ENSG00000134962_8 (sequence is synthesized)
tggatatattcaaatgtcaacaatccatggtttctgtgcttggatggtttgccaaccctatccatggggatggcgactatccagaggggatgagaaagaagttgttctccgttctaccca

SEQ ID NO: 315609 - DNA, 120 bp, Artificial Sequence
  ENSG00000134962_9 (sequence is synthesized)
ttttctctgaagcagagaagcatgagatgagaggcacagctgatttctttgccttttcttttggacccaacaacttcaagcccctaaacaccatggctaaaatgggacaaaatgtttcac

SEQ ID NO: 315610 - DNA, 120 bp, Artificial Sequence
  ENSG00000134962_10 (sequence is synthesized)
ttaatttaagagaagcgctgaactggattaaactggaatacaacaaccctcgaatcttgattgctgagaatggctggttcacagacagtcgtgtgaaaacagaagacaccacggccatct

SEQ ID NO: 315611 - DNA, 120 bp, Artificial Sequence
  ENSG00000134962_11 (sequence is synthesized)
acatgatgaagaatttcctcagccaggtgcttcaagcaataaggttagatgaaatacgagtgtttggttatactgcctggtctctcctggatggctttgaatggcaggatgcttacacca

SEQ ID NO: 315612 - DNA, 120 bp, Artificial Sequence
  ENSG00000134962_12 (sequence is synthesized)
tccgccgaggattattttatgtggattttaacagtaaacagaaagagcggaaacctaagtcttcagcacactactacaaacagatcatacgagaaaatggtttttctttaaaagagtcca

SEQ ID NO: 315613 - DNA, 120 bp, Artificial Sequence
  ENSG00000134962_13 (sequence is synthesized)
cgccagatgtgcagggccagtttccctgtgacttctcctggggtgtcactgaatctgttcttaagcccgagtctgtggcttcgtccccacagttcagcgatcctcatctgtacgtgtgga

SEQ ID NO: 315614 - DNA, 120 bp, Artificial Sequence
  ENSG00000134962_14 (sequence is synthesized)
acgccactggcaacagactgttgcaccgagtggaaggggtgaggctgaaaacacgacccgctcaatgcacagattttgtaaacatcaaaaaacaacttgagatgttggcaagaatgaaag

SEQ ID NO: 315615 - DNA, 120 bp, Artificial Sequence
  ENSG00000134962_15 (sequence is synthesized)
tcacccactaccggtttgctctggattgggcctcggtccttcccactggcaacctgtccgcggtgaaccgacaggccctgaggtactacaggtgcgtggtcagtgaggggctgaagcttg

SEQ ID NO: 315616 - DNA, 120 bp, Artificial Sequence
  ENSG00000134962_16 (sequence is synthesized)
gcatctccgcgatggtcaccctgtattatccgacccacgcccacctaggcctccccgagcctctgttgcatgccgacgggtggctgaacccatcgacggccgaggccttccaggcctacg

SEQ ID NO: 315617 - DNA, 120 bp, Artificial Sequence
  ENSG00000134962_17 (sequence is synthesized)
ctgggctgtgcttccaggagctgggggacctggtgaagctctggatcaccatcaacgagcctaaccggctaagtgacatctacaaccgctctggcaacgacacctacggggcggcgcaca

SEQ ID NO: 315618 - DNA, 120 bp, Artificial Sequence
  ENSG00000134962_18 (sequence is synthesized)
acctgctggtggcccacgccctggcctggcgcctctacgaccggcagttcaggccctcacagcgcggggccgtgtcgctgtcgctgcacgcggactgggcggaacccgccaacccctatg

SEQ ID NO: 315619 - DNA, 120 bp, Artificial Sequence
  ENSG00000134962_19 (sequence is synthesized)
ctgactcgcactggagggcggccgagcgcttcctgcagttcgagatcgcctggttcgccgagccgctcttcaagaccggggactaccccgcggccatgagggaatacattgcctccaagc

SEQ ID NO: 315620 - DNA, 120 bp, Artificial Sequence
  ENSG00000134962_20 (sequence is synthesized)
accgacgggggctttccagctcggccctgccgcgcctcaccgaggccgaaaggaggctgctcaagggcacggtcgacttctgcgcgctcaaccacttcaccactaggttcgtgatgcacg

SEQ ID NO: 315621 - DNA, 120 bp, Artificial Sequence
  ENSG00000134962_21 (sequence is synthesized)
agcagctggccggcagccgctacgactcggacagggacatccagtttctgcaggacatcacccgcctgagctcccccacgcgcctggctgtgattccctggggggtgcgcaagctgctgc

SEQ ID NO: 315622 - DNA, 120 bp, Artificial Sequence
  ENSG00000134962_22 (sequence is synthesized)
ggtgggtccggaggaactacggcgacatggacatttacatcaccgccagtggcatcgacgaccaggctctggaggatgaccggctccggaagtactacctagggaagtaccttcaggagg

SEQ ID NO: 315623 - DNA, 120 bp, Artificial Sequence
  ENSG00000134962_23 (sequence is synthesized)
tgctgaaagcatacctgattgataaagtcagaatcaaaggctattatgcattcaaactggctgaagagaaatctaaacccagatttggattcttcacatctgattttaaagctaaatcct

SEQ ID NO: 315624 - DNA, 120 bp, Artificial Sequence
  ENSG00000134962_24 (sequence is synthesized)
caatacaattttacaacaaagtgatcagcagcaggggcttcccttttgagaacagtagttctagatgcagtcagacccaagaaaatacagagtgcactgtctgcttattccttgtgcaga

SEQ ID NO: 315625 - DNA, 120 bp, Artificial Sequence
  ENSG00000134962_25 (sequence is synthesized)
aaaccactgatattcctgggttgttgcttcttctccaccctggttctactcttatcaattgccatttttcaaaggcagaagagaagaaagttttggaaagcaaaaaacttacaacacata

SEQ ID NO: 315626 - DNA, 120 bp, Artificial Sequence
  ENSG00000134962_26 (sequence is synthesized)
ccattaaagaaaggcaagagagttgttagctaaactgatctgtctgcatgatagacagtttaaaaattcatcccagttccatatgctggtaacttacaggagatatacctgtattataga

SEQ ID NO: 315627 - DNA, 120 bp, Artificial Sequence
  ENSG00000134962_27 (sequence is synthesized)
aagacaatctgagatacagctgtaaccaaggtgatgacaattgtctctgctgtgtggttcaaagaacattcccttaggtgttgacatcagtgaactcagttcttggatgtaaacataaag

SEQ ID NO: 315628 - DNA, 120 bp, Artificial Sequence
  ENSG00000134962_28 (sequence is synthesized)
gcttcatcctgacagtaagctatgaggattacatgctacattgcttcttaaagtttcatcaactgtattccatcattctgctttagctttcatctctaccaatagctacttgtggtacaa

SEQ ID NO: 315629 - DNA, 76 bp, Artificial Sequence
  ENSG00000134962_29 (sequence is synthesized)
ctttagctttcatctctaccaatagctacttgtggtacaataaattatttttaagaagtaaaactctggggctgga

SEQ ID NO: 315630 - DNA, 77 bp, Artificial Sequence
  ENSG00000134962_30 (sequence is synthesized)
aaattagccaggcgtggtgacatttgaacccaggaaacaggttacagtaggccaaaattgcgccactgcactccagc

SEQ ID NO: 315631 - DNA, 120 bp, Artificial Sequence
  ENSG00000134962_31 (sequence is synthesized)
gccactgcactccagcctaggcgacaacagcaagactgtgtccaaaaaaaaaaaaaaaagcaaaagcaaaactttgttttgttagactctacagcagagatttaacacccttctttaaac

SEQ ID NO: 315632 - DNA, 120 bp, Artificial Sequence
  ENSG00000134962_32 (sequence is synthesized)
gagatttaacacccttctttaaactgggtagtcagtgatagataatatatattctgtcacttctaataaggtgccttctcctttaggtcagggtggttctaaaatggaaagaaaacacaa

SEQ ID NO: 315633 - DNA, 120 bp, Artificial Sequence
  ENSG00000134962_33 (sequence is synthesized)
tagggtaagtagtgcttgtctaagccagttacaacacagactcttaaagaggatcaagcccttcatttttctaacaacaaaaaatcacctatagaatatctaatttgtgatcttttacta

SEQ ID NO: 315634 - DNA, 87 bp, Artificial Sequence
  ENSG00000134962_34 (sequence is synthesized)
aaaatcacctatagaatatctaatttgtgatcttttactagatctgattttttaaaataatgtaatttccggccaggcacggtggca

SEQ ID NO: 315635 - DNA, 84 bp, Artificial Sequence
  ENSG00000134962_35 (sequence is synthesized)
cagcctgggggacagggcaagactgtctcttaatttccaaaacctcatctcatggaaagatcacaggatgaaggaaagctagac

SEQ ID NO: 315636 - DNA, 120 bp, Artificial Sequence
  ENSG00000134962_36 (sequence is synthesized)
tcatctcatggaaagatcacaggatgaaggaaagctagactcaactctgtgaatagaagttgctatactgtaagtaaagcaacaattcagaatactgaatgagtttaaattgttttatat

SEQ ID NO: 315637 - DNA, 120 bp, Artificial Sequence
  ENSG00000134962_37 (sequence is synthesized)
agcacccttttgggctagggttaattactagatctgacttggataatttgacactttgggaaatgaactctgttcttgagacttgttcagtgtattttaaacatctgaggaagaaaactt

SEQ ID NO: 315638 - DNA, 120 bp, Artificial Sequence
  ENSG00000134962_38 (sequence is synthesized)
aaatatgcacctatttatacctattctttctttaggtcaacatttaacacccactgcatacattaatttgtccttgtctgctcactccagcaatttagaccttaacagtcacaagagacg

SEQ ID NO: 315639 - DNA, 120 bp, Artificial Sequence
  ENSG00000134962_39 (sequence is synthesized)
ttcttctgttacaaagccttagtaaattaaggcagttttgattatattctaggtccacctatgtctgaagctaaattcagtatctaactgctaatgaacaagtttccaaaatactgtaaa

SEQ ID NO: 315640 - DNA, 120 bp, Artificial Sequence
  ENSG00000134962_40 (sequence is synthesized)
aatacaattagtcaatttgagtaaatgcaaatatgatgagaaatcaatttgctatttggcctggcaaatgggaacagtaaaattctgctttactcttctctagtctccttgccccagctg

SEQ ID NO: 315641 - DNA, 120 bp, Artificial Sequence
  ENSG00000134962_41 (sequence is synthesized)
cacccactaccccaaagttggcagttttgaggtatgattttcaaggaatttttttagtattaacatctccctctgagaactatgtacctaaggtcacgcatacaactagtcaattctgtt

SEQ ID NO: 315642 - DNA, 120 bp, Artificial Sequence
  ENSG00000134962_42 (sequence is synthesized)
tttattactctaactatgtagaaacagtaagtcacttaaaacaatcacttggctgggttttttcccctttgtgccacattgattcaccctgacccaagaactccagggaaaattctttaa

SEQ ID NO: 315643 - DNA, 120 bp, Artificial Sequence
  ENSG00000134962_43 (sequence is synthesized)
tgtcaactgggcaactcattaacctctctttaacatcaagggcttgggaaaaaaaaaaaaaaggttagccacaggaataacaaaaacctggaatttatctttcaggttttgctttctctt

SEQ ID NO: 315644 - DNA, 120 bp, Artificial Sequence
  ENSG00000134962_44 (sequence is synthesized)
tctcactttgtttaaagtatctcgtactcacagttcacaaattaaccttcactgtctctttcacattaagagcttatgcttaaagcatgccccccttttctaacttgctggtttaccata

SEQ ID NO: 315645 - DNA, 120 bp, Artificial Sequence
  ENSG00000134962_45 (sequence is synthesized)
aactcccctaagtaataaaattcctaacccagtactgagagtcctccttctctgccacttgggcattattttactagtttttaagccatcatcgcacaagaatccaaaaacccttaaatt

SEQ ID NO: 315646 - DNA, 120 bp, Artificial Sequence
  ENSG00000134962_46 (sequence is synthesized)
ttttaaccactggcaaatatgtacagcaaattaggttaagcatttaatctggctcatgctctatcatactaaatattcaggtttatcataaactccttaaaaaccatcaaaggtcaacca

SEQ ID NO: 315647 - DNA, 120 bp, Artificial Sequence
  ENSG00000134962_47 (sequence is synthesized)
gaaactgataactcttgaaaggagcaaacaggtaagatctttggagtttaagcttttctgagatgtgttgtgaaaaatctaacgtgtttatcgtatattcaatgtaacaacctggagaat

SEQ ID NO: 315648 - DNA, 120 bp, Artificial Sequence
  ENSG00000134962_48 (sequence is synthesized)
cacaactatatttaaagagcctctggaaaatgaggccagtacagtgtgactacatgtttaattttcaatgtaatttattccaaataaactggttcatgctgaccacttgtattcaactaa

SEQ ID NO: 315649 - DNA, 120 bp, Artificial Sequence
  ENSG00000134970_0 (sequence is synthesized)
aatccccacttccgaccctctcaggccttttccgcttctcttttacctccccaggtccgcccgtctgcgcccctcacaggaagccggagggtcgctctgatcccgaatctcccacaggcg

SEQ ID NO: 315650 - DNA, 120 bp, Artificial Sequence
  ENSG00000134970_1 (sequence is synthesized)
tgaacctgctctgctgtgtatctttgcggggtggcctgcgctgaggcctgccgcgcgcggtgagtccgcgcagacctgaccctgcgtctcgcagctcggttgaggccgccgccgccttct

SEQ ID NO: 315651 - DNA, 120 bp, Artificial Sequence
  ENSG00000134970_2 (sequence is synthesized)
cgggatgccgcggccggggtccgcgcagcgctgggcggccgtcgcgggccgttgggggtgcaggctgctcgcactgctgctactggtgcctggacccggcggcgcctctgagatcacctt

SEQ ID NO: 315652 - DNA, 120 bp, Artificial Sequence
  ENSG00000134970_3 (sequence is synthesized)
cgagcttcctgacaacgccaagcagtgcttctacgaggacatcgctcagggcaccaagtgcaccctggagttccaggtgattactggtggtcactatgatgtagattgtcgattagaaga

SEQ ID NO: 315653 - DNA, 120 bp, Artificial Sequence
  ENSG00000134970_4 (sequence is synthesized)
tcctgatggtaaagtgttatacaaagagatgaagaaacagtatgatagttttaccttcacagcctccaaaaatgggacatacaaattttgcttcagcaatgaattttctactttcacaca

SEQ ID NO: 315654 - DNA, 120 bp, Artificial Sequence
  ENSG00000134970_5 (sequence is synthesized)
taaaactgtatattttgattttcaagttggagaagacccacctttgtttcctagtgagaaccgagtcagtgctcttacccagatggaatctgcctgtgtttcaattcacgaagctctgaa

SEQ ID NO: 315655 - DNA, 120 bp, Artificial Sequence
  ENSG00000134970_6 (sequence is synthesized)
gtctgtcatcgattatcagactcatttccgtttaagagaagctcaaggccgaagccgagcagaggatctaaatacaagagtggcctattggtcagtaggagaagccctcattcttctggt

SEQ ID NO: 315656 - DNA, 120 bp, Artificial Sequence
  ENSG00000134970_7 (sequence is synthesized)
ggttagcatagggcaggtatttcttttgaaaagctttttctcagataaaagaaccaccacaactcgtgttggatcataactacgttttgagaattgatgcaccattgccactgtaatatt

SEQ ID NO: 315657 - DNA, 120 bp, Artificial Sequence
  ENSG00000134970_8 (sequence is synthesized)
gctgtcctctaattaattttaggtactgaagaacttaatattggcaacatttttaaatccttactcatacacttgttgggagggatgtacaatgcatattcccaaactgtggaaaggaca

SEQ ID NO: 315658 - DNA, 120 bp, Artificial Sequence
  ENSG00000134970_9 (sequence is synthesized)
cctttttttatttgtaaaggtggaaaaactttggaactcattttgggctattcatgttaaatattcaacaccaatgatctactctgttcgcagttgtttatatctactcttcgcacacta

SEQ ID NO: 315659 - DNA, 120 bp, Artificial Sequence
  ENSG00000134970_10 (sequence is synthesized)
aactttggtattttgattccttttaaccatttaagactacttttcttataggtagttgatattttaaaaactttagatttaatgtctacatgtgttagggaggaagaaaattgcctttta

SEQ ID NO: 315660 - DNA, 120 bp, Artificial Sequence
  ENSG00000134970_11 (sequence is synthesized)
attgttaataagaaaaccaaatgtgatgaactgtagcccaagccctattctgcactgttcagttttatggaggaaaaataaatctaccataggaatgttagttaatattgatatatcatg

SEQ ID NO: 315661 - DNA, 120 bp, Artificial Sequence
  ENSG00000134970_12 (sequence is synthesized)
gtaaaattgatttctcactagcttagaaaatgtcagacttttgtttttggggtttataatttaaaccagctatgctattttttcataaaggcatttgtagtacacagaaaacagtagttt

SEQ ID NO: 315662 - DNA, 120 bp, Artificial Sequence
  ENSG00000134970_13 (sequence is synthesized)
cagtagtgtaaaagagtttatacaggccttaaatatcagactttgtaacaggtagaaatattacagaataatttaagacactacaatgggggcaaatgaaataggaaaatttttagtgag

SEQ ID NO: 315663 - DNA, 120 bp, Artificial Sequence
  ENSG00000134970_14 (sequence is synthesized)
ttacacgtactcattacattttcagtgcttttacaaggaaaaaaggtgatatgtttaattttaaaattttaattggctagctcttgcccttatatgactttaatgtctgtgagtcattcc

SEQ ID NO: 315664 - DNA, 120 bp, Artificial Sequence
  ENSG00000134970_15 (sequence is synthesized)
cagcttaaattaacaattgttagtattagtctcacacataagtgccatacattttatcctcatggatgtgatgcactgaaaagttagttgctctccttttttcttttttttgtcgtgcat

SEQ ID NO: 315665 - DNA, 120 bp, Artificial Sequence
  ENSG00000134970_16 (sequence is synthesized)
atcttcattgacttttctttagttaatgagtattaaatagtgcatattctgtagactatagggtttacattgtgttgcatcttataacttgtatagattgagctgattgaaataagattt

SEQ ID NO: 315666 - DNA, 120 bp, Artificial Sequence
  ENSG00000134970_17 (sequence is synthesized)
tgttccaagtattatctgatagaatacaagatgattcaaaattatatagatatttaaagcttttctgctgttttttttttttttaattgcaactgcttttctgccgtgcctctcttccct

SEQ ID NO: 315667 - DNA, 120 bp, Artificial Sequence
  ENSG00000134970_18 (sequence is synthesized)
acccaaaagtgatgagttctgaacaagacaagactgtcatattgtagagactttggtatgtgataccatagaatactgattggatagccatcctagtcacttaccaatactgactagaag

SEQ ID NO: 315668 - DNA, 120 bp, Artificial Sequence
  ENSG00000134970_19 (sequence is synthesized)
ttaactcttaattctaagctatcttaaaatgcatatatatacttcttgcatggaagagcaaaacaaattcaagttgtcatgcctgataatttcagatgccaccgtatagcaaagggtgaa

SEQ ID NO: 315669 - DNA, 120 bp, Artificial Sequence
  ENSG00000134970_20 (sequence is synthesized)
catgttttcaaccctttaactttttacggtgtttgaagaccagctactccttaatatttatcaatggattaagaagtttaagattttgcagatttatcaatttgggtttttgtactgaag

SEQ ID NO: 315670 - DNA, 120 bp, Artificial Sequence
  ENSG00000134970_21 (sequence is synthesized)
ttgtcttgcggctttgcaagtgtccctttatatttaaatttgaaagttgtaagcactgatgttaatgtgattgatcagcatgggcatatgtaaaatgtccttttctggttgcctctctat

SEQ ID NO: 315671 - DNA, 120 bp, Artificial Sequence
  ENSG00000134970_22 (sequence is synthesized)
gctattgtgttcagatacttacaccataattaaacagtaagttatagacttgctgagtttggcatagatagtgcactcatttaatctgtgcctctcaaaacttcagaatattagcatatt

SEQ ID NO: 315672 - DNA, 120 bp, Artificial Sequence
  ENSG00000134970_23 (sequence is synthesized)
accacaaataatttttggtgaaactattgagatattaaaatttttgaaatcactactgttacctgttatagaaaatagtgttggcttagtctagtctctgtgtaactggttacattttga

SEQ ID NO: 315673 - DNA, 120 bp, Artificial Sequence
  ENSG00000134970_24 (sequence is synthesized)
tggttgtctatactcaactggatatgtgtatgtaaattagaaaatacatacctatccagacataaatgctaagtaacatttttttcttcctccaactacataatttgtagctcatcattt

SEQ ID NO: 315674 - DNA, 120 bp, Artificial Sequence
  ENSG00000134970_25 (sequence is synthesized)
ttccttaatcctttcctaacttgttgcagcagtttgaatttcccagatatttatgtttgaacataatggctcagaatacatatttgaacatcatagttgtatatatttttaaagtagaat

SEQ ID NO: 315675 - DNA, 120 bp, Artificial Sequence
  ENSG00000134970_26 (sequence is synthesized)
aaataatggaaagcaacttgatatacaagtttatactaaaatttcaactgtgtgaagatacattttaaggcattactttgctaataatctacacattcttttttctattaaataaacaaa

SEQ ID NO: 315676 - DNA, 120 bp, Artificial Sequence
  ENSG00000134970_27 (sequence is synthesized)
tggtttgtggttcacagctttcatccaagcttggtgataatcaattttgaaaatacagtggactgaaaagcaaatttattctttcgaagatttcatttaaatctctgtactatgcatttt

SEQ ID NO: 315677 - DNA, 120 bp, Artificial Sequence
  ENSG00000134970_28 (sequence is synthesized)
tgtttcagtttgtaaatgtgtaacatttatagttaaataggacaaagcaggccctatgactattgttttcaaaaaattaatatataaataattcagaggggtttttcatttacttttgaa

SEQ ID NO: 315678 - DNA, 120 bp, Artificial Sequence
  ENSG00000134970_29 (sequence is synthesized)
aagaaatttctttaacaggattgcacctatcaatttcttgtagaataaaaaaaaatctttcaacaaactgactttacttgtttctgtcaggatttaaatctttctaaagctccttataaa

SEQ ID NO: 315679 - DNA, 120 bp, Artificial Sequence
  ENSG00000134970_30 (sequence is synthesized)
cttaaagcctagagtacagttctgtaatgagagtgattatttatttggtattttattaaaatatctgagggactgtccaagaaagaaggtgaaagagaaataccacgtctgtactgccta

SEQ ID NO: 315680 - DNA, 120 bp, Artificial Sequence
  ENSG00000134970_31 (sequence is synthesized)
atttgtaaccttctctttgcattccttactgaaagtttgtgtaggtgaaaagcagttaaatcatcagttgctctaaagaggtcttaatttttaagtaaattacctttagtttgtatatta

SEQ ID NO: 315681 - DNA, 120 bp, Artificial Sequence
  ENSG00000134970_32 (sequence is synthesized)
attaggaacttcatagctgcaagctaagggaatgctatccatcctgaaggattgcctattcaacaaaaggcaattggggtttgtcttattgctgcaggccttgcttctcagtcactgact

SEQ ID NO: 315682 - DNA, 120 bp, Artificial Sequence
  ENSG00000134982_0 (sequence is synthesized)
actggagacagaatggaggtgctgccggactcggaaatggggtccaagggtagccaaggatggctgcagcttcatatgatcagttgttaaagcaagttgaggcactgaagatggagaact

SEQ ID NO: 315683 - DNA, 120 bp, Artificial Sequence
  ENSG00000134982_1 (sequence is synthesized)
caaatcttcgacaagagctagaagataattccaatcatcttacaaaactggaaactgaggcatctaatatgaaggaagtacttaaacaactacaaggaagtattgaagatgaagctatgg

SEQ ID NO: 315684 - DNA, 120 bp, Artificial Sequence
  ENSG00000134982_2 (sequence is synthesized)
cttcttctggacagattgatttattagagcgtcttaaagagcttaacttagatagcagtaatttccctggagtaaaactgcggtcaaaaatgtccctccgttcttatggaagccgggaag

SEQ ID NO: 315685 - DNA, 120 bp, Artificial Sequence
  ENSG00000134982_3 (sequence is synthesized)
gatctgtatcaagccgttctggagagtgcagtcctgttcctatgggttcatttccaagaagagggtttgtaaatggaagcagagaaagtactggatatttagaagaacttgagaaagaga

SEQ ID NO: 315686 - DNA, 120 bp, Artificial Sequence
  ENSG00000134982_4 (sequence is synthesized)
ggtcattgcttcttgctgatcttgacaaagaagaaaaggaaaaagactggtattacgctcaacttcagaatctcactaaaagaatagatagtcttcctttaactgaaaatttttccttac

SEQ ID NO: 315687 - DNA, 120 bp, Artificial Sequence
  ENSG00000134982_5 (sequence is synthesized)
aaacagatatgaccagaaggcaattggaatatgaagcaaggcaaatcagagttgcgatggaagaacaactaggtacctgccaggatatggaaaaacgagcacagcgaagaatagccagaa

SEQ ID NO: 315688 - DNA, 120 bp, Artificial Sequence
  ENSG00000134982_6 (sequence is synthesized)
ttcagcaaatcgaaaaggacatacttcgtatacgacagcttttacagtcccaagcaacagaagcagagaggtcatctcagaacaagcatgaaaccggctcacatgatgctgagcggcaga

SEQ ID NO: 315689 - DNA, 120 bp, Artificial Sequence
  ENSG00000134982_7 (sequence is synthesized)
atgaaggtcaaggagtgggagaaatcaacatggcaacttctggtaatggtcagggttcaactacacgaatggaccatgaaacagccagtgttttgagttctagtagcacacactctgcac

SEQ ID NO: 315690 - DNA, 120 bp, Artificial Sequence
  ENSG00000134982_8 (sequence is synthesized)
ctcgaaggctgacaagtcatctgggaaccaaggtggaaatggtgtattcattgttgtcaatgcttggtactcatgataaggatgatatgtcgcgaactttgctagctatgtctagctccc

SEQ ID NO: 315691 - DNA, 120 bp, Artificial Sequence
  ENSG00000134982_9 (sequence is synthesized)
aagacagctgtatatccatgcgacagtctggatgtcttcctctcctcatccagcttttacatggcaatgacaaagactctgtattgttgggaaattcccggggcagtaaagaggctcggg

SEQ ID NO: 315692 - DNA, 120 bp, Artificial Sequence
  ENSG00000134982_10 (sequence is synthesized)
ccagggccagtgcagcactccacaacatcattcactcacagcctgatgacaagagaggcaggcgtgaaatccgagtccttcatcttttggaacagatacgcgcttactgtgaaacctgtt

SEQ ID NO: 315693 - DNA, 120 bp, Artificial Sequence
  ENSG00000134982_11 (sequence is synthesized)
gggagtggcaggaagctcatgaaccaggcatggaccaggacaaaaatccaatgccagctcctgttgaacatcagatctgtcctgctgtgtgtgttctaatgaaactttcatttgatgaag

SEQ ID NO: 315694 - DNA, 120 bp, Artificial Sequence
  ENSG00000134982_12 (sequence is synthesized)
agcatagacatgcaatgaatgaactagggggactacaggccattgcagaattattgcaagtggactgtgaaatgtatgggcttactaatgaccactacagtattacactaagacgatatg

SEQ ID NO: 315695 - DNA, 120 bp, Artificial Sequence
  ENSG00000134982_13 (sequence is synthesized)
ctggaatggctttgacaaacttgacttttggagatgtagccaacaaggctacgctatgctctatgaaaggctgcatgagagcacttgtggcccaactaaaatctgaaagtgaagacttac

SEQ ID NO: 315696 - DNA, 120 bp, Artificial Sequence
  ENSG00000134982_14 (sequence is synthesized)
agcaggttattgcgagtgttttgaggaatttgtcttggcgagcagatgtaaatagtaaaaagacgttgcgagaagttggaagtgtgaaagcattgatggaatgtgctttagaagttaaaa

SEQ ID NO: 315697 - DNA, 120 bp, Artificial Sequence
  ENSG00000134982_15 (sequence is synthesized)
aggaatcaaccctcaaaagcgtattgagtgccttatggaatttgtcagcacattgcactgagaataaagctgatatatgtgctgtagatggtgcacttgcatttttggttggcactctta

SEQ ID NO: 315698 - DNA, 120 bp, Artificial Sequence
  ENSG00000134982_16 (sequence is synthesized)
cttaccggagccagacaaacactttagccattattgaaagtggaggtgggatattacggaatgtgtccagcttgatagctacaaatgaggaccacaggcaaatcctaagagagaacaact

SEQ ID NO: 315699 - DNA, 120 bp, Artificial Sequence
  ENSG00000134982_17 (sequence is synthesized)
gtctacaaactttattacaacacttaaaatctcatagtttgacaatagtcagtaatgcatgtggaactttgtggaatctctcagcaagaaatcctaaagaccaggaagcattatgggaca

SEQ ID NO: 315700 - DNA, 120 bp, Artificial Sequence
  ENSG00000134982_18 (sequence is synthesized)
tgggggcagttagcatgctcaagaacctcattcattcaaagcacaaaatgattgctatgggaagtgctgcagctttaaggaatctcatggcaaataggcctgcgaagtacaaggatgcca

SEQ ID NO: 315701 - DNA, 120 bp, Artificial Sequence
  ENSG00000134982_19 (sequence is synthesized)
atattatgtctcctggctcaagcttgccatctcttcatgttaggaaacaaaaagccctagaagcagaattagatgctcagcacttatcagaaacttttgacaatatagacaatttaagtc

SEQ ID NO: 315702 - DNA, 120 bp, Artificial Sequence
  ENSG00000134982_20 (sequence is synthesized)
ccaaggcatctcatcgtagtaagcagagacacaagcaaagtctctatggtgattatgtttttgacaccaatcgacatgatgataataggtcagacaattttaatactggcaacatgactg

SEQ ID NO: 315703 - DNA, 120 bp, Artificial Sequence
  ENSG00000134982_21 (sequence is synthesized)
tcctttcaccatatttgaatactacagtgttacccagctcctcttcatcaagaggaagcttagatagttctcgttctgaaaaagatagaagtttggagagagaacgcggaattggtctag

SEQ ID NO: 315704 - DNA, 120 bp, Artificial Sequence
  ENSG00000134982_22 (sequence is synthesized)
gcaactaccatccagcaacagaaaatccaggaacttcttcaaagcgaggtttgcagatctccaccactgcagcccagattgccaaagtcatggaagaagtgtcagccattcatacctctc

SEQ ID NO: 315705 - DNA, 120 bp, Artificial Sequence
  ENSG00000134982_23 (sequence is synthesized)
aggaagacagaagttctgggtctaccactgaattacattgtgtgacagatgagagaaatgcacttagaagaagctctgctgcccatacacattcaaacacttacaatttcactaagtcgg

SEQ ID NO: 315706 - DNA, 120 bp, Artificial Sequence
  ENSG00000134982_24 (sequence is synthesized)
aaaattcaaataggacatgttctatgccttatgccaaattagaatacaagagatcttcaaatgatagtttaaatagtgtcagtagtagtgatggttatggtaaaagaggtcaaatgaaac

SEQ ID NO: 315707 - DNA, 120 bp, Artificial Sequence
  ENSG00000134982_25 (sequence is synthesized)
cctcgattgaatcctattctgaagatgatgaaagtaagttttgcagttatggtcaatacccagccgacctagcccataaaatacatagtgcaaatcatatggatgataatgatggagaac

SEQ ID NO: 315708 - DNA, 120 bp, Artificial Sequence
  ENSG00000134982_26 (sequence is synthesized)
tagatacaccaataaattatagtcttaaatattcagatgagcagttgaactctggaaggcaaagtccttcacagaatgaaagatgggcaagacccaaacacataatagaagatgaaataa

SEQ ID NO: 315709 - DNA, 120 bp, Artificial Sequence
  ENSG00000134982_27 (sequence is synthesized)
aacaaagtgagcaaagacaatcaaggaatcaaagtacaacttatcctgtttatactgagagcactgatgataaacacctcaagttccaaccacattttggacagcaggaatgtgtttctc

SEQ ID NO: 315710 - DNA, 120 bp, Artificial Sequence
  ENSG00000134982_28 (sequence is synthesized)
catacaggtcacggggagccaatggttcagaaacaaatcgagtgggttctaatcatggaattaatcaaaatgtaagccagtctttgtgtcaagaagatgactatgaagatgataagccta

SEQ ID NO: 315711 - DNA, 120 bp, Artificial Sequence
  ENSG00000134982_29 (sequence is synthesized)
ccaattatagtgaacgttactctgaagaagaacagcatgaagaagaagagagaccaacaaattatagcataaaatataatgaagagaaacgtcatgtggatcagcctattgattatagtt

SEQ ID NO: 315712 - DNA, 120 bp, Artificial Sequence
  ENSG00000134982_30 (sequence is synthesized)
taaaatatgccacagatattccttcatcacagaaacagtcattttcattctcaaagagttcatctggacaaagcagtaaaaccgaacatatgtcttcaagcagtgagaatacgtccacac

SEQ ID NO: 315713 - DNA, 120 bp, Artificial Sequence
  ENSG00000134982_31 (sequence is synthesized)
cttcatctaatgccaagaggcagaatcagctccatccaagttctgcacagagtagaagtggtcagcctcaaaaggctgccacttgcaaagtttcttctattaaccaagaaacaatacaga

SEQ ID NO: 315714 - DNA, 120 bp, Artificial Sequence
  ENSG00000134982_32 (sequence is synthesized)
cttattgtgtagaagatactccaatatgtttttcaagatgtagttcattatcatctttgtcatcagctgaagatgaaataggatgtaatcagacgacacaggaagcagattctgctaata

SEQ ID NO: 315715 - DNA, 120 bp, Artificial Sequence
  ENSG00000134982_33 (sequence is synthesized)
ccctgcaaatagcagaaataaaagaaaagattggaactaggtcagctgaagatcctgtgagcgaagttccagcagtgtcacagcaccctagaaccaaatccagcagactgcagggttcta

SEQ ID NO: 315716 - DNA, 120 bp, Artificial Sequence
  ENSG00000134982_34 (sequence is synthesized)
gtttatcttcagaatcagccaggcacaaagctgttgaattttcttcaggagcgaaatctccctccaaaagtggtgctcagacacccaaaagtccacctgaacactatgttcaggagaccc

SEQ ID NO: 315717 - DNA, 120 bp, Artificial Sequence
  ENSG00000134982_35 (sequence is synthesized)
cactcatgtttagcagatgtacttctgtcagttcacttgatagttttgagagtcgttcgattgccagctccgttcagagtgaaccatgcagtggaatggtaagtggcattataagcccca

SEQ ID NO: 315718 - DNA, 120 bp, Artificial Sequence
  ENSG00000134982_36 (sequence is synthesized)
gtgatcttccagatagccctggacaaaccatgccaccaagcagaagtaaaacacctccaccacctcctcaaacagctcaaaccaagcgagaagtacctaaaaataaagcacctactgctg

SEQ ID NO: 315719 - DNA, 120 bp, Artificial Sequence
  ENSG00000134982_37 (sequence is synthesized)
aaaagagagagagtggacctaagcaagctgcagtaaatgctgcagttcagagggtccaggttcttccagatgctgatactttattacattttgccacggaaagtactccagatggatttt

SEQ ID NO: 315720 - DNA, 120 bp, Artificial Sequence
  ENSG00000134982_38 (sequence is synthesized)
cttgttcatccagcctgagtgctctgagcctcgatgagccatttatacagaaagatgtggaattaagaataatgcctccagttcaggaaaatgacaatgggaatgaaacagaatcagagc

SEQ ID NO: 315721 - DNA, 120 bp, Artificial Sequence
  ENSG00000134982_39 (sequence is synthesized)
agcctaaagaatcaaatgaaaaccaagagaaagaggcagaaaaaactattgattctgaaaaggacctattagatgattcagatgatgatgatattgaaatactagaagaatgtattattt

SEQ ID NO: 315722 - DNA, 120 bp, Artificial Sequence
  ENSG00000134982_40 (sequence is synthesized)
ctgccatgccaacaaagtcatcacgtaaagcaaaaaagccagcccagactgcttcaaaattacctccacctgtggcaaggaaaccaagtcagctgcctgtgtacaaacttctaccatcac

SEQ ID NO: 315723 - DNA, 120 bp, Artificial Sequence
  ENSG00000134982_41 (sequence is synthesized)
aaaacaggttgcaaccccaaaagcatgttagttttacaccgggggatgatatgccacgggtgtattgtgttgaagggacacctataaacttttccacagctacatctctaagtgatctaa

SEQ ID NO: 315724 - DNA, 120 bp, Artificial Sequence
  ENSG00000134982_42 (sequence is synthesized)
caatcgaatcccctccaaatgagttagctgctggagaaggagttagaggaggggcacagtcaggtgaatttgaaaaacgagataccattcctacagaaggcagaagtacagatgaggctc

SEQ ID NO: 315725 - DNA, 120 bp, Artificial Sequence
  ENSG00000134982_43 (sequence is synthesized)
aaggaggaaaaacctcatctgtaaccatacctgaattggatgacaataaagcagaggaaggtgatattcttgcagaatgcattaattctgctatgcccaaagggaaaagtcacaagcctt

SEQ ID NO: 315726 - DNA, 120 bp, Artificial Sequence
  ENSG00000134982_44 (sequence is synthesized)
aggtccagcaagcatctgcgtcttcttctgcacccaacaaaaatcagttagatggtaagaaaaagaaaccaacttcaccagtaaaacctataccacaaaatactgaatataggacacgtg

SEQ ID NO: 315727 - DNA, 120 bp, Artificial Sequence
  ENSG00000134982_45 (sequence is synthesized)
taagaaaaaatgcagactcaaaaaataatttaaatgctgagagagttttctcagacaacaaagattcaaagaaacagaatttgaaaaataattccaaggtcttcaatgataagctcccaa

SEQ ID NO: 315728 - DNA, 120 bp, Artificial Sequence
  ENSG00000134982_46 (sequence is synthesized)
ataatgaagatagagtcagaggaagttttgcttttgattcacctcatcattacacgcctattgaaggaactccttactgtttttcacgaaatgattctttgagttctctagattttgatg

SEQ ID NO: 315729 - DNA, 120 bp, Artificial Sequence
  ENSG00000134982_47 (sequence is synthesized)
atgatgatgttgacctttccagggaaaaggctgaattaagaaaggcaaaagaaaataaggaatcagaggctaaagttaccagccacacagaactaacctccaaccaacaatcagctaata

SEQ ID NO: 315730 - DNA, 120 bp, Artificial Sequence
  ENSG00000134982_48 (sequence is synthesized)
agacacaagctattgcaaagcagccaataaatcgaggtcagcctaaacccatacttcagaaacaatccacttttccccagtcatccaaagacataccagacagaggggcagcaactgatg

SEQ ID NO: 315731 - DNA, 120 bp, Artificial Sequence
  ENSG00000134982_49 (sequence is synthesized)
aaaagttacagaattttgctattgaaaatactccggtttgcttttctcataattcctctctgagttctctcagtgacattgaccaagaaaacaacaataaagaaaatgaacctatcaaag

SEQ ID NO: 315732 - DNA, 120 bp, Artificial Sequence
  ENSG00000134982_50 (sequence is synthesized)
agactgagccccctgactcacagggagaaccaagtaaacctcaagcatcaggctatgctcctaaatcatttcatgttgaagataccccagtttgtttctcaagaaacagttctctcagtt

SEQ ID NO: 315733 - DNA, 120 bp, Artificial Sequence
  ENSG00000134982_51 (sequence is synthesized)
ctcttagtattgactctgaagatgacctgttgcaggaatgtataagctccgcaatgccaaaaaagaaaaagccttcaagactcaagggtgataatgaaaaacatagtcccagaaatatgg

SEQ ID NO: 315734 - DNA, 120 bp, Artificial Sequence
  ENSG00000134982_52 (sequence is synthesized)
gtggcatattaggtgaagatctgacacttgatttgaaagatatacagagaccagattcagaacatggtctatcccctgattcagaaaattttgattggaaagctattcaggaaggtgcaa

SEQ ID NO: 315735 - DNA, 120 bp, Artificial Sequence
  ENSG00000134982_53 (sequence is synthesized)
attccatagtaagtagtttacatcaagctgctgctgctgcatgtttatctagacaagcttcgtctgattcagattccatcctttccctgaaatcaggaatctctctgggatcaccatttc

SEQ ID NO: 315736 - DNA, 120 bp, Artificial Sequence
  ENSG00000134982_54 (sequence is synthesized)
atcttacacctgatcaagaagaaaaaccctttacaagtaataaaggcccacgaattctaaaaccaggggagaaaagtacattggaaactaaaaagatagaatctgaaagtaaaggaatca

SEQ ID NO: 315737 - DNA, 120 bp, Artificial Sequence
  ENSG00000134982_55 (sequence is synthesized)
aaggaggaaaaaaagtttataaaagtttgattactggaaaagttcgatctaattcagaaatttcaggccaaatgaaacagccccttcaagcaaacatgccttcaatctctcgaggcagga

SEQ ID NO: 315738 - DNA, 120 bp, Artificial Sequence
  ENSG00000134982_56 (sequence is synthesized)
caatgattcatattccaggagttcgaaatagctcctcaagtacaagtcctgtttctaaaaaaggcccaccccttaagactccagcctccaaaagccctagtgaaggtcaaacagccacca

SEQ ID NO: 315739 - DNA, 120 bp, Artificial Sequence
  ENSG00000134982_57 (sequence is synthesized)
cttctcctagaggagccaagccatctgtgaaatcagaattaagccctgttgccaggcagacatcccaaataggtgggtcaagtaaagcaccttctagatcaggatctagagattcgaccc

SEQ ID NO: 315740 - DNA, 120 bp, Artificial Sequence
  ENSG00000134982_58 (sequence is synthesized)
cttcaagacctgcccagcaaccattaagtagacctatacagtctcctggccgaaactcaatttcccctggtagaaatggaataagtcctcctaacaaattatctcaacttccaaggacat

SEQ ID NO: 315741 - DNA, 120 bp, Artificial Sequence
  ENSG00000134982_59 (sequence is synthesized)
catcccctagtactgcttcaactaagtcctcaggttctggaaaaatgtcatatacatctccaggtagacagatgagccaacagaaccttaccaaacaaacaggtttatccaagaatgcca

SEQ ID NO: 315742 - DNA, 120 bp, Artificial Sequence
  ENSG00000134982_60 (sequence is synthesized)
gtagtattccaagaagtgagtctgcctccaaaggactaaatcagatgaataatggtaatggagccaataaaaaggtagaactttctagaatgtcttcaactaaatcaagtggaagtgaat

SEQ ID NO: 315743 - DNA, 120 bp, Artificial Sequence
  ENSG00000134982_61 (sequence is synthesized)
ctgatagatcagaaagacctgtattagtacgccagtcaactttcatcaaagaagctccaagcccaaccttaagaagaaaattggaggaatctgcttcatttgaatctctttctccatcat

SEQ ID NO: 315744 - DNA, 120 bp, Artificial Sequence
  ENSG00000134982_62 (sequence is synthesized)
ctagaccagcttctcccactaggtcccaggcacaaactccagttttaagtccttcccttcctgatatgtctctatccacacattcgtctgttcaggctggtggatggcgaaaactcccac

SEQ ID NO: 315745 - DNA, 120 bp, Artificial Sequence
  ENSG00000134982_63 (sequence is synthesized)
ctaatctcagtcccactatagagtataatgatggaagaccagcaaagcgccatgatattgcacggtctcattctgaaagtccttctagacttccaatcaataggtcaggaacctggaaac

SEQ ID NO: 315746 - DNA, 120 bp, Artificial Sequence
  ENSG00000134982_64 (sequence is synthesized)
gtgagcacagcaaacattcatcatcccttcctcgagtaagcacttggagaagaactggaagttcatcttcaattctttctgcttcatcagaatccagtgaaaaagcaaaaagtgaggatg

SEQ ID NO: 315747 - DNA, 120 bp, Artificial Sequence
  ENSG00000134982_65 (sequence is synthesized)
aaaaacatgtgaactctatttcaggaaccaaacaaagtaaagaaaaccaagtatccgcaaaaggaacatggagaaaaataaaagaaaatgaattttctcccacaaatagtacttctcaga

SEQ ID NO: 315748 - DNA, 120 bp, Artificial Sequence
  ENSG00000134982_66 (sequence is synthesized)
ccgtttcctcaggtgctacaaatggtgctgaatcaaagactctaatttatcaaatggcacctgctgtttctaaaacagaggatgtttgggtgagaattgaggactgtcccattaacaatc

SEQ ID NO: 315749 - DNA, 120 bp, Artificial Sequence
  ENSG00000134982_67 (sequence is synthesized)
ctagatctggaagatctcccacaggtaatactcccccggtgattgacagtgtttcagaaaaggcaaatccaaacattaaagattcaaaagataatcaggcaaaacaaaatgtgggtaatg

SEQ ID NO: 315750 - DNA, 120 bp, Artificial Sequence
  ENSG00000134982_68 (sequence is synthesized)
gcagtgttcccatgcgtaccgtgggtttggaaaatcgcctgaactcctttattcaggtggatgcccctgaccaaaaaggaactgagataaaaccaggacaaaataatcctgtccctgtat

SEQ ID NO: 315751 - DNA, 120 bp, Artificial Sequence
  ENSG00000134982_69 (sequence is synthesized)
cagagactaatgaaagttctatagtggaacgtaccccattcagttctagcagctcaagcaaacacagttcacctagtgggactgttgctgccagagtgactccttttaattacaacccaa

SEQ ID NO: 315752 - DNA, 120 bp, Artificial Sequence
  ENSG00000134982_70 (sequence is synthesized)
gccctaggaaaagcagcgcagatagcacttcagctcggccatctcagatcccaactccagtgaataacaacacaaagaagcgagattccaaaactgacagcacagaatccagtggaaccc

SEQ ID NO: 315753 - DNA, 120 bp, Artificial Sequence
  ENSG00000134982_71 (sequence is synthesized)
aaagtcctaagcgccattctgggtcttaccttgtgacatctgtttaaaagagaggaagaatgaaactaagaaaattctatgttaattacaactgctatatagacattttgtttcaaatga

SEQ ID NO: 315754 - DNA, 120 bp, Artificial Sequence
  ENSG00000134982_72 (sequence is synthesized)
aactttaaaagactgaaaaattttgtaaataggtttgattcttgttagagggtttttgttctggaagccatatttgatagtatactttgtcttcactggtcttattttgggaggcactct

SEQ ID NO: 315755 - DNA, 120 bp, Artificial Sequence
  ENSG00000134982_73 (sequence is synthesized)
tgatggttaggaaaaaaatagtaaagccaagtatgtttgtacagtatgttttacatgtatttaaagtagcatcccatcccaacttcctttaattattgcttgtcttaaaataatgaacac

SEQ ID NO: 315756 - DNA, 120 bp, Artificial Sequence
  ENSG00000134982_74 (sequence is synthesized)
tacagatagaaaatatgatatattgctgttatcaatcatttctagattataaactgactaaacttacatcagggaaaaattggtatttatgcaaaaaaaaatgtttttgtccttgtgagt

SEQ ID NO: 315757 - DNA, 120 bp, Artificial Sequence
  ENSG00000134982_75 (sequence is synthesized)
ccatctaacatcataattaatcatgtggctgtgaaattcacagtaatatggttcccgatgaacaagtttacccagcctgctttgctttactgcatgaatgaaactgatggttcaatttca

SEQ ID NO: 315758 - DNA, 120 bp, Artificial Sequence
  ENSG00000134982_76 (sequence is synthesized)
gaagtaatgattaacagttatgtggtcacatgatgtgcatagagatagctacagtgtaataatttacactattttgtgctccaaacaaaacaaaaatctgtgtaactgtaaaacattgaa

SEQ ID NO: 315759 - DNA, 120 bp, Artificial Sequence
  ENSG00000134982_77 (sequence is synthesized)
tgaaactattttacctgaactagattttatctgaaagtaggtagaatttttgctatgctgtaatttgttgtatattctggtatttgaggtgagatggctgctcttttattaatgagacat

SEQ ID NO: 315760 - DNA, 120 bp, Artificial Sequence
  ENSG00000134982_78 (sequence is synthesized)
gaattgtgtctcaacagaaactaaatgaacatttcagaataaattattgctgtatgtaaactgttactgaaattggtatttgtttgaagggtcttgtttcacatttgtattaataattgt

SEQ ID NO: 315761 - DNA, 120 bp, Artificial Sequence
  ENSG00000134982_79 (sequence is synthesized)
ttaaaatgcctcttttaaaagcttatataaatttttttcttcagcttctatgcattaagagtaaaattcctcttactgtaataaaaacaattgaagaagactgttgccacttaaccattc

SEQ ID NO: 315762 - DNA, 120 bp, Artificial Sequence
  ENSG00000134982_80 (sequence is synthesized)
catgcgttggcacttatctattcctgaaatttcttttatgtgattagctcatcttgatttttaatatttttccacttaaacttttttttcttactccactggagctcagtaaaagtaaat

SEQ ID NO: 315763 - DNA, 120 bp, Artificial Sequence
  ENSG00000134982_81 (sequence is synthesized)
tcatgtaatagcaatgcaagcagcctagcacagactaagcattgagcataataggcccacataatttcctctttcttaatattatagaattctgtacttgaaattgattcttagacattg

SEQ ID NO: 315764 - DNA, 120 bp, Artificial Sequence
  ENSG00000134982_82 (sequence is synthesized)
cagtctcttcgaggctttacagtgtaaactgtcttgccccttcatcttcttgttgcaactgggtctgacatgaacactttttatcaccctgtatgttagggcaagatctcagcagtgaag

SEQ ID NO: 315765 - DNA, 120 bp, Artificial Sequence
  ENSG00000134982_83 (sequence is synthesized)
tataatcagcactttgccatgctcagaaaattcaaatcacatggaactttagaggtagatttaatacgattaagatattcagaagtatattttagaatccctgcctgttaaggaaacttt

SEQ ID NO: 315766 - DNA, 120 bp, Artificial Sequence
  ENSG00000134982_84 (sequence is synthesized)
atttgtggtaggtacagttctggggtacatgttaagtgtccccttatacagtggagggaagtcttccttcctgaaggaaaataaactgacacttattaactaagataatttacttaatat

SEQ ID NO: 315767 - DNA, 120 bp, Artificial Sequence
  ENSG00000134982_85 (sequence is synthesized)
atcttccctgatttgttttaaaagatcagagggtgactgatgatacatgcatacatatttgttgaataaatgaaaatttatttttagtgataagattcatacactctgtatttggggagg

SEQ ID NO: 315768 - DNA, 120 bp, Artificial Sequence
  ENSG00000134982_86 (sequence is synthesized)
gaaaacctttttaagcatggtggggcactcagataggagtgaatacacctacctggtgccttgaaaatcacatcaagtagttaattatctaccccttacctgtgtttataacttccaggt

SEQ ID NO: 315769 - DNA, 120 bp, Artificial Sequence
  ENSG00000134982_87 (sequence is synthesized)
aatgagaatgattttttttaaagctaaaatgccagtaaataaaagtgctatgacttgagctaagatatttgactccaatgcctgtactgtgtctactgcaccactttgtaaacacttcaa

SEQ ID NO: 315770 - DNA, 120 bp, Artificial Sequence
  ENSG00000134982_88 (sequence is synthesized)
tttactatctttgaaatgattgacctttaaatttttgccaaatgttatctgaaattgtctatgaataccatctacttctgttgttttcccaggcttccataaacaatggagatacatgca

SEQ ID NO: 315771 - DNA, 120 bp, Artificial Sequence
  ENSG00000134982_89 (sequence is synthesized)
gaatggaggtgctgccggactcggaaatggggacacatgcattggtggccaaaagagagaggagacaaaaccgctgcagatggctgatgtgaatctagtggaaagagctactggggatga

SEQ ID NO: 315772 - DNA, 120 bp, Artificial Sequence
  ENSG00000134982_90 (sequence is synthesized)
caagatggcggagggcaagtagcaagggggcggggtgtggccgccggaagcctagccgctgctcgggggggacctgcgggctcaggcccgggagctgcggaccgaggttggctcgatgct

SEQ ID NO: 315773 - DNA, 120 bp, Artificial Sequence
  ENSG00000134982_91 (sequence is synthesized)
gttcccaggtactgttgttggctgttggtgaggaaggtgaagcactcagttgccttctcgggcctcggcgccccctatgtacgcctccctgggctcgggtccggtcgcccctttgcccgc

SEQ ID NO: 315774 - DNA, 120 bp, Artificial Sequence
  ENSG00000134982_92 (sequence is synthesized)
ttctgtaccaccctcagttctcgggtcctggagcaccggcggcagcaggagctgcgtccggcaggagacgaagagcccgggcggcgctcgtacttctggccactgggcgagcgtctggca

SEQ ID NO: 315775 - DNA, 120 bp, Artificial Sequence
  ENSG00000134982_93 (sequence is synthesized)
aaacatttagtactataatatgaatttcatgtttggcttttttttgctgccttcttttagccatgagatttcctaatttcttacctgtgtattattcagtactataatatgaatttcatg

SEQ ID NO: 315776 - DNA, 120 bp, Artificial Sequence
  ENSG00000134982_94 (sequence is synthesized)
tttagctttttttgctgccttcttttagccatgagattccctaatttcttttttgagatggggtctctttctctcgcccaggctggagtgcagtggtctgatcttggctcactgcaacct

SEQ ID NO: 315777 - DNA, 66 bp, Artificial Sequence
  ENSG00000134982_95 (sequence is synthesized)
ctcctgagtagctgggattacagtgcacgccaccactcccgggaactactcctgactttgtgatct

SEQ ID NO: 315778 - DNA, 120 bp, Artificial Sequence
  ENSG00000134982_96 (sequence is synthesized)
ctcccaaagtgctgggattataggcgcaagccatcacgcccagcctagattccctaatttcttacctgtttatctcaccagtccatagttttagagtaccgcaaactcctaaagtactaa

SEQ ID NO: 315779 - DNA, 120 bp, Artificial Sequence
  ENSG00000134982_97 (sequence is synthesized)
atagttttagagtaccgcaaactcctaaagtactaaggtagaaaagattatataaggggatttaatgtatatcagggtttctctgcctcagcactatagacatttttgaccagataattc

SEQ ID NO: 315780 - DNA, 120 bp, Artificial Sequence
  ENSG00000134982_98 (sequence is synthesized)
ttcgttttgctggggctgacctgtgcactgtagattgtttagcagcatccctggcctttgccaactggctgccagtataccctccccctagttatgccgatcaaaattgtctccagatac

SEQ ID NO: 315781 - DNA, 120 bp, Artificial Sequence
  ENSG00000134982_99 (sequence is synthesized)
tgtcagatgtctgtgggagggaggaaggacaacgtcaccaccaattaagaatcactggtataagtgtacctttgtgctctccaaacctcaatcccctcaaattttgatggtcaacttatc

SEQ ID NO: 315782 - DNA, 120 bp, Artificial Sequence
  ENSG00000134982_100 (sequence is synthesized)
aagaggtgatcagagccaagggtgaggaatcatcaaataataatttgtttacagaaggaaatatctccaggcagtccatctgcttcagaaactaggctaaatttaaaaagaaaaaaaaaa

SEQ ID NO: 315783 - DNA, 120 bp, Artificial Sequence
  ENSG00000134982_101 (sequence is synthesized)
ctttcatttgatgaagagcatagacatgcaatgaatgaactaggtaggaaggctacccggggcatttcatcacaggagctagggcaggggctttcagggggactacaggccattgcagaa

SEQ ID NO: 315784 - DNA, 120 bp, Artificial Sequence
  ENSG00000134982_102 (sequence is synthesized)
atgaaggtcaaggagtgggagaaatcaacatggcaacttctggtaatggtcagatagaaaagatgaggatgtttgaatgctgatgggaaggagccagtagagaagagagttgaagatccc

SEQ ID NO: 315785 - DNA, 120 bp, Artificial Sequence
  ENSG00000134982_103 (sequence is synthesized)
taagatcaaagagaaatggagagagaaaggatccagagcacatctaaagggatggaccttagataggaggaggggaactctgatgtcacagcaaaaggtggcgatggatatatacgcagg

SEQ ID NO: 315786 - DNA, 120 bp, Artificial Sequence
  ENSG00000134986_0 (sequence is synthesized)
ctccctcccccaatcccccctccccccccaatctgtctttctagcatgttgccctttttcaaccacatttgtgtttcaggtgtagagaggagagagagtgaacagggagcggggcttttg

SEQ ID NO: 315787 - DNA, 120 bp, Artificial Sequence
  ENSG00000134986_1 (sequence is synthesized)
tctgttggtctccctggactgaagagagggagaatagaagcccaagactaagattctcaaaatggtttattacccagaactctttgtctgggtcagtcaagaaccatttccaaacaagga

SEQ ID NO: 315788 - DNA, 120 bp, Artificial Sequence
  ENSG00000134986_2 (sequence is synthesized)
catggagggaaggcttcctaagggaagacttcctgtcccaaaggaagtgaaccgcaagaagaacgatgagacaaacgctgcctccctgactccactgggcagcagtgaactccgctcccc

SEQ ID NO: 315789 - DNA, 120 bp, Artificial Sequence
  ENSG00000134986_3 (sequence is synthesized)
aagaatcagttacctccactttttttaatcgtaacacctccatttgtattacatatggtgtatgggtattgatgaggtcatggtatcatatatgggatttttttctgtgtaaatcatcaa

SEQ ID NO: 315790 - DNA, 120 bp, Artificial Sequence
  ENSG00000134986_4 (sequence is synthesized)
gtataagaagaaactatgggactctgagccttgctttagagaatttacagtggacaaataggtgtcatcaaaccagtttttaatcattctgactcaagtgaaaacgctcagaatttcaca

SEQ ID NO: 315791 - DNA, 120 bp, Artificial Sequence
  ENSG00000134986_5 (sequence is synthesized)
ctgtgaatccacgtttacaacccttacaggtgggccttcaggcctggttcgctacaacaatgtcttccacaactcaaactcccaccgcgctcacacaaccggtccactcctgccttttca

SEQ ID NO: 315792 - DNA, 120 bp, Artificial Sequence
  ENSG00000134986_6 (sequence is synthesized)
ctcacacagctcccgactgcttcttgcagaggctgagagtcccccccccaccttttttttcatttagatgtaacaaacctagtagtttatgttcatcaattgtctgtatatctctatatt

SEQ ID NO: 315793 - DNA, 120 bp, Artificial Sequence
  ENSG00000134986_7 (sequence is synthesized)
ttatccatgtactcttttgatgtatagaagtagtttgaaactcattgtttccttgtggtaagtgaccgagatgctgccacaggacctgagacactgatgaatggtgctattttggacttt

SEQ ID NO: 315794 - DNA, 120 bp, Artificial Sequence
  ENSG00000134986_8 (sequence is synthesized)
ctctagactggattgacttgttttccttgtgtcttcagtgtggctttcttcctcagtgttgtaggttgagcgaatgctaccagagtgtgagagaccattgtctcgttggctggcgctcac

SEQ ID NO: 315795 - DNA, 120 bp, Artificial Sequence
  ENSG00000134986_9 (sequence is synthesized)
ggacatgcagtcacggtagcgggagcaatcacaaaactgtaatttacttaccaaatctcttcctttccgtagcctcgcctgcctgacttagagaaagaaaagcaataattttacaggcat

SEQ ID NO: 315796 - DNA, 120 bp, Artificial Sequence
  ENSG00000134986_10 (sequence is synthesized)
tttgaggtgtctctttgggttctttctgtttgaaaggatatttgtcgaaaaaaagagcaaaaccgttttaaataaactccccctggaaaaaaacccaaaacactggcatctgagtgggaa

SEQ ID NO: 315797 - DNA, 120 bp, Artificial Sequence
  ENSG00000134986_11 (sequence is synthesized)
tatgaaaatgacaccttttccaaatattaaattggaaaacaaggtctacaaaatcatgatacttttttaaaaggcagagcattcttttttcggcaattttgataagcaaggtgtagattt

SEQ ID NO: 315798 - DNA, 120 bp, Artificial Sequence
  ENSG00000134986_12 (sequence is synthesized)
acatttttgtccttgctcccaacgaaatggataaacaaaaataaattaccatctactcatggaatgttgttgtgttagccagtctgaaagcccaccttaatttttatataactgtcttta

SEQ ID NO: 315799 - DNA, 120 bp, Artificial Sequence
  ENSG00000134986_13 (sequence is synthesized)
gctcttcttttgacagggcaggccttgttctgaactgtttcgcttctgactgttaaacaccgatgacgcatgcactgcacttcttcgttttcttcttgctcccccattggcctgagtttc

SEQ ID NO: 315800 - DNA, 120 bp, Artificial Sequence
  ENSG00000134986_14 (sequence is synthesized)
ttgtgcattactcctctccctccttcgttagaataggtatatcagctgtgtaaatagagcaagaaaacagtattctgcatctgtggcatttatgtagagttgcagttgtgtactgctgaa

SEQ ID NO: 315801 - DNA, 120 bp, Artificial Sequence
  ENSG00000134986_15 (sequence is synthesized)
aatgcaggcttttgtaacagtgtgatctttactgatgcactcatgacaagtacccaatgtattttagctattttagtagtatttgttcaataaatacgcaagctgtaaggtaactgtctg

SEQ ID NO: 315802 - DNA, 120 bp, Artificial Sequence
  ENSG00000134986_16 (sequence is synthesized)
ggctcatcattgaagaggcctagttttgaatgtcttctctggttcttgctaattcatgtgtttccagagccccagaagtcaggccagcaaacccaagggcaaatatcaaaagagagagaa

SEQ ID NO: 315803 - DNA, 120 bp, Artificial Sequence
  ENSG00000134986_17 (sequence is synthesized)
tcagctctgcctttcatgcgttttcccttttgaggattttatgagattaggggctaggcagtggctcattaagatggtatttgcagagctgcctctggacacaaagcagaattagaccaa

SEQ ID NO: 315804 - DNA, 120 bp, Artificial Sequence
  ENSG00000134986_18 (sequence is synthesized)
gatccttttatttctacactttttctcccttccaaggcattcccatacgcttcaaaacttactctttctcactccttgccattaagacccactctgtggtattctttaagacccactctg

SEQ ID NO: 315805 - DNA, 120 bp, Artificial Sequence
  ENSG00000134986_19 (sequence is synthesized)
tggtattctttctttttccctgccaaaagagatctgacctcccttcttcatggaatatgtgcacttttcctcagacaaaaagcttaaacttttgtaagaggataaaaatttgagacagaa

SEQ ID NO: 315806 - DNA, 120 bp, Artificial Sequence
  ENSG00000134986_20 (sequence is synthesized)
agtctggctcctaggcggctgcacagtggcagcaaggctggggcgctggctccgcgccagctccatcagaattagctcattgttcactagcaccctagcgggagagagagggaaagggag

SEQ ID NO: 315807 - DNA, 120 bp, Artificial Sequence
  ENSG00000134986_21 (sequence is synthesized)
actagcaccctagcgggagagagagggaaagggagagagagagactcttagagaaagagagagacacacacactcttggagagagagcgcgaggcagggagatgatctcctcctcctttt

SEQ ID NO: 315808 - DNA, 120 bp, Artificial Sequence
  ENSG00000134986_22 (sequence is synthesized)
actctgaggcattacactacacggtggaaggctgattcctattctgtcgtcttgattgcaaatatactgccagtagtatgtctgggaacaaagagcagccagaaaacaatctatttttat

SEQ ID NO: 315809 - DNA, 120 bp, Artificial Sequence
  ENSG00000134986_23 (sequence is synthesized)
cacttggttctacttttaagttgctaaaccttttgaactcatgcaatttaaagatgaaccaaacactaagaatagcccaggactctgcaaagccaagtaccagggattcctttgtccctt

SEQ ID NO: 315810 - DNA, 120 bp, Artificial Sequence
  ENSG00000134986_24 (sequence is synthesized)
agttaagcctataggccacttggaaagctctttcagaaatcccagtagttaacaataatttgcatgtaacttatcttaaccacagaaaatggttattcgtctgtaacctctaaagaggca

SEQ ID NO: 315811 - DNA, 120 bp, Artificial Sequence
  ENSG00000134986_25 (sequence is synthesized)
aggaagtcaactatccaccatcttgtcggatccatgcagtcttagcagactttcttcacaccatggatgattgaatccactactctttgcatgtttaaagacagagaaggcagattctct

SEQ ID NO: 315812 - DNA, 120 bp, Artificial Sequence
  ENSG00000134986_26 (sequence is synthesized)
gcagccacaggacctctgggcccggccttcaggggcgctccccgccccgggcttccccgcggaagggagtggggcgcgcgtacccagctgaggggcagggtccgacccgaggccgtgtgc

SEQ ID NO: 315813 - DNA, 120 bp, Artificial Sequence
  ENSG00000134986_27 (sequence is synthesized)
gtgcaaatgcatccttcgcggactctttgtgtgtctgagcgcggctccgcgccgccgcaggcaccattttctgcttcgctcaggacaggcacataaaaggaaggcggctgccgcccgtcg

SEQ ID NO: 315814 - DNA, 120 bp, Artificial Sequence
  ENSG00000134986_28 (sequence is synthesized)
cggggcgcgggtgcggggtgtcggggcgcgcgcgcctgttggccgctcgccgacggggcccagagccgccgattcctgccgagtgtagagaggagagagagtgaacagggagcggggctt

SEQ ID NO: 315815 - DNA, 120 bp, Artificial Sequence
  ENSG00000134986_29 (sequence is synthesized)
agacacacacactcttggagagagagcgcgaggcagggagatgatctcctcctcctttttccaaggctgcacttcttggaagtgtagagaggagagagagtgaacagggagcggggcttt

SEQ ID NO: 315816 - DNA, 120 bp, Artificial Sequence
  ENSG00000134986_30 (sequence is synthesized)
agaatgactgttgccagcatctagaaggaattacttttccaggcagtgcaatcatgctatttatcaaaagaaacattggacaatcagaatgggctgcagagctgtgtcctgagctgtctg

SEQ ID NO: 315817 - DNA, 120 bp, Artificial Sequence
  ENSG00000134986_31 (sequence is synthesized)
gccaactcccggcaagaagcttctttgtcctttaaagactgaactttatcctcaagcagtaacaggactggaatgaaaggagtttggaattattctgctttgagccgaagagaagatgaa

SEQ ID NO: 315818 - DNA, 120 bp, Artificial Sequence
  ENSG00000134986_32 (sequence is synthesized)
acacgaacccagaggagcaggatgacagacagagtcccttgttccaaatgtttccaggttcactgccagatttctgttctgaattgtgtttattacccagaactctttgtctgggtcagt

SEQ ID NO: 315819 - DNA, 120 bp, Artificial Sequence
  ENSG00000134986_33 (sequence is synthesized)
aggttcaggagaaaggaatcagctccttgcaaggtttctgatactgtccttcctgaaatgaagagctcctctaccttaacccagcctgctaagactgctacagcaagattgacagctggt

SEQ ID NO: 315820 - DNA, 120 bp, Artificial Sequence
  ENSG00000134986_34 (sequence is synthesized)
cagattgctgtcctcataaaagcatggtcatcaccttcagctgggctctcaaatggaacagccgggcaatctttgtttccctgattgtaacattggaataaaggaaaatgtacaagactc

SEQ ID NO: 315821 - DNA, 120 bp, Artificial Sequence
  ENSG00000134986_35 (sequence is synthesized)
atgaagagctgaaatgttcacgaatatcgagcaaaaccagagttaactaaatggactgaactcagaaagctgaagaaacctttttacttttgcttggaatattggtgatccttttttagt

SEQ ID NO: 315822 - DNA, 120 bp, Artificial Sequence
  ENSG00000134986_36 (sequence is synthesized)
ttttcagagccaaggaaacttattttgagctatttatggcctttaataattaagtaaggtatacactcctgtgatcaagatttggagcatgtttgtttctctctgcctggtttctctaga

SEQ ID NO: 315823 - DNA, 87 bp, Artificial Sequence
  ENSG00000134986_37 (sequence is synthesized)
actgtgagtatgtaagactccatttttcttttgcaacaggacacagttggaaaaactggtaattttaccaaggctttgactggaagg

SEQ ID NO: 315824 - DNA, 120 bp, Artificial Sequence
  ENSG00000134986_38 (sequence is synthesized)
ctggaagggtatgcttccctttcaggagtcaatctagatttgcagagtcaataaaagcctagtggggaaactagcctcatactatcacctacacagtccctgtacagggttactgacctg

SEQ ID NO: 315825 - DNA, 77 bp, Artificial Sequence
  ENSG00000134986_39 (sequence is synthesized)
actatcacctacacagtccctgtacagggttactgacctgtggtcagtaaagaatgtcactaacagctctaggagct

SEQ ID NO: 315826 - DNA, 120 bp, Artificial Sequence
  ENSG00000134986_40 (sequence is synthesized)
agctaaagtctgttttgcaaaccactcagttcctatgatgatttgttttttaataaatatgaggactggagagagagaaatcatatttgaaaacttatcatacatttgtcattaaattct

SEQ ID NO: 315827 - DNA, 120 bp, Artificial Sequence
  ENSG00000134986_41 (sequence is synthesized)
aaactcactagttgtttttaagtctttgcctacattttaggtttgctcctgtgaatcaactagcaatccctggctgcagctcagaaagaacaaaaggggtgggtaatatagaaattcgga

SEQ ID NO: 315828 - DNA, 120 bp, Artificial Sequence
  ENSG00000134986_42 (sequence is synthesized)
ctagttctgagcaattatcctgcaaatactgccaggtgatgcacatcatgcgaaggtttcctttttgggaaaggaagaccaagggaactaaccaaagctaagcaccatgcacccaaatcc

SEQ ID NO: 315829 - DNA, 120 bp, Artificial Sequence
  ENSG00000134986_43 (sequence is synthesized)
ccaaatcctagcaagcataactatagccaccagttatctggatgtgtcacaagacatcctttcctcccccttgttggaggactcagttccacagtttcaccttagcatttggtttatgat

SEQ ID NO: 315830 - DNA, 120 bp, Artificial Sequence
  ENSG00000134986_44 (sequence is synthesized)
caaagccctaggaaagaaaactggatctaagggatccagaggcaaatgacaacagaggttaaaaagcacagtgcaggtgagcatggctgattcctgtcaattaagccaaccccaagcttc

SEQ ID NO: 315831 - DNA, 120 bp, Artificial Sequence
  ENSG00000134986_45 (sequence is synthesized)
ctatttcatggataaaggccatgttagtatccatggcataaatgaggcctagggaatccaagaccactgacagcaggggagatagggcatatgtgggtaagagcagatgattcctacccc

SEQ ID NO: 315832 - DNA, 120 bp, Artificial Sequence
  ENSG00000134986_46 (sequence is synthesized)
ctaggcccccctgcttcatgggtacaagctgctttggcactcatggtgggacctgacaaggtcaccaggactcggggatgcaaggatggaagagggaaagaggatgctcttccttctttc

SEQ ID NO: 315833 - DNA, 120 bp, Artificial Sequence
  ENSG00000134986_47 (sequence is synthesized)
cctcatgtaccctgggtatctgctaggaagagaagggaaccaaggatgcctgctcccttctttctagatgggtagccattcatcttcagtctgttcccctttagaatgcatcctgaaccc

SEQ ID NO: 315834 - DNA, 120 bp, Artificial Sequence
  ENSG00000134986_48 (sequence is synthesized)
ctgggacttctttgaaaaatacaccttctttttattcctttctcttcttttgttgtctcttcgccaataggtaatcatgtctccatattacaagacactcccctcagatgcaccctccaa

SEQ ID NO: 315835 - DNA, 120 bp, Artificial Sequence
  ENSG00000134986_49 (sequence is synthesized)
attggaaagagttaattccccaaaccttaaactggttggcttagggctggggcccacaggaagtgaacccagacacctgatatgcagcaaaagggtaaagttttttttgccagttgggct

SEQ ID NO: 315836 - DNA, 120 bp, Artificial Sequence
  ENSG00000134986_50 (sequence is synthesized)
tttggccttcctctccctgagcaaactggtaaaaggcctcagaatttttgagctgtctttacccctccccttgttttgttttgatacatgttttctaataacctggtttgtcggttcttg

SEQ ID NO: 315837 - DNA, 120 bp, Artificial Sequence
  ENSG00000134986_51 (sequence is synthesized)
ccttcaggccaccaaactccaaacagtcatgcaactggaacctctgacaatggccccttttgctggggacccttatatcagcctctgagagagctctgactgctgtttccccaaaacaac

SEQ ID NO: 315838 - DNA, 120 bp, Artificial Sequence
  ENSG00000134986_52 (sequence is synthesized)
accccctgtcagcaggaaggatttaagatcggtctttgtccttgtccttaatccaatggcagttagatgtacttctttagaggggagaatgagacagccaggtgggagggagtccctgga

SEQ ID NO: 315839 - DNA, 120 bp, Artificial Sequence
  ENSG00000134986_53 (sequence is synthesized)
gaaactccaaacagcctgcccactgaggtggagcctcaggaagttcataatgtttgcagcagggaggaacctggtccctcgccttcctgtgtggaacctgggattcaaactgccaggagg

SEQ ID NO: 315840 - DNA, 120 bp, Artificial Sequence
  ENSG00000134986_54 (sequence is synthesized)
gaagcactctaacagagggactctggccttgcaagagtccctgttcctcaggtttttcccttttcacccaataaaaccctactttactcaccctttaagccatctgacagcccaaatttt

SEQ ID NO: 315841 - DNA, 120 bp, Artificial Sequence
  ENSG00000134986_55 (sequence is synthesized)
catggccgtgggacagagaagaaccctgtctttagctgaactaaagaaaagtcctgcaacagtttcctatccccctgtattattcaccacacttgcaatacctggtttagtgcctgtaca

SEQ ID NO: 315842 - DNA, 120 bp, Artificial Sequence
  ENSG00000134986_56 (sequence is synthesized)
aagatcccatgaaggtatctgtcttctttacccttttacacttcagaacctagtatggtccttggcagacagaatgcctccaataaatatttgtgaaataaataagaatctaagcgttcc

SEQ ID NO: 315843 - DNA, 120 bp, Artificial Sequence
  ENSG00000134986_57 (sequence is synthesized)
tttctggagtcttacaatcattttaatttctttatcactgctttgctctggaattacttcagttatccttatttttttctagaagaaaaatgttttataatctgagaatatggaatgctt

SEQ ID NO: 315844 - DNA, 120 bp, Artificial Sequence
  ENSG00000134986_58 (sequence is synthesized)
aacaaaattggattgtaccctgagtagataatgtacttcaaaagtgtattcaatggtcagtagataatgtacttcaaaagtgtattaaaaagaaatcaatgttacttctaatttgaaaaa

SEQ ID NO: 315845 - DNA, 120 bp, Artificial Sequence
  ENSG00000134986_59 (sequence is synthesized)
agggaaggcttcctaaggtaagatccttagatgccatattgttaacactattttcaatatagaaacaattgttttaaaatatcagagctttttcatttgaatacccattataggctgcta

SEQ ID NO: 315846 - DNA, 120 bp, Artificial Sequence
  ENSG00000134986_60 (sequence is synthesized)
taacaatccattaatctgatactatgatgaccttggaaataatgtacttttaaaaaatatcctaaagtcctatgacttaaagttcacattatcttccttcataaatgaaaaattttcatt

SEQ ID NO: 315847 - DNA, 120 bp, Artificial Sequence
  ENSG00000134986_61 (sequence is synthesized)
taaaacatggaatcagtttatcaaagtacagtttacaggttttaagtctgttccatttctggttagacaaactcaaatacaatgatcaaactaaaagatttcttaaaagtatgatgacta

SEQ ID NO: 315848 - DNA, 120 bp, Artificial Sequence
  ENSG00000134986_62 (sequence is synthesized)
taaacgtggtttcattgttctgacatcttaggtgtggcagttctctgcctcaagaaaatttgtaaaatttatattttagattttagcataatttctgaaacaaacaataacaactactta

SEQ ID NO: 315849 - DNA, 120 bp, Artificial Sequence
  ENSG00000134986_63 (sequence is synthesized)
ccagtttttactgtagatactggactttgcctcttagggtgaatacttgtttgacttcaagcggggagagtatactttttaaccaatgacttgctgattttgcagttaagaaagaaaaac

SEQ ID NO: 315850 - DNA, 120 bp, Artificial Sequence
  ENSG00000134986_64 (sequence is synthesized)
agaatccactgaaaataaaatttctatttgaaagtttcataagtgtaattgactaacggtgagtcctcccccagctgttactggtatttcaatgtttaagaaattattttatttacacta

SEQ ID NO: 315851 - DNA, 120 bp, Artificial Sequence
  ENSG00000134986_65 (sequence is synthesized)
aatagtatcaacaattccctatcttatactggcaggcagaaactgaagaggttgtatcaactggcagtttgcactgaaagaaaacaatcttaaatcacttttaatcttgcagagcatttt

SEQ ID NO: 315852 - DNA, 120 bp, Artificial Sequence
  ENSG00000134986_66 (sequence is synthesized)
cagcaaatgggaagtctccacatctctacacctacctgttctcatgctcctgtcctgcttcgctcctcacatttgacaaggagctcctcctcctatgaaaggccacttgtcccatagctt

SEQ ID NO: 315853 - DNA, 120 bp, Artificial Sequence
  ENSG00000134986_67 (sequence is synthesized)
tcttccatcccatcgtgtctcagcatctcagggatcttgcactgatcattgtcccattttcagagccggtccaagaggcagattacctgagcagcagcctggcatgccaatttgtaagaa

SEQ ID NO: 315854 - DNA, 120 bp, Artificial Sequence
  ENSG00000134986_68 (sequence is synthesized)
gtgaagagcatccttgaaataattagagaagaacagtaacagttaatttaggttttcctatataaacaaagcataaattggcctgtttcttactgaatagaaatttaaaccaaacaaaat

SEQ ID NO: 315855 - DNA, 120 bp, Artificial Sequence
  ENSG00000134986_69 (sequence is synthesized)
gaaacaaagaagcatattcctctgactctggtccatcacaaatgagtttttgtgatctttcccgttgcaggatgcaaggatgtataagtagaatcgcagtgttgccaacaatgaagttgg

SEQ ID NO: 315856 - DNA, 120 bp, Artificial Sequence
  ENSG00000134986_70 (sequence is synthesized)
agagtgaacagggagcggggcttttgtctgttggtctccctggactgaagagagggagaatagaagcccaagactaagattctcaaaatggtaagacttggtcatcagaggagattctca

SEQ ID NO: 315857 - DNA, 120 bp, Artificial Sequence
  ENSG00000134986_71 (sequence is synthesized)
gtacttcttaccagtctgttacatataaatatcaaccacccatcttcatccgcctcaacccttcattgttctacaccccatctgacctttaaaaggttctatctccagttcctgggagcg

SEQ ID NO: 315858 - DNA, 120 bp, Artificial Sequence
  ENSG00000134986_72 (sequence is synthesized)
attggatgtggcaaattagttctttgacttgcaattattttgaatagaaaactaaaattcctctttcagaagtgaggatttatttaatttgaacaacagaaactattcggttctttaaga

SEQ ID NO: 315859 - DNA, 120 bp, Artificial Sequence
  ENSG00000134986_73 (sequence is synthesized)
agagtgatgtgttgtgacacgcatggaggtggtgacagcagtagggctcaaacaaagccttgggtcttagagctaggccgaagttacccaaaactgaggagtctgtccagctgatcaaac

SEQ ID NO: 315860 - DNA, 120 bp, Artificial Sequence
  ENSG00000134986_74 (sequence is synthesized)
aatctgtctttctagcatgttgccctttttcaaccacatttgtgtttcaggtgtagagaggagagagagtgaacagggagcggggcttttgtctgtttattacccagaactctttgtctg

SEQ ID NO: 315861 - DNA, 120 bp, Artificial Sequence
  ENSG00000134986_75 (sequence is synthesized)
cctcttttcctcagatgccctctgctgcaggtttattattacagtgtagagaggagagagagtgaacagggagcggggcttttgtctaaaatggttattcgtctgtaacctctaaagagg

SEQ ID NO: 315862 - DNA, 120 bp, Artificial Sequence
  ENSG00000134987_0 (sequence is synthesized)
tcaaggaatactgacttaatccaggaatcccaataacatttaatatttatcttccttttctgggaggaatctacacttatccaagttgcccaagtgagcagttccctccccacaagtaat

SEQ ID NO: 315863 - DNA, 120 bp, Artificial Sequence
  ENSG00000134987_1 (sequence is synthesized)
tagttctactccccagagggtctgtgagtgaatccctctgtcagttttgaaatgtcccattatagttttcatctgtaaatatgtcaatatgtatccaaaagatgaggatctttaaaaacg

SEQ ID NO: 315864 - DNA, 120 bp, Artificial Sequence
  ENSG00000134987_2 (sequence is synthesized)
taatcataatgctactatcatatgtaaaaatgaaacataattccttaatatcatcagatatccagtgtttaaatttttccagtctcatgtttttgtacatttttaaataatcacatgttt

SEQ ID NO: 315865 - DNA, 120 bp, Artificial Sequence
  ENSG00000134987_3 (sequence is synthesized)
aaatcgtttccatctccaaggcgtcgacctcccctccattctcctgggcgtcgcgcttccctctttgtttcccgcccttgcggttctgtcggaacctaacgagcttccttccaccgcaaa

SEQ ID NO: 315866 - DNA, 120 bp, Artificial Sequence
  ENSG00000134987_4 (sequence is synthesized)
agagctggagaacaatgctaggcaacgtgctggagaccttggccctcggaacccaagtcacgcctcccatgtgagctctggagggagaactttatgtgttgcactgagggcagtctccgg

SEQ ID NO: 315867 - DNA, 120 bp, Artificial Sequence
  ENSG00000134987_5 (sequence is synthesized)
aaacgcgattcgcagcgggcgccggaagcggtgttgtgtctgcagctctggcagaggactgttccactagacacgctgaagggactgggtacgtgttttccttcaggaccagagctgaga

SEQ ID NO: 315868 - DNA, 120 bp, Artificial Sequence
  ENSG00000134987_6 (sequence is synthesized)
ggagctgggatcgcggcggcaatggaacgggcctcagaaaggcgcacggccagcgcgctttttgcggggttccgggccttgggacttttcagcaacgacattccacacgtggtgcggttc

SEQ ID NO: 315869 - DNA, 120 bp, Artificial Sequence
  ENSG00000134987_7 (sequence is synthesized)
agcgcgctcaagcgccggttctatgtaacaacctgcgtgggcaagagtttccacacctatgacgttcagaaacttagtctggttgcagtaagtaattctgttccacaggatatctgctgt

SEQ ID NO: 315870 - DNA, 120 bp, Artificial Sequence
  ENSG00000134987_8 (sequence is synthesized)
atggcagctgatggcagattagtctttgctgcttatggaaatgttttctctgcatttgcccgtaataaagagatagtacatacctttaagggtcataaggcagaaatccatttcttgcaa

SEQ ID NO: 315871 - DNA, 120 bp, Artificial Sequence
  ENSG00000134987_9 (sequence is synthesized)
ccctttggagaccacattatctctgttgatactgatggcattcttattatttggcacatatattcagaagaagaatacctgcagttgacttttgataaatcagtatttaaaatttctgca

SEQ ID NO: 315872 - DNA, 120 bp, Artificial Sequence
  ENSG00000134987_10 (sequence is synthesized)
attttgcatccaagtacctacttgaataaaatacttctgggcagtgaacaaggaagcctgcagttgtggaatgtaaaatccaataaacttctatatacatttccaggatggaaagttgga

SEQ ID NO: 315873 - DNA, 120 bp, Artificial Sequence
  ENSG00000134987_11 (sequence is synthesized)
gtgacagctcttcagcaggcaccagccgtggatgttgttgctattggtcttatgtcaggtcaagttatcattcacaacattaaatttaatgaaacattaatgaagtttcgtcaagactgg

SEQ ID NO: 315874 - DNA, 120 bp, Artificial Sequence
  ENSG00000134987_12 (sequence is synthesized)
ggacccattacttcaatttcatttcgcacagatggtcatccagtaatggcagctggaagcccatgtggccatattggactctgggatctagaagacaaaaaattaatcaaccaaatgaga

SEQ ID NO: 315875 - DNA, 120 bp, Artificial Sequence
  ENSG00000134987_13 (sequence is synthesized)
aatgcacactctacagcaattgccggactgacatttctccatagagagccacttcttgtcacaaatggcgctgacaatgctcttaggatatggatatttgatggtcctacaggtgaaggc

SEQ ID NO: 315876 - DNA, 120 bp, Artificial Sequence
  ENSG00000134987_14 (sequence is synthesized)
cgacttttgagattcagaatgggtcatagtgctcctcttaccaatatcagatattatggacagaatggacagcagattctaagtgcaagtcaagatggaactcttcagtcattttccacg

SEQ ID NO: 315877 - DNA, 120 bp, Artificial Sequence
  ENSG00000134987_15 (sequence is synthesized)
gtacatgaaaaattcaataagagcttgggacatggattaataaataaaaagagagttaaacgtaaaggacttcagaataccatgtcagtgagacttccacccatcacaaagtttgcagca

SEQ ID NO: 315878 - DNA, 120 bp, Artificial Sequence
  ENSG00000134987_16 (sequence is synthesized)
gaggaagctcgtgaaagtgactgggatggtatcattgcttgccatcaaggtaagctatcttgctcaacctggaattatcagaaatctacaataggcgcttactttctcaagccaaaagag

SEQ ID NO: 315879 - DNA, 120 bp, Artificial Sequence
  ENSG00000134987_17 (sequence is synthesized)
ttgaagaaagatgacataactgcaacagcagtggatataacttcttgtggaaactttgctgtaattggcctctcatcaggaactgtagatgtatataacatgcagtctggcatacatcga

SEQ ID NO: 315880 - DNA, 120 bp, Artificial Sequence
  ENSG00000134987_18 (sequence is synthesized)
ggaagttttggcaaggatcaagctcacaagggatctgttagaggtgtcgcagtggatggattaaaccagttgacagttacaactggtagtgaaggattactcaaattctggaactttaaa

SEQ ID NO: 315881 - DNA, 120 bp, Artificial Sequence
  ENSG00000134987_19 (sequence is synthesized)
aacaaaattttaatccattctgtgagcctcagttcatctccaaatatcatgttgctacatagggacagtggcattctgggactcgccttggatgacttctccattagtgttctggacata

SEQ ID NO: 315882 - DNA, 120 bp, Artificial Sequence
  ENSG00000134987_20 (sequence is synthesized)
gaaactaggaagattgtcagagagttttctggacaccaaggccaaataaatgacatggcttttagtcctgatggtcgttggttaataagtgctgcgatggattgctctattaggacttgg

SEQ ID NO: 315883 - DNA, 120 bp, Artificial Sequence
  ENSG00000134987_21 (sequence is synthesized)
gaccttccttctgggtgccttatagactgctttttgttggactcggctcctctcaatgtttctatgtctcctactggagactttctggcaacttcccatgtggaccaccttggaatttat

SEQ ID NO: 315884 - DNA, 120 bp, Artificial Sequence
  ENSG00000134987_22 (sequence is synthesized)
ctatggtccaatatttccctgtattcagttgtttcattacggccacttcctgcagattatgtcccttcaatagtcatgcttcctggtacttgtcaaacccaagatgtagaagtatcagaa

SEQ ID NO: 315885 - DNA, 120 bp, Artificial Sequence
  ENSG00000134987_23 (sequence is synthesized)
gaaacagtagaaccaagtgatgaattgatagaatatgattcgccagaacagttgaatgagcaattggtgactctttcacttcttcctgaatcacgatggaaaaaccttcttaaccttgat

SEQ ID NO: 315886 - DNA, 120 bp, Artificial Sequence
  ENSG00000134987_24 (sequence is synthesized)
gttattaagaaaaagaataaaccaaaggaaccacccaaagtacccaaatcagcaccatttttcattccaacaattcctggccttgtacccagatatgctgcacctgaacaaaataatgat

SEQ ID NO: 315887 - DNA, 120 bp, Artificial Sequence
  ENSG00000134987_25 (sequence is synthesized)
ccccagcagtctaaagtggtaaatcttggagttttggctcaaaaatcagatttctgcttgaaacttgaagaaggactggtaaataataagtatgacactgctctcaaccttctgaaagaa

SEQ ID NO: 315888 - DNA, 120 bp, Artificial Sequence
  ENSG00000134987_26 (sequence is synthesized)
tcaggcccatcaggaattgaaacagagctgcgaagcttgtctcctgattgtggtgggtccatagaagttatgcagagcttcttgaaaatgattgggatgatgctggacagaaagcgtgat

SEQ ID NO: 315889 - DNA, 120 bp, Artificial Sequence
  ENSG00000134987_27 (sequence is synthesized)
tttgagttagcccaggcataccttgcattgtttctaaagttacaccttaaaatgcttccttcagagccagtactcctagaagaaataacaaatttgtcatcccaggtggaagaaaactgg

SEQ ID NO: 315890 - DNA, 120 bp, Artificial Sequence
  ENSG00000134987_28 (sequence is synthesized)
acccatttgcaatcactcttcaatcaaagcatgtgtattttaaattatctcaaaagtgctttgttgtaaaaataaatttgtgactaaacaaagactttcatattaaatgggttcaattga

SEQ ID NO: 315891 - DNA, 120 bp, Artificial Sequence
  ENSG00000134987_29 (sequence is synthesized)
aaatactttcttgaaataaaatcgcacctcccggccaggcatgatggataatgcctgtaattccagcactttcagaggccaaagcgggaggattgcttgaagccaggaatttgagcccag

SEQ ID NO: 315892 - DNA, 120 bp, Artificial Sequence
  ENSG00000134987_30 (sequence is synthesized)
cctgggcaacatagcaagcaagatcccatctctacaaaaagttaaaaaaataaattacacctgccttttgttttgaagacttaaagaatctgctcaaatgatttattttctgagtctctt

SEQ ID NO: 315893 - DNA, 120 bp, Artificial Sequence
  ENSG00000134987_31 (sequence is synthesized)
cacattaacttttatatgatttttaaaaaattattacctgcttatattttttgagtatctgtttcatataaagagatgctgcatgttcactgtgaagtattgctgaattaaattgaaaat

SEQ ID NO: 315894 - DNA, 120 bp, Artificial Sequence
  ENSG00000134987_32 (sequence is synthesized)
gtcagataaaactgatacatgatgtagttataaaaatgctgttatgaagaaaaaaggaatgcttttttcctcggtggcctttgataaaaatatgaatgattgactctcagagttggagga

SEQ ID NO: 315895 - DNA, 120 bp, Artificial Sequence
  ENSG00000134987_33 (sequence is synthesized)
taaactaatcatcttctagcacagccctgttgtgttgcaggagaggaatcaggctaaagtctgctggtatttcagtgacagattaaaactttctaacagtggcctagtgctttctccatt

SEQ ID NO: 315896 - DNA, 120 bp, Artificial Sequence
  ENSG00000134987_34 (sequence is synthesized)
gtaatgtactgaaaggaagttgttcatggatcagaaatgtgggaggcccttccttgcccaaggcaagtcgctgtagatggttaaactgataccaaggataggtaagggaaattccaaatt

SEQ ID NO: 315897 - DNA, 120 bp, Artificial Sequence
  ENSG00000134987_35 (sequence is synthesized)
ccattggaagatggccttttactgacactgcagacatgtagataacaatagtttaatgtcctctgaaaaggtaaaaattccataaatccttgcaaacaatttttagcaatattgtttatt

SEQ ID NO: 315898 - DNA, 76 bp, Artificial Sequence
  ENSG00000134987_36 (sequence is synthesized)
cataaatccttgcaaacaatttttagcaatattgtttattgctaccacagccaagaatgggtatttcaaagccagg

SEQ ID NO: 315899 - DNA, 120 bp, Artificial Sequence
  ENSG00000134987_37 (sequence is synthesized)
aaatgctgagtatacttttctttcacaaccattgcaaacccaggtagccctggagttttctttttttctcatcatcattgttttgttttttttatggttcaagacttttgcaatacatga

SEQ ID NO: 315900 - DNA, 120 bp, Artificial Sequence
  ENSG00000134987_38 (sequence is synthesized)
attaaaaataagcagttctttaaagcatagcgctctaaaaactattcttagtttataccctcaaaagttgggtctttcatgaaacacagtggtttgaatatgaacaccagtagcattctc

SEQ ID NO: 315901 - DNA, 120 bp, Artificial Sequence
  ENSG00000134987_39 (sequence is synthesized)
gttcgttgttagggtaagagagttttgtagaatgatctccaaaagaagcagtcctcaaaaggcatttaccagtgatatcttttaatattcatgtttttatttaatgatgtaagatagaat

SEQ ID NO: 315902 - DNA, 120 bp, Artificial Sequence
  ENSG00000134987_40 (sequence is synthesized)
taataaactactaaggaaataagccaatgtggttattgtactcaatttcgtttttcttttagaaatgtgtattgacttattaaagccactgacagaaatgttaatcatgacttaagttct

SEQ ID NO: 315903 - DNA, 120 bp, Artificial Sequence
  ENSG00000134987_41 (sequence is synthesized)
taaaaaactattttcctctttcctaaatactatattctaaattggaatatggcaaaatcccaatatataattctatacctagtaaagattgtaaataactaaaacaaaatgataagagct

SEQ ID NO: 315904 - DNA, 120 bp, Artificial Sequence
  ENSG00000134987_42 (sequence is synthesized)
agctgtgaactgaaattgtattgcttacagaaatcatgaaccgaattttcttctctttttaaagtgagcataaagacttaagtgtattgttaccagagatatatttagatagaatacatc

SEQ ID NO: 315905 - DNA, 120 bp, Artificial Sequence
  ENSG00000134987_43 (sequence is synthesized)
attttggcaggtaatcttctagaacctttcatgtactgtttccatcaagggagggaaagaaatagaaaatataattttatctatattttccttaaaatatatcaatctgtgcacactctt

SEQ ID NO: 315906 - DNA, 120 bp, Artificial Sequence
  ENSG00000134987_44 (sequence is synthesized)
tcagttttttaattactcatgtaatatatgactacattttgcttgtgtgctttttgaaaaccatcttcagtcccaatatcctctgtagaagtaatagttttaactctcctagatcttctt

SEQ ID NO: 315907 - DNA, 120 bp, Artificial Sequence
  ENSG00000134987_45 (sequence is synthesized)
ttagagtgtttttatgagtgtttaatgtaggaatgtgtatatattatctacagccacaggaaatgtatagttacgatttttacatacgtgtatgtatattattgtacaacttgctatttc

SEQ ID NO: 315908 - DNA, 120 bp, Artificial Sequence
  ENSG00000134987_46 (sequence is synthesized)
tacttgggagttttttattttggtacattcacatttacctaatctcttgtgcactgtccaacagtactttgcctataatagacacttaaggaagttttccttctttttattcctttataa

SEQ ID NO: 315909 - DNA, 120 bp, Artificial Sequence
  ENSG00000134987_47 (sequence is synthesized)
ttacaaacaatgctgaaaggaacatcatcctacatgagccctttttgtacatataaggctctctctgtggtatatgcttaggatttgaatttcaggccagagtataaccatttttaattt

SEQ ID NO: 315910 - DNA, 120 bp, Artificial Sequence
  ENSG00000134987_48 (sequence is synthesized)
gaagagatacttccatttgggttccagaatggctgtatcaagttacagttcccctgagcaagatatgagcatctgcttccccatgtaattaatgacacttgctattggatttttgtaatt

SEQ ID NO: 315911 - DNA, 120 bp, Artificial Sequence
  ENSG00000134987_49 (sequence is synthesized)
taattactctgaaaaaattattttggttttaaatcagaaatttctcactagtgaagatggacatatttttgtatgtttattttagaacatataaacatttgttaattttctttttcctct

SEQ ID NO: 315912 - DNA, 120 bp, Artificial Sequence
  ENSG00000134987_50 (sequence is synthesized)
catttttctattgaatgatttgtccttttatctcatggatttgttaggagttctcttgtattttctgtattttatgtctgttgccaatgttttctcctacttagccatttggctttaatt

SEQ ID NO: 315913 - DNA, 120 bp, Artificial Sequence
  ENSG00000134987_51 (sequence is synthesized)
ttacatggtgtctgtttaaataaatgttttatatttgtatacaatcaaattgattaattttcatgacttatttcaggatataaagcaaattattttctaagacatttacagtgtatgttt

SEQ ID NO: 315914 - DNA, 120 bp, Artificial Sequence
  ENSG00000134987_52 (sequence is synthesized)
tcctatgtttacatgtgctcatttcacgtcatgtattttcctctacgacatgtttctgtgtgagtagttaacatgtagatctttagaattgatttttctgaagagtgaaacagcgctgct

SEQ ID NO: 315915 - DNA, 120 bp, Artificial Sequence
  ENSG00000134987_53 (sequence is synthesized)
tccaatatctgttcaaaattcatttattgaaaagtccactcatatgtctgatttgaaatgctgtttcattatgtgttaaattctttcactgagctcttccatattcctagtaaatgatgc

SEQ ID NO: 315916 - DNA, 120 bp, Artificial Sequence
  ENSG00000134987_54 (sequence is synthesized)
attactttggtatgttctcagatttgggtaaagccttcctcatgttctataaaaattggttaactgctggtgagcacatctcttgaagttttgatatgggttgcacaacatttataggac

SEQ ID NO: 315917 - DNA, 120 bp, Artificial Sequence
  ENSG00000134987_55 (sequence is synthesized)
tgatttggagagaccgacaataccgagtgcagtcctcccttggtatctagttccaggacccctgtggataccaaaatccaagcaatgccctgcagatcatgggacctatgcatatgaaaa

SEQ ID NO: 315918 - DNA, 120 bp, Artificial Sequence
  ENSG00000134987_56 (sequence is synthesized)
gtcggtccttgtatttgagggttttgcatccctcaaataccatatgttttatttgtgtttggttgaaaaaagtttgcatataagtgaaacttagcatttcaaacctgtgttgttcaaaga

SEQ ID NO: 315919 - DNA, 120 bp, Artificial Sequence
  ENSG00000134987_57 (sequence is synthesized)
tcatttgtatttctcttcaagaacaatgaatgtcttcattaaatcatcttttgtgggagagcttttggtttcatagattttcatatatatatatgatataataaacactttttgacattc

SEQ ID NO: 315920 - DNA, 120 bp, Artificial Sequence
  ENSG00000134987_58 (sequence is synthesized)
tttctacttttgtttgggtgtgttatcctttaatagccttaaaatcattatatgaggtggttatcaattttaatttgcaggctatttttcaaagattttaaaggaaaattttgaattaaa

SEQ ID NO: 315921 - DNA, 120 bp, Artificial Sequence
  ENSG00000134987_59 (sequence is synthesized)
agtttaatatttttcagggagttgatgcgatcaaattaaagtataagttttagaactcatcttttttttcattaactctaaacaaggccaaagtatactttagagaatgaatgatccatt

SEQ ID NO: 315922 - DNA, 120 bp, Artificial Sequence
  ENSG00000134987_60 (sequence is synthesized)
atttatgcacatctaaactttttttttattttgacataaatgtgagacttacagagcatataaggaagccaaggtaacatgtatgtcttataaacttacattatcagcaacaaaaaaggg

SEQ ID NO: 315923 - DNA, 120 bp, Artificial Sequence
  ENSG00000134987_61 (sequence is synthesized)
tgccaggataaatcatgttttgcttttagttgttatgtatctttattttctttaatctggaactgttctttagactttctttgtgcttcatgacattgacacattgacatttttgaagag

SEQ ID NO: 315924 - DNA, 120 bp, Artificial Sequence
  ENSG00000134996_0 (sequence is synthesized)
actcggcggagccgctctgcctgcgtccgctcttcccgcagccaagggtgggcgccggtcctaggaggcgcacggttgtaagccagacaaaaagaactggggtgcccggagtgccaggtg

SEQ ID NO: 315925 - DNA, 120 bp, Artificial Sequence
  ENSG00000134996_1 (sequence is synthesized)
gcgggcaagcggtgggcttttcggcggggtctttaggatttgcagctccaggaagcgagatgtcgaagccgccacccaaaccagtcaaaccagggcaagttaaagtcttcagagccctgt

SEQ ID NO: 315926 - DNA, 120 bp, Artificial Sequence
  ENSG00000134996_2 (sequence is synthesized)
atacgtttgaacccagaactccagatgaattatactttgaggaaggtgatattatctacattactgacatgagcgataccaattggtggaaaggcacctccaaaggcaggactggactaa

SEQ ID NO: 315927 - DNA, 120 bp, Artificial Sequence
  ENSG00000134996_3 (sequence is synthesized)
ttccaagcaactatgtggctgagcaggcagaatccattgacaatccattgcatgaagcagcaaaaagaggcaacttgagctggttgagagagtgtttggacaacagagtgggtgttaatg

SEQ ID NO: 315928 - DNA, 120 bp, Artificial Sequence
  ENSG00000134996_4 (sequence is synthesized)
gcttagacaaagctggaagcactgccttatactgggcttgccacgggggccacaaagatatagtggaaatgctatttactcaaccaaatattgaactgaaccagcagaacaagttgggag

SEQ ID NO: 315929 - DNA, 120 bp, Artificial Sequence
  ENSG00000134996_5 (sequence is synthesized)
gggttatgcagatatcgtccagttgcttctggcaaaaggtgctagaacagacttaagaaacattgagaagaagctggccttcgacatggctaccaatgctgcctgtgcatctctcctgaa

SEQ ID NO: 315930 - DNA, 120 bp, Artificial Sequence
  ENSG00000134996_6 (sequence is synthesized)
aaagaaacagggaacagatgcagttcgaacattaagcaatgccgaggactatctcgatgatgaagactcagattaattcctttctggagctttgagatctaaaacttctgttgcttttgc

SEQ ID NO: 315931 - DNA, 120 bp, Artificial Sequence
  ENSG00000134996_7 (sequence is synthesized)
cattccaaaactttgtctttgccagaaaagtgttggtaactataaagaaaattatatatgaacacggcagtgttgcactgtgtttgagtagaacgtgtaaatgaattgttcccacctttg

SEQ ID NO: 315932 - DNA, 120 bp, Artificial Sequence
  ENSG00000134996_8 (sequence is synthesized)
gtttgccagtaagtgactggattcttggcacatttatgttcaccaaagtagaacaagaagatattatttctatttatcaagcaaaaggaattttaagatttttttttttctttaaaaaca

SEQ ID NO: 315933 - DNA, 120 bp, Artificial Sequence
  ENSG00000134996_9 (sequence is synthesized)
aattaggattttttttttttttttttttttagttaaaatgctttacctcaatggttgagatattttgaatggatttttcaagggggggaaatgcttattataataataaaccaaaatact

SEQ ID NO: 315934 - DNA, 120 bp, Artificial Sequence
  ENSG00000134996_10 (sequence is synthesized)
taacagaaaattgtcagctattctgacaaaaataaacattttgagagactttatttcttttgtccgtttctgtggtatcactcattgtcgttaagtaagtaaagctttttatatttaggt

SEQ ID NO: 315935 - DNA, 120 bp, Artificial Sequence
  ENSG00000135002_0 (sequence is synthesized)
acttacttcggctgtctccgctgccctccagcggagacgcagctcctcaggcgcccggcggtatttgttgggtcggcggcgtcagggattcgcagtggcctgtggtcggcgtcgtccggc

SEQ ID NO: 315936 - DNA, 120 bp, Artificial Sequence
  ENSG00000135002_1 (sequence is synthesized)
cccgcggcaggcagagctcacgctcctgtcccccggctggtccggggtctgggcgccgcgtcgacggcggctccgcaggacgcgcagaccgggccgcagcccattccccgagcggactgc

SEQ ID NO: 315937 - DNA, 120 bp, Artificial Sequence
  ENSG00000135002_2 (sequence is synthesized)
cgagcggactgcattatgaggcacctgccttacttctgccggggtcaagtggtgcggggcttcggccgcggctccaagcagctgggcatccccacagctaattttcctgagcaagtggta

SEQ ID NO: 315938 - DNA, 120 bp, Artificial Sequence
  ENSG00000135002_3 (sequence is synthesized)
gataatcttccagctgatatatccactggtatttactatggttgggccagtgttggaagtggagatgtccataagatggtggtgagcataggatggaacccatattacaagaatacgaag

SEQ ID NO: 315939 - DNA, 120 bp, Artificial Sequence
  ENSG00000135002_4 (sequence is synthesized)
aagtctatggaaacacatatcatgcataccttcaaagaggacttctatggggaaatcctcaatgtggccattgttggctacctgagaccagaaaagaactttgattctttagagtcactt

SEQ ID NO: 315940 - DNA, 120 bp, Artificial Sequence
  ENSG00000135002_5 (sequence is synthesized)
atttcagcaattcaaggtgatattgaagaagctaagaaacgactagagttaccagaacatttgaaaatcaaagaagacaatttcttccaggtttctaaaagcaaaataatgaatggccac

SEQ ID NO: 315941 - DNA, 120 bp, Artificial Sequence
  ENSG00000135002_6 (sequence is synthesized)
tgatgaaaaattgtattatttattcattcactgttttctagtgtttctgtgtttattactgttcagcatcatcttggttatatactgaaaatcaaacactttactacagttgtgaattag

SEQ ID NO: 315942 - DNA, 120 bp, Artificial Sequence
  ENSG00000135002_7 (sequence is synthesized)
tttaaaccgtacaatgttgttatcatatcatgcttcaactattaaattaagcccatcatatcatagcactaaaaagattgagttaaaaataagatttaaaaaatatatattgattaaaat

SEQ ID NO: 315943 - DNA, 120 bp, Artificial Sequence
  ENSG00000135002_8 (sequence is synthesized)
gtaccactagaaaggtattacatgtgtataagtatgggtaaaaaggcaagtcactagtttgagatgaaaactaaaattttcatggtaaaatgccagcatgtatgtacttgtgtagtgtgt

SEQ ID NO: 315944 - DNA, 86 bp, Artificial Sequence
  ENSG00000135002_9 (sequence is synthesized)
catggtaaaatgccagcatgtatgtacttgtgtagtgtgtacttctaaacagagaaggcttataaaagtaaatgcattaaggccaa

SEQ ID NO: 315945 - DNA, 120 bp, Artificial Sequence
  ENSG00000135002_10 (sequence is synthesized)
atagtttatcataaacctgcggggaagaaactcagactttctatttttgatattttgtgcattaatacattacaaacatgaagatgtttgtaaagttttgttttagtcattttctttgca

SEQ ID NO: 315946 - DNA, 120 bp, Artificial Sequence
  ENSG00000135002_11 (sequence is synthesized)
gtcacatcattgtaccaccttcattattgtatagagctgcttcaattctgagtcctctggacttcccctgcctatctgtttgttgttgttgttgaagacagtaaaataagtgttttcaaa

SEQ ID NO: 315947 - DNA, 120 bp, Artificial Sequence
  ENSG00000135002_12 (sequence is synthesized)
tctatatgtctcctttttgttggataatgtttcttctttttaatggtaaatattcttgttcttcaacatttttctttggttcttttttccttttttaggaaaaacaaaacaacagacttc

SEQ ID NO: 315948 - DNA, 120 bp, Artificial Sequence
  ENSG00000135002_13 (sequence is synthesized)
atccttaggttttctcaagatttaagtgaacacatttacacatatcaatttcttaaagaacacaaaatgtttcctccctagcaaaactatttaagagccaattaaactatgaaatagtta

SEQ ID NO: 315949 - DNA, 120 bp, Artificial Sequence
  ENSG00000135002_14 (sequence is synthesized)
taaaattatttttaatatttaaggccttgaaattatattccaaggcaaatctaaatgggtgtagttgtatatgcacgatgtaatttaatgctaaagagtacttacagcttgagggaaaag

SEQ ID NO: 315950 - DNA, 120 bp, Artificial Sequence
  ENSG00000135002_15 (sequence is synthesized)
cataaagttttagttaaatagccttcatactgtggatttttcctcctactaactaatatgtgggaaattaagattacagatgctttgggccccctcaaacagtacattgctacagttcac

SEQ ID NO: 315951 - DNA, 120 bp, Artificial Sequence
  ENSG00000135002_16 (sequence is synthesized)
tgtagcaacagatttggtggtgatggggggatagaggtagaagcagatagaaggtaattttaaagttaatttattatgaatcattttcccctaatctgcataaatgaattagaactgatt

SEQ ID NO: 315952 - DNA, 120 bp, Artificial Sequence
  ENSG00000135002_17 (sequence is synthesized)
ttaataaaaatattctgtgtaaaaagtactcagaaaaacatctaaagctgttggagaagagggactcatataaatagttggattgcgttttgctttttatttctttataaaaatatgtca

SEQ ID NO: 315953 - DNA, 120 bp, Artificial Sequence
  ENSG00000135002_18 (sequence is synthesized)
aaaacagtttttaattttagaaatcttatacttgaaagaaacctcaattatcagtggctttatgaagtaaagttaaaaacaaacataggaaatgtgaaaatatttgtgtttgttttgtct

SEQ ID NO: 315954 - DNA, 120 bp, Artificial Sequence
  ENSG00000135002_19 (sequence is synthesized)
gactaacttgctgctaaatgctatctttaggtgtgtgaaagttctttgatatgttattgtccttttacatcttgttaaatagccattgcttttgagaatcagatagtgtgttgtttaggg

SEQ ID NO: 315955 - DNA, 120 bp, Artificial Sequence
  ENSG00000135002_20 (sequence is synthesized)
gttaattgtgtctatatctttcaaaaacttttatattatgtattataagaagttacagtagtaccattttgattagtctgaatgttttcaggccttgaaataaattttgactaagtgata

SEQ ID NO: 315956 - DNA, 120 bp, Artificial Sequence
  ENSG00000135002_21 (sequence is synthesized)
atccccttgtctgtggcggaggaccgttggctcggttgagggagcttgtccctgcttctggctccgagctccgcggggacggggttgaggggtggtgagggccggaagcccgagatgaat

SEQ ID NO: 315957 - DNA, 120 bp, Artificial Sequence
  ENSG00000135002_22 (sequence is synthesized)
taataatgatggcaggacagataatatttgagcatttaatatatgccaggcaccgttttaagtgctttacgtgaatctatcttctttcacctgtgagggattattttgcctatttctcag

SEQ ID NO: 315958 - DNA, 120 bp, Artificial Sequence
  ENSG00000135002_23 (sequence is synthesized)
tctagctttgaacctagcaggctggctgcttctctccagcggtatgaagttaatgaaatctttcaaaatgtgtgaagtttgagatatagtaaatcagagaacatttgaaacatgttacca

SEQ ID NO: 315959 - DNA, 120 bp, Artificial Sequence
  ENSG00000135002_24 (sequence is synthesized)
ggtatgtattagtgtagtgtgatagttttaactctgttataaagtttcttttacaagtgtaaataccaaccaaaaataatagtgaatgcttttttcctccatttgatatttgcagtgtac

SEQ ID NO: 315960 - DNA, 120 bp, Artificial Sequence
  ENSG00000135002_25 (sequence is synthesized)
atttatgcctatgcctttctcttaaaatataagattagggacatacctttgtttgtttgtttgtttgagacagagttttgctctttgttacccaggctggagtgcagtgacgccccctct

SEQ ID NO: 315961 - DNA, 120 bp, Artificial Sequence
  ENSG00000135002_26 (sequence is synthesized)
ttgtgtaccattgacttaggcctggaaggagtgatggaacaaacatttattgggtatctaccctgtgcagagatactgccagcctgtgagtttttaggattggctaaacagagtagtagt

SEQ ID NO: 315962 - DNA, 120 bp, Artificial Sequence
  ENSG00000135018_0 (sequence is synthesized)
agggaggaggaagcggtggctgctgcggatgtcggtgtgagcgagcggcgcctgaacacacggcggctgccgagcgcctgacccgggcctgcgccagagcctgcaccgagctccggggcc

SEQ ID NO: 315963 - DNA, 120 bp, Artificial Sequence
  ENSG00000135018_1 (sequence is synthesized)
ccacacccgctacggtggccctgcgcccgttgctactgaggcggcgtgctctgcattcttcgctgtccaggcctgccggctctggtgtctgctggctcctccttgctcgcctgctccctc

SEQ ID NO: 315964 - DNA, 120 bp, Artificial Sequence
  ENSG00000135018_2 (sequence is synthesized)
ctgcttgcctgagtcaccgccgccgccgccgccacagccatggccgagagtggtgaaagcggcggtcctccgggctcccaggatagcgccgccggagccgaaggtgctggcgcccccgcg

SEQ ID NO: 315965 - DNA, 120 bp, Artificial Sequence
  ENSG00000135018_3 (sequence is synthesized)
gccgctgcctccgcggagcccaaaatcatgaaagtcaccgtgaagaccccgaaggaaaaggaggaattcgccgtgcccgagaatagctccgtccagcagtttaaggaagaaatctctaaa

SEQ ID NO: 315966 - DNA, 120 bp, Artificial Sequence
  ENSG00000135018_4 (sequence is synthesized)
cgttttaaatcacatactgaccaacttgtgttgatatttgctggaaaaattttgaaagatcaagataccttgagtcagcatggaattcatgatggacttactgttcaccttgtcattaaa

SEQ ID NO: 315967 - DNA, 120 bp, Artificial Sequence
  ENSG00000135018_5 (sequence is synthesized)
acacaaaacaggcctcaggatcattcagctcagcaaacaaatacagctggaagcaatgttactacatcatcaactcctaatagtaactctacatctggttctgctactagcaaccctttt

SEQ ID NO: 315968 - DNA, 120 bp, Artificial Sequence
  ENSG00000135018_6 (sequence is synthesized)
ggtttaggtggccttgggggacttgcaggtctgagtagcttgggtttgaatactaccaacttctctgaactacagagtcagatgcagcgacaacttttgtctaaccctgaaatgatggtc

SEQ ID NO: 315969 - DNA, 120 bp, Artificial Sequence
  ENSG00000135018_7 (sequence is synthesized)
cagatcatggaaaatccctttgttcagagcatgctctcaaatcctgacctgatgagacagttaattatggccaatccacaaatgcagcagttgatacagagaaatccagaaattagtcat

SEQ ID NO: 315970 - DNA, 120 bp, Artificial Sequence
  ENSG00000135018_8 (sequence is synthesized)
atgttgaataatccagatataatgagacaaacgttggaacttgccaggaatccagcaatgatgcaggagatgatgaggaaccaggaccgagctttgagcaacctagaaagcatcccaggg

SEQ ID NO: 315971 - DNA, 120 bp, Artificial Sequence
  ENSG00000135018_9 (sequence is synthesized)
ggatataatgctttaaggcgcatgtacacagatattcaggaaccaatgctgagtgctgcacaagagcagtttggtggtaatccatttgcttccttggtgagcaatacatcctctggtgaa

SEQ ID NO: 315972 - DNA, 120 bp, Artificial Sequence
  ENSG00000135018_10 (sequence is synthesized)
ggtagtcaaccttcccgtacagaaaatagagatccactacccaatccatgggctccacagacttcccagagttcatcagcttccagcggcactgccagcactgtgggtggcactactggt

SEQ ID NO: 315973 - DNA, 120 bp, Artificial Sequence
  ENSG00000135018_11 (sequence is synthesized)
agtactgccagtggcacttctgggcagagtactactgcgccaaatttggtgcctggagtaggagctagtatgttcaacacaccaggaatgcagagcttgttgcaacaaataactgaaaac

SEQ ID NO: 315974 - DNA, 120 bp, Artificial Sequence
  ENSG00000135018_12 (sequence is synthesized)
ccacaactgatgcaaaacatgttgtctgccccctacatgagaagcatgatgcagtcactaagccagaatcctgaccttgctgcacagatgatgctgaataatcccctatttgctggaaat

SEQ ID NO: 315975 - DNA, 120 bp, Artificial Sequence
  ENSG00000135018_13 (sequence is synthesized)
cctcagcttcaagaacaaatgagacaacagctcccaactttcctccaacaaatgcagaatcctgatacactatcagcaatgtcaaaccctagagcaatgcaggccttgttacagattcag

SEQ ID NO: 315976 - DNA, 120 bp, Artificial Sequence
  ENSG00000135018_14 (sequence is synthesized)
cagggtttacagacattagcaacggaagccccgggcctcatcccagggtttactcctggcttgggggcattaggaagcactggaggctcttcgggaactaatggatctaacgccacacct

SEQ ID NO: 315977 - DNA, 120 bp, Artificial Sequence
  ENSG00000135018_15 (sequence is synthesized)
agtgaaaacacaagtcccacagcaggaaccactgaacctggacatcagcagtttattcagcagatgctgcaggctcttgctggagtaaatcctcagctacagaatccagaagtcagattt

SEQ ID NO: 315978 - DNA, 120 bp, Artificial Sequence
  ENSG00000135018_16 (sequence is synthesized)
tgggatttttgaaccgtgaagcaaacttgcaagctctaatagcaacaggaggtgatatcaatgcagctattgaaaggttactgggctcccagccatcatagcagcatttctgtatcttga

SEQ ID NO: 315979 - DNA, 120 bp, Artificial Sequence
  ENSG00000135018_17 (sequence is synthesized)
aaaaatgtaatttatttttgataacggctcttaaactttaaaatacctgctttatttcattttgactcttggaattctgtgctgttataaacaaacccaatatgatgcattttaaggtgg

SEQ ID NO: 315980 - DNA, 120 bp, Artificial Sequence
  ENSG00000135018_18 (sequence is synthesized)
agtacagtaagatgtgtgggtttttctgtatttttcttttctggaacagtgggaattaaggctactgcatgcatcacttctgcatttattgtaattttttaaaaacatcaccttttatag

SEQ ID NO: 315981 - DNA, 120 bp, Artificial Sequence
  ENSG00000135018_19 (sequence is synthesized)
ttgggtgaccagattttgtcctgcatctgtccagtttatttgctttttaaacattagcctatggtagtaatttatgtagaataaaagcattaaaaagaagcaaatcatttgcactctata

SEQ ID NO: 315982 - DNA, 120 bp, Artificial Sequence
  ENSG00000135018_20 (sequence is synthesized)
atttgtggtacagtattgcttattgtgactttggcatgcatttttgcaaacaatgctgtaagatttatactactgataattttgttttatttgtatacaatatagagtatgcacatttgg

SEQ ID NO: 315983 - DNA, 120 bp, Artificial Sequence
  ENSG00000135018_21 (sequence is synthesized)
gactgcatttctggaaacatactgcaataggctctctgagcaaaacacctgtaactaaaaaagtgaagataagaaaatactcttaaagctgagtatttcctaattgtatagaatcttaca

SEQ ID NO: 315984 - DNA, 120 bp, Artificial Sequence
  ENSG00000135018_22 (sequence is synthesized)
gcatctttgacaaacatctcccagcaaaagtgccggttagtcaggtttgttgaaaatacagtagaaaagctgattctggttatctctttaaggacaattaattgtacagacacataatgt

SEQ ID NO: 315985 - DNA, 120 bp, Artificial Sequence
  ENSG00000135018_23 (sequence is synthesized)
aacattgtctcaacattcattcacagattgactgtaaattaccttaatctttgtgcagactgaaggaacactgtagtataccccaaagtgcatttgcctaggacttctcagcttctccca

SEQ ID NO: 315986 - DNA, 120 bp, Artificial Sequence
  ENSG00000135018_24 (sequence is synthesized)
taggtagtttaacaggcattaaaatttgtaattgaaatgttgctttcactgaaaaagtgtcttgatgtttcagttatttttaatcgccataaaaaaatagaactatcttttgggtttatc

SEQ ID NO: 315987 - DNA, 120 bp, Artificial Sequence
  ENSG00000135018_25 (sequence is synthesized)
tgttttctcatgcacaggcaatacacaaatttaaaatgagttgtgagccaattgtttctgaagtgttttggtagttctattaagaaatagttaaatattgtgcttttcagagcctcagag

SEQ ID NO: 315988 - DNA, 120 bp, Artificial Sequence
  ENSG00000135018_26 (sequence is synthesized)
aaagggggacggggtgggggggtggggcagcggaatctgtcctggatggggccagcttaaataatactggcaaccaagattctgttaggatttctgtgcatatagtgtagtaaagaagta

SEQ ID NO: 315989 - DNA, 120 bp, Artificial Sequence
  ENSG00000135018_27 (sequence is synthesized)
tcattcaggggtgaaaaacaaagagccgttttaatgatgttgagtacatttggctgttttatagcctttttcttccctcccccaaagaattctgtttgcctaactcccaaactgttgggg

SEQ ID NO: 315990 - DNA, 120 bp, Artificial Sequence
  ENSG00000135018_28 (sequence is synthesized)
tggtacattcctttaggaccaattaaaacataattgagggtcagtgatacatttggctgactctggttcagtattctcttaggtgattatattctctcatgtacagttacaggaaattaa

SEQ ID NO: 315991 - DNA, 120 bp, Artificial Sequence
  ENSG00000135018_29 (sequence is synthesized)
aatgttaaagtaacctaaaatgaattcagaccaataaaatcaagggaaatacaagttgattgcattacttctgtatgttgcttgctattaaaaaggttaagaggccaggttacccaccag

SEQ ID NO: 315992 - DNA, 120 bp, Artificial Sequence
  ENSG00000135018_30 (sequence is synthesized)
tccttgcactgttctgacactttccccaggaggaaaacaagtacaaaggttacggtggaggcataagtagaagagattgttaagaagggtattcatgtgtctttgctctttctgctttat

SEQ ID NO: 315993 - DNA, 120 bp, Artificial Sequence
  ENSG00000135018_31 (sequence is synthesized)
gcctcagtttggtttaaaaacttctgtactggcaaatggtggtattcagtgtgggatagtgtcataactaatttgacaatttattaatcataaaataacaataaatctctagcttttaca

SEQ ID NO: 315994 - DNA, 120 bp, Artificial Sequence
  ENSG00000135018_32 (sequence is synthesized)
ctgattttcttccattatggaaatggctttcatgatggacttaggaggaggtcaagtaataatttgcacactaggtttgctgtcaaagaggagatacttgcgtttattttgggaaagaaa

SEQ ID NO: 315995 - DNA, 120 bp, Artificial Sequence
  ENSG00000135018_33 (sequence is synthesized)
ttatggattaccagtgtccaggagtaaggttttagattttctccagaagcataacagagaaaagatttaaaaatttacgttcactgattttaattcctttgtaaccactagttttctttc

SEQ ID NO: 315996 - DNA, 120 bp, Artificial Sequence
  ENSG00000135018_34 (sequence is synthesized)
gcacaggtgagtttgtaattgtattgaaaaagactgtgcagtgtgaattaaaataacctaatcttgtaattgtgattttggcacatttgtgttgtgtatgatatcttaatacactagaaa

SEQ ID NO: 315997 - DNA, 120 bp, Artificial Sequence
  ENSG00000135018_35 (sequence is synthesized)
aataagtaaactgtgtctccaattttttagaccgtgtgtttctttgcagtaaattaatacttcatatgtaattaaaacaactttatctctgccattcattgactagaaagaagtgcaggt

SEQ ID NO: 315998 - DNA, 120 bp, Artificial Sequence
  ENSG00000135018_36 (sequence is synthesized)
ttagtttgtttctacatatgttgagttaggagacaagtacagagttctggaatgcccactcttttgaagataaactacttaatgaaatgtaaatcttgaaagcaattaagagcaatgtta

SEQ ID NO: 315999 - DNA, 120 bp, Artificial Sequence
  ENSG00000135018_37 (sequence is synthesized)
atacatttgaaatacttttatttagtagatcactcagattataatagtcatgctcagaatggcagttgtaaaatagcatttattaaagacgggaatttgtcagaacaatgttctccttct

SEQ ID NO: 316000 - DNA, 120 bp, Artificial Sequence
  ENSG00000135018_38 (sequence is synthesized)
ttcaactattgattcccctgctgaaaatcgtatacaggtcccttattaatgtattcctttttctaatttgtttctaaagagaccacagctaagaaaattggggatcttaatgctggctga

SEQ ID NO: 316001 - DNA, 120 bp, Artificial Sequence
  ENSG00000135018_39 (sequence is synthesized)
acactcaggatcacttgggaagctttatagacagtaccgatggttggggcctcatccttagagattttgagataattgcgtccgataaccctttctccctcaagttgcctaggtactatc

SEQ ID NO: 316002 - DNA, 120 bp, Artificial Sequence
  ENSG00000135018_40 (sequence is synthesized)
taggttccataccacagggcttgaaaaaccacggagaatgtgaaataaaccttgataatctgtagtttatatttgctgttcgttaaaaatggcttctgtagtgtgtcaggaatttggaag

SEQ ID NO: 316003 - DNA, 120 bp, Artificial Sequence
  ENSG00000135018_41 (sequence is synthesized)
actttatagttaatctcatcccttaaattttaaaagctttaagtcaaatgaatggtttttattttctaaattctaaaactatattgattcaggtatctttgtgtataattctcagtaata

SEQ ID NO: 316004 - DNA, 120 bp, Artificial Sequence
  ENSG00000135018_42 (sequence is synthesized)
acttatgccctcaccaaatttgtggaattggaaataacaaattttaagaagaatttttgtgtctgtgattctgtatattggaggtacattttatggaagattgatttatgcatatgaaac

SEQ ID NO: 316005 - DNA, 120 bp, Artificial Sequence
  ENSG00000135018_43 (sequence is synthesized)
ttatcagactgagttgttagtattaaatgcttcaatttaccataataagccattttaagtgtgtatttggctaatactgaatgtgcatcttgcttttaaaatttgactttaacaagcaca

SEQ ID NO: 316006 - DNA, 120 bp, Artificial Sequence
  ENSG00000135018_44 (sequence is synthesized)
tgcgtagcaattttgtaataatcttactttagtaaagtgacttgagcactcacatactatttttttactctaaaacaaaatgttgctagtactagattggcatgtcttttattacagata

SEQ ID NO: 316007 - DNA, 120 bp, Artificial Sequence
  ENSG00000135018_45 (sequence is synthesized)
atttagaaacttttacaatgttcttgttatctgcagattaaaatttgtggtttttctattcttttgatttttaaatatttaaaaagactcttgagtgtaaaaacttgtggtataagcact

SEQ ID NO: 316008 - DNA, 120 bp, Artificial Sequence
  ENSG00000135018_46 (sequence is synthesized)
caggtaagttataagaagtatctaataagatgattatctgtgaaaggatacgtttaagatgacatgcttttttaagatgaaatgaagtgaattccaaaagatatgtgtgataacctcgtt

SEQ ID NO: 316009 - DNA, 120 bp, Artificial Sequence
  ENSG00000135018_47 (sequence is synthesized)
aatatgttgatgataagtatttggaaccaataaagaagcaggtttgttgaccttaagcctgtatgagtttacttactgtgaacttactggtcactttgaaataaatactgtatgttcctg

SEQ ID NO: 316010 - DNA, 120 bp, Artificial Sequence
  ENSG00000135018_48 (sequence is synthesized)
aaaggttgtctgacatctgcttttgttattgtattgaaattaactaaaagatcactttgcaagaattggggcgaattttctctaccagcatttacattgctcttaaatacggttaacttc

SEQ ID NO: 316011 - DNA, 120 bp, Artificial Sequence
  ENSG00000135018_49 (sequence is synthesized)
ttgagggcaaggatcatttcctccccagactttggatagataaataggctatcagtaaatccttgttagttgactttttactccgcctggggaaaatgatataaaatgtgtcttttgaag

SEQ ID NO: 316012 - DNA, 120 bp, Artificial Sequence
  ENSG00000135018_50 (sequence is synthesized)
ctacaagaatttattagctctggttatgctccttgtgtattttaatcttattttcaggtatatgacatcatactaataatgatcctgatttttaaattcttaacgtttatttgaagttta

SEQ ID NO: 316013 - DNA, 120 bp, Artificial Sequence
  ENSG00000135018_51 (sequence is synthesized)
cttggtgttctcaaatggatttacatcttttaggtcttaaatcattttaatacttttcccagaggactgttggtgctaggcctgactgattttcacctagcagctccatttctctggcaa

SEQ ID NO: 316014 - DNA, 120 bp, Artificial Sequence
  ENSG00000135018_52 (sequence is synthesized)
gttggttgctgttttgcggtgttatttttttggacctaatattagctgttttgtagtaggcaggtagatgtagtggtccttttcagatctagattttctctgtgcctgccacttgtgtgt

SEQ ID NO: 316015 - DNA, 120 bp, Artificial Sequence
  ENSG00000135018_53 (sequence is synthesized)
tgaggtttctaagcaagccatgttacatagttcatgtattgatgtttatgtttattctgccagtgtagtagaaaatatatcttcatgaatgccagttactcccatttttctttcaatggc

SEQ ID NO: 316016 - DNA, 120 bp, Artificial Sequence
  ENSG00000135018_54 (sequence is synthesized)
atatattcacgtttgttcaaggaaaagcctaagaaaatgattgcttttattttttaggatattgcatgtcattatcataaccaccattctcattgagagagaatatgcctcatttttttg

SEQ ID NO: 316017 - DNA, 120 bp, Artificial Sequence
  ENSG00000135018_55 (sequence is synthesized)
tttttgttcttctggagatccctcttgtggacagtatcttcccttttcctttttttatttatgttctaccttcctcccttttaagtgccagctgaggcacttgggggaagatagaataaa

SEQ ID NO: 316018 - DNA, 120 bp, Artificial Sequence
  ENSG00000135018_56 (sequence is synthesized)
gcggccgctgcctccgcggagcccaaaatcatgaaagtcaccgtgaagaccccgaaggaaaaggaggaattcgccgtgcccgagaatagctccgtccagcagacgttggaacttgccagg

SEQ ID NO: 316019 - DNA, 120 bp, Artificial Sequence
  ENSG00000135040_0 (sequence is synthesized)
atacgcatgcgtgcacgctgccggtcgggctgggctgagaggggagggggcggcggcggccgaggcggcgtcgttatttccgtggtccggacagtgcgtggcggcgcgggtgaccacggg

SEQ ID NO: 316020 - DNA, 120 bp, Artificial Sequence
  ENSG00000135040_1 (sequence is synthesized)
agaagtaggcataatggttatgaaagcttctgtagatgatgacgattcaggatgggagctcagtatgccagaaaaaatggagaaaagcaatacaaactgggtggacattacccaagattt

SEQ ID NO: 316021 - DNA, 120 bp, Artificial Sequence
  ENSG00000135040_2 (sequence is synthesized)
tgaagaagcttgtcgagaattaaagttgggagaactacttcatgataagctatttggtctttttgaagccatgtctgctattgaaatgatggatcccaagatggatgctggcatgattgg

SEQ ID NO: 316022 - DNA, 120 bp, Artificial Sequence
  ENSG00000135040_3 (sequence is synthesized)
aaaccaagttaatcgaaaagttctcaattttgaacaagctatcaaggatggcactattaaaattaaagatctcaccttgcctgaactgatagggattatggatacatgtttttgctgttt

SEQ ID NO: 316023 - DNA, 120 bp, Artificial Sequence
  ENSG00000135040_4 (sequence is synthesized)
gataacgtggttagaaggccattcactggcacagacagtatttacgtgcctttacattcataatccagactttatagaagatcctgctatgaaggcttttgctctgggaatcttgaaaat

SEQ ID NO: 316024 - DNA, 120 bp, Artificial Sequence
  ENSG00000135040_5 (sequence is synthesized)
ctgtgacattgcaagggaaaaagtaaataaagctgctgtttttgaagaggaagattttcagtcaatgacttatggatttaaaatggctaacagtgtgacagatcttcgagttacaggcat

SEQ ID NO: 316025 - DNA, 120 bp, Artificial Sequence
  ENSG00000135040_6 (sequence is synthesized)
gctaaaagatgtggaggatgacatgcaaagaagagtaaagagtactcgaagtcgacaaggagaagaaagagatccagaagttgaactagaacaccaacaatgtttagcagtattcagcag

SEQ ID NO: 316026 - DNA, 120 bp, Artificial Sequence
  ENSG00000135040_7 (sequence is synthesized)
agtgaaatttactcgtgtgttactgacagtgcttatagcctttactaagaaagagaccagtgctgttgcagaagctcaaaaattgatggttcaagcagcagatcttctttctgccattca

SEQ ID NO: 316027 - DNA, 120 bp, Artificial Sequence
  ENSG00000135040_8 (sequence is synthesized)
taattcattgcatcatggcatccaggcccagaatgatactacaaaaggagatcatccaattatgatgggttttgaaccccttgtgaaccagaggctacttccacctaccttccctcgata

SEQ ID NO: 316028 - DNA, 120 bp, Artificial Sequence
  ENSG00000135040_9 (sequence is synthesized)
tgcaaaaataattaaaagggaagaaatggtgaactattttgcaagattaatagatagaataaaaactgtctgtgaggttgtgaatttaacaaatttacattgtatcctggattttttctg

SEQ ID NO: 316029 - DNA, 120 bp, Artificial Sequence
  ENSG00000135040_10 (sequence is synthesized)
tgaatttagtgaacagtcaccatgtgttctttcaagatctctgttacaaaccactttcctggtggataacaaaaaggtctttggaactcatctcatgcaagacatggtgaaagatgcact

SEQ ID NO: 316030 - DNA, 120 bp, Artificial Sequence
  ENSG00000135040_11 (sequence is synthesized)
tcggtcttttgtcagtcctccggtgctttcccccaagtgctacctatataataatcaccaggctaaggactgtatcgactcctttgttactcactgtgttcggccattctgtagtcttat

SEQ ID NO: 316031 - DNA, 120 bp, Artificial Sequence
  ENSG00000135040_12 (sequence is synthesized)
tcagatccatggacataacagggctcgacagagagataagcttggtcatattcttgaggaatttgccaccttgcaggatgaggcagagaaggttgatgcagcgcttcacaccatgctgtt

SEQ ID NO: 316032 - DNA, 120 bp, Artificial Sequence
  ENSG00000135040_13 (sequence is synthesized)
gaaacaggaaccccaaaggcaacatttggcctgtttaggtacctgggtcctttaccataaccttcgcattatgatacagtaccttctaagtggctttgaattggaactctacagtatgca

SEQ ID NO: 316033 - DNA, 120 bp, Artificial Sequence
  ENSG00000135040_14 (sequence is synthesized)
cgagtactattacatatattggtatctctctgaattcctttacgcatggttgatgtcaacattgagtcgtgccgatggctctcaaatggcagaggaaaggataatggaagagcagcagaa

SEQ ID NO: 316034 - DNA, 120 bp, Artificial Sequence
  ENSG00000135040_15 (sequence is synthesized)
aggccgtagtagtaaaaaaacaaagaaaaaaaagaaagttcgcccattgagccgagagatcacaatgagccaagcatatcagaacatgtgtgctggaatgtttaaaaccatggtagcatt

SEQ ID NO: 316035 - DNA, 120 bp, Artificial Sequence
  ENSG00000135040_16 (sequence is synthesized)
tgacatggacggcaaagtacgtaaaccgaagtttgagcttgatagtgaacaagttcggtatgaacacaggtttgctccattcaacagtgtgatgaccccgccgccagtgcactacttaca

SEQ ID NO: 316036 - DNA, 120 bp, Artificial Sequence
  ENSG00000135040_17 (sequence is synthesized)
gttcaaggaaatgtctgacctcaataaatatagccctcctcctcagtctcctgaactgtatgtggcagctagtaagcactttcaacaggcaaaaatgatattggaaaatattcctaaccc

SEQ ID NO: 316037 - DNA, 120 bp, Artificial Sequence
  ENSG00000135040_18 (sequence is synthesized)
ggaccatgaggttaatagaattttaaaggttgccaaacccaactttgtggttatgaagttattggcaggaggacacaaaaaggaatctaaagttcctcctgaatttgatttctctgctca

SEQ ID NO: 316038 - DNA, 120 bp, Artificial Sequence
  ENSG00000135040_19 (sequence is synthesized)
taaatattttcctgttgtgaaacttgtttgagagagactggggaggtggccataaaggggcagagtcttctttcagacccaactcttagagggcacatcaccaggctccacatcacggga

SEQ ID NO: 316039 - DNA, 120 bp, Artificial Sequence
  ENSG00000135040_20 (sequence is synthesized)
agtgagatggatttcttgggtaacaactcattataaggaatacttttagtttgacagccttatatgacatgaatgaaaactgctgttttaaagtggtttattatgttccatggaagaaac

SEQ ID NO: 316040 - DNA, 120 bp, Artificial Sequence
  ENSG00000135040_21 (sequence is synthesized)
tggtcttattgaatgcattgatgaacgttatatggttttattacagatttaatcacaaatcattttttatgaatgattgagtgaaaatagtgtttataaaggttaataaatttcttgaca

SEQ ID NO: 316041 - DNA, 120 bp, Artificial Sequence
  ENSG00000135040_22 (sequence is synthesized)
aaaaaaaaatgcactgctggagatgaaaaacagtaggtctttgtccatgttaagaactgaagaaggtgtatgctctttaacatttgagtagttccaaaaacgttatccaaaagaagtttc

SEQ ID NO: 316042 - DNA, 120 bp, Artificial Sequence
  ENSG00000135040_23 (sequence is synthesized)
aaatcaagggattaattaaacacttgtatgagattttggtaaaatacatttagaagggatttttgggagggcctctaaattacatgaaaattgtgatttttatgtgtcatgacatcacaa

SEQ ID NO: 316043 - DNA, 120 bp, Artificial Sequence
  ENSG00000135040_24 (sequence is synthesized)
aaaagattatacattgtttgctggtgacatgcaaaaaggaggcagatagaaatgtatatagattaaaatttaggactaggtttaaatgtggtgtactttttgtttacttcatattcagtt

SEQ ID NO: 316044 - DNA, 120 bp, Artificial Sequence
  ENSG00000135040_25 (sequence is synthesized)
taacccatgaaacattttcaaatgggtgtctgttcagtatcctctggctttgaaaaactgactacatccccctgtgcttgcaagtgcctgctgccagaggccctccccttcctttcctgc

SEQ ID NO: 316045 - DNA, 120 bp, Artificial Sequence
  ENSG00000135040_26 (sequence is synthesized)
ttgtcctgtgtctgctctgatgtttgcggtggcagctttctaggcctcttgggccttcctttttgtcctctgtagcaggcaatactcttagcaaaatgagttactctgtggtgtaaattg

SEQ ID NO: 316046 - DNA, 120 bp, Artificial Sequence
  ENSG00000135040_27 (sequence is synthesized)
gctttggtggcttagcctaagactagtgacagttttatatttggtctgtggttaaaagggttctcagcttcaaatatcttaactctgatttggtacctttcataaaaacatgatagtata

SEQ ID NO: 316047 - DNA, 120 bp, Artificial Sequence
  ENSG00000135040_28 (sequence is synthesized)
gtgaaacttttctggcagtactttaaagcagctaacctgactgaacttgctaagggtgttcctgttgcccctctttgcagctaatgagccctcttggctctcctttccaagagcggtaat

SEQ ID NO: 316048 - DNA, 120 bp, Artificial Sequence
  ENSG00000135040_29 (sequence is synthesized)
acttgtgttattcaagaacagccattaggtgtcctgaaatttcagaaccgaaaaatcttaaaaaaaattattttttaagtagcctgtacaatagaaacttcaattatggagagacaaaga

SEQ ID NO: 316049 - DNA, 120 bp, Artificial Sequence
  ENSG00000135040_30 (sequence is synthesized)
gtatacctgttactgatgtagttactttgttgagaatgaaaactgtttctggctggtaattactgaatgctttaaacaaaaaaaggcaaaggaatggtaggaaataggcaagacaagaaa

SEQ ID NO: 316050 - DNA, 120 bp, Artificial Sequence
  ENSG00000135040_31 (sequence is synthesized)
caaagaatcaaaagaaaaagcaaagaggaaaacagaatgagcatggacatttggcaaacaaccaagaagagagcctgaagcaagttagaaagctgagaaattattattctttcccagtgg

SEQ ID NO: 316051 - DNA, 120 bp, Artificial Sequence
  ENSG00000135040_32 (sequence is synthesized)
ccaagatacaaagtataaaaaatatgtcccccttaaaagcaaaaaaaggaatgtagattaatgcaacaagggccctgctagatgatgggatcacttttaattaagagggtgtgctggcat

SEQ ID NO: 316052 - DNA, 120 bp, Artificial Sequence
  ENSG00000135040_33 (sequence is synthesized)
tttttagctactatgtctgattgggtctgctggtatagacgagcatctaggttattttgaagtaggtcttcctaagtaaaagttttcctattaacccattatcaactaaaaaagattgat

SEQ ID NO: 316053 - DNA, 120 bp, Artificial Sequence
  ENSG00000135040_34 (sequence is synthesized)
tagtgttagatttatcagtgtatgttactgacagaatcatgtggtttcctttaagtagctttaatttttggtttttagtttgtttagagaggaggtttcactatgttgcccaaactgacc

SEQ ID NO: 316054 - DNA, 120 bp, Artificial Sequence
  ENSG00000135040_35 (sequence is synthesized)
gcctcagcccccagagtagctgggattataggcaaatgcctgcttggctagtttttgtttttaaacagcaggtttctaattataaaaacaaatttgccattttataatttttaaagtaat

SEQ ID NO: 316055 - DNA, 120 bp, Artificial Sequence
  ENSG00000135040_36 (sequence is synthesized)
tttgccattttataatttttaaagtaatctgccattcaaggtacttactgaaaaaaacaataggagaaataagacagtctcctgtcatagagcttttatcatcttacgacaaatacagaa

SEQ ID NO: 316056 - DNA, 120 bp, Artificial Sequence
  ENSG00000135040_37 (sequence is synthesized)
aagcaacaggtattgaaaatgcagtgaagaatatgctgtatgctgggtaggagaactgccccacgtgaaactttaggtgacaaatccccatcgcatctattcaggaggcactgctgggaa

SEQ ID NO: 316057 - DNA, 120 bp, Artificial Sequence
  ENSG00000135040_38 (sequence is synthesized)
aagggtcccagacagaatgtgcacaggcttggaggggagagggtagcagcctggccgaagtatagagcaggaaaaggatggcggagatgagaggcaaggagaagccgatacccaaaaccc

SEQ ID NO: 316058 - DNA, 120 bp, Artificial Sequence
  ENSG00000135040_39 (sequence is synthesized)
tgggaggccacaggttaaagattttggactttattctgatattggtagattctactgaaggcttgtatgcagggacatgatgggatcaagtcaaatctgcttgcctgagaatggttgaaa

SEQ ID NO: 316059 - DNA, 120 bp, Artificial Sequence
  ENSG00000135040_40 (sequence is synthesized)
agggaggcagggaagccagtcacgtgagagaaaatgttggtcttaacaaaggtagtggcagagcaggtggaagaaagtggatgaaatcaaatgttttcagaggtacagctaatgggacat

SEQ ID NO: 316060 - DNA, 120 bp, Artificial Sequence
  ENSG00000135040_41 (sequence is synthesized)
ggtgaatgagagtttctgccaaaatcaaggatgatttttcagaaatttttttggctttggcaactagacgatggtggtgccacttgtgtagatatctaggcaaggtaggagaccaggttt

SEQ ID NO: 316061 - DNA, 120 bp, Artificial Sequence
  ENSG00000135040_42 (sequence is synthesized)
gggataaagattgctttagacattgagatatctttgggacatcctggtgaagatggcaggtagtttggtctcaaactgggaggtgccatctggggtggagatgaactgaggactcagtaa

SEQ ID NO: 316062 - DNA, 120 bp, Artificial Sequence
  ENSG00000135040_43 (sequence is synthesized)
ctatagtcactgtaattttctgggggttgccattgctcagggagctcctagagtaagggactgagataggtcccaaggaatagacttgggagggccagggaatggggaggccactgaggt

SEQ ID NO: 316063 - DNA, 120 bp, Artificial Sequence
  ENSG00000135040_44 (sequence is synthesized)
ggtgggacaggctgcagggaagaatacctcaaaatcatacgaggccactctttgacaagtgtgcctgtttcaccgttttgtttgcacaagactctaagacagtatactgccttaaataaa

SEQ ID NO: 316064 - DNA, 120 bp, Artificial Sequence
  ENSG00000135040_45 (sequence is synthesized)
gtgcaccctgtttggaaaagttcaggagaggtgggtgttttccttgttcctctttggctatgctctgggcactggaaaaagcctgcaaaggagacttatcaggaaaataagcagaatgag

SEQ ID NO: 316065 - DNA, 120 bp, Artificial Sequence
  ENSG00000135040_46 (sequence is synthesized)
ggccatatgccgctcagaggccattaagagaaggactgaaaagagcccattgaacttggcaagtaaagattgctggcgactggggcgagctctttcttgaaggggtggggcagaagctgg

SEQ ID NO: 316066 - DNA, 120 bp, Artificial Sequence
  ENSG00000135040_47 (sequence is synthesized)
aaagtcagttgaggtgtagaccatgcagtgaggaaagagcgactcaactgggcttgaagaactgacttccccatattcatacttgccccactctatttgtggagtggctggtatgatctt

SEQ ID NO: 316067 - DNA, 120 bp, Artificial Sequence
  ENSG00000135040_48 (sequence is synthesized)
cattgcaagggaaaaagtaaataaagctgctgtttttgaagagatttcgcggctcctagaactgattgattttcatgaatataattttaaaaatgaaaatgttcaatgttggaaggaatg

SEQ ID NO: 316068 - DNA, 120 bp, Artificial Sequence
  ENSG00000135040_49 (sequence is synthesized)
gcttatgcgcccagtgggaccggggctgggctgggctgacccgggcagggcggaagggaagcgtgtgcccgcctcaggtgtgcctcggccctaggcccggccggcgggaccctgcggtgc

SEQ ID NO: 316069 - DNA, 120 bp, Artificial Sequence
  ENSG00000135040_50 (sequence is synthesized)
ctgccggctcctcattgctcccggcgaggttctgcctgggtccgggccggctctggcccgggagaggtcccagcgagctctggccagatgaagggctaccttgattgacttcggtagctg

SEQ ID NO: 316070 - DNA, 120 bp, Artificial Sequence
  ENSG00000135040_51 (sequence is synthesized)
atccaggcccagaatgatactacaaaaggaggtctctgacatcttctagagatggaggtggaagtcagagataatgtgtaaaactgaaaagaaacgaaggagtactctaagcttgttttt

SEQ ID NO: 316071 - DNA, 120 bp, Artificial Sequence
  ENSG00000135040_52 (sequence is synthesized)
tgaaaagaaacgaaggagtactctaagcttgttttttgccaatgtgtagatcagaggtgtccaatcttttttttttgagacgaagtttcactattgttgcctaggctggagtgcaatggc

SEQ ID NO: 316072 - DNA, 89 bp, Artificial Sequence
  ENSG00000135040_53 (sequence is synthesized)
tcccgggttcaaatgattctcttacctcactcaccatgcccggctaactttttgtattctttttttagtggagacggagtttcaccatg

SEQ ID NO: 316073 - DNA, 71 bp, Artificial Sequence
  ENSG00000135040_54 (sequence is synthesized)
ggggtgtccaatcttttggcttcccagggccaccctggaagaagaattggtcttgcatcacacataaaata

SEQ ID NO: 316074 - DNA, 120 bp, Artificial Sequence
  ENSG00000135040_55 (sequence is synthesized)
accctggaagaagaattggtcttgcatcacacataaaatatgctaatgagagctgatgagccaaaaaaagaaaaaatcaccaaaacaaatctcataatgttttaataaagtttacaaact

SEQ ID NO: 316075 - DNA, 120 bp, Artificial Sequence
  ENSG00000135045_0 (sequence is synthesized)
agagtgcgcgcgcgcacgttgtgcgcaggttcgaatctccgccgcttcgcggttgcttctcaacgtccgggccgcatctcggcggcggcgagggctgagcgcgggagctgcctccgagcc

SEQ ID NO: 316076 - DNA, 120 bp, Artificial Sequence
  ENSG00000135045_1 (sequence is synthesized)
ggagccccagccctaggccctgcgcgagctgccccgccctaccccctccagcgtcctgtcgcctcctcgcccgacttcggcctgtccctctctcacgcgctcagtcctcgctcttcgccc

SEQ ID NO: 316077 - DNA, 120 bp, Artificial Sequence
  ENSG00000135045_2 (sequence is synthesized)
cccgcagctatcggcactcggtctcccgcgcctggcgggctccgcccgagcctctgggcccatggccaagcggcgtgcggccgagccggtgacgttccacgtgccttggaagcggctcct

SEQ ID NO: 316078 - DNA, 120 bp, Artificial Sequence
  ENSG00000135045_3 (sequence is synthesized)
gctttgcgacttcgctgagcagccgccgccaccgcctctctggatccggccgcccggggtcgcgcatgctgggcagctcctcggcgtcccagagcagcaccgaaagcgcaaaatcgacgc

SEQ ID NO: 316079 - DNA, 120 bp, Artificial Sequence
  ENSG00000135045_4 (sequence is synthesized)
agggaccatggcagagccctcggcttcgcccagcaagcgccgtgacagcggggacaacagcgccccgagcggccaggagcgtgaggaccacggtctggagacaggcgatccgccgctgcc

SEQ ID NO: 316080 - DNA, 120 bp, Artificial Sequence
  ENSG00000135045_5 (sequence is synthesized)
gggggaggagctcccgggcgcccggctcccggggggcggtggcgacgacggggcggggcgcgcaggacccccgcggggagactggggggtcgcatcgcgccagcacaatgaagaattttg

SEQ ID NO: 316081 - DNA, 120 bp, Artificial Sequence
  ENSG00000135045_6 (sequence is synthesized)
gcgccagcacaatgaagaattttggcagtataataccttccagtactggaggaatcctttgcctcctattgatctggcagacattgaagatttaagtgaagacaccctgacagaagcaac

SEQ ID NO: 316082 - DNA, 120 bp, Artificial Sequence
  ENSG00000135045_7 (sequence is synthesized)
acttcagggcaggaatgaaggggctgaggttgacatggagtcctgatgtaaggagccgaagcagtgggattggctgatttgaggagatgtctctaagtgaattctcgtattcttaaggga

SEQ ID NO: 316083 - DNA, 120 bp, Artificial Sequence
  ENSG00000135045_8 (sequence is synthesized)
aaagttattttccatacttgaagttatatttccaaacctgagaaatgaagaaagattgttctgacattaaatacctacagttactactgaacctcttaataaggatttgtcaaggataga

SEQ ID NO: 316084 - DNA, 120 bp, Artificial Sequence
  ENSG00000135045_9 (sequence is synthesized)
aaggtactgatcttataaaaagaaattctagcagttttagaaataggtgggaaaaactcaaatattcctcctatctgcaccaaaaagtttatttgtggtatataaaatgaatattgtttt

SEQ ID NO: 316085 - DNA, 120 bp, Artificial Sequence
  ENSG00000135045_10 (sequence is synthesized)
ataataacttgttaataaagtactttctaatacattctattgactctgttagttgaacaaatagctgacttgaacatctatgcaaacttaagatgggcgggattgttgtaaaagctattg

SEQ ID NO: 316086 - DNA, 120 bp, Artificial Sequence
  ENSG00000135045_11 (sequence is synthesized)
ttttaaaagagctttctaaatgtaaagtagtgataatttcaatttgggtagcgtgtttgcaaagcttccaatatttgatgttggttaagctctactatgggcaactgaagatggataaag

SEQ ID NO: 316087 - DNA, 120 bp, Artificial Sequence
  ENSG00000135045_12 (sequence is synthesized)
aaaaatgaaaactgaatcggtgcctgcttccccctgttttcccaggattagaggaaaaaatttattgtataatcagcttcttggttttgaattgcttcgaggcatggttttattccttat

SEQ ID NO: 316088 - DNA, 120 bp, Artificial Sequence
  ENSG00000135045_13 (sequence is synthesized)
tactttagacctgtagttttcaacactgacagcactttaaaaatctttgcctgggcctcactcttgagagattctcatttaatagttctgaggtgggtcttggatataactattttttta

SEQ ID NO: 316089 - DNA, 120 bp, Artificial Sequence
  ENSG00000135045_14 (sequence is synthesized)
aacacctgtcctgtttccctccattcctctcatgtgcagacagggttgagaaccagtagactaatggtcgtttttcctgtttaaaggagataactaatttgagctgaagcaatgcttctt

SEQ ID NO: 316090 - DNA, 120 bp, Artificial Sequence
  ENSG00000135045_15 (sequence is synthesized)
aattagctttgtttttgttttgctctgttggtggctttgttacaactgaattattgtgttattactatttcattgttaaagaaataaagtaagcaatttgtgatgtgagtatcagtgatt

SEQ ID NO: 316091 - DNA, 120 bp, Artificial Sequence
  ENSG00000135045_16 (sequence is synthesized)
aagttaactaacttttgtactgcatccagaatgttggttttgcaattgagtaactggttcttgcttgcattttttgttgttgatgacattagatccaaaattcaagacaaatggtaaatg

SEQ ID NO: 316092 - DNA, 120 bp, Artificial Sequence
  ENSG00000135045_17 (sequence is synthesized)
ccattgagagggaaagagaaaaacttgattttttttgtgtaatgaaggatttaagaatgggttgacattaataagaatgctttagaacagaagacaaactgtattgcattgtggtcagac

SEQ ID NO: 316093 - DNA, 120 bp, Artificial Sequence
  ENSG00000135045_18 (sequence is synthesized)
atggttcaaagtcttgtactgccacttcctacctatgtatctttaagccagttatttttcatctccaagcctcaaatttctcacctgtaaaatgagaaataataaatagtatctacctca

SEQ ID NO: 316094 - DNA, 120 bp, Artificial Sequence
  ENSG00000135046_0 (sequence is synthesized)
agtgtgaaatcttcagagaagaatttctctttagttctttgcaagaaggtagagataaagacactttttcaaaaatggcaatggtatcagaattcctcaagcaggcctggtttattgaaa

SEQ ID NO: 316095 - DNA, 120 bp, Artificial Sequence
  ENSG00000135046_1 (sequence is synthesized)
atgaagagcaggaatatgttcaaactgtgaagtcatccaaaggtggtcccggatcagcggtgagcccctatcctaccttcaatccatcctcggatgtcgctgccttgcataaggccataa

SEQ ID NO: 316096 - DNA, 120 bp, Artificial Sequence
  ENSG00000135046_2 (sequence is synthesized)
tggttaaaggtgtggatgaagcaaccatcattgacattctaactaagcgaaacaatgcacagcgtcaacagatcaaagcagcatatctccaggaaacaggaaagcccctggatgaaacac

SEQ ID NO: 316097 - DNA, 120 bp, Artificial Sequence
  ENSG00000135046_3 (sequence is synthesized)
tgaagaaagcccttacaggtcaccttgaggaggttgttttagctctgctaaaaactccagcgcaatttgatgctgatgaacttcgtgctgccatgaagggccttggaactgatgaagata

SEQ ID NO: 316098 - DNA, 120 bp, Artificial Sequence
  ENSG00000135046_4 (sequence is synthesized)
ctctaattgagattttggcatcaagaactaacaaagaaatcagagacattaacagggtctacagagaggaactgaagagagatctggccaaagacataacctcagacacatctggagatt

SEQ ID NO: 316099 - DNA, 120 bp, Artificial Sequence
  ENSG00000135046_5 (sequence is synthesized)
ccagggccttgtatgaagcaggagaaaggagaaaggggacagacgtaaacgtgttcaataccatccttaccaccagaagctatccacaacttcgcagagtgtttcagaaatacaccaagt

SEQ ID NO: 316100 - DNA, 120 bp, Artificial Sequence
  ENSG00000135046_6 (sequence is synthesized)
acagtaagcatgacatgaacaaagttctggacctggagttgaaaggtgacattgagaaatgcctcacagctatcgtgaagtgcgccacaagcaaaccagctttctttgcagagaagcttc

SEQ ID NO: 316101 - DNA, 120 bp, Artificial Sequence
  ENSG00000135046_7 (sequence is synthesized)
atcaagccatgaaaggtgttggaactcgccataaggcattgatcaggattatggtttcccgttctgaaattgacatgaatgatatcaaagcattctatcagaagatgtatggtatctccc

SEQ ID NO: 316102 - DNA, 120 bp, Artificial Sequence
  ENSG00000135046_8 (sequence is synthesized)
tttgccaagccatcctggatgaaaccaaaggagattatgagaaaatcctggtggctctttgtggaggaaactaaacattcccttgatggtctcaagctatgatcagaagactttaattat

SEQ ID NO: 316103 - DNA, 120 bp, Artificial Sequence
  ENSG00000135046_9 (sequence is synthesized)
atattttcatcctataagcttaaataggaaagtttcttcaacaggattacagtgtagctacctacatgctgaaaaatatagcctttaaatcatttttatattataactctgtataataga

SEQ ID NO: 316104 - DNA, 120 bp, Artificial Sequence
  ENSG00000135046_10 (sequence is synthesized)
gataagtccattttttaaaaatgttttccccaaaccataaaaccctatacaagttgttctagtaacaatacatgagaaagatgtctatgtagctgaaaataaaatgacgtcacaagacaa

SEQ ID NO: 316105 - DNA, 120 bp, Artificial Sequence
  ENSG00000135046_11 (sequence is synthesized)
aaaaaaaaaaaaaaaaaagcaatcattaagcttttcatctagccattacttttgtacaggctctcattaattccacatagatggtctaatggtctactaaatagtattctaatcctccat

SEQ ID NO: 316106 - DNA, 120 bp, Artificial Sequence
  ENSG00000135046_12 (sequence is synthesized)
ccatcttgtctatctcttagccattctccatgataaaggatgaatggtctttcggaaacataaatgaaaccatgctgctttaaaaaaacaaacaaacaaaaagaaacccattaatgtttt

SEQ ID NO: 316107 - DNA, 120 bp, Artificial Sequence
  ENSG00000135046_13 (sequence is synthesized)
cccaaagctttgtggacacattgaagcttcttgtttcagcttctgccaacatttctcgctccagcaaactttcttctgcttcccaaatatgacaagcttcttctttaacttttctgccag

SEQ ID NO: 316108 - DNA, 120 bp, Artificial Sequence
  ENSG00000135046_14 (sequence is synthesized)
gttaatcttgactcatttcaagagaggcttgggtcagccagggcctactctaagaagtttctttagcccttatgttttcctatggagagcacacactagctttaagtcctgagggtactt

SEQ ID NO: 316109 - DNA, 120 bp, Artificial Sequence
  ENSG00000135046_15 (sequence is synthesized)
aagatgatatttcaatgtttttgtactcttagtgcttggcatatggtgggtggtctacaaatttagaacaatgtagtgaaccacaaactcctctcttcagcctgtgtgcttacttgtagt

SEQ ID NO: 316110 - DNA, 120 bp, Artificial Sequence
  ENSG00000135046_16 (sequence is synthesized)
agttgtctgatctctaaaatttagaactgaatatgccaagaaagagttcaatttcagagaggagggtatggtttcattttaagtataaaagcttcctttaaaaaaaattacgtcttacat

SEQ ID NO: 316111 - DNA, 120 bp, Artificial Sequence
  ENSG00000135046_17 (sequence is synthesized)
tttgttatgctcctaagtgtaattgatcctggaaagtaagcgcaaggctactctctaatgctaactcttatgtatgtaagaggtgaggaaggagaggttgtgtgtggtgcatttgttttg

SEQ ID NO: 316112 - DNA, 120 bp, Artificial Sequence
  ENSG00000135046_18 (sequence is synthesized)
agtgtgaaatcttcagagaagaatttctctttagttctttgcaagaaggtagagataaagggaaggtgtgggaaggacttgtgaaatacatattcgaggaaaaactatgcacaaggccgt

SEQ ID NO: 316113 - DNA, 120 bp, Artificial Sequence
  ENSG00000135046_19 (sequence is synthesized)
gcatttaaaaataaactccctaaggctggggtgaaacctgctacggtctgcgcaagttgactgttaatgaatttgattctcaggtacactttttcaaaaatggcaatggtatcagaattc

SEQ ID NO: 316114 - DNA, 120 bp, Artificial Sequence
  ENSG00000135046_20 (sequence is synthesized)
ccactgttttctcattacatctatgattgggattgcagtgtttatccactttgttgcaatttaatcaattttatcaaatttcctatttttatacattagtcatcttggtgtatattgttt

SEQ ID NO: 316115 - DNA, 120 bp, Artificial Sequence
  ENSG00000135046_21 (sequence is synthesized)
gcagatgtggtgctctggggacaaatttttaatttgaacgtaaacatcgagattgctgctgtcaataaagaatatggtctgattgaaatgtactaatatttaaactgaactgtttaatgc

SEQ ID NO: 316116 - DNA, 120 bp, Artificial Sequence
  ENSG00000135046_22 (sequence is synthesized)
cacaaatgaatagttatgaagttatcttccttttttctttgcagctccaaaataaggaggttttcagagagagagagaaagaaagatctaactatttgaataatatgaaggaatattttg

SEQ ID NO: 316117 - DNA, 120 bp, Artificial Sequence
  ENSG00000135046_23 (sequence is synthesized)
aatatatatgaataatttgaataatatgaaatgatagacatgctaggtactgctctgtagtggttagcatagttgctgccccctttctgccatagtctagtgtgatatttcgttgggtaa

SEQ ID NO: 316118 - DNA, 120 bp, Artificial Sequence
  ENSG00000135046_24 (sequence is synthesized)
tgatgaatacctggtgccatggaagagaaaagtgggacatatactccagactttggaaatccaggtagcattgctgtcagctaaattaacacctgaagtttaaatagaaatgagccagat

SEQ ID NO: 316119 - DNA, 120 bp, Artificial Sequence
  ENSG00000135046_25 (sequence is synthesized)
gagggcaagagtggaagagatggggataaagcaagggtggtccaagaggaagaagtaacccacacacaggcttgaaggcaaaaggtaacataaccttctcaagacagtaagtatagagtg

SEQ ID NO: 316120 - DNA, 120 bp, Artificial Sequence
  ENSG00000135046_26 (sequence is synthesized)
atggtgcacactggaagagatggtagaattaggcaggatattgtaagccttgaaaaagaattaggcaggatatcggaagccctgattagattctatcctaagagcaacagaagatcactg

SEQ ID NO: 316121 - DNA, 120 bp, Artificial Sequence
  ENSG00000135046_27 (sequence is synthesized)
gagaccggatggtgagagatgagttaggaagttgtgacagctctctatacctaccgctaatgtagaggattatttattttcatttcattaccattcgtgtaaggtgtgtgtgtgtgtgtg

SEQ ID NO: 316122 - DNA, 120 bp, Artificial Sequence
  ENSG00000135046_28 (sequence is synthesized)
tgtgtgtgtgtgtgtatagctagtttctctatagaaattatatggaagagtaagaaggcttcactttaaaattcatgtttttaatgagagtattttctgaatatgagacacttaccctca

SEQ ID NO: 316123 - DNA, 120 bp, Artificial Sequence
  ENSG00000135046_29 (sequence is synthesized)
caatatcactcctgtatcaaacagatacagtgttcctgacccattgttatttgtcaatttgtccaattttgtacagccgctactttatcatatttaatacattttgtgacttgggcatgt

SEQ ID NO: 316124 - DNA, 120 bp, Artificial Sequence
  ENSG00000135046_30 (sequence is synthesized)
ggaacataattttgttattttcactgcttttactcccctaaaagatttggaatatgtgtgggaaaagacatgcataacagaacaaatgaaattagaatgaagaaaaacaaaaaaaaaaaa

SEQ ID NO: 316125 - DNA, 120 bp, Artificial Sequence
  ENSG00000135046_31 (sequence is synthesized)
tttgaaaatctcacatttaatatcttcccattaatgagaatcattgttctatttgatgaaagaggtaatacactaccttctcagaataaacttctgttagattcggtgcttttttttaca

SEQ ID NO: 316126 - DNA, 120 bp, Artificial Sequence
  ENSG00000135046_32 (sequence is synthesized)
gatgagattgtaaagtgagcctgtaagtgatttacggctcacttgtgatttgcttaaaacatgtgtcaccacgggaagggtgatgtactttcttttttaacgtgtaattttagtggccta

SEQ ID NO: 316127 - DNA, 120 bp, Artificial Sequence
  ENSG00000135047_0 (sequence is synthesized)
aagctgggccagaaccgcgacctccgcaaccttgagcggcatccgtggagtgcgcctgcgcagctacgaccgcagcaggaaagcgccgccggccaggcccagctgtggccggacagggac

SEQ ID NO: 316128 - DNA, 120 bp, Artificial Sequence
  ENSG00000135047_1 (sequence is synthesized)
tggaagagaggacgcggtcgagtaggttttaaaacatgaatcctacactcatccttgctgccttttgcctgggaattgcctcagctactctaacatttgatcacagtttagaggcacagt

SEQ ID NO: 316129 - DNA, 120 bp, Artificial Sequence
  ENSG00000135047_2 (sequence is synthesized)
ggaccaagtggaaggcgatgcacaacagattatacggcatgaatgaagaaggatggaggagagcagtgtgggagaagaacatgaagatgattgaactgcacaatcaggaatacagggaag

SEQ ID NO: 316130 - DNA, 120 bp, Artificial Sequence
  ENSG00000135047_3 (sequence is synthesized)
ggaaacacagcttcacaatggccatgaacgcctttggagacatgaccagtgaagaattcaggcaggtgatgaatggctttcaaaaccgtaagcccaggaaggggaaagtgttccaggaac

SEQ ID NO: 316131 - DNA, 120 bp, Artificial Sequence
  ENSG00000135047_4 (sequence is synthesized)
ctctgttttatgaggcccccagatctgtggattggagagagaaaggctacgtgactcctgtgaagaatcagggtcagtgtggttcttgttgggcttttagtgctactggtgctcttgaag

SEQ ID NO: 316132 - DNA, 120 bp, Artificial Sequence
  ENSG00000135047_5 (sequence is synthesized)
cagtatgttcaggataatggaggcctggactctgaggaatcctatccatatgaggcaacagaagaatcctgtaagtacaatcccaagtattctgttgctaatgacaccggctttgtggac

SEQ ID NO: 316133 - DNA, 120 bp, Artificial Sequence
  ENSG00000135047_6 (sequence is synthesized)
atccctaagcaggagaaggccctgatgaaggcagttgcaactgtggggcccatttctgttgctattgatgcaggtcatgagtccttcctgttctataaagaaggcatttattttgagcca

SEQ ID NO: 316134 - DNA, 120 bp, Artificial Sequence
  ENSG00000135047_7 (sequence is synthesized)
gactgtagcagtgaagacatggatcatggtgtgctggtggttggctacggatttgaaagcacagaatcagataacaataaatattggctggtgaagaacagctggggtgaagaatggggc

SEQ ID NO: 316135 - DNA, 120 bp, Artificial Sequence
  ENSG00000135047_8 (sequence is synthesized)
atgggtggctacgtaaagatggccaaagaccggagaaaccattgtggaattgcctcagcagccagctaccccactgtgtgagctggtggacggtgatgaggaaggacttgactggggatg

SEQ ID NO: 316136 - DNA, 120 bp, Artificial Sequence
  ENSG00000135047_9 (sequence is synthesized)
gcgcatgcatgggaggaattcatcttcagtctaccagcccccgctgtgtcggatacacactcgaatcattgaagatccgagtgtgatttgaattctgtgatattttcacactggtaaatg

SEQ ID NO: 316137 - DNA, 120 bp, Artificial Sequence
  ENSG00000135047_10 (sequence is synthesized)
ggtaaatgttacctctattttaattactgctataaataggtttatattattgattcacttactgactttgcattttcgtttttaaaaggatgtataaatttttacctgtttaaataaaat

SEQ ID NO: 316138 - DNA, 120 bp, Artificial Sequence
  ENSG00000135047_11 (sequence is synthesized)
gacgcggtcgagtaggtgtgcaccagccctggcaacgagagcgtctaccccgaactctgctggccttgaggtggggaagccggggagggcagttgaggaccccgcggaggcgcgtgactg

SEQ ID NO: 316139 - DNA, 120 bp, Artificial Sequence
  ENSG00000135047_12 (sequence is synthesized)
tcaggataatggaggcctggactctgaggaatcctatccatatgaggcaacagtaagtggagctccttgtcatcattccagctcagcttttggaaggtggacactttaagagataacaga

SEQ ID NO: 316140 - DNA, 84 bp, Artificial Sequence
  ENSG00000135047_13 (sequence is synthesized)
gctcagcttttggaaggtggacactttaagagataacagatacctttttcggaattcatatattagggctaggaggctgagcca

SEQ ID NO: 316141 - DNA, 120 bp, Artificial Sequence
  ENSG00000135048_0 (sequence is synthesized)
agttgagtacgagcggcagctgcgggcgccggcaatcgagtggcttcctggccatggagaggagatctggacccgaggacgccagggactcctctccgtctccctggaccgctgtgtagg

SEQ ID NO: 316142 - DNA, 120 bp, Artificial Sequence
  ENSG00000135048_1 (sequence is synthesized)
cacctgagttaacggacgctaagcggggtaggggaagtaacagtgtatcatgtatgccactgattccaggggacactcccctgctttcctccaacctcagaatggaaatagtcgtcaccc

SEQ ID NO: 316143 - DNA, 120 bp, Artificial Sequence
  ENSG00000135048_2 (sequence is synthesized)
atctggctatgttccagggaaggttgtcccattgcgtccccctcctcctccaaagagtcaagcttcagccaaatttacctccatcagacgagaagaccgggcaaccttcgcattctcacc

SEQ ID NO: 316144 - DNA, 120 bp, Artificial Sequence
  ENSG00000135048_3 (sequence is synthesized)
tgaagaacagcaagcccagagagaaagtcaaaagcaaaagagacacaaaaatactttcatttgttttgctattactagtttctcattttttattgcacttgcaatcattttaggaatatc

SEQ ID NO: 316145 - DNA, 120 bp, Artificial Sequence
  ENSG00000135048_4 (sequence is synthesized)
ctcaaaatatgctccagatgaaaattgcccagatcaaaatcctcgtctcaggaattgggatccaggacaagattctgcaaagcaagttgttatcaaggagggagatatgctccgtctgac

SEQ ID NO: 316146 - DNA, 120 bp, Artificial Sequence
  ENSG00000135048_5 (sequence is synthesized)
ctcagacgccaccgtgcattctatagtcattcaggatggaggactgcttgtatttggggacaataaagatggatccagaaatattactttgaggactcattacatcctgatccaggatgg

SEQ ID NO: 316147 - DNA, 120 bp, Artificial Sequence
  ENSG00000135048_6 (sequence is synthesized)
tggggcgcttcatattggagcagaaaaatgccgctataaatccaaagcgacaattaccttgtatggcaagtcagatgaaggtgaaagtatgccaacatttggcaaaaagtttattggtgt

SEQ ID NO: 316148 - DNA, 120 bp, Artificial Sequence
  ENSG00000135048_7 (sequence is synthesized)
ggaagctggcgggacactggagttacatggggcacggaaggcatcgtggacgttgttggcaaggaccctgaattcctcaggcttgccctttgggtcctatacctttgaaaaggacttttc

SEQ ID NO: 316149 - DNA, 120 bp, Artificial Sequence
  ENSG00000135048_8 (sequence is synthesized)
ccggggcctcaatgtgagggtcattgaccaagacacggccaaaattttggaaagtgagagatttgatacccatgaataccgcaatgagagcaggcggcttcaggagtttctgagattcca

SEQ ID NO: 316150 - DNA, 120 bp, Artificial Sequence
  ENSG00000135048_9 (sequence is synthesized)
ggatccaggtcggattgttgccatagctgtcggggattcagccgctaaaagtctcttacaaggaaccatccagatgatccaggaacggttgggaagtgaactgatccaaggactgggcta

SEQ ID NO: 316151 - DNA, 120 bp, Artificial Sequence
  ENSG00000135048_10 (sequence is synthesized)
caggcaagcttgggctttagttggtgtcattgatggtggaagcacttcttgcaatgaatccgtgagaaactatgaaaatcatagcagtggcgggaaggctcttgcccaaagagaatttta

SEQ ID NO: 316152 - DNA, 120 bp, Artificial Sequence
  ENSG00000135048_11 (sequence is synthesized)
tactgtggatggccagaagttctctgtgacagcttatagtgaatggattgaaggcgtttctctttcaggattccgggtagaggttgtagatggagtgaagctaaatttgctagatgatgt

SEQ ID NO: 316153 - DNA, 120 bp, Artificial Sequence
  ENSG00000135048_12 (sequence is synthesized)
tagtagttggaaacctggagaccagattgtggtcgcaagcacagactattccatgtaccaagcagaggagttcactcttcttccctgttctgaatgcagccattttcaggtcaaagtcaa

SEQ ID NO: 316154 - DNA, 120 bp, Artificial Sequence
  ENSG00000135048_13 (sequence is synthesized)
agaaacccctcagttcctgcacatgggtgagatcatagacggtgtagacatgagagctgaggttggaattcttacccggaatattgtgatccaaggagaagtggaggactcatgctacgc

SEQ ID NO: 316155 - DNA, 120 bp, Artificial Sequence
  ENSG00000135048_14 (sequence is synthesized)
agaaaatcagtgccaattttttgattatgatacctttgggggacacattatgataatgaaaaattttacttcagtccatctttcttatgtggaattgaaacacatgggtcagcagcagat

SEQ ID NO: 316156 - DNA, 120 bp, Artificial Sequence
  ENSG00000135048_15 (sequence is synthesized)
ggggcgataccctgttcattttcacctgtgtggtgacgtggattataaaggaggatacagacatgcaacatttgtggacggcctgtctattcatcacagcttctcaaggtgcatcactgt

SEQ ID NO: 316157 - DNA, 120 bp, Artificial Sequence
  ENSG00000135048_16 (sequence is synthesized)
gcatgggacaaatggcttgctaataaaagacaccattgggtttgacacactaggtcattgtttctttttggaagatggtattgaacagaggaatactttgttccacaatctgggactcct

SEQ ID NO: 316158 - DNA, 120 bp, Artificial Sequence
  ENSG00000135048_17 (sequence is synthesized)
caccaagccgggtactctcctgcccaccgataggaacaactccatgtgtaccaccatgcgagataaagtgtttggaaattacattcctgtgcctgctactgactgtatggctgtttcaac

SEQ ID NO: 316159 - DNA, 120 bp, Artificial Sequence
  ENSG00000135048_18 (sequence is synthesized)
tttctggattgctcatcccaacaataatctgattaataatgcagctgcaggctcacaggatgctggaatatggtatttattccacaaggaaccaactggggaatccagtggattgcagct

SEQ ID NO: 316160 - DNA, 120 bp, Artificial Sequence
  ENSG00000135048_19 (sequence is synthesized)
cttggcaaaaccagaactcactccattgggtatattttataacaacagggtccattcaaattttaaggctggcttatttattgacaaaggtgtcaaaacaaccaactctagtgctgctga

SEQ ID NO: 316161 - DNA, 120 bp, Artificial Sequence
  ENSG00000135048_20 (sequence is synthesized)
cccaagggaatacctctgtttggacaatagtgcaagatttcgacctcatcaggatgcaaaccccgaaaaaccacgtgttgctgctctaattgacaggctcattgcttttaaaaataatga

SEQ ID NO: 316162 - DNA, 120 bp, Artificial Sequence
  ENSG00000135048_21 (sequence is synthesized)
taatggagcttgggtcagaggaggagatattatcgttcaaaattcagcatttgcagataatggaataggactgacctttgccagtgatggaagcttcccaagtgatgaaggttccagcca

SEQ ID NO: 316163 - DNA, 120 bp, Artificial Sequence
  ENSG00000135048_22 (sequence is synthesized)
agaggtatctgaatctctctttgttggggagagcaggaattacggctttcagggtggtcagaacaagtatgtaggcactggaggaatagaccagaagcctcgaacattacccaggaacag

SEQ ID NO: 316164 - DNA, 120 bp, Artificial Sequence
  ENSG00000135048_23 (sequence is synthesized)
gacgttcccaattagaggctttcagatttatgatgggcccattcatctcacaaggagcactttcaaaaaatatgtgccaactccagataggtacagcagtgcaattggcttcctcatgaa

SEQ ID NO: 316165 - DNA, 120 bp, Artificial Sequence
  ENSG00000135048_24 (sequence is synthesized)
gaattcctggcagataacccccaggaataatatctccctcgtgaagtttggtccacatgtctctctgaatgtcttttttggaaagcctggtccctggtttgaagattgtgagatggatgg

SEQ ID NO: 316166 - DNA, 120 bp, Artificial Sequence
  ENSG00000135048_25 (sequence is synthesized)
gctctgtgacaggatacaaggatgcttatgtgggaagaatggacaactacctgatccgccatccaagctgtgtaaatgtgtctaagtggaatgcagtgatctgcagtgggacctatgcac

SEQ ID NO: 316167 - DNA, 120 bp, Artificial Sequence
  ENSG00000135048_26 (sequence is synthesized)
aggtctatgtacagacatggagcactcagaatctttctatgaccattacacgagatgagtatccgtccaaccctatggtgctccgaggtattaatcagaaggctgcctttccacagtacc

SEQ ID NO: 316168 - DNA, 120 bp, Artificial Sequence
  ENSG00000135048_27 (sequence is synthesized)
agcctgtcgtcatgctggagaagggttataccatccactggaatgggccggcaccacggactacatttctatacctcgtcaacttcaacaagaatgactggattcgagttggcctttgct

SEQ ID NO: 316169 - DNA, 120 bp, Artificial Sequence
  ENSG00000135048_28 (sequence is synthesized)
atccatcaaacacaagttttcaagttacctttggctatttgcagcggcagaatggctcattatccaaaatcgaagaatatgagcctgtgcattcactggaagaactgcaaagaaagcaat

SEQ ID NO: 316170 - DNA, 120 bp, Artificial Sequence
  ENSG00000135048_29 (sequence is synthesized)
ccgagaggaaattctattttgactccagcacggggttactgtttttgtatctcaaagccaaaagccacaggcatggccacagttactgttcatctcagggatgtgaaagagtcaagatcc

SEQ ID NO: 316171 - DNA, 120 bp, Artificial Sequence
  ENSG00000135048_30 (sequence is synthesized)
aagcagccacagactcaaaggacatcagtaactgcatggccaaagcatacccacagtactacagaaagccgtcagtggtcaagcggatgccggccatgctcactggactctgtcaaggct

SEQ ID NO: 316172 - DNA, 120 bp, Artificial Sequence
  ENSG00000135048_31 (sequence is synthesized)
gtggcactcggcaggtggtgtttactagtgatcctcataaaagttacctccctgtgcaattccagtcacctgataaagcagaaacccagcgtggagacccgtctgttatttctgtcaatg

SEQ ID NO: 316173 - DNA, 120 bp, Artificial Sequence
  ENSG00000135048_32 (sequence is synthesized)
gcactgactttaccttccgaagtgcaggcgtcctcctccttgttgtggatccgtgcagcgttccattccgcttgacggaaaaaacggtttttcctcttgctgatgtcagtcgcattgaag

SEQ ID NO: 316174 - DNA, 120 bp, Artificial Sequence
  ENSG00000135048_33 (sequence is synthesized)
agtatttaaaaacaggcatccctccaaggtccattgttctgttgagcacaagaggagaaataaagcagttaaacatttcacacttactagtacctctgggattagccaaaccagctcatc

SEQ ID NO: 316175 - DNA, 120 bp, Artificial Sequence
  ENSG00000135048_34 (sequence is synthesized)
tttatgacaaagggagtaccatatttttgggattcagtggaaactttaaaccatcatggactaagctatttaccagtcctgctggacagggccttggggtgcttgaacaattcatacctt

SEQ ID NO: 316176 - DNA, 120 bp, Artificial Sequence
  ENSG00000135048_35 (sequence is synthesized)
tgcagctggacgaatatggttgtcccagagccaccactgtccgcagaagagacctggaactgctaaagcaagcttcaaaagcacattagagactaactgtaacttaagtgctgggggaaa

SEQ ID NO: 316177 - DNA, 120 bp, Artificial Sequence
  ENSG00000135048_36 (sequence is synthesized)
aaaaatgtgaactaacttatttaatttatggcattttaaaatgacactgttaacccaacggaaccattttccagtttgatacagaatggggagaaaagaaagcgtttgaaattattgctt

SEQ ID NO: 316178 - DNA, 120 bp, Artificial Sequence
  ENSG00000135048_37 (sequence is synthesized)
ggataccagcttcatgcaccttctagttgtacaaaatgttaaagacgttgtttgtatttgtaaggctggtgtattcagagagcagatctcttattcctcactttccacccccgtattttg

SEQ ID NO: 316179 - DNA, 120 bp, Artificial Sequence
  ENSG00000135048_38 (sequence is synthesized)
taatgaccatgagcaatgtttttactttttgtataatggggtggggtggagtgggggcttctgagagtcagcctgaggtctttagaggaccagctattgtagcaccttggatacttgaag

SEQ ID NO: 316180 - DNA, 120 bp, Artificial Sequence
  ENSG00000135048_39 (sequence is synthesized)
tttaatgctcagttgggtcgggtggcagttgacttggtggctggcatgttcagcagtgcctggggccctgtttctgggcagcctttgaggattttctatgatattgaatgacagttttaa

SEQ ID NO: 316181 - DNA, 120 bp, Artificial Sequence
  ENSG00000135048_40 (sequence is synthesized)
gtggcaactcaggcccagctcatgcccttttttgcctggacatgtgctatttttattcacttatatatcaattacttgtaagggttaaactttcaaacaggaagtatattgggacaaaag

SEQ ID NO: 316182 - DNA, 120 bp, Artificial Sequence
  ENSG00000135048_41 (sequence is synthesized)
ggctcttggggattagatatccctttaatctgtgaccattgggcaaaaaattttcctgcagcaaaagtctgaggctgttgggaccatttttgcagctttaatccttagcctcttttgact

SEQ ID NO: 316183 - DNA, 120 bp, Artificial Sequence
  ENSG00000135048_42 (sequence is synthesized)
gtatatttgtgtttaaaatgcagagctcaactgaatatttccttttttgttttgttttgttttgttttaagaagtaggttgttttcctgaaccgtaaacttgtatcattttaacttgcac

SEQ ID NO: 316184 - DNA, 120 bp, Artificial Sequence
  ENSG00000135048_43 (sequence is synthesized)
aaaggaagtctgttcttggtattgctcttgcacttgggttttttgttattgttttgtgtggattttttaaagcttttctgttcaccctcctgccaggaaaatcccagaaagcttaatgat

SEQ ID NO: 316185 - DNA, 120 bp, Artificial Sequence
  ENSG00000135048_44 (sequence is synthesized)
accccaaaatgattacacccagggaggaaaaaaaggagcgctttctagggtcagaatcgtggagagaatactcagaaatgaacctctttaaagccttgcaggaatgagtcactcttactt

SEQ ID NO: 316186 - DNA, 120 bp, Artificial Sequence
  ENSG00000135048_45 (sequence is synthesized)
aatgaaatgttaaagccaattaaaaagcatgctgtgatgcccagcttccctttccacagggtgcatgcgtctcctgctggtgaatcacatgcggcaagaggcaactggctccacagcctg

SEQ ID NO: 316187 - DNA, 120 bp, Artificial Sequence
  ENSG00000135048_46 (sequence is synthesized)
ggatgctgccgtaccaagaggaaagaagcagcaaaatgcctttacgttgttctaaacccccgacgcataaagtgtagaggagggatggccaagggtgggtggtagaaagtgtgttcaggc

SEQ ID NO: 316188 - DNA, 120 bp, Artificial Sequence
  ENSG00000135048_47 (sequence is synthesized)
tgacactggcaatgagtacagataatttcactttcctcttctaggggcaaaggctgatggcctctacctttgtatccaggagaaactgcagagcagccctgtgactttacaaaatatgct

SEQ ID NO: 316189 - DNA, 120 bp, Artificial Sequence
  ENSG00000135048_48 (sequence is synthesized)
ctttacaaaatatgctacctcaaagtgctaccgataaacctttctaattgtaagtgcccttactaagggcacatgtcttaatcaaagttagttttttgttttctggtttgtttttttttt

SEQ ID NO: 316190 - DNA, 90 bp, Artificial Sequence
  ENSG00000135048_49 (sequence is synthesized)
tgttttctggtttgttttttttttttgtatattgatgaatgagatcttacctattaaatatattattggattatggttcctgaaggtcat

SEQ ID NO: 316191 - DNA, 120 bp, Artificial Sequence
  ENSG00000135048_50 (sequence is synthesized)
gagcttggttctttaaagatttggagaagatatgtaaattaccaaggcacttggtttttctgttttatatactaataatcagggcctaagttaaataaaaatatgtgtgcatgtatttta

SEQ ID NO: 316192 - DNA, 120 bp, Artificial Sequence
  ENSG00000135048_51 (sequence is synthesized)
gatatgcaacagaagttgaataaaaggagagactctgtttctgaatggaaaattaataaatgttaatttcatggaccagtttcatggaagataatttttccatggactggaggtggaggg

SEQ ID NO: 316193 - DNA, 120 bp, Artificial Sequence
  ENSG00000135048_52 (sequence is synthesized)
tcaggatgattcaagtgcattacatttacttagttaaaatataaatttgacacatttccattagtgtcccaaaaggtacttttctactgtacttgacagttgatactgtagttcatctgg

SEQ ID NO: 316194 - DNA, 120 bp, Artificial Sequence
  ENSG00000135048_53 (sequence is synthesized)
tcatctggaagaataaatgagaaagtagtaaaatataaacaaattacagtaatacaagggcttgtttttatcaaatattaaaatggaccgtgaagccataggccagcatagttttggcag

SEQ ID NO: 316195 - DNA, 120 bp, Artificial Sequence
  ENSG00000135048_54 (sequence is synthesized)
agaagagcaagatcagagaagaacggagaatccacagataggtccaagtatgtatgttggcttactatgtgacaaaaatggtaattcaaaccatggaaaacacatttagtcgtttattta

SEQ ID NO: 316196 - DNA, 120 bp, Artificial Sequence
  ENSG00000135048_55 (sequence is synthesized)
tttttagaattgtgtttatccatttatttaataaatagataatagaacttaaataaatagagtatttgaaacaaaacaaaaccattctcccatgttacagtagacttactccctgataga

SEQ ID NO: 316197 - DNA, 120 bp, Artificial Sequence
  ENSG00000135048_56 (sequence is synthesized)
caatggagaaggaagggtgaggggtggatgacaggaaattactgaataggcacagtgtacattatttgggtgatggataccctaagtgccctgacttcaccactatgcaatcctatgtat

SEQ ID NO: 316198 - DNA, 120 bp, Artificial Sequence
  ENSG00000135048_57 (sequence is synthesized)
gtaatgaaattgcacttgtgcctcacaaatttatacaaattataaacaacaacaacaacaatagactattccctaaaagagctgtgccccagaccatccactaggtcagcagtccccagc

SEQ ID NO: 316199 - DNA, 120 bp, Artificial Sequence
  ENSG00000135048_58 (sequence is synthesized)
actggtttcatggaagataatttttccatggactggaggtgaagggggatggtttcaggatgattgaagcacattacatttactgtgcactttttttctattattattacattgcaatat

SEQ ID NO: 316200 - DNA, 78 bp, Artificial Sequence
  ENSG00000135048_59 (sequence is synthesized)
tgaagcacattacatttactgtgcactttcacagctcaccataatgtaaagtcagtgggagccctgagcttgttttcc

SEQ ID NO: 316201 - DNA, 120 bp, Artificial Sequence
  ENSG00000135048_60 (sequence is synthesized)
tcattgggcattagattctcaggagcacacaacctagatccctcacatgtgcagttcccaatagggttctgctcctatgagagttgaatgccacagctgacctgacaggaggcggagctc

SEQ ID NO: 316202 - DNA, 120 bp, Artificial Sequence
  ENSG00000135048_61 (sequence is synthesized)
aggctgtaatgcaagtgttgtggggtggctgtaaatacagatgaagcttcgctcgcctgctcacctcctgctgtgcaacttggttcctaatctactggtacccatccatggcccaggggt

SEQ ID NO: 316203 - DNA, 120 bp, Artificial Sequence
  ENSG00000135048_62 (sequence is synthesized)
tgggaagccctgcactaggtgaacgtacgtaaatgatttggtttatgtatgcgttaccccttgtaagagcaacgtgtgaagcccatggtggtggggtggaagagtgggaattggatggaa

SEQ ID NO: 316204 - DNA, 120 bp, Artificial Sequence
  ENSG00000135048_63 (sequence is synthesized)
aatcatctagacttttttctttttggagttctgcttttatctaatatttctattcagcagtcagttcagaaagatactcagtagaaagatactcatgctgaaggattgaaattggctctg

SEQ ID NO: 316205 - DNA, 120 bp, Artificial Sequence
  ENSG00000135048_64 (sequence is synthesized)
tagaacaatattttttgctacttccctattctgaaaagtatgagtttgattttagtaccttgacttacagataatgaaaaattttacttcagtccatctttcttatgtggaattgaaaca

SEQ ID NO: 316206 - DNA, 120 bp, Artificial Sequence
  ENSG00000135048_65 (sequence is synthesized)
aagaataacttatgtctcctttgcagcaagcaaagaaagccaattttacatactttgcttctcttgtggggaggctgtatattttgtgttgatggaattaaagagattatacaaattgaa

SEQ ID NO: 316207 - DNA, 120 bp, Artificial Sequence
  ENSG00000135048_66 (sequence is synthesized)
cacttagtctggcacagatcacagaatctcccttttcaaagttgagacacttgactttgtgctgaaaatgtctttttagctgtttaaattttcattctcttccctttacttcttgattat

SEQ ID NO: 316208 - DNA, 86 bp, Artificial Sequence
  ENSG00000135048_67 (sequence is synthesized)
tctattttgactccagcacgggagacggtgtatccctatgttgcccaggctggagtgcagttcacaggcatagttgtggtacacta

SEQ ID NO: 316209 - DNA, 120 bp, Artificial Sequence
  ENSG00000135048_68 (sequence is synthesized)
ttgattttcaatttttgtttagacttaaacaactacctggactttcattctgtagatgatagaacttccagattcccacttgattttccacaagaataaaaagaatatccacatttggaa

SEQ ID NO: 316210 - DNA, 120 bp, Artificial Sequence
  ENSG00000135048_69 (sequence is synthesized)
ctgtttgtctttcccactacagcatatgtttcattcaatcaggtatcttgttttggctcctactgtatcctagaattttgcttagttcataccggatatttagctgtcttcataaaacaa

SEQ ID NO: 316211 - DNA, 120 bp, Artificial Sequence
  ENSG00000135048_70 (sequence is synthesized)
accacttcacttgtgtgtgaacataagaagtatgactctgaaatgaatgcttcatgacagcaaggatcatgtctttctttcttgttcaacaccctatgtccagtgccttgaacagttcct

SEQ ID NO: 316212 - DNA, 120 bp, Artificial Sequence
  ENSG00000135048_71 (sequence is synthesized)
gacccatgattttctgaaaactttactcctttgctgcacttcaagtctgcaaaattgacaaatgaaagtgtcggggcagttggggagaaagaggccttcagatatactctataaatcatc

SEQ ID NO: 316213 - DNA, 120 bp, Artificial Sequence
  ENSG00000135048_72 (sequence is synthesized)
ctacaaataggagtgactcctttgggcttaaattggattggcagcaacacagattctgctgtggattgaagtcattttctacctcggcactactcagtccatggggaatggtgaagttat

SEQ ID NO: 316214 - DNA, 120 bp, Artificial Sequence
  ENSG00000135048_73 (sequence is synthesized)
gattttgcagcaagattctgggagcaggccagcatctacatctgttctaaacttaacagtgtatcatgtatgccactgattccaggggacactcccctgctttcctccaacctcagaatg

SEQ ID NO: 316215 - DNA, 120 bp, Artificial Sequence
  ENSG00000135048_74 (sequence is synthesized)
aaaagtcagagggtttctttgcaataggagcacttttctttgaaacatctatattgcccatttatggacattgcatggcatctcctgaattttggcccatgctaaaatgtgaagcgcgta

SEQ ID NO: 316216 - DNA, 120 bp, Artificial Sequence
  ENSG00000135049_0 (sequence is synthesized)
gctgcggctctgcgcggtccccgccagcgccccatcctgagccgattatctgcaattatgaaatgaagtaactcaagatgagcaagttaaaagtgataccagaaaaaagccttaccaata

SEQ ID NO: 316217 - DNA, 120 bp, Artificial Sequence
  ENSG00000135049_1 (sequence is synthesized)
attctaggatcgtaggactcctggctcaactggagaagatcaatgctgagccttcagaatcagacactgcccgatatgttacatcaaaaattcttcatctggctcagagtcaagaaaaaa

SEQ ID NO: 316218 - DNA, 120 bp, Artificial Sequence
  ENSG00000135049_2 (sequence is synthesized)
caaggagagaaatgacagccaaaggttctacaggaatggaaattctgctgtcaacattagagaacacaaaagatcttcaaactacacttaatatcttaagcattcttgttgagctggtgt

SEQ ID NO: 316219 - DNA, 120 bp, Artificial Sequence
  ENSG00000135049_3 (sequence is synthesized)
cagctggtggaggtcgaagagtgagtttcttagtcaccaaaggtggttcacaaatattgttgcagttacttatgaatgccagcaaagaatctcccccacatgaggacttaatggtacaga

SEQ ID NO: 316220 - DNA, 120 bp, Artificial Sequence
  ENSG00000135049_4 (sequence is synthesized)
ttcattctattcttgcaaagattggaccaaaagataaaaaatttggagtaaaggctagaattaatggggctctgaatataaccctgaatttggtcaagcagaatttgcagaatcatcgct

SEQ ID NO: 316221 - DNA, 120 bp, Artificial Sequence
  ENSG00000135049_5 (sequence is synthesized)
tggttctaccttgccttcagcttttacgagtatattctgccaactctgtgaattcagtatccttagggaaaaatggagttgtggaactgatgtttaaaatcattggaccatttagtaaga

SEQ ID NO: 316222 - DNA, 120 bp, Artificial Sequence
  ENSG00000135049_6 (sequence is synthesized)
agaattccagtcttataaaggttgctttagacactcttgctgcattgctaaaatcaaaaacaaatgccaggagagctgtagacagaggatatgtccaagtgcttttaacaatttatgtag

SEQ ID NO: 316223 - DNA, 120 bp, Artificial Sequence
  ENSG00000135049_7 (sequence is synthesized)
attggcaccgccatgataaccggcatagaaacatgctcattcggaaaggaattttacagagtttaaaaagtgttacaaacatcaagttgggaagaaaagcatttattgatgccaatggga

SEQ ID NO: 316224 - DNA, 120 bp, Artificial Sequence
  ENSG00000135049_8 (sequence is synthesized)
tgaaaattctgtataatacttcgcaattgcctgttattcctgtgactggtcctgtggctcagctctacagcttacctcctgaagtggatgacgtagtagatgaaagtgatgacaacgatg

SEQ ID NO: 316225 - DNA, 120 bp, Artificial Sequence
  ENSG00000135049_9 (sequence is synthesized)
atattgatgtagaagctgaaaacgaaactgagaatgaagatgacctagatcaaaattttaagaatgatgatattgaaacagatattaacaaactaaaaccccagcaagaaccgggacgaa

SEQ ID NO: 316226 - DNA, 120 bp, Artificial Sequence
  ENSG00000135049_10 (sequence is synthesized)
caatagaagatctaaaaatgtatgaacaccttttccctgagcttgttgatgattttcaggactatgatttaatctccaaagaaccaaagccttttgtatttgagggaaaagtacgtggtc

SEQ ID NO: 316227 - DNA, 120 bp, Artificial Sequence
  ENSG00000135049_11 (sequence is synthesized)
ctattgttgttcctacggcaggcgaggaaacatctgggaattctggcaatttaagaaaagttgtaatgaaggagaacatatcttctaaaggagatgaaggtgaaaagaagtctaccttta

SEQ ID NO: 316228 - DNA, 120 bp, Artificial Sequence
  ENSG00000135049_12 (sequence is synthesized)
tggatctagcaaaagaagatattaaagataatgatagaacattacaacagcagccaggtgatcaaaatagaactatttcatcagtccatggtttaaacaatgatattgtaaaggccttgg

SEQ ID NO: 316229 - DNA, 120 bp, Artificial Sequence
  ENSG00000135049_13 (sequence is synthesized)
accgaattacattgcagaatattccttctcaaacagccccaggttttactgcagaaatgaagaaggactgcagtcttcctcttactgtccttacctgtgctaaagcatgtccacacatgg

SEQ ID NO: 316230 - DNA, 120 bp, Artificial Sequence
  ENSG00000135049_14 (sequence is synthesized)
ctacttgtggaaatgttctgtttgagggaagaacagttcagctagggaagctttgctgcactggagttgaaactgaagatgatgaagatactgagtcaaattcatcggtagaacaagcat

SEQ ID NO: 316231 - DNA, 120 bp, Artificial Sequence
  ENSG00000135049_15 (sequence is synthesized)
cggttgaagtacctgatggaccaacactccatgacccagacctctatattgagattgtgaaaaatacgaagtctgtcccagaatattcagaggtggcttatcccgattattttggtcaca

SEQ ID NO: 316232 - DNA, 120 bp, Artificial Sequence
  ENSG00000135049_16 (sequence is synthesized)
ttccgcctccattcaaagagcctattttagaaaggccttatggtgtacaaaggacaaaaattgctcaagatattgaaaggctaatacatcagagtgatatcatagatcgtgtggtatatg

SEQ ID NO: 316233 - DNA, 120 bp, Artificial Sequence
  ENSG00000135049_17 (sequence is synthesized)
aacccaaattacaccattccagaagagggagatattttgaaatttaactccaaatttgagtctgggaatctgcgcaaagtaattcaaattagaaaaaatgaatatgatcttattctgaac

SEQ ID NO: 316234 - DNA, 120 bp, Artificial Sequence
  ENSG00000135049_18 (sequence is synthesized)
tcagacataaacagcaatcattatcatcagtggttttactttgaagtcagtggaatgcgaccaggtgttgcttacaggtttaacatcattaactgtgaaaagtccaacagtcagtttaat

SEQ ID NO: 316235 - DNA, 120 bp, Artificial Sequence
  ENSG00000135049_19 (sequence is synthesized)
tatggtatgcaaccactcatgtattcggttcaggaagcattaaatgccagaccatggtggattcgtatggggactgacatttgttactataaaaatcatttctcaagaagttcagttgct

SEQ ID NO: 316236 - DNA, 120 bp, Artificial Sequence
  ENSG00000135049_20 (sequence is synthesized)
gcaggtgggcaaaagggaaaatcctactatacaattacatttactgtcaattttccacataaagatgatgtttgctactttgcttatcactatccatatacgtattcaactttacagatg

SEQ ID NO: 316237 - DNA, 120 bp, Artificial Sequence
  ENSG00000135049_21 (sequence is synthesized)
catcttcaaaaattggaatcagcacacaatcctcagcaaatctattttcggaaagatgtgttatgtgaaaccctgtctggaaacagctgccccttggtgactataacagcaatgccagag

SEQ ID NO: 316238 - DNA, 120 bp, Artificial Sequence
  ENSG00000135049_22 (sequence is synthesized)
tctaattattatgaacatatctgccatttcagaaatcgcccttacgttttcttgtctgctcgggtacatcctggagaaactaatgcaagttgggttatgaaaggaacgttggaatatctc

SEQ ID NO: 316239 - DNA, 120 bp, Artificial Sequence
  ENSG00000135049_23 (sequence is synthesized)
atgagcaataaccccactgctcagagcttacgagaatcttatatttttaaaattgtccctatgttaaatccagatggtgtcatcaatggaaatcatcgctgttctttaagtggagaggat

SEQ ID NO: 316240 - DNA, 120 bp, Artificial Sequence
  ENSG00000135049_24 (sequence is synthesized)
ttgaataggcagtggcaaagtccaagtccggatttacatcctacaatttaccatgctaaggggctgttgcaatacttggctgcagtgaagcgtttacccttggtttattgtgattatcat

SEQ ID NO: 316241 - DNA, 120 bp, Artificial Sequence
  ENSG00000135049_25 (sequence is synthesized)
ggccattcccgaaagaagaatgtatttatgtatggttgcagcatcaaagagacagtgtggcataccaatgataatgcaacttcatgtgatgttgtggaggatacgggatacaggacattg

SEQ ID NO: 316242 - DNA, 120 bp, Artificial Sequence
  ENSG00000135049_26 (sequence is synthesized)
cctaagatactgagccatatcgccccagcattttgcatgagcagctgtagcttcgtagtggaaaaatctaaagaatccacagcacgtgttgtagtttggagggaaataggagtacaaaga

SEQ ID NO: 316243 - DNA, 120 bp, Artificial Sequence
  ENSG00000135049_27 (sequence is synthesized)
agttataccatggagagtactttatgtggctgtgatcagggaaaatacaagggtttacagattggtacccgagaactggaagagatgggagcaaaattttgtgttggtcttttacgtttg

SEQ ID NO: 316244 - DNA, 120 bp, Artificial Sequence
  ENSG00000135049_28 (sequence is synthesized)
aaaagactgacctctccattggagtataatctgccttccagcctgcttgactttgaaaatgatttaattgaatcaagctgcaaagtaactagccctaccacttatgtcttggatgaagat

SEQ ID NO: 316245 - DNA, 120 bp, Artificial Sequence
  ENSG00000135049_29 (sequence is synthesized)
gaacctcgattccttgaagaagttgattacagtgcagaaagtaatgatgagttagatattgagttggctgaaaatgtaggagattatgaaccttctgctcaagaagaagtactttctgac

SEQ ID NO: 316246 - DNA, 120 bp, Artificial Sequence
  ENSG00000135049_30 (sequence is synthesized)
tctgaattatcaagaacatacctaccttgagcccgctgccatctcttgttaactgcaaagaataaatgaaatatcttggtttttatttcccaggaagcttgagagaaatgagtttataca

SEQ ID NO: 316247 - DNA, 120 bp, Artificial Sequence
  ENSG00000135049_31 (sequence is synthesized)
gagctgactcaaaaagacaaaaagtaacttgggccagtttggtttcaagataataaatgtgttattaattaatgataaaattggcgcttgttttattttcgatattcaatgcactttatg

SEQ ID NO: 316248 - DNA, 120 bp, Artificial Sequence
  ENSG00000135049_32 (sequence is synthesized)
tagcattgaatgatcaaatattggatttacctttaaaaaaaaaacctgagtatcattgcatgaatttttatctccctatggttatatcctgcatcaagtggataattttgaagtgtgttc

SEQ ID NO: 316249 - DNA, 120 bp, Artificial Sequence
  ENSG00000135049_33 (sequence is synthesized)
agaatataaaattgaaattttagagttgttgaaaatcctgacttgttgaaaactaatatatatgtacatggatttctatagatgtgtttgtttagaagtgggtagatattgcagataaga

SEQ ID NO: 316250 - DNA, 120 bp, Artificial Sequence
  ENSG00000135049_34 (sequence is synthesized)
ctgttcttcagaatcatgttaactattgggttgtgactgaagtagtccagggtttgccttgaaaccattacattctacatttaccaaattaaacaaataaaaactgtattaaatgttgca

SEQ ID NO: 316251 - DNA, 120 bp, Artificial Sequence
  ENSG00000135049_35 (sequence is synthesized)
cggggcgccgcgctgacgttgcccgggatgcggacaggttccgccgcctccagcgccgccgccgcagctgccgccgccgccgcctccgcctcgcctgccaccggggtttgtatgaaaaca

SEQ ID NO: 316252 - DNA, 120 bp, Artificial Sequence
  ENSG00000135049_36 (sequence is synthesized)
cgcctccgcctcgcctgccaccggggtttgtatgaaaacaccgggcggcgggcggcgagggatccgccgtgatccaggtgctgagccgggtgctgcggctctgcgcggtccccgccagcg

SEQ ID NO: 316253 - DNA, 120 bp, Artificial Sequence
  ENSG00000135049_37 (sequence is synthesized)
tcctcttgtcaatacctccagtctgataatgaggaagtgtttcccaaaaaatcgactgccactcccaacaattaaaagttcttttcatttccagttgcctgttattcctgtgactggtcc

SEQ ID NO: 316254 - DNA, 120 bp, Artificial Sequence
  ENSG00000135049_38 (sequence is synthesized)
ctttgaaattgctgaaagctctgatgacttctctgcctctaacagctgcccttgcttggcctgggttccactggactttgccccacgcacctttttttctttgctgattttgctttgtat

SEQ ID NO: 316255 - DNA, 120 bp, Artificial Sequence
  ENSG00000135049_39 (sequence is synthesized)
cctttcactgtaataagtcataactgaattcaactgtgtgctgagtcctgtgagtcttcctagcaaatcactaaccctatggtggtcttgggacccctgataagcatgttcattctgaat

SEQ ID NO: 316256 - DNA, 120 bp, Artificial Sequence
  ENSG00000135049_40 (sequence is synthesized)
ttctgtaaaggttggttatcccagaggttctaatgttctactgagaatgatcagagacagatggtattatgatccttttatggatgtgtgcagctgaggctgaaagagagaaatttacct

SEQ ID NO: 316257 - DNA, 120 bp, Artificial Sequence
  ENSG00000135049_41 (sequence is synthesized)
ttccagtcttataaagaatgtctggcagtcaggactctggatcctcttgtcaatacctccagtctgataatgaggaagtgtttcccaaaaaatcgactgccactcccaacaattaaaagt

SEQ ID NO: 316258 - DNA, 120 bp, Artificial Sequence
  ENSG00000135052_0 (sequence is synthesized)
atcttcactttttccgttgctagcagtggaagggtcacagaccaaacactaaggcctgagcggtgacaaccgaggcgagatgatggtcaacagggaatgcctcgtgggagaaaaaagaca

SEQ ID NO: 316259 - DNA, 120 bp, Artificial Sequence
  ENSG00000135052_1 (sequence is synthesized)
attttattctcagcgctgattttgagatgatgggcttgggaaacgggcgtcgcagcatgaagtcgccgcccctcgtgctggccgccctggtggcctgcatcatcgtcttgggcttcaact

SEQ ID NO: 316260 - DNA, 120 bp, Artificial Sequence
  ENSG00000135052_2 (sequence is synthesized)
actggattgcgagctcccggagcgtggacctccagacacggatcatggagctggaaggcagggtccgcagggcggctgcagagagaggcgccgtggagctgaagaagaacgagttccagg

SEQ ID NO: 316261 - DNA, 120 bp, Artificial Sequence
  ENSG00000135052_3 (sequence is synthesized)
gagagctggagaagcagcgggagcagcttgacaaaatccagtccagccacaacttccagctggagagcgtcaacaagctgtaccaggacgaaaaggcggttttggtgaataacatcacca

SEQ ID NO: 316262 - DNA, 120 bp, Artificial Sequence
  ENSG00000135052_4 (sequence is synthesized)
caggtgagaggctcatccgagtgctgcaagaccagttaaagaccctgcagaggaattacggcaggctgcagcaggatgtcctccagtttcagaagaaccagaccaacctggagaggaagt

SEQ ID NO: 316263 - DNA, 120 bp, Artificial Sequence
  ENSG00000135052_5 (sequence is synthesized)
tctcctacgacctgagccagtgcatcaatcagatgaaggaggtgaaggaacagtgtgaggagcgaatagaagaggtcaccaaaaaggggaatgaagctgtagcttccagagacctgagtg

SEQ ID NO: 316264 - DNA, 120 bp, Artificial Sequence
  ENSG00000135052_6 (sequence is synthesized)
aaaacaacgaccagagacagcagctccaagccctcagtgagcctcagcccaggctgcaggcagcaggcctgccacacacagaggtgccacaagggaagggaaacgtgcttggtaacagca

SEQ ID NO: 316265 - DNA, 120 bp, Artificial Sequence
  ENSG00000135052_7 (sequence is synthesized)
agtcccagacaccagcccccagttccgaagtggttttggattcaaagagacaagttgagaaagaggaaaccaatgagatccaggtggtgaatgaggagcctcagagggacaggctgccgc

SEQ ID NO: 316266 - DNA, 120 bp, Artificial Sequence
  ENSG00000135052_8 (sequence is synthesized)
aggagccaggccgggagcaggtggtggaagacagacctgtaggtggaagaggcttcgggggagccggagaactgggccagaccccacaggtgcaggctgccctgtcagtgagccaggaaa

SEQ ID NO: 316267 - DNA, 120 bp, Artificial Sequence
  ENSG00000135052_9 (sequence is synthesized)
atccagagatggagggccctgagcgagaccagcttgtcatccccgacggacaggaggaggagcaggaagctgccggggaagggagaaaccagcagaaactgagaggagaagatgactaca

SEQ ID NO: 316268 - DNA, 120 bp, Artificial Sequence
  ENSG00000135052_10 (sequence is synthesized)
acatggatgaaaatgaagcagaatctgagacagacaagcaagcagccctggcagggaatgacagaaacatagatgtttttaatgttgaagatcagaaaagagacaccataaatttacttg

SEQ ID NO: 316269 - DNA, 120 bp, Artificial Sequence
  ENSG00000135052_11 (sequence is synthesized)
atcagcgtgaaaagcggaatcatacactctgaattgaactggaatcacatatttcacaacagggccgaagagatgactataaaatgttcatgagggactgaatactgaaaactgtgaaat

SEQ ID NO: 316270 - DNA, 120 bp, Artificial Sequence
  ENSG00000135052_12 (sequence is synthesized)
gaagatgattattgtgaaattttagtatgcactttgtgtaggaaaaaatggaatggtcttttaaacagcttttggggggtactttggaagtgtctaataaggtgtcacaatttttggtag

SEQ ID NO: 316271 - DNA, 120 bp, Artificial Sequence
  ENSG00000135052_13 (sequence is synthesized)
taggtatttcgtgagaagttcaacaccaaaactggaacatagttctccttcaagtgttggcgacagcggggcttcctgattctggaatataactttgtgtaaattaacagccacctatag

SEQ ID NO: 316272 - DNA, 120 bp, Artificial Sequence
  ENSG00000135052_14 (sequence is synthesized)
aagagtccatctgctgtgaaggagagacagagaactctgggttccgtcgtcctgtccacgtgctgtaccaagtgctggtgccagcctgttacctgttctcactgaaaagtctggctaatg

SEQ ID NO: 316273 - DNA, 120 bp, Artificial Sequence
  ENSG00000135052_15 (sequence is synthesized)
ctcttgtgtagtcacttctgattctgacaatcaatcaatcaatggcctagagcactgactgttaacacaaacgtcactagcaaagtagcaacagctttaagtctaaatacaaagctgttc

SEQ ID NO: 316274 - DNA, 120 bp, Artificial Sequence
  ENSG00000135052_16 (sequence is synthesized)
tgtgtgagaattttttaaaaggctacttgtataataacccttgtcatttttaatgtacaaaacgctattaagtggcttagaatttgaacatttgtggtctttatttactttgcttcgtgt

SEQ ID NO: 316275 - DNA, 120 bp, Artificial Sequence
  ENSG00000135052_17 (sequence is synthesized)
gtgggcaaagcaacatcttccctaaatatatattaccaagaaaagcaagaagcagattaggtttttgacaaaacaaacaggccaaaagggggctgacctggagcagagcatggtgagagg

SEQ ID NO: 316276 - DNA, 120 bp, Artificial Sequence
  ENSG00000135052_18 (sequence is synthesized)
caaggcatgagagggcaagtttgttgtggacagatctgtgcctactttattactggagtaaaagaaaacaaagttcattgatgtcgaaggatatatacagtgttagaaattaggactgtt

SEQ ID NO: 316277 - DNA, 120 bp, Artificial Sequence
  ENSG00000135052_19 (sequence is synthesized)
tagaaaaacaggaatacaatggttgtttttatcatagtgtacacatttagcttgtggtaaatgactcacaaaactgattttaaaatcaagttaatgtgaattttgaaaattactacttaa

SEQ ID NO: 316278 - DNA, 120 bp, Artificial Sequence
  ENSG00000135052_20 (sequence is synthesized)
tcctaattcacaataacaatggcattaaggtttgacttgagttggttcttagtattatttatggtaaataggctcttaccacttgcaaataactggccacatcattaatgactgacttcc

SEQ ID NO: 316279 - DNA, 120 bp, Artificial Sequence
  ENSG00000135052_21 (sequence is synthesized)
cagtaaggctctctaaggggtaagtaggaggatccacaggatttgagatgctaaggccccagagatcgtttgatccaaccctcttattttcagaggggaaaatggggcctagaagttaca

SEQ ID NO: 316280 - DNA, 90 bp, Artificial Sequence
  ENSG00000135052_22 (sequence is synthesized)
gagtcactgaagcaggccctgtttgcaattcacgttgccacctccaacttaaacattcttcatatgtgatgtccttagtcactaaggtta

SEQ ID NO: 316281 - DNA, 120 bp, Artificial Sequence
  ENSG00000135052_23 (sequence is synthesized)
aaacattcttcatatgtgatgtccttagtcactaaggttaaactttcccacccagaaaaggcaacttagataaaatcttagagtactttcatactcttctaagtcctcttccagcctcac

SEQ ID NO: 316282 - DNA, 120 bp, Artificial Sequence
  ENSG00000135052_24 (sequence is synthesized)
tttgagtcctccttggggttgataggaattttctcttgctttctcaataaagtctctattcatctcatgtttaatttgtacgcatagaattgctgagaaataaaatgttctgttcaactt

SEQ ID NO: 316283 - DNA, 120 bp, Artificial Sequence
  ENSG00000135052_25 (sequence is synthesized)
gcacggcgcggagccggccggagctcgaggccggcggcggcgggagagcgacccgggcggcctcgtagcggggccccggatccccgagtggcggccggagcctcgaaaagagattctcag

SEQ ID NO: 316284 - DNA, 120 bp, Artificial Sequence
  ENSG00000135052_26 (sequence is synthesized)
agatgaggtctgcttgtctggagttggagaactgaatctgttttcagaaattgtatctgctaaagagttgttaagtgctttgttagcagcgaagaagaactaaatatttgagcatcatct

SEQ ID NO: 316285 - DNA, 60 bp, Artificial Sequence
  ENSG00000135052_27 (sequence is synthesized)
tgatggtcaacagggaatgcctcgtgggagaaaaaagacaattttagtctcactctgttg

SEQ ID NO: 316286 - DNA, 120 bp, Artificial Sequence
  ENSG00000135052_28 (sequence is synthesized)
acagatacggtccctaaagtgagaaatgaatgttcgaaagaaggtgctctcgtttggcatggagtgaatgccttgtttccacctcaaatcctaagatggaacacatttttcctggtgact

SEQ ID NO: 316287 - DNA, 120 bp, Artificial Sequence
  ENSG00000135052_29 (sequence is synthesized)
tcaggcagatggcacacctcccacttccgttgtgtgtcatgaaggaggagacacttctatagccagggctgtgcctgaataatgatgtacatgggggggagttcacattcacctccagaa

SEQ ID NO: 316288 - DNA, 120 bp, Artificial Sequence
  ENSG00000135052_30 (sequence is synthesized)
tgggtttcctgctttgcttgagaaatgctttaattgggtgtcattagtaatcctgtcaagggtaaaaaaaacctcccttgttaggaatcaaagcaaaaagctctctctgaggagtaatga

SEQ ID NO: 316289 - DNA, 120 bp, Artificial Sequence
  ENSG00000135052_31 (sequence is synthesized)
cttttttgttgttgatcttccgcctaggtattttattattccgtaaatgcttcctctcagcagaatcactgcccagttttattctgtattgacagtactttctgggagaccttgactcaa

SEQ ID NO: 316290 - DNA, 120 bp, Artificial Sequence
  ENSG00000135052_32 (sequence is synthesized)
cctcttgtcttctgatttacgccacatgaccagggcgtgaccagagtagactgtggcgtttctcggggtcttggttggaaggatatggtggtgggattggtgggattcattgcattggta

SEQ ID NO: 316291 - DNA, 120 bp, Artificial Sequence
  ENSG00000135063_0 (sequence is synthesized)
agtgtgctgcgccttcggctcggctccgctccgcgtcctctgcccgccgcagccggccgcacccggccgcacccttccccgtccgtccatgtccctgcccgtggtgctcccgggctcctg

SEQ ID NO: 316292 - DNA, 80 bp, Artificial Sequence
  ENSG00000135063_1 (sequence is synthesized)
atgtccctgcccgtggtgctcccgggctcctgctgccccgtggctgggctttcgggtgggccgcaggccgggggcccggg

SEQ ID NO: 316293 - DNA, 80 bp, Artificial Sequence
  ENSG00000135063_2 (sequence is synthesized)
cagtcgccgccgctgccgccgcggccccgggctccgcgctgctgcccgcccgcccgctgctgtcacttgggctgcttcag

SEQ ID NO: 316294 - DNA, 120 bp, Artificial Sequence
  ENSG00000135063_3 (sequence is synthesized)
gctgcccgcccgcccgctgctgtcacttgggctgcttcagctgatcttgggctgctgcatggtggcgctcagcttcggggcgctgtcgctgagcagctccccgcaggtgaagaactcgtg

SEQ ID NO: 316295 - DNA, 120 bp, Artificial Sequence
  ENSG00000135063_4 (sequence is synthesized)
cccgttctgggccggctcctcggtgatactctctggaatcataggattaacaacttggaaaaggcctatgatactcctggtaaacctctttgtgctgctctctgtggtttgtgtcctctt

SEQ ID NO: 316296 - DNA, 120 bp, Artificial Sequence
  ENSG00000135063_5 (sequence is synthesized)
aaatctagctggatttatcctaggctgccaaggggcccagtttgtgtccagcgtgcccaggtgtgatctggtggacttaggtgaaggcaagatttgcttctgttgtgaagaatttcaacc

SEQ ID NO: 316297 - DNA, 120 bp, Artificial Sequence
  ENSG00000135063_6 (sequence is synthesized)
agccaagtgcacagacaaagaaaatgccttgaaactctttccggttcagccctgtagtgctgttcaccttctacttaagaaagtcctctttgccctgtgtgccttgaatgccctgaccac

SEQ ID NO: 316298 - DNA, 120 bp, Artificial Sequence
  ENSG00000135063_7 (sequence is synthesized)
caccgtctgcttggtggccgctgccctccgctacctccagatattcgcaaccaggagatcctgcatcgatgaatcccagatttctgctgaagaagcggaggatcatggacgcatccccga

SEQ ID NO: 316299 - DNA, 120 bp, Artificial Sequence
  ENSG00000135063_8 (sequence is synthesized)
ccctgatgattttgtgccgcctgtgcctcccccttcctattttgccacgttttactcgtgcacaccccggatgaaccgcaggatggttggtcctgatgttattcccctgccacacatcta

SEQ ID NO: 316300 - DNA, 120 bp, Artificial Sequence
  ENSG00000135063_9 (sequence is synthesized)
cggagctcgaatcaaaggtgtggaagtgttctgtcctctggatcccccgccgccatatgaagctgtggtgagccagatggaccaggagcagggatcttcattccaaatgtcagaaggatc

SEQ ID NO: 316301 - DNA, 120 bp, Artificial Sequence
  ENSG00000135063_10 (sequence is synthesized)
agaagctgctgtgatcccattggatctgggctgcacacaagtgactcaagatggggacattcctaacatacctgccgaagaaaatgcatccacctcaactcccagttcaaccctggtgcg

SEQ ID NO: 316302 - DNA, 120 bp, Artificial Sequence
  ENSG00000135063_11 (sequence is synthesized)
gaagccggagagccctcccacccttgaggaccaggtcgaagagtgaccctgtgctccatccttctgaggagagagctgccccagtgctcagctgtgaagctgcaacacagactgaaagga

SEQ ID NO: 316303 - DNA, 120 bp, Artificial Sequence
  ENSG00000135063_12 (sequence is synthesized)
gactggatctggctgcagtgactctgaggagaggcttgagatctagagcttcgcgatgcagaccgcggtctttgatagattacaaatcctacatggacaccaagctgctggtggcgaggt

SEQ ID NO: 316304 - DNA, 120 bp, Artificial Sequence
  ENSG00000135063_13 (sequence is synthesized)
tcctggagcagtcctcttgtaccatgaccccagacatccatgaacttgtagaaaacattaaatctgttttgaaatctgatgaggagcacatggaggaagccatcacaagtgccagttttc

SEQ ID NO: 316305 - DNA, 120 bp, Artificial Sequence
  ENSG00000135063_14 (sequence is synthesized)
tagaacagataatggccccattgcagcccagcacatccagggcccacaagctgccctcgcggagacagcctggcctgctgcacctccagagctgcggcgaccttcacaccttcacaccag

SEQ ID NO: 316306 - DNA, 120 bp, Artificial Sequence
  ENSG00000135063_15 (sequence is synthesized)
cggggaggccccgagccgagaggaggccccggcgagtggaggctgagcggccacacagcctcattggggtcatccgagagactgtcctgtgaaccctggaagacagaaggccactccaag

SEQ ID NO: 316307 - DNA, 120 bp, Artificial Sequence
  ENSG00000135063_16 (sequence is synthesized)
gggaaggatccctctcctctctgccatttcttggctgggagctgtggtccacctcaaaaaaaaggagcactctggaggacacgttttcccacctgttggctcccgtgtctgctgactgag

SEQ ID NO: 316308 - DNA, 120 bp, Artificial Sequence
  ENSG00000135063_17 (sequence is synthesized)
ggcattcaggagtaaatgcacaggtcggtccaggcccgtctgggtttgggatgcactgagttggaggttatgaaagctttgatcctcttcttcctctgctgggcctcgcagcattcccaa

SEQ ID NO: 316309 - DNA, 120 bp, Artificial Sequence
  ENSG00000135063_18 (sequence is synthesized)
gggtcacatgccctggcatgggcagaaactgggctaatgattctttgcccacttcacccctcgtgtctctctttgttgctaagttctttccctcttggaaggacagatctgccgggctgc

SEQ ID NO: 316310 - DNA, 120 bp, Artificial Sequence
  ENSG00000135063_19 (sequence is synthesized)
tatttatagttgcctttggcctttcactgctctgcgatttggcaggaaataaggcgattaaccctatgtgtccacaagcctcaagccttgtttcaggtcaccctcaaatcacactctctt

SEQ ID NO: 316311 - DNA, 120 bp, Artificial Sequence
  ENSG00000135063_20 (sequence is synthesized)
taggcaaaacaggaaacttcttaagtgacaaattttaatgccagacatttaaggagaggattattgttgattccatttactcatgcttgcaaaactagagacccctaaggcagaactgag

SEQ ID NO: 316312 - DNA, 120 bp, Artificial Sequence
  ENSG00000135063_21 (sequence is synthesized)
aataaacatgtttactttgggccactgggcttgatgtgtaatatttgttattacatgtatccttcgggctgtatcgttcattcagcaagcacttggctggatggcttcatggagctgcct

SEQ ID NO: 316313 - DNA, 120 bp, Artificial Sequence
  ENSG00000135063_22 (sequence is synthesized)
atttatttgaaatgactatttgttgaacacagtatagttcaaggatattttttcatatgtatttccttaagagagccctgagcctgagattttggaggcttctttcacttgtttgaactt

SEQ ID NO: 316314 - DNA, 120 bp, Artificial Sequence
  ENSG00000135063_23 (sequence is synthesized)
tgaaggtatattttatctattttaaaaaacacttaagaattaacaaattctataaagcatcttttttcatagttttcattcatactttcagcaacttgaagggagagtttttaacgtagt

SEQ ID NO: 316315 - DNA, 120 bp, Artificial Sequence
  ENSG00000135063_24 (sequence is synthesized)
ctgtgtttttgagcactctgagcatttgatttcttcctggtatcaccggtaaatcactcaatatattattattcccaaaattcgtgaagctaagagatgagccatcttgaaaaacaacct

SEQ ID NO: 316316 - DNA, 120 bp, Artificial Sequence
  ENSG00000135063_25 (sequence is synthesized)
tgtgcttatttgcctaaaggagccaggtgaaggcaggtggctctggccagctcaggaccctgcagtttaagtggtcatttgaaggagcttatgaggtcttgggaaagtaaaatattctac

SEQ ID NO: 316317 - DNA, 120 bp, Artificial Sequence
  ENSG00000135063_26 (sequence is synthesized)
gtccatgttaggaatatatatctaccatgtcttttaaggatggtagggtttttttgtttttttttaaagtcattgtcatcaaaagaatttggttgtacatgatactatgctaggtactac

SEQ ID NO: 316318 - DNA, 120 bp, Artificial Sequence
  ENSG00000135063_27 (sequence is synthesized)
atgaagacaattatgcacacctagttctgatttctagatgctgcaatcctataggaatatgcattgtcttaaaaaaagtcaaaaggatttttgtatactccctcttttataatttgttat

SEQ ID NO: 316319 - DNA, 120 bp, Artificial Sequence
  ENSG00000135063_28 (sequence is synthesized)
atttttactatgtatgagtagatgattgaattattgaaatctgaccttgtttttagaactttggatagaatgaagtacacgcacccacacaattcacctctctctctgtgttgtttgtgt

SEQ ID NO: 316320 - DNA, 120 bp, Artificial Sequence
  ENSG00000135063_29 (sequence is synthesized)
tgttgtttgtgtatagatgttacctgaataattaaaaattaaaataataacactgacttttttctgaatatatgaatacctgaacatctctaaatatctcttcattgtagaaaattataa

SEQ ID NO: 316321 - DNA, 120 bp, Artificial Sequence
  ENSG00000135063_30 (sequence is synthesized)
ctaaaggaagaaaattaaaatctcctgtaactccaccagcaccagcttcttcttgtgaagtagtctagcagagttgacctctgctgttctaaaacacctatgcaaataaaactttgataa

SEQ ID NO: 316322 - DNA, 120 bp, Artificial Sequence
  ENSG00000135063_31 (sequence is synthesized)
tcctccaccctgctctctctaaggtcctgtcttgagcccttgcagtctcagttctggctctctgacagtgtgtgttatttgccacagctctggactgaccatgtgcgagccagagagaac

SEQ ID NO: 316323 - DNA, 120 bp, Artificial Sequence
  ENSG00000135063_32 (sequence is synthesized)
attcctcttgtctctacagcagcttctaagtggagaggaagtcctgccgcctggtactgagcgtgtctctgaaacacagtggccaggcagcctggcttctgattcccaagacctgccttc

SEQ ID NO: 316324 - DNA, 120 bp, Artificial Sequence
  ENSG00000135063_33 (sequence is synthesized)
actgtgggtctcctacaccctacctggcaagttgaggactccagcctcaacgggaacttagctgtttgcacagcttagggaaatctttccagaaccccttctcattctgcagacctgcgg

SEQ ID NO: 316325 - DNA, 120 bp, Artificial Sequence
  ENSG00000135063_34 (sequence is synthesized)
gggcaagaacagcagctgctggagccctccattgtggaaggcgccaggttgccttcaagtggaagagtggagaccctgactctgtcctcacacgagtgtctttggcgagtgcttctggaa

SEQ ID NO: 316326 - DNA, 120 bp, Artificial Sequence
  ENSG00000135063_35 (sequence is synthesized)
ccagaagaaagggggtgctccccttcttccacctgctctctcgccccctgcttcttgtcttctttgaatttctaaattgctgcttatcaggccttcatagactgaagatgccaatgttgt

SEQ ID NO: 316327 - DNA, 120 bp, Artificial Sequence
  ENSG00000135063_36 (sequence is synthesized)
gtatgctgaaggctgctggctgacttctggacacataatgaccagatctgagttttgcttcacacacttcacagtgcagaagcattgctggtctttacacccttgctgatataggcagcc

SEQ ID NO: 316328 - DNA, 120 bp, Artificial Sequence
  ENSG00000135063_37 (sequence is synthesized)
atggaaattagagcctgcagtggatttcccaggctctctgttgacttccagaatgatgtgtactttttctgcacctaaatttctcttttggtaatagctatagatctacctcatatccat

SEQ ID NO: 316329 - DNA, 120 bp, Artificial Sequence
  ENSG00000135063_38 (sequence is synthesized)
ggtgtgagcatcgataacacaagtcagtacaacgtccttgaggacgtttgggacaaaggtatagtcaaagtgatcagagcattacattcatctgacaagtcttgtctctcttcagcccct

SEQ ID NO: 316330 - DNA, 120 bp, Artificial Sequence
  ENSG00000135063_39 (sequence is synthesized)
tcctctcttaattgactacttcatcctcgctccttggaacatcctttcattggtcagccacatttttcctgcttggcccatccatccccatctatttgtcataccccatgaaacttaacc

SEQ ID NO: 316331 - DNA, 120 bp, Artificial Sequence
  ENSG00000135063_40 (sequence is synthesized)
tcattatggtttgcattctggattctcctctccaccatctggctttaccttgggggtggtgtcgtacatgacacaatgacgtgtttcgggccatatcctattggaactggacttcaggga

SEQ ID NO: 316332 - DNA, 120 bp, Artificial Sequence
  ENSG00000135063_41 (sequence is synthesized)
ataaccttgtgttgttttccctccttctgcaagatgaaaagcaggatgtgcatggctatcagcatttgtcagatgctttccatgttgagttttgtggtctgtgctttcaggtacaggcat

SEQ ID NO: 316333 - DNA, 120 bp, Artificial Sequence
  ENSG00000135063_42 (sequence is synthesized)
tttccgctgagccagcccatggaccccttcgtgtcatccactgcctctctccccgtgcctttgtaatgaaggctgttgactaactgagctgctgtttaatcaggatgaatcccagatttc

SEQ ID NO: 316334 - DNA, 120 bp, Artificial Sequence
  ENSG00000135063_43 (sequence is synthesized)
tgttctttctgtacctgaggacacatttgcaaaaatcttagcgccgtctcaggctgtctgtagagggtacattggaggacagtaaaaaatgactgatatttcatggtggggatgagaaat

SEQ ID NO: 316335 - DNA, 120 bp, Artificial Sequence
  ENSG00000135063_44 (sequence is synthesized)
accctctccaataagaagaattctttgacactgaggttgcggatgagcactctgttgacctaggaggaggcagcagacagatttagtttctgcagtggcagaaagggaaagtgactcatg

SEQ ID NO: 316336 - DNA, 120 bp, Artificial Sequence
  ENSG00000135063_45 (sequence is synthesized)
tgggtttaggagccgagccatccagcagtgtgctctgagcactcccgaccttcctgtctcctcgctttcctttctcttctctgcttcaccataataatgctcatcactgcagatatttcc

SEQ ID NO: 316337 - DNA, 120 bp, Artificial Sequence
  ENSG00000135063_46 (sequence is synthesized)
actctttaagatctaggtgcatcctcggatttgtctctctgagtcctgagacagcctctggccaaatccaggttggaagaaaacagacaagcttctcatcaagggctttatccttcaaaa

SEQ ID NO: 316338 - DNA, 120 bp, Artificial Sequence
  ENSG00000135063_47 (sequence is synthesized)
ctttctagaaagaaggccgaaggagggagttaaagcaaaacagtcttgtgagaaagaagacattgcccagtctaaaatacgtgcctagagccctataatcatattgccaatgggcaaaca

SEQ ID NO: 316339 - DNA, 120 bp, Artificial Sequence
  ENSG00000135063_48 (sequence is synthesized)
cctttatttttggaaattttaccaatatcagagtgcagtccactttccttttcaaaagggctgaatttattcacatttagatacatgtcctatcaaaaatatttcacaatgtgaccaact

SEQ ID NO: 316340 - DNA, 120 bp, Artificial Sequence
  ENSG00000135063_49 (sequence is synthesized)
tttctagattcacggtataaatcaactttatagacactcatggtttaacctcagttggtaattttctttcttttaagcaggcaggcaagaatattcatgattgttactattttatgacca

SEQ ID NO: 316341 - DNA, 120 bp, Artificial Sequence
  ENSG00000135063_50 (sequence is synthesized)
gttttatccagagttttcacacaacagaggctccccatttcctgtaaggtattatgacctctcagaagaggtttgtttaacttctataaatacaaccacttcatgcgttggcatctcctt

SEQ ID NO: 316342 - DNA, 120 bp, Artificial Sequence
  ENSG00000135063_51 (sequence is synthesized)
gagaaaaggcttctcgagttactgtcataaacagaagtctgattgcagttgaggtttctgtccaaagatgggttcgctactttgtgaattgatttgtaatacaggagggggccgtgcacc

SEQ ID NO: 316343 - DNA, 120 bp, Artificial Sequence
  ENSG00000135063_52 (sequence is synthesized)
ccaccccacctccgctactccagggtgtctctgttctcagaagttggcttgagccagggatcaaggagtctccaacctatttcttgaacatggatctggtttttactctggggatgtagc

SEQ ID NO: 316344 - DNA, 120 bp, Artificial Sequence
  ENSG00000135063_53 (sequence is synthesized)
ctattaaagaaaaccgaagactgagggggtcttgggcattgacgtggttgacatgggcatttcttaaagcagagcccccccaaaccccactcatttcctttcctaagaatttccaaaccc

SEQ ID NO: 316345 - DNA, 120 bp, Artificial Sequence
  ENSG00000135063_54 (sequence is synthesized)
aaactcaagtggagccgggcgatgcttggggttgagtcagtgctcagctgtagagggttgggggagggcccttccctctctccccctctgcaggcagcaaccctgtacccagtcacaggg

SEQ ID NO: 316346 - DNA, 120 bp, Artificial Sequence
  ENSG00000135063_55 (sequence is synthesized)
tacagttttccagtacaggaggaggaggattctctggtcaatggtgtatctgctgctgcattccacctgagtgagtcttcagggcctatttgtagcctgaaagcagaacatgctttgaat

SEQ ID NO: 316347 - DNA, 120 bp, Artificial Sequence
  ENSG00000135063_56 (sequence is synthesized)
ttccatcttcagtgctcctgagcctgcaccagtgaagtcttcctggggacttggtgatggacttgaaagagccaggctctagagtctctgcagagggtgacccaggatgagtctctcacc

SEQ ID NO: 316348 - DNA, 120 bp, Artificial Sequence
  ENSG00000135063_57 (sequence is synthesized)
atttctgagcctcagtttcctcattcaccttcgttgtcatgtggctgcagggagtattgttatgagataatggacataagaagctttctgaaaagaagcaagaccctcattctttaataa

SEQ ID NO: 316349 - DNA, 120 bp, Artificial Sequence
  ENSG00000135063_58 (sequence is synthesized)
aaatttgatcaactttcccagtagaacagggctttaatttcaatcaccattatccatttccttttgcagtggtgctcaatcttggtggtgcattagaatcccctaggagcactgacaacg

SEQ ID NO: 316350 - DNA, 120 bp, Artificial Sequence
  ENSG00000135063_59 (sequence is synthesized)
ggcagattcctgggtcccacgataggcaatgagagcagaatttctaaaagtgaggcctgggccatccagagtttcagaacctcccaaggtgattctacctaccttgccaggactgagagc

SEQ ID NO: 316351 - DNA, 120 bp, Artificial Sequence
  ENSG00000135063_60 (sequence is synthesized)
aaacaaaaacaaaaacaaaaacaaaaaaccaacctgccagtatgtagcagatccatttccctccacagacccttgttaacacaaatgaggtaaaataagaaattgcttaataggaaagga

SEQ ID NO: 316352 - DNA, 120 bp, Artificial Sequence
  ENSG00000135063_61 (sequence is synthesized)
ggtaaaataagaaattgcttaataggaaaggaactttccttctatgtcaactctagcagcatcttccttcaaagtgaggcttttatgggcattatcaaaactaccatagaagctgtttat

SEQ ID NO: 316353 - DNA, 120 bp, Artificial Sequence
  ENSG00000135063_62 (sequence is synthesized)
ccccagttgttcttcgggaagaaattctacaatagtttaggatctaaaacagagcctgttactctgacctcttggccctcagcaagccctctcctctctctggacacgtaacaaacaggc

SEQ ID NO: 316354 - DNA, 120 bp, Artificial Sequence
  ENSG00000135063_63 (sequence is synthesized)
aacggggatagaaactttccaggcaggggacacagcagcgaagaaatacagatgtcatttgttggagagaaaaagtcaagtgtttataagtgctaggaaggtggctcatgggggctatgc

SEQ ID NO: 316355 - DNA, 120 bp, Artificial Sequence
  ENSG00000135063_64 (sequence is synthesized)
tcattaaagatggaaggctggccctctggagaggatagaagtccataggtctcattgatgaaagcaaattgcactgttcatttgccaggaaagaatcttcactcttagatccaggaaggg

SEQ ID NO: 316356 - DNA, 120 bp, Artificial Sequence
  ENSG00000135063_65 (sequence is synthesized)
tctggcttctcagagtcactcagcatttatagttcttaaacagtttcagtggaatgggggagttggaatgaagcccgttggcaagtcctgctgtaagggggagaatctctctttcataat

SEQ ID NO: 316357 - DNA, 120 bp, Artificial Sequence
  ENSG00000135063_66 (sequence is synthesized)
aactttgccaggacccctcccccacgaagggaccctttgtgctagtgcctcgcttccaactggaggcttgatgtgttgcgtgctgaacctgcaaacatctccacttcaggcattagctca

SEQ ID NO: 316358 - DNA, 120 bp, Artificial Sequence
  ENSG00000135063_67 (sequence is synthesized)
tcaccttctgccttccccttcaggtcaagcaagggatgagagcctcgcttacgaacagacaaatatagaggaaaacgagggagtgctttctcatcttttcattcaggttgcagagtctca

SEQ ID NO: 316359 - DNA, 120 bp, Artificial Sequence
  ENSG00000135063_68 (sequence is synthesized)
ttcttctcagtcccagaattccagaagttttattgttaggaagaaagaagatgatatccttttcaaattttttcttccaccaatcacattttgtatatagccacaaagaataaaatgaaa

SEQ ID NO: 316360 - DNA, 120 bp, Artificial Sequence
  ENSG00000135063_69 (sequence is synthesized)
caactataaattcagagaacactgctccccaaaaggcagtgcctgcaagcaactagccccagaatctgttttctcatccatttcttttagctttttaaaatcctttttttgtatttcaag

SEQ ID NO: 316361 - DNA, 120 bp, Artificial Sequence
  ENSG00000135063_70 (sequence is synthesized)
aacagacaaacttttgttctctttttttttctttcattctttgatactccatagcagaatgcaggtgttctggcttttatatgtattttataaattattttaaaacttaggttcatcatt

SEQ ID NO: 316362 - DNA, 120 bp, Artificial Sequence
  ENSG00000135063_71 (sequence is synthesized)
atctagatcatctggtaccttgggcagagatttgtggaattttctgtcaacgttggtgaaaaatcttgtggaggattttgctattattttgaattttgctgttgacggttctttacccac

SEQ ID NO: 316363 - DNA, 120 bp, Artificial Sequence
  ENSG00000135063_72 (sequence is synthesized)
aggacaaaaacaagagtcatgtagaatgtaagacataattgaattttcctgagtccttagctgttttttaaatagaggtgaaactcatataaaatgaaattaaccaaagtatatgattca

SEQ ID NO: 316364 - DNA, 120 bp, Artificial Sequence
  ENSG00000135063_73 (sequence is synthesized)
gtagcatttagtgcattcacattatttcgtaaccatcatctttatctagttccaaagcattttcagtacttcagagagaccccatacccatcaaacagtcactccccattcccttctccc

SEQ ID NO: 316365 - DNA, 120 bp, Artificial Sequence
  ENSG00000135063_74 (sequence is synthesized)
ccatcccctggcagccactaatctgctctgtgtctctatggattgtttgctttttgactgatgggtttaaaagcaatgatggggttgcattttatacactgtcatttgcttaaggaactc

SEQ ID NO: 316366 - DNA, 120 bp, Artificial Sequence
  ENSG00000135063_75 (sequence is synthesized)
agaaaaataaggacttgaggttattgagaagacttaagagtcagtggcatccctcagcacaattttaagaagtctaaaatgtgaaaaaaagtttgtacattgaaaacacggttctgatct

SEQ ID NO: 316367 - DNA, 120 bp, Artificial Sequence
  ENSG00000135069_0 (sequence is synthesized)
gcagactctcaccgcagcggccaggaacgccagccgttcacgcgttcggtcctccttggctgactcaccgccctggccgccgcaccatggacgcccccaggcaggtggtcaactttgggc

SEQ ID NO: 316368 - DNA, 120 bp, Artificial Sequence
  ENSG00000135069_1 (sequence is synthesized)
ctggtcccgccaagctgccgcactcagtgttgttagagatacaaaaggaattattagactacaaaggagttggcattagtgttcttgaaatgagtcacaggtcatcagattttgccaaga

SEQ ID NO: 316369 - DNA, 120 bp, Artificial Sequence
  ENSG00000135069_2 (sequence is synthesized)
ttattaacaatacagagaatcttgtgcgggaattgctagctgttccagacaactataaggtgatttttctgcaaggaggtgggtgcggccagttcagtgctgtccccttaaacctcattg

SEQ ID NO: 316370 - DNA, 120 bp, Artificial Sequence
  ENSG00000135069_3 (sequence is synthesized)
gcttgaaagcaggaaggtgtgctgactatgtggtgacaggagcttggtcagctaaggccgcagaagaagccaagaagtttgggactataaatatcgttcaccctaaacttgggagttata

SEQ ID NO: 316371 - DNA, 120 bp, Artificial Sequence
  ENSG00000135069_4 (sequence is synthesized)
caaaaattccagatccaagcacctggaacctcaacccagatgcctcctacgtgtattattgcgcaaatgagacggtgcatggtgtggagtttgactttatacccgatgtcaagggagcag

SEQ ID NO: 316372 - DNA, 120 bp, Artificial Sequence
  ENSG00000135069_5 (sequence is synthesized)
tactggtttgtgacatgtcctcaaacttcctgtccaagccagtggatgtttccaagtttggtgtgatttttgctggtgcccagaagaatgttggctctgctggggtcaccgtggtgattg

SEQ ID NO: 316373 - DNA, 120 bp, Artificial Sequence
  ENSG00000135069_6 (sequence is synthesized)
tccgtgatgacctgctggggtttgccctccgagagtgcccctcggtcctggaatacaaggtgcaggctggaaacagctccttgtacaacacgcctccatgtttcagcatctacgtcatgg

SEQ ID NO: 316374 - DNA, 120 bp, Artificial Sequence
  ENSG00000135069_7 (sequence is synthesized)
gcttggttctggagtggattaaaaacaatggaggtgccgcggccatggagaagcttagctccatcaaatctcaaacaatttatgagattattgataattctcaaggattctacgtttgtc

SEQ ID NO: 316375 - DNA, 120 bp, Artificial Sequence
  ENSG00000135069_8 (sequence is synthesized)
cagtggagccccaaaatagaagcaagatgaatattccattccgcattggcaatgccaaaggagatgatgctttagaaaaaagatttcttgataaagctcttgaactcaatatgttgtcct

SEQ ID NO: 316376 - DNA, 120 bp, Artificial Sequence
  ENSG00000135069_9 (sequence is synthesized)
tgctgtcacaattgaagacgttcagaagctggccgccttcatgaaaaaatttttggagatgcatcagctatgaacacatcctaaccaggatatactctgttcttgaacaacatacaaagt

SEQ ID NO: 316377 - DNA, 120 bp, Artificial Sequence
  ENSG00000135069_10 (sequence is synthesized)
ttaaagtaacttggggatggctacaaaaagttaacacagtatttttctcaaatgaacatgtttattgcagattcttcttttttgaaagaacaacagcaaaacatccacaactctgtaaag

SEQ ID NO: 316378 - DNA, 120 bp, Artificial Sequence
  ENSG00000135069_11 (sequence is synthesized)
ctggtgggacctaatgtcaccttaattctgacttgaactggaagcattttaagaaatcttgttgcttttctaacaaattcccgcgtattttgcctttgctgctactttttctagttagat

SEQ ID NO: 316379 - DNA, 120 bp, Artificial Sequence
  ENSG00000135069_12 (sequence is synthesized)
ttcaaacttgcctgtggacttaataatgcaagttgcgattaattatttctggagtcatgggaacacacagcacagagggtaggggggccctctaggtgctgaatctacacatctgtgggg

SEQ ID NO: 316380 - DNA, 120 bp, Artificial Sequence
  ENSG00000135069_13 (sequence is synthesized)
tctcctgggttcagcggctgttgattcaaggtcaacattgaccattggaggagtggtttaagagtgccaggcgaagggcaaactgtagatcgatctttatgctgttattacaggagaagt

SEQ ID NO: 316381 - DNA, 120 bp, Artificial Sequence
  ENSG00000135069_14 (sequence is synthesized)
tagcaaggtctgtttttaataccatatactttatatttctatacatttatatttctaataatacagttatcactgatatatgtagacacttttagaatttattaaatccttgaccttgtg

SEQ ID NO: 316382 - DNA, 120 bp, Artificial Sequence
  ENSG00000135069_15 (sequence is synthesized)
atttattaaatccttgaccttgtgcattatagcattccattagcaagagttgtaccccctccccagtcttcgccttcctctttttaagctgttttatgaaaaagacctagaagttcttga

SEQ ID NO: 316383 - DNA, 120 bp, Artificial Sequence
  ENSG00000135069_16 (sequence is synthesized)
ttcatttttaccattctttccataggtagaagagaaagttgattggttggttgtttttcaattatgccattaaactaaacatttctgttaaattaccctatcctttgttctctactgttt

SEQ ID NO: 316384 - DNA, 120 bp, Artificial Sequence
  ENSG00000135069_17 (sequence is synthesized)
tctttgtaatgtatgactacgagagtgatactttgctgaaaagtctttcccctattgtttatctattgtcagtattttatgttgaatatgtaaagaacattaaagtcctaaaacatctaa

SEQ ID NO: 316385 - DNA, 120 bp, Artificial Sequence
  ENSG00000135070_0 (sequence is synthesized)
aatgcgcccgccgtgtccatggagagaagctgaggcggccgaccttcggcccgaggcaccggggcgccgggacggcgaagatgtcggcttccttagtccgggcaactgtccgggctgtga

SEQ ID NO: 316386 - DNA, 120 bp, Artificial Sequence
  ENSG00000135070_1 (sequence is synthesized)
gcaagaggaagctgcagcccacccgggcagccctcaccctgacaccttcagcagtaaacaagataaaacaacttcttaaagataagcctgagcatgtaggtgtaaaagttggtgtccgaa

SEQ ID NO: 316387 - DNA, 120 bp, Artificial Sequence
  ENSG00000135070_2 (sequence is synthesized)
ccaggggctgtaatggcctttcttatactctagaatatacaaagacaaaaggagattctgatgaagaagttattcaagatggagtcagagtattcatcgaaaagaaagcacagctaacac

SEQ ID NO: 316388 - DNA, 120 bp, Artificial Sequence
  ENSG00000135070_3 (sequence is synthesized)
ttttaggaacagaaatggactatgttgaagacaaattatccagtgagtttgtgttcaataacccaaacatcaaagggacttgtggctgtggagaaagctttaatatttgaaatctcagga

SEQ ID NO: 316389 - DNA, 120 bp, Artificial Sequence
  ENSG00000135070_4 (sequence is synthesized)
ctcttctggccgtaggttccaggaaagctcgtggaagctttggggctcactgcagaaatcatgtgactgtcacgtgctggaaaataaagtgatacatcttgaaaatgaatccagtgtgtt

SEQ ID NO: 316390 - DNA, 120 bp, Artificial Sequence
  ENSG00000135070_5 (sequence is synthesized)
ggattccagaagaaatgatatttatattctctataggggacagaaaatgagaagccatcactctttttggatcatttaggtctcttgtatcctttgttttagaaccagtttcattaaagt

SEQ ID NO: 316391 - DNA, 120 bp, Artificial Sequence
  ENSG00000135070_6 (sequence is synthesized)
tgccttcctgggcacctgtttatccatttcctgaactgtgtgcactccttagatcgctattgatggcttgatcatccctcagcatttctcccaaccagatcggtgactcctaaaatctga

SEQ ID NO: 316392 - DNA, 120 bp, Artificial Sequence
  ENSG00000135070_7 (sequence is synthesized)
gacaggacatcgtgactgctggtagtaatatggtggtgcattgttttttccacccaaacttaacatagcctttttatacatttttatgaaaaatttcattgtcagctgcctcactgcata

SEQ ID NO: 316393 - DNA, 120 bp, Artificial Sequence
  ENSG00000135070_8 (sequence is synthesized)
tagttctgagtgatggtatcaaaaggtgagaaagacgtcatccgcctttttttaatccatttcttttgccaccctatatgtctgttcagagatgggctctcaagctgactttgattcttt

SEQ ID NO: 316394 - DNA, 120 bp, Artificial Sequence
  ENSG00000135070_9 (sequence is synthesized)
tagttgagaagtctcttaaagccatctagcccacctccatcaattccctatgtgaggaagcaaaaccccagggaagccaaagggctcctgtccaccctgacaccacaggccgggggagag

SEQ ID NO: 316395 - DNA, 120 bp, Artificial Sequence
  ENSG00000135070_10 (sequence is synthesized)
tagggactctacccccctctccccttgtaggtgacacatgctctgccctctgaggcagtcagcgaaggcaaatggtctgacttctttatgtggtcaacattttgatagaatttctttata

SEQ ID NO: 316396 - DNA, 120 bp, Artificial Sequence
  ENSG00000135070_11 (sequence is synthesized)
atttgatagagattatattatttttattttattttgagtgggaagaattttaaaacctttttatgtcaattaccatcttgtttctttcacctttgaaacaatggtttgtagcagagatga

SEQ ID NO: 316397 - DNA, 120 bp, Artificial Sequence
  ENSG00000135070_12 (sequence is synthesized)
cattgtagcaacccagaattatgcttttggaatgtggtcctcactgtacaggagaatgtgtaatcttttgttaaaattcccagtgtgcatacattttctggttcctcggtccagttgcta

SEQ ID NO: 316398 - DNA, 120 bp, Artificial Sequence
  ENSG00000135070_13 (sequence is synthesized)
aagttcttagtattttagcctaacatatttatcaccaacttttctttaaaagtgttccttttgtcacttagttactgattttcctgggtttgacataagtattctatgagatgatatata

SEQ ID NO: 316399 - DNA, 120 bp, Artificial Sequence
  ENSG00000135070_14 (sequence is synthesized)
tgctttttttgaaagctgattctcatgaattcaagtagctgagttcctttatgtttcgtttattcactaaagtagctgacacaaaacacaccaaaacctagagcggtagttttatgtaaa

SEQ ID NO: 316400 - DNA, 120 bp, Artificial Sequence
  ENSG00000135070_15 (sequence is synthesized)
tgctcatgagtttgtatcaataatataattgttgatccacttataattcgtgcaacactgtatgtatgtagagattgagttgtcaattaaaaaaaatgtggcctctttgtgatcataaaa

SEQ ID NO: 316401 - DNA, 81 bp, Artificial Sequence
  ENSG00000135070_16 (sequence is synthesized)
ttcatttttgtatttttagtggagctgtattatcaactcatgtttttgaggaatcctgtatttccaatttttattcaaagc

SEQ ID NO: 316402 - DNA, 120 bp, Artificial Sequence
  ENSG00000135070_17 (sequence is synthesized)
gtttttgaggaatcctgtatttccaatttttattcaaagctatttattataatttaatttataattaaaattaattatatttgctgctgcccccttcttccaccctataatctgttaaaa

SEQ ID NO: 316403 - DNA, 120 bp, Artificial Sequence
  ENSG00000135070_18 (sequence is synthesized)
acatgggagaatgaggcctagattcctaagtgtgctttcttattaaactaaagttataactatcaataaagaccttttaaaaatgtattattttaaaaattataacacattataaacctt

SEQ ID NO: 316404 - DNA, 120 bp, Artificial Sequence
  ENSG00000135070_19 (sequence is synthesized)
aagattttcatcttaaagaagaggtgacttaattatatattgtttatatttagctaatggctcaatttcttgtaaggaagaaagtttttttgttgtttcgttgttttgtttgtttgttga

SEQ ID NO: 316405 - DNA, 79 bp, Artificial Sequence
  ENSG00000135070_20 (sequence is synthesized)
aaagtttttttgttgtttcgttgttttgtttgtttgttgagacagagtcttgctctctagcctctgtctcccgggctca

SEQ ID NO: 316406 - DNA, 85 bp, Artificial Sequence
  ENSG00000135070_21 (sequence is synthesized)
ccagggttttgccctgtttcccagactagaaagctttcttaaattgattgtatttgttggctgggcactgtggctcacacctgta

SEQ ID NO: 316407 - DNA, 120 bp, Artificial Sequence
  ENSG00000135070_22 (sequence is synthesized)
tcccgggggtgggcgtccccgggggccgatcgcctccacactcctgccggcctgcgctgttcggccgttccggttaagcagaggctgaacgtgcccggtggcgggggttcccggtggtgg

SEQ ID NO: 316408 - DNA, 120 bp, Artificial Sequence
  ENSG00000135070_23 (sequence is synthesized)
gggtggagggtggcgattatacaactctgcggtaacgccatgctcttaagaacagcctaattggaccacaaaagaagaatgaaaatggatgtagatgtctgggcatcggaacgatcactc

SEQ ID NO: 316409 - DNA, 120 bp, Artificial Sequence
  ENSG00000135074_0 (sequence is synthesized)
agacgcgcctccaccgccgggcagtgggcaggtatggctgagggcgtgtgagcgccgagcgctaagggccgccgccaccatgccagggggcgcaggcgccgcccggctctgcttgctggc

SEQ ID NO: 316410 - DNA, 120 bp, Artificial Sequence
  ENSG00000135074_1 (sequence is synthesized)
gtttgccctgcagcccctccggccgcgggcggcgcgggagcctggatggacaagaggaagtgaggaaggcagccccaagctgcagcatgaacttatcatacctcagtggaagacttcaga

SEQ ID NO: 316411 - DNA, 120 bp, Artificial Sequence
  ENSG00000135074_2 (sequence is synthesized)
aagccccgtgagagaaaagcatccactcaaagctgagctcagggtaatggctgaggggcgagaactgatcctggacctggagaagaatgagcaactttttgctccttcctacacagaaac

SEQ ID NO: 316412 - DNA, 120 bp, Artificial Sequence
  ENSG00000135074_3 (sequence is synthesized)
ccattatacttcaagtggtaaccctcaaaccaccacacggaaattggaggatcactgcttttaccacggcacggtgagggagacagaactgtccagcgtcacgctcagcacttgccgagg

SEQ ID NO: 316413 - DNA, 120 bp, Artificial Sequence
  ENSG00000135074_4 (sequence is synthesized)
aattagaggactgattacggtgagcagcaacctcagctacgtcatcgagcccctccctgacagcaagggccaacaccttatttacagatctgaacatctcaagccgcccccgggaaactg

SEQ ID NO: 316414 - DNA, 120 bp, Artificial Sequence
  ENSG00000135074_5 (sequence is synthesized)
tgggttcgagcactccaagcccaccaccagggactgggctcttcagtttacacaacagaccaagaagcgacctcgcaggatgaaaagggaagatttaaactccatgaagtatgtggagct

SEQ ID NO: 316415 - DNA, 120 bp, Artificial Sequence
  ENSG00000135074_6 (sequence is synthesized)
ttacctcgtggctgattatttagagtttcagaagaatcgacgagaccaggacgccaccaaacacaagctcatagagatcgccaactatgttgataagttttaccgatccttgaacatccg

SEQ ID NO: 316416 - DNA, 120 bp, Artificial Sequence
  ENSG00000135074_7 (sequence is synthesized)
gattgctctcgtgggcttggaagtgtggacccacgggaacatgtgtgaagtttcagagaatccatattctaccctctggtcctttctcagttggaggcgcaagctgcttgcccagaagta

SEQ ID NO: 316417 - DNA, 120 bp, Artificial Sequence
  ENSG00000135074_8 (sequence is synthesized)
ccatgacaacgcccaattaatcacgggcatgtccttccacggcaccaccatcggcctggcccccctcatggccatgtgctctgtgtaccagtctggaggagtcaacatggaccactccga

SEQ ID NO: 316418 - DNA, 120 bp, Artificial Sequence
  ENSG00000135074_9 (sequence is synthesized)
gaatgccattggcgtggctgccaccatggcccacgagatgggccacaactttggcatgacccatgattctgcagattgctgctcggccagtgcggctgatggtgggtgcatcatggcagc

SEQ ID NO: 316419 - DNA, 120 bp, Artificial Sequence
  ENSG00000135074_10 (sequence is synthesized)
tgccactgggcacccctttcccaaagtgttcaatggatgcaacaggagggagctggacaggtatctgcagtcaggtggtggaatgtgtctctccaacatgccagacaccaggatgttgta

SEQ ID NO: 316420 - DNA, 120 bp, Artificial Sequence
  ENSG00000135074_11 (sequence is synthesized)
tggaggccggaggtgtgggaacgggtatctggaagatggggaagagtgtgactgtggagaagaagaggaatgtaacaacccctgctgcaatgcctctaattgtaccctgaggccgggggc

SEQ ID NO: 316421 - DNA, 120 bp, Artificial Sequence
  ENSG00000135074_12 (sequence is synthesized)
ggagtgtgctcacggctcctgctgccaccagtgtaagctgttggctcctgggaccctgtgccgcgagcaggccaggcagtgtgacctcccggagttctgtacgggcaagtctccccactg

SEQ ID NO: 316422 - DNA, 120 bp, Artificial Sequence
  ENSG00000135074_13 (sequence is synthesized)
ccctaccaacttctaccagatggatggtaccccctgtgagggcggccaggcctactgctacaacggcatgtgcctcacctaccaggagcagtgccagcagctgtggggacccggagcccg

SEQ ID NO: 316423 - DNA, 120 bp, Artificial Sequence
  ENSG00000135074_14 (sequence is synthesized)
acctgcccctgacctctgcttcgagaaggtgaatgtggcaggagacacctttggaaactgtggaaaggacatgaatggtgaacacaggaagtgcaacatgagagatgcgaagtgtgggaa

SEQ ID NO: 316424 - DNA, 120 bp, Artificial Sequence
  ENSG00000135074_15 (sequence is synthesized)
gatccagtgtcagagctctgaggcccggcccctggagtccaacgcggtgcccattgacaccactatcatcatgaatgggaggcagatccagtgccggggcacccacgtctaccgaggtcc

SEQ ID NO: 316425 - DNA, 120 bp, Artificial Sequence
  ENSG00000135074_16 (sequence is synthesized)
tgaggaggagggtgacatgctggacccagggctggtgatgactggaaccaagtgtggctacaaccatatttgctttgaggggcagtgcaggaacacctccttctttgaaactgaaggctg

SEQ ID NO: 316426 - DNA, 120 bp, Artificial Sequence
  ENSG00000135074_17 (sequence is synthesized)
tgggaagaagtgcaatggccatggggtctgtaacaacaaccagaactgccactgcctgccgggctgggccccgcccttctgcaacacaccgggccacgggggcagtatcgacagtgggcc

SEQ ID NO: 316427 - DNA, 120 bp, Artificial Sequence
  ENSG00000135074_18 (sequence is synthesized)
tatgccccctgagagtgtgggtcctgtggtagctggagtgttggtggccatcttggtgctggcggtcctcatgctgatgtactactgctgcagacagaacaacaaactaggccaactcaa

SEQ ID NO: 316428 - DNA, 120 bp, Artificial Sequence
  ENSG00000135074_19 (sequence is synthesized)
gccctcagctctcccttccaagctgaggcaacagttcagttgtcccttcagggtttctcagaacagcgggactggtcatgccaacccaactttcaagctgcagacgccccagggcaagcg

SEQ ID NO: 316429 - DNA, 120 bp, Artificial Sequence
  ENSG00000135074_20 (sequence is synthesized)
aaaggtgatcaacactccggaaatcctgcggaagccctcccagcctcctccccggccccctccagattatctgcgtggtgggtccccacctgcaccactgccagctcacctgagcagggc

SEQ ID NO: 316430 - DNA, 120 bp, Artificial Sequence
  ENSG00000135074_21 (sequence is synthesized)
tgctaggaactccccagggcccgggtctcaaatagagaggacggagtcgtccaggaggcctcctccaagccggccaattccccccgcaccaaattgcatcgtttcccaggacttctccag

SEQ ID NO: 316431 - DNA, 120 bp, Artificial Sequence
  ENSG00000135074_22 (sequence is synthesized)
gcctcggccgccccagaaggcactcccggcaaacccagtgccaggccgcaggagcctccccaggccaggaggtgcatccccactgcggccccctggtgctggccctcagcagtcccggcc

SEQ ID NO: 316432 - DNA, 120 bp, Artificial Sequence
  ENSG00000135074_23 (sequence is synthesized)
tctggcagcacttgccccaaagtttccagaatacagatcacagagggctggagggatgattagctcgaaaatctagacctgtccaaggggcttctccctttccttgagctctctggacac

SEQ ID NO: 316433 - DNA, 120 bp, Artificial Sequence
  ENSG00000135074_24 (sequence is synthesized)
tgcagaggacccatggccatggaaccctgaagaagcatgtctggccgcctctgagctcctcccaccctcctccaggaacctccacatctccaaaaatctccctgttgactcagtgcctcc

SEQ ID NO: 316434 - DNA, 120 bp, Artificial Sequence
  ENSG00000135074_25 (sequence is synthesized)
tcggcttccttggaagcccagagggactatgatctgatggcctctaggtgttgttttgtgcaatatacagccccaggtagggaggggagagtatgaggagggtgactggcagcttctcct

SEQ ID NO: 316435 - DNA, 120 bp, Artificial Sequence
  ENSG00000135074_26 (sequence is synthesized)
ccagactcctagccccgaggtgctgatggagatgctcaaggccagcaagcccctcaggccagcacttcgcttgcagaagccatccattcactcctggggtgcagggcacgcaagagagct

SEQ ID NO: 316436 - DNA, 120 bp, Artificial Sequence
  ENSG00000135074_27 (sequence is synthesized)
cccattgcttctgctctcctcagaggtcccgggctggatggaggctggtacttacccaccccttttagcttttagggattaaggaagggtcaagccagccactgctgtggccctgcccag

SEQ ID NO: 316437 - DNA, 120 bp, Artificial Sequence
  ENSG00000135074_28 (sequence is synthesized)
ggcttggttgagggaacggcttctggctgtatggctgcatgtgacaagccacgtcccctcccacctctccccaaacccctgcatccctgtattcacacgggtcactctgactcagacagg

SEQ ID NO: 316438 - DNA, 120 bp, Artificial Sequence
  ENSG00000135074_29 (sequence is synthesized)
tactattcgtaggcagtgtagacagcaggaggagcaccgggcttgggcttcctctgagccgtgatgccaaaggttgcgactcctgactctggataatttttagttgctctttgttttctc

SEQ ID NO: 316439 - DNA, 120 bp, Artificial Sequence
  ENSG00000135074_30 (sequence is synthesized)
tgccgcactttcctggtgccccacgcttttctctcttccttcccctctcattctccctctaatgtgtggtgctttggtgagcaaaccctcagcagtcctgaccttcgggtgaccaggtgc

SEQ ID NO: 316440 - DNA, 120 bp, Artificial Sequence
  ENSG00000135074_31 (sequence is synthesized)
ttgtgacctacaagtcagagtcctctctcacagtcggccactggatttccctcactggctctcaggagtgtgaccagagtagacttggggcatggccattggggtcatatgtttattttt

SEQ ID NO: 316441 - DNA, 120 bp, Artificial Sequence
  ENSG00000135074_32 (sequence is synthesized)
cattgtgttttgtgacctcagcagggtgggggtcttcctccttactctaagctaaatctaggtgaggtttccccttagggagcccagctatttacaaagtacacacgagggagcaggctg

SEQ ID NO: 316442 - DNA, 120 bp, Artificial Sequence
  ENSG00000135074_33 (sequence is synthesized)
gtcattgacttcgggctggaccgttgccctctgagcagagaacagacccatttctgggagctgcccgagatcactggagaaggcagccagcagcagctgcactggaacagtcagagcagg

SEQ ID NO: 316443 - DNA, 120 bp, Artificial Sequence
  ENSG00000135074_34 (sequence is synthesized)
gagcctcttcctcaacccagctttttgtcattcacttccttttgttctctctctggtcactgcccttacctgaccctcacagaaagagagctctgagcaggtgagggggtctgcggtggc

SEQ ID NO: 316444 - DNA, 120 bp, Artificial Sequence
  ENSG00000135074_35 (sequence is synthesized)
tcctgtcttccctgcagcagggaaggagggccgtgtggtgctttgctagataggacggtttttgcaaagcacctggagatgtttgctgggagatagactcccactccacaaaggtgctgg

SEQ ID NO: 316445 - DNA, 120 bp, Artificial Sequence
  ENSG00000135074_36 (sequence is synthesized)
gtggctctccggacaggagctggcctgactctcactcctctgaggctttcctggggcctcctcccatcctgccatgagcaattgtttgctcttgaaaacctcactgcaaggctgaggctg

SEQ ID NO: 316446 - DNA, 120 bp, Artificial Sequence
  ENSG00000135074_37 (sequence is synthesized)
agcttctgattcaccaccccagggcctccttatagttctctgcacacaataggtgcttcttggatgttcttgggtttggaaataagtggaaaatacgggatgtacccctgggggaaaagc

SEQ ID NO: 316447 - DNA, 120 bp, Artificial Sequence
  ENSG00000135074_38 (sequence is synthesized)
ctgggttgggtttagaaagatctcaggaaaatgagtttctcttccctcagggtggctgtgatacaggttccccatgtccttgccgtgggtcatccttgctgtgggtcatccttgctgtgg

SEQ ID NO: 316448 - DNA, 120 bp, Artificial Sequence
  ENSG00000135074_39 (sequence is synthesized)
agatccattccccacctttcctgtggcccaaccttttatttaaatgtgctaccctctgcctcaaggcttggttcctggaaagtaaaggtgaaaacatcccctttcacccctctgcaaaac

SEQ ID NO: 316449 - DNA, 120 bp, Artificial Sequence
  ENSG00000135074_40 (sequence is synthesized)
aaacaagcaacatcctcaaaacccaaccccatgcctcacagagcttcctgtggcttctccagcctttctccctcacatcaggaggtagatagctctgaaatgacagcgccacagccatag

SEQ ID NO: 316450 - DNA, 120 bp, Artificial Sequence
  ENSG00000135074_41 (sequence is synthesized)
tgactgcatgagccatctgaacctgcagtccaccctccctggaaccacaccagaaagagacctgggttgtcgttttcttgctttttgttttgttttgttttattattttcatatcacctc

SEQ ID NO: 316451 - DNA, 120 bp, Artificial Sequence
  ENSG00000135074_42 (sequence is synthesized)
catcccataaagttgtactgtgaactggaagatggtggaatgttttggaatttgatagactttcggcaaccagttctactaatgcttcactcctggctctgttcagggaggctgcccagg

SEQ ID NO: 316452 - DNA, 120 bp, Artificial Sequence
  ENSG00000135074_43 (sequence is synthesized)
aggaagactggccattatgcatccccttttctttccagtgcccagtatgctgttttgaggtgtcaaatacaaataaatctgggcttagggaaggagagaccttattccaaagcacgattg

SEQ ID NO: 316453 - DNA, 120 bp, Artificial Sequence
  ENSG00000135074_44 (sequence is synthesized)
cagaaggggaaagggaatattgcaaaagggagaggaaggggccttatgggaatagtgaaaaggctcagaccgaccgatggcaagatctgcaagcgtctcaaagcccaggcagaaaaggac

SEQ ID NO: 316454 - DNA, 120 bp, Artificial Sequence
  ENSG00000135074_45 (sequence is synthesized)
gcaagcgtctcaaagcccaggcagaaaaggacttttcttttattggaagaagtaaacatggctagaaagaaccacgttcagggaatgacgttgtgcccagcctttttttttttttttttt

SEQ ID NO: 316455 - DNA, 120 bp, Artificial Sequence
  ENSG00000135074_46 (sequence is synthesized)
ctcaggctgaggatggcccaaagtccagggtctggtggggaggagggaagcttaactcaagtttgggttagtgagttagcaagctctttgtgcagatggggatgtaggtaaatcttttta

SEQ ID NO: 316456 - DNA, 120 bp, Artificial Sequence
  ENSG00000135074_47 (sequence is synthesized)
aaagtgaaattaacctcctgccaattttacaacccaagaatttttttttaagggccttggagccatctctaaaacaaacctcaagggatttagtgccctgtctccctgtctctagaagcc

SEQ ID NO: 316457 - DNA, 120 bp, Artificial Sequence
  ENSG00000135074_48 (sequence is synthesized)
ttagcctgggcacctggctcaatcttgtaactgcctgctagccatagattcctttcagccttgctgacttctccctataaaagtaaagcctttttctgccccagctctgagacacttgca

SEQ ID NO: 316458 - DNA, 120 bp, Artificial Sequence
  ENSG00000135074_49 (sequence is synthesized)
gatcttaaggtctgagacttgctgattttctggttggagtgtttttttgtattgccatagtcccttccccctgaagcaatagcccctccccacctcctgcaatacgcctttccaatcttt

SEQ ID NO: 316459 - DNA, 120 bp, Artificial Sequence
  ENSG00000135074_50 (sequence is synthesized)
attggaagtctctccctgcctacttcctaatttattcttatttgacagagggtatggaagacttgcaatttgaaaactggggaccagttccaaagtcagtaattgtgttaaccacgtgta

SEQ ID NO: 316460 - DNA, 120 bp, Artificial Sequence
  ENSG00000135074_51 (sequence is synthesized)
taacagctctgctggacacccaagaaagccatgggaacgccaactggaaaggtccccttccccaggggagcctgcgaaggagaggttctgtagaatccaagcccacatttccaaagtcac

SEQ ID NO: 316461 - DNA, 120 bp, Artificial Sequence
  ENSG00000135074_52 (sequence is synthesized)
ccccaacgcgtcctctcacaccgtccactgtgcgtttgtatgtgtctgggatccagggcaatgtgaattttctttttatttgggagattgttcacggaaaacagatcttcttctctcttg

SEQ ID NO: 316462 - DNA, 120 bp, Artificial Sequence
  ENSG00000135074_53 (sequence is synthesized)
tccacctattaattgtttacaatatttgtacatctatgcaaaatacttgaatgggccatggtgccttttttccttgttagtatttaattaaaaatgaattgtttgtcatttgcaatgtta

SEQ ID NO: 316463 - DNA, 120 bp, Artificial Sequence
  ENSG00000135074_54 (sequence is synthesized)
ttcatgcttcttgtggtctggactgaacttccagaacaaaagccaagggcaaaacattcatgtttcttggtgcccgcttgactgtggagttttggcttcatgtgaaaggtgattcttaga

SEQ ID NO: 316464 - DNA, 120 bp, Artificial Sequence
  ENSG00000135074_55 (sequence is synthesized)
atcctgagctgtggtggcttcagtcctgcccctgcacctgacctggggagggaccctgagcaagtccctcttgagtctgtttcctcatttgtacagaggctatgatgagcagtagtacca

SEQ ID NO: 316465 - DNA, 120 bp, Artificial Sequence
  ENSG00000135074_56 (sequence is synthesized)
gccccatcaggttgttgtgaagagcaaggaagtgcattagtagaagccacctggcctgcgggaggctgtgtacacttggcccctcctcgtacttcttctgtgtggctgacagtctcagtt

SEQ ID NO: 316466 - DNA, 120 bp, Artificial Sequence
  ENSG00000135074_57 (sequence is synthesized)
tgccagtcttggcagtcaggtcagaaagggatgaggtgaagaagctggctgaccatgctgtattcccacgaggcattgagaaaactatggactgtgctgctgccttagcagggaagggaa

SEQ ID NO: 316467 - DNA, 120 bp, Artificial Sequence
  ENSG00000135074_58 (sequence is synthesized)
accattagttctgtttctggcccactctgtcctctgggtgcccattttggagatcacagatgggactttccttccttgtatgacaaacttctagaacacttcccaatgctattagttgag

SEQ ID NO: 316468 - DNA, 120 bp, Artificial Sequence
  ENSG00000135074_59 (sequence is synthesized)
gaaatgaaaattcacattaatgctgacacaagctaagtgcagatgtgttggtgtcacagaaatcacttagtcttgattggaattcattaaatattgtcattgttatttttgctctgcata

SEQ ID NO: 316469 - DNA, 120 bp, Artificial Sequence
  ENSG00000135074_60 (sequence is synthesized)
atacatacttcattttcttgaaggaataatgtacttggagagaaaaaagataataatataaactataaactattttaataagacgcagcgtagagacctagtactggggaatgtatctta

SEQ ID NO: 316470 - DNA, 120 bp, Artificial Sequence
  ENSG00000135074_61 (sequence is synthesized)
tatggccttctacaggtcaatgaggattagaatagaaccaggaatcaagaccaagttgctggttttactagtttggaagcagttttaatgaagatggaaatgtttatcaactcaacacag

SEQ ID NO: 316471 - DNA, 120 bp, Artificial Sequence
  ENSG00000135077_0 (sequence is synthesized)
atttggagagttaaaactgtgcctaacagaggtgtcctctgacttttcttctgcaagctccatgttttcacatcttccctttgactgtgtcctgctgctgctgctgctactacttacaag

SEQ ID NO: 316472 - DNA, 120 bp, Artificial Sequence
  ENSG00000135077_1 (sequence is synthesized)
gtcctcagaagtggaatacagagcggaggtcggtcagaatgcctatctgccctgcttctacaccccagccgccccagggaacctcgtgcccgtctgctggggcaaaggagcctgtcctgt

SEQ ID NO: 316473 - DNA, 120 bp, Artificial Sequence
  ENSG00000135077_2 (sequence is synthesized)
gtttgaatgtggcaacgtggtgctcaggactgatgaaagggatgtgaattattggacatccagatactggctaaatggggatttccgcaaaggagatgtgtccctgaccatagagaatgt

SEQ ID NO: 316474 - DNA, 120 bp, Artificial Sequence
  ENSG00000135077_3 (sequence is synthesized)
gactctagcagacagtgggatctactgctgccggatccaaatcccaggcataatgaatgatgaaaaatttaacctgaagttggtcatcaaaccagccaaggtcacccctgcaccgactcg

SEQ ID NO: 316475 - DNA, 120 bp, Artificial Sequence
  ENSG00000135077_4 (sequence is synthesized)
gcagagagacttcactgcagcctttccaaggatgcttaccaccaggggacatggcccagcagagacacagacactggggagcctccctgatataaatctaacacaaatatccacattggc

SEQ ID NO: 316476 - DNA, 120 bp, Artificial Sequence
  ENSG00000135077_5 (sequence is synthesized)
caatgagttacgggactctagattggccaatgacttacgggactctggagcaaccatcagaataggcatctacatcggagcagggatctgtgctgggctggctctggctcttatcttcgg

SEQ ID NO: 316477 - DNA, 120 bp, Artificial Sequence
  ENSG00000135077_6 (sequence is synthesized)
cgctttaattttcaaatggtattctcatagcaaagagaagatacagaatttaagcctcatctctttggccaacctccctccctcaggattggcaaatgcagtagcagagggaattcgctc

SEQ ID NO: 316478 - DNA, 120 bp, Artificial Sequence
  ENSG00000135077_7 (sequence is synthesized)
agaagaaaacatctataccattgaagagaacgtatatgaagtggaggagcccaatgagtattattgctatgtcagcagcaggcagcaaccctcacaacctttgggttgtcgctttgcaat

SEQ ID NO: 316479 - DNA, 120 bp, Artificial Sequence
  ENSG00000135077_8 (sequence is synthesized)
gccatagatccaaccaccttatttttgagcttggtgttttgtctttttcagaaactatgagctgtgtcacctgactggttttggaggttctgtccactgctatggagcagagttttccca

SEQ ID NO: 316480 - DNA, 120 bp, Artificial Sequence
  ENSG00000135077_9 (sequence is synthesized)
tatttaagccaacagagttacccaacccagagactgttaatcatggatgttagagctcaaacgggcttttatatacactaggaattcttgacgtggggtctctggagctccaggaaattc

SEQ ID NO: 316481 - DNA, 120 bp, Artificial Sequence
  ENSG00000135077_10 (sequence is synthesized)
gggcacatcatatgtccatgaaacttcagataaactagggaaaactgggtgctgaggtgaaagcataacttttttggcacagaaagtctaaaggggccactgattttcaaagagatctgt

SEQ ID NO: 316482 - DNA, 120 bp, Artificial Sequence
  ENSG00000135077_11 (sequence is synthesized)
tgggattacaggcgtgagccaccacatccagccagtgatccttaaaagattaagagatgactggaccaggtctaccttgatcttgaagattcccttggaatgttgagatttaggcttatt

SEQ ID NO: 316483 - DNA, 120 bp, Artificial Sequence
  ENSG00000135077_12 (sequence is synthesized)
attcccttggaatgttgagatttaggcttatttgagcactgcctgcccaactgtcagtgccagtgcatagcccttcttttgtctcccttatgaagactgccctgcagggctgagatgtgg

SEQ ID NO: 316484 - DNA, 120 bp, Artificial Sequence
  ENSG00000135077_13 (sequence is synthesized)
caggagctcccagggaaaaacgaagtgcatttgattggtgtgtattggccaagttttgcttgttgtgtgcttgaaagaaaatatctctgaccaacttctgtattcgtggaccaaactgaa

SEQ ID NO: 316485 - DNA, 120 bp, Artificial Sequence
  ENSG00000135077_14 (sequence is synthesized)
gctatatttttcacagaagaagaagcagtgacggggacacaaattctgttgcctggtggaaagaaggcaaaggccttcagcaatctatattaccagcgctggatcctttgacagagagtg

SEQ ID NO: 316486 - DNA, 120 bp, Artificial Sequence
  ENSG00000135077_15 (sequence is synthesized)
gtccctaaacttaaatttcaagacggtataggcttgatctgtcttgcttattgttgccccctgcgcctagcacaattctgacacacaattggaacttactaaaaatttttttttactgtt

SEQ ID NO: 316487 - DNA, 120 bp, Artificial Sequence
  ENSG00000135077_16 (sequence is synthesized)
atgaataagatttatctgtggatcatattaaaggtactgattgttctcatctctgacttccctaattatagccctggaggagggccactaagacctaaagtttaacaggccccattggtg

SEQ ID NO: 316488 - DNA, 120 bp, Artificial Sequence
  ENSG00000135077_17 (sequence is synthesized)
agggccactaagacctaaagtttaacaggccccattggtgatgctcagtgatatttaacaccttctctctgttttaaaactcatgggtgtgcctgggcgtggtggctcacacctctaatc

SEQ ID NO: 316489 - DNA, 79 bp, Artificial Sequence
  ENSG00000135077_18 (sequence is synthesized)
cctggccaacatagtaaaaccacgggagcctgtaattctagctacttggggggctgaagcaggagaatcacttgaacct

SEQ ID NO: 316490 - DNA, 77 bp, Artificial Sequence
  ENSG00000135077_19 (sequence is synthesized)
acttggggtggtaagccaagatctcgccattgtactccagcctggctgacaagggtgaaactctgtctcaaaaaaaa

SEQ ID NO: 316491 - DNA, 120 bp, Artificial Sequence
  ENSG00000135077_20 (sequence is synthesized)
gtttctgaaagtgaggttctgagaccagccacttcagcaacacttgagaacttgttagaaataaaagttctcaggctctaccacaggccaactgagtcaggaactctagcagttgagccc

SEQ ID NO: 316492 - DNA, 120 bp, Artificial Sequence
  ENSG00000135077_21 (sequence is synthesized)
agcaatctgtgttttcgcaaggcttcccagtgattctgatggccttcacatctgagaagcattgtcacagcgaatcatcctccaaacaggactgcagcagtagcttcctctttattctgt

SEQ ID NO: 316493 - DNA, 80 bp, Artificial Sequence
  ENSG00000135083_0 (sequence is synthesized)
gggacccgagcgcacgcaggggcgcggcgacggcgggggctagtcgggctgcggaggcggccgtcgggagtgcggagcgc

SEQ ID NO: 316494 - DNA, 120 bp, Artificial Sequence
  ENSG00000135083_1 (sequence is synthesized)
cgggagtgcggagcgcctcggacgagggtccaaccgccggcaggcaccagagggcacggctggctcggcactgggaggggcccggcgctcgcagccccccacgcccagagaggatgcggt

SEQ ID NO: 316495 - DNA, 120 bp, Artificial Sequence
  ENSG00000135083_2 (sequence is synthesized)
gcgccctgagagccgggtagcctcggatagcggcgctgcgtacgcgatgatggatgagccgtggtgggaagggcgcgtcgcctcggacgtccactgcaccctgcgcgagaaggaactgaa

SEQ ID NO: 316496 - DNA, 120 bp, Artificial Sequence
  ENSG00000135083_3 (sequence is synthesized)
gctgcccaccttccgagcccactccccactcctgaagagccgccggttcttcgtggacatcctgaccctgctgagcagccactgccagctctgccctgcagcccggcacctggccgtcta

SEQ ID NO: 316497 - DNA, 120 bp, Artificial Sequence
  ENSG00000135083_4 (sequence is synthesized)
cctgctggaccacttcatggatcgctacaacgtcaccacctccaagcagctctacaccgtggccgtctcctgcctcctgcttgcaagtaagttcgaggatcgggaagaccacgtccccaa

SEQ ID NO: 316498 - DNA, 120 bp, Artificial Sequence
  ENSG00000135083_5 (sequence is synthesized)
gttggagcaaataaacagcacgaggatcctgagcagccagaacttcaccctcaccaagaaggagctgctgagcacagagctgctgctcctggaggccttcagctggaacctctgcctgcc

SEQ ID NO: 316499 - DNA, 120 bp, Artificial Sequence
  ENSG00000135083_6 (sequence is synthesized)
cacgcctgcccacttcctggactactacctcttggcctccgtcagccagaaggaccaccactgccacacctggcccaccacctgcccccgcaagaccaaagagtgcctcaaggagtatgc

SEQ ID NO: 316500 - DNA, 120 bp, Artificial Sequence
  ENSG00000135083_7 (sequence is synthesized)
ccattacttcctagaggtcaccctgcaagatcacatattctacaaattccagccttctgtggtcgctgcggcctgtgttggggcctccaggatttgcctgcagctttctccctactggac

SEQ ID NO: 316501 - DNA, 120 bp, Artificial Sequence
  ENSG00000135083_8 (sequence is synthesized)
cagagacctgcagaggatctcaagctattccctggagcacctcagcacgtgtattgaaatcctgctggtagtgtatgacaacgtcctcaaggatgccgtagccgtcaagagccaggcctt

SEQ ID NO: 316502 - DNA, 120 bp, Artificial Sequence
  ENSG00000135083_9 (sequence is synthesized)
ggcaatggtgcccggcacaccccccacccccactcaagtgctgttccagccaccagcctacccggccctcggccagccagcgaccaccctggcacagttccagacccccgtgcaggacct

SEQ ID NO: 316503 - DNA, 120 bp, Artificial Sequence
  ENSG00000135083_10 (sequence is synthesized)
atgcttggcctatcgggactccttgcaggcccaccgttcagggagcctgctctcggggagtacaggctcatccctccacaccccgtaccaaccgctgcagcccttggatatgtgtcccgt

SEQ ID NO: 316504 - DNA, 120 bp, Artificial Sequence
  ENSG00000135083_11 (sequence is synthesized)
gcccgtccctgcatcccttagcatgcatatggccattgcagctgagcccaggcactgcctcgccaccacctatggaagcagctacttcagtgggagccacatgttccccaccggctgctt

SEQ ID NO: 316505 - DNA, 120 bp, Artificial Sequence
  ENSG00000135083_12 (sequence is synthesized)
tgacagataggccacctccagacctcacgaggaagccttggagatgtgggcagaggaagaggacactgaagaggagagctcagccaagtgaggcagcaggaggccatccctgaagagcct

SEQ ID NO: 316506 - DNA, 120 bp, Artificial Sequence
  ENSG00000135083_13 (sequence is synthesized)
acattcaataacatacctcacccgagagcattcctctgagaaacgtctgccacgtgtggctagggtacaaaaggatggcttggtggccgtccccccacacaggggcccagtgaatcgaga

SEQ ID NO: 316507 - DNA, 120 bp, Artificial Sequence
  ENSG00000135083_14 (sequence is synthesized)
aagacttgataagaggccaggagagtgggaactggacacagaccactgatctcaagcatgtccagtttttagcattaaagacttttctattctttgctgatggcagctacaccgctgaaa

SEQ ID NO: 316508 - DNA, 120 bp, Artificial Sequence
  ENSG00000135083_15 (sequence is synthesized)
aaggaggggcagcctggcgtgttctcaggacccccggaggatcccatattgggtgcttttctttccctggctctatgcagaggggcctgagttggtgtgtatgcctgagtgtttgccttg

SEQ ID NO: 316509 - DNA, 120 bp, Artificial Sequence
  ENSG00000135083_16 (sequence is synthesized)
cgaggcacagtgggtggctgtcttgcctttgttttcgaacctaaaaccattttcagccttttagatatgtcatgtgctgctgcttcccgaagtggtcttgctttctgtttcgtaagatgt

SEQ ID NO: 316510 - DNA, 120 bp, Artificial Sequence
  ENSG00000135083_17 (sequence is synthesized)
cttgtttacacactgtatcagggatttggtgatacttgaaaattcctttggagaaaaaaacaaatttaattgccacactgcctgtcccacatgagggctgttaatttggaacccaagttt

SEQ ID NO: 316511 - DNA, 120 bp, Artificial Sequence
  ENSG00000135083_18 (sequence is synthesized)
gaacccaacttgtgatggacccgcaggtaaccacagagcttcctttttgaaggcatatggttggagagaaccattttcccagctctcggttccggaagattccacgtcttggaggctgtg

SEQ ID NO: 316512 - DNA, 120 bp, Artificial Sequence
  ENSG00000135083_19 (sequence is synthesized)
ttcaccactagaactttaataactacccagggagggagaagctcgttgaaaggaagacaaagatttaaacagttcccacctctctccaccacatacttacagggcatgagtttaacccag

SEQ ID NO: 316513 - DNA, 120 bp, Artificial Sequence
  ENSG00000135083_20 (sequence is synthesized)
tctaggctttgagtgtggctgatagcgaaggatagcaatgtggaaaatttgcttagtcccacctgtatttggggagtgggatgtacatgggcgtttgataccaccattgataggcaagcg

SEQ ID NO: 316514 - DNA, 120 bp, Artificial Sequence
  ENSG00000135083_21 (sequence is synthesized)
actggttggatcaaaagccagtatttagggatctgcagcgagagggccctcaggaagactcttgtaaccatgtgcaatatgtttttattctgactcgcagcttgtgctcagcatgttctt

SEQ ID NO: 316515 - DNA, 120 bp, Artificial Sequence
  ENSG00000135083_22 (sequence is synthesized)
tggtttagtttggggttgggggacacattgttcacccagcagaactgggaggtgcaaaggaccgtggaagcaatttttgttttgtttgaggaatacctgtcttggattccttagcccctt

SEQ ID NO: 316516 - DNA, 120 bp, Artificial Sequence
  ENSG00000135083_23 (sequence is synthesized)
gccagtcctggagactgtggcaggggccgccaggaaggcagctgtctgctgctgagtcagatcggaaggtggtgaatctttccagagcagctgaaaatctcagcatggagacagtaagaa

SEQ ID NO: 316517 - DNA, 120 bp, Artificial Sequence
  ENSG00000135083_24 (sequence is synthesized)
aagagacggggtgtggataagactctgccaccgtgtcacactagcataggaggctgcacgttcatttgttgttgtttttttttcctttgccaacctccgttctatttatgtgcaagcagt

SEQ ID NO: 316518 - DNA, 120 bp, Artificial Sequence
  ENSG00000135083_25 (sequence is synthesized)
ttggattcaagttcttgtatctgtctgttctgggacctggggattgtgagggttccctcacagccagcacgacccccagaaagaggcgtcccacaataaacacgtcacctgctcttgatc

SEQ ID NO: 316519 - DNA, 120 bp, Artificial Sequence
  ENSG00000135083_26 (sequence is synthesized)
gagaaagaaaaacaggtggaaccgacgtaaggatggctagagcagtgcgcgcggaaggcagaactttctgggggcgtcctgtccgcacgtttcacgcgtggtgcgcgcaggtggcgccgc

SEQ ID NO: 316520 - DNA, 77 bp, Artificial Sequence
  ENSG00000135083_27 (sequence is synthesized)
gccccaccccccacccacaccgccccaagtagctgagactacaggtaagttcgaggatcgggaagaccacgtcccca

SEQ ID NO: 316521 - DNA, 120 bp, Artificial Sequence
  ENSG00000135083_28 (sequence is synthesized)
ctctttcaattcagcagacgtgtcctgagcactcactgaggcaaggctgaagaatgcacccggggtccccaaaccagttctgctgccagaaggctttctccaaggtgactgaatttctgg

SEQ ID NO: 316522 - DNA, 120 bp, Artificial Sequence
  ENSG00000135083_29 (sequence is synthesized)
aactgacagatggagcctgagggaccttggtaatactgtgtcagctcccgtggccagtcagggagagcagagtcttcagggctgtatctccgcaccctgcccaccatcttccctctgacg

SEQ ID NO: 316523 - DNA, 120 bp, Artificial Sequence
  ENSG00000135083_30 (sequence is synthesized)
ggctgttggccaggatctgatccactcctttgagagtgtcaggagctgtggaaggtatggggtggggggcggggttcctcccaaggcaaagttcctgtggaggtcagatgagactgagct

SEQ ID NO: 316524 - DNA, 120 bp, Artificial Sequence
  ENSG00000135083_31 (sequence is synthesized)
tgagaactgagttatgaaaaaaacctcaaggaacatccttcacctgccctctatggctccttagcttcttgaggttctgctgctcagagcctagtgtgataaataacctctttctcttta

SEQ ID NO: 316525 - DNA, 120 bp, Artificial Sequence
  ENSG00000135083_32 (sequence is synthesized)
gctgctgcaaggcttgccgagaagggagcaaccctggcttgctgagacgtggttgattcattctgcagtgacgtcttttgagccgtcctcaggaatgtgttgtatctactgtggagcagc

SEQ ID NO: 316526 - DNA, 120 bp, Artificial Sequence
  ENSG00000135083_33 (sequence is synthesized)
ggcctgcctcaggccacgggcagtttccagagtctggaacttgtggtggttcttccagctacagggtctcagggaaagtgggccatggtgactcctggtagaagtggggtttcgagaacc

SEQ ID NO: 316527 - DNA, 68 bp, Artificial Sequence
  ENSG00000135083_34 (sequence is synthesized)
ggccatggtgactcctggtagaagtggggtttcgagaaccagttcttcctattttgaatagcttcagg

SEQ ID NO: 316528 - DNA, 61 bp, Artificial Sequence
  ENSG00000135083_35 (sequence is synthesized)
gggtttacatctttaaagtcaggcagcaagggagaagcgggctgtttgcacctttaaatgt

SEQ ID NO: 316529 - DNA, 120 bp, Artificial Sequence
  ENSG00000135083_36 (sequence is synthesized)
ggcagcaagggagaagcgggctgtttgcacctttaaatgtctaggctatttgatctaagtcccagtgtaatcttatagataatcgcattgaaggacttccattataagctacttttctca

SEQ ID NO: 316530 - DNA, 120 bp, Artificial Sequence
  ENSG00000135083_37 (sequence is synthesized)
gacatggtcacaaagctgacctcttagccagtaagctcccctaagcgccacagcctctgcaagggtccctgggaatcttggggaggaaatgttcagtgtgtcagagaagatacttaaagg

SEQ ID NO: 316531 - DNA, 120 bp, Artificial Sequence
  ENSG00000135083_38 (sequence is synthesized)
catcatgagcccaacaccctgaaactgacactggaggtaaatgtgccccatagttactgcagggagcaaggcaaacaggacagagccattcccagtaggcacacactgtccagttcccct

SEQ ID NO: 316532 - DNA, 120 bp, Artificial Sequence
  ENSG00000135083_39 (sequence is synthesized)
tccacctgccaggcactgcgtatcctgggtgctggcctgactgactggtgggctgtgtgggcaaagcggaagcccttagacccctgaagagagccctccccgatgtgggaagctttgctg

SEQ ID NO: 316533 - DNA, 120 bp, Artificial Sequence
  ENSG00000135083_40 (sequence is synthesized)
gcagctgtctttatctcattcctctgaaaagtcagtcctactccgtaggccttattttaaaatttgtgtttttgagaaggtccccaaagcctggtctgagtgtcggtgcatgccttacat

SEQ ID NO: 316534 - DNA, 120 bp, Artificial Sequence
  ENSG00000135083_41 (sequence is synthesized)
aagcctctaattgttttgttttcccaaaaagctatatgggaagctttttttgagatggcaaaaatctctgttccagcccccttttcagatgaaaaatcctaggccccagcggtcaatttg

SEQ ID NO: 316535 - DNA, 120 bp, Artificial Sequence
  ENSG00000135083_42 (sequence is synthesized)
gttgatatcagctagctaaggagtgaccccgctggggatggagctggcccagaattgcctggaaagcagagattgggctcattcaggccccaggaacactccagtgccaggggatgggaa

SEQ ID NO: 316536 - DNA, 120 bp, Artificial Sequence
  ENSG00000135083_43 (sequence is synthesized)
ggccggcccctccttccctctctcaaatcagccctggtgagcatctccctatggtagagggtggaatattgggggcagcagcaagacctcgggagctgagtcctgccctctgagtaggag

SEQ ID NO: 316537 - DNA, 120 bp, Artificial Sequence
  ENSG00000135083_44 (sequence is synthesized)
ctgggcctccctgggcacacagaggccagcggaggggtgtataaggcttgacaccccagctccatcaccgtctcagggtttttccaaagaaaccagtaggatatatatggagagagattt

SEQ ID NO: 316538 - DNA, 120 bp, Artificial Sequence
  ENSG00000135083_45 (sequence is synthesized)
attttaaggaattggctcatgtgattgcagaggctgtggtctaaaatttgtggggcatgtcagcaggctggaaattcaggtaagagctgatgttgcagtagagttcaaaatctgtagggc

SEQ ID NO: 316539 - DNA, 120 bp, Artificial Sequence
  ENSG00000135083_46 (sequence is synthesized)
aggcccacaggctggaaactcaggcatgatttctgtgttagcagtcgtgaggcaaaatttattctccaggaaacctcaatctttgctcttacgaccttttaccagttggatgaggcccac

SEQ ID NO: 316540 - DNA, 120 bp, Artificial Sequence
  ENSG00000135083_47 (sequence is synthesized)
ccacattatggaggcttttcttaaagtcaactgattgtaaatgttaatcacatctaaaaataccttgacagcaacatctagactagtacctagccacacaacaggcactgtagcctagcc

SEQ ID NO: 316541 - DNA, 120 bp, Artificial Sequence
  ENSG00000135083_48 (sequence is synthesized)
aagctgccacataaacttaatgatcacaccacttaccagctgttggaaggcagttgacccaacctctctctgagcctccatcttgtcacctgttaaaatgggagtgataacaccttgcct

SEQ ID NO: 316542 - DNA, 120 bp, Artificial Sequence
  ENSG00000135083_49 (sequence is synthesized)
catagggttcttaagaggattaaataacataatgtacatcaaggccagtacctccaaaaaaggagataattattatatttcttcaagcataagatcagctttttgtaagatgcactatta

SEQ ID NO: 316543 - DNA, 120 bp, Artificial Sequence
  ENSG00000135083_50 (sequence is synthesized)
ttttatgcactaataagactttttagaaaactaaatcatgaggcagtttgcaagataccattgattatatgttgcattctgatttcagaagcgttacatgtcaaaatatgtatatgtaga

SEQ ID NO: 316544 - DNA, 120 bp, Artificial Sequence
  ENSG00000135083_51 (sequence is synthesized)
attgatgagatatagcatcagctgttatgaaaaatgtcagattcgtactcctccttgaagggagtctcactcaagacttctgtcttgccctctacctacccagcttccagcaggagaacc

SEQ ID NO: 316545 - DNA, 120 bp, Artificial Sequence
  ENSG00000135083_52 (sequence is synthesized)
accccagagagccggtgtcactgtggggctgagacatttgctaagtgcagatgcctttgattagacaattaggggaggaatgggaagatgagctcagggcctgaggctgcagcccagacc

SEQ ID NO: 316546 - DNA, 120 bp, Artificial Sequence
  ENSG00000135083_53 (sequence is synthesized)
caggagtgtgtttgacaccgccaagggcggggctgagggcagtgctcaccacccgctgtgtgcaaggctaggtgaggcaggaagctctaagttttggggattcagagacaaggcaagtct

SEQ ID NO: 316547 - DNA, 120 bp, Artificial Sequence
  ENSG00000135083_54 (sequence is synthesized)
tgggttgaccaagagcacccacctcactttggacaaatccctccctctttgggcttccatttctccatctgttactatggagatggtcaagttggtggatggttctaagctcttggggcg

SEQ ID NO: 316548 - DNA, 120 bp, Artificial Sequence
  ENSG00000135083_55 (sequence is synthesized)
gggggagactgtgccacagaggctgtgacctctgtggccttcagccagagggatccacttgtatttcttccacccttgggcactcccatgtaagattgtgttaattcccatgctggagga

SEQ ID NO: 316549 - DNA, 120 bp, Artificial Sequence
  ENSG00000135083_56 (sequence is synthesized)
cagctatgaaagctttaaaaagcacaaagatagtcttaaagttcctcccagggctggcatcaggttaaattcagaggttttcaagcctgagcaagctgcagaatgacctggagccttctc

SEQ ID NO: 316550 - DNA, 120 bp, Artificial Sequence
  ENSG00000135083_57 (sequence is synthesized)
taggaggggtggggacctggaatctgcactttagccagcttcttggtcattcaggcatatgatttctttgtttgttttttatatttcagttgtatttttataactccccagtttagtttg

SEQ ID NO: 316551 - DNA, 90 bp, Artificial Sequence
  ENSG00000135083_58 (sequence is synthesized)
acagggtctcactctgtggcccaggctagagtgcagtggcacagtcacggctcactgcagcttcaaccttctgggctcaagtgatcctcc

SEQ ID NO: 316552 - DNA, 79 bp, Artificial Sequence
  ENSG00000135083_59 (sequence is synthesized)
agcaataagccactacgcctggtccagcttgttttgaaaagtattttctgacgtctatatgaatttaacagaattatct

SEQ ID NO: 316553 - DNA, 120 bp, Artificial Sequence
  ENSG00000135083_60 (sequence is synthesized)
agtattttctgacgtctatatgaatttaacagaattatctcaaagtacacagaaattacctgtatttgccagtaaatatgagatgctgatgaaagaatactcaatataccaatatttaag

SEQ ID NO: 316554 - DNA, 120 bp, Artificial Sequence
  ENSG00000135083_61 (sequence is synthesized)
catgtcaacataatagaactttttccaccttttaaaattatttttcccacctaacccaatttatatttgacatttgggttacatgtgcatatagaaacagacctattccacaactgacca

SEQ ID NO: 316555 - DNA, 120 bp, Artificial Sequence
  ENSG00000135083_62 (sequence is synthesized)
tagataaactagcatgcaagtgtcctttctggatgtaattaagtttcagaggcagcatggttcaaatgggagcaaatgagctgacctcctcatgaaatacactaggcaaaaaatcaagaa

SEQ ID NO: 316556 - DNA, 120 bp, Artificial Sequence
  ENSG00000135083_63 (sequence is synthesized)
gtgcagtggcacaatcacggctcactgctgcctcaacctttggtgctcaagtgattcttctatttcagctttctgagcagctaagactacaggaactgaagctgcccaccttccgagccc

SEQ ID NO: 316557 - DNA, 120 bp, Artificial Sequence
  ENSG00000135083_64 (sequence is synthesized)
catttggttgtgtgtttccaattagtcaaccacagcttgcaacttggcagatatgagtaacagatgaaaaaacactttctgtgtcagcactaatggataactgaaagcaagtcgacaaag

SEQ ID NO: 316558 - DNA, 120 bp, Artificial Sequence
  ENSG00000135083_65 (sequence is synthesized)
agctggaggtgtggagggaagagctttggagccactccacagagtgatccaggaggaaagcggagagatccaagaattggacctgtgacagagaaccagcatggagggggacatcgggac

SEQ ID NO: 316559 - DNA, 120 bp, Artificial Sequence
  ENSG00000135090_0 (sequence is synthesized)
aggagccgcacctcggacagcagcagcggcggcggccgcgggagggtccttgtggcgccgggcggcggggtcctgcgtggagagtgggacgcaacgccgagaccgcgagcagaggctgcg

SEQ ID NO: 316560 - DNA, 120 bp, Artificial Sequence
  ENSG00000135090_1 (sequence is synthesized)
cacagccggatccggcactcagcgaccggacccaaggatccgccggggaacaagccacaggagagcgactcaggaacaagtgtgggagaggaagcggcggcggcggcgccgggcccgggg

SEQ ID NO: 316561 - DNA, 120 bp, Artificial Sequence
  ENSG00000135090_2 (sequence is synthesized)
gtggtgacagcaggtctgaggttgcatcataaatacaaaggactgaagttataaaagagaaaagagaagtttgctgctaaaatgaatctgagcaatatggaatattttgtgccacacaca

SEQ ID NO: 316562 - DNA, 120 bp, Artificial Sequence
  ENSG00000135090_3 (sequence is synthesized)
aaaaggtactgaagatttaccccccaaaaaaaattgtcaatgagaaataaagctaactgatatcaaaaagcagagcctgctctactggccatcatgcgtaaaggggtgctgaaggaccca

SEQ ID NO: 316563 - DNA, 120 bp, Artificial Sequence
  ENSG00000135090_4 (sequence is synthesized)
gagattgccgatctattctacaaagatgatcctgaggaactttttattggtttgcatgaaattggacatggaagttttggagcagtttattttgctacaaatgctcacaccagtgaggtg

SEQ ID NO: 316564 - DNA, 120 bp, Artificial Sequence
  ENSG00000135090_5 (sequence is synthesized)
gtggcaattaagaagatgtcctatagtgggaagcagacccatgagaaatggcaagatattcttaaggaagttaaatttttacgacaattgaagcatcctaatactattgagtacaaaggc

SEQ ID NO: 316565 - DNA, 120 bp, Artificial Sequence
  ENSG00000135090_6 (sequence is synthesized)
tgttacttgaaagaacacactgcttggttggtgatggaatattgcttaggctcagcctctgatttattagaagttcataaaaaaccacttcaggaagtggagatcgctgccattactcat

SEQ ID NO: 316566 - DNA, 120 bp, Artificial Sequence
  ENSG00000135090_7 (sequence is synthesized)
ggagccttgcatggactagcctacctacattctcatgcattgattcatagggatattaaagcaggaaatattcttctaacagagccaggtcaggtaaaactagctgattttggatctgct

SEQ ID NO: 316567 - DNA, 120 bp, Artificial Sequence
  ENSG00000135090_8 (sequence is synthesized)
tcaatggcttctcctgccaactccttcgtgggcacaccttactggatggctccagaggtgatcttagctatggatgaaggacagtatgatgggaaagttgatatttggtcacttggcatc

SEQ ID NO: 316568 - DNA, 120 bp, Artificial Sequence
  ENSG00000135090_9 (sequence is synthesized)
acttgtattgaattggcggaacggaagccgccccttttcaacatgaatgcaatgagtgccttatatcacattgcccagaatgactccccaacgttacagtctaatgaatggacagactcc

SEQ ID NO: 316569 - DNA, 120 bp, Artificial Sequence
  ENSG00000135090_10 (sequence is synthesized)
tttaggagatttgttgattactgcttgcagaaaatacctcaggaaaggccaacatcagcagaactattaaggcatgactttgttcgacgagaccggccactacgtgtcctcattgacctc

SEQ ID NO: 316570 - DNA, 120 bp, Artificial Sequence
  ENSG00000135090_11 (sequence is synthesized)
atacagaggacaaaagatgcagttcgtgagctagataacctacagtaccgaaaaatgaaaaaaatacttttccaagagacacggaatggacccttgaatgagtcacaggaggatgaggaa

SEQ ID NO: 316571 - DNA, 120 bp, Artificial Sequence
  ENSG00000135090_12 (sequence is synthesized)
gacagtgaacatggaaccagcctgaacagggaaatggacagcctgggcagcaaccattccattccaagcatgtccgtgagcacaggcagccagagcagcagtgtgaacagcatgcaggaa

SEQ ID NO: 316572 - DNA, 120 bp, Artificial Sequence
  ENSG00000135090_13 (sequence is synthesized)
gtcatggacgagagcagttccgaacttgtcatgatgcacgatgacgaaagcacaatcaattccagctcctccgtcgtgcataagaaagatcatgtattcataagggatgaggcgggccac

SEQ ID NO: 316573 - DNA, 120 bp, Artificial Sequence
  ENSG00000135090_14 (sequence is synthesized)
ggcgatcccaggcctgagccgcggcctacccagtcagttcagagccaggccctccactaccggaacagagagcgctttgccacgatcaaatcagcatctttggttacacgacagatccat

SEQ ID NO: 316574 - DNA, 120 bp, Artificial Sequence
  ENSG00000135090_15 (sequence is synthesized)
gagcatgagcaggagaacgagttgcgggaacagatgtcaggttataagcggatgcggcgccagcaccagaagcagctgatcgccctggagaacaagctgaaggctgagatggacgagcac

SEQ ID NO: 316575 - DNA, 120 bp, Artificial Sequence
  ENSG00000135090_16 (sequence is synthesized)
cgcctcaagctacagaaggaggtggagacgcatgccaacaactcgtccatcgagctggagaagctggccaagaagcaagtggctatcatagaaaaggaggcaaaggtagctgcagcagat

SEQ ID NO: 316576 - DNA, 120 bp, Artificial Sequence
  ENSG00000135090_17 (sequence is synthesized)
gagaagaagttccagcaacagatcttggcccagcagaagaaagatttgacaactttcttagaaagtcagaagaagcagtataagatttgtaaggaaaaaataaaagaggaaatgaatgag

SEQ ID NO: 316577 - DNA, 120 bp, Artificial Sequence
  ENSG00000135090_18 (sequence is synthesized)
gcaagagcggatctccaaacataaagagaacttgcagcacacacaggctgaagaggaagcccaccttctcactcaacagagactgtactacgacaaaaattgtcgtttcttcaagcggaa

SEQ ID NO: 316578 - DNA, 120 bp, Artificial Sequence
  ENSG00000135090_19 (sequence is synthesized)
aataatgatcaagcggcacgaggtggagcagcagaacattcgggaggaactaaataaaaagaggacccagaaggagatggagcatgccatgctaatccggcacgacgagtccacccgaga

SEQ ID NO: 316579 - DNA, 120 bp, Artificial Sequence
  ENSG00000135090_20 (sequence is synthesized)
gctagagtacaggcagctgcacacgttacagaagctacgcatggatctgatccgtttacagcaccagacggaactggaaaaccagctggagtacaataagaggcgagaaagagaactgca

SEQ ID NO: 316580 - DNA, 120 bp, Artificial Sequence
  ENSG00000135090_21 (sequence is synthesized)
cagaaagcatgtcatggaacttcggcaacagccaaaaaacttaaaggccatggaaatgcaaattaaaaaacagtttcaggacacttgcaaagtacagaccaaacagtataaagcactcaa

SEQ ID NO: 316581 - DNA, 120 bp, Artificial Sequence
  ENSG00000135090_22 (sequence is synthesized)
gaatcaccagttggaagttactccaaagaatgagcacaaaacaatcttaaagacactgaaagatgagcagacaagaaaacttgccattttggcagagcagtatgaacagagtataaatga

SEQ ID NO: 316582 - DNA, 120 bp, Artificial Sequence
  ENSG00000135090_23 (sequence is synthesized)
aatgatggcctctcaagcgttacggctagatgaggctcaagaagcagaatgccaggccttgaggctacagctccagcaggaaatggagctgctcaacgcctaccagagcaaaatcaagat

SEQ ID NO: 316583 - DNA, 120 bp, Artificial Sequence
  ENSG00000135090_24 (sequence is synthesized)
gcaaacagaggcacaacatgaacgtgagctccagaagctagagcagagagtgtctctgcgcagagcacaccttgagcagaagattgaagaggagctggctgcccttcagaaggaacgcag

SEQ ID NO: 316584 - DNA, 120 bp, Artificial Sequence
  ENSG00000135090_25 (sequence is synthesized)
cgagagaataaagaacctattggaaaggcaagagcgagagattgaaacttttgacatggagagcctcagaatgggatttgggaatttggttacattagattttcctaaggaggactacag

SEQ ID NO: 316585 - DNA, 120 bp, Artificial Sequence
  ENSG00000135090_26 (sequence is synthesized)
aaaaaaaaaaaagaaaacagaaaaaaattcagaccctgcaaaaccacattccccattttaacgggcgttgctctcactctctctctctcttactcttactgacatcgtgtcggactagtg

SEQ ID NO: 316586 - DNA, 120 bp, Artificial Sequence
  ENSG00000135090_27 (sequence is synthesized)
cttactcttactgacatcgtgtcggactagtgcctgtttattcttactccatcaggggcccccttcctccccccgtgtcaactttcagtgctggccaaaacctggccgtctcttctattc

SEQ ID NO: 316587 - DNA, 120 bp, Artificial Sequence
  ENSG00000135090_28 (sequence is synthesized)
acagtacacgtcacagtattgatgtgattcaaaatgtttcagtgaaaactttggagacagttttaacaaaaccaataaaccaacaacaaaaaaagtggatgtatattgctttaagcaatc

SEQ ID NO: 316588 - DNA, 120 bp, Artificial Sequence
  ENSG00000135090_29 (sequence is synthesized)
actcattaccaccaatctgtgaaagtaaagcaaaaaataataataataaatgccaagggggagagagacacaatatccgcagccttacaccttaactagctgctgcattattttatttta

SEQ ID NO: 316589 - DNA, 120 bp, Artificial Sequence
  ENSG00000135090_30 (sequence is synthesized)
ttttatttttttggtatttattcatcaggaataaaaaaaacaaagttttattaaagattgaaaatttgatacattttacagaaactaattgtgatgtacatatcagtggtgacatattat

SEQ ID NO: 316590 - DNA, 120 bp, Artificial Sequence
  ENSG00000135090_31 (sequence is synthesized)
tacttttttggggacggggggtgggtggggtgaagagatcttgtgatttttaagaacctgctggcaagagtttaacttgtcttcagcatattctgattgtatcataatcattttctgctg

SEQ ID NO: 316591 - DNA, 120 bp, Artificial Sequence
  ENSG00000135090_32 (sequence is synthesized)
ttgcagaggatgtgaatacacttaaggagctcacagaatcccagtagcacaaattgggctttggcaaatcgtgtattttgtgtatagaaggaatttaaggagaggtattacttattttca

SEQ ID NO: 316592 - DNA, 120 bp, Artificial Sequence
  ENSG00000135090_33 (sequence is synthesized)
tattgtattttaactgtttctctgatcaaatttttttacttcctcctcctgttcctccccacctccctccttttccagttcagtatttggagttcaacactgtctctcaatcagatcatc

SEQ ID NO: 316593 - DNA, 120 bp, Artificial Sequence
  ENSG00000135090_34 (sequence is synthesized)
ttgatctttttctttatctcccttccccttcctaagtcccatttcttggtcataaatattgcattattcacactttcaaactgtgtattttcttacaataaaaaatgatgaaaaaaaaaa

SEQ ID NO: 316594 - DNA, 120 bp, Artificial Sequence
  ENSG00000135090_35 (sequence is synthesized)
aggctttacttcttttgcatgcactttaaaaacaaaacaaaacatttttcaggttccaaggaagagcatgataactgtcagagcttttaattatatttgtaaataaaagtgttcatcaca

SEQ ID NO: 316595 - DNA, 120 bp, Artificial Sequence
  ENSG00000135090_36 (sequence is synthesized)
gttgtaacaggaaatacttcagcttgcaatactgatagtaatgtgtggcacccagatcacgctgtttttatctgcagttcctttttagtattgtacaaagtttcttgaagatttttaaat

SEQ ID NO: 316596 - DNA, 120 bp, Artificial Sequence
  ENSG00000135090_37 (sequence is synthesized)
gtagagagaaggtgctagaactgtgtacgatcatgactggaaagcaggatccctcagtgactgccgaatcttcccagcacaagatagagaggcagttcagcacaagcctacattggttct

SEQ ID NO: 316597 - DNA, 120 bp, Artificial Sequence
  ENSG00000135090_38 (sequence is synthesized)
aggcagaacgatgatcctaccgaacagatctcaaataaaattaaattgagaaagcagatctttcaagggaatgaggcggaggctcgcttttatgttaaaagccaccagcatcctccttgc

SEQ ID NO: 316598 - DNA, 120 bp, Artificial Sequence
  ENSG00000135090_39 (sequence is synthesized)
agaggtaggtaatgtgccaaggtgtgacacacacaaagtggatggtgtagctgtaattcaagcccaggagcctacctccaaagcccacaggtgtagccttcctgacgcctgctgctgtgg

SEQ ID NO: 316599 - DNA, 120 bp, Artificial Sequence
  ENSG00000135090_40 (sequence is synthesized)
tttcagatcatactgaaaagaatgtgtttggtattgtagcccattgggcagacttgactgtttttgattcccaactctgaatgtacccagagcatctgtgtttttgagggggcaaccaat

SEQ ID NO: 316600 - DNA, 120 bp, Artificial Sequence
  ENSG00000135090_41 (sequence is synthesized)
ttcaatccaaatgaggaaacctcttccagtagtcaccaagggctgtaggccaccaagggctgtaggcaagggtgcatgaccgtgtgtgtcttctgtgtccgcagttacggctagatgagg

SEQ ID NO: 316601 - DNA, 120 bp, Artificial Sequence
  ENSG00000135090_42 (sequence is synthesized)
tttctcgggatgaaggtgctgatagcctggggtgttcttataacttaagttcagttttttctttcctgtgaggaagaggcagttttttaaatgaagccatctctggggaaatcgtattga

SEQ ID NO: 316602 - DNA, 120 bp, Artificial Sequence
  ENSG00000135090_43 (sequence is synthesized)
ttgttgtagctaaatacggaatttttaaagtctttagtatgttgaactggaaatataggacatgcgtttgagatctactgtgagaaaccaaggcttaaagggatgaagtaataaaaagct

SEQ ID NO: 316603 - DNA, 120 bp, Artificial Sequence
  ENSG00000135090_44 (sequence is synthesized)
gtcaccatgaggaaggaaactgaattttcaagggaagtttttataaaagttattttgaagcatttgaaccttatcattttcagcttgacataaatttcctcatcttctctgttttatctt

SEQ ID NO: 316604 - DNA, 120 bp, Artificial Sequence
  ENSG00000135090_45 (sequence is synthesized)
ttcactgaccatcaacttccaattcatggtttctagtgctcattacacctcatgccttttttaaaaagaataaggagtacatccacaccttctcattctaaattaccataatgaaaaatg

SEQ ID NO: 316605 - DNA, 120 bp, Artificial Sequence
  ENSG00000135090_46 (sequence is synthesized)
aattttttgaattatatttttaaaactttttgctatataatacctctattagctttagtagtaaccacgtgcaattctttgtagtaatacaatagaaatgtaatttcctaacccctaatc

SEQ ID NO: 316606 - DNA, 120 bp, Artificial Sequence
  ENSG00000135090_47 (sequence is synthesized)
cttgtttgttttgatctttcagggtcttctttttactgtacagagttatttttaaaatatcaccttctatataacatgtacctcaaatgccttagagttgcagttacaattaaagacaga

SEQ ID NO: 316607 - DNA, 120 bp, Artificial Sequence
  ENSG00000135090_48 (sequence is synthesized)
gagaaagggtcacaggcaagaaagaaaaggtatgtgtgtagttgaggtttattggtaggtggtcaatacggaatcattgcaggtttgtttaggctccaaaaatgtcacataatttggaaa

SEQ ID NO: 316608 - DNA, 120 bp, Artificial Sequence
  ENSG00000135090_49 (sequence is synthesized)
agcagaaaaagcagttaaaattggcaccaattttctcagcacagggaatactattgataactggatttagcctttaagaatatgcctttgtaagtgtagcagctgaataggttttcttgt

SEQ ID NO: 316609 - DNA, 120 bp, Artificial Sequence
  ENSG00000135090_50 (sequence is synthesized)
tcgccatgtctgccttttttctcatttgtattccctccctctgaagaaagctctacctttaagtaactagtatgacctacctgcaagtacacccaggaatctgggcccccttacaacatg

SEQ ID NO: 316610 - DNA, 120 bp, Artificial Sequence
  ENSG00000135090_51 (sequence is synthesized)
tggacatgacatttttaaaggaattatctggttacagcgttttaagcaaactgttctaaggagtctgtacattgcattattttttctattctttttttcttttgcatatatgtaattctg

SEQ ID NO: 316611 - DNA, 120 bp, Artificial Sequence
  ENSG00000135090_52 (sequence is synthesized)
gaggtaaagaaaaagcctgccagggattcagaaggcatcccactagcgatcagctgacattcctaactgaaggctgcaatgtgttgcttattcattttgtaccgtgggagctgcggggac

SEQ ID NO: 316612 - DNA, 120 bp, Artificial Sequence
  ENSG00000135090_53 (sequence is synthesized)
tagcagagagctaaactatgcatttcaaacagcagtgcttgtgcagaaagaggggtgagagagaggcagccggcgaggaaagagcacagctggactttctccttgtttttatccatttct

SEQ ID NO: 316613 - DNA, 120 bp, Artificial Sequence
  ENSG00000135090_54 (sequence is synthesized)
aggtttggtgccacggcttcgagagctttgggaatcaagaaaatccaagatccagcctgttgttcccaagatgattcttgcacaaatttaggatattgatgtttttctgcccaaaggact

SEQ ID NO: 316614 - DNA, 120 bp, Artificial Sequence
  ENSG00000135090_55 (sequence is synthesized)
gaggaaaggacgacgttgaataaagccaagccaatgtggatacttgctggagtgtcttataagatggaactcaaggagtgacatgccacatcagacctgtggcacatagggactttgagg

SEQ ID NO: 316615 - DNA, 120 bp, Artificial Sequence
  ENSG00000135090_56 (sequence is synthesized)
gcaaatgtgatagataccacatatgataccatgtgttcatttatgaaagattttactgactgccctccccgcaactaatatcaggcacaaatgaataagagtccctgcccttagggagcc

SEQ ID NO: 316616 - DNA, 120 bp, Artificial Sequence
  ENSG00000135090_57 (sequence is synthesized)
taaaaaattcttattaatcatgcggaagaagaaatctttccaggagcagcaaactcaggaccggagagataagataaatatataaagcttcagggtatgaagccatacacatagtagaaa

SEQ ID NO: 316617 - DNA, 120 bp, Artificial Sequence
  ENSG00000135090_58 (sequence is synthesized)
atttctctgtctgcctggtttccttcaagaactactttattgtgtttctttcctcttccagcggaacggaagccgccccttttcaacatgaatgcaatgagtgccttatatcacattgcc

SEQ ID NO: 316618 - DNA, 120 bp, Artificial Sequence
  ENSG00000135090_59 (sequence is synthesized)
cccactatgtgaaaaagttctagactgggcactatgaaaaacttttgaagataaaaattaattgatgctgtccgccttaagaaacatgaagggttgtacaagagacattcataaaataac

SEQ ID NO: 316619 - DNA, 120 bp, Artificial Sequence
  ENSG00000135090_60 (sequence is synthesized)
acttatataaggcaaaatatgaaaagtgctacagaggtgtaaccccattgcaggggtccatcatggggagaaaataagtctgctggtgggattagtgaaggtttcctggaggacatgatg

SEQ ID NO: 316620 - DNA, 120 bp, Artificial Sequence
  ENSG00000135090_61 (sequence is synthesized)
tgggtagtttctgacaaatgggcatagggtgttctagactcagaaaggtgttgtgctttaggaagattatcctagcaacagagtgtaacatggatttgaatgggcaacatcctggctaat

SEQ ID NO: 316621 - DNA, 120 bp, Artificial Sequence
  ENSG00000135090_62 (sequence is synthesized)
agtccatgcaagaggtaataaggtcagtgtcgatgcaaatggggaaaagggagcactttagagaaacatcgtagaggtagatttcataatccatggcttctcattgacagtgacagataa

SEQ ID NO: 316622 - DNA, 120 bp, Artificial Sequence
  ENSG00000135090_63 (sequence is synthesized)
ggaggagtttaaggtgactctgagcattggagcctgggtggctaggagtatgtcaataccaagaacagagaaaaagaaccagggagaaagagtagatttaggatgatttcagtttcgtgc

SEQ ID NO: 316623 - DNA, 120 bp, Artificial Sequence
  ENSG00000135090_64 (sequence is synthesized)
cttttgagtttaaggtcctggcattataaactcttgccagtatacagatagaagttttcagttagagaatccttgatgaccttagtaaaagcagttttacaggactaggtagaatgaata

SEQ ID NO: 316624 - DNA, 120 bp, Artificial Sequence
  ENSG00000135090_65 (sequence is synthesized)
gtagattactggagttgtataattcatgggagttgataagagggagacaggaaaaaataattatgttaagattcagaaattgggttaagaaggaaaagtaagagtgggcagcatgtagag

SEQ ID NO: 316625 - DNA, 120 bp, Artificial Sequence
  ENSG00000135090_66 (sequence is synthesized)
agatccataaatataaggcaggcttcttcatctttaaatgcagtagagatggagccagggcagagtcagaggcaccgaagatagaagaaagggatatagttaaagaggcaggatttcaga

SEQ ID NO: 316626 - DNA, 120 bp, Artificial Sequence
  ENSG00000135090_67 (sequence is synthesized)
acgtagacataacaagaacaggagtattttagctttttaacagaaaataaaataaacataaaagtattttatcaataattttaaaaatgaagctcggaaagttgcattgaactataaaat

SEQ ID NO: 316627 - DNA, 120 bp, Artificial Sequence
  ENSG00000135090_68 (sequence is synthesized)
ttcttgattgcatatatagaaatgatcccctttaattgggaaaataagtctgttaaaaataatgtattatcttccattttatattacccagtaattttttatattgccatggctaagtaa

SEQ ID NO: 316628 - DNA, 120 bp, Artificial Sequence
  ENSG00000135090_69 (sequence is synthesized)
tgtgatggataaattatatgttctgattattttaccacttttcaaatagtagtctttgggccagtaatgatgaataccagtattatttaacagatatatataataagattacagagataa

SEQ ID NO: 316629 - DNA, 120 bp, Artificial Sequence
  ENSG00000135090_70 (sequence is synthesized)
gcatgatagaatcgcttgagggaggcagactttaattacctgtccaggaaagtagaattaatatttctgcttagatatgaagttactcaataatgacttgcagagggagcatattgcttg

SEQ ID NO: 316630 - DNA, 120 bp, Artificial Sequence
  ENSG00000135090_71 (sequence is synthesized)
tcaaatatctgaaaactctttccactctactttttcaagtgaccactgctgtatttgaagatatcctagagctcacctgtttagtggccagcagtcttcctctagctccttgatgttcca

SEQ ID NO: 316631 - DNA, 120 bp, Artificial Sequence
  ENSG00000135090_72 (sequence is synthesized)
gaaggtcccttacaaacctggcttgattttgcttactgaatagcaacacgataatatgatagtgtgtatgacaggggaaagccctgggatggcagcatttggagccttatgacccacgtc

SEQ ID NO: 316632 - DNA, 120 bp, Artificial Sequence
  ENSG00000135090_73 (sequence is synthesized)
cagaatggcccctggggaaggcataggaagcaaatatgagatgtatgaaaatggtggaggagtagtggagccagtacataaaaagtttgtctttgcagattggcagaaaagcaacttgac

SEQ ID NO: 316633 - DNA, 120 bp, Artificial Sequence
  ENSG00000135090_74 (sequence is synthesized)
gtcacttagcttccagatgtttcagttacctttttgcaactgcagtgtggtactaaacctggcatgtgacagttttcttacagtcaaaaagtaacaaaggactacacaggctacatctgt

SEQ ID NO: 316634 - DNA, 120 bp, Artificial Sequence
  ENSG00000135090_75 (sequence is synthesized)
gcctatttcttcatctccctctctcattactctgatgtccatcatcatcaataaataagttgaagaatttgataagtccttctctaaaccaataatcttaatactgtagaccttcaagtc

SEQ ID NO: 316635 - DNA, 120 bp, Artificial Sequence
  ENSG00000135090_76 (sequence is synthesized)
ccaataatcttaatactgtagaccttcaagtcttcctgagtgtacctgttggttgtgcccttttagaagtatgctctttcaaaagtatgtttcttggctgggcgtggtggctcacatctg

SEQ ID NO: 316636 - DNA, 120 bp, Artificial Sequence
  ENSG00000135090_77 (sequence is synthesized)
aagcatctggcacaatgtttttgtttggtttggtttggtgttgtaaagagagaggatcttgctatgtttgccagactggtctcaaactcctggtctcaagtcatcctctcaccttggcct

SEQ ID NO: 316637 - DNA, 120 bp, Artificial Sequence
  ENSG00000135093_0 (sequence is synthesized)
gcggccgcaggttccgctgtctcgggaaccgtcgtatccctcggtccggcggcggcggcggcggtagcggaggagacggtttcaggcctccggtgcggctgcaatgctgagctcccgggc

SEQ ID NO: 316638 - DNA, 120 bp, Artificial Sequence
  ENSG00000135093_1 (sequence is synthesized)
cgaggcggcgatgaccgcggccgacagggccatccagcgcttcctgcggaccggggcggccgtcagatataaagtcatgaagaactggggagttataggtggaattgctgctgctcttgc

SEQ ID NO: 316639 - DNA, 120 bp, Artificial Sequence
  ENSG00000135093_2 (sequence is synthesized)
agcaggaatatatgttatttggggtcccattacagaaagaaagaagcgtagaaaagggcttgtgcctggccttgttaatttagggaacacctgcttcatgaactccctgctacaaggcct

SEQ ID NO: 316640 - DNA, 120 bp, Artificial Sequence
  ENSG00000135093_3 (sequence is synthesized)
gtctgcctgtcctgctttcatcaggtggctggaagagttcacctcccagtactccagggatcagaaggagcccccctcacaccagtatttatccttaacactcttgcaccttctgaaagc

SEQ ID NO: 316641 - DNA, 120 bp, Artificial Sequence
  ENSG00000135093_4 (sequence is synthesized)
cttgtcctgccaagaagttactgatgatgaggtcttagatgcaagctgcttgttggatgtcttaagaatgtacagatggcagatctcatcatttgaagaacaggatgctcacgaattatt

SEQ ID NO: 316642 - DNA, 120 bp, Artificial Sequence
  ENSG00000135093_5 (sequence is synthesized)
ccatgtcattacctcgtcattggaagatgagcgagaccgccagcctcgggtcacacatttgtttgatgtgcattccctggagcagcagtcagaaataactcccaaacaaattacctgccg

SEQ ID NO: 316643 - DNA, 120 bp, Artificial Sequence
  ENSG00000135093_6 (sequence is synthesized)
cacaagagggtcacctcaccctacatccaatcactggaagtctcaacatccttttcatggaagactcactagtaatatggtctgcaaacactgtgaacaccagagtcctgttcgatttga

SEQ ID NO: 316644 - DNA, 120 bp, Artificial Sequence
  ENSG00000135093_7 (sequence is synthesized)
tacctttgatagcctttcactaagtattccagccgccacatggggtcacccattgaccctggaccactgccttcaccacttcatctcatcagaatcagtgcgggatgttgtgtgtgacaa

SEQ ID NO: 316645 - DNA, 120 bp, Artificial Sequence
  ENSG00000135093_8 (sequence is synthesized)
ctgtacaaagattgaagccaagggaacgttgaacggggaaaaggtggaacaccagaggaccacttttgttaaacagttaaaactagggaagctccctcagtgtctctgcatccacctaca

SEQ ID NO: 316646 - DNA, 120 bp, Artificial Sequence
  ENSG00000135093_9 (sequence is synthesized)
gcggctgagctggtccagccacggcacgcctctgaagcggcatgagcacgtgcagttcaatgagttcctgatgatggacatttacaagtaccacctccttggacataaacctagtcaaca

SEQ ID NO: 316647 - DNA, 120 bp, Artificial Sequence
  ENSG00000135093_10 (sequence is synthesized)
caaccctaaactgaacaagaacccagggcctacactggagctgcaggatgggccgggagcccccacaccagttctgaatcagccaggggcccccaaaacacagatttttatgaatggcgc

SEQ ID NO: 316648 - DNA, 120 bp, Artificial Sequence
  ENSG00000135093_11 (sequence is synthesized)
ctgctccccatctttattgccaacgctgtcagcgccgatgcccttccctctcccagttgttcccgactacagctcctccacatacctcttccggctgatggcagttgtcgtccaccatgg

SEQ ID NO: 316649 - DNA, 120 bp, Artificial Sequence
  ENSG00000135093_12 (sequence is synthesized)
agacatgcactctggacactttgtcacttaccgacggtccccaccttctgccaggaaccctctctcaactagcaatcagtggctgtgggtctccgatgacactgtccgcaaggccagcct

SEQ ID NO: 316650 - DNA, 120 bp, Artificial Sequence
  ENSG00000135093_13 (sequence is synthesized)
gcaggaggtcctgtcctccagcgcctacctgctgttctacgagcgcgtcctttccaggatgcagcaccagagccaggagtgcaagtctgaagaatgactgtgccctcctgcaaggctaga

SEQ ID NO: 316651 - DNA, 120 bp, Artificial Sequence
  ENSG00000135093_14 (sequence is synthesized)
gctgatggcactgtctgcactgtccaggaaaaaagtaaaactgtactgttgcgtgtgcaagcggccccactagagccttccagccttctggtgtgttctaagagcaggctccacctggga

SEQ ID NO: 316652 - DNA, 120 bp, Artificial Sequence
  ENSG00000135093_15 (sequence is synthesized)
ccctgaacagtcctgttcatgtgtgtaggtggttctgttgtgttaagaaagcattcattatgtccggagtgtctttttactcatctgatacaggtaattaaaagaactcagattcttgaa

SEQ ID NO: 316653 - DNA, 120 bp, Artificial Sequence
  ENSG00000135093_16 (sequence is synthesized)
gccaccgttttcatattgtaatgttaggtgttctcagaggggaggtacctttgtctaatcaacgtttccacttagatcttttatttttaataagcaggcccataaaaattgttgacaaga

SEQ ID NO: 316654 - DNA, 120 bp, Artificial Sequence
  ENSG00000135093_17 (sequence is synthesized)
attaatgaaattattaaaggcaacaatttagaagaaaaagtgcctttcactttcgattgcttttgtagcacgtccattgtgaaatattccttccaggctactcaaaggatagcaagagaa

SEQ ID NO: 316655 - DNA, 120 bp, Artificial Sequence
  ENSG00000135093_18 (sequence is synthesized)
caggtaaatgatgcctaaagaacaccttcctttttctatgccttttctaatctttcaattctttctatggagtaaaggctcatctgccaaatctgccccctggggaaactctttcactac

SEQ ID NO: 316656 - DNA, 120 bp, Artificial Sequence
  ENSG00000135093_19 (sequence is synthesized)
tttgtcagttataagtgaagagcttacttgttgcttttatcttttgtatattggactgagatgtaattacactgtattataaaactctgtgaatagccagaactgagctggatctttgca

SEQ ID NO: 316657 - DNA, 120 bp, Artificial Sequence
  ENSG00000135093_20 (sequence is synthesized)
acacctgattcctctgctctgtggaaaactttttcttacacaaggatccactgtggacggttactttcatctgtttatttattgcccatgcagagctcttaaggtttacaggtgggagct

SEQ ID NO: 316658 - DNA, 120 bp, Artificial Sequence
  ENSG00000135093_21 (sequence is synthesized)
tggggctgtataaaaaaataatccctgccctgagttgacacctggcttaggaaggaagggctgactatggggctgcagtctctctgaacctcagtttcctcatttgtgaagtgaagggtt

SEQ ID NO: 316659 - DNA, 120 bp, Artificial Sequence
  ENSG00000135093_22 (sequence is synthesized)
agatttgatgaccaccaaagttcagcccttttcacgaaaaggagaaagcagcttttgactttttaaaaaacatataactacagctggcatctagtattgtcatgttgctctaggtccata

SEQ ID NO: 316660 - DNA, 120 bp, Artificial Sequence
  ENSG00000135093_23 (sequence is synthesized)
ttctgaatttattcatttccaatagcctaatacaaaaagtatatattgagcactttcttcccttttcaggtaagtctctgaatgcagcccagggccaaaggaattttgatgacacagtag

SEQ ID NO: 316661 - DNA, 120 bp, Artificial Sequence
  ENSG00000135093_24 (sequence is synthesized)
tacctatgttttaagctatatttttaatttagaaaaatggataccaaattcaaaccgactcatcagaggtaagatttggaatcagacctttccaaaaggtcatctgaggtaaggctaaga

SEQ ID NO: 316662 - DNA, 120 bp, Artificial Sequence
  ENSG00000135093_25 (sequence is synthesized)
ccgcacttcctctgctgggggtgagctggcagacacaccaaacagtgccttggcagcagctcacagtgcaggaagcccaggtgatcactcttctgctgggcccaggctgcaccctgagga

SEQ ID NO: 316663 - DNA, 120 bp, Artificial Sequence
  ENSG00000135093_26 (sequence is synthesized)
ctcagtaactcactctcaacagaatattctgtgcaggctctccaggctctgggcgtcagggtgcaaggggcagcttgaactgtacggtccgtcctgcactcacccgatgcagaccttgac

SEQ ID NO: 316664 - DNA, 120 bp, Artificial Sequence
  ENSG00000135093_27 (sequence is synthesized)
tttgatgttgaaatgaacacacttgttttacccaagtctggtggaacaaatgcccaatcatgtgaccttaaagtgtactgcaaagctgtagctttaagtaattgctgttctgccactgct

SEQ ID NO: 316665 - DNA, 120 bp, Artificial Sequence
  ENSG00000135093_28 (sequence is synthesized)
tactctgaaatctaccatcaaagaaagatagagaaaaggggctgagccttggaatatatggttataagcagatctttctttggtcagagaccagggtttgagccaaggctgtaaatgtga

SEQ ID NO: 316666 - DNA, 120 bp, Artificial Sequence
  ENSG00000135093_29 (sequence is synthesized)
acaatagctgtgcaaagccttttaacctgacttcttcattttgtaaattattatgcattaagtagcagcccaataatctgatttctagttttattttcaaagtaagtagcttcttttggg

SEQ ID NO: 316667 - DNA, 120 bp, Artificial Sequence
  ENSG00000135093_30 (sequence is synthesized)
aaaaacctaagttaaactagtagttttgccataataactgctgatttatgtatttgctaaaggtacttttgtatctgctgtgtattatagcaataaaataatcattttgttagaaaaaaa

SEQ ID NO: 316668 - DNA, 82 bp, Artificial Sequence
  ENSG00000135093_31 (sequence is synthesized)
atccccattgttgcatagctgggaaagggagctggacaacctggtaccttttcgattatggattcaaatgtctctgaagtat

SEQ ID NO: 316669 - DNA, 90 bp, Artificial Sequence
  ENSG00000135093_32 (sequence is synthesized)
agcctaaagcagcattttttggtgtgtctgtaagggtgtttcaagaggagattgctgtgtgagtctgagtggacaaagttcaggaagatc

SEQ ID NO: 316670 - DNA, 120 bp, Artificial Sequence
  ENSG00000135093_33 (sequence is synthesized)
attgctgtgtgagtctgagtggacaaagttcaggaagatctgccctcgatgtgtgaatgagcaccatcaaatcagctagaggcccagacagaacagaaacagaggaaagagacagagtct

SEQ ID NO: 316671 - DNA, 77 bp, Artificial Sequence
  ENSG00000135093_34 (sequence is synthesized)
cggacactaagacccagcgctgaggacaaaaggaagcaagctctgcatatttgaagtgttgcaaactagggtccatc

SEQ ID NO: 316672 - DNA, 120 bp, Artificial Sequence
  ENSG00000135093_35 (sequence is synthesized)
aagctctgcatatttgaagtgttgcaaactagggtccatcctctgggccagccctctcctctagtgacttactcagagtgtgttggatataaagtcatgaagaactggggagttataggt

SEQ ID NO: 316673 - DNA, 120 bp, Artificial Sequence
  ENSG00000135093_36 (sequence is synthesized)
catgggtatgtactgatttatggtttatttggagtctgtttcagaaacatttcaatctgaaagggctttgaggcattttatgtggctcaggcactatgtgtaattcagatacatggttgg

SEQ ID NO: 316674 - DNA, 120 bp, Artificial Sequence
  ENSG00000135093_37 (sequence is synthesized)
ttgaaccctctcttaactttcatatggtggcatgattatgggagagaggaaaatgaatcgtttttcttttgctccagaaattttggctttttgaatacacacgcacgcatgcgcgcacac

SEQ ID NO: 316675 - DNA, 120 bp, Artificial Sequence
  ENSG00000135093_38 (sequence is synthesized)
cgcggccgacagggccatccagcgcttcctgcggaccggggcggccgtcagccctatgaggtaggtcttatggattgtccccattgtacagatgaggaaactgaggcttagaaggtgaag

SEQ ID NO: 316676 - DNA, 120 bp, Artificial Sequence
  ENSG00000135093_39 (sequence is synthesized)
agggttggaggcctgggcccgtaggtgggaggactgacgggctccagtccttcggcaacaccaattctgtctgcactccccagtttccatcttgaacttcgtggttttaagcacagacct

SEQ ID NO: 316677 - DNA, 120 bp, Artificial Sequence
  ENSG00000135093_40 (sequence is synthesized)
ggggagacagacaggcatgattcagagccatgttccttcactcactgtgaccaagttgggctcttagtttcttctgctataaaaatgaaagtgatagtagaacctgcatctgtggggttg

SEQ ID NO: 316678 - DNA, 120 bp, Artificial Sequence
  ENSG00000135093_41 (sequence is synthesized)
ggtggaacaccagaggaccacttttgttaaacagttaaaactagggaaggtgagcccacactacacaccctgttggctttgttttgaggactccgtgtatcctgcccctgaaacaactcg

SEQ ID NO: 316679 - DNA, 120 bp, Artificial Sequence
  ENSG00000135093_42 (sequence is synthesized)
tgggttcatttcagcaggtagcagtcaagtgccaattgtgtgccgctataacaccactgtggtctgcagcactccaaagctgtcctattttaggcattgctgcagagaaatgttcctttt

SEQ ID NO: 316680 - DNA, 120 bp, Artificial Sequence
  ENSG00000135094_0 (sequence is synthesized)
gaccattcagaagactgtccacccgtcctcagccccctctcttcgtgggctatctactcagttgatccctccctcgctggcttggctctgactcctgctcagacccatcacctttgccgg

SEQ ID NO: 316681 - DNA, 120 bp, Artificial Sequence
  ENSG00000135094_1 (sequence is synthesized)
gaatgatgtctggagaacccctgcacgtgaagacccccatccgtgacagcatggccctgtccaaaatggccggcaccagcgtctacctcaagatggacagtgcccagccctccggctcct

SEQ ID NO: 316682 - DNA, 120 bp, Artificial Sequence
  ENSG00000135094_2 (sequence is synthesized)
tcaagatccggggcattgggcacttctgcaagaggtgggccaagcaaggctgtgcacattttgtctgctcctcggcgggcaacgcaggcatggcggctgcatatgcggccaggcaactcg

SEQ ID NO: 316683 - DNA, 120 bp, Artificial Sequence
  ENSG00000135094_3 (sequence is synthesized)
gcgtccccgccaccatcgtggtgcccagcaccacacctgctctcaccattgagcgcctcaagaatgaaggtgccacagtcaaggtggtgggtgagttattggatgaagccttcgagctgg

SEQ ID NO: 316684 - DNA, 120 bp, Artificial Sequence
  ENSG00000135094_4 (sequence is synthesized)
ccaaggccctagcgaagaacaacccgggttgggtctacattcccccctttgatgaccccctcatctgggaaggccacgcttccatcgtgaaagagctgaaggagacactgtgggaaaagc

SEQ ID NO: 316685 - DNA, 120 bp, Artificial Sequence
  ENSG00000135094_5 (sequence is synthesized)
cgggggccatcgcgctgtcagtgggcggcgggggcctgctgtgtggagtggtccaggggctgcaggaggtgggctggggggacgtgcctgtcatcgccatggagacttttggtgcccaca

SEQ ID NO: 316686 - DNA, 120 bp, Artificial Sequence
  ENSG00000135094_6 (sequence is synthesized)
agatcaccagtgttgccaaggccctgggcgtgaagactgtgggggctcaggccctgaagctgtttcaggaacaccccattttctctgaagttatctcggaccaggaggctgtggccgcca

SEQ ID NO: 316687 - DNA, 120 bp, Artificial Sequence
  ENSG00000135094_7 (sequence is synthesized)
ttgagaagttcgtggatgatgagaagatcctggtggagcccgcctgcggggcagccctggccgctgtctatagccacgtgatccagaagctccaactggaggggaatctccgaaccccgc

SEQ ID NO: 316688 - DNA, 120 bp, Artificial Sequence
  ENSG00000135094_8 (sequence is synthesized)
tgccatccctcgtggtcatcgtctgcgggggcagcaacatcagcctggcccagctgcgggcgctcaaggaacagctgggcatgacaaataggttgcccaagtgaggacggaccccttacc

SEQ ID NO: 316689 - DNA, 120 bp, Artificial Sequence
  ENSG00000135094_9 (sequence is synthesized)
gatctgtgctctcctagcccaagagacccctggaggggctggagttttatccagcgcctcgtcgtatgtttggctgagcacctgtggcctgggtgcaggttaacttcttgttatcaggag

SEQ ID NO: 316690 - DNA, 120 bp, Artificial Sequence
  ENSG00000135094_10 (sequence is synthesized)
cccactatgcagaggccaaaggtcggcagccagcgaggctatgaattggacctttttggtatctgtgtgactgctctgtgcccatccttagccaacttgctggcgtgacaagtgcccaca

SEQ ID NO: 316691 - DNA, 120 bp, Artificial Sequence
  ENSG00000135094_11 (sequence is synthesized)
agtaacacaccaggtacccagagcagggtggacaggagagacctgaatcacagcagtgaggaattcctcaaagctgtgacctcgcccctgaacttgttcccagtgaaggtcaacagggcc

SEQ ID NO: 316692 - DNA, 120 bp, Artificial Sequence
  ENSG00000135094_12 (sequence is synthesized)
accaaccagggttgaggaaccatctcagccatcctcccaggaagcccacccctgacccttactaatttttctaatgtgcaaactttttcattgaaaaataaaatatatttatgaaacaaa

SEQ ID NO: 316693 - DNA, 120 bp, Artificial Sequence
  ENSG00000135094_13 (sequence is synthesized)
tgtgtcctgggatcagacactctgcttctctgagccctggtttccccagcaatgtgccactgaaaacaatggcagcagccaccaatttggaattccagggggaggccagcagtcgcccag

SEQ ID NO: 316694 - DNA, 120 bp, Artificial Sequence
  ENSG00000135094_14 (sequence is synthesized)
ggtggggaggtgaggggggaactccagagcccccagtagagggtacgcagtcctgcctgggctcccagatgctcccgcactgacacgctctccacccccgaccctggcagcgggcaacgc

SEQ ID NO: 316695 - DNA, 120 bp, Artificial Sequence
  ENSG00000135094_15 (sequence is synthesized)
agggccagtgctgtgtgaaattaaaggcgttgtaggataagcctactgactccccgcaaggactgagcgtccaccattagggcttcctctgtttgaggggtgcccttccaggagggttcc

SEQ ID NO: 316696 - DNA, 120 bp, Artificial Sequence
  ENSG00000135094_16 (sequence is synthesized)
ttgggactgatcccagagccatcagtcgcctattttcctccaccctttcctgagccagtctctttggagatgggaggtgcagtctcagacaagggtagaacaaattctgagtgaaggaaa

SEQ ID NO: 316697 - DNA, 120 bp, Artificial Sequence
  ENSG00000135094_17 (sequence is synthesized)
gagtcccccttagggctggctttgagatagatcctgatgtcagcctgtttcacagatgagacaatggaggctttgatcgcttgcccagggccacgtccagtgagtggtacagcttggact

SEQ ID NO: 316698 - DNA, 120 bp, Artificial Sequence
  ENSG00000135094_18 (sequence is synthesized)
acagcttggactcaaacccaagtctgtgtgactccaacatgtcacacttcctcacgtgaaaagcctcatatgaggctgggcacagtgacttgtgcctgtaatcccagcactttgggtggc

SEQ ID NO: 316699 - DNA, 120 bp, Artificial Sequence
  ENSG00000135094_19 (sequence is synthesized)
agttcaagaccagcctgagcaacatagagagattcccacctctaaaaaaagttttttgttttttttttaaattaactgggcgtggtagcacacacgcatagtcccaggctaaggtgggaa

SEQ ID NO: 316700 - DNA, 120 bp, Artificial Sequence
  ENSG00000135094_20 (sequence is synthesized)
aaattaactgggcgtggtagcacacacgcatagtcccaggctaaggtgggaaggattgcttaagcccaggagactgaggctgtagtgagccatgatcatgccagtgcactccagcctggg

SEQ ID NO: 316701 - DNA, 120 bp, Artificial Sequence
  ENSG00000135094_21 (sequence is synthesized)
ctgtacgttcttgaaaggggaactttgaaatggatgacaggaagagagccaagaggaaaagttcctacagagaacagcagccaggaccacctcgagggagaaatgcactttggggtgccg

SEQ ID NO: 316702 - DNA, 120 bp, Artificial Sequence
  ENSG00000135094_22 (sequence is synthesized)
ccaggaccacctcgagggagaaatgcactttggggtgccgcggatgcagacagaaggggtttggggcaggagagacggggtttcaccatgttggctggtctcaaactcctgagctcaagt

SEQ ID NO: 316703 - DNA, 120 bp, Artificial Sequence
  ENSG00000135097_0 (sequence is synthesized)
cgccgccgccgctccgctgcccgcgccgcccgcggctcccgatggagactgacgcgccccagcccggcctcgcctccccggactcgccgcacgacccctgcaagatgttcatcgggggac

SEQ ID NO: 316704 - DNA, 120 bp, Artificial Sequence
  ENSG00000135097_1 (sequence is synthesized)
gcacgacccctgcaagatgttcatcgggggactcagttggcagactacgcaggaagggctgcgcgaatacttcggccagttcggggaggtgaaggagtgtctggtgatgcgggaccccct

SEQ ID NO: 316705 - DNA, 120 bp, Artificial Sequence
  ENSG00000135097_2 (sequence is synthesized)
gaccaagagatccaggggtttcggcttcgtcactttcatggaccaggcgggggtggataaagtgctggcgcaatcgcggcacgagctcgactccaaaacaattgaccctaaggtggcctt

SEQ ID NO: 316706 - DNA, 120 bp, Artificial Sequence
  ENSG00000135097_3 (sequence is synthesized)
ccctcggcgagcacagcccaagatggtgactcgaacgaagaagatctttgtgggggggctgtcggtgaacaccacggtggaggacgtgaagcaatattttgagcagtttgggaaggtgga

SEQ ID NO: 316707 - DNA, 120 bp, Artificial Sequence
  ENSG00000135097_4 (sequence is synthesized)
cgacgccatgctgatgtttgacaaaaccaccaaccggcaccgagggttcgggtttgtcacgtttgagagtgaggacatcgtggagaaagtgtgtgaaattcattttcatgaaatcaacaa

SEQ ID NO: 316708 - DNA, 120 bp, Artificial Sequence
  ENSG00000135097_5 (sequence is synthesized)
caaaatggtggaatgtaagaaagctcagccaaaggaggtgatgtcgccaacgggctcagcccgggggaggtctcgagtcatgccctacggaatggacgccttcatgctgggcatcggcat

SEQ ID NO: 316709 - DNA, 120 bp, Artificial Sequence
  ENSG00000135097_6 (sequence is synthesized)
gctgggttacccaggtttccaagccacaacctacgccagccggagttatacaggcctcgcccctggctacacctaccagttccccgaattccgtgtagagcggacccctctcccgagcgc

SEQ ID NO: 316710 - DNA, 120 bp, Artificial Sequence
  ENSG00000135097_7 (sequence is synthesized)
cccagtcctccccgagcttacagccattcctctcactgcctacggaccaatggcggcggcagcggcggcagcggctgtggttcgagggacaggctctcacccctggacgatggctccccc

SEQ ID NO: 316711 - DNA, 120 bp, Artificial Sequence
  ENSG00000135097_8 (sequence is synthesized)
tccaggttcgactcccagccgcacagggggcttcctggggaccaccagccccggccccatggccgagctctacggggcggccaaccaggactcgggggtcagcagttacatcagcgccgc

SEQ ID NO: 316712 - DNA, 120 bp, Artificial Sequence
  ENSG00000135097_9 (sequence is synthesized)
cagccctgcccccagcaccggcttcggccacagtcttgggggccctttgattgccacagccttcaccaatgggtaccactgaagcaggggacggtggcaggagcgccccagcctgcagct

SEQ ID NO: 316713 - DNA, 120 bp, Artificial Sequence
  ENSG00000135097_10 (sequence is synthesized)
gactgaggaccacgagtgagccagcgagggggcgggagacctcagccgcagccgccgccccctcccctgcagcgactcggacccgctactgcctgcccccaactccccgggcccggcccc

SEQ ID NO: 316714 - DNA, 120 bp, Artificial Sequence
  ENSG00000135097_11 (sequence is synthesized)
tgccctgctgcccccaacagcgtctggctcccctactaacgtccccctcttcgcccttgcccccatccccacccgcccctctcccggccctgcttttatttattttggattagccggttg

SEQ ID NO: 316715 - DNA, 120 bp, Artificial Sequence
  ENSG00000135097_12 (sequence is synthesized)
tggatttgtgcatagctggagtgaaggcggagggagcctgctacaggccgcagcccaacccctgttttttattcagatttcccctcctttaccctttccctttttttttttttttttttt

SEQ ID NO: 316716 - DNA, 120 bp, Artificial Sequence
  ENSG00000135097_13 (sequence is synthesized)
aagaaaccttttttaaactatttctaggtttgtgaatgtgaagccccaggccgcagggggcaaggggccaggtgccccccaccagctgagaacaaagtgtctatctgggtgtgggcccct

SEQ ID NO: 316717 - DNA, 120 bp, Artificial Sequence
  ENSG00000135097_14 (sequence is synthesized)
ggccgcctccctccagccctggagaggagggcagggctgcggggaggccaggccgagcccctggaaccatcccgtcctgtatcatatgtaaatactgtgaggtgatgtgcccacccctct

SEQ ID NO: 316718 - DNA, 120 bp, Artificial Sequence
  ENSG00000135097_15 (sequence is synthesized)
ctaagacccctcgggggtgaggggctcccccctcccctgtttctgtcccctcagacaccgttactgtaagcttgcaggcctcagctgtggccacggcaggcccgctctctcaggccctca

SEQ ID NO: 316719 - DNA, 120 bp, Artificial Sequence
  ENSG00000135097_16 (sequence is synthesized)
gggtcaaggccttggttggacctgcccactccaaaaacccagtgtgggggcaaagggcgtgggaagagcagggcttgcccagcgacactgctggacaggaattaactctccaaaggtctc

SEQ ID NO: 316720 - DNA, 120 bp, Artificial Sequence
  ENSG00000135097_17 (sequence is synthesized)
ccctgctccctacctaggttggggcttcatggtttctgctcagtctgtcccccttccccctcgacccccgcaatgagtgggcaccaggggacgctctggcgagggcagaccccaggggaa

SEQ ID NO: 316721 - DNA, 120 bp, Artificial Sequence
  ENSG00000135097_18 (sequence is synthesized)
agcaaagggcgtctcagggaacccccacattctctcactgaagtttcccaccaggatgaccccacagccagagtcccttggcagcccctcaccccagaccccccttctaaggaaaaagag

SEQ ID NO: 316722 - DNA, 120 bp, Artificial Sequence
  ENSG00000135097_19 (sequence is synthesized)
aggttcagagcgttggaccttcatgaacagtggcctggctggcgtggcagggccaaggcccacccactgccatcccccttctgtgtgtccctctcccccagttatgaggcccagggcctg

SEQ ID NO: 316723 - DNA, 120 bp, Artificial Sequence
  ENSG00000135097_20 (sequence is synthesized)
agctctcttccccagcattgcccccacccggaaaccccacctttggagagttaattgtctgtgtgaggtgcttaacctatcagccctgagaacacaaagcaataatctttgttactgaga

SEQ ID NO: 316724 - DNA, 120 bp, Artificial Sequence
  ENSG00000135097_21 (sequence is synthesized)
tgcgcggctgttcgtgttttgggttttttttttttttaatgtttcctaataaaagagaagctgcattttattggtttttatttttaattttctacacgtttgagctgagtcctgagacac

SEQ ID NO: 316725 - DNA, 120 bp, Artificial Sequence
  ENSG00000135097_22 (sequence is synthesized)
ttagcttccctctccctcattcccggacccttccaccccactgggcccaaccatgggctcaggaccctggaattccgttttctgatttgctttgggattttttttttttttaagatgtta

SEQ ID NO: 316726 - DNA, 120 bp, Artificial Sequence
  ENSG00000135097_23 (sequence is synthesized)
catggtgtttcgaagccagcaagttaccatcctccggtgtctcttctctccacatctgtaacttctttttccaggttttattttcagttttaaattcctaataaattatttgaaaacgtt

SEQ ID NO: 316727 - DNA, 120 bp, Artificial Sequence
  ENSG00000135097_24 (sequence is synthesized)
tcgccccaggaggggacaccggtggggctaacccggacccccagccatcttccttgccccctgccctggcctcaaccccaccgtcccactaggggcctctccagccaaggcccaggtgga

SEQ ID NO: 316728 - DNA, 120 bp, Artificial Sequence
  ENSG00000135100_0 (sequence is synthesized)
agctccaatgtaaacagaacaggcaggggccctgattcacgggccgctggggccagggttgggggttgggggtgcccacagggcttggctagtggggttttgggggggcagtgggtgcaa

SEQ ID NO: 316729 - DNA, 120 bp, Artificial Sequence
  ENSG00000135100_1 (sequence is synthesized)
ggagtttggtttgtgtctgccggccggcaggcaaacgcaacccacgcggtgggggaggcggctagcgtggtggacccgggccgcgtggccctgtggcagccgagccatggtttctaaact

SEQ ID NO: 316730 - DNA, 120 bp, Artificial Sequence
  ENSG00000135100_2 (sequence is synthesized)
gagccagctgcagacggagctcctggcggccctgctcgagtcagggctgagcaaagaggcactgatccaggcactgggtgagccggggccctacctcctggctggagaaggccccctgga

SEQ ID NO: 316731 - DNA, 120 bp, Artificial Sequence
  ENSG00000135100_3 (sequence is synthesized)
caagggggagtcctgcggcggcggtcgaggggagctggctgagctgcccaatgggctgggggagactcggggctccgaggacgagacggacgacgatggggaagacttcacgccacccat

SEQ ID NO: 316732 - DNA, 120 bp, Artificial Sequence
  ENSG00000135100_4 (sequence is synthesized)
cctcaaagagctggagaacctcagccctgaggaggcggcccaccagaaagccgtggtggagacccttctgcaggaggacccgtggcgtgtggcgaagatggtcaagtcctacctgcagca

SEQ ID NO: 316733 - DNA, 120 bp, Artificial Sequence
  ENSG00000135100_5 (sequence is synthesized)
gcacaacatcccacagcgggaggtggtcgataccactggcctcaaccagtcccacctgtcccaacacctcaacaagggcactcccatgaagacgcagaagcgggccgccctgtacacctg

SEQ ID NO: 316734 - DNA, 120 bp, Artificial Sequence
  ENSG00000135100_6 (sequence is synthesized)
gtacgtccgcaagcagcgagaggtggcgcagcagttcacccatgcagggcagggagggctgattgaagagcccacaggtgatgagctaccaaccaagaaggggcggaggaaccgtttcaa

SEQ ID NO: 316735 - DNA, 120 bp, Artificial Sequence
  ENSG00000135100_7 (sequence is synthesized)
gtggggcccagcatcccagcagatcctgttccaggcctatgagaggcagaagaaccctagcaaggaggagcgagagacgctagtggaggagtgcaatagggcggaatgcatccagagagg

SEQ ID NO: 316736 - DNA, 120 bp, Artificial Sequence
  ENSG00000135100_8 (sequence is synthesized)
ggtgtccccatcacaggcacaggggctgggctccaacctcgtcacggaggtgcgtgtctacaactggtttgccaaccggcgcaaagaagaagccttccggcacaagctggccatggacac

SEQ ID NO: 316737 - DNA, 120 bp, Artificial Sequence
  ENSG00000135100_9 (sequence is synthesized)
gtacagcgggccccccccagggccaggcccgggacctgcgctgcccgctcacagctcccctggcctgcctccacctgccctctcccccagtaaggtccacggtgtgcgctatggacagcc

SEQ ID NO: 316738 - DNA, 120 bp, Artificial Sequence
  ENSG00000135100_10 (sequence is synthesized)
tgcgaccagtgagactgcagaagtaccctcaagcagcggcggtcccttagtgacagtgtctacacccctccaccaagtgtcccccacgggcctggagcccagccacagcctgctgagtac

SEQ ID NO: 316739 - DNA, 120 bp, Artificial Sequence
  ENSG00000135100_11 (sequence is synthesized)
agaagccaagctggtctcagcagctgggggccccctcccccctgtcagcaccctgacagcactgcacagcttggagcagacatccccaggcctcaaccagcagccccagaacctcatcat

SEQ ID NO: 316740 - DNA, 120 bp, Artificial Sequence
  ENSG00000135100_12 (sequence is synthesized)
ggcctcacttcctggggtcatgaccatcgggcctggtgagcctgcctccctgggtcctacgttcaccaacacaggtgcctccaccctggtcatcggcctggcctccacgcaggcacagag

SEQ ID NO: 316741 - DNA, 120 bp, Artificial Sequence
  ENSG00000135100_13 (sequence is synthesized)
tgtgccggtcatcaacagcatgggcagcagcctgaccaccctgcagcccgtccagttctcccagccgctgcacccctcctaccagcagccgctcatgccacctgtgcagagccatgtgac

SEQ ID NO: 316742 - DNA, 120 bp, Artificial Sequence
  ENSG00000135100_14 (sequence is synthesized)
acccacacgggcctgctcccgcagactatgctcatcaccgacaccaccaacctgagcgccctggccagcctcacgcccaccaagcaggtcttcacctcagacactgaggcctccagtgag

SEQ ID NO: 316743 - DNA, 120 bp, Artificial Sequence
  ENSG00000135100_15 (sequence is synthesized)
tccgggcttcacacgccggcatctcaggccaccaccctccacgtccccagccaggaccctgccagcatccagcacctgcagccggcccaccggctcagcgccagccccacagtgtcctcc

SEQ ID NO: 316744 - DNA, 120 bp, Artificial Sequence
  ENSG00000135100_16 (sequence is synthesized)
agcagcctggtgctgtaccagagctcagactccagcaatggccagagccacctgctgccatccaaccacagcgtcatcgagaccttcatctccacccagatggcctcttcctcccagtaa

SEQ ID NO: 316745 - DNA, 120 bp, Artificial Sequence
  ENSG00000135100_17 (sequence is synthesized)
ccacggcacctgggccctggggcctgtactgcctgcttggggggtgatgagggcagcagccagccctgcctggaggacctgagcctgccgagcaaccgtggcccttcctggacagctgtg

SEQ ID NO: 316746 - DNA, 120 bp, Artificial Sequence
  ENSG00000135100_18 (sequence is synthesized)
cctcgctccccactctgctctgatgcatcagaaagggagggctctgaggcgccccaacccgtggaggctgctcggggtgcacaggagggggtcgtggagagctaggagcaaagcctgttc

SEQ ID NO: 316747 - DNA, 120 bp, Artificial Sequence
  ENSG00000135100_19 (sequence is synthesized)
atggcagatgtaggagggactgtcgctgcttcgtgggatacagtcttcttacttggaactgaagggggcggcctatgacttgggcacccccagcctgggcctatggagagccctgggacc

SEQ ID NO: 316748 - DNA, 120 bp, Artificial Sequence
  ENSG00000135100_20 (sequence is synthesized)
gctacaccactctggcagccacacttctcaggacacaggcctgtgtagctgtgacctgctgagctctgagaggccctggatcagcgtggccttgttctgtcaccaatgtacccaccgggc

SEQ ID NO: 316749 - DNA, 120 bp, Artificial Sequence
  ENSG00000135100_21 (sequence is synthesized)
cactccttcctgccccaactccttccagctagtgacccacatgccatttgtactgaccccatcacctactcacacaggcatttcctgggtggctactctgtgccagagcctggggctcta

SEQ ID NO: 316750 - DNA, 120 bp, Artificial Sequence
  ENSG00000135100_22 (sequence is synthesized)
acgcctgagcccagggaggccgaagctaacagggaaggcaggcagggctctcctggcttcccatccccagcgattccctctcccaggccccatgacctccagctttcctgtatttgttcc

SEQ ID NO: 316751 - DNA, 120 bp, Artificial Sequence
  ENSG00000135100_23 (sequence is synthesized)
caagagcatcatgcctctgaggccagcctggcctcctgcctctactgggaaggctacttcggggctgggaagtcgtccttactcctgtgggagcctcgcaacccgtgccaagtccaggtc

SEQ ID NO: 316752 - DNA, 120 bp, Artificial Sequence
  ENSG00000135100_24 (sequence is synthesized)
ctggtggggcagctcctctgtctcgagcgccctgcagaccctgcccttgtttggggcaggagtagctgagctcacaaggcagcaaggcccgagcagctgagcagggccggggaactggcc

SEQ ID NO: 316753 - DNA, 120 bp, Artificial Sequence
  ENSG00000135100_25 (sequence is synthesized)
aagctgaggtgcccaggagaagaaagaggtgaccccagggcacaggagctacctgtgtggacaggactaacactcagaagcctgggggcctggctggctgagggcagttcgcagccaccc

SEQ ID NO: 316754 - DNA, 120 bp, Artificial Sequence
  ENSG00000135100_26 (sequence is synthesized)
tgaggagtctgaggtcctgagcactgccaggagggacaaaggagcctgtgaacccaggacaagcatggtcccacatccctgggcctgctgctgagaacctggccttcagtgtaccgcgtc

SEQ ID NO: 316755 - DNA, 120 bp, Artificial Sequence
  ENSG00000135100_27 (sequence is synthesized)
taccctgggattcaggaaaaggcctggggtgacccggcaccccctgcagcttgtagccagccggggcgagtggcacgtttatttaacttttagtaaagtcaaggagaaatgcggtggaaa

SEQ ID NO: 316756 - DNA, 120 bp, Artificial Sequence
  ENSG00000135100_28 (sequence is synthesized)
ggctcagctgcagagcccccacggtgagcgccctgtgccccacacagcaggagatgatgatagaggttggctgtcaatggatgcaggggaaaggggtgcctggcaggcattgcagtctgc

SEQ ID NO: 316757 - DNA, 120 bp, Artificial Sequence
  ENSG00000135100_29 (sequence is synthesized)
atgtgtctctgggacaagtgtgtttccgtgattgagggtgtctgcaggccagtgtgttcccatgtgaatgcacgtatctgtgtgtgtgcacgactgcttgtgtgagcagatccctagtgc

SEQ ID NO: 316758 - DNA, 120 bp, Artificial Sequence
  ENSG00000135100_30 (sequence is synthesized)
tccaggcctgctggccctcccttggcctgtgacagagcccctcacccccacatcccccgggctcaggaggctgctctgctcccccaggtcttcacctcagacactgaggcctccagtgag

SEQ ID NO: 316759 - DNA, 120 bp, Artificial Sequence
  ENSG00000135100_31 (sequence is synthesized)
ctgctgagtacagaagccaagctggtgagtgtccttgcttgtaaggaaaacccaacctcatctttccttggcagggagattctggagcagtccctagggaggccctgtggggaccccggc

SEQ ID NO: 316760 - DNA, 120 bp, Artificial Sequence
  ENSG00000135100_32 (sequence is synthesized)
cggtaagctggtggggatgggtgggcacctgggtgggaggctcatggggcaaccgcagaatccaggagctggaagagccactgggactcattcattcattcatacaacatgtatttatcc

SEQ ID NO: 316761 - DNA, 120 bp, Artificial Sequence
  ENSG00000135100_33 (sequence is synthesized)
agtgcctactctggaccagtcactgtgctacatcagtgatacctgggtgaaccaaacagaccaaaatctcagcaactcaagcagggaggcaggcactaagcataatacatcaattctgtg

SEQ ID NO: 316762 - DNA, 120 bp, Artificial Sequence
  ENSG00000135100_34 (sequence is synthesized)
gtacctcagaaggtgaagggtctatgggcaaattacagcagggtaagggggactgatgttttctaagtttttgttttatgaagaaaaattaagcccagaaagcccttatttgcaggtaca

SEQ ID NO: 316763 - DNA, 120 bp, Artificial Sequence
  ENSG00000135100_35 (sequence is synthesized)
attatgcagaagcccagtacataagatagataaggagctgctaggagaggggagcagagaactgaccccatggcctttgcactgctgtggaaccccagggctccagggaaccgcagtttg

SEQ ID NO: 316764 - DNA, 120 bp, Artificial Sequence
  ENSG00000135100_36 (sequence is synthesized)
acaacttttgaacaagtcaccgcctgcctctcccactagcctagacaaagagctaaaggctcagagagggggaatgacttgccagagccacttaaattagtggcaggtcccagtggaggg

SEQ ID NO: 316765 - DNA, 120 bp, Artificial Sequence
  ENSG00000135100_37 (sequence is synthesized)
ctgtttcctgaccaccctgccccctcctccaaaccacgggctctgggaaggagaggtggtgcccttgggaggtcttgggcaggggtgggatataactggggggcccagctgattccctcc

SEQ ID NO: 316766 - DNA, 120 bp, Artificial Sequence
  ENSG00000135100_38 (sequence is synthesized)
gttgtgcatgcatttgtgtgcatgcctgtgtttctctgaaactcttagggccatatgaatttctaaaatctattcagattttagaaaggtaatctggggccaggcgtggtggctcatgcc

SEQ ID NO: 316767 - DNA, 120 bp, Artificial Sequence
  ENSG00000135108_0 (sequence is synthesized)
atggcggcggcagcagtcgacagcgcgatggaggtggtgccggcgctggcggaggaggccgcgccggaggtagcgggcctcagctgcctcgtcaacctgccgggtgaggtgctggagtac

SEQ ID NO: 316768 - DNA, 120 bp, Artificial Sequence
  ENSG00000135108_1 (sequence is synthesized)
atcctgtgctgcggctcgctgacggccgccgacatcggccgtgtctccagcacctgccggcggctgcgcgagctgtgccagagcagcgggaaggtgtggaaggagcagttccgggtgagg

SEQ ID NO: 316769 - DNA, 120 bp, Artificial Sequence
  ENSG00000135108_2 (sequence is synthesized)
tggccttcccttatgaaacactacagccccaccgactacgtcaattggttggaagagtataaagttcggcaaaaagctgggttagaagcgcggaagattgtagcctcgttctcaaagagg

SEQ ID NO: 316770 - DNA, 120 bp, Artificial Sequence
  ENSG00000135108_3 (sequence is synthesized)
ttcttttcagagcacgttccttgtaatggcttcagtgacattgagaaccttgaaggaccagagattttttttgaggatgaactggtgtgtatcctaaatatggaaggaagaaaagctttg

SEQ ID NO: 316771 - DNA, 120 bp, Artificial Sequence
  ENSG00000135108_4 (sequence is synthesized)
acctggaaatactacgcaaaaaaaattctttactacctgcggcaacagaagatcttaaataatcttaaggcctttcttcagcagccagatgactatgagtcgtatcttgaaggtgctgta

SEQ ID NO: 316772 - DNA, 120 bp, Artificial Sequence
  ENSG00000135108_5 (sequence is synthesized)
tatattgaccagtactgcaatcctctctccgacatcagcctcaaagacatccaggcccaaattgacagcatcgtggagcttgtttgcaaaacccttcggggcataaacagtcgccacccc

SEQ ID NO: 316773 - DNA, 120 bp, Artificial Sequence
  ENSG00000135108_6 (sequence is synthesized)
agcttggccttcaaggcaggtgaatcatccatgataatggaaatagaactccagagccaggtgctggatgccatgaactatgtcctttacgaccaactgaagttcaaggggaatcgaatg

SEQ ID NO: 316774 - DNA, 120 bp, Artificial Sequence
  ENSG00000135108_7 (sequence is synthesized)
gattactataatgccctcaacttatatatgcatcaggttttgattcgcagaacaggaatcccaatcagcatgtctctgctctatttgacaattgctcggcagttgggagtcccactggag

SEQ ID NO: 316775 - DNA, 120 bp, Artificial Sequence
  ENSG00000135108_8 (sequence is synthesized)
cctgtcaacttcccaagtcacttcttattaaggtggtgccaaggcgcagaaggggcgaccctggacatctttgactacatctacatagatgcttttgggaaaggcaagcagctgacagtg

SEQ ID NO: 316776 - DNA, 120 bp, Artificial Sequence
  ENSG00000135108_9 (sequence is synthesized)
aaagaatgcgagtacttgatcggccagcacgtgactgcagcactgtatggggtggtcaatgtcaagaaggtgttacagagaatggtgggaaacctgttaagcctggggaagcgggaaggc

SEQ ID NO: 316777 - DNA, 120 bp, Artificial Sequence
  ENSG00000135108_10 (sequence is synthesized)
atcgaccagtcataccagctcctgagagactcgctggatctctatctggcaatgtacccggaccaggtgcagcttctcctcctccaagccaggctttacttccacctgggaatctggcca

SEQ ID NO: 316778 - DNA, 120 bp, Artificial Sequence
  ENSG00000135108_11 (sequence is synthesized)
gagaagtctttctgtcttgttttgaaggtgcttgacatcctccagcacatccaaaccctagacccggggcagcacggggcggtgggctacctggtgcagcacactctagagcacattgag

SEQ ID NO: 316779 - DNA, 120 bp, Artificial Sequence
  ENSG00000135108_12 (sequence is synthesized)
ggtgaagctgcgctccgatgagaagcacagagatgtctgctactccatcgggctcattatgaagcataagaggtatggctataactgtgtgatctacggctgggaccccacctgcatgat

SEQ ID NO: 316780 - DNA, 120 bp, Artificial Sequence
  ENSG00000135108_13 (sequence is synthesized)
gggacacgagtggatccggaacatgaacgtccacagcctgccgcacggccaccaccagcctttctataacgtgctggtggaggacggctcctgtcgatacgcagcccaagaaaacttgga

SEQ ID NO: 316781 - DNA, 120 bp, Artificial Sequence
  ENSG00000135108_14 (sequence is synthesized)
atataacgtggagcctcaagaaatctcacaccctgacgtgggacgctatttctcagagtttactggcactcactacatcccaaacgcagagctggagatccggtatccagaagatctgga

SEQ ID NO: 316782 - DNA, 120 bp, Artificial Sequence
  ENSG00000135108_15 (sequence is synthesized)
gtttgtctatgaaacggtgcagaatatttacagtgcaaagaaagagaacatagatgagtaaagtctagagaggacattgcacctttgctgctgctgctatcttccaagagaacgggactc

SEQ ID NO: 316783 - DNA, 120 bp, Artificial Sequence
  ENSG00000135108_16 (sequence is synthesized)
cggaagaagacgtctccacggagccctcgggacctgctgcaccaggaaagccactccaccagtagtgctggttgcctcctactaagtttaaataccgtgtgctcttccccagctgcaaag

SEQ ID NO: 316784 - DNA, 120 bp, Artificial Sequence
  ENSG00000135108_17 (sequence is synthesized)
acaatgttgctctccgcctacactagtgaattaatctgaaaggcactgtgtcagtggcatggcttgtatgcttgtcctgtggtgacagtttgtgacattctgtcttcatgaggtctcaca

SEQ ID NO: 316785 - DNA, 120 bp, Artificial Sequence
  ENSG00000135108_18 (sequence is synthesized)
gtcgacgctcctgtaatcattctttgtattcactccattcccctgtctgtctgcatttgtctcagaacatttccttggctggacagatggggttatgcatttgcaataatttccttctga

SEQ ID NO: 316786 - DNA, 120 bp, Artificial Sequence
  ENSG00000135108_19 (sequence is synthesized)
tttctctgtggaacgtgttcggtcccgagtgaggactgtgtgtctttttaccctgaagttagttgcatattcagaggtaaagttgtgtgctatcttggcagcatcttagagatggagaca

SEQ ID NO: 316787 - DNA, 120 bp, Artificial Sequence
  ENSG00000135108_20 (sequence is synthesized)
ttaacaagctaatggtaattagaatcatttgaatttatttttttctaatatgtgaaacacagatttcaagtgttttatcttttttttttaaatttaaatgggaatataacacagttttcc

SEQ ID NO: 316788 - DNA, 120 bp, Artificial Sequence
  ENSG00000135108_21 (sequence is synthesized)
cttccatattcctctcttgagtttatgcacatctctataaatcattagttttctattttattacataaaattcttttagaaaatgcaaatagtgaactttgtgaatggatttttccatac

SEQ ID NO: 316789 - DNA, 120 bp, Artificial Sequence
  ENSG00000135108_22 (sequence is synthesized)
tcatctacaattcctccattttaaatgactacttttattttttaatttaaaaaatctacttcagtatcatgagtaggtcttacatcagtgatgggttctttttgtagtgagacatacaaa

SEQ ID NO: 316790 - DNA, 120 bp, Artificial Sequence
  ENSG00000135108_23 (sequence is synthesized)
tctgatgttaatgtttgctcttagaagtcatactccatggtcttcaaagaccaaaaaatgaggttttgcttttgtaatcaggaaaaaaaaaaattaatgaaccttaaaaaaaaaaaaaaa

SEQ ID NO: 316791 - DNA, 120 bp, Artificial Sequence
  ENSG00000135108_24 (sequence is synthesized)
ttagaaagagagagaatgtctttcatttgaagagtgttggacttgtgtgaaaggagatgtgcgtgttggaatctgcttttccaagccgccagggtcctgacggcagcaggacgaagcctg

SEQ ID NO: 316792 - DNA, 120 bp, Artificial Sequence
  ENSG00000135108_25 (sequence is synthesized)
ttgtggcgtcttctgggaaagcctgaccgtgtgttcggacggcactggctcctttccgaagttctcagtaactgagcccagagtaactgcacgcctttgtgcagctctggagctccacca

SEQ ID NO: 316793 - DNA, 120 bp, Artificial Sequence
  ENSG00000135108_26 (sequence is synthesized)
actctcggcctgccagttctcaagcgagctaatcttgtcattaatcgatagaagctaacttccgaagttaggacctagttactttgctctcaacatttaaaataatgcagttgctctagt

SEQ ID NO: 316794 - DNA, 120 bp, Artificial Sequence
  ENSG00000135108_27 (sequence is synthesized)
gaatggggcgttaggggcctgtctctgcacctgtctgtccatctgcatgcagtattctcacccatgttgaatgcctgctgcttgtttaccctttggaaaccctggggtgaccaaggtttg

SEQ ID NO: 316795 - DNA, 120 bp, Artificial Sequence
  ENSG00000135108_28 (sequence is synthesized)
gaaagccacctgagaccacttcatagcaagggaaggctttaagcagttactagaaagagatggggatttggcccctggctcctccagcctgaatgagctatttaatccactgtccatgtt

SEQ ID NO: 316796 - DNA, 120 bp, Artificial Sequence
  ENSG00000135108_29 (sequence is synthesized)
cctcatcagtcaaatccaaagtcaaaggatttgaacctgcatctggaaacgtaaccactcacagcacctggcccgccaaggttgggaggattgtacactactttcatttaaaggggaaag

SEQ ID NO: 316797 - DNA, 120 bp, Artificial Sequence
  ENSG00000135108_30 (sequence is synthesized)
tttgataatacggaattaattaatatgaatgagatgcattaataagaacctgagcatgctgagagttgcaattgttggttttctggtttgattgatttccttttttcttagacacatcaa

SEQ ID NO: 316798 - DNA, 120 bp, Artificial Sequence
  ENSG00000135108_31 (sequence is synthesized)
agtcaagaaagatggttttacctttactgacccagctgtacatatgtatctagactgtttttaaatgtctttcttcatgaatgcttcatggggctccaggaagcctgtatcacctgtgta

SEQ ID NO: 316799 - DNA, 120 bp, Artificial Sequence
  ENSG00000135108_32 (sequence is synthesized)
agttggtatttgggcactttatatttttctaaaaacgtgttttggatcctgtactctaataaatcataagtttctttttaaaaattttccaaaacttttctccattttaaaaagccctgt

SEQ ID NO: 316800 - DNA, 120 bp, Artificial Sequence
  ENSG00000135108_33 (sequence is synthesized)
tataaacgttgaactttcacaatgttaaaatgttaaatatttggatatagcaacttcttttctcttcaaatgaatgccaagatttttttgtacaatgattaataaatggaacttatccag

SEQ ID NO: 316801 - DNA, 120 bp, Artificial Sequence
  ENSG00000135108_34 (sequence is synthesized)
agaaaccacgcaaatggcctgcccaatttcgtttgaggacagaaagcccagccatgacttgagtagaatgtctctcacctctcttcggatctaaatatgaaaagtatgttctgctgaatt

SEQ ID NO: 316802 - DNA, 120 bp, Artificial Sequence
  ENSG00000135108_35 (sequence is synthesized)
tttctgagcattggtgagcggacagcctacctgtaaaccatgacctccttgccaaacgttaattttatcagctcactagtaacctttgagaattatctggttgtcatgcaaagattgcac

SEQ ID NO: 316803 - DNA, 120 bp, Artificial Sequence
  ENSG00000135108_36 (sequence is synthesized)
tttctgaattatgttaaaacacatgttgtaaaatgagaactgctcatgctttgaaagaaaaccaggttcttcgtgcgttctgttgccgttgatttgaatggctgtgctgtatacgatgtg

SEQ ID NO: 316804 - DNA, 120 bp, Artificial Sequence
  ENSG00000135108_37 (sequence is synthesized)
tccagaatgtcttcagagcactgtttccgtgtgatgttactacctactatgtgggaggaaaaaaggttataggttaaacaaagtcaattgactctatggtggtgtttctcaatacctgtg

SEQ ID NO: 316805 - DNA, 120 bp, Artificial Sequence
  ENSG00000135108_38 (sequence is synthesized)
acgcacagtactgtgcgtcgtgactttctaagagaagtgtgcagcgggtgtgtcatcttgatatatgaaaccctggaatttccctcccctacacgcacgcaccgtccccgggggtccggt

SEQ ID NO: 316806 - DNA, 120 bp, Artificial Sequence
  ENSG00000135108_39 (sequence is synthesized)
gtttgcagacatgctttgaaaagctgtctcagtgagacatcagttatgtccaaaatgagtttaccttagaatcagaccggttttgccaggcgtcatgtttgcaaacattatccacctaat

SEQ ID NO: 316807 - DNA, 120 bp, Artificial Sequence
  ENSG00000135108_40 (sequence is synthesized)
cagattttgaaaggccggctttcatgtcgcctgcctgagactcataacagatccccattataagcgcgtttacacagcaaaatgattttattgagaaaaccagcattaagtactgttgcc

SEQ ID NO: 316808 - DNA, 120 bp, Artificial Sequence
  ENSG00000135108_41 (sequence is synthesized)
ggctcagttttccattgcatactatctacttaaagtcccgttctcatttgtaagtgttccgatctttccccacggagaaaactgagcagagctgccgtgtcgcaggctttctgctgctga

SEQ ID NO: 316809 - DNA, 120 bp, Artificial Sequence
  ENSG00000135108_42 (sequence is synthesized)
tgtcgcatctctttgctttcccctccttagtccatactccaagtaagtgaactcagactaccagcaactttttaactgaaaagtatctgtccatgatgatcaagatgcagctcttcgtgt

SEQ ID NO: 316810 - DNA, 120 bp, Artificial Sequence
  ENSG00000135108_43 (sequence is synthesized)
tgtcttttttttttttttttttttttggagggaaggagagacatcaactggacaaaatgcaaaatttggatgtgggacaattgctttttggagacgtgaatagctgtactgtacgtatta

SEQ ID NO: 316811 - DNA, 120 bp, Artificial Sequence
  ENSG00000135108_44 (sequence is synthesized)
acgtattattttgtgtggcatgctaactttgagccgggcactggcctaataaagtctttgtaatcctcccagcaatcctataaagcagacgcagatagtaaagattttaggctttgcagg

SEQ ID NO: 316812 - DNA, 120 bp, Artificial Sequence
  ENSG00000135108_45 (sequence is synthesized)
ccacgtacagactgtcacatgttctctgtttttaaaagtgtcaacaacattcttagctcaaaaacaggctgcaggtgggatggtgcccacaggccatagttggctgaccccggctagggt

SEQ ID NO: 316813 - DNA, 120 bp, Artificial Sequence
  ENSG00000135108_46 (sequence is synthesized)
gtaggcacttagcattccactgtataaaggggaaacccaggtcatactgcgtgtgcgtgggtgggaagccggatgtggaatacaggtggtccctgagtctccaggaaccactgagctcca

SEQ ID NO: 316814 - DNA, 120 bp, Artificial Sequence
  ENSG00000135108_47 (sequence is synthesized)
gctgttcacacccacactctgcggcgcaagcaactacctcgccacggtttagccttggtctagcagcgactttaaccttgaatgttgcatttctgaaaaatttagaatcttgaaagtaaa

SEQ ID NO: 316815 - DNA, 120 bp, Artificial Sequence
  ENSG00000135108_48 (sequence is synthesized)
ggacgtccctccggtgaataaaattaggcgcaattatagaatacatgtattatggccacgtagcaatgactgtattagggctctgctagttctgtaataaatagacccgaaaagcaacaa

SEQ ID NO: 316816 - DNA, 120 bp, Artificial Sequence
  ENSG00000135108_49 (sequence is synthesized)
gctttacttttctaaagccagagagagagtgggggtggagggagcagggagggacccacgcagcacaatgtagacggagtccagatcagcattatttctcaaatgggttcaacggatttt

SEQ ID NO: 316817 - DNA, 120 bp, Artificial Sequence
  ENSG00000135108_50 (sequence is synthesized)
ttttgcaacccctccgttatttggggaatcatcaatgattgaacactgtaaatttctcccggttgttttcccagaagggttgacgaaattaatgtggttcttctctctggctttgcaggt

SEQ ID NO: 316818 - DNA, 120 bp, Artificial Sequence
  ENSG00000135108_51 (sequence is synthesized)
actgtctatgccaatcaaattcctgtaagtcctgcctcctggaccctgccctcggctcctcccagactagaagggaaccggatgaacacctgggggccccctagtgctccctggcctccc

SEQ ID NO: 316819 - DNA, 120 bp, Artificial Sequence
  ENSG00000135108_52 (sequence is synthesized)
aaggctgtggctgccggctgacgccggagatgccctcgtgtggccacctgtgggaactgcagcccactgcgccggccctgggagcacctgagagcccgcaagtgtacagtaaggttgggt

SEQ ID NO: 316820 - DNA, 120 bp, Artificial Sequence
  ENSG00000135108_53 (sequence is synthesized)
aggcgtctgggccactgccgccccggcaggtgccagcccagggcaaggctgaggtggagactgacagagcctgtggaagctggtaagagacaagaatgccttcagtgtgagtctcccttc

SEQ ID NO: 316821 - DNA, 120 bp, Artificial Sequence
  ENSG00000135108_54 (sequence is synthesized)
tctttgttcctgttgaatttcacctctacttaataggatgaattcagtgtatgtctgtcaaagcattcacattgattaattaataattcacatttattaataaaaatgaatgtgaatgct

SEQ ID NO: 316822 - DNA, 120 bp, Artificial Sequence
  ENSG00000135111_0 (sequence is synthesized)
agacgcccggtgaattctagaggcggcggagggtggcgaggagctctcgctttctctcgctccctccctctccgactccgtctctctctctctctctctctctcccctccctctctttcc

SEQ ID NO: 316823 - DNA, 120 bp, Artificial Sequence
  ENSG00000135111_1 (sequence is synthesized)
ctctgttccattttttccccctctaaatcctccctgccctgcgcgcctggacacagatttaggaagcgaattcgctcacgttttaggacaaggaagagagagaggcacgggagaagagcc

SEQ ID NO: 316824 - DNA, 120 bp, Artificial Sequence
  ENSG00000135111_2 (sequence is synthesized)
cagcaagatttggattgaaaccgagacaccctccggaggctcggagcagaggaaggaggaggagggcggcgaacggaagccagtttgcaattcaagttttgatagcgctggtagaagggg

SEQ ID NO: 316825 - DNA, 120 bp, Artificial Sequence
  ENSG00000135111_3 (sequence is synthesized)
gtttaaatcagatttttttttttttaaaggagagagactttttccgctctctcgctccctgttaaagccgggtctagcacagctgcagacgccaccagcgagaaagagggagaggaagac

SEQ ID NO: 316826 - DNA, 120 bp, Artificial Sequence
  ENSG00000135111_4 (sequence is synthesized)
agatagggggcgggggaagaagaaaaagaaaggtaaaaagtcttctaggagaacctttcacatttgcaacaaaagacctaggggctggagagagattcctgggacgcagggctggagtgt

SEQ ID NO: 316827 - DNA, 120 bp, Artificial Sequence
  ENSG00000135111_5 (sequence is synthesized)
ctatttcgagctcagcggcagggctcgggcgcgagtcgagaccctgctcgctcctctcgcttctgaaaccgacgttcaggagcggctttttaaaaacgcaaggcacaaggacggtcaccc

SEQ ID NO: 316828 - DNA, 120 bp, Artificial Sequence
  ENSG00000135111_6 (sequence is synthesized)
gcgcgactatgtttgctgatttttcgccttgccctctttaaaagcggcctcccattctccaaaagacacttcccctcctccctttgaagtgcattagttgtgatttctgcctccttttct

SEQ ID NO: 316829 - DNA, 120 bp, Artificial Sequence
  ENSG00000135111_7 (sequence is synthesized)
tttttctttcttttttgttttgctttttccccccttttgaattatgtgctgctgttaaacaacaacaaaaaaacaacaaaacacagcagctgcggacttgtccccggctggagcccagcg

SEQ ID NO: 316830 - DNA, 120 bp, Artificial Sequence
  ENSG00000135111_8 (sequence is synthesized)
ccccgcctggagtggatgagcctctccatgagagatccggtcattcctgggacaagcatggcctaccatccgttcctacctcaccgggcgccggacttcgccatgagcgcggtgctgggt

SEQ ID NO: 316831 - DNA, 120 bp, Artificial Sequence
  ENSG00000135111_9 (sequence is synthesized)
caccagccgccgttcttccccgcgctgacgctgcctcccaacggcgcggcggcgctctcgctgccgggcgccctggccaagccgatcatggatcaattggtgggggcggccgagaccggc

SEQ ID NO: 316832 - DNA, 120 bp, Artificial Sequence
  ENSG00000135111_10 (sequence is synthesized)
atcccgttctcctccctggggccccaggcgcatctgaggcctttgaagaccatggagcccgaagaagaggtggaggacgaccccaaggtgcacctggaggctaaagaactttgggatcag

SEQ ID NO: 316833 - DNA, 120 bp, Artificial Sequence
  ENSG00000135111_11 (sequence is synthesized)
tttcacaagcggggcaccgagatggtcattaccaagtcgggaaggcgaatgtttcctccatttaaagtgagatgttctgggctggataaaaaagccaaatacattttattgatggacatt

SEQ ID NO: 316834 - DNA, 120 bp, Artificial Sequence
  ENSG00000135111_12 (sequence is synthesized)
atagctgctgatgactgtcgttataaatttcacaattctcggtggatggtggctggtaaggccgaccccgaaatgccaaagaggatgtacattcacccggacagccccgctactggggaa

SEQ ID NO: 316835 - DNA, 120 bp, Artificial Sequence
  ENSG00000135111_13 (sequence is synthesized)
cagtggatgtccaaagtcgtcactttccacaaactgaaactcaccaacaacatttcagacaaacatggatttactatattgaactccatgcacaaataccagccccggttccacattgta

SEQ ID NO: 316836 - DNA, 120 bp, Artificial Sequence
  ENSG00000135111_14 (sequence is synthesized)
agagccaatgacatcttgaaactcccttatagtacatttcggacatacttgttccccgaaactgaattcatcgctgtgactgcataccagaatgataagataacccagttaaaaatagac

SEQ ID NO: 316837 - DNA, 120 bp, Artificial Sequence
  ENSG00000135111_15 (sequence is synthesized)
aacaacccttttgcaaaaggtttccgggacactggaaatggccgaagagaaaaaagaaaacagctcaccctgcagtccatgagggtgtttgatgaaagacacaaaaaggagaatgggacc

SEQ ID NO: 316838 - DNA, 120 bp, Artificial Sequence
  ENSG00000135111_16 (sequence is synthesized)
tctgatgagtcctccagtgaacaagcagctttcaactgcttcgcccaggcttcttctccagccgcctccactgtagggacatcgaacctcaaagatttatgtcccagcgagggtgagagc

SEQ ID NO: 316839 - DNA, 120 bp, Artificial Sequence
  ENSG00000135111_17 (sequence is synthesized)
gacgccgaggccgagagcaaagaggagcatggccccgaggcctgcgacgcggccaagatctccaccaccacgtcggaggagccctgccgtgacaagggcagccccgcggtcaaggctcac

SEQ ID NO: 316840 - DNA, 120 bp, Artificial Sequence
  ENSG00000135111_18 (sequence is synthesized)
cttttcgctgctgagcggccccgggacagcgggcggctggacaaagcgtcgcccgactcacgccatagccccgccaccatctcgtccagcactcgcggcctgggcgcggaggagcgcagg

SEQ ID NO: 316841 - DNA, 120 bp, Artificial Sequence
  ENSG00000135111_19 (sequence is synthesized)
ggcaaggaggccttcgcgccgctcacggtgcagacggacgcggccgccgcgcacctggcccagggccccctgcctggcctcggcttcgccccgggcctggcgggccaacagttcttcaac

SEQ ID NO: 316842 - DNA, 120 bp, Artificial Sequence
  ENSG00000135111_20 (sequence is synthesized)
caacgggcacccgctcttcctgcaccccagccagtttgccatggggggcgccttctccagcatggcggccgctggcatgggtcccctcctggccacggtttctggggcctccaccggtgt

SEQ ID NO: 316843 - DNA, 120 bp, Artificial Sequence
  ENSG00000135111_21 (sequence is synthesized)
ctcgggcctggattccacggccatggcctctgccgctgcggcgcagggactgtccggggcgtccgcggccaccctgcccttccacctccagcagcacgtcctggcctctcagggcctggc

SEQ ID NO: 316844 - DNA, 120 bp, Artificial Sequence
  ENSG00000135111_22 (sequence is synthesized)
catgtcccctttcggaagcctgttcccttacccctacacgtacatggccgcagcggcggccgcctcctctgcggcagcctccagctcggtgcaccgccaccccttcctcaatctgaacac

SEQ ID NO: 316845 - DNA, 120 bp, Artificial Sequence
  ENSG00000135111_23 (sequence is synthesized)
catgcgcccgcggctgcgctacagcccctactccatcccggtgccggtcccggacggcagcagtctgctcaccaccgccctgccctccatggcggcggccgcggggcccctggacggcaa

SEQ ID NO: 316846 - DNA, 120 bp, Artificial Sequence
  ENSG00000135111_24 (sequence is synthesized)
agtcgccgccctggccgccagcccggcctcggtggcagtggactcgggctctgaactcaacagccgctcctccacgctctcctccagctccatgtccttgtcgcccaaactctgcgcgga

SEQ ID NO: 316847 - DNA, 120 bp, Artificial Sequence
  ENSG00000135111_25 (sequence is synthesized)
gaaagaggcggccaccagcgaactgcagagcatccagcggttggttagcggcttggaagccaagccggacaggtcccgcagcgcgtccccgtagacccgtcccagacacgtcttttcatt

SEQ ID NO: 316848 - DNA, 120 bp, Artificial Sequence
  ENSG00000135111_26 (sequence is synthesized)
ccagtccagttcaggctgccgtgcactttgtcggatataaaataaaccacgggcccgccatggcgttagcccttccttttgcagttgcgtctgggaaggggccccggactccctcgagag

SEQ ID NO: 316849 - DNA, 120 bp, Artificial Sequence
  ENSG00000135111_27 (sequence is synthesized)
aatgtgctagagacagcccctgtcttcttggcgtggtttatatgtccgggatctggatcagattctgggggctcagaaacgtcggttgcattgagctactgggggtaggagttccaacat

SEQ ID NO: 316850 - DNA, 120 bp, Artificial Sequence
  ENSG00000135111_28 (sequence is synthesized)
ttatgtccagagcaacttccagcaaggctggtctgggtctctgcccaccaggcggggaggtgttcaaagacatctccctcagtgcggatttatatatatatttttccttcactgtgtcaa

SEQ ID NO: 316851 - DNA, 120 bp, Artificial Sequence
  ENSG00000135111_29 (sequence is synthesized)
gtggaaacaaaaacaaaatctttcaaaaaaaaaatcgggacaagtgaacacattaacatgattctgtttgtgcagattaaaaactttatagggacttgcattatcggttctcaataaatt

SEQ ID NO: 316852 - DNA, 120 bp, Artificial Sequence
  ENSG00000135111_30 (sequence is synthesized)
actgagcagctttgtttggggagggaagtccctaccatccttgtttagtctatattaagaaaatctgtgtctttttaatattcttgtgatgttttcagagccgctgtaggtctcttcttg

SEQ ID NO: 316853 - DNA, 120 bp, Artificial Sequence
  ENSG00000135111_31 (sequence is synthesized)
catgtccacagtaatgtatttgtggtttttattttgaacgcttgcttttagagagaaaacaatatagccccctacccttttcccaatcctttgccctcaaatcagtgacccaagggaggg

SEQ ID NO: 316854 - DNA, 120 bp, Artificial Sequence
  ENSG00000135111_32 (sequence is synthesized)
ggggatttaaagggaaggagtgggcaaaacacataaaatgaatttattatatctaagctctgtagcaggattcatgtcgttctttgacagttctttctctttcctgtatatgcaataaca

SEQ ID NO: 316855 - DNA, 120 bp, Artificial Sequence
  ENSG00000135111_33 (sequence is synthesized)
aggttttaaaaaaataataaagaagtgagactattagacaaagtatttatgtaattatttgataactcttgtaaataggtggaatatgaatgcttggaaaattaaactttaatttattga

SEQ ID NO: 316856 - DNA, 120 bp, Artificial Sequence
  ENSG00000135111_34 (sequence is synthesized)
cattgtacatagctctgtgtaaatagaattgcaactgtcaggttttgtgttcttgttttcctttagttgggtttatttccaggtcacagaattgctgttaacactagaaaacacacttcc

SEQ ID NO: 316857 - DNA, 120 bp, Artificial Sequence
  ENSG00000135111_35 (sequence is synthesized)
tgcaccaacaccaataccctttcaaaagagttgtctgcaacatttttgttttcttttttaatgtccaaaagtgggggaaagtgctatttcctattttcaccaaaattggggaaggagtgc

SEQ ID NO: 316858 - DNA, 120 bp, Artificial Sequence
  ENSG00000135111_36 (sequence is synthesized)
cactttccagctccacttcaaattccttaaaatataactgagattgctgtggggagggaggagggcagaggctgcggtttgactttttaatttttcttttgttatttgtatttgctagtc

SEQ ID NO: 316859 - DNA, 120 bp, Artificial Sequence
  ENSG00000135111_37 (sequence is synthesized)
tctgatttcctcaaaacgaagtggaatttactactgttgtcagtatcggtgttttgaattggtgcctgcctatagagatatattcacagttcaaaagtcaggtgctgagagatggtttaa

SEQ ID NO: 316860 - DNA, 120 bp, Artificial Sequence
  ENSG00000135111_38 (sequence is synthesized)
agacaaattcatgaaggtatattttgtgttatagttgttgatgagttctttggttttctgtatttttccccctctctttaaaacatcactgaaatttcaataaatttttattgaaatgtc

SEQ ID NO: 316861 - DNA, 120 bp, Artificial Sequence
  ENSG00000135111_39 (sequence is synthesized)
gaaactcaccaacaacatttcagacaaacatggatttgtaagtttcattgctctcttcagtaaaattttctcctccttcactcagtcaaaggcagtgcttcccatttcatgagtttcagc

SEQ ID NO: 316862 - DNA, 120 bp, Artificial Sequence
  ENSG00000135111_40 (sequence is synthesized)
ccagacttctcctttgcttctccctaagcatagcaaacttgtcctcgtctggaaaaaggattcggggtgtttctctccaaataatggaaggcctggcgttctaaaagaaatggggcaaga

SEQ ID NO: 316863 - DNA, 120 bp, Artificial Sequence
  ENSG00000135111_41 (sequence is synthesized)
aaacttaccggcttgtgttctatagcaattccagctctttggtagattcctgacctgagagtgaagttaaaaaccattttttaagagctaaaatcaatttcaaggctatgtattcctaaa

SEQ ID NO: 316864 - DNA, 120 bp, Artificial Sequence
  ENSG00000135111_42 (sequence is synthesized)
ggatttgttttgttttaaaatatcatacttctgttttgaaaccagtgatattattttctcaggagagtttacgtttcggagccttgactctgttggttaaatggtgtgaatacattttta

SEQ ID NO: 316865 - DNA, 120 bp, Artificial Sequence
  ENSG00000135111_43 (sequence is synthesized)
aaaactcgttcttttactaaaaaaagaattgggcttaggtgggagtccggcttaccctaaatgaggcttagatcttcagaaaaaaatggtttgtgtgttgggagtgtatatatggattca

SEQ ID NO: 316866 - DNA, 120 bp, Artificial Sequence
  ENSG00000135111_44 (sequence is synthesized)
gtgacagtgcttagaaacttagaaaactttcattgcttgtagatatcaggcaaaggaccttttgcgccttttcctacccctccccaacatttcaataaaataaacagcgtgataagcaag

SEQ ID NO: 316867 - DNA, 120 bp, Artificial Sequence
  ENSG00000135111_45 (sequence is synthesized)
gagtaagcagaaagattaggcccaggaagacgcgaatggcgcggaaatatcttcagcgggcaggaattgcatttgaagcccttgatttgattaaggcataaatattcctctctagagttc

SEQ ID NO: 316868 - DNA, 120 bp, Artificial Sequence
  ENSG00000135111_46 (sequence is synthesized)
agcctttcagggctttaagtggattgggctcgtcaattagtgggcgcttaaagtactgaatcattttgtaaattaaaatgcatgtttttctctatcttttaagactttggccttcccaag

SEQ ID NO: 316869 - DNA, 120 bp, Artificial Sequence
  ENSG00000135111_47 (sequence is synthesized)
aattatagttttggtactcaggtaggctagggttcaaggtatgaatgatccttagatggtgagggtggggggggccctttggcaactgaggagcaatttggattctccagaagataacat

SEQ ID NO: 316870 - DNA, 120 bp, Artificial Sequence
  ENSG00000135111_48 (sequence is synthesized)
ctgtggagcgaaacgtacccagggggtactccaaggaggtgggctcggtacaagcgtggtaccctgcggtggggaagatttcagcctggcaggggtcctaagatcccgtttgttctgcta

SEQ ID NO: 316871 - DNA, 120 bp, Artificial Sequence
  ENSG00000135114_0 (sequence is synthesized)
tgactagacggccagcctgttaaggtggccccagatattccagcctcagcccagagtcctcctgtgcccctactgcagcaagggtgtctccaagaagggggacctggagtcagcccgtca

SEQ ID NO: 316872 - DNA, 120 bp, Artificial Sequence
  ENSG00000135114_1 (sequence is synthesized)
cacctggtttcctctctgctagggtccctcctcccacagagcactggagggcagctgaggaggagctaccttaaaaaaggaggtgtgtgccagggagctgggtaggagcctggctatata

SEQ ID NO: 316873 - DNA, 120 bp, Artificial Sequence
  ENSG00000135114_2 (sequence is synthesized)
tctgcccagcagcggtactctcgggacagagatggcactgatgcaggaactgtatagcacaccagcctccaggctggactccttcgtggctcagtggctgcagccccaccgggagtggaa

SEQ ID NO: 316874 - DNA, 120 bp, Artificial Sequence
  ENSG00000135114_3 (sequence is synthesized)
ggaagaggtgctagacgctgtgcggaccgtggaggagtttctgaggcaggagcatttccaggggaagcgtgggctggaccaggatgtgcgggtgctgaaggtagtcaaggtgggctcctt

SEQ ID NO: 316875 - DNA, 120 bp, Artificial Sequence
  ENSG00000135114_4 (sequence is synthesized)
cgggaatggcacggttctcaggagcaccagagaggtggagctggtggcgtttctgagctgtttccacagcttccaggaggcagccaagcatcacaaagatgttctgaggctgatatggaa

SEQ ID NO: 316876 - DNA, 120 bp, Artificial Sequence
  ENSG00000135114_5 (sequence is synthesized)
aaccatgtggcaaagccaggacctgctggacctcgggctcgaggacctgaggatggagcagagagtccccgatgctctcgtcttcaccatccagaccagggggactgcggagcccatcac

SEQ ID NO: 316877 - DNA, 120 bp, Artificial Sequence
  ENSG00000135114_6 (sequence is synthesized)
ggtcaccattgtgcctgcctacagagccctggggccttctcttcccaactcccagccaccccctgaggtctatgtgagcctgatcaaggcctgcggtggtcctggaaatttctgcccatc

SEQ ID NO: 316878 - DNA, 120 bp, Artificial Sequence
  ENSG00000135114_7 (sequence is synthesized)
cttcagcgagctgcagagaaatttcgtgaaacatcggccaactaagctgaagagcctcctgcgcctggtgaaacactggtaccagcagtatgtgaaagccaggtcccccagagccaatct

SEQ ID NO: 316879 - DNA, 120 bp, Artificial Sequence
  ENSG00000135114_8 (sequence is synthesized)
gccccctctctatgctcttgaacttctaaccatctatgcctgggaaatgggtactgaagaagacgagaatttcatgttggacgaaggcttcaccactgtgatggacctgctcctggagta

SEQ ID NO: 316880 - DNA, 120 bp, Artificial Sequence
  ENSG00000135114_9 (sequence is synthesized)
tgaagtcatctgtatctactggaccaagtactacacactccacaatgcaatcattgaggattgtgtcagaaaacagctcaaaaaagagaggcccatcatcctggatccggccgaccccac

SEQ ID NO: 316881 - DNA, 120 bp, Artificial Sequence
  ENSG00000135114_10 (sequence is synthesized)
cctcaacgtggcagaagggtacagatgggacatcgttgctcagagggcctcccagtgcctgaaacaggactgttgctatgacaacagggagaaccccatctccagctggaacgtgaagag

SEQ ID NO: 316882 - DNA, 120 bp, Artificial Sequence
  ENSG00000135114_11 (sequence is synthesized)
ggcacgagacatccacttgacagtggagcagaggggttacccagatttcaacctcatcgtgaacccttatgagcccataaggaaggttaaagagaaaatccggaggaccaggggctactc

SEQ ID NO: 316883 - DNA, 120 bp, Artificial Sequence
  ENSG00000135114_12 (sequence is synthesized)
tggcctgcagcgtctgtccttccaggttcctggcagtgagaggcagcttctcagcagcaggtgctccttagccaaatatgggatcttctcccacactcacatctatctgctggagaccat

SEQ ID NO: 316884 - DNA, 120 bp, Artificial Sequence
  ENSG00000135114_13 (sequence is synthesized)
agaatcctgatggtgggagctacgcctatgccatcaaccccaacagcttcatcctgggtctgaagcagcagattgaagaccagcaggggcttcctaaaaagcagcagcagctggaattcc

SEQ ID NO: 316885 - DNA, 120 bp, Artificial Sequence
  ENSG00000135114_14 (sequence is synthesized)
aaggccaagtcctgcaggactggttgggtctggggatctatggcatccaagacagtgacactctcatcctctcgaagaagaaaggagaggctctgtttccagccagttagttttctctgg

SEQ ID NO: 316886 - DNA, 120 bp, Artificial Sequence
  ENSG00000135114_15 (sequence is synthesized)
gagacttctctgtacatttctgccatgtactccagaactcatcctgtcaatcactctgtcccattgtctactgggaaggtcccaggtcttcaccagttttacaatgagttatcccaggcc

SEQ ID NO: 316887 - DNA, 120 bp, Artificial Sequence
  ENSG00000135114_16 (sequence is synthesized)
agaactttgggaggccgaggtgggaggagcgcttgagccgaggagttcaagaccagcctgggtatcacagggagaccccgtctctacaaaataaaaaaataattcactgggtgtggttgt

SEQ ID NO: 316888 - DNA, 120 bp, Artificial Sequence
  ENSG00000135114_17 (sequence is synthesized)
aaaaaaataattcactgggtgtggttgtgcacatttgtagtctcaggcactcaagaagctgaggcagaagaatcacttgagcccaggaggctgaagctgcagtgagctgtgatcacaccg

SEQ ID NO: 316889 - DNA, 120 bp, Artificial Sequence
  ENSG00000135114_18 (sequence is synthesized)
ctacactcctgcccaggccacagagcaagaccctgtgtctaaaaactaaaacataaaaataagtaaatccgtttaaaaaaaggattatcccagccctgccagggggaggatgaggagggg

SEQ ID NO: 316890 - DNA, 120 bp, Artificial Sequence
  ENSG00000135114_19 (sequence is synthesized)
tgtgaggactaaatatacaaataaatagtgtggtcacatgacgcacagcaacagaattcggacccacagccttctgcagcaatcaaccccaaaccatcaggacttgggcgataactggca

SEQ ID NO: 316891 - DNA, 120 bp, Artificial Sequence
  ENSG00000135114_20 (sequence is synthesized)
gcatctctaactccccaccctactcccatcctgcttcctatttatgaccaacccaagaaacccaaataagctccccagaccaatcacatggttagccccacttctggtgagtgcacttcc

SEQ ID NO: 316892 - DNA, 120 bp, Artificial Sequence
  ENSG00000135114_21 (sequence is synthesized)
agcttccccataccaacagcctcaatcacggcatccctgaagccttcccattttcctgcctgtctttaaatctctgtcaaaagcgagagatgggtggctggttcctttgctatagcaagt

SEQ ID NO: 316893 - DNA, 120 bp, Artificial Sequence
  ENSG00000135114_22 (sequence is synthesized)
tgggaataaatcgcctttgttagttctcatttgggggctgtttatttccacagggcctaatgctgtcctaatggttattgcttgatcatttgagcttctcaactctaagaaatgaggact

SEQ ID NO: 316894 - DNA, 120 bp, Artificial Sequence
  ENSG00000135114_23 (sequence is synthesized)
ggggaaactgaggcaaaaagagacaaagaatgggagattgaggatgatgcagtgtaaaaaaaaatcacctcaactcctaaaacccatacacaaacagtacataatagtcaggaaactgta

SEQ ID NO: 316895 - DNA, 120 bp, Artificial Sequence
  ENSG00000135114_24 (sequence is synthesized)
ggaaagtaatagcatctttattatcaaaggacgtcatgtgatcaggtttactccaagcaataaaaagtttccttttgcccccctgttttgcctagttttctggtgggctactctcctacc

SEQ ID NO: 316896 - DNA, 120 bp, Artificial Sequence
  ENSG00000135114_25 (sequence is synthesized)
atagcatagaaaatgcacactgcaattggttatcaacagcctctggtcaatttagcaatcataatctgtgtatctcccacctctgtttgccttcagggacagaaaaagtgcctcctttcc

SEQ ID NO: 316897 - DNA, 120 bp, Artificial Sequence
  ENSG00000135114_26 (sequence is synthesized)
aggaggtagacaggctgttccagtccccatctttgtgtccttcataatgcccagcacagcccacattgtaggtggtgggaaaattcttgtttaaaataaaaaaaagaatgaaaaatgcaa

SEQ ID NO: 316898 - DNA, 120 bp, Artificial Sequence
  ENSG00000135114_27 (sequence is synthesized)
tctctgggctgtcaagggcttgaaggtcagaacgacagataaactactcagtatttactcattcagttctgtgttgatggagaacagaactttagagtcaccgtttaagggccagctgca

SEQ ID NO: 316899 - DNA, 120 bp, Artificial Sequence
  ENSG00000135114_28 (sequence is synthesized)
ccacccatgggctccgtgaacttggacaaattctttggctctcagagccttgggtttcttaccttcaaattcttgttctcctttcctttctttttcccataatttactggagaatcagtt

SEQ ID NO: 316900 - DNA, 120 bp, Artificial Sequence
  ENSG00000135116_0 (sequence is synthesized)
gcacaacacaaggagaaacttggtgtccaggggaggcccccggcggctggagcgcggcggcagcgggcgcagaggccggagggagaggaggcgaggggcggcccgagcgcggggcgggag

SEQ ID NO: 316901 - DNA, 80 bp, Artificial Sequence
  ENSG00000135116_1 (sequence is synthesized)
ccccggccgtgtgcgcctgcagcgcgggtcgcctggggctgcgctcgtccgccgcgcagctcaccgccgcccggctcaag

SEQ ID NO: 316902 - DNA, 80 bp, Artificial Sequence
  ENSG00000135116_2 (sequence is synthesized)
ggctcaaggcgctaggcgacgagctgcaccagcgcaccatgtggcggcgccgcgcgcggagccggagggcgccggcgccc

SEQ ID NO: 316903 - DNA, 120 bp, Artificial Sequence
  ENSG00000135116_3 (sequence is synthesized)
cgcaggtggcggcgctggcggcctggctgctcggcaggcggaacttgtaggaacgcggggcttcttggtggggccggagccgagacccagccggagcgagcaacaggttggtgaaaaccc

SEQ ID NO: 316904 - DNA, 120 bp, Artificial Sequence
  ENSG00000135116_4 (sequence is synthesized)
tgtgtccttggagaaagctggttcccgttttccagagggggagcccagagcttgaaaggccgcggttggcacttcgagaaggaagtggagagtaaagacagcgcctggagcgatcgtaga

SEQ ID NO: 316905 - DNA, 120 bp, Artificial Sequence
  ENSG00000135116_5 (sequence is synthesized)
aacacagaatgggactggggaagccctttggaaatccagctgcagaaacagacaccccaatgctatttacatacagctctatatatataaaaaaagaaaatatgaatattacgtatcagt

SEQ ID NO: 316906 - DNA, 120 bp, Artificial Sequence
  ENSG00000135116_6 (sequence is synthesized)
gcatgccttgttgaggacgtggttgccttccttttctgcaccttgcgatgtgaactttgatattctgtaatgtctggggcgccagaagagagatgcctgctgtgtacttagaaactattt

SEQ ID NO: 316907 - DNA, 120 bp, Artificial Sequence
  ENSG00000135116_7 (sequence is synthesized)
gcaaagactggtgggaattagccccagcatcggccaactgcctggggatagatgctggtggaataagaggtaacagtgcaaaaggcatgatagaaaaaaaaagtgaggacttgggaccga

SEQ ID NO: 316908 - DNA, 120 bp, Artificial Sequence
  ENSG00000135116_8 (sequence is synthesized)
ttgtgtaggggcagtctgggatgcctccatttcttgactcgtcctagcctctccctctgtacttacctaggtcgatcgctagatcccactgtcacgtcaagagaaatgggatttttgtgt

SEQ ID NO: 316909 - DNA, 120 bp, Artificial Sequence
  ENSG00000135116_9 (sequence is synthesized)
ctctggtgcttcacttaaaattttgctggtgctaagtgcgttcctgctggtgctgctgtggtattctgttgacagacttggaaggccaggggacaagagagatttctattttgctgtttc

SEQ ID NO: 316910 - DNA, 120 bp, Artificial Sequence
  ENSG00000135116_10 (sequence is synthesized)
agattcttttttttttttttttaagggacaagttgcaaaagtgccacttgagagtctcttctcttcttctacctggggacgaatatccagaggtggtttggagcaaaccttggggtctag

SEQ ID NO: 316911 - DNA, 120 bp, Artificial Sequence
  ENSG00000135116_11 (sequence is synthesized)
gagggaggatggcattgagaggcttgctggttatgaggcagaaagctgacctcatgcatgacttggttgctatctcccccacccccacaaaagtgtcctcggagttcagcccacagcctc

SEQ ID NO: 316912 - DNA, 120 bp, Artificial Sequence
  ENSG00000135116_12 (sequence is synthesized)
ctccactccccaaggggatttcagggtttaggttttatggattaaagagccaagaaatggctacattctgttcaaagatgatttataaccgggggatgttgtgggagggagtgggccatt

SEQ ID NO: 316913 - DNA, 120 bp, Artificial Sequence
  ENSG00000135116_13 (sequence is synthesized)
taaatgaaatgcaccagcatctcactgattgacagaggtctgatttttttccccccaaggataagctactattttcagaagtttctagaagggctaaaaaaagatgtgtgctggacggag

SEQ ID NO: 316914 - DNA, 120 bp, Artificial Sequence
  ENSG00000135116_14 (sequence is synthesized)
acttggctgcaaagactcttcagggagcagtgattattttttgctttcattttcgaaaaatccaacataagcaggtattcttcctctgtgcaggataccacacactgccattttcaaagc

SEQ ID NO: 316915 - DNA, 120 bp, Artificial Sequence
  ENSG00000135116_15 (sequence is synthesized)
cgaggtggcgaggtgtcaggctgcagattcggacggtcattctccaaggctggatttgcaggtcaccacccggtacctatagacagagggtccagcaggctggttagcagacaccgctcc

SEQ ID NO: 316916 - DNA, 120 bp, Artificial Sequence
  ENSG00000135116_16 (sequence is synthesized)
agttctaagacgccagcagtgggatccatgtttaaggtggatgcggctgaaatgggaattatccccccacaggctttgctgtacagttctaagaagccagcagtgggatccacatttgtt

SEQ ID NO: 316917 - DNA, 120 bp, Artificial Sequence
  ENSG00000135116_17 (sequence is synthesized)
aaggtggatgcggctgaaatgggaattatccctccataggctttgctgtaaatgaccaggtcctttagaatgtacaacctctcagtgctgctgcaagctgggagctggatttctttctgt

SEQ ID NO: 316918 - DNA, 120 bp, Artificial Sequence
  ENSG00000135116_18 (sequence is synthesized)
cttccttttaaaatccgttccttgtgttttcctaaatagccctttaaagagaaatgcaaccccagggctgctgaatgccagggaagactcccccaccccgcagctttgaactcagcaaac

SEQ ID NO: 316919 - DNA, 120 bp, Artificial Sequence
  ENSG00000135116_19 (sequence is synthesized)
caaaaaaaaaaaaagaagaataatgcttattttgggagaacgtgtttctcctcattactcgtgccctccccctagctgatgtttgcaggggaccctcgcttagctggggactgcagagag

SEQ ID NO: 316920 - DNA, 120 bp, Artificial Sequence
  ENSG00000135116_20 (sequence is synthesized)
cagtgggtaatattcccacaaagctacgaacttagagaaggcaaattcattagaataatatgaaatacagtcactgcttctatttaatcactttcttagccacagactagggtctttcca

SEQ ID NO: 316921 - DNA, 120 bp, Artificial Sequence
  ENSG00000135116_21 (sequence is synthesized)
gctccccccattttctggggaggggcgtccattactacacagctgtatccaatcacagttctctgcttctttaaggctgtaccttcaagatcgtagtgggggcatgctgaccacctgtag

SEQ ID NO: 316922 - DNA, 120 bp, Artificial Sequence
  ENSG00000135116_22 (sequence is synthesized)
acacaggagaagatgaaaggtgagaggatccctttttcagccccgacttgcctactggcttttgatgtttcccctggaggatacaaactccaaacgctggggttggcattttgggtgatt

SEQ ID NO: 316923 - DNA, 120 bp, Artificial Sequence
  ENSG00000135116_23 (sequence is synthesized)
ttgatttcaatgaagccactttgctgagagaactggggcacccacgacctcctgatagagcttctcagccaagtcccttgtagatattctcctgttttattagagaccacgtatttatcg

SEQ ID NO: 316924 - DNA, 120 bp, Artificial Sequence
  ENSG00000135116_24 (sequence is synthesized)
ttggagtgcacttctcgactgccccgatttttgacacggggttgtttttaatgcttgtttttatatgagatttgacttcttgatggacatttgtattaggaaattgaagcatgatatata

SEQ ID NO: 316925 - DNA, 120 bp, Artificial Sequence
  ENSG00000135116_25 (sequence is synthesized)
tgtatatattgtctccaccatctctcctgttgtattacttggattgcatgagatagtggggtggttcttgttttttaaaaaatatttccacagtgtgcaaagtgctggcaacatccctcc

SEQ ID NO: 316926 - DNA, 120 bp, Artificial Sequence
  ENSG00000135116_26 (sequence is synthesized)
ctctcctccaccgctcccccacttttctctggctgccaaggagtcattgattttgattagcttcactgcagagcgtctgtgaagagagagagagagaaagggagggaggctttgaaataa

SEQ ID NO: 316927 - DNA, 75 bp, Artificial Sequence
  ENSG00000135116_27 (sequence is synthesized)
gaagagagagagagagaaagggagggaggctttgaaataaattttaaaaaagacctcatatcgggtttcagcaga

SEQ ID NO: 316928 - DNA, 120 bp, Artificial Sequence
  ENSG00000135116_28 (sequence is synthesized)
atcgtttaggtagcttgctgcataatgagatgaagagacttttgcctcttcatttctgatggtgctgcttgctctcagagagtggggagccaggaaccgctgggactggagcccccggga

SEQ ID NO: 316929 - DNA, 120 bp, Artificial Sequence
  ENSG00000135116_29 (sequence is synthesized)
cttcaacactccgaatgagatccagtcctttctggaagcttctcacccccacctgatctcccacaaacaaatacaatctcttcaaatttgggggtccgtttcctattctctttgttattg

SEQ ID NO: 316930 - DNA, 120 bp, Artificial Sequence
  ENSG00000135116_30 (sequence is synthesized)
gtgtagcttgagtaggaagtttctctggggagcccattggccccaatggctgctgtccatggtcctaggccgtgcgcatgtcctagaccccagttcctgttttgtttttttttgggtttt

SEQ ID NO: 316931 - DNA, 85 bp, Artificial Sequence
  ENSG00000135116_31 (sequence is synthesized)
agttcccgccttcatttggatactggggacttcttttccacttcttcttcttcttctattttattttgagacagagtctcactct

SEQ ID NO: 316932 - DNA, 120 bp, Artificial Sequence
  ENSG00000135116_32 (sequence is synthesized)
gggattacaggcatgagccaccgagctcagcctccacttcttattttgattcttttctgttttgatggtgagaggaaagggtgatttacccaatactgtcacagaaaaatgaaactgtga

SEQ ID NO: 316933 - DNA, 120 bp, Artificial Sequence
  ENSG00000135116_33 (sequence is synthesized)
acagaaaaatgaaactgtgactggttttcacaatgtatgtagctgatctcatgttctcctattattatgtttctgacagtgataaaatatcactctccctccctggggcattagaggagt

SEQ ID NO: 316934 - DNA, 120 bp, Artificial Sequence
  ENSG00000135116_34 (sequence is synthesized)
cctcacccacccacctcctacacaagtatcttttagggacagtggctcaccattgtggactttttgagtgtccacctgatattacaagttgcattgaccagaacacagattttgctcttc

SEQ ID NO: 316935 - DNA, 120 bp, Artificial Sequence
  ENSG00000135116_35 (sequence is synthesized)
tgtgtcaatacccatttcttttctgaaggtcagaagttggttaagggtttgggggaccagctagacactcttcttagtcccatggagctgactggaagttccatgaggggaggaaattga

SEQ ID NO: 316936 - DNA, 120 bp, Artificial Sequence
  ENSG00000135116_36 (sequence is synthesized)
tgtcaaagtgtcattttaaagcttaagctgaaagtttattttttaaattctcattcattcatttagcatatattgattgagcatctacaatgtgccagttgtagaattccatctcagaag

SEQ ID NO: 316937 - DNA, 120 bp, Artificial Sequence
  ENSG00000135116_37 (sequence is synthesized)
agacttgacttgtggatggtggaggggcagtcctgctcggaagcagatgatgtgaaatgttcctttccagtctggttcacgatgtttaacagatttgtcaggtcaccactgtgaccccaa

SEQ ID NO: 316938 - DNA, 120 bp, Artificial Sequence
  ENSG00000135116_38 (sequence is synthesized)
gctttgctggcagattgttatatagtatttactgagagccctgctatctggtaaaggcagttaaaaagcctgcaatctcgactcatttccagcatgaacagactggtccttgctgcttta

SEQ ID NO: 316939 - DNA, 120 bp, Artificial Sequence
  ENSG00000135116_39 (sequence is synthesized)
cacaataatcaaagctaccttttatggcgtgctcgccactcccaagcactgggcgaagtgctttacccgtcttcccctccgcgatgcctcatgcccactttagcagatagtactgttagc

SEQ ID NO: 316940 - DNA, 120 bp, Artificial Sequence
  ENSG00000135116_40 (sequence is synthesized)
attcccattttacagtggaggaagctgaggctcagagaggttaagcaacttagctgaaggccacaccaccagcgaagtgcctgagccaagatttggactcgagtccatgggacccccacg

SEQ ID NO: 316941 - DNA, 120 bp, Artificial Sequence
  ENSG00000135116_41 (sequence is synthesized)
ctcgtgagctgactgctctgctccactgggtcccttcatgaggtcgtcccacagcactgctagttccagggcgagtgccagcacatggccccactgggagccggggcctgacttaggtct

SEQ ID NO: 316942 - DNA, 120 bp, Artificial Sequence
  ENSG00000135116_42 (sequence is synthesized)
actggaaaaagtgtcacctttggggacactcaaggacaggctggttggtttcgttgtggattttatatactcatgccctaaccctgtgttcctggtttctataaggccccggggaaggtg

SEQ ID NO: 316943 - DNA, 120 bp, Artificial Sequence
  ENSG00000135116_43 (sequence is synthesized)
caaggaatttgcaaatagggcctgtatgacttatttcctaggacacgggaagcttttcttacctcctttctaccctcttctccaacctgaactcccaagtttcttctcctgaaggtcttt

SEQ ID NO: 316944 - DNA, 120 bp, Artificial Sequence
  ENSG00000135116_44 (sequence is synthesized)
gcactataagcgccaaggagcccgtgtgcgtggcaggggcggctgggagggtatctggagaaccttagtgaggcctctggcctagccagagaggcaataagcttggggacgttccgttct

SEQ ID NO: 316945 - DNA, 120 bp, Artificial Sequence
  ENSG00000135116_45 (sequence is synthesized)
gggttctgacgttgttggttctgacgtcgttgtgctcttttgtaagaggaatttcataccttggagacgctttgtacatatttgtaatgactttattaaaaaactgattgtgcacttcta

SEQ ID NO: 316946 - DNA, 120 bp, Artificial Sequence
  ENSG00000135116_46 (sequence is synthesized)
gcggccgcgcaggtggcggcgctggcggcctggctgctcggcaggcggaacttgtaggaacgcggggcttcttggtggggccggagccgagacccagccggagcgagcaacagcctacat

SEQ ID NO: 316947 - DNA, 120 bp, Artificial Sequence
  ENSG00000135116_47 (sequence is synthesized)
ctgacctcagaataccagccgctccggcctttcttgtgcttttgatttaatttggggaaactcattttttcccagctctgagccccaggggaggctcctctgaggctggggaggcctgga

SEQ ID NO: 316948 - DNA, 120 bp, Artificial Sequence
  ENSG00000135116_48 (sequence is synthesized)
tcctcatcctttttaatggctgcatgatgttctgttgcttggatgaaccaggatttccttatatggtcacttccttgggaacatttgcattgtttcctgttttctggttggtgaaaaccc

SEQ ID NO: 316949 - DNA, 120 bp, Artificial Sequence
  ENSG00000135116_49 (sequence is synthesized)
tctgcccggctcccgggcgccgggggtcccatccacttctccctaccttctctctctcctgttggagaggccaggggctcccgcgactgaaaggggccaggctgaggctgcccaatccca

SEQ ID NO: 316950 - DNA, 120 bp, Artificial Sequence
  ENSG00000135116_50 (sequence is synthesized)
gggacaggaagaacattttggatggatcgcggggtgcagaaaaaggaagttgagcgacagacgcgaagcccaaagcgtggaatttgggaagaggcagaaaaaaagtgggcgaagaggaag

SEQ ID NO: 316951 - DNA, 120 bp, Artificial Sequence
  ENSG00000135116_51 (sequence is synthesized)
agaaaaaacaagcgacgagatggggagggacaagaagtttggggaggatagagaaaaagagaaactgcctggaaaacaagttgcaagacaattgaaaagtgaatgagaaggaaagagagg

SEQ ID NO: 316952 - DNA, 120 bp, Artificial Sequence
  ENSG00000135116_52 (sequence is synthesized)
ggctttctctggttctgtcgtccaggagattggaaacgctctccccttccggcaccaggcgtgcgggatgtcgggtgcccctcccgggaggccgaggactccgggccggagcctgactgt

SEQ ID NO: 316953 - DNA, 120 bp, Artificial Sequence
  ENSG00000135116_53 (sequence is synthesized)
tccatctcgcatttgccagttgtgtgaccttaggccgatcccattaccttctgagccttggtttcctcatctgtaaaatgggaagaataatagcatctgtgctggaggagcactatgtat

SEQ ID NO: 316954 - DNA, 120 bp, Artificial Sequence
  ENSG00000135119_0 (sequence is synthesized)
acatgctgcccaggctgcgcgggtgattggcttggctggacctgaatgatgcggctgtgattgctgaattgtctgggcaggtttggagtctctggcaagctcccctgactgtgcatccct

SEQ ID NO: 316955 - DNA, 120 bp, Artificial Sequence
  ENSG00000135119_1 (sequence is synthesized)
ctggagacgaagaggagggggaggcctgtcctctctgggatccattggtcacatccccctgaggattcccgaatgcctacctccagtgtcgtcaacatggagttctgaagtccatgtggc

SEQ ID NO: 316956 - DNA, 120 bp, Artificial Sequence
  ENSG00000135119_2 (sequence is synthesized)
tcttcacagtgaatcaggtgttaaggaagatgcagagacgccacagcagcaacacggataacattccacctgaaagaaaccgcagccaggcgctcagctccgaggcgagtgtggatgaag

SEQ ID NO: 316957 - DNA, 120 bp, Artificial Sequence
  ENSG00000135119_3 (sequence is synthesized)
gtggcgtctttgagagtctgaaggcagaggcagcctccccaccagcgctcttctcgggcttatcaggcagcctccccaccagctcgttcccctccagcctggtgctgggctcctcggctg

SEQ ID NO: 316958 - DNA, 120 bp, Artificial Sequence
  ENSG00000135119_4 (sequence is synthesized)
gcggcggggacgtgttcatccagatgcccgcgtccagggaggaaggagggggccggggcgaggggggcgcctaccaccaccgccagccccaccaccatttccaccatggcggccaccgcg

SEQ ID NO: 316959 - DNA, 120 bp, Artificial Sequence
  ENSG00000135119_5 (sequence is synthesized)
ggggctccctgctgcagcacgtgggtggggaccaccgggggcactcggaggagggaggcgacgagcagcctgggacgcccgcccccgccctgtccgagctgaaggctgtgatctgctggc

SEQ ID NO: 316960 - DNA, 120 bp, Artificial Sequence
  ENSG00000135119_6 (sequence is synthesized)
tccagaaaggactccccttcatcctgatcctcctggccaaactgtgctttcagcataagctcggcattgctgtgtgcatcgggatggccagcaccttcgcctatgccaactccacgcttc

SEQ ID NO: 316961 - DNA, 120 bp, Artificial Sequence
  ENSG00000135119_7 (sequence is synthesized)
gagaacaggtctcactgaaggagaagaggtcagtgctggtcatcttgtggatcctggcctttctggcggggaacaccctctatgtgctttatacattcagctcccagcagctgtacaaca

SEQ ID NO: 316962 - DNA, 120 bp, Artificial Sequence
  ENSG00000135119_8 (sequence is synthesized)
gcctcatattcctgaagcccaacctggagatgctggacttctttgacctgctatggattgtggggatcgcagactttgttctgaagtacatcaccatcgccctcaagtgcctcatcgtgg

SEQ ID NO: 316963 - DNA, 120 bp, Artificial Sequence
  ENSG00000135119_9 (sequence is synthesized)
ccctgcccaagatcatcctggctgtcaagtccaagggaaagttctatctggtcatcgaggagctgagccagctgttccgatcccttgtccccatccagctgtggtacaaatacatcatgg

SEQ ID NO: 316964 - DNA, 120 bp, Artificial Sequence
  ENSG00000135119_10 (sequence is synthesized)
gtgacgactcctccaacagctacttcctgggcggggtcctgatcgttctctacagcctctgcaagtccttcgacatctgtggacgtgtgggcggagttaggaaagccctgaagcttctct

SEQ ID NO: 316965 - DNA, 120 bp, Artificial Sequence
  ENSG00000135119_11 (sequence is synthesized)
gtacctctcagaactatggagtccgagccaccgggcagcagtgcacagaagctggtgacatctgcgccatctgtcaggccgagttccgagagcctctgattctcctgtgccagcacgtgt

SEQ ID NO: 316966 - DNA, 120 bp, Artificial Sequence
  ENSG00000135119_12 (sequence is synthesized)
tctgtgaggagtgcctctgcctgtggctggaccgtgagcgcacctgcccgctctgccgctcggtcgccgtggacaccctgcgctgctggaaggacggcgccacgtccgcacacttccagg

SEQ ID NO: 316967 - DNA, 120 bp, Artificial Sequence
  ENSG00000135119_13 (sequence is synthesized)
tgtactaggaccgaacactgaggacacccagaaggacgccaagggtcagcatgcccggacccagccctgcgggggcttcctgagaaacaggcctcaagcacttacatcctgcctcttgcc

SEQ ID NO: 316968 - DNA, 120 bp, Artificial Sequence
  ENSG00000135119_14 (sequence is synthesized)
ctccaccacctctgaccccaaagtcccgcccctgtcttgtccttctgaccttcatcttcctctctcgttctgtggtatagtgcgtgcctccttcccctgcaaaaggggacgtcttcctaa

SEQ ID NO: 316969 - DNA, 120 bp, Artificial Sequence
  ENSG00000135119_15 (sequence is synthesized)
ctcagacttgatgcccttctagatgcatcttccttctccactccaagtcaaggacctggcaatacatgaagttcccacttgttggttattttctctttcttttttcttttcttttctttc

SEQ ID NO: 316970 - DNA, 66 bp, Artificial Sequence
  ENSG00000135119_16 (sequence is synthesized)
tctctctctgtttccctccctccctccttccttccttccttccttttttttttttttttaaaacaa

SEQ ID NO: 316971 - DNA, 76 bp, Artificial Sequence
  ENSG00000135119_17 (sequence is synthesized)
acaggcatgagccaccgtgcccaggtcttcacccaggctggagtgcagttggcacaatcacagctcactgcaacct

SEQ ID NO: 316972 - DNA, 90 bp, Artificial Sequence
  ENSG00000135119_18 (sequence is synthesized)
ttttttttttgagacagggtctgggtcttcacccaggctggagtgcagtactcctgggcccaagccatcctcccgcctcagcctcccaag

SEQ ID NO: 316973 - DNA, 83 bp, Artificial Sequence
  ENSG00000135119_19 (sequence is synthesized)
tatgttgtccagggctggcctcgcaaagtgctgagtgctggaattacaggtatgagcccctgtgcccagcccacctgctggtt

SEQ ID NO: 316974 - DNA, 120 bp, Artificial Sequence
  ENSG00000135119_20 (sequence is synthesized)
ttacaggtatgagcccctgtgcccagcccacctgctggttattttaacttagtacctagtacctaggacttgatggtgcaggctggggaggagcctagagatcactgcctcccagatagc

SEQ ID NO: 316975 - DNA, 78 bp, Artificial Sequence
  ENSG00000135119_21 (sequence is synthesized)
ggctggggaggagcctagagatcactgcctcccagatagcccaggcctgcagattagaatccctgtgagccctgtgaa

SEQ ID NO: 316976 - DNA, 120 bp, Artificial Sequence
  ENSG00000135119_22 (sequence is synthesized)
acacctggcccaaagtattttcaaaatacagttgttgggccccaccatatacctgtaatgacttaaggtcccaaatacttcatgcgcagcaggcaaagcatgcagcatcctgcttggatt

SEQ ID NO: 316977 - DNA, 120 bp, Artificial Sequence
  ENSG00000135119_23 (sequence is synthesized)
acgtgctgtcatcctcacaacagccctgtgatgggggaggtactgttgggtcccctgttttatagatgaggaaacttgggcacagagcttggtgcggtaactttcccagggtcacccagc

SEQ ID NO: 316978 - DNA, 120 bp, Artificial Sequence
  ENSG00000135119_24 (sequence is synthesized)
cagcatgggcgggccaagtttccaacagaggcctggtacagtttcagaacccacatctaaaaaaaaataaatttattagagatgaggtttctaataaaaatccaggttgtccaggctaga

SEQ ID NO: 316979 - DNA, 120 bp, Artificial Sequence
  ENSG00000135119_25 (sequence is synthesized)
tgatcctccctcctcagcctcccaagcagctgcaactacaggcacactccgctatccccagcagagcccgcactcttaacctccgcactgctctgcccctcagacattccaggcatgggg

SEQ ID NO: 316980 - DNA, 120 bp, Artificial Sequence
  ENSG00000135119_26 (sequence is synthesized)
cagacattccaggcatggggcccagcagacacggtcttctaaaagcacacgagaggccgggtgtggtggcccatgcctgtagtgccagcattttgggaggctgaagcaggcgggtcacct

SEQ ID NO: 316981 - DNA, 68 bp, Artificial Sequence
  ENSG00000135119_27 (sequence is synthesized)
ccagcattttgggaggctgaagcaggcggctctttactaaaaaatacaaaaattagccgggcgcggtg

SEQ ID NO: 316982 - DNA, 85 bp, Artificial Sequence
  ENSG00000135119_28 (sequence is synthesized)
ccagctactcaggaggctaaggcagggagaactgcttgaactcgggaggtgaaaacctgggtgacagagtgagtgagactctgtc

SEQ ID NO: 316983 - DNA, 120 bp, Artificial Sequence
  ENSG00000135119_29 (sequence is synthesized)
actgaggacacccagaaggacgccaaggattcaggacatttgcccctgtgtgccaccaaaccaggactttccccttggcttggcatccctggctctctcctggtacccagcaagacgtct

SEQ ID NO: 316984 - DNA, 120 bp, Artificial Sequence
  ENSG00000135119_30 (sequence is synthesized)
gttccagggcagtgtagcatctttcaagctccgttactatggcgatggccatgatgttacaatcccacttgcctgaataatcaagtgggaaggggaagcagagggaaatggggccatgtg

SEQ ID NO: 316985 - DNA, 120 bp, Artificial Sequence
  ENSG00000135119_31 (sequence is synthesized)
aatgcagctgctctgttctccctaccctgaggaaaaaccaaagggaagcaacaggaacttctgcaactggtttttatcggaaagatcatcctgcctgcagatgctgttgaaggggcacaa

SEQ ID NO: 316986 - DNA, 120 bp, Artificial Sequence
  ENSG00000135119_32 (sequence is synthesized)
gaaattggagctggagaagattgatgaaagtgcaggtgtgtaaggaaatagaacagtctgctgggagtcagacctggaattctgattccaaactctttattactttgggaagtcactcag

SEQ ID NO: 316987 - DNA, 120 bp, Artificial Sequence
  ENSG00000135119_33 (sequence is synthesized)
cctccctgtagccatctccagggtgacggaacccagtgtattacctgctggaaccaaggaaactaacaatgtaggttactagtgaataccccaatggtttctccaattatgcccatgcca

SEQ ID NO: 316988 - DNA, 120 bp, Artificial Sequence
  ENSG00000135119_34 (sequence is synthesized)
ccaaaacaataaaacaaaattctctaacactgcaaagagtgagccatgcctgttaacactgtaaagaatgtaacatgtgggggacacacaggggcagatgggatggtttagtttaggatt

SEQ ID NO: 316989 - DNA, 120 bp, Artificial Sequence
  ENSG00000135119_35 (sequence is synthesized)
ttattagtgcatgccctaccctctgggggaacgtcccatctgaggttttcttctcggtggggggatttaacttctgtcctagggaaaacagtgtctgatgaggagtgtttccaacacagg

SEQ ID NO: 316990 - DNA, 120 bp, Artificial Sequence
  ENSG00000135119_36 (sequence is synthesized)
ctacatgaattcccctataccagtgcgaaagcagccaggagtccccgttggaaaagaacaatgccactctcttttatgtatcttggttctgcaactcatttgttgtaagtagggttaatc

SEQ ID NO: 316991 - DNA, 120 bp, Artificial Sequence
  ENSG00000135119_37 (sequence is synthesized)
gagtatcaggttcacagtatcctgcccttattattttatgattcactgactcaagttccacgaagtccttagaaatggacctcttcatgtaaaatatcttgagaataataaatgtgaggg

SEQ ID NO: 316992 - DNA, 120 bp, Artificial Sequence
  ENSG00000135119_38 (sequence is synthesized)
aataagaaaggcaagctttggacacagatatgataggtgcatcagcttcggaagagaagaatgatgtgcagagtgttaggaagacatccgggctgctgagactcgggattagaagaaaga

SEQ ID NO: 316993 - DNA, 120 bp, Artificial Sequence
  ENSG00000135119_39 (sequence is synthesized)
gaggtaaataaagtgggtcctggaatcttttaggacttctgctgtaggacaaacagctgcctttggtgttttaatgtctcccaaagtacccttcagccaataaataccatctgttggtgc

SEQ ID NO: 316994 - DNA, 120 bp, Artificial Sequence
  ENSG00000135119_40 (sequence is synthesized)
agcaacacggataacattccacctgaaagctgtgaccaaggctggcccctctggggaactgggggccattgaacttgaagactgcagagccagcggtccttgggatcccgagaaaccgca

SEQ ID NO: 316995 - DNA, 120 bp, Artificial Sequence
  ENSG00000135119_41 (sequence is synthesized)
ccactccacccctcccatgtaacacatggggaatctgaacccacagaggggttactgatttgtctagggtcacagcaagttagcagcagcatcaacccagaatccatgtctcctgccagt

SEQ ID NO: 316996 - DNA, 120 bp, Artificial Sequence
  ENSG00000135119_42 (sequence is synthesized)
ccgctgcccacttcacttcatccagcacctcttggctgcacagtttaccgcgttatcctctcacatgaggactttctccacctctgagtctcatcgtcctcctctgtgaaatggggtgat

SEQ ID NO: 316997 - DNA, 87 bp, Artificial Sequence
  ENSG00000135119_43 (sequence is synthesized)
gaaagaaaggtcagctttggcccagatgtggttaccccttggtctcctgtctttatgtctttctcctcttcctattctgtcatctcc

SEQ ID NO: 316998 - DNA, 120 bp, Artificial Sequence
  ENSG00000135119_44 (sequence is synthesized)
tcctcttcctattctgtcatctccctcacttaagtctcaggcctgtcagcagctcctgtggacattgccatcccctctggtagccttcagagcaaacaggacaacctatgttatggatgt

SEQ ID NO: 316999 - DNA, 120 bp, Artificial Sequence
  ENSG00000135119_45 (sequence is synthesized)
ttccaccaaccagggtagtggcatggagcaccgtaaccatctgtgcttctgtgatctctatgacagagccacttctccacctctgaaatgttccctgctctgaaatctggcatgagatgg

SEQ ID NO: 317000 - DNA, 120 bp, Artificial Sequence
  ENSG00000135119_46 (sequence is synthesized)
cacaggtgaccacgcagaagccaccagaatcttgcctgccctattcctcctcccaagtctgttctcttattgtcaacctcagcacaacaggctggcgccaatggcattacagagaaagca

SEQ ID NO: 317001 - DNA, 120 bp, Artificial Sequence
  ENSG00000135119_47 (sequence is synthesized)
atctgtgtggctagtgggcagattaccatgcaagccccaggagaaatggaggagctttgtagccacctcgctgtcagccagtattaacatgtccccttccccctgccccgccgtagattc

SEQ ID NO: 317002 - DNA, 120 bp, Artificial Sequence
  ENSG00000135119_48 (sequence is synthesized)
aaagggggcggacaatcgcgtgagtgctgcgggcgtagctgtgcccgggtcctagcgccggacccggcgacgccaagaaaccacccaataggaggccggaagcatcggaagtcacatgct

SEQ ID NO: 317003 - DNA, 120 bp, Artificial Sequence
  ENSG00000135119_49 (sequence is synthesized)
gctgaattgtctgggcagggatgaaaagcgctcgcgacgttgttcccgaagtgcacctgccggcttccagtccaagtgatgcaggcgatgctcctctgagtgcatttcggtgcagtcctg

SEQ ID NO: 317004 - DNA, 120 bp, Artificial Sequence
  ENSG00000135119_50 (sequence is synthesized)
taacgggccccaggggcgcaacttgaaccatcgcaagcatcgaaaagtctcggtgcggtccttcaaagggacatagtgggatgtacagagcagaggattaaaaagcgtttcattcattca

SEQ ID NO: 317005 - DNA, 120 bp, Artificial Sequence
  ENSG00000135124_0 (sequence is synthesized)
gctgggatgacaggtgtgagccaccgcccccggcccctcgcccgccttttgaaggagcctttcgtcctcaagggcgaggccactccccccccgcgagttccatgccccctagagggtcat

SEQ ID NO: 317006 - DNA, 120 bp, Artificial Sequence
  ENSG00000135124_1 (sequence is synthesized)
ctagagggtcatcgttcccgacggggaggtggcgccctcccccgggccccgggccccgaccgcccgtgctgcctccttccgggccctcctccgcgatgacggcgccgccagcaggccagg

SEQ ID NO: 317007 - DNA, 120 bp, Artificial Sequence
  ENSG00000135124_2 (sequence is synthesized)
ctgggcggggctccgagcggggactgggacccagaccgactaggggactgggagcgggcggcgcggccatggcgggctgctgcgccgcgctggcggccttcctgttcgagtacgacacgc

SEQ ID NO: 317008 - DNA, 120 bp, Artificial Sequence
  ENSG00000135124_3 (sequence is synthesized)
cgcgcatcgtgctcatccgcagccgcaaagtggggctcatgaaccgcgccgtgcaactgctcatcctggcctacgtcatcgggtgggtgtttgtgtgggaaaagggctaccaggaaactg

SEQ ID NO: 317009 - DNA, 120 bp, Artificial Sequence
  ENSG00000135124_4 (sequence is synthesized)
actccgtggtcagctccgttacgaccaaggtcaagggcgtggctgtgaccaacacttctaaacttggattccggatctgggatgtggcggattatgtgataccagctcaggaggaaaact

SEQ ID NO: 317010 - DNA, 120 bp, Artificial Sequence
  ENSG00000135124_5 (sequence is synthesized)
ccctcttcgtcatgaccaacgtgatcctcaccatgaaccagacacagggcctgtgccccgagattccagatgcgaccactgtgtgtaaatcagatgccagctgtactgccggctctgccg

SEQ ID NO: 317011 - DNA, 120 bp, Artificial Sequence
  ENSG00000135124_6 (sequence is synthesized)
gcacccacagcaacggagtctcaacaggcaggtgcgtagctttcaacgggtctgtcaagacgtgtgaggtggcggcctggtgcccggtggaggatgacacacacgtgccacaacctgctt

SEQ ID NO: 317012 - DNA, 120 bp, Artificial Sequence
  ENSG00000135124_7 (sequence is synthesized)
ttttaaaggctgcagaaaacttcactcttttggttaagaacaacatctggtatcccaaatttaatttcagcaagaggaatatccttcccaacatcaccactacttacctcaagtcgtgca

SEQ ID NO: 317013 - DNA, 120 bp, Artificial Sequence
  ENSG00000135124_8 (sequence is synthesized)
ccaggtcaactgggactgcaacctggacagagccgcctccctctgcttgcccaggtactccttccgccgcctcgatacacgggacgttgagcacaacgtatctcctggctacaatttcag

SEQ ID NO: 317014 - DNA, 120 bp, Artificial Sequence
  ENSG00000135124_9 (sequence is synthesized)
gtttgccaagtactacagagacctggctggcaacgagcagcgcacgctcatcaaggcctatggcatccgcttcgacatcattgtgtttgggaaggcagggaaatttgacatcatccccac

SEQ ID NO: 317015 - DNA, 120 bp, Artificial Sequence
  ENSG00000135124_10 (sequence is synthesized)
tatgatcaacatcggctctggcctggcactgctaggcatggcgaccgtgctgtgtgacatcatagtcctctactgcatgaagaaaagactctactatcgggagaagaaatataaatatgt

SEQ ID NO: 317016 - DNA, 120 bp, Artificial Sequence
  ENSG00000135124_11 (sequence is synthesized)
ggaagattacgagcagggtcttgctagtgagctggaccagtgaggcctaccccacacctgggctctccacagccccatcaaagaacagagaggaggaggagggagaaatggccaccacat

SEQ ID NO: 317017 - DNA, 120 bp, Artificial Sequence
  ENSG00000135124_12 (sequence is synthesized)
caccccagagaaatttctggaatctgattgagtctccactccacaagcactcagggttccccagcagctcctgtgtgttgtgtgcaggatctgtttgcccactcggcccaggaggtcagc

SEQ ID NO: 317018 - DNA, 120 bp, Artificial Sequence
  ENSG00000135124_13 (sequence is synthesized)
agtctgttcttggctgggtcaactctgcttttcccgcaacctggggttgtcgggggagcgctggcccgacgcagtggcactgctgtggctttcagggctggagctggctttgctcagaag

SEQ ID NO: 317019 - DNA, 120 bp, Artificial Sequence
  ENSG00000135124_14 (sequence is synthesized)
cctcctgtctccagctctctccaggacaggcccagtcctctgaggcacggcggctctgttcaagcactttatgcggcaggggaggccgcctggctgcagtcactagacttgtagcaggcc

SEQ ID NO: 317020 - DNA, 120 bp, Artificial Sequence
  ENSG00000135124_15 (sequence is synthesized)
tgggctgcaggcttccccccgaccattccctgcagccatgcggcagagctggcatttctcctcagagaagcgctgtgctaaggtgatcgaggaccagacattaaagcgtgattttcttaa

SEQ ID NO: 317021 - DNA, 120 bp, Artificial Sequence
  ENSG00000135124_16 (sequence is synthesized)
gcaggacacagtttccaggacatggccgtggaggtgggtgcgggccctggctctcctgacccagccctggaggcgtctcgtgccaggtgctgaggaaagccttgccgtgtctctgctgct

SEQ ID NO: 317022 - DNA, 120 bp, Artificial Sequence
  ENSG00000135124_17 (sequence is synthesized)
cctgatccatcctccttcccctcaggtttgccaagtactacagagacctggctggcaacgagcagcgcacgctcatcaaggcctatggcatccgcttcgacatcattgtgtttgggaagg

SEQ ID NO: 317023 - DNA, 120 bp, Artificial Sequence
  ENSG00000135124_18 (sequence is synthesized)
atgatcaacatcggctctggcctggcactgctaggcatggtgagtggtttaggccctgccttcaccctcacggtgaggtgagaccctgggctggggtcctggtcctggccctaggcccta

SEQ ID NO: 317024 - DNA, 120 bp, Artificial Sequence
  ENSG00000135124_19 (sequence is synthesized)
gacctcagatgtgtttctaaacttgaccctcctaccttctttcccttggcccccagccctcctcccaccttcccttctccaagaccacccccctcaggtcccagccttctcccaagagat

SEQ ID NO: 317025 - DNA, 120 bp, Artificial Sequence
  ENSG00000135124_20 (sequence is synthesized)
gggagtgcctttccattccggtaaagattccaggcttctcaggaaggggcacgcaaagaataagatgggttgatgggttgcaagcatcctggctcactctcaccctatgctaaactcagg

SEQ ID NO: 317026 - DNA, 63 bp, Artificial Sequence
  ENSG00000135124_21 (sequence is synthesized)
tttgtttttttgtttttttgagccagagtctcgctctgtcacccaacaattctcctgcctcag

SEQ ID NO: 317027 - DNA, 120 bp, Artificial Sequence
  ENSG00000135124_22 (sequence is synthesized)
tggcatcaccctggctgagatgtggctggcacacaggtaactgtcttcctccgattctaactcctggacagtgacactgtctaaatcccagatttgcacagctcaagactggctgcatgg

SEQ ID NO: 317028 - DNA, 120 bp, Artificial Sequence
  ENSG00000135124_23 (sequence is synthesized)
cctggggagggcggcccctgagcagatcgcccccactgtggagcgtctctgatagagaaatcttcccaattccttcacatgaccctgggtgagccaggtgccgaggctggggtcctggag

SEQ ID NO: 317029 - DNA, 120 bp, Artificial Sequence
  ENSG00000135124_24 (sequence is synthesized)
gtgagccaggtgccgaggctggggtcctggagcccctctacattcactgctgtcattggagccccacaagccatcccagctcttgccctactgtttttttttttgttgttgttgttgttt

SEQ ID NO: 317030 - DNA, 120 bp, Artificial Sequence
  ENSG00000135124_25 (sequence is synthesized)
ggagccctgggcgtgggcctgtctggggaggcccttctgcagaggctggcaccagtgtggcgtggtgtccccgttaacccgggcagtcctgccactctcagcagctgctccatccctagg

SEQ ID NO: 317031 - DNA, 120 bp, Artificial Sequence
  ENSG00000135124_26 (sequence is synthesized)
cccctgtactagattgactctttaaacccagcctcgtttcaatgagcgacatctcaggttggtgatgataatgcatgctctgagaatgcctgtgggcacacactacttcagtgcaccttg

SEQ ID NO: 317032 - DNA, 120 bp, Artificial Sequence
  ENSG00000135124_27 (sequence is synthesized)
cggaacaggaagggttgggttccaggcctgggaccaacttgagaacccctggcggtgaagtcccaggagcgcacctccctcccgcctgccacaaggggtcccaggggcaccttgatctgc

SEQ ID NO: 317033 - DNA, 120 bp, Artificial Sequence
  ENSG00000135124_28 (sequence is synthesized)
tgaactcacatccctggttggacctgaagcatttgggggcaggagctcccctgcagctttttgcttttggcgtttgctgctagtgggaggatcagtgcacatctaccttagggtacctgt

SEQ ID NO: 317034 - DNA, 120 bp, Artificial Sequence
  ENSG00000135124_29 (sequence is synthesized)
aaaattacaactgcggaaaatatccatagtggtgttgcactgtatggtagccactagtaacttgcacctgttgaacacttaaccgttcctactctacactgagatgtgctataaccttaa

SEQ ID NO: 317035 - DNA, 120 bp, Artificial Sequence
  ENSG00000135124_30 (sequence is synthesized)
gagatgtgctataaccttaaaatacacactggatttcaaagacatagtacagaaaaagaggctgggcacagtggctcatgcctgaaatcacagtactttgggaggctgaggtgggaagat

SEQ ID NO: 317036 - DNA, 81 bp, Artificial Sequence
  ENSG00000135124_31 (sequence is synthesized)
ataggcctacctatttgggaggttgaggcagaaggactgcttgaacctgggaggttgaggccacagagagctgtgatcaca

SEQ ID NO: 317037 - DNA, 84 bp, Artificial Sequence
  ENSG00000135124_32 (sequence is synthesized)
taggcctacctatttgggaggttgaggcagaaggactgcttgaacctgggaggttgaggccacagagagctgtgatcacaccac

SEQ ID NO: 317038 - DNA, 120 bp, Artificial Sequence
  ENSG00000135124_33 (sequence is synthesized)
attgatgacatgttaaaatattttggatatattgggttacacagaatatatcattacaattaatttttcctgtctcttttttctttttttctttttaaacggcgccttgctttgtcaccc

SEQ ID NO: 317039 - DNA, 120 bp, Artificial Sequence
  ENSG00000135124_34 (sequence is synthesized)
cctctgcctcccaggctcaagtgattctaccatctcagcctctggaattatgggactacaggtgcacaccaccatgactggctaattattgtgtttttgtttgtttgtttgtacagatga

SEQ ID NO: 317040 - DNA, 120 bp, Artificial Sequence
  ENSG00000135124_35 (sequence is synthesized)
tacaggtgcacaccaccatgactggctaattattgtgtttttgtttgtttgtttgtacagatgagaaatctcatctctacaatcatgaggtttccatgttgcccaggctggtctcgaact

SEQ ID NO: 317041 - DNA, 120 bp, Artificial Sequence
  ENSG00000135124_36 (sequence is synthesized)
ggcatgagccaccgtgcccagccctttctatttctttttactttttgacatggctactagaaacttttaaattacagggtcttgccctgtggtagctcacgcctgtaatcccaatacttt

SEQ ID NO: 317042 - DNA, 120 bp, Artificial Sequence
  ENSG00000135124_37 (sequence is synthesized)
tcccaatactttgggaggctgaggcaagtggatcccttgagcttaggaattttgagaccagcctgggcaacgtagtgaaaccccatctctaccaaaaatacgaaaaattagcttggcata

SEQ ID NO: 317043 - DNA, 84 bp, Artificial Sequence
  ENSG00000135124_38 (sequence is synthesized)
ccccatctctaccaaaaatacgaaaaattagcttggcatagtggcgcacacctgtggagtagcctgggaggcggaggttgcagt

SEQ ID NO: 317044 - DNA, 120 bp, Artificial Sequence
  ENSG00000135124_39 (sequence is synthesized)
agcgagagcctgtctcaaaaaaaaaaatatgtggctcgcgttatgtttttatgggacagcgcagctctgtaggattccttatgacgcattcactatctcggtcatgagaatctttaaagc

SEQ ID NO: 317045 - DNA, 120 bp, Artificial Sequence
  ENSG00000135124_40 (sequence is synthesized)
agtaaatgctttgcttttgtccgtcttgctataatcaaaactgactcaggacctgcattaaggctctttttttttttaacctcatctcttaactttttgatgcaactcatcttagtgaaa

SEQ ID NO: 317046 - DNA, 120 bp, Artificial Sequence
  ENSG00000135124_41 (sequence is synthesized)
ttgtggtctcctcctacagcaaccctccctcaaaaaaagaccgaacacgcaattctcatctatctaactctgttaacaatcatatgaggaggaaataatcacatgataatgagtggcatg

SEQ ID NO: 317047 - DNA, 120 bp, Artificial Sequence
  ENSG00000135124_42 (sequence is synthesized)
aaaccctgtgtctctaaattaagcaactcactgtacttgatgagtacatcagtcttcctgccccaagcttttgtgtgtcagactggaattaaatggaagcttacactgcagctgaattcc

SEQ ID NO: 317048 - DNA, 120 bp, Artificial Sequence
  ENSG00000135124_43 (sequence is synthesized)
tagaagccctggacttgtcaggggaaaagcccatggggggaaagcccatctctaggctgggcaatgaacttggagactgctcgatcacacacactcataagtaacaaaaccattaatttc

SEQ ID NO: 317049 - DNA, 60 bp, Artificial Sequence
  ENSG00000135124_44 (sequence is synthesized)
tcgatcacacacactcataagtaacaaaaccattaatttcttttcttttttttggtggag

SEQ ID NO: 317050 - DNA, 72 bp, Artificial Sequence
  ENSG00000135124_45 (sequence is synthesized)
agctaattttgtgtatttttagtagagtcaaaaccagtgaatttctgaagtctcagcatctaggacttagaa

SEQ ID NO: 317051 - DNA, 120 bp, Artificial Sequence
  ENSG00000135124_46 (sequence is synthesized)
accagtgaatttctgaagtctcagcatctaggacttagaagaaggagaagcctagcatttcctgattctataaataacaacactgatagtctctagtagatgtttaacagcagttcgaag

SEQ ID NO: 317052 - DNA, 120 bp, Artificial Sequence
  ENSG00000135124_47 (sequence is synthesized)
ctacattaattcttttaccctcacaagaatcctgtgaagatctactatcattcccagattatagatgggaaaaactgaggcacaatgaggttaagcaccttggccaaagttatgcctcgt

SEQ ID NO: 317053 - DNA, 120 bp, Artificial Sequence
  ENSG00000135124_48 (sequence is synthesized)
caaagttatgcctcgtgaatggtggagctgagccatgaaccaagacctctgcctccagtctgtcctaacccctataagctaatgcctgtagatggttttttttttttttttttttttgag

SEQ ID NO: 317054 - DNA, 78 bp, Artificial Sequence
  ENSG00000135124_49 (sequence is synthesized)
tttttttttttttgagacagagccttgccctgtcgcccaggctggagtgcggtggcatcacagctcactgcagcctcc

SEQ ID NO: 317055 - DNA, 120 bp, Artificial Sequence
  ENSG00000135124_50 (sequence is synthesized)
gtaggattccttatgacgtattcactgtctcagtcacgagaatctttaaagcagtaaatgctttgcttttgtccatcttgctataatcaaaactgaccatgcccggctaattttttattt

SEQ ID NO: 317056 - DNA, 120 bp, Artificial Sequence
  ENSG00000135124_51 (sequence is synthesized)
ctgaccatgcccggctaattttttattttttgtagagatccctatgttgcccaggcttgtctcgagctcttgggcacaaatgatcttccccccttgacctcccaaagttctgggattaca

SEQ ID NO: 317057 - DNA, 120 bp, Artificial Sequence
  ENSG00000135124_52 (sequence is synthesized)
ggatttttaattgttcaaactggtagtcatagtcccacttcagaggagagaaccatatatgtgaccagaattcttgggggaaaagtaagaaactactcttaaaagttccttaaagggtag

SEQ ID NO: 317058 - DNA, 120 bp, Artificial Sequence
  ENSG00000135124_53 (sequence is synthesized)
aattctcttttctagaaagagtagcctagggttgtccaatcttttggctttcgtgggccacactggaaggagaaattatcttgggccacacattaaatatgctaacactaacaatagctg

SEQ ID NO: 317059 - DNA, 88 bp, Artificial Sequence
  ENSG00000135124_54 (sequence is synthesized)
aatctcataacctcattcaaagccatcctgggccgcatgcggcctgtgtgctatgggttagacaagcttagagtagagcatagtgggt

SEQ ID NO: 317060 - DNA, 120 bp, Artificial Sequence
  ENSG00000135124_55 (sequence is synthesized)
tgctatgggttagacaagcttagagtagagcatagtgggtgagagaagaggcttcagatgcttctggcttgagttcaaatcctgactctgccactcactagctgtgtgacctttggcaag

SEQ ID NO: 317061 - DNA, 120 bp, Artificial Sequence
  ENSG00000135124_56 (sequence is synthesized)
tgacttaacctctctgtgtttccatttcctcctctgtaaaatggaaataataataatgatacctgtctcataaagtggtcaggattaaatgagttaatacatataaagagcttagatcag

SEQ ID NO: 317062 - DNA, 120 bp, Artificial Sequence
  ENSG00000135124_57 (sequence is synthesized)
tcagtgcctggtgcctataaacactccagtggtaactgttataatttgtattatctcttggtgattcccataggtcacaggcattgaaagtgctcaaagggccaggtgcagtggctcacg

SEQ ID NO: 317063 - DNA, 120 bp, Artificial Sequence
  ENSG00000135124_58 (sequence is synthesized)
gagcgaaacatcgtctcaaaaaaaaaaaaagagaaaatgctcaaatgtaataaagacagtattcatcgagcgttttctctgtgccatcagtgtgctgagtgctttacctgcaccatctca

SEQ ID NO: 317064 - DNA, 120 bp, Artificial Sequence
  ENSG00000135124_59 (sequence is synthesized)
tttatttcccgcaaaccctcctgtggtttaggtgctaccatccccatttggcagaagtggaaatggagtcccctagaaggtacgtagcttgtagaaagtcatgtaattagtcaacatcgt

SEQ ID NO: 317065 - DNA, 120 bp, Artificial Sequence
  ENSG00000135124_60 (sequence is synthesized)
acttccagccactggccagcagaagcttccccatcaattcaaatccattgaatcctaatggcaatttaagaggcctgttttattttataggtgggtgtttgtgtgggaaaagggctacca

SEQ ID NO: 317066 - DNA, 120 bp, Artificial Sequence
  ENSG00000135127_0 (sequence is synthesized)
atgtccgctttctgcctgggcttggtcggccgcgcttcagcacccgccgagccggacagcgcctgctgcatggagctgcccgccgcggccggggacgcagtccggagtcccgccgccgcc

SEQ ID NO: 317067 - DNA, 120 bp, Artificial Sequence
  ENSG00000135127_1 (sequence is synthesized)
gccgccctcatcttccccgggggctccggggagctagaactggcgttagaggaggagctggcgctgctggcggccggggagcggccgtccgaccccggggaacaccctcaggccgagcct

SEQ ID NO: 317068 - DNA, 120 bp, Artificial Sequence
  ENSG00000135127_2 (sequence is synthesized)
gggtctctggccgagggggccggaccgcagccgccgccctcccaggaccccgagctgctgtcggtgatccgacagaaggagaaggatctggtgttggcggcccggctgggtaaggcgctg

SEQ ID NO: 317069 - DNA, 120 bp, Artificial Sequence
  ENSG00000135127_3 (sequence is synthesized)
ctcgagaggaaccaggacatgagccggcagtacgagcagatgcataaggagctgacagacaagctcgagcacttagagcaagagaaacatgaattgagaagacgatttgagaaccgagaa

SEQ ID NO: 317070 - DNA, 120 bp, Artificial Sequence
  ENSG00000135127_4 (sequence is synthesized)
ggggagtgggaaggccgagtgtcagagctggagagtgatgtgaagcagctacaggatgagttggagaggcagcagattcatctgcgggaagcagatcgagaaaaatcacgggctgtccag

SEQ ID NO: 317071 - DNA, 120 bp, Artificial Sequence
  ENSG00000135127_5 (sequence is synthesized)
gaactgtcggaacagaaccaaaggctattggatcagctcagcagggcatcagaagttgagagacaactctccatgcaggtccacgccctcagagaagactttcgggagaaaaactcatca

SEQ ID NO: 317072 - DNA, 120 bp, Artificial Sequence
  ENSG00000135127_6 (sequence is synthesized)
accaaccagcacattatccggctggagagccttcaggccgagatcaagatgctgtcagatcggaaacgggagctggagcatcgtctcagcgctactttagaggaaaatgacctgctccaa

SEQ ID NO: 317073 - DNA, 120 bp, Artificial Sequence
  ENSG00000135127_7 (sequence is synthesized)
gggaccgtggaggagctacaggaccgggtgctaatcctggagaggcagggccatgacaaggacctacagctgcaccaaagccagctggagcttcaggaggtgcgtctctcctgccgacag

SEQ ID NO: 317074 - DNA, 120 bp, Artificial Sequence
  ENSG00000135127_8 (sequence is synthesized)
ctgcaggtgaaggtggaagaactcactgaggagaggagtctgcagagctctgccgccaccagcacatccctcctgtcagagatcgagcagagcatggaggctgaggagctggagcaggag

SEQ ID NO: 317075 - DNA, 120 bp, Artificial Sequence
  ENSG00000135127_9 (sequence is synthesized)
cgagagcagctgagactgcagctctgggaagcctactgccaggttcgctatctgtgctcacaccttcgaggcaatgacagtgctgactcagccgtctccacggactcctccatggacgag

SEQ ID NO: 317076 - DNA, 120 bp, Artificial Sequence
  ENSG00000135127_10 (sequence is synthesized)
tcttcagaaacctcgtccgccaaggatgtgccagccggcagcttgcgcactgccctcaatgagctcaagagactgatacagagcattgtggatggcatggagcccacggtgacactgctg

SEQ ID NO: 317077 - DNA, 120 bp, Artificial Sequence
  ENSG00000135127_11 (sequence is synthesized)
agtgtggagatgactgccctaaaagaggagagagaccgactcagagtcacttctgaggacaaggagccaaaggagcagcttcagaaggccatcagggaccgcgacgaggccattgcaaag

SEQ ID NO: 317078 - DNA, 120 bp, Artificial Sequence
  ENSG00000135127_12 (sequence is synthesized)
acagccagttgctggatgccattcagcagaaactgaacctctcgcagcagctggaagcttggcaggatgacatgcacagggtcattgaccggcagctgatggacacgcacctgaaagaac

SEQ ID NO: 317079 - DNA, 120 bp, Artificial Sequence
  ENSG00000135127_13 (sequence is synthesized)
ggagccagccggctgctgccctctgcaggggccacagcgctgggcggggggatgagcccagcatcgctgaaggcaaacgactcttctcattcttcaggaaaatttaagttgggaggagtc

SEQ ID NO: 317080 - DNA, 120 bp, Artificial Sequence
  ENSG00000135127_14 (sequence is synthesized)
aggccaccaaagatgggtggactggaggcagctggaaaggcggtgcaggcaaggcctcccctgcagcttgcacctcagcagctgccctgcccctcatgctagggccccatgggtccggga

SEQ ID NO: 317081 - DNA, 120 bp, Artificial Sequence
  ENSG00000135127_15 (sequence is synthesized)
gggcctgctccctttcgtcggtggggatggagacctagaggtgggggcctgccttggccactgaaggcttcccttggcccaccgcctggccaagcccacgcctgggcttctccaggacca

SEQ ID NO: 317082 - DNA, 120 bp, Artificial Sequence
  ENSG00000135127_16 (sequence is synthesized)
cgtgcttgagcagggttaggccacctcccagaggggccccttggtgttgggctttgcagctcacacccaacagatcgcagcccacccccaggcactgctgcctccttgattttagcaaat

SEQ ID NO: 317083 - DNA, 120 bp, Artificial Sequence
  ENSG00000135127_17 (sequence is synthesized)
ggggaacagaaggaatggaggcccttctctgcatgcctcaggaggcctgagccccaggggcctagacctgtgggggcagcgggccaggcctgagcctccattccttccccagcccctggc

SEQ ID NO: 317084 - DNA, 120 bp, Artificial Sequence
  ENSG00000135127_18 (sequence is synthesized)
ccagggtcaaaggagagatggcagcccctcccccgcatgcatgcacctcagctggcaggaggccaagcctctggccgcagggtctaagagccggggcttacccaagctcagctgaggcca

SEQ ID NO: 317085 - DNA, 120 bp, Artificial Sequence
  ENSG00000135127_19 (sequence is synthesized)
cccgagccccagggaggaagaaggccctgtccccctgtcgccactgctctccctcccagccttcagtctctgccccttagcagggcctggccaggcagagtgttatcaccagtcatctgc

SEQ ID NO: 317086 - DNA, 120 bp, Artificial Sequence
  ENSG00000135127_20 (sequence is synthesized)
aggctttagccatccagccctttcccctgctcagggctggggttggacggggtctcctcctcccacagctccctcctccacccctcacatacatacataatttcttggcctagccaaaca

SEQ ID NO: 317087 - DNA, 120 bp, Artificial Sequence
  ENSG00000135127_21 (sequence is synthesized)
agtccaggccactgaatggcaccagaggggtctgtggtcagccaccccaccttgagggcagcacaggcaccacggggtggaggggagggggaggctgccggaagcctccagatgctgcct

SEQ ID NO: 317088 - DNA, 120 bp, Artificial Sequence
  ENSG00000135127_22 (sequence is synthesized)
gcctgcctgcagaagcctgcagtggctgctgctcctgcctctgcagccgcccctcctcctccacccaggccccaactcagaggctccgcggcccggccagccctcagctgctcacaaccg

SEQ ID NO: 317089 - DNA, 120 bp, Artificial Sequence
  ENSG00000135127_23 (sequence is synthesized)
attcagtctccctccctccctcacgtggggaaagcacagcagggatgcgcggcaagaatgtacctgtagatgtgtacataccacagtgctgtaattttgtatgtagcaatcatgtaaata

SEQ ID NO: 317090 - DNA, 120 bp, Artificial Sequence
  ENSG00000135127_24 (sequence is synthesized)
catgtatggattttataatatacatatataaaaatctataaaggcatatttttagaaaaacagcacaccactgcttcttttgaaaatagtctgaataagaataaaatgaatttctacaga

SEQ ID NO: 317091 - DNA, 120 bp, Artificial Sequence
  ENSG00000135127_25 (sequence is synthesized)
tgttggtgaccattcctcccagggccccatggggctggcagccagaacactggccccaccgcagggtgcccgtccctggctccttggctcctgcatggcagccagctggccgcgccctgg

SEQ ID NO: 317092 - DNA, 120 bp, Artificial Sequence
  ENSG00000135127_26 (sequence is synthesized)
ctgaccgctgctctctctcttctctcccggctacagtttgcttcctcagggctttttactatctggctcctttggtttctgatctagtggcctttctcagttcccgtatcaacagcttta

SEQ ID NO: 317093 - DNA, 120 bp, Artificial Sequence
  ENSG00000135127_27 (sequence is synthesized)
gttgtacacccctcctgcctttgagatggctgttccatccactgagggaccagcaggcctggaatgatgagcagcgtgtgtctgggaaactctaaagggcgacctggacagacctgattg

SEQ ID NO: 317094 - DNA, 120 bp, Artificial Sequence
  ENSG00000135127_28 (sequence is synthesized)
acagaaccaaaggctattggatcagctcagcaggaaaattaagacttggatttactattctacctcagcccttcttgtatattgaaaataaaactaccaactcttcagttaccggaggaa

SEQ ID NO: 317095 - DNA, 120 bp, Artificial Sequence
  ENSG00000135127_29 (sequence is synthesized)
aaagaacttctctgatatcatccctcagcactgatgttctcatgggagcagtgccgtgtctgcatggtctcctctgtttcaggcatcagaagttgagagacaactctccatgcaggtcca

SEQ ID NO: 317096 - DNA, 120 bp, Artificial Sequence
  ENSG00000135127_30 (sequence is synthesized)
agatacttgccttcatgttttggggctagtccctagttcctacttgtcagcccgggtgtaactccacaccacccctgtggctctccaccctttcagatcaagatgctgtcagatcggaaa

SEQ ID NO: 317097 - DNA, 120 bp, Artificial Sequence
  ENSG00000135127_31 (sequence is synthesized)
taaggagctgacagacaagctcgagacaagatctcactctatcccccaggctgcagtggagtggctgatcatggcttactgcaccctcaagtgaccctcccactcagcctcctgagtagc

SEQ ID NO: 317098 - DNA, 120 bp, Artificial Sequence
  ENSG00000135127_32 (sequence is synthesized)
tgggactacaggcgcctactacacacctggctaattttgtaaaaatgtttcgtagagatggggtctcactatgttgccaaggctggtctcaaactacggggctcaagcagtcctcctgcc

SEQ ID NO: 317099 - DNA, 120 bp, Artificial Sequence
  ENSG00000135127_33 (sequence is synthesized)
ctggccttccaaagtggtgggattacaggagtgaaccattgagcctggcctgtattttcaattaaatcaaacacttgggagtataaaaccagtactttaagacgcatttattcatgagag

SEQ ID NO: 317100 - DNA, 120 bp, Artificial Sequence
  ENSG00000135127_34 (sequence is synthesized)
gtcaaacacattttcttacagggtggtttgaaagagaaacatgtgagtggactgagggaatgccactttcactattgaataatgagactggttttattttaatcccatcttctctactac

SEQ ID NO: 317101 - DNA, 82 bp, Artificial Sequence
  ENSG00000135127_35 (sequence is synthesized)
aatgagactggttttattttaatcccatcttctctactacttcaaaattggcacctttcttccacccccccaccctgccccc

SEQ ID NO: 317102 - DNA, 67 bp, Artificial Sequence
  ENSG00000135127_36 (sequence is synthesized)
ggcacctttctaatgtcgggacaaacaaggcattttcaagatcttttctacctattcattagttaat

SEQ ID NO: 317103 - DNA, 120 bp, Artificial Sequence
  ENSG00000135127_37 (sequence is synthesized)
aggcattttcaagatcttttctacctattcattagttaatactaaatacctctctggttctgtgtgccaagcccaagattttgttgttttcatttcaaacattaaagtacttgatgctac

SEQ ID NO: 317104 - DNA, 120 bp, Artificial Sequence
  ENSG00000135127_38 (sequence is synthesized)
cgagctcaagcctagcatgtgatgtggtaccctttcttcaagagagacaggccctctcttgaagcaggatggcagtggaatgctaccagcttgcacccccacacatgtaccctggtcctg

SEQ ID NO: 317105 - DNA, 120 bp, Artificial Sequence
  ENSG00000135127_39 (sequence is synthesized)
cttctctgatatcatccctcagcactgatgttctcatgggagcagtgccgtgtctgcatggtttcccatctggagaatccagtcaccatttgattgtctgggaagtaggaattggacagt

SEQ ID NO: 317106 - DNA, 120 bp, Artificial Sequence
  ENSG00000135127_40 (sequence is synthesized)
ttatgtttttgactattttcattcattattcatgaaagattcaaccagagaggcctggctagattgatttatttgttcaaaaacatttaatacatactttgagtaagtgtttcttacgga

SEQ ID NO: 317107 - DNA, 120 bp, Artificial Sequence
  ENSG00000135127_41 (sequence is synthesized)
gctcccggagacttgatgatgactccttagaagaacagataaggcagaccagtgaggactcgagagccctaagggagctcatggagggagagaggggtaaactgaggcaaagcctagaag

SEQ ID NO: 317108 - DNA, 120 bp, Artificial Sequence
  ENSG00000135127_42 (sequence is synthesized)
ggtaaactggagcctgagatccagggcgagaggagactccaggaggaatctctgaacccaggcagagtgtaaggagagtttgccactggagggttccatgtgactgggtgaacagcacat

SEQ ID NO: 317109 - DNA, 120 bp, Artificial Sequence
  ENSG00000135144_0 (sequence is synthesized)
gcgagaagccccactgaagccgggcgcagggtctgggacgcagttgggagtgcaaagggctggctgagagccgcaggagcagcaggctgtggcccaggcctcctgggtgacaggccctgt

SEQ ID NO: 317110 - DNA, 120 bp, Artificial Sequence
  ENSG00000135144_1 (sequence is synthesized)
ctggcggggaagagggaccaagagacaacacggaagaggctggacctcgaacaggggcggctgcctcactccctacctgagccagccgagggggccaaggactttagagctgtttcctcc

SEQ ID NO: 317111 - DNA, 120 bp, Artificial Sequence
  ENSG00000135144_2 (sequence is synthesized)
ggcataagagagacacttgctttccagggcagcaccctttatcggagaaggctctacagggaaggggtctttgcagcctggatggccatcccacattcctttaacggaggtctctaggcc

SEQ ID NO: 317112 - DNA, 120 bp, Artificial Sequence
  ENSG00000135144_3 (sequence is synthesized)
tcagagagaacccagagttagaaaggaggccagacggtccttgctgtccccctggggagagaggaagttgccgcctgctgccaggcccaggaggagctgggcctgcaatagtgggggacc

SEQ ID NO: 317113 - DNA, 120 bp, Artificial Sequence
  ENSG00000135144_4 (sequence is synthesized)
tggcccctgaggcagtggcggccatgtcacggccaggccacggtgggctgatgcctgtgaatggtctgggcttcccaccgcagaacgtggcccgggtggtggtgtgggagtggctgaatg

SEQ ID NO: 317114 - DNA, 120 bp, Artificial Sequence
  ENSG00000135144_5 (sequence is synthesized)
agcacagccgctggcggccctacacggccaccgtgtgccaccacattgagaacgtgctgaaggaggacgctcgcggttccgtggtcctggggcaggtggacgcccagcttgtgccctaca

SEQ ID NO: 317115 - DNA, 120 bp, Artificial Sequence
  ENSG00000135144_6 (sequence is synthesized)
tcatcgacctgcagtccatgcaccagtttcgccaggacacaggcaccatgcggcccgtgcggcgcaacttctacgacccgtcgtcggcgccgggcaagggcatcgtgtgggagtgggaga

SEQ ID NO: 317116 - DNA, 120 bp, Artificial Sequence
  ENSG00000135144_7 (sequence is synthesized)
acgacggcggcgcatggacggcctacgatatggacatctgcatcaccatccagaacgcctacgagaagcagcacccgtggctcgacctctcatcgctaggcttctgctacctcatctact

SEQ ID NO: 317117 - DNA, 120 bp, Artificial Sequence
  ENSG00000135144_8 (sequence is synthesized)
tcaacagcatgtcgcagatgaaccgccagacgcgccggcgccgccgcctgcgccgccgcctggacctcgcctacccgctcaccgtgggctccatccctaagtcgcagtcgtggcccgtgg

SEQ ID NO: 317118 - DNA, 120 bp, Artificial Sequence
  ENSG00000135144_9 (sequence is synthesized)
cgtggcccgtgggcgccagctcgggccagccctgctcctgccagcagtgcctgctggtcaacagcacgcgcgccgcctccaacgccatcctggcctcgcagcgccgcaaggcgccccccg

SEQ ID NO: 317119 - DNA, 80 bp, Artificial Sequence
  ENSG00000135144_10 (sequence is synthesized)
cgccgccgccgccacctggagggcctccaggcgcgcttgccgtgcgccccagcgccaccttcacaggcgccgcgctctgg

SEQ ID NO: 317120 - DNA, 120 bp, Artificial Sequence
  ENSG00000135144_11 (sequence is synthesized)
ggcggagcgcgcaccccggggcagaacaacctcaaccggcccgggccccagcgcaccaccagcgtgagcgcgcgcgcctccatcccgccgggggtccccgcactcccggtgaagaacttg

SEQ ID NO: 317121 - DNA, 120 bp, Artificial Sequence
  ENSG00000135144_12 (sequence is synthesized)
cgggggtccccgcactcccggtgaagaacttgaatggtactgggccggtccatccggccctggcagggatgaccgggatactgctgtgcgcggccgggctgcccgtgtgcctgacgcggg

SEQ ID NO: 317122 - DNA, 120 bp, Artificial Sequence
  ENSG00000135144_13 (sequence is synthesized)
cccccaagcccatcctgcacccgccgcccgtgagcaagagcgacgtgaagcccgtgcctggcgtgcccggggtgtgccgcaagaccaagaagaagcaccttaaaaagagtaagaatcccg

SEQ ID NO: 317123 - DNA, 120 bp, Artificial Sequence
  ENSG00000135144_14 (sequence is synthesized)
gagggcgtgcttcggcacaagggcgtgcggcctgagctcgtgggccgcctgggccgctgtggccacatgtaccacctgctgtgcctcgtggccatgtactccaatggcaacaaggatggc

SEQ ID NO: 317124 - DNA, 120 bp, Artificial Sequence
  ENSG00000135144_15 (sequence is synthesized)
agcctgcagtgccccacctgcaaggccatctacggggagaagacgggtacgcagccgcctgggaagatggagttccacctcatcccccactcgctgcccggcttccctgatacccagacc

SEQ ID NO: 317125 - DNA, 120 bp, Artificial Sequence
  ENSG00000135144_16 (sequence is synthesized)
atccgcatcgtctatgacatccccacaggcatccagggccctgagcaccccaaccccgggaagaagttcaccgcaagaggattccctcgccactgctatctacccaacaacgagaaaggc

SEQ ID NO: 317126 - DNA, 120 bp, Artificial Sequence
  ENSG00000135144_17 (sequence is synthesized)
cggaaggtgctgcggctgctcatcacggcctgggagagaagactcatcttcactatcggcacgtccaacaccacgggcgagtcggacaccgtggtgtggaacgagatccaccacaagacc

SEQ ID NO: 317127 - DNA, 120 bp, Artificial Sequence
  ENSG00000135144_18 (sequence is synthesized)
gagtttggatccaacctcacgggccacggctacccggacgctagctacctagacaacgtgctggctgagctcacagcccagggcgtatccgaggctgcagccaaggcttgaggcccaagg

SEQ ID NO: 317128 - DNA, 120 bp, Artificial Sequence
  ENSG00000135144_19 (sequence is synthesized)
ctgcccaccttccctcctgctttgcccctggtccggcaaatgcctccttcgccaggtgtgtcctggtagcccaggttcagggctggggaggagcctgcggaaggggccgcagccattcag

SEQ ID NO: 317129 - DNA, 120 bp, Artificial Sequence
  ENSG00000135144_20 (sequence is synthesized)
gggacctgcctggtggcagctgggatgaagagagatggcatgtcaggctggccccgaatcatagctccctgagagggccaagcagagagtactggaaacctccctaccaaaaagacagag

SEQ ID NO: 317130 - DNA, 120 bp, Artificial Sequence
  ENSG00000135144_21 (sequence is synthesized)
acccgccccctcacacacaaacacacatgtcctgttgaactcatgcacgcacacccacgtgcctgtacttgcccccaggctggaagagaagagacagaaagaccccatgacccccccatg

SEQ ID NO: 317131 - DNA, 120 bp, Artificial Sequence
  ENSG00000135144_22 (sequence is synthesized)
tggatccccatctgtgtctcagttgcatctgtacagccttgtctgcaaactggaggatgcggggcaagcccttaggggcctgccagggctcggggggcaaagagggactcgggaaactca

SEQ ID NO: 317132 - DNA, 120 bp, Artificial Sequence
  ENSG00000135144_23 (sequence is synthesized)
gtgtaccccagatgcctcacccattccgtgtcatcacccatgtctgccacccactgattgggcaattgtgggcccatggggtggaagcccccagatgactgagcagttctacaaaagaat

SEQ ID NO: 317133 - DNA, 120 bp, Artificial Sequence
  ENSG00000135144_24 (sequence is synthesized)
ggccagcacgagcggggactagagggtcctgattttgtgtctgtgcctcttcatctctctggactctgatctccttctcccttcccatctccaggccttctgtctgtcccagataaaggc

SEQ ID NO: 317134 - DNA, 120 bp, Artificial Sequence
  ENSG00000135144_25 (sequence is synthesized)
gctgttctcccatcctccctaccccatcctctccaccaaatcgctcccaattttgagagccaaaggctggcgcttctgacttcaggagcgaaaggaggaggcctagtttgggccgatgta

SEQ ID NO: 317135 - DNA, 120 bp, Artificial Sequence
  ENSG00000135144_26 (sequence is synthesized)
ttttaaagcagagtggacagcagagagtcaatttccctttcgttgggagtgggcagtggggtggctaattgtcttcggccaaccaggggcctgttgcccaggcaactcaccagctccgcc

SEQ ID NO: 317136 - DNA, 120 bp, Artificial Sequence
  ENSG00000135144_27 (sequence is synthesized)
tctgctgattggctgccacggtgggagtcagccaagatttaaagggatgccagcgattgctcttttcaaaacctaccagtcccactgtgggtggagaaataaatggtctttctcctcctc

SEQ ID NO: 317137 - DNA, 120 bp, Artificial Sequence
  ENSG00000135144_28 (sequence is synthesized)
aatccctgctctcacattcctcccaaaagcagcacccgaacagtaacgaccacagccacctccttcacacatcttatctcgtttcctgagccactgaggtcaagatcctgaccccatttt

SEQ ID NO: 317138 - DNA, 120 bp, Artificial Sequence
  ENSG00000135144_29 (sequence is synthesized)
cctcctcccacccgcgagatcccggcggccgccagccggctcctgcgtccgtccgtcggccgggcagtctgtccacgcgcggaaagctcggcgcggcggccgaggggcctgggagggaac

SEQ ID NO: 317139 - DNA, 120 bp, Artificial Sequence
  ENSG00000135144_30 (sequence is synthesized)
ctgggagggaacgggcgcggaggcgggaccgcggctccctcccactccggggggagcccaggaggcggcggtgctggagcgcgagccggagccggagccggagacgaagagaggcggtcg

SEQ ID NO: 317140 - DNA, 120 bp, Artificial Sequence
  ENSG00000135144_31 (sequence is synthesized)
cggagccggagacgaagagaggcggtcgcgagcacgagtggggtggggcgtgcccacgggcccccgcccccctcgtccccctcgtcccccagcccagctccggagccgcagtccaggcgc

SEQ ID NO: 317141 - DNA, 120 bp, Artificial Sequence
  ENSG00000135144_32 (sequence is synthesized)
tggagtaccctctgtctaactcctagaccaaacactcagcaagagcagggttacccactgggccagactgggcattatatagacctggggtagcaaactggctatactgattgatagagg

SEQ ID NO: 317142 - DNA, 120 bp, Artificial Sequence
  ENSG00000135148_0 (sequence is synthesized)
agtgcggggtctgacagaggaggctccgtgtctgcagctagtgtgtcaactcagcgtttctcctctcgtccctggtgaggtgtagcggcggcacgcggctggagatcccctgtggcctcc

SEQ ID NO: 317143 - DNA, 120 bp, Artificial Sequence
  ENSG00000135148_1 (sequence is synthesized)
agtttaggaagggtccagcatcccaagggaggggtgtgtgggcgaggggtctctgggcccggggtcgcggctgtgaggagaggatgcccgcgcggcggcatctcaggcacctggaggagg

SEQ ID NO: 317144 - DNA, 120 bp, Artificial Sequence
  ENSG00000135148_2 (sequence is synthesized)
ccgcgctttctcctcagggaaccggcgccttggcagcccccggcgacgccgcccccttcgcggcctaggttggtctggtgagccgggaagcgggcgtcgttcgcagcgccgctgtgacca

SEQ ID NO: 317145 - DNA, 120 bp, Artificial Sequence
  ENSG00000135148_3 (sequence is synthesized)
ccgcgtcccgggcggagctgggctcagtgccggcctgggcctagagtccgagcctcgagctgccggcgtggggggtcgcgagtggcctaatgcggcctcgaagccgaaggacccgagtcc

SEQ ID NO: 317146 - DNA, 120 bp, Artificial Sequence
  ENSG00000135148_4 (sequence is synthesized)
gagctcgcactccgacccgctggtgctgtggaaaactcaggtggccttccgctttcgtagcctctaaagtggggaccaagactttcacctcttaggattgtagtcgggattaaaagattt

SEQ ID NO: 317147 - DNA, 120 bp, Artificial Sequence
  ENSG00000135148_5 (sequence is synthesized)
tcccggaagagctaaagatggctgaatttctagatgaccaggaaactcgactgtgtgacaactgcaaaaaagaaattcctgtgtttaactttaccatccatgagatccactgtcaaagga

SEQ ID NO: 317148 - DNA, 120 bp, Artificial Sequence
  ENSG00000135148_6 (sequence is synthesized)
acattggtatgtgtcctacctgtaaggaaccatttcccaaatctgacatggagactcacatggctgcagaacactgtcaggtgacctgcaaatgtaacaagaagttggagaagaggctgt

SEQ ID NO: 317149 - DNA, 120 bp, Artificial Sequence
  ENSG00000135148_7 (sequence is synthesized)
taaagaagcatgaggagactgagtgccctttgcggcttgctgtctgccagcactgtgatttagaactttccattctcaaactgaaggaacatgaagattattgtggtgcccggacggaac

SEQ ID NO: 317150 - DNA, 120 bp, Artificial Sequence
  ENSG00000135148_8 (sequence is synthesized)
tatgtggcaactgtggtcgcaatgtccttgtgaaagatctgaagactcaccctgaagtttgtgggagagagggggaggaaaagagaaatgaggttgccatacctcctaatgcatatgatg

SEQ ID NO: 317151 - DNA, 120 bp, Artificial Sequence
  ENSG00000135148_9 (sequence is synthesized)
aatcttggggtcaggatggaatctggattgcatcccaactcctcagacaaattgaggctctggacccacccatgaggctgccgcgaaggcccctgagagcctttgaatcagatgttttcc

SEQ ID NO: 317152 - DNA, 120 bp, Artificial Sequence
  ENSG00000135148_10 (sequence is synthesized)
acaatagaactaccaaccaaaggaacattacagcccaggtttcaattcagaataatctgtttgaagaacaagagaggcaggaaaggaatagaggccaacagccccccaaagagggtggtg

SEQ ID NO: 317153 - DNA, 120 bp, Artificial Sequence
  ENSG00000135148_11 (sequence is synthesized)
aagagagtgcaaacttggacttcatgttggccctaagtctgcaaaatgaaggccaagcctccagtgtggcagagcaggacttctggagggccgtatgtgaggccgaccagtctcatggcg

SEQ ID NO: 317154 - DNA, 120 bp, Artificial Sequence
  ENSG00000135148_12 (sequence is synthesized)
gtcccaggtctctcagtgacataaagggtgcagctgacgagatcatgttgccttgtgaattttgtgaggagctctacccagaggaactgctgattgaccatcagacaagctgtaaccctt

SEQ ID NO: 317155 - DNA, 120 bp, Artificial Sequence
  ENSG00000135148_13 (sequence is synthesized)
tgatgtcatcttccagaacttcttgcaacaggctgcaagtaaccagttagactctttgatgggcctgagcaattcacaccctgtggaggagagcatcattatcccatgtgaattctgtgg

SEQ ID NO: 317156 - DNA, 120 bp, Artificial Sequence
  ENSG00000135148_14 (sequence is synthesized)
ggtacagctggaagaggaggtgctgttccatcaccaggaccagtgtgaccaacgcccagccactgcaaccaaccatgtgacagaggggattcctagactggattcccagcctcaagagac

SEQ ID NO: 317157 - DNA, 120 bp, Artificial Sequence
  ENSG00000135148_15 (sequence is synthesized)
ctcaccagagctgcccaggaggcgtgtcagacaccagggagacctgtcttctggttacctggatgatactaagcaggaaacagctaatgggcccacctcctgtctgcctcccagccgacc

SEQ ID NO: 317158 - DNA, 120 bp, Artificial Sequence
  ENSG00000135148_16 (sequence is synthesized)
cattaacaatatgacagctacctataaccagctatcgagatcaacatcaggccccagacctgggtgccagcccagctctccttgtgtgccgaagctcagcaactcagacagccaggacat

SEQ ID NO: 317159 - DNA, 120 bp, Artificial Sequence
  ENSG00000135148_17 (sequence is synthesized)
ccaggggcggaatcgagacagccagaatggggccatagcccctgggcacgtttcagtgattcgccctcctcaaaatctctacccagaaaacattgtgccctctttctcccctgggccttc

SEQ ID NO: 317160 - DNA, 120 bp, Artificial Sequence
  ENSG00000135148_18 (sequence is synthesized)
agggagatacggagctagtggtaggagtgaaggtggcaggaattcccgggtcacccctgcagctgccaactaccgcagcagaactgcaaaggcaaagccttccaagcaacagggagctgg

SEQ ID NO: 317161 - DNA, 120 bp, Artificial Sequence
  ENSG00000135148_19 (sequence is synthesized)
ggatgcagaagaggaagaggaggagtaatggtgtctccagagactttacatcggttcctgtcttctgtgcacagcagcacttgccgctgtgcaggcccacctctttggctctttgggtgg

SEQ ID NO: 317162 - DNA, 120 bp, Artificial Sequence
  ENSG00000135148_20 (sequence is synthesized)
gagagtttttccagattttagatttttctaggttatggccattttgtgtcttttgaggttgtgctgtgggggtttgggtttgagggaagggagcagggtggcggttgaggaacgcttcag

SEQ ID NO: 317163 - DNA, 120 bp, Artificial Sequence
  ENSG00000135148_21 (sequence is synthesized)
ccttagctgctacctttcggcagcagtgaaatacaagctgcagcctcggctgccagggctcccttttgacttattgtcgccactgccccttggtgctgtgtggtcccagtggaaggaggg

SEQ ID NO: 317164 - DNA, 120 bp, Artificial Sequence
  ENSG00000135148_22 (sequence is synthesized)
gaagattttggaaacctggtagccaccagtaaggtgattctctgccctgttggggcctaaatttgggggcttttgggcaacctctccgtgtactgcgtctgtccacactcgattgggccc

SEQ ID NO: 317165 - DNA, 120 bp, Artificial Sequence
  ENSG00000135148_23 (sequence is synthesized)
caggtgtgtatgaggcgctctggtaaggtgctcaggccagttgcaatgtctgtcagtaacgaggcttttgatgtgttgagctggaggtgagtggaccgggggctgtgttttaagctgctt

SEQ ID NO: 317166 - DNA, 120 bp, Artificial Sequence
  ENSG00000135148_24 (sequence is synthesized)
ccttggcatttggcatcactgccttctgttcccgggggagcatggatcttttgtcctcactgctttctaatggggagggctgagggctccctgtccccacagcaggtatgttgggctctg

SEQ ID NO: 317167 - DNA, 120 bp, Artificial Sequence
  ENSG00000135148_25 (sequence is synthesized)
ccccagccccacacttgctctgaaaaccaagtgtcagagccccttccccttgtttttattttactgttataataattattaacttccttgtaatagaaataaagtttgtacttggagttc

SEQ ID NO: 317168 - DNA, 120 bp, Artificial Sequence
  ENSG00000135148_26 (sequence is synthesized)
agaatggtatcaaaatcccaaggcaaatgggaacagggctttggggccagatagatcttgattatagaaacccgactgtagctgagtaacactgggaagaatacctctctttcctataaa

SEQ ID NO: 317169 - DNA, 120 bp, Artificial Sequence
  ENSG00000135148_27 (sequence is synthesized)
atggaaataacctccattggattatagttagggttcataatggtgagtatgatgacagtgttgtaaatagccaacacttatacagattgagtatcccttatccaaaatacttggggccag

SEQ ID NO: 317170 - DNA, 120 bp, Artificial Sequence
  ENSG00000135148_28 (sequence is synthesized)
agagctagttgaacatggtcatttttattccttcccggatgcctgtaaaccttgactatttgctaggcatggacttgagttgagggtggtaacatttctaatgtatcctgaatgttggtt

SEQ ID NO: 317171 - DNA, 120 bp, Artificial Sequence
  ENSG00000135148_29 (sequence is synthesized)
gcttagatatgatctttgaaccactaaactaagtgagaaaggcaaaaatgaagtggagagaccagactggtggaggaaagggttcaggatttcatttttgtacagctttacagtgaagtt

SEQ ID NO: 317172 - DNA, 120 bp, Artificial Sequence
  ENSG00000135164_0 (sequence is synthesized)
agcgggacagacgagcgggaggggcagcgtgcggggagctgggggcggggcgcggccgcagctccgtttccggtggctcgtcgcgctcgctcactccagctgcagccactctcgcccgtg

SEQ ID NO: 317173 - DNA, 120 bp, Artificial Sequence
  ENSG00000135164_1 (sequence is synthesized)
gctgcttcctccatcctggtattttttggagcttccatcctggttcttccaaagtgcccggacccaaaacaggaaagtgttgcggagataggaacatgggagagaaacaatctgggtaac

SEQ ID NO: 317174 - DNA, 120 bp, Artificial Sequence
  ENSG00000135164_2 (sequence is synthesized)
atgaaagtgatgctggttgctaagggaaggcaacttgattctgtgggaagggctgtagctgatccatccgttgtctagatttgagtatgagcacagtggaagaggattctgacacagtaa

SEQ ID NO: 317175 - DNA, 120 bp, Artificial Sequence
  ENSG00000135164_3 (sequence is synthesized)
cagtagaaactgtgaactctgtgactttgactcaggacacagaagggaatctcattcttcactgccctcagaatgaagcggatgaaatagactcagaagatagtattgaacctccacata

SEQ ID NO: 317176 - DNA, 120 bp, Artificial Sequence
  ENSG00000135164_4 (sequence is synthesized)
aaaggctttgtttgtcctctgaggatgatcagagtattgatgattctactccttgcatatcagttgttgcacttccactttcagaaaatgatcagagctttgaagtgaccatgactgcaa

SEQ ID NO: 317177 - DNA, 120 bp, Artificial Sequence
  ENSG00000135164_5 (sequence is synthesized)
ccacagaagtagcagatgatgaggttactgaggggactgtgacacagatacagattttgcagaatgagcaactagatgaaatatctcccttgggtaacgaggaagtttcagcagttagcc

SEQ ID NO: 317178 - DNA, 120 bp, Artificial Sequence
  ENSG00000135164_6 (sequence is synthesized)
aagcatggtttacaactaaagaagataaggattctctgactaataaaggacataaatggaagcaggggatgtggtccaaggaagaaattgatattttgatgaacaatattgaacgctatc

SEQ ID NO: 317179 - DNA, 120 bp, Artificial Sequence
  ENSG00000135164_7 (sequence is synthesized)
ttaaggcacgcggaataaaagatgctacagaaatcatctttgagatgtcaaaagacgaaagaaaagatttctacaggactatagcatggggtctgaaccggcctttgtttgcagtttata

SEQ ID NO: 317180 - DNA, 120 bp, Artificial Sequence
  ENSG00000135164_8 (sequence is synthesized)
gaagagtgcttcgcatgtatgatgacagaaaccatgtgggaaaatatacacctgaagaaattgagaagctcaaggagctccggataaagcatggcaatgactgggcaacaataggggcgg

SEQ ID NO: 317181 - DNA, 120 bp, Artificial Sequence
  ENSG00000135164_9 (sequence is synthesized)
cgctaggaagaagtgcatcttctgtcaaagatcggtgccgactgatgaaggatacttgcaacacagggaagtggacagaagaagaagaaaagagacttgcagaagtggttcatgagttga

SEQ ID NO: 317182 - DNA, 120 bp, Artificial Sequence
  ENSG00000135164_10 (sequence is synthesized)
caagcactgagccaggtgacatagtcacacagggtgtgtcttgggcagctgtggctgaacgagtcggtacccgctcagaaaagcaatgtcgttctaaatggctcaactacctgaattgga

SEQ ID NO: 317183 - DNA, 120 bp, Artificial Sequence
  ENSG00000135164_11 (sequence is synthesized)
aacagagtgggggtactgaatggaccaaggaagatgaaatcaatctcatcctcaggatagcagaacttgatgtagctgatgaaaatgacattaactgggatctgttagctgagggatgga

SEQ ID NO: 317184 - DNA, 120 bp, Artificial Sequence
  ENSG00000135164_12 (sequence is synthesized)
gtagtgtccgttcaccacaatggctacgaagtaaatggtggaccatcaaaaggcaaattgcaaaccataaggatgtttcgttccctgtcttaataaaaggtcttaaacagttacatgaga

SEQ ID NO: 317185 - DNA, 120 bp, Artificial Sequence
  ENSG00000135164_13 (sequence is synthesized)
accaaaaaaacaacccaacgcttttggagaataaatcaggatctggagttccaaacagtaataccaattccagtgtgcagcatgttcagataagagttgcccgcttggaagataatacag

SEQ ID NO: 317186 - DNA, 120 bp, Artificial Sequence
  ENSG00000135164_14 (sequence is synthesized)
ccatctcttctagccccatggcagcattgcagattccagtccagatcacccatgtttcttcagcagactctcctgctaccgttgactcagaaacaataacactaaacagtggaacactac

SEQ ID NO: 317187 - DNA, 120 bp, Artificial Sequence
  ENSG00000135164_15 (sequence is synthesized)
aaggccttcccctaactctgactgctagtcccacagtaaccctgacagctgctgctcctgcttctcctgaacagattattgttcatgctttatccccagaacatttgttgaacacaagtg

SEQ ID NO: 317188 - DNA, 120 bp, Artificial Sequence
  ENSG00000135164_16 (sequence is synthesized)
ataatgttacagtgcagtgtcacacaccaagagtcatcattcagactgttgccacagaggacatcacttcttccatatcccaagcagaactgacagtcgatagtgatattcagtcatctg

SEQ ID NO: 317189 - DNA, 120 bp, Artificial Sequence
  ENSG00000135164_17 (sequence is synthesized)
attttcctgagcctccagacgccctagaagcagacactttcccagatgaaattcatcaccctaagatgactgtggagccatcatttaatgatgctcatgtatccaaattcagtgaccaaa

SEQ ID NO: 317190 - DNA, 120 bp, Artificial Sequence
  ENSG00000135164_18 (sequence is synthesized)
atagcacagaactgatgaatagtgttatggtcagaacagaagaagaaatctctgacaccgaccttaaacaagaggaatcaccctctgatttagccagtgcttatgttactgagggtttag

SEQ ID NO: 317191 - DNA, 120 bp, Artificial Sequence
  ENSG00000135164_19 (sequence is synthesized)
agtctcccactatagaagaacaagttgatcaaacaattgatgatgaaacaatacttatcgttccttcaccacatggctttatccaggcatctgatgttatagatactgaatctgtcttgc

SEQ ID NO: 317192 - DNA, 120 bp, Artificial Sequence
  ENSG00000135164_20 (sequence is synthesized)
ctttgacaacactaacagatcccatactccaacatcatcaggaagaatcaaatatcattggatcatccttgggcagtcctgtttcagaagattcaaaggatgtcgaagatttggtaaact

SEQ ID NO: 317193 - DNA, 120 bp, Artificial Sequence
  ENSG00000135164_21 (sequence is synthesized)
gtcattagaataattcttagaaataggcagttcaagcaaagaaggcacactgttaattacaacctcttcaaagaaataggagcaacccccaagaggcttaatttaccaatttaaatagcc

SEQ ID NO: 317194 - DNA, 120 bp, Artificial Sequence
  ENSG00000135164_22 (sequence is synthesized)
acagtccttaagccacacacattgttgctgctatgactttttacctcctttaaacacatcatctgaggttgagttttatgacagtatgtagttgagtggaggctgggagttttaagcata

SEQ ID NO: 317195 - DNA, 120 bp, Artificial Sequence
  ENSG00000135164_23 (sequence is synthesized)
aatccctgtttagtgttacatgggaataaggaatttcattcacttcagccactaagaaaagtttagaatcacgaaagcttaactgctgtggtttaaagtacagtttctctaaagatcaga

SEQ ID NO: 317196 - DNA, 120 bp, Artificial Sequence
  ENSG00000135164_24 (sequence is synthesized)
catggcactgtctcctctcaagcctggttgtagttcagatgagtcttttcaacatggtcttcaacatggtctagagcttaccagtgatcttctgatcttcaagaagactaagtttgagac

SEQ ID NO: 317197 - DNA, 120 bp, Artificial Sequence
  ENSG00000135164_25 (sequence is synthesized)
ttgaccagcatacaagtatagagacctaggaggtggtcttgtggtggtacatttggttaacccattgctggcagtgggagctgatttaggcagggtaaacaggaaagcattaaaagttaa

SEQ ID NO: 317198 - DNA, 120 bp, Artificial Sequence
  ENSG00000135164_26 (sequence is synthesized)
aattcactacaggttttttgttacttttaaagggaatatggataagcatagtaacaaaacccaccagaatctaagcagttttcaccccctcagaaaccactgtcattagtttacaaagtt

SEQ ID NO: 317199 - DNA, 120 bp, Artificial Sequence
  ENSG00000135164_27 (sequence is synthesized)
agcactttgaagtaaaactaaatgaggaaggaagtaatgttacctatccttgataccatgaccatttattagatgttttgctatataaattaccgagagaatagtttgtcatccacttag

SEQ ID NO: 317200 - DNA, 120 bp, Artificial Sequence
  ENSG00000135164_28 (sequence is synthesized)
tgtgttagctggtggggtacaatataacctctcatctcaggctattttaaaaaaacaatatttgcttctataacaaaaggaaacaaatctaagaatcattcctgtactacagaagggtta

SEQ ID NO: 317201 - DNA, 120 bp, Artificial Sequence
  ENSG00000135164_29 (sequence is synthesized)
aggcaaaggtagccttttgggctttttaatgaatatgacccctatagaaaagtcaagaaaaaaaaacccttgtataaattattttatttattattgtaattagatcttcacaaagttgtc

SEQ ID NO: 317202 - DNA, 120 bp, Artificial Sequence
  ENSG00000135164_30 (sequence is synthesized)
ttttcactgtgttttgtcaacgtgaaattaaattgtagttataagcaaaagttggttgcctagggaacaattgtatattcagtttaacagaaataaaagaatatttgtcttaagatgcaa

SEQ ID NO: 317203 - DNA, 120 bp, Artificial Sequence
  ENSG00000135164_31 (sequence is synthesized)
aagtaagtgcgatggaaccttcaggttccaaccgccgccagggccgctccgcccagtggagcctgtccggcccccttgctgcccgctagctcccgccggctggcgcaagctgtcggcgcc

SEQ ID NO: 317204 - DNA, 120 bp, Artificial Sequence
  ENSG00000135164_32 (sequence is synthesized)
ggggcactgcgggcggggtcggagcctggccttcctgacgttgcagctgccgtccccgcacgttccggccagggcctccctcttagggccgggcggtgcccgtggctcaggctgcagagt

SEQ ID NO: 317205 - DNA, 120 bp, Artificial Sequence
  ENSG00000135164_33 (sequence is synthesized)
agaaagcacaaaaaccagcctgattgtatctggaaaaaaccattatgttacagttgataggctcaccccaaaatatgcttttggggactgatttagcacctgcatattctgcgtgaatct

SEQ ID NO: 317206 - DNA, 120 bp, Artificial Sequence
  ENSG00000135164_34 (sequence is synthesized)
atcaacatttaatcactcctttatgtctccaaatgatacaagaagacccgagaaagtggtaaactaaatgatttttattaaagtaattgccaaatattaaagataaaatatggatagtta

SEQ ID NO: 317207 - DNA, 120 bp, Artificial Sequence
  ENSG00000135164_35 (sequence is synthesized)
acactttcaaactttggctctcaaagtattgctgcccacaacttccaaaccagtcaaatgggaagaagaagaatgaagaataaatgatgaaattaaaagggagaaaacaattgaaccaaa

SEQ ID NO: 317208 - DNA, 120 bp, Artificial Sequence
  ENSG00000135164_36 (sequence is synthesized)
ttatatgctaagtgacttaacattcagctccctaaatgaaattctgatttttattgaggtttttagcattcattgttttaattgattttttaaaaatttctctgaatttctagatataca

SEQ ID NO: 317209 - DNA, 120 bp, Artificial Sequence
  ENSG00000135164_37 (sequence is synthesized)
ctttttaagctcctccccttttcttaccatatttactccttaggagtgagaggttagaagttctttgccccagctagagatatcatagcagatttctacttacaccacttccctgtttct

SEQ ID NO: 317210 - DNA, 120 bp, Artificial Sequence
  ENSG00000135164_38 (sequence is synthesized)
ctcagtaattgtttccttccccagagaagagttaatactgtttgtaattcctaaagcccctaaaatgaaaatgtacacacttattcttgttcttctacgtaaactatcaggaggaaataa

SEQ ID NO: 317211 - DNA, 120 bp, Artificial Sequence
  ENSG00000135164_39 (sequence is synthesized)
aaactatcaggaggaaataaaatcatgccacataacgatttaatttttatgtttttagagacagggtctagcttggttgtccaggccgacatgcagtggtgtgatcatagctcactgtaa

SEQ ID NO: 317212 - DNA, 120 bp, Artificial Sequence
  ENSG00000135164_40 (sequence is synthesized)
ttctcccacctcagcctcctgaatagctcggactacaggcacacaccaccatgtccagctattttttttcgtagagatgaggtcttgccatgttacccaggttggtctccaactcctggg

SEQ ID NO: 317213 - DNA, 120 bp, Artificial Sequence
  ENSG00000135164_41 (sequence is synthesized)
tgggctcaagtgatcttcccagcttggcttcccaatgtgctgggattacctgcatgagccagcatagctggccactcataacctttcagtcaacaacagatgtcatacatagtattggtc

SEQ ID NO: 317214 - DNA, 120 bp, Artificial Sequence
  ENSG00000135164_42 (sequence is synthesized)
tcacaatattaaaatactgtatttttactttttttctatgtttagatacacaaatatttaccattgtgttacagttgcctacagtatttggtacagtaacatgctgtaagggtttgtagc

SEQ ID NO: 317215 - DNA, 120 bp, Artificial Sequence
  ENSG00000135164_43 (sequence is synthesized)
ctaggagcaatagactgtatagatcatctagcctacgtgtgtagtaggctgtaccatctaggtttgtgtaagtacactgtgatgatcccatgacagaatcacctaatggctcatttctca

SEQ ID NO: 317216 - DNA, 120 bp, Artificial Sequence
  ENSG00000135164_44 (sequence is synthesized)
gaacatatccccatccttaagtgattgatgactatatttttattttgtacaaagatgtacttctgaaaacctaagtttaagtcaacttttgtgagttgtataatttcaaatatcttagct

SEQ ID NO: 317217 - DNA, 120 bp, Artificial Sequence
  ENSG00000135164_45 (sequence is synthesized)
aggtgtgttagagaaattctgtgataattttgtagaacaaaggctctgtaattttctaattttattaattatataaatctagagatcttaagttgggtttgcttaaagtgaagcatactt

SEQ ID NO: 317218 - DNA, 120 bp, Artificial Sequence
  ENSG00000135164_46 (sequence is synthesized)
tttgttgcctgttttgcatttaggtattaaacttagttgtacagtctgtttaatttaggttactaaatttattccccttattatagcactcttaacttccattattccaaaggaaaattt

SEQ ID NO: 317219 - DNA, 83 bp, Artificial Sequence
  ENSG00000135164_47 (sequence is synthesized)
actacagaaaaaataaaaaccaattagccaggcatggtgggcatgtgcttgtagtcccagctattggggagcaagagcctgag

SEQ ID NO: 317220 - DNA, 120 bp, Artificial Sequence
  ENSG00000135164_48 (sequence is synthesized)
tgtgcttgtagtcccagctattggggagcaagagcctgaggcaggaggatggcttgagtccaggggttcgaggctgcagtgagctatgattatgccactccagcctgagcaacagagcaa

SEQ ID NO: 317221 - DNA, 120 bp, Artificial Sequence
  ENSG00000135164_49 (sequence is synthesized)
gaccttgtctaaaaataaaattaaattaaaaaatccagttagagaggataagcgtattttacgaatagagcaaagcaaagtctagaattggcttccctgcgcaagaataccatattactg

SEQ ID NO: 317222 - DNA, 120 bp, Artificial Sequence
  ENSG00000135164_50 (sequence is synthesized)
tttggaaaagagaagttgctacctctagaccaacagtcaagggcccttcagccctggcggggaaaacatacactattcgtttaaaaaatgaaaataagctgtttagcattgccagtattc

SEQ ID NO: 317223 - DNA, 120 bp, Artificial Sequence
  ENSG00000135164_51 (sequence is synthesized)
ttcctaaataataatcctatcaagacaccctagaatagaaaatgtcctgtttccatgttctttgtaatgtctacctttttttaacactataaatcttagatggcaagaataacaatatta

SEQ ID NO: 317224 - DNA, 120 bp, Artificial Sequence
  ENSG00000135164_52 (sequence is synthesized)
agaattaaaatttgttacgatgtttataaaaatctcaggatatgttgttttttaaaatatcttatttttataagctctcacatccagtatgcagttatttattccaaatactttccctcc

SEQ ID NO: 317225 - DNA, 120 bp, Artificial Sequence
  ENSG00000135164_53 (sequence is synthesized)
gatttttgagtacctgttatagaccaggattagttgataaggaccaaaatagaaggtagttatctaaacagttcttcctactgctgctgttccaggcacagtgttatacaccatcactct

SEQ ID NO: 317226 - DNA, 120 bp, Artificial Sequence
  ENSG00000135164_54 (sequence is synthesized)
ttttttttttttttttcagagaacgtttgtctgcctgatgagagccacttgggttaagaaactacctgtgaatagtcatcatttctgtccttcattggggaatacttttagaggccagtt

SEQ ID NO: 317227 - DNA, 120 bp, Artificial Sequence
  ENSG00000135164_55 (sequence is synthesized)
tccaaaaattctgcttaaaaaagaattctggttttgtcttactcttccagatgagatatcacagaggcttgggcctagattgtcatcagcatactgctatactattcgtttgttcttatt

SEQ ID NO: 317228 - DNA, 120 bp, Artificial Sequence
  ENSG00000135164_56 (sequence is synthesized)
aacctcaaatcatgtgcttttttttttttttaaggtctttggttggcttttgaggataaagatgagaagcttattgaaagaaacctttaaaaaccatttcatatttcataaagtttcaca

SEQ ID NO: 317229 - DNA, 120 bp, Artificial Sequence
  ENSG00000135164_57 (sequence is synthesized)
ttgctttcaagagcttgtaatttgtcttttctggcctaattgtttaaggttttgtttttgttttttccacagattcctagatagggttgttcatctgtcatcttaaaagggttttctgga

SEQ ID NO: 317230 - DNA, 120 bp, Artificial Sequence
  ENSG00000135164_58 (sequence is synthesized)
tttctggatgaatagggtactatataatttttaatgctttaagataaaacataaagaggtgttaataattataaaggaaaactatagttactaataatatttatggtgctgtattgattg

SEQ ID NO: 317231 - DNA, 120 bp, Artificial Sequence
  ENSG00000135164_59 (sequence is synthesized)
aatgactgggcaacaataggggcggcgctaggaagaagtgcatcttctgtcaaagatcggtgccgactgatgaaggatacttgcaacacaggatagcagaacttgatgtagctgatgaaa

SEQ ID NO: 317232 - DNA, 120 bp, Artificial Sequence
  ENSG00000135164_60 (sequence is synthesized)
actccagctgcagccactctcgcccgtggctgcttcctccatcctggtattttttggagcttccatcctggttcttccaaagtgcccggacccaaaacaggaaatttgagtatgagcaca

SEQ ID NO: 317233 - DNA, 120 bp, Artificial Sequence
  ENSG00000135164_61 (sequence is synthesized)
tccatccgttgtctagccatgagatgctatattctgagactagttattccatctgtctgaacaagaggaaaataatatttgtgtaaaatagcagatttgagtatgagcacagtggaagag

SEQ ID NO: 317234 - DNA, 120 bp, Artificial Sequence
  ENSG00000135164_62 (sequence is synthesized)
taagctcaaacccccaacctcacacctcacaaagtgttgtcactggcagaaatgggcaggcagtgatcctgtggcagtcaggaagaataagaaaaccatgttctatcttaccacagttcc

SEQ ID NO: 317235 - DNA, 120 bp, Artificial Sequence
  ENSG00000135164_63 (sequence is synthesized)
tcactaaaactttttcctctttacctacaatacattgagaaatgtttgttagaacccatagaagcattttcctgagtggttagtaatctttgtggttcagcctaggaacatcatcctaca

SEQ ID NO: 317236 - DNA, 120 bp, Artificial Sequence
  ENSG00000135164_64 (sequence is synthesized)
ctgtaacagcattgtttcttctgttatattcagctgacctataactgacctagtccttatgagttccttttgttaaaagtatgttagattgtgaggtcatcttttgtccctgtgagacct

SEQ ID NO: 317237 - DNA, 120 bp, Artificial Sequence
  ENSG00000135164_65 (sequence is synthesized)
taactttttattttatattctgatttttaaatgggttatgtttaagtctaacctatacatacctatacatgggattttaaggaagactagtaagaatatgagtcaatattttttttttaa

SEQ ID NO: 317238 - DNA, 120 bp, Artificial Sequence
  ENSG00000135164_66 (sequence is synthesized)
tgatccaataagctactagtcctgttgagttctacactgtggtagaataccttaaattcttgacatggattagagaataaatatatacatttaagactaacttgaaactcattacagatc

SEQ ID NO: 317239 - DNA, 120 bp, Artificial Sequence
  ENSG00000135164_67 (sequence is synthesized)
tttggggatttagtacccaggagagttgtttcagctaagtacacaagactgaaaaacaggctacatgattttaactcccagacctattttagagtgcaaatacttttttagaatattaag

SEQ ID NO: 317240 - DNA, 120 bp, Artificial Sequence
  ENSG00000135164_68 (sequence is synthesized)
ataaacctaaatcaaattttttatatagaagcttatggtcgtgaaaagtttattggtcaattttattatacttcctttaaaaattcaaaagaaaatgtgttatttaatagttaaccagct

SEQ ID NO: 317241 - DNA, 120 bp, Artificial Sequence
  ENSG00000135164_69 (sequence is synthesized)
ttttcagataaacatctttctccttcagcagaacattgctaattactatttctgtaccctgtccctttctataaaaaatttcccaaaattataccgtgaaaaagtgttcaagtaaacact

SEQ ID NO: 317242 - DNA, 120 bp, Artificial Sequence
  ENSG00000135164_70 (sequence is synthesized)
gctgttgtgccttttttttttaaactgggggcctgccagtttttacgtgctacaaagaaagaaaaagaggggtgattgggtgttgtgggttactgcactggaaacagtggctcatacaac

SEQ ID NO: 317243 - DNA, 120 bp, Artificial Sequence
  ENSG00000135164_71 (sequence is synthesized)
tgtcttggtgccctgaaacaaatagctgagaccagaccatagaaatacacaggagcaaagagcagcctcttaaaccttcaggctaggtaatgacttgagacgattatgccctacattgta

SEQ ID NO: 317244 - DNA, 120 bp, Artificial Sequence
  ENSG00000135164_72 (sequence is synthesized)
ttacttgttcgcaccttcacaatgggtaagtacatttgtgtctagtaaactaaactcagtccgtttttgtatataaaagtagacttaatcattgttaaactatctttcctttttccttta

SEQ ID NO: 317245 - DNA, 120 bp, Artificial Sequence
  ENSG00000135164_73 (sequence is synthesized)
tggagccaaaatgctattgccctgtcttcatcaacatttaatcactcctttatgtctccaaatgatacaagaagacccgagaaagtgagtgttgcggagataggaacatgggagagaaac

SEQ ID NO: 317246 - DNA, 120 bp, Artificial Sequence
  ENSG00000135175_0 (sequence is synthesized)
cagtgggcctgggaagatgtgtttcccctggatgtgcacgttcctgtttgtggcttatcgcctctcgtttattctgtgtgagtaggtagaaaatgagcatcacggacgtgctcagtgctg

SEQ ID NO: 317247 - DNA, 120 bp, Artificial Sequence
  ENSG00000135175_1 (sequence is synthesized)
atgacattgcagcagcgctccaggaatgccaagacccagacacttttgaaccccaaaaattcttccagacgtcaggcctctccaagatgtcagccagtcaggtgaaggatgttttccggt

SEQ ID NO: 317248 - DNA, 120 bp, Artificial Sequence; identical to SEQ ID NO: 246322
  ENSG00000135175_2 (sequence is synthesized)

SEQ ID NO: 317249 - DNA, 120 bp, Artificial Sequence
  ENSG00000135175_3 (sequence is synthesized)
taatcacctggaaggattccaaagccctgggaatggggaaccccacatcccatccctacctaatttgttaattttccctgaaaaccttctgcagtttgctcattgttttagcgaggtcac

SEQ ID NO: 317250 - DNA, 120 bp, Artificial Sequence
  ENSG00000135175_4 (sequence is synthesized)
gagagagtcactcatgactttcttggtggtgggtatatgccctgacaacttctgtaagccccccttcccccaacaggcaatgcctctaaaaatcacccaataaagacaggcttctcaaca

SEQ ID NO: 317251 - DNA, 120 bp, Artificial Sequence
  ENSG00000135175_5 (sequence is synthesized)
ggaaatctaagaggttgtaactatcactttttctagcctatataaggtaggtcagtaaggtagcaaaagcacatctgttgttttgctccttcaactctttttcctgattcttcctggggg

SEQ ID NO: 317252 - DNA, 120 bp, Artificial Sequence
  ENSG00000135185_0 (sequence is synthesized)
acttcctgcggcagctgctcaagatgaggaggtgcgcggggccggggcggagcagtcgcgttccccgcgtgtgagcccccacccatccctggcgccagcgcttccccgaccactcgggtt

SEQ ID NO: 317253 - DNA, 120 bp, Artificial Sequence
  ENSG00000135185_1 (sequence is synthesized)
cggctatgcgggagccgtgaggaggaggcttgcagtcgtggacctgagacctcgggaggtcatgctgtcttgcttttaagtggcttggggaaagtgaagaaaccccaaaatggaggactt

SEQ ID NO: 317254 - DNA, 120 bp, Artificial Sequence
  ENSG00000135185_2 (sequence is synthesized)
tgctaccaggacctacggcaccagtggcctggacaacagacctctgtttggggagacgtccgccaaggatcgaatcatcaatttagttgttggcagcttaacatccttattgattctagt

SEQ ID NO: 317255 - DNA, 120 bp, Artificial Sequence
  ENSG00000135185_3 (sequence is synthesized)
aacgctgataagtgcttttgttttccctcaactacctccaaaaccgttgaatatattctttgctgtctgcatctctttgagtagtattactgcctgcatacttatctactggtatcgaca

SEQ ID NO: 317256 - DNA, 120 bp, Artificial Sequence
  ENSG00000135185_4 (sequence is synthesized)
gtgaggctgccaaggagaagtacttaccaggactcttcaaaatgatacattaggacagtgagtaatttttggataaggtatgctgaagaatctcctgcagaagtctgatacatgattttc

SEQ ID NO: 317257 - DNA, 120 bp, Artificial Sequence
  ENSG00000135185_5 (sequence is synthesized)
atgttaattgtaaatgttaattccctcttgcaagggagacatatcctagatcactttgctttttctttaaggagctgatgttgcacctaaacattccaacccttaaagctaaaacagcac

SEQ ID NO: 317258 - DNA, 120 bp, Artificial Sequence
  ENSG00000135185_6 (sequence is synthesized)
aaaaaaatttcacttttgaaatgaaatttttataattgtatggcaaaaggctatgtaaaaacaaatcttgcatcttaagacaaatattcttttatttctgttaaactgaatatacaattg

SEQ ID NO: 317259 - DNA, 120 bp, Artificial Sequence
  ENSG00000135185_7 (sequence is synthesized)
ttccctaggcaaccaacttttgcttataactacaatttaatttcacgttgacaaaacacagtgaaaagacaactttgtgaagatctaattacaataataaataaaataatttatacaagg

SEQ ID NO: 317260 - DNA, 120 bp, Artificial Sequence
  ENSG00000135185_8 (sequence is synthesized)
gggcgggccgacttgcgacggaggcagcgggtccgggtcgggggacctgagaaggagccgggaggtgatccgcagcgctgcgacgggaccgcgcgattcctctcccacgcatctggcccg

SEQ ID NO: 317261 - DNA, 120 bp, Artificial Sequence
  ENSG00000135185_9 (sequence is synthesized)
taccacaaaattgcagttgctaattggagtagctaatttaattctgccccacccccaggttgaatatgtgaaatggtacaagtcagacaacttcgttttaagataattgagtttaccatg

SEQ ID NO: 317262 - DNA, 120 bp, Artificial Sequence
  ENSG00000135185_10 (sequence is synthesized)
catttctattttgttcctgaagaacatatccattaccctttggtcaagttttaaaagatttggtcacagtgtatagtagttgtactgtatacatcctgtatacagtatacatctgggagc

SEQ ID NO: 317263 - DNA, 120 bp, Artificial Sequence
  ENSG00000135185_11 (sequence is synthesized)
tattacaataaaatttttaaaagctgtattttccatagtttgacatttttctggcacattaaatttaagagaatttttttccatggcttcttaatgaaaagattgcatataatgctgcat

SEQ ID NO: 317264 - DNA, 120 bp, Artificial Sequence
  ENSG00000135185_12 (sequence is synthesized)
ctgttagaaacagaactatacaacattagaagtctttcagtgtgtttcataatgttatagcaaaaccagctttgattatattcattttgctagaaatatttaaaataacaaaatggctag

SEQ ID NO: 317265 - DNA, 120 bp, Artificial Sequence
  ENSG00000135185_13 (sequence is synthesized)
aacttttaccagcagaatcattaatcctgggagtgaggtttagttaatgaagttattttggcatcagctagtattactgatgttttctctcctttcataagtaagggaaagtttagaaaa

SEQ ID NO: 317266 - DNA, 120 bp, Artificial Sequence
  ENSG00000135185_14 (sequence is synthesized)
gtaagtactgttgagaatttaaacagtgttcttgagggtttaagttgcaatgcacaggacaaaaattttcagccttgggtctatacaaaagggtatctcttaattatatcctcatcctcc

SEQ ID NO: 317267 - DNA, 120 bp, Artificial Sequence
  ENSG00000135185_15 (sequence is synthesized)
ccctaaaagtatgttagaattctcaataaaatctgagtcttctccttttctcctaaatcccaaagttgtaaccccaaagagaaattccactcccttgatagcttaaaaaaaaaaaaaaaa

SEQ ID NO: 317268 - DNA, 120 bp, Artificial Sequence
  ENSG00000135185_16 (sequence is synthesized)
gtttcctcccagggccattgttaccacctgatcatttgagttttagtttctctagcagatgctggctaatgactgaccaggatcgaatcatcaatttagttgttggcagcttaacatcct

SEQ ID NO: 317269 - DNA, 120 bp, Artificial Sequence
  ENSG00000135185_17 (sequence is synthesized)
ttaaataacttggaaaaactactggactggatggtctcttaagattgcaagtgccaagccttggcactctaggacccatcccttttaacagtagcatctatttttagactagacaaggat

SEQ ID NO: 317270 - DNA, 120 bp, Artificial Sequence
  ENSG00000135185_18 (sequence is synthesized)
acctaagctgtattacaaatatagttccagacacatcatggtactctacatctagtccggttcctgatacctttaaccaatgctctggcctggccattcctgcagtgcctgtccttctcc

SEQ ID NO: 317271 - DNA, 120 bp, Artificial Sequence
  ENSG00000135185_19 (sequence is synthesized)
atcaagactctagtataaatgttctgtcccttcaagaaaccttccccagttggccattttcccaaagtacattttccactcttatggttcagtacactttgctttgtctggtagttttat

SEQ ID NO: 317272 - DNA, 120 bp, Artificial Sequence
  ENSG00000135185_20 (sequence is synthesized)
gtgtaaagctcagaggactggatcttgggtttctttatagtaaaccatccaaatgccttgcattgtactatactgaaggtaacatggatccaagtcatatggcttaaaaattcttttctc

SEQ ID NO: 317273 - DNA, 120 bp, Artificial Sequence
  ENSG00000135185_21 (sequence is synthesized)
tttcaggatcgaatcatcaatttagttgttggcagcttaacatccttattgattctagtaacgctgataagtgcttttgttttccctcaactacctccaaaaccgttgaatatattcttt

SEQ ID NO: 317274 - DNA, 120 bp, Artificial Sequence
  ENSG00000135185_22 (sequence is synthesized)
agttacgtgttcagtcatacaagtagtttcctctggtaatgcttcactaactccctttcatgagttgaatagtgaagtcagtaattaggcagtttttgcttctcaaagtgctccagacat

SEQ ID NO: 317275 - DNA, 120 bp, Artificial Sequence
  ENSG00000135185_23 (sequence is synthesized)
cccggcgcggccagggccccccagcgtgcgagcgcctaggggatgccgaggtttggcgggcgcgggaccaatatgggcagggccgaggcgggattctccctctcgctgtgcctagaccgt

SEQ ID NO: 317276 - DNA, 120 bp, Artificial Sequence
  ENSG00000135205_0 (sequence is synthesized)
ggataccaaggacgcgacttcttgtttggagagggtggagctttggagtgagacccaggaggccaaatcccaaagagaaaaataggagcctaaataaggatcaggaccaagggaagggaa

SEQ ID NO: 317277 - DNA, 120 bp, Artificial Sequence
  ENSG00000135205_1 (sequence is synthesized)
tcgtgaaaaatggaagacagtagcacagacacagaaaaagaagaggaagaggagaaagatgaaaaggatcaagagcccatttatgccatagtgcccacaattaacattcaagatgagcgg

SEQ ID NO: 317278 - DNA, 120 bp, Artificial Sequence
  ENSG00000135205_2 (sequence is synthesized)
tttgttgatttatctgaaactccagctttcatttttctgcatgagttacatgctatgggaaaacttcctggaaccagaatggcagcgttaaaagccaagtataccttgctgcatgacgcc

SEQ ID NO: 317279 - DNA, 120 bp, Artificial Sequence
  ENSG00000135205_3 (sequence is synthesized)
gtgatgagcacacaagagtcagaggtccaactgctacagaatgccaaacgtttcactgagcaaatacaacagcagcagtttcacctgcagcaagctgataattttccagaagcattctcc

SEQ ID NO: 317280 - DNA, 120 bp, Artificial Sequence
  ENSG00000135205_4 (sequence is synthesized)
acggaggtctccaaaatgagagaacaacttctcaagtatcaaaatgaatataatgcagtgaaggaaagagagttccataatcagtacagattaaatagcttaaaggaagaaaaaatcatc

SEQ ID NO: 317281 - DNA, 120 bp, Artificial Sequence
  ENSG00000135205_5 (sequence is synthesized)
atagtaaaagaatttgagaagataacaaagccaggagaaatggagaagaagatgaaaatattgagagaaagcactgaagaattacgtaaagaaataatgcagaagaaattagaaattaaa

SEQ ID NO: 317282 - DNA, 120 bp, Artificial Sequence
  ENSG00000135205_6 (sequence is synthesized)
aatttacgagaagatttggcatctaaacaaaagcaattattaaaagagcagaaggaactagaagaattgttgggacatcaggtcgtcctaaaggatgaagtggcccaccatcaaaccatt

SEQ ID NO: 317283 - DNA, 120 bp, Artificial Sequence
  ENSG00000135205_7 (sequence is synthesized)
ccagtacaaattggaaaagagatagaaaaaataacacgcaaaaaagtagaaatggaaaagaaaaaaattgtcttggaacaagaagtcaaaacgctaaatgactccctaaagaaagttgaa

SEQ ID NO: 317284 - DNA, 120 bp, Artificial Sequence
  ENSG00000135205_8 (sequence is synthesized)
aacaaggttagtgctatagtggatgagaaggaaaatgtaataaaggaagttgaaggcaaacgagccttacttgaaatcaaagaacgagaacataaccaattggtcaagctattggaatta

SEQ ID NO: 317285 - DNA, 120 bp, Artificial Sequence
  ENSG00000135205_9 (sequence is synthesized)
gccagagagaatgaagcaacttcattaactgaaagagggatcttggatctcaatttacgcaacagtctcattgacaagcagaactaccatgatgaactttctcgtaagcaaagagagaaa

SEQ ID NO: 317286 - DNA, 120 bp, Artificial Sequence
  ENSG00000135205_10 (sequence is synthesized)
gaacgagattttcgaaatttaagaaagatggaactgctcttgaaagtgtcctgggatgcacttaggcaaactcaagcactgcatcaaaggcttctattagagatggaagctatccccaaa

SEQ ID NO: 317287 - DNA, 120 bp, Artificial Sequence
  ENSG00000135205_11 (sequence is synthesized)
gatgattctacattatctgagagaaggcgagagcttcacaaggaagttgaagtagctaagaggaatttggcccaacagaaaattatatcagaaatggagtctaagttagtagaacaacaa

SEQ ID NO: 317288 - DNA, 120 bp, Artificial Sequence
  ENSG00000135205_12 (sequence is synthesized)
cttgcagaagaaaacaagcttttaaaggagcaagaaaacatgaaagagctagtagtcaaccttctccgcatgactcaaatcaaaattgatgaaaaggaacaaaagtccaaggatttcctg

SEQ ID NO: 317289 - DNA, 120 bp, Artificial Sequence
  ENSG00000135205_13 (sequence is synthesized)
gagactgagagagtttgctaaactgtatgacaccattcgaaatgaaagaaacaaatttgttaacttactccacaaagctcatcagaaagtaaatgaaataaaagaaaggcataaaatgtc

SEQ ID NO: 317290 - DNA, 120 bp, Artificial Sequence
  ENSG00000135205_14 (sequence is synthesized)
attaaatgaacttgaaattctgagaaatagtgccgttagtcaagaaagaaagctacaaaattccatgctgaaacacgccaacaatgttaccatcagagagagcatgcaaaacgatgtgcg

SEQ ID NO: 317291 - DNA, 120 bp, Artificial Sequence
  ENSG00000135205_15 (sequence is synthesized)
caaaattgtatcaaaacttcaggaaatgaaagaaaagaaggaagcccagttaaataacattgacagacttgccaacacgatcacaatgatcgaagaggagatggtgcagcttcgcaaaag

SEQ ID NO: 317292 - DNA, 120 bp, Artificial Sequence
  ENSG00000135205_16 (sequence is synthesized)
atacgaaaaagctgttcagcatcgaaatgaaagtggcgttcagctgatagagcgggaagaagaaatatgcattttttatgaaaaaataaatatccaagagaagatgaaactaaatggaga

SEQ ID NO: 317293 - DNA, 120 bp, Artificial Sequence
  ENSG00000135205_17 (sequence is synthesized)
aattgaaatacatctactggaagaaaagatccaattcctgaaaatgaagattgctgagaagcaaagacaaatttgtgtgacccagaaattactgccagccaagaggtccctggatgccga

SEQ ID NO: 317294 - DNA, 120 bp, Artificial Sequence
  ENSG00000135205_18 (sequence is synthesized)
cctagctgtgctccaaattcagttttcacagtgtacagacagaattaaagacctggagaaacagttcgtaaagcctgatggtgagaatagagctcgcttccttccagggaaagatctgac

SEQ ID NO: 317295 - DNA, 120 bp, Artificial Sequence
  ENSG00000135205_19 (sequence is synthesized)
cgaaaaagaaatgatccaaaaattagacaagctggaactacaactggccaagaaggaggagaagctgctggagaaggatttcatctatgagcaggtctccaggctcacagacaggctctg

SEQ ID NO: 317296 - DNA, 120 bp, Artificial Sequence
  ENSG00000135205_20 (sequence is synthesized)
cagcaaaactcagggctgcaagcaggacacactgctcttagccaagaagatgaatggctatcaaagaaggatcaaaaatgcaactgagaaaatgatggctcttgttgctgagctgtccat

SEQ ID NO: 317297 - DNA, 120 bp, Artificial Sequence
  ENSG00000135205_21 (sequence is synthesized)
gaaacaagccctaaccattgaactccaaaaggaagtcagggagaaagaagacttcatcttcacttgcaattccaggatagaaaaaggtctgccactcaataaggaaattgagaaagaatg

SEQ ID NO: 317298 - DNA, 120 bp, Artificial Sequence
  ENSG00000135205_22 (sequence is synthesized)
gttgaaagtccttcgagatgaagaaatgcacgccttggccatcgctgaaaagtctcaggagttcttggaagcagataatcgccagctgcccaatggtgtttacacaactgcagagcagcg

SEQ ID NO: 317299 - DNA, 120 bp, Artificial Sequence
  ENSG00000135205_23 (sequence is synthesized)
tccgaatgcctacatcccagaagcagatgccactcttcctttgccaaaaccttatggtgctttggctccttttaaacccagtgaacctggagccaatatgaggcacataaggaaacctgt

SEQ ID NO: 317300 - DNA, 120 bp, Artificial Sequence
  ENSG00000135205_24 (sequence is synthesized)
tataaagccagttgaaatctgaatatgtgaacaaatccaggcctctcaaggaaaagacttcaaccaggcttccttgtacccacaggtgaaaaatgtgagcataatacttctaatattatt

SEQ ID NO: 317301 - DNA, 120 bp, Artificial Sequence
  ENSG00000135205_25 (sequence is synthesized)
gataagtaaggtaaccacaattagtcagcaacagagtacaacagggtttctatttacccaccaactactatacctttcatgacgttgaatgggacatagaactgtcctacatttatgtca

SEQ ID NO: 317302 - DNA, 120 bp, Artificial Sequence
  ENSG00000135205_26 (sequence is synthesized)
aagtatatatttgaatcgcttatattttctttttcactctttatattgagtacattccagaaatttgtagtaggcaaggtgctataaaaatgcactaaaaataaatctgttctcaatgaa

SEQ ID NO: 317303 - DNA, 120 bp, Artificial Sequence
  ENSG00000135205_27 (sequence is synthesized)
aatgtggaaggtaaaggttttatcggtgacttttcacgtcaaggatataatgcaatacagttaagagcatcagagagaagaaatatactttccaggtaatcagaacacctagattttttt

SEQ ID NO: 317304 - DNA, 120 bp, Artificial Sequence
  ENSG00000135205_28 (sequence is synthesized)
aaataacacgcaaaaaagtgtatgatttaatatttttactttgaatccctgccagtccaagttatgtgtgcacactagaacaagagtactaaccattggacacattaaattactatgata

SEQ ID NO: 317305 - DNA, 120 bp, Artificial Sequence
  ENSG00000135205_29 (sequence is synthesized)
attttagaaatttctgctttgggccctgtctaggttgtttatatcaagttctttaaaagaaagtaatgcaccaaatttctatcattcatagtatttatggcttaattatgggtcaagatt

SEQ ID NO: 317306 - DNA, 120 bp, Artificial Sequence
  ENSG00000135205_30 (sequence is synthesized)
acattattgcttaaaattgcatctgttagctcctcgttgatgtagtttcacagatacctatggtactgtttcatgttatgctgacagacctatccttcattattctagtcactaatatag

SEQ ID NO: 317307 - DNA, 120 bp, Artificial Sequence
  ENSG00000135205_31 (sequence is synthesized)
tccttttgttgtaatctagtcatacattctaagcttgatttagacacttgccaaaagaagttccaatccagtggtttcgagattccaaaggcacatttctctcatgacccaaaggagtaa

SEQ ID NO: 317308 - DNA, 120 bp, Artificial Sequence
  ENSG00000135205_32 (sequence is synthesized)
ttgggactttcagagacattgtggctagccaaccacatggtcagcctcaaagttgagaggctcagtaaccctcctatccctagagaattccaaagtgtggatgtaatttaactagaaagc

SEQ ID NO: 317309 - DNA, 120 bp, Artificial Sequence
  ENSG00000135205_33 (sequence is synthesized)
cattggtgactatctgtgatcctctggaagtatgctatgttgtgtatatcttgcatccaaagccagagggaaccacaatgactagtaaaacggtggtctcaatgcccacttagcctctgc

SEQ ID NO: 317310 - DNA, 120 bp, Artificial Sequence
  ENSG00000135211_0 (sequence is synthesized)
agaactgagagatcctctaccgcagtcgtttgaggaggcggaactgaagttttttcttaattatcatgtgacgggttctggatttaatggggggaaaagggcggaaaaggacaaggatcc

SEQ ID NO: 317311 - DNA, 120 bp, Artificial Sequence
  ENSG00000135211_1 (sequence is synthesized)
aaactggcgaatttgctgatcttcgcgtccctctccgctttccggccggcagcgctgccagggtatatttccttttttccgatcctgcaacagcctctttaaactgtttaaatgagaatg

SEQ ID NO: 317312 - DNA, 120 bp, Artificial Sequence
  ENSG00000135211_2 (sequence is synthesized)
tccttggctcagagagtactactcacctggcttttcacactactcttcttgatcatgttggtgttgaaactggatgagaaagcaccttggaactggttcctcatattcattccagtctgg

SEQ ID NO: 317313 - DNA, 120 bp, Artificial Sequence
  ENSG00000135211_3 (sequence is synthesized)
aaatggctgggcggtgtaagtctggctttgaccctcgacatggatcacacaatattaaaaaaaaagcctggtacctcattgcaatgttacttaaattagccttctgcctcgcactctgtg

SEQ ID NO: 317314 - DNA, 120 bp, Artificial Sequence
  ENSG00000135211_4 (sequence is synthesized)
ctaaactggaacagtttactaccatgaatctatcctatgtcttcattcctttatgggccttgctggctggggctttaacagaactcggatataatgtcttttttgtgagagactgacttc

SEQ ID NO: 317315 - DNA, 120 bp, Artificial Sequence
  ENSG00000135211_5 (sequence is synthesized)
taagtacatcatctcctttctattgctgttcaacaagttaccattaaagtgttctgaatctgtcaagcttcaagaataccagagaactgagggaaaataccaaatgtagttttatactac

SEQ ID NO: 317316 - DNA, 120 bp, Artificial Sequence
  ENSG00000135211_6 (sequence is synthesized)
ttccataaaacaggattggtgaatcacggacttctagtcaacctacagcttaattattcagcatttgagttattgagatccttattatctctatgtaaataaagtttgttttggacctca

SEQ ID NO: 317317 - DNA, 120 bp, Artificial Sequence
  ENSG00000135218_0 (sequence is synthesized)
aacttgtgttaggcatgcgtccgaagagctggaaggctgaggatgtcaatggctttcagatgtcaggataaccttaaggatagatgaagggttgagagcctgtgcctcatttctgagttc

SEQ ID NO: 317318 - DNA, 120 bp, Artificial Sequence
  ENSG00000135218_1 (sequence is synthesized)
tcagctgctatgccgtggaaatcctgtttactttctgcatctgctcctgcaagactctggagccagtcttgaggtcctacatctccgaaagcaagctcttctagaagttgatagctttcc

SEQ ID NO: 317319 - DNA, 120 bp, Artificial Sequence
  ENSG00000135218_2 (sequence is synthesized)
aatgattagacgaattgattctttctgtgactcatcagttcatttcctgtaaaattcatgtcttgctgttgatttgtgaataagaaccagagcttgtagaaaccactttaatcatatcca

SEQ ID NO: 317320 - DNA, 120 bp, Artificial Sequence
  ENSG00000135218_3 (sequence is synthesized)
ggagtttgcaagaaacaggtgcttaacactaattcacctcctgaacaagaaaaatgggctgtgaccggaactgtgggctcatcgctggggctgtcattggtgctgtcctggctgtgtttg

SEQ ID NO: 317321 - DNA, 120 bp, Artificial Sequence
  ENSG00000135218_4 (sequence is synthesized)
gaggtattctaatgccagttggagacctgcttatccagaagacaattaaaaagcaagttgtcctcgaagaaggtacaattgcttttaaaaattgggttaaaacaggcacagaagtttaca

SEQ ID NO: 317322 - DNA, 120 bp, Artificial Sequence
  ENSG00000135218_5 (sequence is synthesized)
gacagttttggatctttgatgtgcaaaatccacaggaagtgatgatgaacagcagcaacattcaagttaagcaaagaggtccttatacgtacagagttcgttttctagccaaggaaaatg

SEQ ID NO: 317323 - DNA, 120 bp, Artificial Sequence
  ENSG00000135218_6 (sequence is synthesized)
taacccaggacgctgaggacaacacagtctctttcctgcagcccaatggtgccatcttcgaaccttcactatcagttggaacagaggctgacaacttcacagttctcaatctggctgtgg

SEQ ID NO: 317324 - DNA, 120 bp, Artificial Sequence
  ENSG00000135218_7 (sequence is synthesized)
cagctgcatcccatatctatcaaaatcaatttgttcaaatgatcctcaattcacttattaacaagtcaaaatcttctatgttccaagtcagaactttgagagaactgttatggggctata

SEQ ID NO: 317325 - DNA, 120 bp, Artificial Sequence
  ENSG00000135218_8 (sequence is synthesized)
tttatccttacaacaatactgcagatggagtttataaagttttcaatggaaaagataacataagtaaagttgccataatcgacacatataaaggtaaaaggaatctgtcctattgggaaa

SEQ ID NO: 317326 - DNA, 120 bp, Artificial Sequence
  ENSG00000135218_9 (sequence is synthesized)
gtcactgcgacatgattaatggtacagatgcagcctcatttccaccttttgttgagaaaagccaggtattgcagttcttttcttctgatatttgcaggtcaatctatgctgtatttgaat

SEQ ID NO: 317327 - DNA, 120 bp, Artificial Sequence
  ENSG00000135218_10 (sequence is synthesized)
ccgacgttaatctgaaaggaatccctgtgtatagatttgttcttccatccaaggcctttgcctctccagttgaaaacccagacaactattgtttctgcacagaaaaaattatctcaaaaa

SEQ ID NO: 317328 - DNA, 120 bp, Artificial Sequence
  ENSG00000135218_11 (sequence is synthesized)
attgtacatcatatggtgtgctagacatcagcaaatgcaaagaagggagacctgtgtacatttcacttcctcattttctgtatgcaagtcctgatgtttcagaacctattgatggattaa

SEQ ID NO: 317329 - DNA, 120 bp, Artificial Sequence
  ENSG00000135218_12 (sequence is synthesized)
acccaaatgaagaagaacataggacatacttggatattgaacctataactggattcactttacaatttgcaaaacggctgcaggtcaacctattggtcaagccatcagaaaaaattcaag

SEQ ID NO: 317330 - DNA, 120 bp, Artificial Sequence
  ENSG00000135218_13 (sequence is synthesized)
tattaaagaatctgaagaggaactatattgtgcctattctttggcttaatgagactgggaccattggtgatgagaaggcaaacatgttcagaagtcaagtaactggaaaaataaacctcc

SEQ ID NO: 317331 - DNA, 120 bp, Artificial Sequence
  ENSG00000135218_14 (sequence is synthesized)
ttggcctgatagaaatgatcttactcagtgttggtgtggtgatgtttgttgcttttatgatttcatattgtgcatgcagatcgaaaacaataaaataagtaagtatgtaccaaaaaatat

SEQ ID NO: 317332 - DNA, 120 bp, Artificial Sequence
  ENSG00000135218_15 (sequence is synthesized)
tgcttcaataatattagcttatatattacttgttttcactttatcaaagagaagttacatattaggccatatatatttctagacatgtctagccactgatcatttttaaatataggtaaa

SEQ ID NO: 317333 - DNA, 120 bp, Artificial Sequence
  ENSG00000135218_16 (sequence is synthesized)
taaacctataaatattatcacgcagatcactaaagtatatctttaattctgggagaaatgagataaaagatgtacttgtgaccattgtaacaatagcacaaataaagcacttgtgccaaa

SEQ ID NO: 317334 - DNA, 120 bp, Artificial Sequence
  ENSG00000135218_17 (sequence is synthesized)
gattgcatggagacactcaggagcacaaattgcaccacggggttagtccatcacggggttagtccatccaaaagcaaggaggcagcctttggtacccctgtgccagtcaatattcattaa

SEQ ID NO: 317335 - DNA, 120 bp, Artificial Sequence
  ENSG00000135218_18 (sequence is synthesized)
ttcattaaagggcagttttttcaaggaagtcggagctagctgctggacactaacagtcaaatctcaaaggagctgggagagaaatgcacaagcagacagggtcttgctctgttgcccagg

SEQ ID NO: 317336 - DNA, 81 bp, Artificial Sequence
  ENSG00000135218_19 (sequence is synthesized)
gctcaagtgaaaggtttccaagaattacgttggtaggcattcaactggcatcctctggaggtaaccagatgcccagctgct

SEQ ID NO: 317337 - DNA, 120 bp, Artificial Sequence
  ENSG00000135218_20 (sequence is synthesized)
gtttccaagaattacgttggtaggcattcaactggcatcctctggaggtaaccagatgcccagctgctcctggaggggacatatggaagtgggctcataggcggaagggacttgccttgt

SEQ ID NO: 317338 - DNA, 120 bp, Artificial Sequence
  ENSG00000135218_21 (sequence is synthesized)
atcctaggccctgcattcctgtcatcctcatccgggggaaacaccatcatcccagtagctgccctattcaactgcaacagtctccaggaccatcagtatactgcatttcatgtgcaccaa

SEQ ID NO: 317339 - DNA, 120 bp, Artificial Sequence
  ENSG00000135218_22 (sequence is synthesized)
atattttgaaagacatttataaataattggcttatgactcatatttctctatgaataccttcatacagcaggtataactcttttctttatgggcttaaatattttgtcactgatcctgca

SEQ ID NO: 317340 - DNA, 120 bp, Artificial Sequence
  ENSG00000135218_23 (sequence is synthesized)
aatggacatcattttagcacactagcggtttatattttaaggaccttcattctctgttctgcacctcttctggaaattgagtaaattttgcttttttttttttactcagttgcaacttac

SEQ ID NO: 317341 - DNA, 120 bp, Artificial Sequence
  ENSG00000135218_24 (sequence is synthesized)
gcttggcatcttcagaatgcttttctagcattaagagatgtaaatgataaaggaattattgtatgaaatattacaaagcgtagactatgcattgttattcattataatattttttgctgt

SEQ ID NO: 317342 - DNA, 120 bp, Artificial Sequence
  ENSG00000135218_25 (sequence is synthesized)
tatgttcttccttaaattcctgtgctttttctagttcctcttgtgtcataaaatgtttatcctaattttctctctgaagtatattttatctgaatccacatttctttataaatccatagt

SEQ ID NO: 317343 - DNA, 120 bp, Artificial Sequence
  ENSG00000135218_26 (sequence is synthesized)
ccttgctgaaatatgctttctaaatttctaccactttgttctaggctaattttttaagctaattggatgaagaacaaaaagacatttggtttcatcctttacagcagtaggacaattgca

SEQ ID NO: 317344 - DNA, 120 bp, Artificial Sequence
  ENSG00000135218_27 (sequence is synthesized)
aaggtttttcctttttcataaggagacacattaataggtaactctgtttcttgagcaggggttcacttattctgagagcattagttctcctaaaaagctccagcatagaaagggaagata

SEQ ID NO: 317345 - DNA, 120 bp, Artificial Sequence
  ENSG00000135218_28 (sequence is synthesized)
aaccaaattctagcttgtgttttacccacagaaggatacaggacaaaggaatagtaactggcctgtttggatactaaaatcgaaaataacttttagcctcctccttatgatagccgccag

SEQ ID NO: 317346 - DNA, 120 bp, Artificial Sequence
  ENSG00000135218_29 (sequence is synthesized)
agtaaatgttgagcattactacagaaaagccacaaaccaagaatctacctgtttggaaagatcttttgcatctctgaaggtgcttaaagcatacttagtgcctttccttttaactgggaa

SEQ ID NO: 317347 - DNA, 120 bp, Artificial Sequence
  ENSG00000135218_30 (sequence is synthesized)
gataaaagaagtatctgtccaagatattaatatgtaagataacattgtagacatgttcttctgataatacaaggtttattctatttgcattaggatatttgtggacatgtccatctaata

SEQ ID NO: 317348 - DNA, 120 bp, Artificial Sequence
  ENSG00000135218_31 (sequence is synthesized)
taaaggaaagttttttaatcattgaggcatgtagggctgagttatataatgtagaaacttctaaagataattggatgagaatatacatattgacctgtatattatgactaatcatgactc

SEQ ID NO: 317349 - DNA, 120 bp, Artificial Sequence
  ENSG00000135218_32 (sequence is synthesized)
agatcttaatacagggatgatctcatagcatttagatatcagaaaaggttttgacctatatgtctttaatattgtttgaatacatgtataatctttatcattcctcagtgtttcatttct

SEQ ID NO: 317350 - DNA, 120 bp, Artificial Sequence
  ENSG00000135218_33 (sequence is synthesized)
caaattctgtaaaaggaatataagaggaaagacaattcatatacaaagacaacgagattaaaaatatgcagtaggaaaaataattacttaaggggagattttttttacatgaaatctggg

SEQ ID NO: 317351 - DNA, 120 bp, Artificial Sequence
  ENSG00000135218_34 (sequence is synthesized)
gtgtgtgtgtgtgtgtgtgtgtgcacatatgcactgtggtgggagtggggcaacttggggaatatgttacatgtgtgactttgttttgccctggcgaagttaatgttgttcagaaagggt

SEQ ID NO: 317352 - DNA, 120 bp, Artificial Sequence
  ENSG00000135218_35 (sequence is synthesized)
gttgttcagaaagggtaaatgtttggacacttgcaattgctcatggatgaatttatatgttttagtcatagaaaaattgtaccctttgatagaagcacattttctttccaaagctggtta

SEQ ID NO: 317353 - DNA, 120 bp, Artificial Sequence
  ENSG00000135218_36 (sequence is synthesized)
ttaaccacagaattatagcaggtattcataacttaagtttgaaaatcaatagcgtctgcaaatggattaacagattagagaatcaacagcatcggaaaataggttaatgcatattgcttc

SEQ ID NO: 317354 - DNA, 120 bp, Artificial Sequence
  ENSG00000135218_37 (sequence is synthesized)
taacaagtgcatgaagaaatagaagaagctatgtagctttcagttctgacagaaaagggtgaaggagggtatcatttcaagaaaaaaaatagctatcacgcaatggttatctctgaaaat

SEQ ID NO: 317355 - DNA, 120 bp, Artificial Sequence
  ENSG00000135218_38 (sequence is synthesized)
tctctactaaaaatacaaaaatgagcggggtgtggtggcccatgcctgtagtcccagctgctcgggagactgaatctcttgagcctgggaagcagaggttgcagtgaactgagatcgcgt

SEQ ID NO: 317356 - DNA, 120 bp, Artificial Sequence
  ENSG00000135218_39 (sequence is synthesized)
agcgagattccatctcaaaaaaaaaaaacagtatgcacgtacaaatttcttaacctgttatcaatgtctgagctacataattatctttctagttggagtttgttttaggtgtgtaccaac

SEQ ID NO: 317357 - DNA, 120 bp, Artificial Sequence
  ENSG00000135218_40 (sequence is synthesized)
ctagttggagtttgttttaggtgtgtaccaactgacatttcagtttttctgtttgaagtccaatgtattagtgactctgtggctgctctcttcacctgccccttgtggcctgtctacaat

SEQ ID NO: 317358 - DNA, 120 bp, Artificial Sequence
  ENSG00000135218_41 (sequence is synthesized)
tctaaatggattttgaactcaatgtcgtcgcttctggtttcctgcatataccaatagcattacctatgactttttttttcctgagctattttcactgagctgagctaatgaactaaaact

SEQ ID NO: 317359 - DNA, 120 bp, Artificial Sequence
  ENSG00000135218_42 (sequence is synthesized)
gagttatgtttaatatttgtatcaaatacataaaaggaatactgctttttccttttgtggctcaaaggtagctgcattttaaaatatttgtgaaaataaaaacttttgttattagaaaaa

SEQ ID NO: 317360 - DNA, 120 bp, Artificial Sequence
  ENSG00000135218_43 (sequence is synthesized)
ctttcaattcctctggcaacaaaccacacactgggatctgacactgtagagtgctttctcttctctttttttgggggggggagggggtgtggttgcatatttaaactctcacgcatttat

SEQ ID NO: 317361 - DNA, 120 bp, Artificial Sequence
  ENSG00000135218_44 (sequence is synthesized)
gtactgaggactgcagtgtaggactttcctgcagaataccatttgatcctattaagaattgtccaaatgttggagcatttgattgaaaaatccttcttagccattttaaagatagctttc

SEQ ID NO: 317362 - DNA, 120 bp, Artificial Sequence
  ENSG00000135218_45 (sequence is synthesized)
gactgcagtgtaggactttcctgcagaataccatttgatcctattaagaattgtccaaatgttggagcatttgattgaaaaatccttcttagccattttaaagactcattagtgaaccag

SEQ ID NO: 317363 - DNA, 120 bp, Artificial Sequence
  ENSG00000135218_46 (sequence is synthesized)
aaaaggtacaagtagtccaaagaatatgccttctcattttgattgattctaacttctctttttttgctttgtatttacctgctttatatttcatggtaactgctaattttgtatctttga

SEQ ID NO: 317364 - DNA, 120 bp, Artificial Sequence
  ENSG00000135218_47 (sequence is synthesized)
cataaaggtaattatgaaccactgcaactctatatgatgcgactttatgtgaaatgttataagtataatgtatatttaacatgactccattgctgtcttaaatataaataccaaattcta

SEQ ID NO: 317365 - DNA, 120 bp, Artificial Sequence
  ENSG00000135218_48 (sequence is synthesized)
ttaaaagctgtctacaggtatgcatgttagtagaaataattgttttaagttatgtccaaagagcatgttggcatgcttttgagtaggaaataagtgagtatattttgtaaaagcacattt

SEQ ID NO: 317366 - DNA, 120 bp, Artificial Sequence
  ENSG00000135218_49 (sequence is synthesized)
atgacattattagttctgccactggtaggcattagaagcaagaaaagggagacggaccgaggaagccactttggtgaaacaaaaagaaaagcatttgtttatttagaacgggcaaaatga

SEQ ID NO: 317367 - DNA, 120 bp, Artificial Sequence
  ENSG00000135218_50 (sequence is synthesized)
tacgtttcagtgggtgttttctttgtactttgatctttttgtactgatatttaagcttctgttttatgatctctttctaatgatagaaccagagcttgtagaaaccactttaatcatatc

SEQ ID NO: 317368 - DNA, 120 bp, Artificial Sequence
  ENSG00000135218_51 (sequence is synthesized)
gaccaacaggatgaaaattggatatgctttacttttacaaagcacaccttatcttttagttgaagaaatggtggcactatttctttttttgcactaagcaactgcacatttcaaaaggat

SEQ ID NO: 317369 - DNA, 120 bp, Artificial Sequence
  ENSG00000135218_52 (sequence is synthesized)
tattgagatgttatgaaaatctctaccttgcacaaaaaaaaacccagcagcttttaaaattcatcatttccacaactgaattgatttccgtttctacagacctggctcaagcacaaacca

SEQ ID NO: 317370 - DNA, 120 bp, Artificial Sequence
  ENSG00000135218_53 (sequence is synthesized)
gagagttctccttagataagatttcaatatgttaatcatgtgtagaaagaaaattaaaaaggaggaatatgaagaaattcagatatgacattattagttctgccactggtaggcattaga

SEQ ID NO: 317371 - DNA, 120 bp, Artificial Sequence
  ENSG00000135218_54 (sequence is synthesized)
ggaaggaaccagggtgaagagcagctcatttttaagctggagaggttaacaaacactggctgcaagatttactttggtttaggaataccactgtctcacaggagtgtcaatcaaaattcc

SEQ ID NO: 317372 - DNA, 120 bp, Artificial Sequence
  ENSG00000135218_55 (sequence is synthesized)
ctggtcttcccaactagcattctgaaagtgcattaacatttgtggccttgtgctctttcatcggacttctaatgagaattgtttttgcaagctgttcaagtaagaattaggtctgccaac

SEQ ID NO: 317373 - DNA, 120 bp, Artificial Sequence
  ENSG00000135218_56 (sequence is synthesized)
atttttagatggcctgtaaaatttacataatgatttggccatgcccacatgagaactacctacatatacagaagtgctctctttaatctgttacaagcatgacttctattaaacctatag

SEQ ID NO: 317374 - DNA, 120 bp, Artificial Sequence
  ENSG00000135218_57 (sequence is synthesized)
cctgcttatccagaagacaattaaaaaggcacagaagtttacagacagttttggatctttgatgtgcaaaatccacaggaagtgatgatgaacagcagcaacattcaagttaagcaaaga

SEQ ID NO: 317375 - DNA, 120 bp, Artificial Sequence
  ENSG00000135218_58 (sequence is synthesized)
cgctgaaatgagtctctctctttgcctgcctccatccacgtaagatatgacttggtcctccttgccttcggcaatgattgtgtggcctccccagccacgtagaactgtaagtccaataaa

SEQ ID NO: 317376 - DNA, 120 bp, Artificial Sequence
  ENSG00000135218_59 (sequence is synthesized)
cccagtctcaggtatgtctttatcagcaccgtgaaaatggactactacagtaaatacacttgtcaggggtaccaattttaaaatatgaaacctggaggatataatgttaagtgaaataag

SEQ ID NO: 317377 - DNA, 120 bp, Artificial Sequence
  ENSG00000135218_60 (sequence is synthesized)
aatgttaagtgaaataagcaaggcacaaaaagacaaataccacattatctcactcatatgtagaatctgaaaaagttgatgtcatataagcaaagggtagaatggtgttaccaagggctg

SEQ ID NO: 317378 - DNA, 120 bp, Artificial Sequence
  ENSG00000135218_61 (sequence is synthesized)
gggcagttgaggaaaggggtctgggaagatgttggtcaaaggatataaaagtacagttagatgggaggaataagttcaagagctctattgtacaatatagtgatactattatgtattaca

SEQ ID NO: 317379 - DNA, 120 bp, Artificial Sequence
  ENSG00000135218_62 (sequence is synthesized)
atatgattagtaatatatagaactcttgaaaaatgctaagagagtggataggtgttcttactacaaaatatataactatgtgaatgaattcatatgttaattagctagatttagtcattt

SEQ ID NO: 317380 - DNA, 120 bp, Artificial Sequence
  ENSG00000135218_63 (sequence is synthesized)
cacaatgtaaatacaccttgaaacatgttgtacatgataaatacatacgattttatctgacaatttgtaaaaattgacaaaagtgataaaagaaataaacaaaatagaactataagaact

SEQ ID NO: 317381 - DNA, 120 bp, Artificial Sequence
  ENSG00000135218_64 (sequence is synthesized)
catgggagaattaaagggaggaaggggcaagaatataaattaatcatctacatgttttgaatgtttgctgatccaaacatctgcttctttcctcttccctgcttctctcttctgcctgcc

SEQ ID NO: 317382 - DNA, 120 bp, Artificial Sequence
  ENSG00000135218_65 (sequence is synthesized)
ttgtacttagcttatatcagttacccacttaacactttccttctattcattctgaacacttatactactgagtaattcatgtatcccattggaaaaaaaaaaatttcccctaagtagaga

SEQ ID NO: 317383 - DNA, 120 bp, Artificial Sequence
  ENSG00000135218_66 (sequence is synthesized)
tctaagtttctgataaatgtttttaatttttttcttattccaagatgtttctaattaacacctggcagtttttattttatgatctggctacctaatggcatcaggtacattgcaataaga

SEQ ID NO: 317384 - DNA, 120 bp, Artificial Sequence
  ENSG00000135218_67 (sequence is synthesized)
taaaaggttcaaacaaaacataaacagaattgaacatttcttaaacttagtacttgtcacatttaaatgcatcatattaacagaagtattgaattataatagaaaaagtaatgtaagaaa

SEQ ID NO: 317385 - DNA, 120 bp, Artificial Sequence
  ENSG00000135218_68 (sequence is synthesized)
cacagcataggaaattcatcatgtttattaactaactctttgcaaaatgttcttctgcatcttccaatttttaatagtacaaattttttttttttttgccatttctatctaagcaagaac

SEQ ID NO: 317386 - DNA, 120 bp, Artificial Sequence
  ENSG00000135218_69 (sequence is synthesized)
cattttgccttttaaaaactaaactagtagtctattaacgatcaagtccagaagggcgtgcccaatctttctaaagacatacagagaagatgatgcaaatgtaacagaactgtgttaatg

SEQ ID NO: 317387 - DNA, 120 bp, Artificial Sequence
  ENSG00000135218_70 (sequence is synthesized)
tgctctgctcagatttgtggggcccagtagataacacacaagcactggagcctttaccactacccttgagcccaagctctgtccctaaagactgtatgcttgtgggtaggcatttaacat

SEQ ID NO: 317388 - DNA, 120 bp, Artificial Sequence
  ENSG00000135218_71 (sequence is synthesized)
ctctgaatttttttcttatctgtacaatttaagacagcagtatttcttcatatacgtgtatctggggataagaaaaatatgtgtattgaaccctatgatagacacttggtaaacgatgga

SEQ ID NO: 317389 - DNA, 120 bp, Artificial Sequence
  ENSG00000135218_72 (sequence is synthesized)
aatgtaccaggtatatatccagcatgtatatgcatacactccagtgagtggtctttctttccaggattaattaagccgtgaaagaaactatttcatttaaactgatcacaaataaagtat

SEQ ID NO: 317390 - DNA, 120 bp, Artificial Sequence
  ENSG00000135218_73 (sequence is synthesized)
ttgaaggaagtcctataaatatttactctattggataaattgcctgtgagaagtaacttgagtataaataaacatggtacttcacaaacaagaatagttcatgcttggctattgagtttt

SEQ ID NO: 317391 - DNA, 120 bp, Artificial Sequence
  ENSG00000135218_74 (sequence is synthesized)
agtatgtgttaaaatttcccaatcactttttttctaagaatgaaacaagaatttaaaagagtatatgatgtttctaagttaaaacaagaataagaaaaaatgaatctccagaatgtaagt

SEQ ID NO: 317392 - DNA, 120 bp, Artificial Sequence
  ENSG00000135218_75 (sequence is synthesized)
aagaacatgagtaaatctatgtaagtaagtggaaataacatctgatatcaacttatctttagcttaatgtcaccaatcattattaaatgcttatgactaatttcacagattttggaatgg

SEQ ID NO: 317393 - DNA, 120 bp, Artificial Sequence
  ENSG00000135218_76 (sequence is synthesized)
ttttatggttttatttgagcatttgatagcatctcttattttgttagctgcccaaatatttctatgacaataattaatttttggaattcatatttcagttccccgagaatttattgaaag

SEQ ID NO: 317394 - DNA, 120 bp, Artificial Sequence
  ENSG00000135218_77 (sequence is synthesized)
gaaaaatccacacttgtgaaaaaaaatcaatgtgattagaagacatataagagcaaaggaagtcaaaaacaactatattaaaatttaaatgagtcattacaggaacaaaatcaaattagc

SEQ ID NO: 317395 - DNA, 120 bp, Artificial Sequence
  ENSG00000135218_78 (sequence is synthesized)
ttaaagtttgttatatataaatattagtttatatgttcataattattttcaacgtatattacagagtattaaagaatctgaagaggaactatattgtgcctattctttggcttaatgagg

SEQ ID NO: 317396 - DNA, 120 bp, Artificial Sequence
  ENSG00000135218_79 (sequence is synthesized)
attgtgcctattctttggcttaatgaggtttgtatttgcagctgttagtcattaaaaacaaccttctttgtatataaacaagctcttgatgtttcaaaagaatgtatagtatttaaagct

SEQ ID NO: 317397 - DNA, 120 bp, Artificial Sequence
  ENSG00000135218_80 (sequence is synthesized)
atatgtatttccattacccatatggatgagtatacatttatttaacctatttgagatgatccaattgaacaaaaacatttcctatcatttaagattttcttcaaaaatgcatctattaaa

SEQ ID NO: 317398 - DNA, 120 bp, Artificial Sequence
  ENSG00000135218_81 (sequence is synthesized)
cacattttcttgttgtaacatttgtcttctattgcctgacaaggtatttttactataaatccatgcattgatagctataaaaataggaaaaacattgaataagtctttggagcaaatgaa

SEQ ID NO: 317399 - DNA, 120 bp, Artificial Sequence
  ENSG00000135218_82 (sequence is synthesized)
actgttgaccctttgatagttctgaagagcaaatgaatcctagtacattgaagagtaccgtactctatctggcacttaattgcctttcttgacttgcaaaaggaattccattaacttgcc

SEQ ID NO: 317400 - DNA, 120 bp, Artificial Sequence
  ENSG00000135220_0 (sequence is synthesized)
aactacaaaaccattgcagatcagtgtgtgagggaactgccatcatgaggtctgacaagtcagctttggtatttctgctcctgcagctcttctgtgttggctgtggattctgtgggaaag

SEQ ID NO: 317401 - DNA, 120 bp, Artificial Sequence
  ENSG00000135220_1 (sequence is synthesized)
tcctggtgtggccctgtgacatgagccattggcttaatgtcaaggtcattctagaagagctcatagtgagaggccatgaggtaacagtattgactcactcaaagccttcgttaattgact

SEQ ID NO: 317402 - DNA, 120 bp, Artificial Sequence
  ENSG00000135220_2 (sequence is synthesized)
acaggaagccttctgcattgaaatttgaggtggtccatatgccacaggacagaacagaagaaaatgaaatatttgttgacctagctctgaatgtcttgccaggcttatcaacctggcaat

SEQ ID NO: 317403 - DNA, 120 bp, Artificial Sequence
  ENSG00000135220_3 (sequence is synthesized)
cagttataaaattaaatgatttttttgttgaaataagaggaactttaaaaatgatgtgtgagagctttatctacaatcagacgcttatgaagaagctacaggaaaccaactacgatgtaa

SEQ ID NO: 317404 - DNA, 120 bp, Artificial Sequence
  ENSG00000135220_4 (sequence is synthesized)
tgcttatagaccctgtgattccctgtggagacctgatggctgagttgcttgcagtcccttttgtgctcacacttagaatttctgtaggaggcaatatggagcgaagctgtgggaaacttc

SEQ ID NO: 317405 - DNA, 120 bp, Artificial Sequence
  ENSG00000135220_5 (sequence is synthesized)
cagctccactttcctatgtacctgtgcctatgacaggactaacagacagaatgacctttctggaaagagtaaaaaattcaatgctttcagttttgttccacttctggattcaggattacg

SEQ ID NO: 317406 - DNA, 120 bp, Artificial Sequence
  ENSG00000135220_6 (sequence is synthesized)
actatcatttttgggaagagttttatagtaaggcattaggaaggcccactacattatgtgagactgtgggaaaagctgagatatggctaatacgaacatattgggattttgaatttcctc

SEQ ID NO: 317407 - DNA, 120 bp, Artificial Sequence
  ENSG00000135220_7 (sequence is synthesized)
aaccataccaacctaactttgagtttgttggaggattgcactgtaaacctgccaaagctttgcctaaggaaatggaaaattttgtccagagttcaggggaagatggtattgtggtgtttt

SEQ ID NO: 317408 - DNA, 120 bp, Artificial Sequence
  ENSG00000135220_8 (sequence is synthesized)
ctctggggtcactgtttcaaaatgttacagaagaaaaggctaatatcattgcttcagcccttgcccagatcccacagaaggtgttatggaggtacaaaggaaaaaaaccatccacattag

SEQ ID NO: 317409 - DNA, 120 bp, Artificial Sequence
  ENSG00000135220_9 (sequence is synthesized)
gagccaatactcggctgtatgattggataccccagaatgatcttcttggtcatcccaaaaccaaagcttttatcactcatggtggaatgaatgggatctatgaagctatttaccatgggg

SEQ ID NO: 317410 - DNA, 120 bp, Artificial Sequence
  ENSG00000135220_10 (sequence is synthesized)
tccctatggtgggagttcccatatttggtgatcagcttgataacatagctcacatgaaggccaaaggagcagctgtagaaataaacttcaaaactatgacaagcgaagatttactgaggg

SEQ ID NO: 317411 - DNA, 120 bp, Artificial Sequence
  ENSG00000135220_11 (sequence is synthesized)
ctttgagaacagtcattaccgattcctcttataaagagaatgctatgagattatcaagaattcaccatgatcaacctgtaaagcccctagatcgagcagtcttctggatcgagtttgtca

SEQ ID NO: 317412 - DNA, 120 bp, Artificial Sequence
  ENSG00000135220_12 (sequence is synthesized)
gtggcaactgctatattcttgttcacaaaatgttttttattttcctgtcaaaaatttaataaaactagaaagatagaaaagagggaatagatctttccaaattcaagaaagacctgatgg

SEQ ID NO: 317413 - DNA, 120 bp, Artificial Sequence
  ENSG00000135220_13 (sequence is synthesized)
ggtaatcctgttaattccagccacatagaatttggtgaaaaccttgctattttcatattatctattctgttattttatcttagctatatagcctagaattccacgatcatgaggttgtga

SEQ ID NO: 317414 - DNA, 120 bp, Artificial Sequence
  ENSG00000135220_14 (sequence is synthesized)
gtatatctcattctttcgttgtattttcctaggtgtctttactctcttctctcactttgtgacacaaggacatgaatacatctaaattttcctatttctgatatgactgttttgatgatg

SEQ ID NO: 317415 - DNA, 120 bp, Artificial Sequence
  ENSG00000135220_15 (sequence is synthesized)
tcattacttctataaccttaagtgatagggtgacatgcaatatgattattcctggtgtgcgcccaaacacatggatataaagaggtaaaaaacttaaaattcacaaaattcagtaaacca

SEQ ID NO: 317416 - DNA, 120 bp, Artificial Sequence
  ENSG00000135220_16 (sequence is synthesized)
cacaaatcaggtaagtgttctatgagattagctggctatgagaaacataatgatgtttctttttcaatttaaataagcccttctacatagccagcatcagtgatctcagaaaataaattg

SEQ ID NO: 317417 - DNA, 120 bp, Artificial Sequence
  ENSG00000135220_17 (sequence is synthesized)
ctaataatgatgacatggcattatgcttagaaaagtttgctgtatttccatagacctcatctagatgtcatggcctacatttctgccatcactcaaccaatacttttttctgttttcttg

SEQ ID NO: 317418 - DNA, 120 bp, Artificial Sequence
  ENSG00000135220_18 (sequence is synthesized)
atgataaaaagacctttctcatgattgccatcaaataacaaaagaaactattttttttctcacatagagaacatgtcagtaagatattcaaggtgaacagattatttttgggattagtaa

SEQ ID NO: 317419 - DNA, 120 bp, Artificial Sequence
  ENSG00000135220_19 (sequence is synthesized)
caaggtgaacagattatttttgggattagtaactatttgaaatatgtggtgataattactgagtttataaaatttatttgatagtacacttaaagaagatttatatgtttattctttaaa

SEQ ID NO: 317420 - DNA, 120 bp, Artificial Sequence
  ENSG00000135220_20 (sequence is synthesized)
atcaaaagtataatttactgtagaaaaataaagagatgcttgttctgaaagtaagatcagtgaactgcttttcagtctcaatctttgagaattgtaaattcatcaaataattgcttacat

SEQ ID NO: 317421 - DNA, 120 bp, Artificial Sequence
  ENSG00000135220_21 (sequence is synthesized)
aatatgttaatcttctcatttttttactgtcatataatcttagtgatatgcctattaatagttttaaataaataaattggctcatctggctttttgaaaattttgaaattcttacagatg

SEQ ID NO: 317422 - DNA, 120 bp, Artificial Sequence
  ENSG00000135220_22 (sequence is synthesized)
aaaccaagctctcttaagccatggcatctgtatctaaaatagaaatacagaaggagagctgacaatttccatcattctctaggaaatggaaaattttgtccagagttcaggggaagatgg

SEQ ID NO: 317423 - DNA, 120 bp, Artificial Sequence
  ENSG00000135222_0 (sequence is synthesized)
gacttagtagccatgaaggtcctcatcctcgcctgcctggtggctcttgctcttgcaagggagaccatagaaagcctttcaagcagtgaggaatctattacagaatacaagcagaaagtt

SEQ ID NO: 317424 - DNA, 120 bp, Artificial Sequence
  ENSG00000135222_1 (sequence is synthesized)
gagaaggttaaacatgaggaccagcagcaaggagaggatgaacaccaggataaaatctacccctctttccagccacagcctctgatctatccattcgttgaacctatcccctatggtttt

SEQ ID NO: 317425 - DNA, 120 bp, Artificial Sequence
  ENSG00000135222_2 (sequence is synthesized)
cttccacaaaacattctgcctcttgctcagcctgctgtggtgctgcctgtccctcagcctgaaataatggaagtccctaaagctaaagacactgtctacactaagggcagagtgatgcct

SEQ ID NO: 317426 - DNA, 120 bp, Artificial Sequence
  ENSG00000135222_3 (sequence is synthesized)
gtccttaaatctccaacgatacccttttttgaccctcaaatcccaaaactcactgatcttgaaaatctgcatcttcctctgcctctgctccagcccttgatgcagcaggtccctcagcct

SEQ ID NO: 317427 - DNA, 120 bp, Artificial Sequence
  ENSG00000135222_4 (sequence is synthesized)
ctgttcaagcccttctgctcaaccaagaacttctacttaaccccacccaccagatctaccctgtgactcagccacttgccccagttcataaccccattagtgtctaagaagatttcaaag

SEQ ID NO: 317428 - DNA, 120 bp, Artificial Sequence
  ENSG00000135222_5 (sequence is synthesized)
ttaattttccctccttatttttgaattgactgagactggaaatatgatgccttttccgtctttgtatcacgttaccccaaattaagtatgtttgaatgagtttatatggaaaaaatgaac

SEQ ID NO: 317429 - DNA, 120 bp, Artificial Sequence
  ENSG00000135222_6 (sequence is synthesized)
tttgtccctttatttattttatatattatgtcattcatttaatttgaaatttgactcatgaactatttacattttccaaatcttaattcaactagtaccacagaagttcaatactcattt

SEQ ID NO: 317430 - DNA, 120 bp, Artificial Sequence
  ENSG00000135222_7 (sequence is synthesized)
ggaaatgctacaaacatatcaaacatatgtatacaaattgtttctggaattgtgcttatttttatttctttaagaatctatttcctttccagtcatttcaataaattattcttaagcata

SEQ ID NO: 317431 - DNA, 120 bp, Artificial Sequence
  ENSG00000135226_0 (sequence is synthesized)
gaaaagaatgattgcattgcaccaggatggctctgaagtggacttcagttcttctgctgatacatctcggttgttactttagctctgggagttgtggaaaggtgctggtgtggaccggtg

SEQ ID NO: 317432 - DNA, 120 bp, Artificial Sequence
  ENSG00000135226_1 (sequence is synthesized)
aatacagccattggatgaatatgaagacaatcctgaaagagcttgttcagagaggtcatgaggtgactgtactggcatcttcagcttccattctttttgatcccaatgacgcattcactc

SEQ ID NO: 317433 - DNA, 120 bp, Artificial Sequence
  ENSG00000135226_2 (sequence is synthesized)
ttaaactcgaagtttatcctacatctttaactaaaactgaatttgagaatatcatcatgcaacaggttaagagatggtcagacattcaaaaagatagcttttggttatatttttcacaag

SEQ ID NO: 317434 - DNA, 120 bp, Artificial Sequence
  ENSG00000135226_3 (sequence is synthesized)
aacaagaaatcctgtgggaatttcatgacatatttagaaacttctgtaaagatgtagtttcaaataagaaagttatgaaaaaactacaagagtcaagatttgacatcatttttgcagatg

SEQ ID NO: 317435 - DNA, 120 bp, Artificial Sequence
  ENSG00000135226_4 (sequence is synthesized)
ctttttttccttgtggtgagctgctggctgcgctacttaacataccgtttgtgtacagtctctgcttcactcctggctacacaattgaaaggcacagtggaggactgattttccctcctt

SEQ ID NO: 317436 - DNA, 120 bp, Artificial Sequence
  ENSG00000135226_5 (sequence is synthesized)
cctacatacctgttgttatgtcaaaattaagtgatcaaatgactttcatggagagggtaaaaaacatgatctatgtgctttattttgacttttggttccaaatgtgtgatatgaagaagt

SEQ ID NO: 317437 - DNA, 120 bp, Artificial Sequence
  ENSG00000135226_6 (sequence is synthesized)
gggatcagttttacagtgaagttttaggaagacccactaccttatttgagacaatggggaaagctgacatatggcttatgcgaaactcctggagttttcaatttcctcatccattcttac

SEQ ID NO: 317438 - DNA, 120 bp, Artificial Sequence
  ENSG00000135226_7 (sequence is synthesized)
aaatggaggaatttgtacagagctctggtgaaaatggtgttgtggtgttttctctggggtcagtgataagtaacatgacagcagaaagggccaacgtaattgcaacagcccttgccaaga

SEQ ID NO: 317439 - DNA, 120 bp, Artificial Sequence
  ENSG00000135226_8 (sequence is synthesized)
tcccacaaaaggttctgtggagatttgatgggaataaaccagatgccttaggtctcaatactcggctgtataagtggataccccagaatgaccttctaggtcttccaaaaaccagagctt

SEQ ID NO: 317440 - DNA, 120 bp, Artificial Sequence
  ENSG00000135226_9 (sequence is synthesized)
ttataactcatggtggagccaatggcatctatgaggcaatctaccatgggatccctatggtaggcattccattgttttgggatcaacctgataacattgctcacatgaaggccaagggag

SEQ ID NO: 317441 - DNA, 120 bp, Artificial Sequence
  ENSG00000135226_10 (sequence is synthesized)
cagctgttagactggacttccacacaatgtcgagtacagacctgctgaatgcactgaagacagtaattaatgatccttcatataaagagaatgttatgaaattatcaataattcaacatg

SEQ ID NO: 317442 - DNA, 120 bp, Artificial Sequence
  ENSG00000135226_11 (sequence is synthesized)
atcaaccagtaaagcccctgcatcgagcagtcttctggattgaatttgtgatgtgccacaaaggagccaaacaccttcgagttgcagcccgtgacctcacctggttccagtaccactctt

SEQ ID NO: 317443 - DNA, 120 bp, Artificial Sequence
  ENSG00000135226_12 (sequence is synthesized)
tggatgtgattgggtttctgctggcctgtgtggcaactgtgatatttgtcgtcacaaagttttgtctgttttgtttctggaagtttgctagaaaagggaagaagggaaaaagagattagt

SEQ ID NO: 317444 - DNA, 120 bp, Artificial Sequence
  ENSG00000135226_13 (sequence is synthesized)
tatgtctgacatttgaagctggaaaaccagatagatgggttgacatcagtttattccagcaagaaagaaaagattgttatgcaagatttctttcttcctgtgacaaaaaaaaaaactttt

SEQ ID NO: 317445 - DNA, 120 bp, Artificial Sequence
  ENSG00000135226_14 (sequence is synthesized)
caaaatctaccttgtcaagtaaaaatttgtttttcagagatttaccacccaggtaatggttagaaatattctgtggcaatgaagaaaacactagggaaaataaaaaataatataaagcca

SEQ ID NO: 317446 - DNA, 120 bp, Artificial Sequence
  ENSG00000135241_0 (sequence is synthesized)
agtgtttgtgttggaagctcagctgatgcaggccggttggagtggacgtcattgccgggaacgagcgagtcgccgctgcagccctagtgactgcggcctgcatcccgattgtcttctcct

SEQ ID NO: 317447 - DNA, 120 bp, Artificial Sequence
  ENSG00000135241_1 (sequence is synthesized)
ccaaggtctacatgattacctgaagtttaataagtaagaccatgaattatggcatttcttaaatgaagcgttcaagaagtgagagaatgtcatagaaaataaatgatttttaagttatgt

SEQ ID NO: 317448 - DNA, 120 bp, Artificial Sequence
  ENSG00000135241_2 (sequence is synthesized)
ctattaatctgactgtagatatatatatttacctccttagtaatgcaagaagtgtttgtgggaagcagagaagcaagcaactgtatttcttgttctcacctaagcattactggaggataa

SEQ ID NO: 317449 - DNA, 120 bp, Artificial Sequence
  ENSG00000135241_3 (sequence is synthesized)
gccacatcagtctacaaagaggttttcatacaaacataataagatgtaaatggaccaaaagtgaagcacattcttgcagtaagcactgttactctccaagcaaccatggtttacatattg

SEQ ID NO: 317450 - DNA, 120 bp, Artificial Sequence
  ENSG00000135241_4 (sequence is synthesized)
ggattttgaaacttagcacttctgctcccaagggacttacaaaagtgaacatttgtatgtcccgtattaaaagtactttgaactctgtttcaaaggctgtttttggcaatcaaaatgaaa

SEQ ID NO: 317451 - DNA, 120 bp, Artificial Sequence
  ENSG00000135241_5 (sequence is synthesized)
tgatttcacgtttagctcaatttaagccaagttcccaaattttaagaaaagtatcggatagtggctggttaaaacagaaaaacatcaaacaagccatcaaatctctgaaaaaatatagtg

SEQ ID NO: 317452 - DNA, 120 bp, Artificial Sequence
  ENSG00000135241_6 (sequence is synthesized)
acaaatcagcagaaaagagtccttttccagaagagaaaagtcacattatagacaaagaagaagatataggtaaacgcagtctttttcattacacaagttctataaccacaaaatttggag

SEQ ID NO: 317453 - DNA, 120 bp, Artificial Sequence
  ENSG00000135241_7 (sequence is synthesized)
actcattctactttttatcaaatcatattaattcatatttcaaacgtaaggaaaaaatgtctcaacaaaaggaaaatgaacatttccgggacaaatcagaacttgaagataaaaaggtag

SEQ ID NO: 317454 - DNA, 120 bp, Artificial Sequence
  ENSG00000135241_8 (sequence is synthesized)
aagaggggaaattaagatctccagatcctggcatcctggcttataagccaggctcagaatctgtacatacggtggacaagcctacaagtccttctgcgatacctgatgttcttcaagttt

SEQ ID NO: 317455 - DNA, 120 bp, Artificial Sequence
  ENSG00000135241_9 (sequence is synthesized)
caactaaacaaagtattgctaactttctttctcgtcccacggaaggtgtacaagctttagtaggtggttatattggtggacttgtccccaaattaaagtatgattcaaagagtcagtcag

SEQ ID NO: 317456 - DNA, 120 bp, Artificial Sequence
  ENSG00000135241_10 (sequence is synthesized)
aagaacaggaagagcctgctaaaactgatcaggctgtcagcaaagacagaaatgcagaggagaaaaagcgtttatctcttcagcgagaaaagattatcgcaagggtgagtattgataaca

SEQ ID NO: 317457 - DNA, 120 bp, Artificial Sequence
  ENSG00000135241_11 (sequence is synthesized)
ggacccgggcattagttcaggcattaagaagaacaactgacccaaagctctgcattactagggttgaagaactgacttttcatcttctagaatttcctgaaggaaaaggagtggctgtca

SEQ ID NO: 317458 - DNA, 120 bp, Artificial Sequence
  ENSG00000135241_12 (sequence is synthesized)
aggaaagaattattccatatttattacgactgagacaaattaaggatgaaactcttcaggctgcagttagagaaattttggccctaattggctatgtggatccagtgaaagggagaggaa

SEQ ID NO: 317459 - DNA, 120 bp, Artificial Sequence
  ENSG00000135241_13 (sequence is synthesized)
tccgaattctctcaattgatggtggaggaacaaggggcgtggttgctctccagaccctacgaaaattagttgaacttactcagaagccagttcatcagctctttgattacatttgtggtg

SEQ ID NO: 317460 - DNA, 120 bp, Artificial Sequence
  ENSG00000135241_14 (sequence is synthesized)
taagcacaggtgccatattagctttcatgttggggttgtttcatatgcccttggatgaatgtgaggaactttatcgaaaattaggatcagatgtattttcacaaaatgtcattgttggaa

SEQ ID NO: 317461 - DNA, 120 bp, Artificial Sequence
  ENSG00000135241_15 (sequence is synthesized)
cagtaaaaatgagttggagccatgcattttatgacagtcaaacatgggaaaacattcttaaggataggatgggatctgcactgatgattgaaacagcaagaaaccccacatgtcctaagg

SEQ ID NO: 317462 - DNA, 120 bp, Artificial Sequence
  ENSG00000135241_16 (sequence is synthesized)
tagctgctgtaagtaccatagtaaatagagggataacacccaaagcttttgtgttcagaaactatggtcattttcctggaatcaactctcattatttgggaggctgtcagtataaaatgt

SEQ ID NO: 317463 - DNA, 120 bp, Artificial Sequence
  ENSG00000135241_17 (sequence is synthesized)
ggcaggccattagagcctcatctgctgctccaggctactttgcagaatatgcattgggaaatgatcttcatcaagatggaggtttgcttctgaataacccttcggcattagctatgcatg

SEQ ID NO: 317464 - DNA, 120 bp, Artificial Sequence
  ENSG00000135241_18 (sequence is synthesized)
agtgtaaatgtctttggccagatgtgccgttagagtgcatagtatccctgggcactggacgttatgagagtgatgtgagaaacacggtaacatacacaagcttgaaaactaaactttcta

SEQ ID NO: 317465 - DNA, 120 bp, Artificial Sequence
  ENSG00000135241_19 (sequence is synthesized)
acagtgctacagatacagaagaagtccatataatgcttgatggcctgttacctcctgacacctattttagattcaatcctgtaatgtgtgaaaacatacctctagatgaaagtcgaaatg

SEQ ID NO: 317466 - DNA, 120 bp, Artificial Sequence
  ENSG00000135241_20 (sequence is synthesized)
aaaagctggatcagctgcagttggaagggttgaaatacatagaaagaaatgaacaaaaaatgaaaaaagttgcaaaaatattaagtcaagaaaaaacaactctgcagaaaattaatgatt

SEQ ID NO: 317467 - DNA, 120 bp, Artificial Sequence
  ENSG00000135241_21 (sequence is synthesized)
ggataaaattaaaaactgatatgtatgaaggacttccattcttttcaaaattgtgatgagtatatgcttatgttctcataaatgaaggtctgtttagaagatcaaccacattcaataagg

SEQ ID NO: 317468 - DNA, 120 bp, Artificial Sequence
  ENSG00000135241_22 (sequence is synthesized)
aattgtggggttcgacatgagttaactttgaaatacgtatgaattctggagaatcctgaaaaagacggtgcttcaaccagcttgcatagcacagagaatattcttggttacagaattcat

SEQ ID NO: 317469 - DNA, 120 bp, Artificial Sequence
  ENSG00000135241_23 (sequence is synthesized)
atgggaactaggcttttaagatgttaataattagctaagctttagtaacccttactgtgctagtagattttagtagatattggtgttatattgtttgatgtttgaaaatatattaatata

SEQ ID NO: 317470 - DNA, 120 bp, Artificial Sequence
  ENSG00000135241_24 (sequence is synthesized)
tgtgccgaacaagaaaccgaaagctatattgtactgtgtatttttactttagtcctcataatcatgttgaatttatgtgatcattgattttatttcatatggaaaagctaatttcttctt

SEQ ID NO: 317471 - DNA, 120 bp, Artificial Sequence
  ENSG00000135241_25 (sequence is synthesized)
aaatttacattacctaatattctcactagctatgttctccaatccacactgccttttattgtaatatcatctaaatagatgcagaaaaatggaattttctctattaaagtattttacatt

SEQ ID NO: 317472 - DNA, 120 bp, Artificial Sequence
  ENSG00000135241_26 (sequence is synthesized)
tgacataaaaaagaaccagatacagttttctattcagatatgtttattttaacattgtttggttaaaaaaggtgaagttccagtcaaccactttttacccctgaaatttcaagataatgc

SEQ ID NO: 317473 - DNA, 120 bp, Artificial Sequence
  ENSG00000135241_27 (sequence is synthesized)
tatattaacttttccagatctaacactagcttattcttccctgttataaaatggtttgaacttactgaggagatattcctatcattaacaaaaataaactatttaaataatctgttgtta

SEQ ID NO: 317474 - DNA, 120 bp, Artificial Sequence
  ENSG00000135241_28 (sequence is synthesized)
aaaggctaatgtcattttaaaattaatttttgttcataatgtagctcccctttagcctttgaatacacctggcagcagtatgcttaaaaataagaagttagttgcctggcgcagtagctc

SEQ ID NO: 317475 - DNA, 74 bp, Artificial Sequence
  ENSG00000135241_29 (sequence is synthesized)
agagacggaggttgcagtgagccaaatagcgccagtgcactccagcctaggcgacacagcgagactccatctca

SEQ ID NO: 317476 - DNA, 120 bp, Artificial Sequence
  ENSG00000135241_30 (sequence is synthesized)
aaaaaaaaaaaaaaaaaaagaagaagttaggcttgttttaccttattaactcctttgaactgtctggatttcatggaagttggtaagatgcacttacatggaacattgttcatgccaaac

SEQ ID NO: 317477 - DNA, 120 bp, Artificial Sequence
  ENSG00000135241_31 (sequence is synthesized)
catggaacattgttcatgccaaacaaactcatctttattgtatctatttgtcacataaatccttacatggaatgttttgatttcttaagaaaaatgaaacaaaggttagcgccccttgtt

SEQ ID NO: 317478 - DNA, 120 bp, Artificial Sequence
  ENSG00000135241_32 (sequence is synthesized)
ttagacatacaaactaaagctagaccctgttgcccagatagtcatattgcttctttgcaatatcaattcacagaggctgtgagatgtggttcaaagagtggagtcgagagtctggatgct

SEQ ID NO: 317479 - DNA, 120 bp, Artificial Sequence
  ENSG00000135241_33 (sequence is synthesized)
aatcctgcctttgctgcaagaacccttctgtttgttaccttgaggaaggcaaatgtctgtaggctttgcatatctcatttgtaaaatgaggaaaggtagctgtaaaattttctaacatcc

SEQ ID NO: 317480 - DNA, 120 bp, Artificial Sequence
  ENSG00000135241_34 (sequence is synthesized)
gaattatataaactttagacatagtataaaataggaaactaccaatgatttctaaagataatatagttctttcagaccacaaataatacataataacatgcaactaagaacaacttgtaa

SEQ ID NO: 317481 - DNA, 120 bp, Artificial Sequence
  ENSG00000135241_35 (sequence is synthesized)
atgcaagaaaaaaacaaataattggaaatcagaatatttctgggaattcttcgtaataaagcaaatttcaagcacaataaagtaatatttatgcatatttacatatttgcacctcatcat

SEQ ID NO: 317482 - DNA, 120 bp, Artificial Sequence
  ENSG00000135241_36 (sequence is synthesized)
aaggtcactctagtcctaaactgatgtagttcatctgttttacagctgaagttaagtatgtcccttatttgtgcttggcttatttctttcttaaataatacattacacaagtgaactctg

SEQ ID NO: 317483 - DNA, 120 bp, Artificial Sequence
  ENSG00000135241_37 (sequence is synthesized)
gtcatgctctattgcgcatatctcggggcgggggaggaacggagattgacaaggaggcagaggcctgagcgaggcggaaaatcctcaccccggcccgcgggtagacccaaacttctagcg

SEQ ID NO: 317484 - DNA, 120 bp, Artificial Sequence
  ENSG00000135241_38 (sequence is synthesized)
aaggatgaaagcctgaactagagcagtggaaatgcgaatgtggagcagaggaacgattcaagaaattctgcggtaaaactcatcagacttcatgactgattaaagattgtcttctcctcc

SEQ ID NO: 317485 - DNA, 120 bp, Artificial Sequence
  ENSG00000135241_39 (sequence is synthesized)
agctcagctgatgcaggccggttggagtggacgtcattgccgggaacgagcgagtcgccgctgcagccctagtgactgcggcctgcatcccgattatcgcaagggtgagtattgataaca

SEQ ID NO: 317486 - DNA, 120 bp, Artificial Sequence
  ENSG00000135241_40 (sequence is synthesized)
aggggatgaaagagcataagcggagagggaatggtggtgctctctccttgaccatactttagttaggctcctctgagccctcttcccaactaggcctcatccttgggcccctgtcttagg

SEQ ID NO: 317487 - DNA, 120 bp, Artificial Sequence
  ENSG00000135241_41 (sequence is synthesized)
cctgctgagtccagttttagcaagaatcttgcaaagtcagtttagagagtatctcctagccttgataattgatcatctccgcctgtcttcagcaagaatcttagtgttatacagctggaa

SEQ ID NO: 317488 - DNA, 120 bp, Artificial Sequence
  ENSG00000135241_42 (sequence is synthesized)
aatctgtcttataagattactgagaaagtaatgaacactgtcaccttggttgtcatgtggtgaactgcatgtattggttaataataatcatacattttcagtcttgatttgacaaaagca

SEQ ID NO: 317489 - DNA, 120 bp, Artificial Sequence
  ENSG00000135241_43 (sequence is synthesized)
aggggctcgagaggcctggacctgtggcgcatcctcagtgaggagggccgccctgcatccgtcgccggccccggtctccaggggcctcacccgagtcatgccccgctattgcgcagcgat

SEQ ID NO: 317490 - DNA, 120 bp, Artificial Sequence
  ENSG00000135245_0 (sequence is synthesized)
gcgctctgcggctgacggcgcttttgtctccggtgagttttgtggcgggaagcttctgcgctggtgcttagtaaccgactttcctccggactcctgcacgacctgctcctacagccggcg

SEQ ID NO: 317491 - DNA, 120 bp, Artificial Sequence
  ENSG00000135245_1 (sequence is synthesized)
atccactcccggctgttcccccggagggtccagaggcctttcagaaggagaaggcagctctgtttctctgcagaggagtagggtcctttcagccatgaagcatgtgttgaacctctacct

SEQ ID NO: 317492 - DNA, 120 bp, Artificial Sequence
  ENSG00000135245_2 (sequence is synthesized)
gttaggtgtggtactgaccctactctccatcttcgttagagtgatggagtccctagagggcttactagagagcccatcgcctgggacctcctggaccaccagaagccaactagccaacac

SEQ ID NO: 317493 - DNA, 120 bp, Artificial Sequence
  ENSG00000135245_3 (sequence is synthesized)
agagcccaccaagggccttccagaccatccatccagaagcatgtgataagacctccttccatactggccatattttggaacactgacctagacatgtccagatgggagtcccattcctag

SEQ ID NO: 317494 - DNA, 120 bp, Artificial Sequence
  ENSG00000135245_4 (sequence is synthesized)
cagacaagctgagcaccgttgtaaccagagaactattactaggccttgaagaacctgtctaactggatgctcattgcctgggcaaggcctgtttaggccggttgcggtggctcatgcctg

SEQ ID NO: 317495 - DNA, 80 bp, Artificial Sequence
  ENSG00000135245_5 (sequence is synthesized)
cgagatcgcactgctgtacccagcctgggccagcctgtttaatgcacaggtgtgagtggattgcttatggctatgagata

SEQ ID NO: 317496 - DNA, 120 bp, Artificial Sequence
  ENSG00000135245_6 (sequence is synthesized)
aatgcacaggtgtgagtggattgcttatggctatgagataggttgatctcgcccttaccccggggtctggtgtatgctgtgctttcctcagcagtatggctctgacatctcttagatgtc

SEQ ID NO: 317497 - DNA, 120 bp, Artificial Sequence
  ENSG00000135245_7 (sequence is synthesized)
ccaacttcagctgttgggagatggtgatattttcaaccctacttcctaaacatctgtctggggttcctttagtcttgaatgtcttatgctcaattatttggtgttgagcctctcttccac

SEQ ID NO: 317498 - DNA, 120 bp, Artificial Sequence
  ENSG00000135245_8 (sequence is synthesized)
aagagctcctccatgtttggatagcagttgaagaggttgtgtgggtgggctgttgggagtgaggatggagtgttcagtgcccatttctcattttacattttaaagtcgttcctccaacat

SEQ ID NO: 317499 - DNA, 120 bp, Artificial Sequence
  ENSG00000135245_9 (sequence is synthesized)
agtgtgtattggtctgaagggggtggtgggatgccaaagcctgctcaagttatggacattgtggccaccatgtggcttaaatgattttttctaactaataaagtggaatatatatttcta

SEQ ID NO: 317500 - DNA, 120 bp, Artificial Sequence
  ENSG00000135245_10 (sequence is synthesized)
atcttccagggtacctaacacattgcagatattcatggtatgtttgttaaataaatgaacttgatagatttgaccctcatagagttatttggacttgcaaaaagtttgtagttaactcca

SEQ ID NO: 317501 - DNA, 120 bp, Artificial Sequence
  ENSG00000135245_11 (sequence is synthesized)
atctgtgatgtgggagagacttctaggcaggttcctttctccagggcatgttcttatatttcccattacccaccacccccctgcaaaaggactgggcctatttcaggaaggtgactgatg

SEQ ID NO: 317502 - DNA, 120 bp, Artificial Sequence
  ENSG00000135245_12 (sequence is synthesized)
tgggcctatttcaggaaggtgactgatgcctgcactgtagcacaggggttgtgtattgtgccttgcaggaacaaaattttcaataaagtaaatgtttgtttgtttgtttttgagacggag

SEQ ID NO: 317503 - DNA, 120 bp, Artificial Sequence
  ENSG00000135245_13 (sequence is synthesized)
ggtgagcggccctgtgggcttccccggctccccacccccatcgctagagtgctcgccgcgctagcagcctcgcgttccagggctgggggtgcgccgccgggatcctctctgatcgcccac

SEQ ID NO: 317504 - DNA, 120 bp, Artificial Sequence
  ENSG00000135245_14 (sequence is synthesized)
gccccatctggggtccccattcagccgtcagccctgttttgtcctaaggtggtcctaactaggatccacgtggcccatcccacgcccacaggtgctgagttaggcatccctgccatgccc

SEQ ID NO: 317505 - DNA, 120 bp, Artificial Sequence
  ENSG00000135248_0 (sequence is synthesized)
ggagacagagatcccaggacaaatgtgcagcaggcccctgagcatgtgtagaaatgttgtcatcatttccacatagaaagacttggaggaaatcaaagaagacagtaaaagtcacaagat

SEQ ID NO: 317506 - DNA, 120 bp, Artificial Sequence
  ENSG00000135248_1 (sequence is synthesized)
cctatccaaccttcccttccctgaatgcctgggaagaattcaggggcctcttgcctgtggatggagagccgaaccctggagcgggcctaggtgtggaggagggactgctctgccgggtgg

SEQ ID NO: 317507 - DNA, 120 bp, Artificial Sequence
  ENSG00000135248_2 (sequence is synthesized)
ttcattctccagaattcaacctgtttcttgactccgtggtgtttgaaagcaacttcatccaggtcaaaaggggcaggaattggagagacgtctacaaagcttccaacaccatggccctgg

SEQ ID NO: 317508 - DNA, 120 bp, Artificial Sequence
  ENSG00000135248_3 (sequence is synthesized)
gggtgacctcctcggtaccctgcctgcccctccccaacatcctactcatggccagtgtcaaatggcaccaggggcagaaccagacatggaacagaccatccatagcccccaacatcttcc

SEQ ID NO: 317509 - DNA, 120 bp, Artificial Sequence
  ENSG00000135248_4 (sequence is synthesized)
tgaagaggattctcccattgaggtttgtggagctccaggtatgtgaccactatcaacgcatcctgcagttgaggacagtcactgagaagatttattacctaaagctccatcctgaccatc

SEQ ID NO: 317510 - DNA, 120 bp, Artificial Sequence
  ENSG00000135248_5 (sequence is synthesized)
ctgagactgtcttccacttctggatccgactggttcaaattctgcaaaaggggctgtccatcaccaccaaagaccctaggattcttgtcacgcactgcctggtacccaagaactgcagca

SEQ ID NO: 317511 - DNA, 120 bp, Artificial Sequence
  ENSG00000135248_6 (sequence is synthesized)
gcccctcaggagattcgaagttagtacagaagaaactccaagcctcccagcccagcgagagtctcattcagctaatgaccaagggggagagtgaagccctgtctcagatttttgccgact

SEQ ID NO: 317512 - DNA, 120 bp, Artificial Sequence
  ENSG00000135248_7 (sequence is synthesized)
aaggtggagaccaacaagaacagctcagggaaagattcttcccgtgaagacagcatcccttgcacctgtgacctacgttggagggcttcattcacgtacggagagtgggaaagagagaac

SEQ ID NO: 317513 - DNA, 120 bp, Artificial Sequence
  ENSG00000135248_8 (sequence is synthesized)
ccctccggcctgcagcccctctcactactcagcactctggcagcctccaccgggccacagctggccccacccataggaaattctatttgagccacccttccgcactggggagaatctatg

SEQ ID NO: 317514 - DNA, 120 bp, Artificial Sequence
  ENSG00000135248_9 (sequence is synthesized)
caagcctcgtcaacaccactttgcagcattcagctgctgagggattatcgggatggagagtaggagaaaactgcaaccaaggaagaatagagtcatctcacggtgacagcagagcctttc

SEQ ID NO: 317515 - DNA, 120 bp, Artificial Sequence
  ENSG00000135248_10 (sequence is synthesized)
cagctgtacataaccacgtcctcgccactgcacctcggcatatgccacctccatgccactgccagagctggcctagcaagatgtgctctcagaatggccgggcccaagagatgaaggaaa

SEQ ID NO: 317516 - DNA, 120 bp, Artificial Sequence
  ENSG00000135248_11 (sequence is synthesized)
ggagtgaaagggaagtaggaccagagaagtggaaggaagcaaaatggaggtgatgagaaaggtggtgggagaaagtcagcagatgagagacacaaagagaagtggtaataggaaacggaa

SEQ ID NO: 317517 - DNA, 120 bp, Artificial Sequence
  ENSG00000135248_12 (sequence is synthesized)
gagacttggtagacgagataaggaggacaagagaagggacacacccctgagagatgctcaccaagcttctatttatctaatttaaaacttgaaagtaaagccataaacaaaaaaaagaaa

SEQ ID NO: 317518 - DNA, 120 bp, Artificial Sequence
  ENSG00000135248_13 (sequence is synthesized)
tgttttcttccctgctcagaccattctggacaaatgtgaactgccagacaccttccatttccctttctatctgtttttcttgctagttcctgtcttctgattaaagcttcattccttctt

SEQ ID NO: 317519 - DNA, 120 bp, Artificial Sequence
  ENSG00000135248_14 (sequence is synthesized)
agacataatgatggcaggagctggagcagccacctgaggacccagagctcaaagccacatgttgagaagggcagagataactgtatccactctggactgctgacctttgaactattatgt

SEQ ID NO: 317520 - DNA, 120 bp, Artificial Sequence
  ENSG00000135248_15 (sequence is synthesized)
tatttccagggaaatgcaaaccaaaggatgtggtctctgatctaatccttagagaatgtgaccatgaagacacttttcctacctggtcaaaaggggcaggaattggagagacgtctacaa

SEQ ID NO: 317521 - DNA, 120 bp, Artificial Sequence
  ENSG00000135248_16 (sequence is synthesized)
cagcttggaggaggcaagcgcttatagcaacgaagagctcgcaaagacatgggcccaagtcattgctctgactgcacccttgagcatatcgaaacctgggggctcagtcttcagatctgt

SEQ ID NO: 317522 - DNA, 120 bp, Artificial Sequence
  ENSG00000135248_17 (sequence is synthesized)
gaaccagttgaggtacatgacttaaatcaagccagcctctgacattccctcctgcaacccagatggtctgggctgtgagatccagaaaccaaatagcttggttaatgagcgcagggtttt

SEQ ID NO: 317523 - DNA, 120 bp, Artificial Sequence
  ENSG00000135248_18 (sequence is synthesized)
taaacaaaagataatgagaaaagtgaggttggaagttggtttactgagccaggagctataacaggtgctggagcaggggtgtgatctgaatgaccagagggaaggactgatggaattgga

SEQ ID NO: 317524 - DNA, 120 bp, Artificial Sequence
  ENSG00000135249_0 (sequence is synthesized)
gtggcactcagtcctacggcctccgaggctgggtagtgagtgtgtcgctggccttagccagactccacaggccacgctggctgcgaatggagccgaggactcgcgcggaggcgagatgct

SEQ ID NO: 317525 - DNA, 120 bp, Artificial Sequence
  ENSG00000135249_1 (sequence is synthesized)
accagccggcgagatcggcgcctctcctgcagccccgtgctgctctgaaagtggtgacgaaaggaagaacctcgaggagaaaagtgacataaatgttacagttcttattggaagtaaaca

SEQ ID NO: 317526 - DNA, 120 bp, Artificial Sequence
  ENSG00000135249_2 (sequence is synthesized)
agtcagtgaaggtacagataatggtgatctcccttcttatgtgtctgcattcatagaaaaggaagttggaaatgaccttaaatctttaaagaaacttgataaactcatagaacagaggac

SEQ ID NO: 317527 - DNA, 120 bp, Artificial Sequence
  ENSG00000135249_3 (sequence is synthesized)
agtaagtaaaatgcagttagaagaacaggtacttacaatttcatcagaaattcctaaaagaattcgaagtgccttaaaaaatgcagaagaatcaaagcaatttcttaatcagtttctgga

SEQ ID NO: 317528 - DNA, 120 bp, Artificial Sequence
  ENSG00000135249_4 (sequence is synthesized)
gcaggaaactcatctcttcagcgccattaacagccatttgctgactgcgcaaccttggatggacgatcttggaaccatgattagccagattgaagagatcgaacgtcatcttgcttacct

SEQ ID NO: 317529 - DNA, 120 bp, Artificial Sequence
  ENSG00000135249_5 (sequence is synthesized)
taaatggatttcacaaattgaagaactaagtgataacattcagcaatatctgatgaccaataatgtaccggaggcagcctccactctagtgtctatggcagaacttgacattaaacttca

SEQ ID NO: 317530 - DNA, 120 bp, Artificial Sequence
  ENSG00000135249_6 (sequence is synthesized)
ggaatcatcttgtactcatcttcttggtttcatgagagccacagttaaattctggcataaaattctcaaggacaagcttacaagtgattttgaggaaattttagcacagcttcattggcc

SEQ ID NO: 317531 - DNA, 120 bp, Artificial Sequence
  ENSG00000135249_7 (sequence is synthesized)
attcatcgcaccccctcaatcacaaactgttggcttaagtcgacctgccagtgccccggagatatacagttacctggagacactgttttgtcagcttttgaaactacaaacctcagatga

SEQ ID NO: 317532 - DNA, 120 bp, Artificial Sequence
  ENSG00000135249_8 (sequence is synthesized)
attacttactgagccaaagcaactcccagaaaaatactctcttcctgcctccccttctgtcatcctgcccatccaggttatgctgactcctcttcagaagaggttcaggtatcacttcag

SEQ ID NO: 317533 - DNA, 120 bp, Artificial Sequence
  ENSG00000135249_9 (sequence is synthesized)
agggaaccggcagactaatgtgttaagcaagccagaatggtacttggctcaagtacttatgtggattggaaaccatactgaatttctggatgagaagattcagccaatattagacaaagt

SEQ ID NO: 317534 - DNA, 120 bp, Artificial Sequence
  ENSG00000135249_10 (sequence is synthesized)
aggctctttggtaaacgcaaggcttgaattttctcggggccttatgatgctggttcttgagaagttagccactgatattccttgtctgctatatgatgacaatctcttctgtcatttggt

SEQ ID NO: 317535 - DNA, 120 bp, Artificial Sequence
  ENSG00000135249_11 (sequence is synthesized)
cagagatggttgacggtggagagaaaatttgctcttcaaaaaatggactcaatgctttcctcagaagctgcctgggtatcgcaatataaggatatcactgacgtggatgaaatgaaagtt

SEQ ID NO: 317536 - DNA, 120 bp, Artificial Sequence
  ENSG00000135249_12 (sequence is synthesized)
ccagattgtgcagaaacttttatgactctactcttggttataactgacaggtataaaaatcttcccacagcttcccgaaagcttcagttcctggagttacagaaggacttagtagatgat

SEQ ID NO: 317537 - DNA, 120 bp, Artificial Sequence
  ENSG00000135249_13 (sequence is synthesized)
tttaggatacgattaacacaagtgatgaaagaagagactagagcttcccttggctttcgatactgtgcaattcttaatgctgtgaactacatctcaacagtactagcagattgggctgac

SEQ ID NO: 317538 - DNA, 120 bp, Artificial Sequence
  ENSG00000135249_14 (sequence is synthesized)
aatgttttctttctacaacttcaacaggctgcactggaggtgtttgcagagaataatactctgagtaaattgcagctaggacagctagcctctatggagagctctgtctttgatgacatg

SEQ ID NO: 317539 - DNA, 120 bp, Artificial Sequence
  ENSG00000135249_15 (sequence is synthesized)
attaacctcttagaacgtttaaagcatgatatgttgacccgtcaagtagaccacgtttttagagaagttaaagatgctgcaaaattgtataaaaaagaaagatggttgtccttgccatct

SEQ ID NO: 317540 - DNA, 120 bp, Artificial Sequence
  ENSG00000135249_16 (sequence is synthesized)
cagtcagagcaggcagtgatgtccctgtccagttcggcttgcccgttgctgctgacgttacgagaccatttacttcagttggagcagcagctttgtttctccttatttaaaattttctgg

SEQ ID NO: 317541 - DNA, 120 bp, Artificial Sequence
  ENSG00000135249_17 (sequence is synthesized)
caaatgcttgtagagaagctggatgtatacatctaccaagaaataattcttgctaatcacttcaatgaaggaggagcagcccagctgcagtttgatatgactcggaatcttttccctttg

SEQ ID NO: 317542 - DNA, 120 bp, Artificial Sequence
  ENSG00000135249_18 (sequence is synthesized)
ttttctcactattgcaagagaccagaaaattattttaaacatataaaagaagcctgtattgttttgaatttgaacgtcggttctgcactactgctgaaagatgtactgcagtcagcttca

SEQ ID NO: 317543 - DNA, 120 bp, Artificial Sequence
  ENSG00000135249_19 (sequence is synthesized)
gggcagcttcctgccacagcagcattaaatgaagttggaatttacaaactggctcaacaagatgttgagattctacttaatttgaggacaaattggcctaatactggaaaataatgtctt

SEQ ID NO: 317544 - DNA, 120 bp, Artificial Sequence
  ENSG00000135249_20 (sequence is synthesized)
tcagaaaaaggtttctttggtttttgtttctaagaaagaggaagccaattggatttcaagttatatgatgaaattctgaattaatgaaactggaaaactttatagaattacttattatct

SEQ ID NO: 317545 - DNA, 120 bp, Artificial Sequence
  ENSG00000135249_21 (sequence is synthesized)
tggatttatggtgttattaaaatgctgaccatatttccttcatcctcttgttcctaaggaaacaaaaacagaaaacgaaacaatgaaaactcaattctatttacaagtataaatgctgag

SEQ ID NO: 317546 - DNA, 120 bp, Artificial Sequence
  ENSG00000135249_22 (sequence is synthesized)
tatgtctgttgaagacgagcagagatattaaattataaccaactttcaatttcctgtgctaattaagggaaattctgttgtggataatcaaacatagccaataaatttttttaaaactcc

SEQ ID NO: 317547 - DNA, 120 bp, Artificial Sequence
  ENSG00000135249_23 (sequence is synthesized)
ttatattaagtaatatatactagttcgaactattttattaatacttttcaaaatgttgaatctattgcaagcaaaaataaacatgctagacagaaccatagtgccataattaaaaggtgt

SEQ ID NO: 317548 - DNA, 74 bp, Artificial Sequence
  ENSG00000135249_24 (sequence is synthesized)
tcccctctcaaaaaaaaaattatgaaaattttatctgattgctgctgttctttctttctttcttttttaaaatt

SEQ ID NO: 317549 - DNA, 120 bp, Artificial Sequence
  ENSG00000135250_0 (sequence is synthesized)
ccattgaatcccagtcctaacagaagtactgcgaatcttgtggcctcattctgaacaaaagggattagagaagaaaaatctcttgatataaggcttgaaagcaagggcaggcaatcttgg

SEQ ID NO: 317550 - DNA, 120 bp, Artificial Sequence
  ENSG00000135250_1 (sequence is synthesized)
ttgtgaatattttctgatttttccagaaatcaagcagaagattgagctgctgatgtcagttaactctgagaagtcgtcctcttcagaaaggccggagcctcaacagaaagctcctttagt

SEQ ID NO: 317551 - DNA, 120 bp, Artificial Sequence
  ENSG00000135250_2 (sequence is synthesized)
tcctcctcctccaccgccaccaccaccaccaccgccacctttgccagaccccacacccccggagccagaggaggagatcctgggatcagatgatgaggagcaagaggaccctgcggacta

SEQ ID NO: 317552 - DNA, 120 bp, Artificial Sequence
  ENSG00000135250_3 (sequence is synthesized)
ctgcaaaggtggatatcatccagtgaaaattggagacctcttcaatggccggtatcatgttattagaaagcttggatgggggcacttctctactgtctggctgtgctgggatatgcaggg

SEQ ID NO: 317553 - DNA, 120 bp, Artificial Sequence
  ENSG00000135250_4 (sequence is synthesized)
gaaaagatttgttgcaatgaaagttgtaaaaagtgcccagcattatacggagacagccttggatgaaataaaattgctcaaatgtgttcgagaaagtgatcccagtgacccaaacaaaga

SEQ ID NO: 317554 - DNA, 120 bp, Artificial Sequence
  ENSG00000135250_5 (sequence is synthesized)
catggtggtccagctcattgacgacttcaagatttcaggcatgaatgggatacatgtctgcatggtcttcgaagtacttggccaccatctcctcaagtggatcatcaaatccaactatca

SEQ ID NO: 317555 - DNA, 120 bp, Artificial Sequence
  ENSG00000135250_6 (sequence is synthesized)
aggcctcccagtacgttgtgtgaagagtatcattcgacaggtccttcaagggttagattacttacacagtaagtgcaagatcattcatactgacataaagccggaaaatatcttgatgtg

SEQ ID NO: 317556 - DNA, 120 bp, Artificial Sequence
  ENSG00000135250_7 (sequence is synthesized)
tgtggatgatgcatatgtgagaagaatggcagctgaggccactgagtggcagaaagcaggtgctcctcctccttcagggtctgcagtgagtacggctccacagcagaaacctataggaaa

SEQ ID NO: 317557 - DNA, 120 bp, Artificial Sequence
  ENSG00000135250_8 (sequence is synthesized)
aatatctaaaaacaaaaagaaaaaactgaaaaagaaacagaagaggcaggctgagttattggagaagcgcctgcaggagatagaagaattggagcgagaagctgaaaggaaaataataga

SEQ ID NO: 317558 - DNA, 120 bp, Artificial Sequence
  ENSG00000135250_9 (sequence is synthesized)
agaaaacatcacctcagctgcaccttccaatgaccaggatggcgaatactgcccagaggtgaaactaaaaacaacaggattagaggaggcggctgaggcagagactgcaaaggacaatgg

SEQ ID NO: 317559 - DNA, 120 bp, Artificial Sequence
  ENSG00000135250_10 (sequence is synthesized)
tgaagctgaggaccaggaagagaaagaagatgctgagaaagaaaacattgaaaaagatgaagatgatgtagatcaggaacttgcgaacatagaccctacgtggatagaatcacctaaaac

SEQ ID NO: 317560 - DNA, 120 bp, Artificial Sequence
  ENSG00000135250_11 (sequence is synthesized)
caatggccatattgagaatggcccattctcactggagcagcaactggacgatgaagatgatgatgaagaagactgcccaaatcctgaggaatataatcttgatgagccaaatgcagaaag

SEQ ID NO: 317561 - DNA, 120 bp, Artificial Sequence
  ENSG00000135250_12 (sequence is synthesized)
tgattacacatatagcagctcctatgaacaattcaatggtgaattgccaaatggacgacataaaattcccgagtcacagttcccagagttttccacctcgttgttctctggatccttaga

SEQ ID NO: 317562 - DNA, 120 bp, Artificial Sequence
  ENSG00000135250_13 (sequence is synthesized)
acctgtggcctgcggctctgtgctttctgagggatcaccacttactgagcaagaggagagcagtccatcccatgacagaagcagaacggtttcagcctccagtactggggatttgccaaa

SEQ ID NO: 317563 - DNA, 120 bp, Artificial Sequence
  ENSG00000135250_14 (sequence is synthesized)
agcaaaaacccgggcagctgacttgttggtgaatcccctggatccgcggaatgcagataaaattagagtaaaaattgctgacctgggaaatgcttgttgggtgcataaacacttcacgga

SEQ ID NO: 317564 - DNA, 120 bp, Artificial Sequence
  ENSG00000135250_15 (sequence is synthesized)
ctggcaacgggagattatttgtttgaaccacattctggggaagactattccagagacgaagaccacatagcccacatcatagagctgctaggcagtattccaaggcactttgctctatct

SEQ ID NO: 317565 - DNA, 120 bp, Artificial Sequence
  ENSG00000135250_16 (sequence is synthesized)
ggaaaatattctcgggaattcttcaatcgcagaggagaactgcgacacatcaccaagctgaagccctggagcctctttgatgtacttgtggaaaagtatggctggccccatgaagatgct

SEQ ID NO: 317566 - DNA, 120 bp, Artificial Sequence
  ENSG00000135250_17 (sequence is synthesized)
gcacagtttacagatttcctgatcccgatgttagaaatggttccagaaaaacgagcctcagctggcgaatgccttcggcatccttggttgaattcttagcaaattctaccaatattgcat

SEQ ID NO: 317567 - DNA, 120 bp, Artificial Sequence
  ENSG00000135250_18 (sequence is synthesized)
tctgagctagcaaatgttcccagtacattggacctaaacggtgactctcattctttaacaggattacaagtgagctggcttcatcctcagacctttattttgctttgaggtactgttgtt

SEQ ID NO: 317568 - DNA, 120 bp, Artificial Sequence
  ENSG00000135250_19 (sequence is synthesized)
tgacattttgctttttgtgcactgtgatcctggggaagggtagtcttttgtcttcagctaagtagtttactgaccattttcttctggaaacaataacatgtctctaagcattgtttcttg

SEQ ID NO: 317569 - DNA, 120 bp, Artificial Sequence
  ENSG00000135250_20 (sequence is synthesized)
tgttgtgtgacattcaaatgtcatttttttgaatgaaaaatactttcccctttgtgttttggcaggttttgtaactatttatgaagaaatattttagctgagtactatataatttacaat

SEQ ID NO: 317570 - DNA, 120 bp, Artificial Sequence
  ENSG00000135250_21 (sequence is synthesized)
cttaagaaattatcaagttggaaccaagaaatagcaaggaaatgtacaattttatcttctggcaaagggacatcattcctgtattatagtgtatgtaaatgcaccctgtaaatgttactt

SEQ ID NO: 317571 - DNA, 120 bp, Artificial Sequence
  ENSG00000135250_22 (sequence is synthesized)
tccattaaatatgggagggggactcaaatttcagaaaagctaccaagtcttgagtgctttgtagcctatgttgcatgtagcggactttaactgctccaaggagttgtgcaaacttttcat

SEQ ID NO: 317572 - DNA, 120 bp, Artificial Sequence
  ENSG00000135250_23 (sequence is synthesized)
tccataacagtcttttcacattggattttaaacaaagtggctctgggttataagatgtcattctctatatggcactttaaaggaagaaaagatatgtttctcattctaaaatatgcatta

SEQ ID NO: 317573 - DNA, 120 bp, Artificial Sequence
  ENSG00000135250_24 (sequence is synthesized)
taatttagcagtcccatttgtgattttgcatatttttaaaagtacttttaaagaagagcaatttccctttaaaaatgtgatggctcagtaccatgtcatgttgcctcctctgggcgctgt

SEQ ID NO: 317574 - DNA, 120 bp, Artificial Sequence
  ENSG00000135250_25 (sequence is synthesized)
aagttaagctctacatagattaaattggagaaacgtgttaattgtgtggaatgaaaaaatacatatatttttggaaaagcatgatcatgcttgtctagaacacaaggtatggtatataca

SEQ ID NO: 317575 - DNA, 120 bp, Artificial Sequence
  ENSG00000135250_26 (sequence is synthesized)
atttgcagtgcagtgggcagaatacttctcacagctcaaagataacagtgatcacattcattccataggtagctttacgtgtggctacaacaaattttactagctttttcattgtctttc

SEQ ID NO: 317576 - DNA, 120 bp, Artificial Sequence
  ENSG00000135250_27 (sequence is synthesized)
catgaaacgaagttgagaaaatgattttccctttgcaggttgcacacagttttgtttatgcatttccttaaaattaattgtagactccaggatacaaaccatagtaggcaatacaatttt

SEQ ID NO: 317577 - DNA, 120 bp, Artificial Sequence
  ENSG00000135250_28 (sequence is synthesized)
agaatgtaatatatagaggtatatttagcctcttttagaagtcagtggattgaatgtctttttattttaaattttacattcattaaggtgcctcgtttttgactttgtccattaacattt

SEQ ID NO: 317578 - DNA, 120 bp, Artificial Sequence
  ENSG00000135250_29 (sequence is synthesized)
atccatatgcctttgcaataactagattgtgaaaagctaacaagtgttgtaacaataatccattgtttgaggtgcttgcagttgtcttaaaaattaaagtgttttggtttttttttttcc

SEQ ID NO: 317579 - DNA, 120 bp, Artificial Sequence
  ENSG00000135250_30 (sequence is synthesized)
gttggagtgggccctgtgcctctgctgtctcctactgctaacgagtgaacaaccaaggcgatgggctgtaggatgttgatacatctgaggggccagatggccaccatatcagggaaagcc

SEQ ID NO: 317580 - DNA, 120 bp, Artificial Sequence
  ENSG00000135250_31 (sequence is synthesized)
aggcgcggttctcgtctcctcccggccggcggagcgagtggaggctgcagcccagctcgtctcggcgcccgcgtcgccgtcgcgaagccccccgccccgcttccgccgcgtcggaatgag

SEQ ID NO: 317581 - DNA, 120 bp, Artificial Sequence
  ENSG00000135250_32 (sequence is synthesized)
gagaggaggaagcggcgctcatggggttgcaaggatgtagaggagcaaagggagagaagaggccgcgggaagagaggtggtgcgagacccgcggaggcgccggccaaggacgggcgcatg

SEQ ID NO: 317582 - DNA, 120 bp, Artificial Sequence
  ENSG00000135250_33 (sequence is synthesized)
ctatttttactgagacagctcttgatttggaatgtaagttctggaacaagagggagctttaataattaagcttcctggcctgctgagaagctcaagttgtttcccatagttcttccctgg

SEQ ID NO: 317583 - DNA, 120 bp, Artificial Sequence
  ENSG00000135250_34 (sequence is synthesized)
cttgagctgcttgaatttactgattgattgaaaggttggaggctgtcattgccagtgctttgcaagtcaggtaaccatgacgggaggcagacaaaagctgtagctttttcttttttccct

SEQ ID NO: 317584 - DNA, 120 bp, Artificial Sequence
  ENSG00000135250_35 (sequence is synthesized)
ttgcagcataggcttatctcttacagttcatgttgtcttggctgctaagagcttcatatgtgagacccaaacacacagtgacatacacctgctcgggcacctgtttcatttttggcattg

SEQ ID NO: 317585 - DNA, 120 bp, Artificial Sequence
  ENSG00000135250_36 (sequence is synthesized)
aggagctgggatgttgttactttgtatatagacagcagcaaataaaacttgcaagaggagcttctcctttaaggccaagagaatttcgaacttcagttctcttagagtttgaatggtgaa

SEQ ID NO: 317586 - DNA, 120 bp, Artificial Sequence
  ENSG00000135250_37 (sequence is synthesized)
gacttactggatttaagctatatccctctgagggcaggacctggtagtagacctagtacgtgatatcagtcagcactgctttccctttgattttatcgtaagccttaccacaaagtggat

SEQ ID NO: 317587 - DNA, 120 bp, Artificial Sequence
  ENSG00000135250_38 (sequence is synthesized)
ctgtctgggtttgggattttaatagaatatggcatgagaaagcagagtttattgctatttgccatgctgctagtcgttatactatcgtggtgctttaaaaagaagaatactgacctgtgg

SEQ ID NO: 317588 - DNA, 120 bp, Artificial Sequence
  ENSG00000135250_39 (sequence is synthesized)
cccagtacgttgtgtgaagagtatcattcgacaggtgagacttttgacggcagcccctaggccctagtacctaattggttaggctttcaacatgaatgctgtttacaaatatgtatatgt

SEQ ID NO: 317589 - DNA, 120 bp, Artificial Sequence
  ENSG00000135250_40 (sequence is synthesized)
attacatatgtatcagtgcataatgtatatatgttatgtatgttacatatgtatcagtgcataacattttgaactcttattaagtcagtatttaatgatattttgtgttgtgaagggaac

SEQ ID NO: 317590 - DNA, 120 bp, Artificial Sequence
  ENSG00000135250_41 (sequence is synthesized)
atagttccatgtgaaatcttcatggaaaatgacaagcagtggatcacatatgtgtttatagcagatacaggagctggctatctagaagttggcagacagaactgcccaaaggcagagaaa

SEQ ID NO: 317591 - DNA, 120 bp, Artificial Sequence
  ENSG00000135250_42 (sequence is synthesized)
aggtggatataagatcttccgagtcataaacttcttaggtgaaaaccgatttactaacttgcttcttcccatacctggaccatacataactagttaccacgataaagtaaggaaactttc

SEQ ID NO: 317592 - DNA, 120 bp, Artificial Sequence
  ENSG00000135250_43 (sequence is synthesized)
agtgaggaaatgaggcctctgcaacagctatgcaagtgaattatcttggtaacaggtctttcagcctccgtcaagccttcagatgactgcggcctcaagtgacatcttgactcaccagct

SEQ ID NO: 317593 - DNA, 120 bp, Artificial Sequence
  ENSG00000135250_44 (sequence is synthesized)
aaactgctcccaaattgctggaccacaaaaactaaatcaagcagaagattgagctgctgatgtcagttaactctgagaagtcgtcctcttcagaaagagctggcttttaagaagctttct

SEQ ID NO: 317594 - DNA, 120 bp, Artificial Sequence
  ENSG00000135250_45 (sequence is synthesized)
cagagttatccatcacatgttcagtaagaagaacaaacagtagtaaacacaattgagtatttctgacaggaaaagtgtccagaagtcacaagttgatacttgatacagcagaaaaacact

SEQ ID NO: 317595 - DNA, 120 bp, Artificial Sequence
  ENSG00000135250_46 (sequence is synthesized)
gcatattataaccatcagcttttctgcactcaacctaaagtcctttggaacccatcgaaaggtcaatgttattaccttgctcatttttggaggacttttacaagtattttgagaagtatc

SEQ ID NO: 317596 - DNA, 120 bp, Artificial Sequence
  ENSG00000135250_47 (sequence is synthesized)
tggggatggacattcattcgtagttgtgggttctggattttcaggatcagggtctataaagcagaagaaacctatagtaagtataaaattacacaataaacactgttttaacaccacaaa

SEQ ID NO: 317597 - DNA, 120 bp, Artificial Sequence
  ENSG00000135250_48 (sequence is synthesized)
aggcccgaaagcggaggccgaaaagagagaaacatccgaaaaagtggagtacatcctgctgcttcaagggtagaagactcctcactgctttccttcatgagatttcaaaggaagtgttgg

SEQ ID NO: 317598 - DNA, 120 bp, Artificial Sequence
  ENSG00000135253_0 (sequence is synthesized)
gagccgcgacgacagacggcgagccgagcgaggcggagctagcatggccggggtcggggccgctgcgctgtcccttctcctgcacctcggggccctggcgctggccgcgggcgcggaagg

SEQ ID NO: 317599 - DNA, 120 bp, Artificial Sequence
  ENSG00000135253_1 (sequence is synthesized)
tggggctgtccccagggagccccctgggcagcagacaactgcccattcctcagtccttgctgggaactcccaggagcagtggcaccccctgcgagagtggctggggcgactggaggctgc

SEQ ID NO: 317600 - DNA, 120 bp, Artificial Sequence
  ENSG00000135253_2 (sequence is synthesized)
agtgatggagctcagagaacagaataaggacctgcagacgagggtgaggcagctggagtcctgtgagtgccaccctgcatctccccagtgctgggggctggggcgtgcctggcccgaggg

SEQ ID NO: 317601 - DNA, 120 bp, Artificial Sequence
  ENSG00000135253_3 (sequence is synthesized)
ggcacgctgggagcctgacgcctgcacagcctgcgtctgccaggatggggccgctcactgtggcccccaagcacacctgccccattgcaggggctgcagccaaaatggccagacctacgg

SEQ ID NO: 317602 - DNA, 120 bp, Artificial Sequence
  ENSG00000135253_4 (sequence is synthesized)
caacggggagaccttctccccagatgcctgcaccacctgccgctgtctgacaggagccgtgcagtgccaggggccctcgtgttcagagctcaactgcttggagagctgcaccccacctgg

SEQ ID NO: 317603 - DNA, 120 bp, Artificial Sequence
  ENSG00000135253_5 (sequence is synthesized)
ggagtgctgccccatctgccggcccggctgtgattatgaggggcagctttatgaggagggggtcaccttcctgtccagctccaacccttgtctacagtgcacctgcctgaggagccgagt

SEQ ID NO: 317604 - DNA, 120 bp, Artificial Sequence
  ENSG00000135253_6 (sequence is synthesized)
tcgctgcatggccctgaagtgcccgcctagcccctgcccagagccagtgctgaggcctgggcactgctgcccaacctgccaaggctgcacagaaggtggctctcactgggaacatggcca

SEQ ID NO: 317605 - DNA, 120 bp, Artificial Sequence
  ENSG00000135253_7 (sequence is synthesized)
agagtggacaacacctggggacccctgccgaatctgccggtgcctggagggtcacatccagtgccgccagcgagaatgtgccagcctgtgtccatacccagcccggcccctcccaggcac

SEQ ID NO: 317606 - DNA, 120 bp, Artificial Sequence
  ENSG00000135253_8 (sequence is synthesized)
ctgctgccctgtgtgtgatggctgtttcctaaacgggcgggagcaccgcagcggggagcctgtgggctcaggggacccctgctcgcactgccgctgtgctaatgggagtgtccagtgtga

SEQ ID NO: 317607 - DNA, 120 bp, Artificial Sequence
  ENSG00000135253_9 (sequence is synthesized)
gcctctgccctgcccgccagtgccctgcagacacccaggcaagatccctgggcagtgctgccctgtctgcgatggctgtgagtaccagggacaccagtatcagagccaggagaccttcag

SEQ ID NO: 317608 - DNA, 120 bp, Artificial Sequence
  ENSG00000135253_10 (sequence is synthesized)
actccaagagcggggcctctgtgtccgctgctcctgccaggctggcgaggtctcctgtgaggagcaggagtgcccagtcaccccctgtgccctgcctgcctctggccgccagctctgccc

SEQ ID NO: 317609 - DNA, 120 bp, Artificial Sequence
  ENSG00000135253_11 (sequence is synthesized)
agcctgtgagctggatggagaggagtttgctgagggagtccagtgggagcctgatggtcggccctgcaccgcctgcgtctgtcaagatggggtacccaagtgcggggctgtgctctgccc

SEQ ID NO: 317610 - DNA, 120 bp, Artificial Sequence
  ENSG00000135253_12 (sequence is synthesized)
cccagccccctgccagcaccccacccagccccctggtgcctgctgccccagctgtgacagctgcacctaccacagccaagtgtatgccaatgggcagaacttcacggatgcagacagccc

SEQ ID NO: 317611 - DNA, 120 bp, Artificial Sequence
  ENSG00000135253_13 (sequence is synthesized)
ttgccatgcctgccactgtcaggatggaactgtgacatgctccttggttgactgccctcccacgacctgtgccaggccccagagtggaccaggccagtgttgccccaggtgcccagactg

SEQ ID NO: 317612 - DNA, 120 bp, Artificial Sequence
  ENSG00000135253_14 (sequence is synthesized)
catcctggaggaagaggtgtttgtggacggcgagagcttctcccacccccgagacccctgccaggagtgccgatgccaggaaggccatgcccactgccagcctcgcccctgccccagggc

SEQ ID NO: 317613 - DNA, 120 bp, Artificial Sequence
  ENSG00000135253_15 (sequence is synthesized)
cccctgtgcccacccgctgcctgggacctgctgcccgaacgactgcagcggctgtgcctttggcgggaaagagtaccccagcggagcggacttcccccacccctctgacccctgccgtct

SEQ ID NO: 317614 - DNA, 120 bp, Artificial Sequence
  ENSG00000135253_16 (sequence is synthesized)
gtgtcgctgtctgagcggcaacgtgcagtgcctggcccgccgctgcgtgccgctgccctgtccagagcctgtcctgctgccgggagagtgctgcccgcagtgcccagccgccccagcccc

SEQ ID NO: 317615 - DNA, 80 bp, Artificial Sequence
  ENSG00000135253_17 (sequence is synthesized)
caggagtacttctccccgcccggcgatccctgccgccgctgcctctgcctcgacggctccgtgtcctgccagcggctgcc

SEQ ID NO: 317616 - DNA, 120 bp, Artificial Sequence
  ENSG00000135253_18 (sequence is synthesized)
ctgcccgcccgcgccctgcgcgcacccgcgccaggggccttgctgcccctcctgcgacggctgcctgtaccaggggaaggagtttgccagcggggagcgcttcccatcgcccactgctgc

SEQ ID NO: 317617 - DNA, 120 bp, Artificial Sequence
  ENSG00000135253_19 (sequence is synthesized)
ctgccacctctgcctttgctgggagggcagcgtgagctgcgagcccaaggcatgtgcccctgcactgtgccccttccctgccaggggcgactgctgccctgactgtgatggctgtgagta

SEQ ID NO: 317618 - DNA, 120 bp, Artificial Sequence
  ENSG00000135253_20 (sequence is synthesized)
gcaacctgtgtacctgtcttggaggcttcgtgacctgcggccgccggccctgtgagcctccgggctgcagccacccactcatcccctctgggcactgctgcccgacctgccagggatgcc

SEQ ID NO: 317619 - DNA, 120 bp, Artificial Sequence
  ENSG00000135253_21 (sequence is synthesized)
gctaccatggcgtcactactgcctccggagagacccttcctgacccacttgaccctacctgctccctctgcacctgccaggaaggttccatgcgctgccagaagaagccatgtcccccag

SEQ ID NO: 317620 - DNA, 120 bp, Artificial Sequence
  ENSG00000135253_22 (sequence is synthesized)
ctctctgcccccacccctctccaggcccctgcttctgccctgtttgccacagctgtctctctcagggccgggagcaccaggatggggaggagtttgagggaccagcaggcagctgtgagt

SEQ ID NO: 317621 - DNA, 120 bp, Artificial Sequence
  ENSG00000135253_23 (sequence is synthesized)
ggtgtcgctgtcaggctggccaggtcagctgtgtgcggctgcagtgcccaccccttccctgcaagctccaggtcaccgagcgggggagctgctgccctcgctgcagaggctgcctggctc

SEQ ID NO: 317622 - DNA, 120 bp, Artificial Sequence
  ENSG00000135253_24 (sequence is synthesized)
atggggaagagcaccccgaaggcagtagatgggtgccccccgacagtgcctgctcctcctgtgtgtgtcacgagggcgtcgtcacctgtgcacgcatccagtgcatcagctcttgcgccc

SEQ ID NO: 317623 - DNA, 120 bp, Artificial Sequence
  ENSG00000135253_25 (sequence is synthesized)
agccccgccaagggccccatgactgctgtcctcaatgctctgactgtgagcatgagggccggaagtacgagcctggggagagcttccagcctggggcagacccctgtgaagtgtgcatct

SEQ ID NO: 317624 - DNA, 120 bp, Artificial Sequence
  ENSG00000135253_26 (sequence is synthesized)
gcgagccacagcctgaggggcctcccagccttcgctgtcaccggcggcagtgtcccagcctggtgggctgcccccccagccagctcctgccccctgggccccagcactgctgtcccacct

SEQ ID NO: 317625 - DNA, 120 bp, Artificial Sequence
  ENSG00000135253_27 (sequence is synthesized)
gtgccgaggccttgagtaactgttcagagggcctgctgggatctgagctagccccaccagacccctgctacacgtgccagtgccaggacctgacatggctctgcatccaccaggcttgtc

SEQ ID NO: 317626 - DNA, 120 bp, Artificial Sequence
  ENSG00000135253_28 (sequence is synthesized)
ctgagctcagctgtcccctctcagagcgccacactccccctgggagctgctgccccgtatgccgggctcccacccagtcctgcgtgcaccagggccgtgaggtggcctctggagagcgct

SEQ ID NO: 317627 - DNA, 120 bp, Artificial Sequence
  ENSG00000135253_29 (sequence is synthesized)
ggactgtggacacctgcaccagctgctcctgcatggcgggcaccgtgcgttgccagagccagcgctgctcaccgctctcgtgtggccccgacaaggcccctgccctgagtcctggcagct

SEQ ID NO: 317628 - DNA, 120 bp, Artificial Sequence
  ENSG00000135253_30 (sequence is synthesized)
gctgcccccgctgcctgcctcggcccgcttcctgcatggccttcggagacccccattaccgcaccttcgacggccgcctgctgcacttccagggcagttgcagctatgtgctggccaagg

SEQ ID NO: 317629 - DNA, 120 bp, Artificial Sequence
  ENSG00000135253_31 (sequence is synthesized)
actgccacagcggggacttcagtgtgcacgtgaccaatgatgaccggggccggagcggtgtggcctggacccaggaggtggcggtgctgctgggagacatggccgtgcggctgctgcagg

SEQ ID NO: 317630 - DNA, 120 bp, Artificial Sequence
  ENSG00000135253_32 (sequence is synthesized)
acggggcagtcacggtggatgggcacccggtggccttgcccttcctgcaggagccgctgctgtatgtggagctgcgaggacacactgtgatcctgcacgcccagcccgggctccaggtgc

SEQ ID NO: 317631 - DNA, 120 bp, Artificial Sequence
  ENSG00000135253_33 (sequence is synthesized)
tgtgggatgggcagtcccaggtggaggtgagcgtacctggctcctaccagggccggacttgtgggctctgtgggaacttcaatggctttgcccaggacgatctgcagggccctgaggggc

SEQ ID NO: 317632 - DNA, 120 bp, Artificial Sequence
  ENSG00000135253_34 (sequence is synthesized)
tgctcctgccctcggaggctgcgtttgggaatagctggcaggtctcagaggggctgtggcctggccggccctgttctgcaggccgagaggtggatccgtgccgggcagcaggttaccgtg

SEQ ID NO: 317633 - DNA, 120 bp, Artificial Sequence
  ENSG00000135253_35 (sequence is synthesized)
ccaggcgtgaggccaatgcccggtgtggggtgctgaagtcctccccattcagtcgctgccatgctgtggtgccaccggagcccttctttgccgcctgtgtgtatgacctgtgtgcctgtg

SEQ ID NO: 317634 - DNA, 120 bp, Artificial Sequence
  ENSG00000135253_36 (sequence is synthesized)
gccctggctcctccgctgatgcctgcctctgtgatgccctggaagcctacgccagtcactgtcgccaggcaggagtgacacctacctggcgaggccccacgctgtgtgtggtaggctgcc

SEQ ID NO: 317635 - DNA, 120 bp, Artificial Sequence
  ENSG00000135253_37 (sequence is synthesized)
ccctggagcgtggcttcgtgtttgatgagtgcggcccaccctgtccccgcacctgcttcaatcagcatatccccctgggggagctggcagcccactgcgtgaggccctgcgtgcccggct

SEQ ID NO: 317636 - DNA, 120 bp, Artificial Sequence
  ENSG00000135253_38 (sequence is synthesized)
gccagtgccctgcaggcctggtggagcatgaggcccactgcatcccacccgaggcctgcccccaagtcctgctcactggagaccagccacttggtgctcggcccagccccagccgggagc

SEQ ID NO: 317637 - DNA, 120 bp, Artificial Sequence
  ENSG00000135253_39 (sequence is synthesized)
cccaggagacaccctgagccaggacagtgcctgataagggttcatcaggccaggagtctccccttggcgagcagttcccaccctggttagggctatggagagaatgccctgcctggacac

SEQ ID NO: 317638 - DNA, 120 bp, Artificial Sequence
  ENSG00000135253_40 (sequence is synthesized)
ttcagtcctgtttaggcctctgtatctgtagagggggtggggatgccagctacctcctagccaaaaaaggcaaggagtggggtacaggggtgtgaggggaggtggatcagggtcagagat

SEQ ID NO: 317639 - DNA, 120 bp, Artificial Sequence
  ENSG00000135253_41 (sequence is synthesized)
ctccccaggcagtcagaggagttctgagttctgagcccgatttctaatctcggctcagcctcttaagccaccaccagcctcctctgggccacagatttctcgtctgtaaagtggggaatg

SEQ ID NO: 317640 - DNA, 120 bp, Artificial Sequence
  ENSG00000135253_42 (sequence is synthesized)
ggaagggtcagtggcagtggggaggatgtcagctgaagtctcctgggggggtgtctcaggttccttccaactctcatgtggaagagtaatttgccccctgcccccagcaggaaacacaac

SEQ ID NO: 317641 - DNA, 120 bp, Artificial Sequence
  ENSG00000135253_43 (sequence is synthesized)
tcgtaaattcgtagaataagggtgtacacttctaatccggaccctaattgtgctttgtcctctgcaaggcccgaatgcccatgagaaagtgaatccccggaagggggttgcatttcacct

SEQ ID NO: 317642 - DNA, 120 bp, Artificial Sequence
  ENSG00000135253_44 (sequence is synthesized)
ggggcccagtgcagggatggcagcaggagaaggtgccctcatgcaggagctgtgggcagctcctcctgtcatctgtctttgcccagggctggcacagaatgtatccacttggccttggcc

SEQ ID NO: 317643 - DNA, 120 bp, Artificial Sequence
  ENSG00000135253_45 (sequence is synthesized)
tgcaagagggccgcgggtatcccccagggctggagctgccccctgtactgctgcagatggagtggagccggcgggcccaggagcagctcctgtgggacttggaactgctgactggtgtgg

SEQ ID NO: 317644 - DNA, 120 bp, Artificial Sequence
  ENSG00000135253_46 (sequence is synthesized)
agctgggcctcttctggccaccccaggcccagtttttcggtccgaggggccaggcccagcaagcatggagccagtgctgtcagccaggtggtagcacaggtggggaccctgagcagccgg

SEQ ID NO: 317645 - DNA, 120 bp, Artificial Sequence
  ENSG00000135253_47 (sequence is synthesized)
tgagtgggtgagggggcacggcggggacagaggttctgggaacactggggccctgctgtggtgagggcaagcggaaggggcagggttttagagacagggctgggtttgaatctccacact

SEQ ID NO: 317646 - DNA, 120 bp, Artificial Sequence
  ENSG00000135253_48 (sequence is synthesized)
cagggttttagagacagggctgggtttgaatctccacactgaccacccccgtgggctctgagtttacctttcctcagctagaaaatgcccacgaggccaggcgtggtggctcacgcctgt

SEQ ID NO: 317647 - DNA, 65 bp, Artificial Sequence
  ENSG00000135253_49 (sequence is synthesized)
gctgaggcagcagaatcaatgtgggcaacaagaaccaaactccgtttcccccaagccccccggcc

SEQ ID NO: 317648 - DNA, 120 bp, Artificial Sequence
  ENSG00000135253_50 (sequence is synthesized)
agtgtgcgaattcagaggaaggagaccgaatccagcctgggcacaggagggaaagcgtcctggaggcagctggtccccaggtggcccttaaggataaagaaaagttagcttggtgaaggg

SEQ ID NO: 317649 - DNA, 120 bp, Artificial Sequence
  ENSG00000135253_51 (sequence is synthesized)
tgcgggagaccagagggctgggtcagaataatctttactgccctagggtggatctaaaatatttattacagtaagaaaaagccccgaggctgggagccctagctgaagcctgtgaccccg

SEQ ID NO: 317650 - DNA, 86 bp, Artificial Sequence
  ENSG00000135253_52 (sequence is synthesized)
tcttgtctctacacaaaaaatttaaaatcagctggtcgtggtgcctcttgtagttccatctactccggaggctgaggtgggaggat

SEQ ID NO: 317651 - DNA, 120 bp, Artificial Sequence
  ENSG00000135253_53 (sequence is synthesized)
gctggtcgtggtgcctcttgtagttccatctactccggaggctgaggtgggaggattgcccaggagtttgaggctacagtgaaccgtgttttcaccactgcactccaggctgggtgacag

SEQ ID NO: 317652 - DNA, 120 bp, Artificial Sequence
  ENSG00000135253_54 (sequence is synthesized)
caacggggagaccttctccccagatgcctgcaccacctgccgctgtctggaaggtaccatcacttgcaaccagaagccatgcccaagaggaccctgccctgagccaggagcatgctgccc

SEQ ID NO: 317653 - DNA, 120 bp, Artificial Sequence
  ENSG00000135253_55 (sequence is synthesized)
gccacactccccctgggagctgctgccccgtatgccgggaatgtgtggtggaggccgagggccggagagtggcagatggagagagctggcgggaccccagcaatgcgtgcatcgcctgca

SEQ ID NO: 317654 - DNA, 120 bp, Artificial Sequence
  ENSG00000135253_56 (sequence is synthesized)
cctgccatcggggccatgtggagtgccacctcgaggagtgccaggccctctcctgcccccatggctgggcgaaggtgccccaggctgacagctgctgtgagcgatgccaagctcccaccc

SEQ ID NO: 317655 - DNA, 120 bp, Artificial Sequence
  ENSG00000135253_57 (sequence is synthesized)
agcagatatggggtctttaagggtcaggggcatccctgcaccggggcatggagccgaaggctggatttcattcccctcttgaactgtgaagaatgtattgtgggaggggcaggcagaagt

SEQ ID NO: 317656 - DNA, 120 bp, Artificial Sequence
  ENSG00000135253_58 (sequence is synthesized)
cttgaacccaggagtttgagaccagaatgggccacatagaaattgggatggcggttcttgttaagctcccctatgccgcccagcaggaaaccagtcaccgtgtcctcgtctccgatcact

SEQ ID NO: 317657 - DNA, 120 bp, Artificial Sequence
  ENSG00000135253_59 (sequence is synthesized)
gcgatgagcttacccctccccgccatccctgcagccgggcagagctcaccctagagcaccagaagccactgaaaccccgcctccgccgtacggcgccccgtcggcctcaacccccaccct

SEQ ID NO: 317658 - DNA, 120 bp, Artificial Sequence
  ENSG00000135253_60 (sequence is synthesized)
tcgagcatgcgcagtcctcccagccgcattccgggacatgcgcattaacagcaacacggcctccatgtgaatacgcctgcgccgtaaagacaggcccgaaccaggggactacgattccca

SEQ ID NO: 317659 - DNA, 120 bp, Artificial Sequence
  ENSG00000135253_61 (sequence is synthesized)
gaagaccgcgcggcaccacgtccttcgcgggcattcattcgttcattcactcgttccttggttcattcgttcaacaagcgctttggacctgacgctgttagacgccgagaccccagagaa

SEQ ID NO: 317660 - DNA, 120 bp, Artificial Sequence
  ENSG00000135253_62 (sequence is synthesized)
gagacgcagttactcatctcaagggcagggtctgggtctttatcgtgtatgtatgtgtgtaactatgacacatagttaacaagtaacacacgtttgttcagttaaaggaatgcaaaagtt

SEQ ID NO: 317661 - DNA, 120 bp, Artificial Sequence
  ENSG00000135269_0 (sequence is synthesized)
gctgcggcggactgggcggcggaagttcgacggcgccgggcgagtggctgttgagcggcgccgcgggagttccgcaggtttcccgtgttcgcagcggagccggaggccagctgaacccgg

SEQ ID NO: 317662 - DNA, 120 bp, Artificial Sequence
  ENSG00000135269_1 (sequence is synthesized)
ccgtgggatcccggataggaggaggaggggacccataggacgcgttaacatggacctggaaaacaaagtgaagaagatgggcttaggtcacgagcaaggatttggagccccttgtttaaa

SEQ ID NO: 317663 - DNA, 120 bp, Artificial Sequence
  ENSG00000135269_2 (sequence is synthesized)
atgcaaagaaaaatgtgaaggattcgaactgcacttctggagaaaaatatgtcgtaactgcaagtgtggccaagaagagcatgatgtcctcttgagcaatgaagaggatcgaaaagtggg

SEQ ID NO: 317664 - DNA, 120 bp, Artificial Sequence
  ENSG00000135269_3 (sequence is synthesized)
aaaactttttgaagacaccaagtataccactctgattgcaaaactaaagtcagatggaattcccatgtataaacgcaatgttatgatattgacgaatccagttgctgccaagaagaatgt

SEQ ID NO: 317665 - DNA, 120 bp, Artificial Sequence
  ENSG00000135269_4 (sequence is synthesized)
ctccatcaatacagttacctatgagtgggctcctcctgtccagaatcaagcattggccaggcagtacatgcagatgctacccaaggaaaagcagccagtagcaggctcagagggggcaca

SEQ ID NO: 317666 - DNA, 120 bp, Artificial Sequence
  ENSG00000135269_5 (sequence is synthesized)
gtaccggaagaagcagctggcaaagcagctccctgcacatgaccaggacccttcaaagtgccatgagttgtctcccagagaggtgaaggagatggagcagtttgtgaagaaatataagag

SEQ ID NO: 317667 - DNA, 120 bp, Artificial Sequence
  ENSG00000135269_6 (sequence is synthesized)
cgaagctctgggagtaggagatgtcaaacttccctgtgagatggatgcccaaggccccaaacaaatgaacattcctggaggggatagaagcaccccagcagcagtgggggccatggagga

SEQ ID NO: 317668 - DNA, 120 bp, Artificial Sequence
  ENSG00000135269_7 (sequence is synthesized)
caaatctgctgagcacaaaagaactcaatattcctgctattgctgcaaactgagtatgaaagaaggtgacccagccatctatgccgaaagggctggctatgataaactgtggcacccagc

SEQ ID NO: 317669 - DNA, 120 bp, Artificial Sequence
  ENSG00000135269_8 (sequence is synthesized)
ttgttttgtctgcagcacctgccatgaactcctggttgacatgatttatttttggaagaatgagaagctatactgtggcagacattactgtgacagcgagaaaccccgatgtgctggctg

SEQ ID NO: 317670 - DNA, 120 bp, Artificial Sequence
  ENSG00000135269_9 (sequence is synthesized)
tgacgagctgatattcagcaatgagtatacccaggcagaaaaccagaattggcacctgaaacacttctgctgctttgactgtgatagcattctagctggggagatatacgtgatggtcaa

SEQ ID NO: 317671 - DNA, 120 bp, Artificial Sequence
  ENSG00000135269_10 (sequence is synthesized)
tgacaagcccgtgtgcaagccctgctatgtgaagaatcacgctgtggtgtgtcaaggatgccacaatgccatcgacccagaagtgcagcgggtgacctataacaatttcagctggcatgc

SEQ ID NO: 317672 - DNA, 120 bp, Artificial Sequence
  ENSG00000135269_11 (sequence is synthesized)
taagaagaggatgtcttaggaggagggcacccagaagtatcgagccatagctatccaaagtggtctgcatttctactgtaaaatgcaatttgaaaaaaataaaacgcaaaaaaagaaact

SEQ ID NO: 317673 - DNA, 120 bp, Artificial Sequence
  ENSG00000135269_12 (sequence is synthesized)
gtaaaggaaaccaagagattttgtttaatttttttggccattttttcttcatcaattttttttcggtctcaacttttaaacttggtttaagcatttgatttgtaaaacagtaaataattg

SEQ ID NO: 317674 - DNA, 120 bp, Artificial Sequence
  ENSG00000135269_13 (sequence is synthesized)
tatctttccatagcttttcaaatgtgaaatcatttttggaagcttggatctcattaaacttcatgtctctattccatttgtgccacacacttaaaagttagtgtactgaatggaaagatg

SEQ ID NO: 317675 - DNA, 120 bp, Artificial Sequence
  ENSG00000135269_14 (sequence is synthesized)
agcattcctagttctacacttcttttttccccctcatgtgtaaaatgaaaagaaaactaaatttgccctaataccaaggcgctacgtttattgcctcgtcttattcactgacctttgtaa

SEQ ID NO: 317676 - DNA, 120 bp, Artificial Sequence
  ENSG00000135269_15 (sequence is synthesized)
tgatacacagtgaattctttttgacaaagagaaatgcagtgtagtatgcagagctgctgttttaatgcctatgcatttactctttcctgatttaggcagaggtggcattttctttattgc

SEQ ID NO: 317677 - DNA, 120 bp, Artificial Sequence
  ENSG00000135269_16 (sequence is synthesized)
atttctctatttttttaatgtaccctaccttcagtattctctttgtaagttggtgacttgcatctgtggccttgaatattttattatcacatgtggcataacagtatccacactttttag

SEQ ID NO: 317678 - DNA, 69 bp, Artificial Sequence
  ENSG00000135269_17 (sequence is synthesized)
agccaccatgcctgacccacacactttttacttgtatagatgatttttggcttggacataaaagccaag

SEQ ID NO: 317679 - DNA, 120 bp, Artificial Sequence
  ENSG00000135269_18 (sequence is synthesized)
acttgtatagatgatttttggcttggacataaaagccaagccacccatttgcttttaatccaaagaacatgtatagtttttgtacccagagactatgatttatattgattgcacttgcct

SEQ ID NO: 317680 - DNA, 120 bp, Artificial Sequence
  ENSG00000135269_19 (sequence is synthesized)
gccatgatttagataagattttttttgcatggtttttattctttcctaatggatcctgttttataatacttccaagcctgtccatggatatatcaaatgtcttcacttgtatattttcat

SEQ ID NO: 317681 - DNA, 120 bp, Artificial Sequence
  ENSG00000135269_20 (sequence is synthesized)
ggctaggtatttctaatgtttattcttccctgtgtacttctacacatagctatgcactatgaaaattaaatggaatgaatgatatgtatattactcaaaataaagtttctttcactttaa

SEQ ID NO: 317682 - DNA, 120 bp, Artificial Sequence
  ENSG00000135269_21 (sequence is synthesized)
ctccatcaatacagttacctatgagtgggctcctcctgtccagaatcaagcattggtaaatgatatggaacagagagtttctttattgaagttcctggagtatttatttggggcagtttc

SEQ ID NO: 317683 - DNA, 120 bp, Artificial Sequence
  ENSG00000135269_22 (sequence is synthesized)
tttgatgacctaatcaacttcacacatcccagatctgttattcttccggggttctcattactttgacttctgattcctgttctagtcttttgaatgtaagactagatacttcataaaatt

SEQ ID NO: 317684 - DNA, 120 bp, Artificial Sequence
  ENSG00000135269_23 (sequence is synthesized)
tttccaactccctagatatgtttacctttttgagggaatggtctaacgttcttaataattagatggaaatcagatgttttatatcaatctagtaactcttctagcttagtcttgagagga

SEQ ID NO: 317685 - DNA, 120 bp, Artificial Sequence
  ENSG00000135269_24 (sequence is synthesized)
gaagaatcacgctgtggtgagaagtgttctaaggatatggttgcctcagcctgctttaggacttgagtttatgcttttcttaaagcctcttacaaatgggaaacagaaagcagtcctcct

SEQ ID NO: 317686 - DNA, 84 bp, Artificial Sequence
  ENSG00000135269_25 (sequence is synthesized)
agtgagactcaggcagtcttctaatgactaggttgttctggatggcttccctttcagtcctgctattgctgcaaactgagtatg

SEQ ID NO: 317687 - DNA, 120 bp, Artificial Sequence
  ENSG00000135269_26 (sequence is synthesized)
accaaaaagatcacagttttatatcaagctccttccactattataacaaccaaatgaaacatttggaagtcttttaaggttagttaaatcattaaagtgaattttgcgatatcatttttt

SEQ ID NO: 317688 - DNA, 120 bp, Artificial Sequence
  ENSG00000135269_27 (sequence is synthesized)
acattgtctttctcaaagtaacggattcaggaggagtccttttctgagtagagtccacagaagaggtattctattgatgggcttaggtcacgagcaaggatttggagccccttgtttaaa

SEQ ID NO: 317689 - DNA, 120 bp, Artificial Sequence
  ENSG00000135269_28 (sequence is synthesized)
tagtaactcagatcttacaaactgaaaaaatatataatttcatggagagaaagtgttactttttacccaactaaatctatttagtgtaccgtttttgagttttaacttcttaatatactg

SEQ ID NO: 317690 - DNA, 120 bp, Artificial Sequence
  ENSG00000135269_29 (sequence is synthesized)
atcaaggcaattcaaaaacaatacatgcattgactatgagccacctcaagatttctacttgtgaaatttacaatatcaattataggtactgcttaataataaaatcctcacttaaaaaaa

SEQ ID NO: 317691 - DNA, 120 bp, Artificial Sequence
  ENSG00000135269_30 (sequence is synthesized)
aataaataggaggttttgagggctgtttatgagcgcattccattacagtgtctttcagcggagccagagctcagccaatcctaattaagaagcaatttcagctgcagtcattgcttatta

SEQ ID NO: 317692 - DNA, 120 bp, Artificial Sequence
  ENSG00000135272_0 (sequence is synthesized)
ggaaggccccctcgcaggggagccggctggagtgagctggctggaaagagggggcggagtgcgcggagtcagagccgccaccgctgccgcagttgccgccactgcggcgtctgggctgag

SEQ ID NO: 317693 - DNA, 120 bp, Artificial Sequence
  ENSG00000135272_1 (sequence is synthesized)
ccggagggaggcgggaggacgcgcaggggcggccgccgccgtcgtcaggccaccggggcgaaaatgcggccgctgccggaggctcgctaactttccggggcggaagaggaggaggaggag

SEQ ID NO: 317694 - DNA, 120 bp, Artificial Sequence
  ENSG00000135272_2 (sequence is synthesized)
gaggaaggggcttggagcgactacggggggatgcggagaagcagtcagttccctgcacccagcacctcacagcccttcctccgtgcgccctgccgggcggcgagctaggcggcagcggcg

SEQ ID NO: 317695 - DNA, 120 bp, Artificial Sequence
  ENSG00000135272_3 (sequence is synthesized)
gagcggcccatgtccggcgcgggcgaagccctcgctcccgggcccgtggggccgcagcgcgtggccgaggcgggcggcggccagctgggctccacagcccagggaaaatgtgataaagac

SEQ ID NO: 317696 - DNA, 120 bp, Artificial Sequence
  ENSG00000135272_4 (sequence is synthesized)
aaaatgtgataaagacaatactgagaaagatataactcaagctaccaatagccacttcacacatggagagatgcaagaccagtccatttggggaaatccttcggatggtgaactcattag

SEQ ID NO: 317697 - DNA, 120 bp, Artificial Sequence
  ENSG00000135272_5 (sequence is synthesized)
aacccaacctcagcgcttgcctcagcttcagacttcagcccaggtgccaagtggtgaggaaataggcaagataaagaacggccacacaggtctgagcaatggaaatggaattcaccacgg

SEQ ID NO: 317698 - DNA, 120 bp, Artificial Sequence
  ENSG00000135272_6 (sequence is synthesized)
ggccaaacacggatccgcagataatcgcaaactttcagcacctgtttctcaaaaaatgcatagaaaaattcagtccagcttgtctgtaaacagcgatatcagtaagaagagcaaagtaaa

SEQ ID NO: 317699 - DNA, 120 bp, Artificial Sequence
  ENSG00000135272_7 (sequence is synthesized)
tgctgtcttttcccaaaagacaggctcttcacctgaagattgttgtgtccactgtatcctggcttgcttgttctgcgaattcctgaccctttgcaacattgtcctgggacaagcgtcatg

SEQ ID NO: 317700 - DNA, 120 bp, Artificial Sequence
  ENSG00000135272_8 (sequence is synthesized)
tggcatctgcacctcagaagcctgctgctgttgctgtggtgacgagatgggggatgattgtaactgcccttgtgatatggactgtggcatcatggatgcctgttgtgaatcatcagactg

SEQ ID NO: 317701 - DNA, 120 bp, Artificial Sequence
  ENSG00000135272_9 (sequence is synthesized)
cttggaaatctgtatggaatgctgtggaatttgttttccttcataaatatttatcttttgtttgtgttaaaactggagagtgtttaaaaatttccttttggggggaagaaaagcacattg

SEQ ID NO: 317702 - DNA, 120 bp, Artificial Sequence
  ENSG00000135272_10 (sequence is synthesized)
taagattctcatgaaacaacatggaatttgcactgttaactcattattgtaagtaatctctgaaagcctttttactttaaccaaatctacatggtttaatatgtgaaattttaactactt

SEQ ID NO: 317703 - DNA, 120 bp, Artificial Sequence
  ENSG00000135272_11 (sequence is synthesized)
taactagttttataaatttcttaatatgttacaataacttagggacattttgacaccccccttcccaaatgttaaatgccttctcctttttaccgatatttctgtttcttttaaccgttc

SEQ ID NO: 317704 - DNA, 120 bp, Artificial Sequence
  ENSG00000135272_12 (sequence is synthesized)
tcaggagcactttgctccaaatatattatttttcagtgtgtatttaaacgaggcagtttattttgatatgtatctattcatgattgaaaggaagcagtcttggccaggcacggtggctta

SEQ ID NO: 317705 - DNA, 63 bp, Artificial Sequence
  ENSG00000135272_13 (sequence is synthesized)
tgattgaaaggaagcagtcttggccaggcacggtggcttacacctgtaaccctgagggcaaca

SEQ ID NO: 317706 - DNA, 75 bp, Artificial Sequence
  ENSG00000135272_14 (sequence is synthesized)
agtctttattttaaaagaaactttaggaaacaaacccacataatagttgggaaccagtgttgatctctctccctt

SEQ ID NO: 317707 - DNA, 120 bp, Artificial Sequence
  ENSG00000135272_15 (sequence is synthesized)
ccacataatagttgggaaccagtgttgatctctctcccttaccttctccacttgttcaacagactctgaatgccgactgtgtggactctcttcctcagactgtggggacagatacaattc

SEQ ID NO: 317708 - DNA, 120 bp, Artificial Sequence
  ENSG00000135272_16 (sequence is synthesized)
cactcctgtccacaggaacatgagatttagcagactaaggagatctgtaaagaatgaaccataccacaaggcatactgaagtgaggattataagagaaataaactcaaaatgctgttgga

SEQ ID NO: 317709 - DNA, 120 bp, Artificial Sequence
  ENSG00000135272_17 (sequence is synthesized)
atgagtgattcacctgctatttaaatgaattatttagatttttgacaaagatttaggtggacaccctaaactgtgtgtgcctttaaccagttaaaagaacagtgccttcagcatactttt

SEQ ID NO: 317710 - DNA, 120 bp, Artificial Sequence
  ENSG00000135272_18 (sequence is synthesized)
ttattagttgtaggaatacagctttttgaaaaagctataaagtttaaattaactaaaaatatgcattttcttacacataatttaaatgttatcatacttttttgatgaaaacataatgcc

SEQ ID NO: 317711 - DNA, 120 bp, Artificial Sequence
  ENSG00000135272_19 (sequence is synthesized)
ttagtaaaatagctctatttaataaagaagattgagtactctgacacatttcatttaaattaggaaatttttaatattaaaatcccagtgttctgagttattgaaaggctttcttttatt

SEQ ID NO: 317712 - DNA, 120 bp, Artificial Sequence
  ENSG00000135272_20 (sequence is synthesized)
ttgagagctttaggtctttttgggatgagaacattttagttgtttagtttgtttcttaagcagtgctattttttgtaaacacagataaatggaaaccattcttttcaatgcagaagaaat

SEQ ID NO: 317713 - DNA, 120 bp, Artificial Sequence
  ENSG00000135272_21 (sequence is synthesized)
ctagatatcccctactgtgaccaaatttctgtattacgattttatgttaaattaaactaatatggcaggttataatgatccttaagtgtaaagaaatcagtcaattacaagagtaattgt

SEQ ID NO: 317714 - DNA, 120 bp, Artificial Sequence
  ENSG00000135272_22 (sequence is synthesized)
atagttattgagacctatagtgtgtggcttagatgaaagggagagtaaattttcataccatgctctctcctactcagtttgatctctctaaaattgtagtttggtttgatttaatataat

SEQ ID NO: 317715 - DNA, 120 bp, Artificial Sequence
  ENSG00000135272_23 (sequence is synthesized)
tcttagtagaaattttgaaagtatgctttgggattaataattatttttaatttttctggctgaatatcaaattgatagtaacaacagaagcataattttaggaaggctttcgcaaaccta

SEQ ID NO: 317716 - DNA, 120 bp, Artificial Sequence
  ENSG00000135272_24 (sequence is synthesized)
gccttttaagagaggtttttaacctgaagcatgagaatatatcacctgtggtttttcctttgagatgaaacgtagtttctagttatatcattacttaaagggcttaaaaagaaaaaactt

SEQ ID NO: 317717 - DNA, 120 bp, Artificial Sequence
  ENSG00000135272_25 (sequence is synthesized)
agcaaacttttgaatctttcttttattgctatttacacatacatacacacatacaaaacctttaaattttgggatctgaatataattctggtaaacagctgtcttcatttttctcctcta

SEQ ID NO: 317718 - DNA, 120 bp, Artificial Sequence
  ENSG00000135272_26 (sequence is synthesized)
aagaacttaattcatttgttacataaaatataaggaaatctttatactattttacagtaaccacaatctaaatatttacatatacccaaaattaacttatgctcatatattaggatgtga

SEQ ID NO: 317719 - DNA, 120 bp, Artificial Sequence
  ENSG00000135272_27 (sequence is synthesized)
gaatatcatctgtttatggacacatgaaacctcctaatgacctggaattgttagaatatttgactttttatatgcaaagtttttcaaccaagtggtttgtctaatatttaaacatgtact

SEQ ID NO: 317720 - DNA, 120 bp, Artificial Sequence
  ENSG00000135272_28 (sequence is synthesized)
ggcacaatttgtgatgaaaatattagcacatttgcaataatgtttctccataacagagaatgttaatggataccagaattttatttttgtatttatgttcatagtacttttcctcttgtc

SEQ ID NO: 317721 - DNA, 120 bp, Artificial Sequence
  ENSG00000135272_29 (sequence is synthesized)
tactccagacagttattccataaagcatttgtataattaaaaggaaaacagaaaaaggaaaagtaggcaaatgtgaaaatagtttcaatatatcttatgatttcttaatgtaaaatgttt

SEQ ID NO: 317722 - DNA, 120 bp, Artificial Sequence
  ENSG00000135272_30 (sequence is synthesized)
tgttgaagtatatggctatcatgactaagtgctagaatttatagttacaggcggtgtccttttaaatgtggaaaggcttttaaaatattttaaaactggacctgtattatcctgaataca

SEQ ID NO: 317723 - DNA, 120 bp, Artificial Sequence
  ENSG00000135272_31 (sequence is synthesized)
ctattttgaaaatttttaaaaatgacttctttattttgctttaccgtatgtttatatctaattgacatattgactaatgtttgaaagaattcaaccataagttaaaatctgaaggttatc

SEQ ID NO: 317724 - DNA, 120 bp, Artificial Sequence
  ENSG00000135272_32 (sequence is synthesized)
tttatcatgtttcatccctgtctgaagatttcctagtcttcttatgtaaatcacatgactcatgtccgtaaatgaactatgaaagatatcgatcagtttatgatcattgacatgtgattt

SEQ ID NO: 317725 - DNA, 120 bp, Artificial Sequence
  ENSG00000135272_33 (sequence is synthesized)
caaaacacagtgttcttttaaaaatctataatatgtcaaaatacaagttttttttttttacatcgttttagtaagttaatttcatttatttactttggagctatatttccacttagaaaa

SEQ ID NO: 317726 - DNA, 120 bp, Artificial Sequence
  ENSG00000135272_34 (sequence is synthesized)
actaaggtaattttacaatatatgctgagattaaaaaccaaggtaaaaatgatcaaacatatatgaaattgagtcttagatttaatgaatttcactcgaaaataaatgatcagaagaatt

SEQ ID NO: 317727 - DNA, 120 bp, Artificial Sequence
  ENSG00000135272_35 (sequence is synthesized)
ggctcctctaccacccggttgataattcaggtttctgtgaccagtagctttggaatggcttatgcttgttttcaataactggtttgttttgaaataaataaacaaggtttataagaaaca

SEQ ID NO: 317728 - DNA, 120 bp, Artificial Sequence
  ENSG00000135272_36 (sequence is synthesized)
ctgacatcctgcttttagataatcgtcttctagagtgaatagtcattactttaaatataactgctatacttctttttttaatgccacatttaaaaatataaatacaacattttgatggca

SEQ ID NO: 317729 - DNA, 120 bp, Artificial Sequence
  ENSG00000135272_37 (sequence is synthesized)
cccaggccggctctggcctcctgacccagacagcgcagggcgcgagggatcgcgcggccgagcccgggtcgcgccgctcccagcatcggggccgctagccaagagttcgaggccttcccg

SEQ ID NO: 317730 - DNA, 120 bp, Artificial Sequence
  ENSG00000135272_38 (sequence is synthesized)
gctcttcacctgaagtttgctgacactccatcgaaggcacttaattttaatgccaaatacagaaacacaaaggacatgtgacaatgattgttgtgtccactgtatcctggcttgcttgtt

SEQ ID NO: 317731 - DNA, 120 bp, Artificial Sequence
  ENSG00000135297_0 (sequence is synthesized)
ggccgcgccctgcagattgtctcttgttgcgtaagtttttttgaccgtcactcgtgtcagcttcaaagtcagatagatttttctcccagcatgttctacttccgaggctgtggccgttgg

SEQ ID NO: 317732 - DNA, 120 bp, Artificial Sequence
  ENSG00000135297_1 (sequence is synthesized)
gtcgcggtttccttcaccaagcagcaatttccgttggcacggttgagcagtgacagcgcggcgccccggactccgcacttcgacgtgatagtcattggtggaggacatgccgggactgag

SEQ ID NO: 317733 - DNA, 120 bp, Artificial Sequence
  ENSG00000135297_2 (sequence is synthesized)
gcagccaccgccgccgctcggtgcggctctcggactctgctcctcactcaccgcgtggacacgatcggtcagatgtcatgtaatccttcctttggtggcatcggaaagggacatttaatg

SEQ ID NO: 317734 - DNA, 120 bp, Artificial Sequence
  ENSG00000135297_3 (sequence is synthesized)
agggaagtagatgccttggatggcctgtgttctcgcatctgtgaccagtctggtgtacattataaagtattaaaccggcgtaagggaccagctgtgtggggtctgagagctcagattgat

SEQ ID NO: 317735 - DNA, 120 bp, Artificial Sequence
  ENSG00000135297_4 (sequence is synthesized)
aggaaactctataaacagaacatgcagaaagaaatcttgaatacaccactgcttactgttcaggagggagctgtagaagatcttattcttacagaaccagagcctgaacacactgggaaa

SEQ ID NO: 317736 - DNA, 120 bp, Artificial Sequence
  ENSG00000135297_5 (sequence is synthesized)
tgccgtgtcagtggggttgttttggtggatggaagcacagtatatgcagagagtgtgattctgactactgggacatttctgagaggcatgattgtaattggattggagacgcatccagca

SEQ ID NO: 317737 - DNA, 120 bp, Artificial Sequence
  ENSG00000135297_6 (sequence is synthesized)
ggacgtttaggggatcagccttctataggattggctcagacactggagaagttagggtttgtggtgggaaggttgaagactgggactccaccccgaattgccaaagagtccattaatttc

SEQ ID NO: 317738 - DNA, 120 bp, Artificial Sequence
  ENSG00000135297_7 (sequence is synthesized)
agtattctaaacaagcatataccggacaatccatccataccattcagctttaccaatgagacagtatggattaagccagaagatcagctgccatgttacttgactcacaccaaccctaga

SEQ ID NO: 317739 - DNA, 120 bp, Artificial Sequence
  ENSG00000135297_8 (sequence is synthesized)
gtggatgagattgtccttaagaaccttcaccttaatagtcatgttaaagaaacgacaagaggacctcgatactgtccctccattgaatcaaaagttttgcgttttccaaaccgtctacat

SEQ ID NO: 317740 - DNA, 120 bp, Artificial Sequence
  ENSG00000135297_9 (sequence is synthesized)
caggtttggttggaacctgaaggaatggattctgaccttatctacccacaggggttatctatgacgctaccagctgagttacaagagaaaatgatcacatgcatcagaggcttggagaaa

SEQ ID NO: 317741 - DNA, 80 bp, Artificial Sequence
  ENSG00000135297_10 (sequence is synthesized)
ccaggccctgccaggctacggtgttcagtatgattacttagatccccgtcagatcaccccttccttggagactcatttgg

SEQ ID NO: 317742 - DNA, 120 bp, Artificial Sequence
  ENSG00000135297_11 (sequence is synthesized)
gatccccgtcagatcaccccttccttggagactcatttggttcaacgactcttctttgctggacagatcaatggcaccactggttatgaggaagctgcagctcaaggtgtgatagccgga

SEQ ID NO: 317743 - DNA, 120 bp, Artificial Sequence
  ENSG00000135297_12 (sequence is synthesized)
gacctcactactctgggcaccagtgaaccataccgcatgtttaccagccgagtagagttccgtttgtcactgcgccctgataatgctgacagccggctcacactgcgagggtataaagac

SEQ ID NO: 317744 - DNA, 120 bp, Artificial Sequence
  ENSG00000135297_13 (sequence is synthesized)
gctggctgtgtgtcccaacaacgatatgaaagagcttgttggatgaagtcttctttagaagaaggcatttctgtgttgaaatctattgagtttttgagctctaaatggaaaaaattaatc

SEQ ID NO: 317745 - DNA, 120 bp, Artificial Sequence
  ENSG00000135297_14 (sequence is synthesized)
ccagaggcttctataagtactagtagaagtctgcctgtcagagctctcgatgttctgaagtatgaggaagttgacatggattcattagccaaggctgttccagagcccttgaagaagtat

SEQ ID NO: 317746 - DNA, 120 bp, Artificial Sequence
  ENSG00000135297_15 (sequence is synthesized)
actaaatgtagagagctggctgaaagactgaaaatagaagccacttatgaatcagtgttgttccatcaactacaagaaataaagggagttcagcaagatgaagctctccaactgccaaaa

SEQ ID NO: 317747 - DNA, 120 bp, Artificial Sequence
  ENSG00000135297_16 (sequence is synthesized)
gacctagattatttgactatcagggatgtgtctttgtcccatgaagttcgagagaaactacattttagtcgtccacagacgatcggggctgctagtcgcatacccggagtaacacctgcc

SEQ ID NO: 317748 - DNA, 120 bp, Artificial Sequence
  ENSG00000135297_17 (sequence is synthesized)
gccatcatcaatctgctgagatttgtgaagaccactcaacgaagacagtcggctatgaatgaatcatccaagactgatcaatacttatgtgatgcagacagacttcaagagagagagtta

SEQ ID NO: 317749 - DNA, 120 bp, Artificial Sequence
  ENSG00000135297_18 (sequence is synthesized)
tagctttcaattcataaaagatttttaaagagcatataaataatttgatcaatacaacagtatagataaaagaattatttagcacatgttaaaatagctttattaggttactatgggttt

SEQ ID NO: 317750 - DNA, 120 bp, Artificial Sequence
  ENSG00000135297_19 (sequence is synthesized)
gccattaatttctgagtgggacagaaattataattgtgctttttcgtgtatatgaaaaaactagtcgtaaacaatttgtactctttctttaaggagctgtaatacaaataactttgtgca

SEQ ID NO: 317751 - DNA, 120 bp, Artificial Sequence
  ENSG00000135297_20 (sequence is synthesized)
gtgttcatcaaagagagagacagtgaacctaaaactgaacctggaataaaactcaacatgcagatttgcctactcatagggactttgcctattaagtctaccaaattaaaagtcttatca

SEQ ID NO: 317752 - DNA, 120 bp, Artificial Sequence
  ENSG00000135297_21 (sequence is synthesized)
ttcagcgtgttttgagagttaataatcttttgcttggttatactaggctaggaagcaatatcaaagcccttaaattctcaagactaaagacttgagattatataaaattatccagaatca

SEQ ID NO: 317753 - DNA, 120 bp, Artificial Sequence
  ENSG00000135297_22 (sequence is synthesized)
ttcagctaatactattggaatatagtatgtagggtgaaagttgacagaaatctgtacttcttcaggaaatcctcactggtaattgttttgaacattaatgaaagccctataaaatagaaa

SEQ ID NO: 317754 - DNA, 120 bp, Artificial Sequence
  ENSG00000135297_23 (sequence is synthesized)
gattggaaatcaccattgtttcctattatccacagtgtggatggatacttatttggtgacctagttatgggagaattgagtaacgttagttattttatatcataccataaaaatattttc

SEQ ID NO: 317755 - DNA, 120 bp, Artificial Sequence
  ENSG00000135297_24 (sequence is synthesized)
taaataaataaataaaaataaaaaataataataataaaaaaagcccgcacgaactaggaaagaaaatacacaaccggccctccgtgcgatcacccatctccctcaccaggaaagtagctc

SEQ ID NO: 317756 - DNA, 120 bp, Artificial Sequence
  ENSG00000135297_25 (sequence is synthesized)
atagtaactggtgagtggtgtttccctgtttttaagtcagaatgacagaaaaaacagaatagtggtagtacccctcttcctctccagtacttcaatggtatgtcttcacaggggttagag

SEQ ID NO: 317757 - DNA, 120 bp, Artificial Sequence
  ENSG00000135297_26 (sequence is synthesized)
tgggataatcagctgggccttttgactcagatacctcagatacctcaaccattctaaatagactaagggatgaatacagccaaatgggccagacagccctgcttgtctctggaattccaa

SEQ ID NO: 317758 - DNA, 120 bp, Artificial Sequence
  ENSG00000135297_27 (sequence is synthesized)
cccagatctctggtgtcagcctagggagaagctcccgtgtcaccttcgggccaaagcaggtactcaggagagttctaagggccccaaagtcactttggctacagatgtgtatgttaagcc

SEQ ID NO: 317759 - DNA, 120 bp, Artificial Sequence
  ENSG00000135297_28 (sequence is synthesized)
tgattatgggtgtgaggcaaccaagtatcttgttactataattgcatatggccacttggaggtagcttagttttcttgggtttattttatctaattttagtctttccagaaagcagtaag

SEQ ID NO: 317760 - DNA, 120 bp, Artificial Sequence
  ENSG00000135297_29 (sequence is synthesized)
attagtagcaagtaaaaagtatttgtagtgctggataatttaggaatgatgaatattttttaatacttgattcagtgatttcaaaaggtcgtaacttttagtcatagctactcctgggca

SEQ ID NO: 317761 - DNA, 120 bp, Artificial Sequence
  ENSG00000135297_30 (sequence is synthesized)
tttagtcatagctactcctgggcaaaattcttcttacagagacaatattaattacaataccacattgtgtatatattttgaaaagaggctggttgcagcagctcacgcctgtaatcccag

SEQ ID NO: 317762 - DNA, 61 bp, Artificial Sequence
  ENSG00000135297_31 (sequence is synthesized)
ttcaaaaaaaagaaaaagaaaagaaggtattttgtgtttttgtgctacccgttcagcaaaa

SEQ ID NO: 317763 - DNA, 120 bp, Artificial Sequence
  ENSG00000135297_32 (sequence is synthesized)
agaaggtattttgtgtttttgtgctacccgttcagcaaaataatgaaattcattgtttctaaacttttttttctgattaaatacaagagtaaaaaaagtgaatggagtgccttttgaata

SEQ ID NO: 317764 - DNA, 78 bp, Artificial Sequence
  ENSG00000135297_33 (sequence is synthesized)
atacaagagtaaaaaaagtgaatggagtgccttttgaatagaatataacaaaaatttatcttaaagaaacgggaagta

SEQ ID NO: 317765 - DNA, 67 bp, Artificial Sequence
  ENSG00000135297_34 (sequence is synthesized)
caggaagttcaaatattttgggaggttcttgacagctacaatttggggctagtgacactatacacat

SEQ ID NO: 317766 - DNA, 120 bp, Artificial Sequence
  ENSG00000135297_35 (sequence is synthesized)
cttgacagctacaatttggggctagtgacactatacacatataaagaaactttaaagtttcttagtaatgaaggtttgtaatgctattccattacaatagtaactgtctcactgaaaaat

SEQ ID NO: 317767 - DNA, 120 bp, Artificial Sequence
  ENSG00000135297_36 (sequence is synthesized)
ccattacaatagtaactgtctcactgaaaaatgtttcatggaaaatacatattttagattctatgatttgctttaggatgtgaacttctttattttttagagacagggtctcactctgtt

SEQ ID NO: 317768 - DNA, 64 bp, Artificial Sequence
  ENSG00000135297_37 (sequence is synthesized)
aagtgatccttagttttaaaaaaattttttgtaggaatgaagtctcactatgttgcccaggctg

SEQ ID NO: 317769 - DNA, 65 bp, Artificial Sequence
  ENSG00000135297_38 (sequence is synthesized)
tggcctcaaaacgtggcctgaaacctctttaaatccacaatgtttgtatgttaacttaaacaaaa

SEQ ID NO: 317770 - DNA, 120 bp, Artificial Sequence
  ENSG00000135297_39 (sequence is synthesized)
tctttaaatccacaatgtttgtatgttaacttaaacaaaattacatcacttaatatgtcaaaacagcctaccctctggtgctgctatgcagaagtactacagaatatgatgccctaggaa

SEQ ID NO: 317771 - DNA, 120 bp, Artificial Sequence
  ENSG00000135297_40 (sequence is synthesized)
gaaatcagctaaaaatgtaaccttactcaatgtagttacttcatagaaatcccatcactgacaataatcagctgccaacgaaagctggccatacttgtgacttcctctattcaccacaga

SEQ ID NO: 317772 - DNA, 120 bp, Artificial Sequence
  ENSG00000135297_41 (sequence is synthesized)
ccagactgcctaccagttgaaaaagccaggtattttttcaattcaattcaacaggaacaccaaaaaataagaaatgactaagaaacactaagcatttgtaaaattactgggggaggaagg

SEQ ID NO: 317773 - DNA, 120 bp, Artificial Sequence
  ENSG00000135297_42 (sequence is synthesized)
ttatagccaagagcttaaattttgttactgatggttttaaaagtattttgtcattttttagtttcaacctagattggaatagccatggcttttctacttcagaaatttcaactcctagaa

SEQ ID NO: 317774 - DNA, 120 bp, Artificial Sequence
  ENSG00000135297_43 (sequence is synthesized)
gaatgccctgtccagaagaagtggtcaggagtatcaggaaagccaccagcagagactaggggtttattctgatctggaagagccacttaacactggaatgcacacagtgaaaattaattg

SEQ ID NO: 317775 - DNA, 120 bp, Artificial Sequence
  ENSG00000135297_44 (sequence is synthesized)
ttcctcttacactccctctccacaatacttctattattacacttacttcgttctaccttaatgtttttatttagagacaagatctcactctgccaccctggctggagtgcagtggcatga

SEQ ID NO: 317776 - DNA, 120 bp, Artificial Sequence
  ENSG00000135297_45 (sequence is synthesized)
tcactctgccaccctggctggagtgcagtggcatgattacagctcactgcagcctcaacctccctggctctagctattctcccatctcagccctccaagtagctgggactacaggtgtgc

SEQ ID NO: 317777 - DNA, 120 bp, Artificial Sequence
  ENSG00000135297_46 (sequence is synthesized)
cttactatgttgcccaggctggtctcaaagtcctgggctcaattaatcctccctcttcagcctcctgtgtaggtgatagtacaggcatgagccaccatgtgcctggccctaccttaatgt

SEQ ID NO: 317778 - DNA, 120 bp, Artificial Sequence
  ENSG00000135297_47 (sequence is synthesized)
cttaatgttaatatctgtctaccttaagaagatataagccttgtaaatataagcaatatcacagttgtagatactcgtgctttttaaatagattaatgaatactactaaaggcaagaaat

SEQ ID NO: 317779 - DNA, 120 bp, Artificial Sequence
  ENSG00000135297_48 (sequence is synthesized)
tttttaaatagattaatgaatactactaaaggcaagaaatggtattactaaaactcaagtgaataattaaatgagatcaaaatatttgtgacaggccaggcacggtggcttacgcctgta

SEQ ID NO: 317780 - DNA, 120 bp, Artificial Sequence
  ENSG00000135297_49 (sequence is synthesized)
ccagcctgggcaacatggcgaaactccgtctttaccaaaaatacaaaaataagccaagcatggtggcacgtacctgttgttccagcaacttgggggctgaggcaggagaatcacttgagc

SEQ ID NO: 317781 - DNA, 87 bp, Artificial Sequence
  ENSG00000135297_50 (sequence is synthesized)
cgtacctgttgttccagcaacttgggggctgaggcaggagaatcacttgagccggggagtttgaggctgcagtgagttgatagcatg

SEQ ID NO: 317782 - DNA, 80 bp, Artificial Sequence
  ENSG00000135297_51 (sequence is synthesized)
tcacatctgtaatcccagcattttgggattacaaatctgccagcgcaagcagatcacttgaggaatctcttattaaaata

SEQ ID NO: 317783 - DNA, 85 bp, Artificial Sequence
  ENSG00000135297_52 (sequence is synthesized)
gagctactcaggtggctgaggcacaagaatcgcttgaacctgggagatggaagttgcaatgagctgagatcaagccactgcactc

SEQ ID NO: 317784 - DNA, 120 bp, Artificial Sequence
  ENSG00000135297_53 (sequence is synthesized)
cagagcaagactgtctcaaaaaaaaaaaatttgtacagtcatgttcaaagtagcattaattcacaatagccaaaagctggaagtagcccaagtatccaccaatgaatgaaaggataaaca

SEQ ID NO: 317785 - DNA, 120 bp, Artificial Sequence
  ENSG00000135297_54 (sequence is synthesized)
gataaacaaaatgtggcatatacatacaatggaatattatacagccttaaaaaggaaggaaattcatatacatgctacagcatggataaaccttgaaaaagttatgctaactgaaatcag

SEQ ID NO: 317786 - DNA, 120 bp, Artificial Sequence
  ENSG00000135297_55 (sequence is synthesized)
ccagtcacaaaaagacaaatactgtatgattccctttataagagttacctggagcactcaaattcatagagacagtaaaatgatggttaccaggggatgggggagggagaaacaggaaac

SEQ ID NO: 317787 - DNA, 80 bp, Artificial Sequence
  ENSG00000135297_56 (sequence is synthesized)
tgatggttaccaggggatgggggagggagaaacaggaaactattctttagtgagtacagaatttcacctcacactgtcac

SEQ ID NO: 317788 - DNA, 68 bp, Artificial Sequence
  ENSG00000135297_57 (sequence is synthesized)
tccagaatttcaagttttgcaagatgaaaagagttctggagatggttgatggtgatggttgcacaaca

SEQ ID NO: 317789 - DNA, 120 bp, Artificial Sequence
  ENSG00000135297_58 (sequence is synthesized)
aagagttctggagatggttgatggtgatggttgcacaacaatttgaatattttaaatgccaatgaactgttcatttacaaatggttacgatggaatttttctttttcttttttttttctt

SEQ ID NO: 317790 - DNA, 76 bp, Artificial Sequence
  ENSG00000135297_59 (sequence is synthesized)
ggcactatctcggctcactgcaacctcctcctgctgggttaaagtgtgccaccatgctcagctaattttttctatt

SEQ ID NO: 317791 - DNA, 72 bp, Artificial Sequence
  ENSG00000135297_60 (sequence is synthesized)
ttacaggcatgagccaccgtgcacagccaagatggaaatttttatgttcttgtatctctcagaattcccaca

SEQ ID NO: 317792 - DNA, 89 bp, Artificial Sequence
  ENSG00000135297_61 (sequence is synthesized)
caacttgaactgtatctctcagggaggtaattgaatcacaagggccggtttttaccatgctttcttgtgatagtgaataagtctcacaa

SEQ ID NO: 317793 - DNA, 120 bp, Artificial Sequence
  ENSG00000135297_62 (sequence is synthesized)
tgcttcttcctcattttctcttgccactcccatgtaagaagtgcctttcgcctcccgccaagattctgaggcttcctcagccatgtggaactttggggacgaaaagaggtttaattggac

SEQ ID NO: 317794 - DNA, 72 bp, Artificial Sequence
  ENSG00000135297_63 (sequence is synthesized)
aggcttcctcagccatgtggaactttggggacgaaaagaggtttaattggacttaaagttccaattaagttt

SEQ ID NO: 317795 - DNA, 120 bp, Artificial Sequence
  ENSG00000135297_64 (sequence is synthesized)
tggatgacctctgggattacaggcgtgcgccaccgcgctcggtctatattcaccaattttaagatgcacatctttccatattttagtatctctaagttggagtatgtcttacaattaatg

SEQ ID NO: 317796 - DNA, 120 bp, Artificial Sequence
  ENSG00000135297_65 (sequence is synthesized)
gcatctgacagttataactggcagcatttgtgactgaaaaacatcttagatgcaatgaaatacagtgtgtgtgtttgtattgtgctgcaatataaaatgtatttcaggccaggtatggtg

SEQ ID NO: 317797 - DNA, 73 bp, Artificial Sequence
  ENSG00000135297_66 (sequence is synthesized)
tataccactgtactccagcctaggcaacagagcaagacccagtctctaaaaaataaatgaaaatgtttcttat

SEQ ID NO: 317798 - DNA, 120 bp, Artificial Sequence
  ENSG00000135297_67 (sequence is synthesized)
aagacccagtctctaaaaaataaatgaaaatgtttcttattgtggatcacagtcaaaagtttgaaaaaacacaatctgtttgaacagcactactttctgacaggaaaaccccaacaggtt

SEQ ID NO: 317799 - DNA, 120 bp, Artificial Sequence
  ENSG00000135297_68 (sequence is synthesized)
aggatctgtgtattcctcagagtaagaatttttctaaaaagtttttaaaaacttaaagtcttactgatctcttcctatgctccaattttatagatataacttagccttgcgaggtgatgt

SEQ ID NO: 317800 - DNA, 120 bp, Artificial Sequence
  ENSG00000135297_69 (sequence is synthesized)
aattaaagtctaacttcaagttgctgttgagcatagatctcaggtcttctgacttcacaacacctttctgccactttcagtggatttttccctcctagggaccagaggtcctctactgga

SEQ ID NO: 317801 - DNA, 72 bp, Artificial Sequence
  ENSG00000135297_70 (sequence is synthesized)
ccatcccttttgaacaatctggaagtctgtttctcttaaccttcagttcccattccaatcctttgtaaccta

SEQ ID NO: 317802 - DNA, 120 bp, Artificial Sequence
  ENSG00000135297_71 (sequence is synthesized)
ctcttaaccttcagttcccattccaatcctttgtaacctatttcaggttaagcatttatggaggtgccatgcttaattagccattatggcactcactctatttcaaaggttatcccagaa

SEQ ID NO: 317803 - DNA, 120 bp, Artificial Sequence
  ENSG00000135297_72 (sequence is synthesized)
tttggaggctgtaggggaattcagagtgtgaatttcacttgaacagcaccctctgcagacttaaaatattcctcctatatctgaagacaataataatttcttagaatttgctaggctaaa

SEQ ID NO: 317804 - DNA, 120 bp, Artificial Sequence
  ENSG00000135297_73 (sequence is synthesized)
caactattttttagtccagtggcttgtaattaagtcatttttagtctttaattatgttggttgcttttagaattctcttttagagttggtctacatccttttaaaacatgggcaatccaa

SEQ ID NO: 317805 - DNA, 120 bp, Artificial Sequence
  ENSG00000135297_74 (sequence is synthesized)
atttataacagtaaattaagatacataaaaaaaaacactggctaaatttaaaaggaaacacttctagaatatactgtattttgacacaagaccagactgtgctatgtgtatgtggtgttt

SEQ ID NO: 317806 - DNA, 120 bp, Artificial Sequence
  ENSG00000135297_75 (sequence is synthesized)
caagtaatttaagaaaactgttggaattttctgtatttccagtttcacaagaaacaacctcaaggagggcagtttaactgaaaattcagaggtattatagctctgaagaaaaatactgat

SEQ ID NO: 317807 - DNA, 120 bp, Artificial Sequence
  ENSG00000135297_76 (sequence is synthesized)
gagcagttatacaaaatgagaaattgagttctaagaaatgcatccctaacttcaacataaagatagctatgagaaaacattctttgtacccaaccataaatgaataaaaatcacctcatt

SEQ ID NO: 317808 - DNA, 120 bp, Artificial Sequence
  ENSG00000135297_77 (sequence is synthesized)
tctcatcagatgtttactgggttgctagttatatatagaatcctgcaagaggctcaacagggaagtccaaagagtcaatcaagaaggtatgataatggctaaagatggggactgtaggtc

SEQ ID NO: 317809 - DNA, 120 bp, Artificial Sequence
  ENSG00000135297_78 (sequence is synthesized)
aatgctccacgaggttcttcttttgttgcaccaatatagctgcactgttatacccatatggttacaatccaggcctcagaaaatgttgcagatgccctcaccagaaggctgagaaccagt

SEQ ID NO: 317810 - DNA, 120 bp, Artificial Sequence
  ENSG00000135297_79 (sequence is synthesized)
tcctcagtttgcatgcctccagacagcactagaagtcaaactcaaattgcttacatggtaacttggtttatcccaacaccaactaggatattccctcaatcacatgattgtactgaaaat

SEQ ID NO: 317811 - DNA, 120 bp, Artificial Sequence
  ENSG00000135297_80 (sequence is synthesized)
ataaccaagttttatttatgtttttcatttggtattagccatctggtatttaacctctgaaaaccacacaatcttctatacgcttttttcactggaataaatgaaactgcttacttttga

SEQ ID NO: 317812 - DNA, 120 bp, Artificial Sequence
  ENSG00000135297_81 (sequence is synthesized)
gcagtgagccgagatcaagccattgcacccaaacctgagggacaagagtgagacttctctcaaaaaaaaagaaaagactcatacaagctctcgatgttctgaagtatgaggaagttgaca

SEQ ID NO: 317813 - DNA, 120 bp, Artificial Sequence
  ENSG00000135297_82 (sequence is synthesized)
cttcaagcgatcctcctgcctcagccctccctagtagctgggactgcaggcatgcaccacaacacccagggtgtgatagccggaatcaacgccagtcttcgggtcagtcgcaagcctccc

SEQ ID NO: 317814 - DNA, 120 bp, Artificial Sequence
  ENSG00000135297_83 (sequence is synthesized)
gggaccacagtggatggaagcacagtatatgcagagagtgtgattctgactactgggacatttctgagaggcatgattgtaattggattggagacgcatccagcaggacgtttaggggat

SEQ ID NO: 317815 - DNA, 120 bp, Artificial Sequence
  ENSG00000135297_84 (sequence is synthesized)
tgttttaatggtcagtgaggaggccttagctacagtcattgttgttcagagcctcagaagatgaagcccaacacctatacattttaaatagtctgttttttgtttgtttgtttgtttgtt

SEQ ID NO: 317816 - DNA, 120 bp, Artificial Sequence
  ENSG00000135297_85 (sequence is synthesized)
agcgggggacctcttcctttcctcaaagctagtgagaatcctaccttctgtggttttagcctcgatcagtgtctcgcaaggatcaggcgggccaggccagaactctatattagtctattc

SEQ ID NO: 317817 - DNA, 90 bp, Artificial Sequence
  ENSG00000135297_86 (sequence is synthesized)
aggactggtcttgaaccccagggctccagtgatcttcctgccccagtctctcaaagtgttcatattatagtcatgagccactgagcctgg

SEQ ID NO: 317818 - DNA, 120 bp, Artificial Sequence
  ENSG00000135297_87 (sequence is synthesized)
tcaaagtgttcatattatagtcatgagccactgagcctggccgatttaatttaatatctttaaatgctattttgtgatcctgtccatattttataggcccaacaataacaatttttttgt

SEQ ID NO: 317819 - DNA, 120 bp, Artificial Sequence
  ENSG00000135298_0 (sequence is synthesized)
actgcgcgccggcgcgcacacccgagacagagctttactatctcgctccctctcgcgcctccctcctcgctgggcattcaaacagctttccgacatcaccagccaaggatttttttcccc

SEQ ID NO: 317820 - DNA, 120 bp, Artificial Sequence
  ENSG00000135298_1 (sequence is synthesized)
gctctccttagtcgccgtccgtccatcagtacctgcaggggggaggaggaggagggaggaaagcggaaagaggaaaaagcataagcttgagccttccgatccgaccacgaatactcctgt

SEQ ID NO: 317821 - DNA, 120 bp, Artificial Sequence
  ENSG00000135298_2 (sequence is synthesized)
aataaacccaccgccccaacaaatctgccatagcagccgccgccgccgccggtcacttctcgtctcagcgctttctttgcttcttggtttgttgggggtagcttttatgaaacaaatctt

SEQ ID NO: 317822 - DNA, 120 bp, Artificial Sequence
  ENSG00000135298_3 (sequence is synthesized)
tgctattaagccacttacattttggggggttccttagagtctcccttgggggggcttctccctccctttagcccccctcggtttggaggttggattcagttggatacggcgcaaggttct

SEQ ID NO: 317823 - DNA, 120 bp, Artificial Sequence
  ENSG00000135298_4 (sequence is synthesized)
gggctcctgctggcttttttttcctctctctcatcgacccccctttggttcccaccccccaccttttgcttttcgtatgtatgcatttttaaaaataaatcctgattttggaagctgagc

SEQ ID NO: 317824 - DNA, 120 bp, Artificial Sequence
  ENSG00000135298_5 (sequence is synthesized)
cggggaaaatgggcaacggtgattgggaccgaaggggagtctctccgtcactgttgctgggacgcgtgcctgtgctggtgtcttagagcaagagcctccctgagctttcggagtggaaga

SEQ ID NO: 317825 - DNA, 120 bp, Artificial Sequence
  ENSG00000135298_6 (sequence is synthesized)
acagtggaagagactgcagcctaaagacttttaaaattaacttggcatcacttttatcagctcaaaggctaaacaaacaaacaaaagcagtgtcatttattctaagaaataacttcttaa

SEQ ID NO: 317826 - DNA, 120 bp, Artificial Sequence
  ENSG00000135298_7 (sequence is synthesized)
aggttaaagctgaaaaatattcaagttatttttggataacaacttacagaggccaaatgacataggatgaaggctgttcgtaacctgctgatttatatattttccacctatctcctggtt

SEQ ID NO: 317827 - DNA, 120 bp, Artificial Sequence
  ENSG00000135298_8 (sequence is synthesized)
atgtttggatttaatgctgcccaagacttctggtgttcaactttggtgaagggagtcatttatggatcgtattctgtaagtgaaatgtttcctaaaaactttacaaactgcacttggacg

SEQ ID NO: 317828 - DNA, 120 bp, Artificial Sequence
  ENSG00000135298_9 (sequence is synthesized)
ctggaaaatccagatccaaccaaatatagcatttacctgaaattttccaaaaaggaccttagctgctctaacttttcactcctggcttatcagtttgatcatttttcccatgaaaaaata

SEQ ID NO: 317829 - DNA, 120 bp, Artificial Sequence
  ENSG00000135298_10 (sequence is synthesized)
aaggatcttttaagaaagaatcattctataatgcaactctgcaattccaagaatgctttcgtttttctacagtatgataaaaattttattcaaatacgtcgagtatttccaactaatttc

SEQ ID NO: 317830 - DNA, 120 bp, Artificial Sequence
  ENSG00000135298_11 (sequence is synthesized)
ccaggattacagaaaaaaggggaagaagatcagaaatctttttttgagtttttggtattgaacaaggtcagcccaagccagtttggttgccatgtattatgtacttggttggagagctgc

SEQ ID NO: 317831 - DNA, 120 bp, Artificial Sequence
  ENSG00000135298_12 (sequence is synthesized)
ttaaaatcagaaaatgggagaacagaatcatgtgggatcatgtatacaaaatgcacctgccctcagcatttgggagagtgggggatcgacgaccagtcgctgattttgttaaataacgtg

SEQ ID NO: 317832 - DNA, 120 bp, Artificial Sequence
  ENSG00000135298_13 (sequence is synthesized)
gtgttacccctgaatgagcagacagagggctgcctgacccaggagctgcaaaccacccaagtctgcaatcttaccagggaggccaagcgaccacccaaagaagaatttggaatgatggga

SEQ ID NO: 317833 - DNA, 120 bp, Artificial Sequence
  ENSG00000135298_14 (sequence is synthesized)
gatcatacaattaaaagtcagcgacctcgatctgttcatgaaaaaagggtccctcaggaacaagctgatgctgctaaatttatggcacaaactggtgaatctggtgtggaagagtggtcc

SEQ ID NO: 317834 - DNA, 120 bp, Artificial Sequence
  ENSG00000135298_15 (sequence is synthesized)
cagtggagcacatgttcggttacttgtggtcaagggtcgcaggtgcgaaccagaacttgtgtatcaccttacgggacacactgcagcggcccattaagagaatcaagggtttgcaataac

SEQ ID NO: 317835 - DNA, 120 bp, Artificial Sequence
  ENSG00000135298_16 (sequence is synthesized)
actgccctctgtccagtacacggagtatgggaggaatggtcaccatggagtttatgttcatttacatgtggtcgaggccaaagaacaagaacaaggtcatgcacacctcctcagtatgga

SEQ ID NO: 317836 - DNA, 120 bp, Artificial Sequence
  ENSG00000135298_17 (sequence is synthesized)
ggaaggccgtgtgaaggacctgaaacacatcataagccttgtaatattgctctttgcccagttgatggacagtggcaagagtggagttcgtggagccagtgctcagtaacgtgctcgaat

SEQ ID NO: 317837 - DNA, 120 bp, Artificial Sequence
  ENSG00000135298_18 (sequence is synthesized)
gggactcagcagagaagccggcagtgcactgcagctgcccatggaggctccgaatgcagagggccatgggcagaaagcagagagtgctataaccctgaatgtacagccaatggtcaatgg

SEQ ID NO: 317838 - DNA, 120 bp, Artificial Sequence
  ENSG00000135298_19 (sequence is synthesized)
aatcagtggggtcattggagtggttgttccaagtcctgtgatggcggctgggaaaggcgaataaggacctgtcagggtgcagtgataacagggcagcaatgtgaaggaacgggcgaagaa

SEQ ID NO: 317839 - DNA, 120 bp, Artificial Sequence
  ENSG00000135298_20 (sequence is synthesized)
gtgagaagatgcaatgagcagcgatgccctgcaccttatgaaatatgccctgaggattatctgatgtcgatggtgtggaaaagaactccagcaggcgacttggcattcaatcaatgtccc

SEQ ID NO: 317840 - DNA, 120 bp, Artificial Sequence
  ENSG00000135298_21 (sequence is synthesized)
ctgaatgccacaggcaccactagcagacgctgctctctcagtcttcatggagtggccttctgggaacagccgagctttgcaagatgcatatcaaatgagtacagacacttgcagcattca

SEQ ID NO: 317841 - DNA, 120 bp, Artificial Sequence
  ENSG00000135298_22 (sequence is synthesized)
attaaagagcaccttgctaaggggcagcgaatgctggcaggtgatggaatgtcccaggtgaccaagacactgttggatttaactcagagaaaaaatttctatgcaggcgatcttctgatg

SEQ ID NO: 317842 - DNA, 120 bp, Artificial Sequence
  ENSG00000135298_23 (sequence is synthesized)
tctgtggagatcctgagaaatgtgacagacacatttaaaagggcaagttacatccctgcatctgatggtgtccagaacttctttcaaatagttagcaaccttctagatgaagaaaacaag

SEQ ID NO: 317843 - DNA, 120 bp, Artificial Sequence
  ENSG00000135298_24 (sequence is synthesized)
gaaaaatgggaagatgcacaacagatttatccagggtcaatagagttaatgcaggtgattgaagattttatacacattgttggaatggggatgatggactttcagaattcatacttaatg

SEQ ID NO: 317844 - DNA, 120 bp, Artificial Sequence
  ENSG00000135298_25 (sequence is synthesized)
gttgactgggcaagaaactcagaagatagggtagtaattccaaaaagcattttcactccggtgtcatcaaaagaattagatgaatcatctgtatttgttcttggcgcagtcctatacaaa

SEQ ID NO: 317845 - DNA, 120 bp, Artificial Sequence
  ENSG00000135298_26 (sequence is synthesized)
aacttagatctaattttgcccactttgagaaattatactgtcattaattccaaaatcatcgtggtcacaataaggcctgaacccaaaacaaccgattcgtttctggagatagaactagct

SEQ ID NO: 317846 - DNA, 120 bp, Artificial Sequence
  ENSG00000135298_27 (sequence is synthesized)
catttggctaatggtactttgaatccctattgtgtattgtgggatgactccaaaacgaacgagtctttgggaacgtggtccacccagggatgtaaaactgtgcttaccgatgcatcccat

SEQ ID NO: 317847 - DNA, 120 bp, Artificial Sequence
  ENSG00000135298_28 (sequence is synthesized)
acgaaatgcttatgtgatcgtctctctaccttcgccattttggctcagcaacctagagaaataatcatggaatcctctggcacaccttcagttaccctaatagtaggcagtggtctttct

SEQ ID NO: 317848 - DNA, 120 bp, Artificial Sequence
  ENSG00000135298_29 (sequence is synthesized)
tgcttggccttgattaccctagcagttgtctatgcagcattatggaggtacatacgctctgagagatccataatactaattaacttctgcctgtctatcatctcatccaatatcctcata

SEQ ID NO: 317849 - DNA, 120 bp, Artificial Sequence
  ENSG00000135298_30 (sequence is synthesized)
ctggttggacagactcagacacataataagagtatctgcacaaccaccactgcatttttgcactttttcttcctggcttcattctgttgggttttgactgaggcgtggcaatcatatatg

SEQ ID NO: 317850 - DNA, 120 bp, Artificial Sequence
  ENSG00000135298_31 (sequence is synthesized)
gctgtaactggaaaaattaggacacggcttataagaaaacgctttttgtgccttggatggggtttaccagcattagtagtggccacatcagtaggcttcaccagaacaaaaggatatggc

SEQ ID NO: 317851 - DNA, 120 bp, Artificial Sequence
  ENSG00000135298_32 (sequence is synthesized)
actgatcactactgctggctctctcttgaaggaggactactctatgcttttgtgggacctgcagccgctgttgtcctggtcaacatggtgattggcattttggtatttaataaacttgtt

SEQ ID NO: 317852 - DNA, 120 bp, Artificial Sequence
  ENSG00000135298_33 (sequence is synthesized)
tccagagatggaatcctagataaaaagctcaaacacagagccggtcagatgagtgagcctcatagcggtttgacgctcaaatgtgccaagtgtggagtagtttcaacaacagctttgtca

SEQ ID NO: 317853 - DNA, 120 bp, Artificial Sequence
  ENSG00000135298_34 (sequence is synthesized)
gccaccaccgccagtaacgccatggcgtctctttggagctcctgtgtggtgttgccccttctggctttgacgtggatgtctgcggttctggccatgacagataaacgctccatattgttt

SEQ ID NO: 317854 - DNA, 120 bp, Artificial Sequence
  ENSG00000135298_35 (sequence is synthesized)
caaatactttttgctgtgtttgattcattgcaaggctttgttatagtcatggtccactgcattcttcggagagaggttcaggatgcatttagatgccgattgagaaactgtcaggatccc

SEQ ID NO: 317855 - DNA, 120 bp, Artificial Sequence
  ENSG00000135298_36 (sequence is synthesized)
atcaatgcagattcttcgagttcgtttcctaatgggcatgctcaaatcatgacagactttgaaaaggatgtagacattgcctgtcgatcagttcttcataaggatattggtccttgccga

SEQ ID NO: 317856 - DNA, 120 bp, Artificial Sequence
  ENSG00000135298_37 (sequence is synthesized)
gcagccacaataacaggaacactttctaggatttctctaaatgatgatgaagaagaaaagggaacaaaccctgaagggctaagctattcaacattgcctggaaatgtcatttccaaagtc

SEQ ID NO: 317857 - DNA, 120 bp, Artificial Sequence
  ENSG00000135298_38 (sequence is synthesized)
atcatccagcaacccacaggtttgcacatgcccatgagtatgaatgagcttagcaatccatgtttgaaaaaagaaaatagtgaattgcggagaactgtgtacttatgtacggatgataat

SEQ ID NO: 317858 - DNA, 120 bp, Artificial Sequence
  ENSG00000135298_39 (sequence is synthesized)
ttgagaggggctgacatggacatagtccatcctcaagaaagaatgatggaaagtgactatattgtgatgcccagaagttctgtaaataaccagccttcaatgaaagaagaaagcaaaatg

SEQ ID NO: 317859 - DNA, 120 bp, Artificial Sequence
  ENSG00000135298_40 (sequence is synthesized)
aatattggcatggaaaccttgccgcatgaaaggctattgcactacaaagtaaaccctgaattcaatatgaatccccctgtaatggaccagttcaatatgaacttagagcaacatctcgca

SEQ ID NO: 317860 - DNA, 120 bp, Artificial Sequence
  ENSG00000135298_41 (sequence is synthesized)
ccccaggaacatatgcagaatttgccctttgaacctcgcacagctgtgaagaatttcatggcctctgagttggatgataatgcaggactatcaagaagtgaaactggatcaacgatatca

SEQ ID NO: 317861 - DNA, 120 bp, Artificial Sequence
  ENSG00000135298_42 (sequence is synthesized)
atgagttctttagagagaagaaaatcacgatattcagaccttgactttgagaaggtcatgcatacaaggaagaggcatatggaactatttcaagaactaaatcagaaatttcaaactttg

SEQ ID NO: 317862 - DNA, 120 bp, Artificial Sequence
  ENSG00000135298_43 (sequence is synthesized)
gacagatttcgggatataccaaatacaagcagtatggaaaaccccgcaccaaacaagaatccatgggacactttcaaaaaccccagtgaatacccgcattacaccacaatcaatgtctta

SEQ ID NO: 317863 - DNA, 120 bp, Artificial Sequence
  ENSG00000135298_44 (sequence is synthesized)
gacacagaggcaaaggatgctttggaactgaggccagcagagtgggagaagtgtctgaatttgcctctggatgtgcaagagggtgactttcaaacagaagtttaaaaaaatcaaaatgga

SEQ ID NO: 317864 - DNA, 120 bp, Artificial Sequence
  ENSG00000135298_45 (sequence is synthesized)
ctaaggtagagacaaaactttattgcactgacacttaagacttgggaagcctgacatttctatctggacagtgtgactatcttatgtcaggaccttcatgtgccaaacgtcagtggtgtt

SEQ ID NO: 317865 - DNA, 120 bp, Artificial Sequence
  ENSG00000135298_46 (sequence is synthesized)
ttcatatggtaacttctcactagtcaggctagtggagagatgaccaggtgtacagttctgaccatcctgtgttgtaagtacccgtggaatggatttgtaaggtaatctttatagataaac

SEQ ID NO: 317866 - DNA, 120 bp, Artificial Sequence
  ENSG00000135298_47 (sequence is synthesized)
ctcaagcaacgattcatgttgtaaccgcttcatatggtttagttttcaaaaaacttcaccatgaagcacaatgtatatatttatgcagtttttaaagtttataacagtctgtttggccat

SEQ ID NO: 317867 - DNA, 120 bp, Artificial Sequence
  ENSG00000135298_48 (sequence is synthesized)
tactacactttttactttataatataaaagcaaagtttttgtcattaaatgaatgtttgttgagctacattcttcattgctttaaatgcaataaagtaataatctcacttttatatgaat

SEQ ID NO: 317868 - DNA, 120 bp, Artificial Sequence
  ENSG00000135298_49 (sequence is synthesized)
aatatatttcacatctttattattgcagttttctctagaaagctctgagaagctttctctgctgcagctgtgtataaaatatttaaaatgttgtatggtgtaaataaacttttgtctaca

SEQ ID NO: 317869 - DNA, 120 bp, Artificial Sequence
  ENSG00000135298_50 (sequence is synthesized)
agtcccggtttcagcacctccggcgctggacagctctctgcacgccgcaccgccgcctgcttgctttttcccactctcgctttgcattactggagatgcatctaaattacatcctgttca

SEQ ID NO: 317870 - DNA, 120 bp, Artificial Sequence
  ENSG00000135298_51 (sequence is synthesized)
acaacaagtagatttttttttcctgtacaggaattacagtagacgactctctcaattaaactgcattttcttctttacggatttggctatcaggcgtatttatcccgatttcctcccccc

SEQ ID NO: 317871 - DNA, 120 bp, Artificial Sequence
  ENSG00000135298_52 (sequence is synthesized)
atatgctttagcattttaaatggctacaccaaagagaaaattgaaccaggctctcttccctactcctactggactttggggtggggttattcctctgaatgttctagcggacttggggtt

SEQ ID NO: 317872 - DNA, 120 bp, Artificial Sequence
  ENSG00000135298_53 (sequence is synthesized)
agcttaatgcttctgccccagggcaaagaagcagttgagggaaagaaatgtcaaggacgtcagaggcgagctggactgagtgaagtgtggagtaggaagcttaggaacgagtctttggga

SEQ ID NO: 317873 - DNA, 80 bp, Artificial Sequence
  ENSG00000135299_0 (sequence is synthesized)
gaggccctggggccgccggagccagcgggagccagtccccgtcttcgcccctcgccccccaccgtgtcgccggccttggt

SEQ ID NO: 317874 - DNA, 120 bp, Artificial Sequence
  ENSG00000135299_1 (sequence is synthesized)
gccttggtccctgcggcgcggacgtccggcgcgggagagaaaggtcccgaagatggcatattcataaagacatcttctgatgattgtgaacatctttacctctgggtgccaggccgggcc

SEQ ID NO: 317875 - DNA, 120 bp, Artificial Sequence
  ENSG00000135299_2 (sequence is synthesized)
agtgacttcgtgttgagctgaaggaacttgtctaccgcttccctgaaaacctttctttcctaattcatgagccagcaagatgcggtcgctgcactttcagagcgccttctcgtagctgcg

SEQ ID NO: 317876 - DNA, 120 bp, Artificial Sequence
  ENSG00000135299_3 (sequence is synthesized)
tacaaaggccaaacagagaatgtggttcagctcatcaacaagggcgccagggtagcggttaccaagcatggccggactcccctgcatcttgctgccaataagggccatcttcctgtggtc

SEQ ID NO: 317877 - DNA, 120 bp, Artificial Sequence
  ENSG00000135299_4 (sequence is synthesized)
cagatcttgctgaaggctggctgcgaccttgatgtccaggatgatggggaccagaccgccttgcaccgggccacagtggtggggaacacggagatcatcgcggcgctcatccacgaaggg

SEQ ID NO: 317878 - DNA, 120 bp, Artificial Sequence
  ENSG00000135299_5 (sequence is synthesized)
tgtgccctggacagacaagacaaggatgggaatacagccttgcatgaagcatcctggcatggtttcagccagtcagccaagctgctcattaaagcaggagccaacgtgcttgccaagaac

SEQ ID NO: 317879 - DNA, 120 bp, Artificial Sequence
  ENSG00000135299_6 (sequence is synthesized)
aaggcggggaacacagctctgcacctggcctgccagaacagccactcccagagcacgcgcgtcctcctgctggccgggtcccgcgctgacctcaaaaataatgcaggagacacctgtttg

SEQ ID NO: 317880 - DNA, 120 bp, Artificial Sequence
  ENSG00000135299_7 (sequence is synthesized)
cacgttgctgcgcgctataatcacttgtccatcattaggctcctcctcactgctttctgttctgtccatgaaaagaaccaggctggagacacagcacttcacgttgctgctgccctaaat

SEQ ID NO: 317881 - DNA, 120 bp, Artificial Sequence
  ENSG00000135299_8 (sequence is synthesized)
cacaagaaggtggccaaaatcttactggaagccggagcagatacgaccattgttaacaatgcaggccagactccgctggagactgcccgctaccacaataacccggaagttgctcttctc

SEQ ID NO: 317882 - DNA, 120 bp, Artificial Sequence
  ENSG00000135299_9 (sequence is synthesized)
cttactaaagctccccaggtcttgcgcttcagtcgtgggcgaagcctgaggaaaaagagagagaggctcaaggaagagaggagagcccagtctgtgccaagagatgaggtggcccaaagc

SEQ ID NO: 317883 - DNA, 120 bp, Artificial Sequence
  ENSG00000135299_10 (sequence is synthesized)
aagggcagtgtctcagcaggagacacccccagcagtgaacaggctgtggccagaaaagaagaagccagagaagagttcctgtcagcctccccagaacccagagcaaaggatgacaggagg

SEQ ID NO: 317884 - DNA, 120 bp, Artificial Sequence
  ENSG00000135299_11 (sequence is synthesized)
agaaagtcaaggcccaaggtgtcagcattttctgaccccaccccaccagccgaccaacagcctggacaccagaagaacctgcatgctcataatcaccctaaaaagaggaacaggcatcgg

SEQ ID NO: 317885 - DNA, 120 bp, Artificial Sequence
  ENSG00000135299_12 (sequence is synthesized)
caataaatggttgtcgatgtgaacctctaatcaacaagctggagaatcagttggaggctactgtggaggagataaaagcagagctgggatcggttcaggacaaaatgaatacaaagctgg

SEQ ID NO: 317886 - DNA, 120 bp, Artificial Sequence
  ENSG00000135299_13 (sequence is synthesized)
ggcagatggagaataagacccagcaccaaatgcgtgttttggacaagctgatggttgagcgactttctgcagagaggacggagtgcctgaaccgcctgcaacagcactcagacacagaga

SEQ ID NO: 317887 - DNA, 120 bp, Artificial Sequence
  ENSG00000135299_14 (sequence is synthesized)
agcatgagggggagaaacgacagatatccttggtggatgaattaaaaacctggtgcatgttaaagattcagaatctggagcagaagctttctggagattctagggcctgcagagctaaat

SEQ ID NO: 317888 - DNA, 120 bp, Artificial Sequence
  ENSG00000135299_15 (sequence is synthesized)
ccacaccatctacttgtgtggaccaattagtggtgactgcaggtccagcagcagcttccgacagctcccctccagtggttaggcccaaagagaaggccctcaactccactgctacccaga

SEQ ID NO: 317889 - DNA, 120 bp, Artificial Sequence
  ENSG00000135299_16 (sequence is synthesized)
gactccagcaggagctgtcgtcttctgactgtacaggctcccgactgagaaacgtcaaggtccagacagccttgctacccatgaatgaggcagccagatctgatcagcaggctgggccct

SEQ ID NO: 317890 - DNA, 120 bp, Artificial Sequence
  ENSG00000135299_17 (sequence is synthesized)
gcgtcaacagaggcactcaaactaagaagtctgggaagagtgggccaacaaggcatcgtgcccagcaacccgcagccagcagcacctgtgggcagccgccaccagccacaggcagcgagc

SEQ ID NO: 317891 - DNA, 120 bp, Artificial Sequence
  ENSG00000135299_18 (sequence is synthesized)
agactggccctcacattcgggacacctcccaagctctggagcttacccagtatttttttgaggctgtttctacccagatggaaaagtggtatgaaaggaagattgaagaagcacgaagcc

SEQ ID NO: 317892 - DNA, 120 bp, Artificial Sequence
  ENSG00000135299_19 (sequence is synthesized)
aagccaatcagaaagcccagcaagataaggctacattgaaggaacacattaaaagtttagaagaggaacttgccaaactaaggactagggtgcagaaggaaaattagcaccaataaagag

SEQ ID NO: 317893 - DNA, 120 bp, Artificial Sequence
  ENSG00000135299_20 (sequence is synthesized)
gaaatatgaaaggattcttgaagatttccagttttgcaactgcataatagctatgcccaaggagtcaactattgtatatattgcagatttgcctttttaaaaaaatcactaattctacaa

SEQ ID NO: 317894 - DNA, 120 bp, Artificial Sequence
  ENSG00000135299_21 (sequence is synthesized)
tgtgccagatacatgtttcctatgcccaggaagttatgaagacttcaacaattaaactgaaaccaggggaagcttgcttagttttgggtttcattataaactcttagcctcagtccaggt

SEQ ID NO: 317895 - DNA, 120 bp, Artificial Sequence
  ENSG00000135299_22 (sequence is synthesized)
taatctgaagtttgaaagctcagattaagcaagccatgccaagaaactggacgatgtgtaagcctagactctaaaattcaagatgtgtgaaataatataagtcaaaagcaagaaaaacgt

SEQ ID NO: 317896 - DNA, 120 bp, Artificial Sequence
  ENSG00000135299_23 (sequence is synthesized)
aatcccgtctgaactcaagtagtcattcatataaatttgaacacacctgctgtgcctagacaagtgtctttctgtaagagctgtaactctgagatgtgctaaataaaccctctttctcaa

SEQ ID NO: 317897 - DNA, 120 bp, Artificial Sequence
  ENSG00000135299_24 (sequence is synthesized)
tatcagatttttgaggagaaatattttcatgatgtcacaagatccaatatatcttatgataaaatttattgaaaagtcagtttatttaaataatgaataattggctaacagctctggaaa

SEQ ID NO: 317898 - DNA, 120 bp, Artificial Sequence
  ENSG00000135299_25 (sequence is synthesized)
caatgagatcaaatgagaaagattcaaattgtttgttattttctgtattttcagtcaaaaaatcagttatatagtgattttaaagcagattaatggaaaaaaattcatgtaacaattacc

SEQ ID NO: 317899 - DNA, 120 bp, Artificial Sequence
  ENSG00000135299_26 (sequence is synthesized)
tgaaaatttataacctattcctaatcaaacccaattatatcagaatacctttctgaatttgagatttttgctctacattttataatgaataaggctattttttgaaagtatttcattttg

SEQ ID NO: 317900 - DNA, 120 bp, Artificial Sequence
  ENSG00000135299_27 (sequence is synthesized)
aattctgtcattaacctcaaaagctttctactgctttgcggtgaaggcaaaatattcgataactcaacttaggccccactgttccccaacttcatggaggccagaagactttactttgtt

SEQ ID NO: 317901 - DNA, 120 bp, Artificial Sequence
  ENSG00000135299_28 (sequence is synthesized)
ccataatgaaatataaacacagaacaaagttgtaaaagtagcatggatatgttgaaactttggacaagcttcttgtcctttggaatatgggatttatattcatctcctcaatatcccatg

SEQ ID NO: 317902 - DNA, 120 bp, Artificial Sequence
  ENSG00000135299_29 (sequence is synthesized)
tatgcacagaaacttcagttctatttctatagacacaggaacctagtgactattgaacgtaattgtaataaaatgctgctcattgagccaaagagaagaaatgatttattaacatgggga

SEQ ID NO: 317903 - DNA, 120 bp, Artificial Sequence
  ENSG00000135299_30 (sequence is synthesized)
caccaagaaaaacaaagtatgcttttattccctttgtcaagctcagttttagggttttttcttttttttatagtgacaatccatagatatagacattcctaaaagaaaaataattcagta

SEQ ID NO: 317904 - DNA, 120 bp, Artificial Sequence
  ENSG00000135299_31 (sequence is synthesized)
ccatagatatagacattcctaaaagaaaaataattcagtagatatatgtcactgttacctgaatatggaatgaatttgatgttttttattttgttgagacagggtcttgctctgtcaccc

SEQ ID NO: 317905 - DNA, 120 bp, Artificial Sequence
  ENSG00000135299_32 (sequence is synthesized)
ttggcctctcaggctcgtgatcctcctgcctcaacctcgcaagtagcttgggactacaggcgtgtgccaccagtcctggctaattttttgtagatataaggtctcatgatattgcccagg

SEQ ID NO: 317906 - DNA, 120 bp, Artificial Sequence
  ENSG00000135299_33 (sequence is synthesized)
ctgaatttgatgttatttcaagttgattttcatgtgtttgggagcttgtcttgttctcaactactacgcaggtagacagtcttcccccagagactcattagattgcaatatagaggcact

SEQ ID NO: 317907 - DNA, 120 bp, Artificial Sequence
  ENSG00000135299_34 (sequence is synthesized)
ttctcatttccctattgttcctaatacagaattgtagagctggagagtaccttcagttttctaaatctattctcaaacaggatatcactaacctctttagaatcattcctcagtatacat

SEQ ID NO: 317908 - DNA, 120 bp, Artificial Sequence
  ENSG00000135299_35 (sequence is synthesized)
caatttattgagaactgcctaatactcaagaaattaaatcctgagttcagtaggctgtgttccaagcaggaattattttcacttaccaaaatatctcctattacctcaaggtatccttgt

SEQ ID NO: 317909 - DNA, 120 bp, Artificial Sequence
  ENSG00000135299_36 (sequence is synthesized)
tgaggaatgctgaaaactaaattttaagtatcaagtctagaccatagagtgctttggtgggagtattttgattacctcctacccatcagaagcaggcagctaatattgtgaactgagtat

SEQ ID NO: 317910 - DNA, 120 bp, Artificial Sequence
  ENSG00000135299_37 (sequence is synthesized)
ttttgtcaaaagtcacagggaagagactacagaagaatgagaagggtcaaaaggacctagtgtggcttactacatggatcttgtctcttggaggtctgtcgtagaagaagaaacaaatag

SEQ ID NO: 317911 - DNA, 120 bp, Artificial Sequence
  ENSG00000135299_38 (sequence is synthesized)
aggtgatgaagacacagaacaggctcagtcagcatcctcacccagagatggcaacatctattaagaccaatgcaataccttttcatcttcagcaaatgttgtttcatctgtttttgatcc

SEQ ID NO: 317912 - DNA, 120 bp, Artificial Sequence
  ENSG00000135299_39 (sequence is synthesized)
ttggcattgtcaaaaacttaactgcaggtccagtgtatatttttccttatttttcccttttagctatctgctaaagtgagtaaatgccacaactgtacttttccaaagaaaaagaactat

SEQ ID NO: 317913 - DNA, 120 bp, Artificial Sequence
  ENSG00000135299_40 (sequence is synthesized)
tgacaacttatagcctgtcatgcaggtcatgtttcaaatcaaggctgaaattttcaacagctgtgggaaaaactaaaacacagaaatactgtacagtattagtgtttttttaaagaaatt

SEQ ID NO: 317914 - DNA, 120 bp, Artificial Sequence
  ENSG00000135299_41 (sequence is synthesized)
gttagtgcattattgagtatactaaatatctgtgattaaataaattagttctaacttttgattttgggagcccaaaataaagggagtgttgttttcatggttatgccttgtttgtggagt

SEQ ID NO: 317915 - DNA, 120 bp, Artificial Sequence
  ENSG00000135299_42 (sequence is synthesized)
caagtgttgatatacttgaggcatgttatgtgtcttctaattaatatttttatcaccttgaatttgtgtctcttccaagcattaaagatactatggatcttaaattccttattaaaaaaa

SEQ ID NO: 317916 - DNA, 120 bp, Artificial Sequence
  ENSG00000135299_43 (sequence is synthesized)
agatttgctgggagtgacagccctaggaagctaatgatctctccaggaaagaattgaccacagttatccagaaactgaacacgatgtagaacagagaggacagcccctcggatgtcccga

SEQ ID NO: 317917 - DNA, 120 bp, Artificial Sequence
  ENSG00000135299_44 (sequence is synthesized)
ccatggtactgattatgcgggactacaaagttgttgggactcctggttgcaatctactgaagcctcttcaaactaacttaaatatggaatgtaaccaggcagtggaggtataggcatgca

SEQ ID NO: 317918 - DNA, 120 bp, Artificial Sequence
  ENSG00000135299_45 (sequence is synthesized)
tgggggcccaggatgacgggagtcaaaggcatcaagtccagctcttcgtgttcatgcctgggccgcctcatcttctccctgtggctggatctttgtcacggccagctgcctaggtcatag

SEQ ID NO: 317919 - DNA, 120 bp, Artificial Sequence
  ENSG00000135299_46 (sequence is synthesized)
tttcccagctactcagccaaggaagaagttccagtttaagacatcgcaggacagggccatgattgcagagtttaggccaaatgcccatccctgaagaagtgggacagggactttaagaag

SEQ ID NO: 317920 - DNA, 120 bp, Artificial Sequence
  ENSG00000135299_47 (sequence is synthesized)
gaggcagtttattacagatttcaaccctttctgcatccctccctcccttacaacacgcacactcatcttttcttgcattactgctgaaattatgcaaacttcgtttctctgtcatctgag

SEQ ID NO: 317921 - DNA, 120 bp, Artificial Sequence
  ENSG00000135299_48 (sequence is synthesized)
cgtcattcagaaatgttcctccgatctgtgaattgttccctgacttcaatcggggcagtgttacaggtcctctgctggcaggagggagcagtccgtgaaaatctgcagacacaagacttt

SEQ ID NO: 317922 - DNA, 120 bp, Artificial Sequence
  ENSG00000135299_49 (sequence is synthesized)
cagaagctgtgacgagcagactagcaagccacaaaacattgcaagctgaatggatgtcttaataagcttttagatgtgatttggccagcatcagcagaggaggctaacgggaaaaggcag

SEQ ID NO: 317923 - DNA, 120 bp, Artificial Sequence
  ENSG00000135299_50 (sequence is synthesized)
gcatcggtgttcatccccacccccaccccatgagttcagggcgtatcagctctacacattgtaccggggcaaggatgggaaagtgatgcagatgcgtgttttggacaagctgatggttga

SEQ ID NO: 317924 - DNA, 120 bp, Artificial Sequence
  ENSG00000135299_51 (sequence is synthesized)
aaacaaacaaaaaaaaaaactaatagagcaagaacttactaaccgtgaggatggtaccaagccagtcatgaggcattcacccccttgacacaaacacctcccatgaggccccacctccaa

SEQ ID NO: 317925 - DNA, 120 bp, Artificial Sequence
  ENSG00000135299_52 (sequence is synthesized)
atcaaatttcaacatgagatttggaggggtcaaatatccaaaccatagcagtgggcaagccataacttttgggtttgttagatggtatcctcaactgttataattgaaaagtccatcctt

SEQ ID NO: 317926 - DNA, 120 bp, Artificial Sequence
  ENSG00000135299_53 (sequence is synthesized)
aggtaacccacacacagagagcccttttgtccaaaaggaacacgaccagcagctcttgtactctcctgcactgaaaggcagtacgtatgctagggctgtgggaaacactggatggtaaag

SEQ ID NO: 317927 - DNA, 120 bp, Artificial Sequence
  ENSG00000135299_54 (sequence is synthesized)
tgcactctgtaggggcaaggactgtattttgctcgtaaccatatactcagttgctatgtaataataaagcactcatttatgtgctcaaacttatttgaataaaggaattaaagaattgtt

SEQ ID NO: 317928 - DNA, 120 bp, Artificial Sequence
  ENSG00000135299_55 (sequence is synthesized)
ctttaagtagagcctcataacgctttaacaaagggccccatttcagtctcaggcaaatctcagtttgactttgaagagccacacctaggccaggtaatgaaaagctgggggctgtaggcc

SEQ ID NO: 317929 - DNA, 120 bp, Artificial Sequence
  ENSG00000135299_56 (sequence is synthesized)
tttacatttgagaagacagagcgcagagaggtcaaatcacttgcccagagaccctatagccagtagctactgggttcaaactgagatctgttctgacccacctatgtttttctgtgtcca

SEQ ID NO: 317930 - DNA, 120 bp, Artificial Sequence
  ENSG00000135299_57 (sequence is synthesized)
ttctgtcactctgcactgtaagaggcagagtaaatgcttccttttggggaagagataactgtcccgtggttggtactatggctcatagatacactttaataatattttgaatcaaattga

SEQ ID NO: 317931 - DNA, 120 bp, Artificial Sequence
  ENSG00000135299_58 (sequence is synthesized)
tgtgacttggacacagtttggccaagggaacatctgctgggctagctcaagtccagtgtaccaagatggagagtgagactgtgcctcacacggggctgctgcgttgcacaactccaggag

SEQ ID NO: 317932 - DNA, 120 bp, Artificial Sequence
  ENSG00000135299_59 (sequence is synthesized)
acgccattcatatcctagtttatgtgaatggcactccctggagcacagtctctgtgcatgtagttggcagtcccggcccagcatcagtgtctgtagttattatcatcatagactttaagc

SEQ ID NO: 317933 - DNA, 120 bp, Artificial Sequence
  ENSG00000135299_60 (sequence is synthesized)
ttcttgaggtcagggataatatcctacctgtctccgagtccccgtggtgcccaggacaagacctaggaggatggtaggtggtccagaggtgcttgcttgatgtgaacacctgctctcacc

SEQ ID NO: 317934 - DNA, 120 bp, Artificial Sequence
  ENSG00000135299_61 (sequence is synthesized)
ctctaagctgtaaattccattaggtcagagccccaggtccaaggagaattctctcacacagatgctgcgcacaccagtggttgtaacaatgccgtttgcctccttcaggtcttgcgcttc

SEQ ID NO: 317935 - DNA, 120 bp, Artificial Sequence
  ENSG00000135299_62 (sequence is synthesized)
aactgtaagtagcgagcttggtttccatgagtcacatgtgtccacagaataggcccaactagacaacagatctgtgggaatgtttggctctccatgaaccacaaagactcctccaacaca

SEQ ID NO: 317936 - DNA, 120 bp, Artificial Sequence
  ENSG00000135299_63 (sequence is synthesized)
ctcctggctgcttcctgatgtcttgctggcagcaagtgggctagggtcggcttgcccagaggggcgcatccaggtggggttcacctttctgaaccaggtcccgaagatggcatattcata

SEQ ID NO: 317937 - DNA, 120 bp, Artificial Sequence
  ENSG00000135299_64 (sequence is synthesized)
agttttggtttggccattgacatgtaaatgtcagagaggcctgaggctgttccccagtggaccctcccgccttcccacacaaagccctggctctgtgagggccatggctttgcctttgtg

SEQ ID NO: 317938 - DNA, 120 bp, Artificial Sequence
  ENSG00000135312_0 (sequence is synthesized)
atttggtcaaagccttctcctcaagcagtacttcaccctcctgcactagacgcctccagggagctggagcggagcagggctcggtgggccagctcttagcaacccaggtctaagacccgg

SEQ ID NO: 317939 - DNA, 120 bp, Artificial Sequence
  ENSG00000135312_1 (sequence is synthesized)
tgtggagaggaacaaccacagacgcggcggcttagctaggcgctctggaagtgcaggggaggcgcccgcctgccttggctgccgcacccatgacctctagtttcagctgtgaacctgggc

SEQ ID NO: 317940 - DNA, 120 bp, Artificial Sequence
  ENSG00000135312_2 (sequence is synthesized)
ggaggaataattgaggaactcacggaactatcaactggggacaaacctgcgatcgccacggtccttccgccctctccttcgtccgctccatgcccaagagctgcgctccggagctggggc

SEQ ID NO: 317941 - DNA, 120 bp, Artificial Sequence
  ENSG00000135312_3 (sequence is synthesized)
gaggagagccatggaggaaccgggtgctcagtgcgctccaccgccgcccgcgggctccgagacctgggttcctcaagccaacttatcctctgctccctcccaaaactgcagcgccaagga

SEQ ID NO: 317942 - DNA, 120 bp, Artificial Sequence
  ENSG00000135312_4 (sequence is synthesized)
ctacatttaccaggactccatctccctaccctggaaagtactgctggttatgctattggcgctcatcaccttggccaccacgctctccaatgcctttgtgattgccacagtgtaccggac

SEQ ID NO: 317943 - DNA, 120 bp, Artificial Sequence
  ENSG00000135312_5 (sequence is synthesized)
ccggaaactgcacaccccggctaactacctgatcgcctctctggcggtcaccgacctgcttgtgtccatcctggtgatgcccatcagcaccatgtacactgtcaccggccgctggacact

SEQ ID NO: 317944 - DNA, 120 bp, Artificial Sequence
  ENSG00000135312_6 (sequence is synthesized)
gggccaggtggtctgtgacttctggctgtcgtcggacatcacttgttgcactgcctccatcctgcacctctgtgtcatcgccctggaccgctactgggccatcacggacgccgtggagta

SEQ ID NO: 317945 - DNA, 120 bp, Artificial Sequence
  ENSG00000135312_7 (sequence is synthesized)
ctcagctaaaaggactcccaagagggcggcggtcatgatcgcgctggtgtgggtcttctccatctctatctcgctgccgcccttcttctggcgtcaggctaaggccgaagaggaggtgtc

SEQ ID NO: 317946 - DNA, 120 bp, Artificial Sequence
  ENSG00000135312_8 (sequence is synthesized)
tctacgtagaagcccgctcccggattttgaaacagacgcccaacaggaccggcaagcgcttgacccgagcccagctgataaccgactcccccgggtccacgtcctcggtcacctctatta

SEQ ID NO: 317947 - DNA, 120 bp, Artificial Sequence
  ENSG00000135312_9 (sequence is synthesized)
actcgcgggttcccgacgtgcccagcgaatccggatctcctgtgtatgtgaaccaagtcaaagtgcgagtctccgacgccctgctggaaaagaagaaactcatggccgctagggagcgca

SEQ ID NO: 317948 - DNA, 120 bp, Artificial Sequence
  ENSG00000135312_10 (sequence is synthesized)
aagccaccaagaccctagggatcattttgggagcctttattgtgtgttggctacccttcttcatcatctccctagtgatgcctatctgcaaagatgcctgctggttccacctagccatct

SEQ ID NO: 317949 - DNA, 120 bp, Artificial Sequence
  ENSG00000135312_11 (sequence is synthesized)
ttgacttcttcacatggctgggctatctcaactccctcatcaaccccataatctataccatgtccaatgaggactttaaacaagcattccataaactgatacgttttaagtgcacaagtt

SEQ ID NO: 317950 - DNA, 120 bp, Artificial Sequence
  ENSG00000135312_12 (sequence is synthesized)
gacttgccgtttgcagtggggtcgcctaagcgacctttggggaccaagttgtgtctggttccacaggtaggtcgaatcttctttcgcggtttctgggtcccagcgaggctctctctcctg

SEQ ID NO: 317951 - DNA, 120 bp, Artificial Sequence
  ENSG00000135312_13 (sequence is synthesized)
ggcaagggcaatggatcctgagaagccagaatagtcctgagagagagctctgaaaggagaagtgttgaaactaaatgtagagcttccctgcccaggaggaggctcacttcctcccctcaa

SEQ ID NO: 317952 - DNA, 120 bp, Artificial Sequence
  ENSG00000135312_14 (sequence is synthesized)
gccccgggctcagcactgaccctgcggcagccaatcccaaagggggttgcaacttttaaaaattgataatggaagggaatccctgccctgctttggtatcgtggataatgcccactagaa

SEQ ID NO: 317953 - DNA, 120 bp, Artificial Sequence
  ENSG00000135312_15 (sequence is synthesized)
gcagtgtacttgtaattgttgtctgaagcctgtctgagacagatctacatacagcctggcagtacttgaactagacgcttaatgccctgtgtttttggggggagaactttgtgttacagc

SEQ ID NO: 317954 - DNA, 80 bp, Artificial Sequence
  ENSG00000135314_0 (sequence is synthesized)
gcgcgcctcgcgcggccgcggcgcgagccgggacccctggaagggtcgggtgcgcggcccaggaggtaccgctgtctcct

SEQ ID NO: 317955 - DNA, 120 bp, Artificial Sequence
  ENSG00000135314_1 (sequence is synthesized)
cgccgccgccgccgccgccgccgccctactcagggagtggcccaggcctgcggcgcgccaccctcacctccttcattcctaccgtcaaagcccagccttggctacctgacccccctgtgg

SEQ ID NO: 317956 - DNA, 120 bp, Artificial Sequence
  ENSG00000135314_2 (sequence is synthesized)
tctcgaactcggttagtccggtgaagggacagagaagcctgggttcccggcggcatcactgagatgctcagtcctgaattctgccctccattaggattatctgctttgtgggataatttc

SEQ ID NO: 317957 - DNA, 120 bp, Artificial Sequence
  ENSG00000135314_3 (sequence is synthesized)
ctcattggttgagtcagtgagttgcgtgtctgcaagagagcatcctatctggtcggagcagagcatggacatgggaacgagtgctctcagcaagaagccgtggtggaccctgcctcaaaa

SEQ ID NO: 317958 - DNA, 120 bp, Artificial Sequence
  ENSG00000135314_4 (sequence is synthesized)
cgggcatggtgacacataccttcgctgcattgaggtgcacagccacacccttattcagctggagagttggttcacagctacaggccagactcgtgtgactgtagtcggaccacacagggc

SEQ ID NO: 317959 - DNA, 120 bp, Artificial Sequence
  ENSG00000135314_5 (sequence is synthesized)
aaggcagtggctgctgcacatgttttgttgtgtggggagccaggactcctatcatcatgctcgaggcctggagatgctggaacgtgtccgaagccagcctctgaccaacgatgacctggt

SEQ ID NO: 317960 - DNA, 120 bp, Artificial Sequence
  ENSG00000135314_6 (sequence is synthesized)
cacctccattagtgtgccaccatacactggagacctgtctttggctcccaggataagtggaaccgtgtgtcttagcgttcctcagccttccccttaccaagtgattggttgttcgggttt

SEQ ID NO: 317961 - DNA, 120 bp, Artificial Sequence
  ENSG00000135314_7 (sequence is synthesized)
ccatttgagttcactgtatccgtaattaaggactgatctcccctgggaagtggggatgagaggagaaatcttggcttcacttttggtgagaaagacatgatagacactgaggaaagtttg

SEQ ID NO: 317962 - DNA, 120 bp, Artificial Sequence
  ENSG00000135314_8 (sequence is synthesized)
aacttgtggccgggacctgtccctctcaggtcttctagacatgtctgagggaagtctcttgaatgtaagaaagtgttattggcaaagcaatccaataaaataagctacctatgatgcaaa

SEQ ID NO: 317963 - DNA, 120 bp, Artificial Sequence
  ENSG00000135314_9 (sequence is synthesized)
ggcggaagaggcgggtccagggcggtgtaattaaggcgcggagcccagaccctcctgctacagtgcctcgggctttcctggaggcgggcggcgggatgctgctccgttctccgggtcctc

SEQ ID NO: 317964 - DNA, 120 bp, Artificial Sequence
  ENSG00000135314_10 (sequence is synthesized)
tcctccggttcttgtcgtttggtcacgccctcagttcagtcggttattggaaaacgatcaaggcccaaagatggtttacgtggcgttgtggatgttatcaccgttgtttggtgaccgagc

SEQ ID NO: 317965 - DNA, 120 bp, Artificial Sequence
  ENSG00000135314_11 (sequence is synthesized)
ctggagcttgagccctgggacgtcttgccagccgcatgtggtcccgtgcccacttctcgcggtggcgcgttaatccacctagactgtgcattggtccagtctgggttgaccccgacccga

SEQ ID NO: 317966 - DNA, 120 bp, Artificial Sequence
  ENSG00000135314_12 (sequence is synthesized)
agtggccctttccttcgcgtcctgaacttcgcttctccgtcggtgtctggtctcttcccgccggcgggctctgcggtggcgggaggagctgtactactcgtgccttagcgcacccttact

SEQ ID NO: 317967 - DNA, 120 bp, Artificial Sequence
  ENSG00000135314_13 (sequence is synthesized)
ttcccaggccagaaacgcgaaatgctgtcggccttccagaggctgttccgagtcttatttgtgattgaaacagtctcagaatacggagtcctgatcttcatttatggatggccctttctc

SEQ ID NO: 317968 - DNA, 120 bp, Artificial Sequence
  ENSG00000135314_14 (sequence is synthesized)
tcaaggagcggaaagactagatgccgatccaaaaggtgaccagccaccaagtaaagcactgatggtttcagaatgtgcctaaacctgcaccagtgaggcaagtatgcaaaaggagtccct

SEQ ID NO: 317969 - DNA, 120 bp, Artificial Sequence
  ENSG00000135314_15 (sequence is synthesized)
ttccgggatggacacacttcccatagagccgtgtcaccccgcacagggttgcaaccaggctgggtgccactgcctgcaaacagactgggatctgtttttgtttttttgttgttttgtttt

SEQ ID NO: 317970 - DNA, 120 bp, Artificial Sequence
  ENSG00000135314_16 (sequence is synthesized)
aggcatgagccactgcacccggcctcagactgggatctgaaattagagagaatcccttgtggactggggacaggacaagactgctctagattggcccatggtgccaggttagttccttct

SEQ ID NO: 317971 - DNA, 120 bp, Artificial Sequence
  ENSG00000135314_17 (sequence is synthesized)
ttctgtaagctccacctcctccaggggcacccgctaattggctccctcagatcctggctagccagtacaaggcctcagcagtgcacagatcccatctccagccagtccaggtggcgctcg

SEQ ID NO: 317972 - DNA, 120 bp, Artificial Sequence
  ENSG00000135314_18 (sequence is synthesized)
catggtagggtgcatgaacctgtgttggagtacaggccttctttgctccagttgtttcccaataataaatgttataaaattatcaaaggcactgtattagtctgttatgctgctacacga

SEQ ID NO: 317973 - DNA, 88 bp, Artificial Sequence
  ENSG00000135314_19 (sequence is synthesized)
cagttccacattgctgcggagaccttttcacaaggtggtaggagaatgaatgagcgccagtaggggaaatgccagacgcttataaaac

SEQ ID NO: 317974 - DNA, 120 bp, Artificial Sequence
  ENSG00000135314_20 (sequence is synthesized)
caccttttcacaaggtggtaggagaatgaatgagcgccagtaggggaaatgccagacgcttataaaaccatcagatgtcgtgagagtcactcatcacgagaacagcatgggggaaactgc

SEQ ID NO: 317975 - DNA, 120 bp, Artificial Sequence
  ENSG00000135314_21 (sequence is synthesized)
cttgccctttacatgtggggattattacaattcaaggtgagatctgggtggggacacagagccaaaccatataaggcacactgctcaccaacattaggtagagttcatacatttctttct

SEQ ID NO: 317976 - DNA, 120 bp, Artificial Sequence
  ENSG00000135314_22 (sequence is synthesized)
ctcagcaatggacaatggatacattagaatgaggatgattgctgcaatgctaaccagctaataaatagaagtggactgggatgagagtccaggcaattgcctaatgagccccgctataca

SEQ ID NO: 317977 - DNA, 120 bp, Artificial Sequence
  ENSG00000135314_23 (sequence is synthesized)
tacatatttgcaaaaatgtagaatgatgccattcttttttgttttggcaaatagttatttttcattaaaaatgtaatgttatgttaatattggataaaaattgatttaataaaaatgtta

SEQ ID NO: 317978 - DNA, 120 bp, Artificial Sequence
  ENSG00000135315_0 (sequence is synthesized)
gttaccctgacaactggtggacccgcacagaccttccgggaaagcgcggaattcagaggcagagtgtttccaatgtttgaggtactttagaatgtttactttgggaggtcaaaattgttg

SEQ ID NO: 317979 - DNA, 120 bp, Artificial Sequence
  ENSG00000135315_1 (sequence is synthesized)
actatggctaactgttcccaagaagagctagatgaagagtttgaacagtttatgaaagagctttcagatgattcttttgaaaattcagacaaaacagctagacaatctaaaaaagagatg

SEQ ID NO: 317980 - DNA, 120 bp, Artificial Sequence
  ENSG00000135315_2 (sequence is synthesized)
aagaagaaagatacagtgccttggtggataactgaagatgattttaaagatgatggacttcttggaacaaatgtgagctatttgaaaacaaagaagacttctcagcctgttatggaaata

SEQ ID NO: 317981 - DNA, 120 bp, Artificial Sequence
  ENSG00000135315_3 (sequence is synthesized)
gaagaggagtctgctgaaaagattcaatttcttaagagcagtggaacctctctcttaagtactgatagcttagaaacaaatgaactagtagtttctgagctcaaccatagtagtctcgga

SEQ ID NO: 317982 - DNA, 120 bp, Artificial Sequence
  ENSG00000135315_4 (sequence is synthesized)
gtgggattggacacattagaagaacaagaggagaaagaacaattttttgccaggcttgagaaaggcttgacatcttccattgattattcgagattaaataaggaattggattctaatgac

SEQ ID NO: 317983 - DNA, 120 bp, Artificial Sequence
  ENSG00000135315_5 (sequence is synthesized)
tctacacattttaaagctttacatagtaatcaagccaacgcagaactaactgatgacgaacatgagaatgaatcgaaacatgaagaactggcagaaaattacagtgatgattttgaagat

SEQ ID NO: 317984 - DNA, 120 bp, Artificial Sequence
  ENSG00000135315_6 (sequence is synthesized)
gagtatgttggtgcaccgttgactactaaagatgaagagatgccttccaaagagaattccaaatcagaaaaaataagtgtgcccaaacaggaagaagaaaaaactggcatgcttgctaat

SEQ ID NO: 317985 - DNA, 120 bp, Artificial Sequence
  ENSG00000135315_7 (sequence is synthesized)
gttgtgctgcttgattcattagactctgttgcagaggtcaatcttgatgaacaagataaaataacacctaagccaaggtgcctaccagaaatgactgagaatgaaatgacaggaacaggt

SEQ ID NO: 317986 - DNA, 120 bp, Artificial Sequence
  ENSG00000135315_8 (sequence is synthesized)
gtttcttatggacaaagcagtagtgacgttgaagccctacatcaagcttattgtcatatagcccattcattgggagatgaagacaaacaaaaaattgagagtaacacagtggaagatatc

SEQ ID NO: 317987 - DNA, 120 bp, Artificial Sequence
  ENSG00000135315_9 (sequence is synthesized)
aagagctcagtgaaaggtcatcctcaagaaaatgaagagaattcaaaaaacatctctactatggaatctgatctgcccacagtagaggagctgatgaaacctatcagaatagattccttt

SEQ ID NO: 317988 - DNA, 120 bp, Artificial Sequence
  ENSG00000135315_10 (sequence is synthesized)
gggatcagtggttttgatttacaacctgtcagctctgagaaagtggccgaaagaaaagaaactgaattttttagctctttacccctgaagatgaacccaaatattttgtctcaagactca

SEQ ID NO: 317989 - DNA, 120 bp, Artificial Sequence
  ENSG00000135315_11 (sequence is synthesized)
caacatgtgaaccttttttttgacaaaaatgatgagaatgtgattttacaaaagaccacaaatgagagtatggaaaacagctgtccacaagtaactgaagtaactgccacagaagaacat

SEQ ID NO: 317990 - DNA, 120 bp, Artificial Sequence
  ENSG00000135315_12 (sequence is synthesized)
gttgataaaatgtaccttaatattttgaggaaaaaaataactgttaattcttcatcattatctcaggatgacaaaattaataaaacttacagatctcaacttagttctgaagaagaaggg

SEQ ID NO: 317991 - DNA, 120 bp, Artificial Sequence
  ENSG00000135315_13 (sequence is synthesized)
gctgtaatgggtaaacaggtaccatacaagaaggccagaagtgcacctcctttacttaaaaggaaaccccagagtggattatatgcgtcagttaggagctcaggctatggcaaacccagt

SEQ ID NO: 317992 - DNA, 120 bp, Artificial Sequence
  ENSG00000135315_14 (sequence is synthesized)
tcaccactcaagatgttttctactcttgaaaagaaaacttcagaggacattataaaaagcaaaaacttgagatcgatttctacctccaatcaacctaggaaaaaagaaatcttatctgga

SEQ ID NO: 317993 - DNA, 120 bp, Artificial Sequence
  ENSG00000135315_15 (sequence is synthesized)
acaaaactcatcaagcctgcagctttggataaaccagctcacaaaactgaaagttgcctgtctactcgtaagaagtctgaaaatcccacagaaactgattcctgtattcagtttcagact

SEQ ID NO: 317994 - DNA, 120 bp, Artificial Sequence
  ENSG00000135315_16 (sequence is synthesized)
gattccttaggatactgtggtgagaacaaggagaagaaattacttatgtttaaaagagttcaggaagcagaggataaatggaggggtgcgcaagccctaattgagcaaattaaagccaca

SEQ ID NO: 317995 - DNA, 120 bp, Artificial Sequence
  ENSG00000135315_17 (sequence is synthesized)
ttctcagaaaaggagaaagaactagaaaataagttggaagaactaaagaaacaacaggaaaaagaactcttcaaattgaatcaagataattatattcttcaagccaagttaagcagcttt

SEQ ID NO: 317996 - DNA, 120 bp, Artificial Sequence
  ENSG00000135315_18 (sequence is synthesized)
gaagaaacaaacaaaaaacaaaggtggttacattttggagaagcagctgatcctgtcactggagaaaagttgaagcaaatccaaaaagaaatacaagaacaagagacacttcttcaagga

SEQ ID NO: 317997 - DNA, 120 bp, Artificial Sequence
  ENSG00000135315_19 (sequence is synthesized)
tatcaacaggaaaatgaacgattatataatcaagtaaaagatctccaagaacaaaacaagaaaaatgaggagcgaatgtttaaggaaaaccaaagtttattcagtgaggtagcttcctta

SEQ ID NO: 317998 - DNA, 120 bp, Artificial Sequence
  ENSG00000135315_20 (sequence is synthesized)
aaagaacagatgcacaaaagtcgttttctgtctcaagtagttgaagattcagagcccacaagaaatcagaattttacagatctgttagcagaactacggatggcacagaaagaaaaagac

SEQ ID NO: 317999 - DNA, 120 bp, Artificial Sequence
  ENSG00000135315_21 (sequence is synthesized)
gtgagaaattatatgaaataaaaattttagaagaaacacataaacaagaaatcagtcgtctgcaaaaaagattacagtggtatgctgaaaatcaggaacttctggataaagatgcacttc

SEQ ID NO: 318000 - DNA, 120 bp, Artificial Sequence
  ENSG00000135315_22 (sequence is synthesized)
ggcttagagaagcaaatgaggaaattgagaagctcaaacttgagattgagaaactgaaagctgaatctgggaatccatctattcggcagaagatacgcttaaaagataaagcagcagatg

SEQ ID NO: 318001 - DNA, 120 bp, Artificial Sequence
  ENSG00000135315_23 (sequence is synthesized)
ccaaaaaaattcaggatctggagcgacaagttaaggaaatggaagggattctgaagagaagatatcccaattctttacctgctttaatattggctgcatcagcagctggtgatacagtgg

SEQ ID NO: 318002 - DNA, 120 bp, Artificial Sequence
  ENSG00000135315_24 (sequence is synthesized)
ataaaaatacagtggaatttatggagaaaaggataaaaaagctagaagctgatctggagggcaaagatgaagatgcaaagaaaagccttcgtaccatggaacaacagtttcagaaaatga

SEQ ID NO: 318003 - DNA, 120 bp, Artificial Sequence
  ENSG00000135315_25 (sequence is synthesized)
agattcagtatgaacaaagactagagcagcaggagcagctacttgcctgcaaattgaatcaacatgactctcccagaattaaagccctagagaaggaacttgatgacatcaaggaagccc

SEQ ID NO: 318004 - DNA, 120 bp, Artificial Sequence
  ENSG00000135315_26 (sequence is synthesized)
atcagatcactgtaagaaaccttgaagccgaaatagacgttcttaaacatcagaatgctgaattagacgtcaagaaaaatgataaagatgatgaagattttcagtctatagaattccagg

SEQ ID NO: 318005 - DNA, 120 bp, Artificial Sequence
  ENSG00000135315_27 (sequence is synthesized)
tggaacaggctcatgctaaagctaaattagtaagactcaatgaagaactggctgcaaaaaagagagaaatacaagacctctcaaaaactgtggagaggcttcagaaagacagaagaatga

SEQ ID NO: 318006 - DNA, 120 bp, Artificial Sequence
  ENSG00000135315_28 (sequence is synthesized)
tgctatcaaatcagaactcaaagggcagagaggaaatgtctgccaaaagggcaaagaaagatgttttgcactcaagtaaaggaaatgctaactccttccctggaaccctggacagcaagc

SEQ ID NO: 318007 - DNA, 120 bp, Artificial Sequence
  ENSG00000135315_29 (sequence is synthesized)
tgtaccaaccacatactttcactgattcccatgtttcagaagttttacaagaaaactacagattaaaaaatgagctagaaggattaatttcagagaagaatgaactgaagatgaaatctg

SEQ ID NO: 318008 - DNA, 120 bp, Artificial Sequence
  ENSG00000135315_30 (sequence is synthesized)
aagcagtgatgaatcaatttgaaaactccatgagaagggtcaaggaagatactgcagcacacattgcatccctcaaagcatctcatcagagagaaatagagaaactcctttgccaaaatg

SEQ ID NO: 318009 - DNA, 120 bp, Artificial Sequence
  ENSG00000135315_31 (sequence is synthesized)
cagtagaaaattcttcttccaaagtagctgaactaaatcgtaaaatagcaactcaagaggtacttataagacatttccaaagtcaagttaatgagctgcagagtaaacaagagtctctcg

SEQ ID NO: 318010 - DNA, 120 bp, Artificial Sequence
  ENSG00000135315_32 (sequence is synthesized)
tagtttctgaagttcgagaagaaattctacagaaagagattacaaaactcttagaagaattgagagaagccaaagaaaaccatacaccagagatgaaacatttcgtgggcttagaaaaga

SEQ ID NO: 318011 - DNA, 120 bp, Artificial Sequence
  ENSG00000135315_33 (sequence is synthesized)
aaattaagcagatggaaatgagacatgcacaaagagaacaggaacttcaacagataatacagcaaacacaccaagtagtagaaactgagcaaaacaaagaagttgaaaaatggaaaagac

SEQ ID NO: 318012 - DNA, 120 bp, Artificial Sequence
  ENSG00000135315_34 (sequence is synthesized)
tggcacagttaaagaatcgtgagctggagaagttccgcacagaactagactcaatattagatgttctccgagagctgcaccggcaaggagtggttgtgccagttgcttttgcagatgaaa

SEQ ID NO: 318013 - DNA, 120 bp, Artificial Sequence
  ENSG00000135315_35 (sequence is synthesized)
tgaatgcaccagagtattaatagaaattcagatttcataatgaccttattaaaaggcctgaagatggatgggattgtgccactgtcaggacagcttatgaaaaacaagtgttccaatatg

SEQ ID NO: 318014 - DNA, 120 bp, Artificial Sequence
  ENSG00000135315_36 (sequence is synthesized)
tttccagaaagcaaacaaccaaagcaacatttcaaaataaattgcctttaaccaataagaaaaaaaacatataatggtgtattttactaaaaatcattaaccagtctcattttaagtgat

SEQ ID NO: 318015 - DNA, 120 bp, Artificial Sequence
  ENSG00000135315_37 (sequence is synthesized)
ttatggacagtttcctttatagcagagaagggctcacttgtatgctagaaatagaaagaaaagaaaattgaacatactccgccacatttttattgataatgtgaggtttttaaaattttt

SEQ ID NO: 318016 - DNA, 120 bp, Artificial Sequence
  ENSG00000135315_38 (sequence is synthesized)
attttagatccagggggtacatgtgcttgttgtaacatgggtgtattgaataatggtgggaattgggcttctagtgtacccatcatccaaatattaaacactgtacccaacaggtaattt

SEQ ID NO: 318017 - DNA, 120 bp, Artificial Sequence
  ENSG00000135315_39 (sequence is synthesized)
ttcaacgcttactgccgctcacactctttcccctattggagtccccagtgtctgttatctccatctttatgtctctgtgtacccattgtttagctcctacttttaagtgagaatatatgc

SEQ ID NO: 318018 - DNA, 120 bp, Artificial Sequence
  ENSG00000135315_40 (sequence is synthesized)
attgtttagctcctacttttaagtgagaatatatgcaatattttattttttatgtctgatttagttcacataggataatggcctccagctctatccatgttgctgcaaatgacatgattt

SEQ ID NO: 318019 - DNA, 120 bp, Artificial Sequence
  ENSG00000135315_41 (sequence is synthesized)
tatctctctctatatatatctcacgttttctttatccagtcaattgttggtagatacttaggttggttccatgaatttgctattgtaaatattgctgcaataaacatacatgtacagata

SEQ ID NO: 318020 - DNA, 120 bp, Artificial Sequence
  ENSG00000135315_42 (sequence is synthesized)
ttaaagatgatgttatctactgaactccgggttattcctcctcattcctcaaagattttagctgctgtttcactgacttcttggaacaaatgtgagctatttgaaaacaaagaagacttc

SEQ ID NO: 318021 - DNA, 120 bp, Artificial Sequence
  ENSG00000135315_43 (sequence is synthesized)
agaaagatacagtgccttggtggataactgaagatgattttaaagatgatggtaaatgttgctttctttgaacataaatcttcatctgtattaaattgtgtacctaggacttcttggaac

SEQ ID NO: 318022 - DNA, 120 bp, Artificial Sequence
  ENSG00000135316_0 (sequence is synthesized)
actcgcgccggacacagggagcagcgagcacgcgtttcccgcaacccgataccatcggacaggatttctccgcctcagcccaacggggagatctctggaaacatggctacagaacatgtt

SEQ ID NO: 318023 - DNA, 120 bp, Artificial Sequence
  ENSG00000135316_1 (sequence is synthesized)
aatggaaatggtactgaagagcccatggatactacttctgcagttatccattcagaaaattttcagacattgcttgatgctggtttaccacagaaagttgctgaaaaactagatgaaatt

SEQ ID NO: 318024 - DNA, 120 bp, Artificial Sequence
  ENSG00000135316_2 (sequence is synthesized)
tacgttgcagggctagttgcacatagtgatttagatgaaagagctattgaagctttaaaagaattcaatgaagacggtgcattggcagttcttcaacagtttaaagacagtgatctctct

SEQ ID NO: 318025 - DNA, 120 bp, Artificial Sequence
  ENSG00000135316_3 (sequence is synthesized)
catgttcagaacaaaagtgcctttttatgtggagtcatgaagacttacaggcagagagaaaaacaagggaccaaagtagcagattctagtaaaggaccagatgaggcaaaaattaaggca

SEQ ID NO: 318026 - DNA, 120 bp, Artificial Sequence
  ENSG00000135316_4 (sequence is synthesized)
ctcttggaaagaacaggctacacacttgatgtgaccactggacagaggaagtatggaggaccacctccagattccgtttattcaggtcagcagccttctgttggcactgagatatttgtg

SEQ ID NO: 318027 - DNA, 120 bp, Artificial Sequence
  ENSG00000135316_5 (sequence is synthesized)
ggaaagatcccaagagatctatttgaggatgaacttgttccattatttgagaaagctggacctatatgggatcttcgtctaatgatggatccactcactggtctcaatagaggttatgcg

SEQ ID NO: 318028 - DNA, 120 bp, Artificial Sequence
  ENSG00000135316_6 (sequence is synthesized)
tttgtcactttttgtacaaaagaagcagctcaggaggctgttaaactgtataataatcatgaaattcgttctggaaaacatattggtgtctgcatctcagttgccaacaataggcttttt

SEQ ID NO: 318029 - DNA, 120 bp, Artificial Sequence
  ENSG00000135316_7 (sequence is synthesized)
gtgggctctattcctaagagtaaaaccaaggaacagattcttgaagaatttagcaaagtaacagagggtcttacagacgtcattttataccaccaaccggatgacaagaaaaaaaacaga

SEQ ID NO: 318030 - DNA, 120 bp, Artificial Sequence
  ENSG00000135316_8 (sequence is synthesized)
ggcttttgctttcttgaatatgaagatcacaaaacagctgcccaggcaaggcgtaggttaatgagtggtaaagtcaaggtctgggggaatgttggaactgttgaatgggctgatcctata

SEQ ID NO: 318031 - DNA, 120 bp, Artificial Sequence
  ENSG00000135316_9 (sequence is synthesized)
gaagatcctgatcctgaggttatggcaaaggtaaaagtgctgtttgtacgcaaccttgccaatactgtaacagaagagattttagaaaaggcatttagtcagtttgggaaactggaacga

SEQ ID NO: 318032 - DNA, 120 bp, Artificial Sequence
  ENSG00000135316_10 (sequence is synthesized)
gtgaagaagttaaaagattatgcgttcattcattttgatgagcgagatggtgctgtcaaggctatggaagaaatgaatggcaaagacttggagggagaaaatattgaaattgtttttgcc

SEQ ID NO: 318033 - DNA, 120 bp, Artificial Sequence
  ENSG00000135316_11 (sequence is synthesized)
ggtcgagggcgtggaggtagaggtggttatggatatcctccagattattatggatatgaagattattatgattattatggttatgattaccataactatcgtggtggatatgaagatcca

SEQ ID NO: 318034 - DNA, 120 bp, Artificial Sequence
  ENSG00000135316_12 (sequence is synthesized)
tactatggttatgaagattttcaagttggagctagaggaaggggtggtagaggagcaaggggtgctgctccatccagaggtcgtggggctgctcctccccgcggtagagccggttattca

SEQ ID NO: 318035 - DNA, 120 bp, Artificial Sequence
  ENSG00000135316_13 (sequence is synthesized)
cagagaggaggtcctggatcagcaagaggcgttcgaggtgcgagaggaggtgcccaacaacaaagaggccgcggggtacgtggtgcgaggggtggccgcggtggaaatgtaggaggaaag

SEQ ID NO: 318036 - DNA, 120 bp, Artificial Sequence
  ENSG00000135316_14 (sequence is synthesized)
cgcaaagctgatgggtacaaccagccagattccaagcggcgccagaccaataatcagaactggggctcccaacccattgctcagcaaccgctccaaggtggtgatcattctggtaactat

SEQ ID NO: 318037 - DNA, 120 bp, Artificial Sequence
  ENSG00000135316_15 (sequence is synthesized)
ggttacaaatctgaaaaccaggagttttatcaggatacttttgggcaacagtggaagtagaaacagtagggcctctgtaaaattggagactgataggttgatcagaaactcaccctaaat

SEQ ID NO: 318038 - DNA, 120 bp, Artificial Sequence
  ENSG00000135316_16 (sequence is synthesized)
ctgaacgggtgccgctataatttgtgacatctggcaagatttccctttatgtatatattttaacaatccgcttggacacgaacaaagccacacttctaactgcttctggcgaactgattt

SEQ ID NO: 318039 - DNA, 120 bp, Artificial Sequence
  ENSG00000135316_17 (sequence is synthesized)
tatttttaatttttttcaataaagatattcttagatactgaaagaaatagttaatgagtttgcatttgtgcttgagaaaatttggctcaagtccatttggctgtagtgtcaacgatgttt

SEQ ID NO: 318040 - DNA, 120 bp, Artificial Sequence
  ENSG00000135316_18 (sequence is synthesized)
ccagtagtgtttagatttggtgtcttcaaaggtagttgattaaaaccaagtgtgtctttaatatcttgtatcagaataactttgtatgttaccaacttaaattgctagaataaggtaaat

SEQ ID NO: 318041 - DNA, 120 bp, Artificial Sequence
  ENSG00000135316_19 (sequence is synthesized)
tgatacacaactgctatttttaatttagaactttgacctaatttgggttttcaaaaccattttggctacttgtattctttatgctgttgtttatttcaataaaaaattcacacctaaatg

SEQ ID NO: 318042 - DNA, 120 bp, Artificial Sequence
  ENSG00000135316_20 (sequence is synthesized)
tatacttactaaaattgtgtttacaattcgtttttcacaaaatttcctgcaaatttggttcaaattgtatagcatgtcaaggccaattaaagggttttgtgccttgttaattcttgtgtg

SEQ ID NO: 318043 - DNA, 120 bp, Artificial Sequence
  ENSG00000135316_21 (sequence is synthesized)
gaatatgtctgcacattacacaacactgatttattgcagttttctgcttctggtttaaagtgctattttacaacagacttcatgttcccatcaaaaataaaaagataatacatgtagtaa

SEQ ID NO: 318044 - DNA, 120 bp, Artificial Sequence
  ENSG00000135316_22 (sequence is synthesized)
caccagaagcttgcagtggagtaatggtaaggaaatcaagcaaccttaaatatgtcggctgtataggagcatattctattgcagaagaccttcctatgaagatcatggaatcaaatacgg

SEQ ID NO: 318045 - DNA, 120 bp, Artificial Sequence
  ENSG00000135316_23 (sequence is synthesized)
gacattgaactaatacttggactttgatatgaatttctttaacaattttctctgcagtgcaagttattaaactaaagctactctattttcaaaatgtgttccaacagaaatccttcataa

SEQ ID NO: 318046 - DNA, 120 bp, Artificial Sequence
  ENSG00000135316_24 (sequence is synthesized)
ctcctagcatggtatcttaataaagaataaagttcttttaaaaatctgctctaagtagatttttccccttttttaaattaaggatcccaacagtggtattttgaaatattctcttgaatt

SEQ ID NO: 318047 - DNA, 120 bp, Artificial Sequence
  ENSG00000135316_25 (sequence is synthesized)
tgtgcatttaaattttattgcagtggtatagatgaatgccactgatggtatccttaaattttatttctgctcaccaaggttaatcatgattgtctatatcttttttatagtgatcacttt

SEQ ID NO: 318048 - DNA, 120 bp, Artificial Sequence
  ENSG00000135316_26 (sequence is synthesized)
tgaattgtgttcagatatgcagtttcaggtgtaatcatcagagctggttagtcaggcattccagatagtggttcttttcagaacctttttaaaagggttggttaactacctcagtagcag

SEQ ID NO: 318049 - DNA, 120 bp, Artificial Sequence
  ENSG00000135316_27 (sequence is synthesized)
aggattgaactataccctgtctgtactgtacatagaaaatctttgtagataaaagcaaggcttgttaaatatgatatgagggtaagattttaatataccaaatgtaacattcttagttgc

SEQ ID NO: 318050 - DNA, 120 bp, Artificial Sequence
  ENSG00000135316_28 (sequence is synthesized)
ctttagtttcagaggcttgtaagacttcctcatgaccatcataacaggccttgcttttgtcgtattttgtggctgaaaaagcagccttgcttcttcagatattgtagttatttggatgta

SEQ ID NO: 318051 - DNA, 120 bp, Artificial Sequence
  ENSG00000135316_29 (sequence is synthesized)
taatagtttagcaagatgttacttttgtaagacatcagatgttcaaaaaagtgcatccgaacttgtactaaatactgcagtgtccctttataaaaagtcagactaaaactgacaattgta

SEQ ID NO: 318052 - DNA, 120 bp, Artificial Sequence
  ENSG00000135316_30 (sequence is synthesized)
cagcgaagcctgacatttggatattttgaagttttttcataaatcatagaaattagtatatggctgtagtttagctttttaggtaaaaggtatgtttcattagtgcatttcttcctgctg

SEQ ID NO: 318053 - DNA, 120 bp, Artificial Sequence
  ENSG00000135316_31 (sequence is synthesized)
atcactgtaaacatgtgaatcagctttccatttcttatgcaggtcatgataacttgtagagtagagtacaatcatttgtgctatgtttttaattttctaaagcaccttgatgacagtgag

SEQ ID NO: 318054 - DNA, 120 bp, Artificial Sequence
  ENSG00000135316_32 (sequence is synthesized)
ttatagtttcattaggacttggtgtaaagaaatcccctccccccttccccaaagggatactgcagttatatcacatacccaataggcaccacgatgaagatcagagcttatacttaatta

SEQ ID NO: 318055 - DNA, 120 bp, Artificial Sequence
  ENSG00000135316_33 (sequence is synthesized)
aggttttatacacaccagttccccagtaaatgcaaatttaacaagaaaatcagacatgtcatatgttcaaaatgctcatggcaaacaatcattttgcattcctgcaaataaaattgtttt

SEQ ID NO: 318056 - DNA, 120 bp, Artificial Sequence
  ENSG00000135316_34 (sequence is synthesized)
atactgtaagctggaggcgagtgtaacttatttttgtaataaagtttttattttttttatgtgtcattaatataaatgtgtgttagtgtagaaatcttctggtttaaaaacttagaattg

SEQ ID NO: 318057 - DNA, 120 bp, Artificial Sequence
  ENSG00000135316_35 (sequence is synthesized)
cacacatttcagtatgtttatttgtacttacataattttagaatagtggttgccaatagcctgtatgtttcacattaattggttttttgttatctaaataaatcattttagtatgttgta

SEQ ID NO: 318058 - DNA, 120 bp, Artificial Sequence
  ENSG00000135316_36 (sequence is synthesized)
tgtcagttactgggatagctgggacatagagtgtaatttaaaatttgtcaataagtattcattggaatatatgtaaatgtgccttgccggttattgaaacttatctacaaaatgagtatg

SEQ ID NO: 318059 - DNA, 120 bp, Artificial Sequence
  ENSG00000135316_37 (sequence is synthesized)
gggtgacaaaaattagttcctggtgcttaatgaaactttctgccactgattttatatattaccccgtgcttttttaaagtacatctctctcaaaacttagtgtaagtttgagggctacac

SEQ ID NO: 318060 - DNA, 120 bp, Artificial Sequence
  ENSG00000135316_38 (sequence is synthesized)
aaaacatttacatttcattctaacataatgaatataataggttgtggaaagtgggtaaactaaatgtagccttcagtaaaattgaatctcagtgtaatccttggtgctggcatttctcag

SEQ ID NO: 318061 - DNA, 120 bp, Artificial Sequence
  ENSG00000135316_39 (sequence is synthesized)
ttccgaggagttaaatgatcccatctaagaggtcattgccatgcctattggcactttactgtcatagcatttttaagggacactgtcaaggtgtttaagttctcagaattacttgttggg

SEQ ID NO: 318062 - DNA, 120 bp, Artificial Sequence
  ENSG00000135316_40 (sequence is synthesized)
attttaggacaggtttgtttacttaaagtaagaactgcattgtcaaagttgaaagaggaacacttttgtgagttcacaaatgtgttcttaagaaaacattaaaatatggagctctgggtt

SEQ ID NO: 318063 - DNA, 120 bp, Artificial Sequence
  ENSG00000135316_41 (sequence is synthesized)
ttcaagactatttggcattcttaatttggggacttgggagggaaactgataaaaagaaattgaagaattgatggttatacttaaagaagggtaatgtaaacagtggtgatgaaatatata

SEQ ID NO: 318064 - DNA, 120 bp, Artificial Sequence
  ENSG00000135316_42 (sequence is synthesized)
cacatcaagtgaaattacttgacagtgttcatttgaatgactttgaattcaagccattataattacttttaaaattaaatatcatttgcactgttctgataatgggtgcagtttttgagc

SEQ ID NO: 318065 - DNA, 120 bp, Artificial Sequence
  ENSG00000135316_43 (sequence is synthesized)
aatataatcagagctaaatatgcatgtagtgattagtgatgtgaacaattaacgttctgagaagaaatactaactgtggtattttcaaacttaaatttctgtagtaaaatcagtatcaaa

SEQ ID NO: 318066 - DNA, 120 bp, Artificial Sequence
  ENSG00000135316_44 (sequence is synthesized)
gtcttatcagatcaaggaaaaacaggcaatgcatataaacatacttttgaatgttgtgtggcctataaagcaataatgcaatttatatggaatgtcatgggatatgagaaatggaaatgc

SEQ ID NO: 318067 - DNA, 120 bp, Artificial Sequence
  ENSG00000135316_45 (sequence is synthesized)
aaaaataactaatcctttagtaaaaatgtcaacatgttaaagggggaatgttaactaatgtaggttattgctatttgtgatttgtttatgggttcttggctttgacagcttcaaagaatg

SEQ ID NO: 318068 - DNA, 120 bp, Artificial Sequence
  ENSG00000135316_46 (sequence is synthesized)
gacagtgataagttaaaagaaattttgtatattgtcaaggaaagggtcttaaatccgagtcaagtcccttccttggggtaaaaaatgtattcttaaagcattctgatgttaaaaagaaaa

SEQ ID NO: 318069 - DNA, 120 bp, Artificial Sequence
  ENSG00000135316_47 (sequence is synthesized)
cttaagttatctaaccaaaacagacgcaagattttgtttctgcagactacttggcaatcaaaagtgatcataaatttaggttatcagttttcagaaagttgctttgtgagaaaattttgt

SEQ ID NO: 318070 - DNA, 120 bp, Artificial Sequence
  ENSG00000135316_48 (sequence is synthesized)
tagatatattctcccaagcatgctttttgtggaaggttttcagccattgccactgaatcagatgttaaaaatgaagggaaaattgagtgtgcacacacacaactgttgtacactcatgat

SEQ ID NO: 318071 - DNA, 120 bp, Artificial Sequence
  ENSG00000135316_49 (sequence is synthesized)
tgcagtttttagcttaagaaacttttctaccagttactgtgaatctgacttaaaatgtaaagtttcctcatgataaaataggaacaacatagaaatggattgatggggtgatctgagtta

SEQ ID NO: 318072 - DNA, 120 bp, Artificial Sequence
  ENSG00000135316_50 (sequence is synthesized)
ttgtatataaaagtttttaaagaatagaatgaacatcaagctagataggcaaaaattgacacattcagaacagcttttttgactgcgaagccaaaagttgtcagaaacagcaaaagatcc

SEQ ID NO: 318073 - DNA, 120 bp, Artificial Sequence
  ENSG00000135316_51 (sequence is synthesized)
cttattattacagagtattttacgtagtctctattttaaggagagaaattaaatagaagggcttcatgcatttaggggagggtgctaaaacttctcaagttcgtcaaacttacaggaata

SEQ ID NO: 318074 - DNA, 120 bp, Artificial Sequence
  ENSG00000135316_52 (sequence is synthesized)
cccaccatgatcattttctctctaattatgtataccacaaaattttcatctggccataggaattcactggtgggtgtaaaattaatgactaaagaaattaagtgacaaatacataaaaga

SEQ ID NO: 318075 - DNA, 120 bp, Artificial Sequence
  ENSG00000135316_53 (sequence is synthesized)
aacagacttgtggggatattgttttaaggtgtattaattactcagtgatgataccactcaatagggcatgccactacttttcttaagatgctaattatgaagcagtgctcacaggcattt

SEQ ID NO: 318076 - DNA, 120 bp, Artificial Sequence
  ENSG00000135316_54 (sequence is synthesized)
tttaactagcaaattagtagatggacttttggggtctgtcactttttaaaagtatttaagacttaaattctattagcaccacagtctgccttcagtaatacacctaaaatatttttcagg

SEQ ID NO: 318077 - DNA, 120 bp, Artificial Sequence
  ENSG00000135316_55 (sequence is synthesized)
accagaagcattcagtttgaaaatttgcagatgcaaaccagtattattactaacgctctgggtcaaagattaggtttttaatattaacagtagtctggtaaatatttagaagtctggcat

SEQ ID NO: 318078 - DNA, 120 bp, Artificial Sequence
  ENSG00000135316_56 (sequence is synthesized)
tgagaaacaaaagcttgtacctgactagtatttttatttaaaaaaattagttctgttagcttatttaaattgtgttttatttatccgtagaatttatatttatttcattcctttcatctc

SEQ ID NO: 318079 - DNA, 120 bp, Artificial Sequence
  ENSG00000135316_57 (sequence is synthesized)
actgaaaactgtctgcaggccctttgatttggattagatgtgtgaagtactgtcttttgccaaaaacctcaaattacctgttcttttcaacgtagtgggtttgtgcttgtttggagatca

SEQ ID NO: 318080 - DNA, 120 bp, Artificial Sequence
  ENSG00000135316_58 (sequence is synthesized)
gttcaaaaactatctgtactatctgtactgcctctgatgttaagattttatgtatagcataaggaagctagctctgactatattttcctaagaataaagacctatttttgtagcatgtct

SEQ ID NO: 318081 - DNA, 120 bp, Artificial Sequence
  ENSG00000135316_59 (sequence is synthesized)
gcttttaagtagacacttggaatctttagaggtctgtcgccctttgattatccatacattcgaagtaactagccaatggtgaaaaattcctcaagatatcctcagttgcaatcacattac

SEQ ID NO: 318082 - DNA, 120 bp, Artificial Sequence
  ENSG00000135316_60 (sequence is synthesized)
tggaagatgaatagaataaatgtattaggctggtcttaatttttgatggaaatattctgttgtcccgtacttgccattggatttgataaagttagtggtaatttggaaagaatcggggac

SEQ ID NO: 318083 - DNA, 120 bp, Artificial Sequence
  ENSG00000135316_61 (sequence is synthesized)
ttgccaatatatttgtgggttttagcttatacccctaggatttcttggttgcgggacgagcagttttggccacttccatcaggacaagactttttaggtcacttagtgcaggttttagtt

SEQ ID NO: 318084 - DNA, 120 bp, Artificial Sequence
  ENSG00000135316_62 (sequence is synthesized)
tctattttggattaacaacatttatattgattatcgaaaagaagctttcatcatttcagaacagtcctggaagtttgactttgagtgtgggagaagtcctaataaaccattttggaaatt

SEQ ID NO: 318085 - DNA, 120 bp, Artificial Sequence
  ENSG00000135317_0 (sequence is synthesized)
ctcagcctgcggcggctaactgccggtaggcgtctgtgtgcgccgccaagtcggtggggcggggacgcgaggtgtggatggggggtcgccttgacctctgcctcagccagtagcgcagtc

SEQ ID NO: 318086 - DNA, 120 bp, Artificial Sequence
  ENSG00000135317_1 (sequence is synthesized)
tcggcctcgccgttacggagatggtgccctgggtgcggacgatggggcagaagctgaagcagcggctgcgactggacgtgggacgcgagatctgccgccagtacccgctgttctgcttcc

SEQ ID NO: 318087 - DNA, 120 bp, Artificial Sequence
  ENSG00000135317_2 (sequence is synthesized)
tgctgctctgtctcagcgccgcctccctgcttcttaacaggtatattcatattttaatgatcttctggtcatttgttgctggagttgtcacattctactgctcactaggacctgattctc

SEQ ID NO: 318088 - DNA, 120 bp, Artificial Sequence
  ENSG00000135317_3 (sequence is synthesized)
tcttaccaaatatattcttcacaataaaatacaaacccaagcagttaggacttcaggaattatttcctcaaggtcatagctgtgctgtttgtggtaaagtgaaatgtaaacgacataggc

SEQ ID NO: 318089 - DNA, 120 bp, Artificial Sequence
  ENSG00000135317_4 (sequence is synthesized)
cttctttgctacttgaaaactaccagccatggctagacctgaaaatttcttccaaggttgatgcatctctctcagaggttcttgaattagtgttggaaaactttgtttatccgtggtaca

SEQ ID NO: 318090 - DNA, 120 bp, Artificial Sequence
  ENSG00000135317_5 (sequence is synthesized)
gggatgtgacagatgatgaatcctttgttgatgaactgagaataacattacgtttttttgcatctgtcttaataagaaggattcacaaggtggatattccatctattataaccaagaaac

SEQ ID NO: 318091 - DNA, 120 bp, Artificial Sequence
  ENSG00000135317_6 (sequence is synthesized)
tattaaaagcagcaatgaagcatatagaagtgatagttaaagccagacagaaagtaaaaaatacagagtttttacagcaagctgctttagaagaatatggtccagagcttcatgttgctt

SEQ ID NO: 318092 - DNA, 120 bp, Artificial Sequence
  ENSG00000135317_7 (sequence is synthesized)
tgagaagtcgaagagatgaattgcactatttaaggaaacttactgaactgctttttccttatattttgcctcctaaagcaacagactgcagatctctgaccttacttataagagagattc

SEQ ID NO: 318093 - DNA, 120 bp, Artificial Sequence
  ENSG00000135317_8 (sequence is synthesized)
tgtctggctctgtgttccttccttctttggatttcctagctgatccagatactgtgaatcatttgcttatcatcttcatagatgacagtccacctgaaaaagcaactgaaccggcttctc

SEQ ID NO: 318094 - DNA, 120 bp, Artificial Sequence
  ENSG00000135317_9 (sequence is synthesized)
ctttggttccattcttgcagaaatttgcagaacctagaaataaaaagccatctgtgctgaagttagaattgaagcaaatcagagagcaacaagatcttttatttcgttttatgaactttc

SEQ ID NO: 318095 - DNA, 120 bp, Artificial Sequence
  ENSG00000135317_10 (sequence is synthesized)
tgaaacaagaaggcgcagtgcacgtgttgcagttttgtttgactgtggaggaatttaatgatagaattttacgaccagaattatcaaatgatgaaatgctgtctcttcatgaagaattgc

SEQ ID NO: 318096 - DNA, 120 bp, Artificial Sequence
  ENSG00000135317_11 (sequence is synthesized)
agaagatttataaaacatactgtttggatgaaagtattgacaaaattagatttgatcccttcattgtagaagagattcaaagaattgctgaaggcccatacatagatgttgtgaaacttc

SEQ ID NO: 318097 - DNA, 120 bp, Artificial Sequence
  ENSG00000135317_12 (sequence is synthesized)
aaactatgagatgtctttttgaagcatatgaacatgttctttcccttttggagaatgtatttactcctatgttctgccatagtgatgagtatttcagacaacttttaagaggtgcagaat

SEQ ID NO: 318098 - DNA, 120 bp, Artificial Sequence
  ENSG00000135317_13 (sequence is synthesized)
caccaacacgcaattcaaaattgaacagaggtagcctaagtttggatgattttcggaacacacagaaaaggggagaatcatttggaatcagcagaataggtagcaaaattaaaggagtat

SEQ ID NO: 318099 - DNA, 120 bp, Artificial Sequence
  ENSG00000135317_14 (sequence is synthesized)
gaagatgattctccagtggaggctgtgagcacacctaatactccccgaaaccttgctgcatggaaaattagcattccatatgtagacttttttgaggatccctcctctgaaaggaaggag

SEQ ID NO: 318100 - DNA, 120 bp, Artificial Sequence
  ENSG00000135317_15 (sequence is synthesized)
aaaaaagaaagaattcctgtgttttgtattgatgttgaaagaaatgatagaagagcagttggacacgagcctgaacattggtctgtctatagaagatatcttgaattctatgtacttgaa

SEQ ID NO: 318101 - DNA, 120 bp, Artificial Sequence
  ENSG00000135317_16 (sequence is synthesized)
tcaaaactaacagaatttcatggtgcatttcctgatgcccagcttccttctaagaggatcattggccccaaaaattatgaattcttaaagtcaaagagggaagagttccaagaatatcta

SEQ ID NO: 318102 - DNA, 120 bp, Artificial Sequence
  ENSG00000135317_17 (sequence is synthesized)
cagaaacttctgcagcatccagaactgagtaatagtcaacttctggcagactttctttcccctaatggtggggaaacacaatttcttgataagatactaccagatgtaaatcttgggaaa

SEQ ID NO: 318103 - DNA, 120 bp, Artificial Sequence
  ENSG00000135317_18 (sequence is synthesized)
attataaaatctgttcctggaaaactaatgaaagagaaaggtcagcatttggaaccttttatcatgaatttcattaattcttgtgagtctccaaagcctaaaccaagtagaccagaactg

SEQ ID NO: 318104 - DNA, 120 bp, Artificial Sequence
  ENSG00000135317_19 (sequence is synthesized)
accattctcagccctacttcagaaaacaacaagaagcttttcaatgatctgtttaaaaataatgcaaaccgtgctgaaaatacagagagaaagcaaaatcagaattattttatggaggtg

SEQ ID NO: 318105 - DNA, 120 bp, Artificial Sequence
  ENSG00000135317_20 (sequence is synthesized)
atgactgtagaaggagtctatgattacctgatgtatgtaggacgggtagttttccaggttcctgactggcttcatcatctcttaatgggaactcgaatcctctttaaaaacaccctggaa

SEQ ID NO: 318106 - DNA, 120 bp, Artificial Sequence
  ENSG00000135317_21 (sequence is synthesized)
atgtatactgattactatcttcagtgtaaactagaacagctatttcaggagcaccgtttggtctcactcataacacttctcagagatgctatattctgtgaaaacactgaacctcgctct

SEQ ID NO: 318107 - DNA, 120 bp, Artificial Sequence
  ENSG00000135317_22 (sequence is synthesized)
ctccaagataagcaaaaaggagcaaaacagacttttgaagaaatgatgaattacattccagatctgttagtcaagtgtattggtgaagaaaccaagtatgaaagcatcagacttctgttt

SEQ ID NO: 318108 - DNA, 120 bp, Artificial Sequence
  ENSG00000135317_23 (sequence is synthesized)
gatggcttacagcaaccagtactcaacaagcagctgacttatgttttattggacattgtgatacaggaactgtttccagagctcaataaggtacaaaaggaagttacctctgtgacatct

SEQ ID NO: 318109 - DNA, 120 bp, Artificial Sequence
  ENSG00000135317_24 (sequence is synthesized)
tggatgtaaacacttggatttggtatagaataacccattgaaatttctgctgtgcgagggtggtagaaatttacttttttgggtatattcttatatatattatgtacatcgctgtctgaa

SEQ ID NO: 318110 - DNA, 120 bp, Artificial Sequence
  ENSG00000135317_25 (sequence is synthesized)
attttagttattttttgtttttaataaagactaacacaaacttaatgattaaaagtgattgagtctcatagtctttcatttgctagctgtgatccaaattttattagaacataagtcact

SEQ ID NO: 318111 - DNA, 120 bp, Artificial Sequence
  ENSG00000135317_26 (sequence is synthesized)
tgttattgccatttttaaaagagaaaattcataatgatgttatggcaaacagataagactgataaacttcgtattgtatagctttgaaaataattatgcctagtatggagaaacaggaat

SEQ ID NO: 318112 - DNA, 120 bp, Artificial Sequence
  ENSG00000135317_27 (sequence is synthesized)
acaggaataagatctgattttcttagagttaatatattttagtagattggttttccttttttttattttgtacatagttaactgtgtatctataaataaagcatcctatatgagttttta

SEQ ID NO: 318113 - DNA, 120 bp, Artificial Sequence
  ENSG00000135317_28 (sequence is synthesized)
ttttcaaaactgtttttcttttttttaataatggttttcaataaactagactgttgtgataatttgctatgtacttgatacatttttgtttaatattcaggaacacacagaaaaggggag

SEQ ID NO: 318114 - DNA, 120 bp, Artificial Sequence
  ENSG00000135317_29 (sequence is synthesized)
tcgagagaatgaatactttgttaatgaaatggattgagctatacatttcctttatgtggaaatcagttgaacggtatacagagggtattgtgtgtaattacttggttctttgctttaatg

SEQ ID NO: 318115 - DNA, 120 bp, Artificial Sequence
  ENSG00000135317_30 (sequence is synthesized)
aggtaaaattttcgcaaagcgaacatatgtgtgtaaccagcattcagatcaggaaacaaaacgttaccggcatcccagaactcccctttatgttcctctctagccactatactcccttca

SEQ ID NO: 318116 - DNA, 120 bp, Artificial Sequence
  ENSG00000135317_31 (sequence is synthesized)
gaggtaaccactaacacctaattttgaccccttacataaatcttagctgcttgtttcttcactgtattctgaaaatactgacttataaagttaggaatggaaaggactaacttgctctgt

SEQ ID NO: 318117 - DNA, 120 bp, Artificial Sequence
  ENSG00000135317_32 (sequence is synthesized)
ttcttctttccatagcacgtttttggttcagttaagcttcagagtcaggaacaatttatttaactttttgtttgattatgggaatatttagaaatatgtgcatgtcattctaataataag

SEQ ID NO: 318118 - DNA, 120 bp, Artificial Sequence
  ENSG00000135317_33 (sequence is synthesized)
tttttctatttgtggaatttttatgattttccaagtgttttctcatatgttttctttgatcctcattcacataaggatgaaatatacattttgtcatgtgaaagtattatattactgtcg

SEQ ID NO: 318119 - DNA, 120 bp, Artificial Sequence
  ENSG00000135317_34 (sequence is synthesized)
agtctcactctgtcgcccaggctggtgtacagtggcaacatcttggctcactgtaacctctgcctctcaggctcaagcgatactcctgcctcagccccccaaatagctgggaatacaggt

SEQ ID NO: 318120 - DNA, 120 bp, Artificial Sequence
  ENSG00000135317_35 (sequence is synthesized)
agccccccaaatagctgggaatacaggtacacgtcactacacccagcttattgttctgttttttgtagatacagggtttcatcatgttacccaggctggtctcaaactcgtgagctaaag

SEQ ID NO: 318121 - DNA, 120 bp, Artificial Sequence
  ENSG00000135317_36 (sequence is synthesized)
gctgggattacaggtgtgagccactgctcaccgcctactgtcactatttgtgataataaaattgtttcttggtaatgttacatattcccaaatggtaccatttattttccaaaaactaat

SEQ ID NO: 318122 - DNA, 120 bp, Artificial Sequence
  ENSG00000135317_37 (sequence is synthesized)
ttttccatgcatttctatacatgtatgtacagatgtacaaacatcattttagggtttaatttgttttgttttcccttagtggggtaatacaataagtattattttccaactagcagattt

SEQ ID NO: 318123 - DNA, 120 bp, Artificial Sequence
  ENSG00000135317_38 (sequence is synthesized)
tttttttttttttttttactgcagcatttctcagagtttgcattatgccttgtgcattgtgaatctccaaaaatgggatacatgatactgcatttgtcaacttgaccatagaaacctctt

SEQ ID NO: 318124 - DNA, 120 bp, Artificial Sequence
  ENSG00000135317_39 (sequence is synthesized)
atccaggagcctcttatagaaacactggtttggggagtattgatttgcagtttttgcctagtatctgggaaacagggtggtgattttgctttatgatccagttaatggtgagtcacttta

SEQ ID NO: 318125 - DNA, 120 bp, Artificial Sequence
  ENSG00000135317_40 (sequence is synthesized)
gtgctgtagtttcttccgggctccctacaaccttcttccctctcctccgcaatacaggcagttactgggtgctggggctgtcctttgatttccggaaatggccggtcgccagtgttgtca

SEQ ID NO: 318126 - DNA, 120 bp, Artificial Sequence
  ENSG00000135317_41 (sequence is synthesized)
gagtttccacggaagactgcgcgctactccggccaggagggcggagcggcgagacgctagaggctttgcgctgggtgacgacttcgggcacgttctacggccgttcctctggtcggctgg

SEQ ID NO: 318127 - DNA, 120 bp, Artificial Sequence
  ENSG00000135317_42 (sequence is synthesized)
ggaccgcggccgcgcacgcgcggcggggggcgtggggctgggcccagccggacgcgacctcagcctgcggcggctaactgccggtatattcatattttaatgatcttctggtcatttgtt

SEQ ID NO: 318128 - DNA, 120 bp, Artificial Sequence
  ENSG00000135317_43 (sequence is synthesized)
catagatgacagtccagtgagtattgaatatattagaaaacacttcagattgcattgaattttgattttgtatgtcaaatcaagtgggaattttactgagttaataattctctttctttc

SEQ ID NO: 318129 - DNA, 120 bp, Artificial Sequence
  ENSG00000135317_44 (sequence is synthesized)
atgaaagagattgtggatatgacaaaaaaggtctttcagcataaggatcttacagaaattcaagagccagtagacatcacaccagaggaattaacataatataacttgataaagatgagt

SEQ ID NO: 318130 - DNA, 120 bp, Artificial Sequence
  ENSG00000135317_45 (sequence is synthesized)
gctttggaaccagtgctagacagtgaggaagaagactttgaagaaacagtgccaggggccaaatgcagtggctcatgcctgtaatgccagcattttgggaggccaaggtggatggctcac

SEQ ID NO: 318131 - DNA, 120 bp, Artificial Sequence
  ENSG00000135317_46 (sequence is synthesized)
ctgtctctacaaaaaatacaaaaaatttagctggatgtggaggtacacgtctgtagtcccagctacatggggggctgaggtggggaagatcagttgagcctgggatgcagtgagccatga

SEQ ID NO: 318132 - DNA, 120 bp, Artificial Sequence
  ENSG00000135317_47 (sequence is synthesized)
gtctgtagtcccagctacatggggggctgaggtggggaagatcagttgagcctgggatgcagtgagccatgatggcaccactgcactccagctgggatgacagagtgagactctatctca

SEQ ID NO: 318133 - DNA, 120 bp, Artificial Sequence
  ENSG00000135317_48 (sequence is synthesized)
cacaaattgacagtagacaatatggcagaaggttttcaattatcaagactgcttttcacttcttttatcacatggacccttctttgatactggcactgaatctaaagcaaatggtagaag

SEQ ID NO: 318134 - DNA, 120 bp, Artificial Sequence
  ENSG00000135317_49 (sequence is synthesized)
aaagatcagtactatataaaaatgtttttagagaaatgaaacggcaaaaagtcgggcagaaatcatgatgtacttctataaagtcgagtgtgcctgccacttctgcatccccttctacct

SEQ ID NO: 318135 - DNA, 120 bp, Artificial Sequence
  ENSG00000135317_50 (sequence is synthesized)
ctttcacccctgcaattcctcagacagcaagaccaacccctcctcttcagcctacccagtgtgaagacaatgaagatgaagacctttgtgataatccacttccacttaatacagttagga

SEQ ID NO: 318136 - DNA, 120 bp, Artificial Sequence
  ENSG00000135317_51 (sequence is synthesized)
tttcaatcttttagttgtgttttgttattttgttcttttgtcttttctgtgtattttcaaatagcctgtcttcaagcttagtaattctttctattacttgatcacttctactattaagag

SEQ ID NO: 318137 - DNA, 120 bp, Artificial Sequence
  ENSG00000135317_52 (sequence is synthesized)
actctaatgcattcttctatatgtcagttgcatttttgaactccagaatttttgcttaattcttttaattatttcagcttctttgttaaatttatctgataggattctttattccttctc

SEQ ID NO: 318138 - DNA, 120 bp, Artificial Sequence
  ENSG00000135317_53 (sequence is synthesized)
tgtgttatcttgaatttctttgagttttcttaatacagctattttgaattctccatctgaaaggtcacatatctttgtttctccaggattggtccctcgtgctttatttagtttgtttgg

SEQ ID NO: 318139 - DNA, 120 bp, Artificial Sequence
  ENSG00000135317_54 (sequence is synthesized)
tgagccatgtttcccttcatggtcttgatgcttgtggatgtttttcagtgtctgggtattgaagagttatttattgtagtgtttgcattctgggcttgtttgtttcctgtccttgggaag

SEQ ID NO: 318140 - DNA, 120 bp, Artificial Sequence
  ENSG00000135317_55 (sequence is synthesized)
cctttcctggtattcgaagggatttgggtatcatctatgtttttggtcaatgcagccatatttgcattaaggggtactgcaagcctagtaacgctgtggttcttgcagacttacagaggt

SEQ ID NO: 318141 - DNA, 70 bp, Artificial Sequence
  ENSG00000135317_56 (sequence is synthesized)
tgccttccaggcataggtggatattccatctattataaccaagaaactattaaaagcagcaatgaagcat

SEQ ID NO: 318142 - DNA, 120 bp, Artificial Sequence
  ENSG00000135318_0 (sequence is synthesized)
actcgccggcactcgcccggctcgcccgctttcgcacccagttcacgcgccacagctatgtgtccccgagccgcgcgggcgcccgcgacgctactcctcgccctgggcgcggtgctgtgg

SEQ ID NO: 318143 - DNA, 120 bp, Artificial Sequence
  ENSG00000135318_1 (sequence is synthesized)
cctgcggctggcgcctgggagcttacgattttgcacaccaacgacgtgcacagccggctggagcagaccagcgaggactccagcaagtgcgtcaacgccagccgctgcatgggtggcgtg

SEQ ID NO: 318144 - DNA, 120 bp, Artificial Sequence
  ENSG00000135318_2 (sequence is synthesized)
gctcggctcttcaccaaggttcagcagatccgccgcgccgaacccaacgtgctgctgctggacgccggcgaccagtaccagggcactatctggttcaccgtgtacaagggcgccgaggtg

SEQ ID NO: 318145 - DNA, 120 bp, Artificial Sequence
  ENSG00000135318_3 (sequence is synthesized)
gcgcacttcatgaacgccctgcgctacgatgccatggcactgggaaatcatgaatttgataatggtgtggaaggactgatcgagccactcctcaaagaggccaaatttccaattctgagt

SEQ ID NO: 318146 - DNA, 120 bp, Artificial Sequence
  ENSG00000135318_4 (sequence is synthesized)
gcaaacattaaagcaaaggggccactagcatctcaaatatcaggactttatttgccatataaagttcttcctgttggtgatgaagttgtgggaatcgttggatacacttccaaagaaacc

SEQ ID NO: 318147 - DNA, 120 bp, Artificial Sequence
  ENSG00000135318_5 (sequence is synthesized)
ccttttctctcaaatccagggacaaatttagtgtttgaagatgaaatcactgcattacaacctgaagtagataagttaaaaactctaaatgtgaacaaaattattgcactgggacattcg

SEQ ID NO: 318148 - DNA, 120 bp, Artificial Sequence
  ENSG00000135318_6 (sequence is synthesized)
ggttttgaaatggataaactcatcgctcagaaagtgaggggtgtggacgtcgtggtgggaggacactccaacacatttctttacacaggcaatccaccttccaaagaggtgcctgctggg

SEQ ID NO: 318149 - DNA, 120 bp, Artificial Sequence
  ENSG00000135318_7 (sequence is synthesized)
aagtacccattcatagtcacttctgatgatgggcggaaggttcctgtagtccaggcctatgcttttggcaaatacctaggctatctgaagatcgagtttgatgaaagaggaaacgtcatc

SEQ ID NO: 318150 - DNA, 120 bp, Artificial Sequence
  ENSG00000135318_8 (sequence is synthesized)
tcttcccatggaaatcccattcttctaaacagcagcattcctgaagatccaagcataaaagcagacattaacaaatggaggataaaattggataattattctacccaggaattagggaaa

SEQ ID NO: 318151 - DNA, 120 bp, Artificial Sequence
  ENSG00000135318_9 (sequence is synthesized)
acaattgtctatctggatggctcctctcaatcatgccgctttagagaatgcaacatgggcaacctgatttgtgatgcaatgattaacaacaacctgagacacacggatgaaatgttctgg

SEQ ID NO: 318152 - DNA, 120 bp, Artificial Sequence
  ENSG00000135318_10 (sequence is synthesized)
aaccacgtatccatgtgcattttaaatggaggtggtatccggtcgcccattgatgaacgcaacaatggcacaattacctgggagaacctggctgctgtattgccctttggaggcacattt

SEQ ID NO: 318153 - DNA, 120 bp, Artificial Sequence
  ENSG00000135318_11 (sequence is synthesized)
gacctagtccagttaaaaggttccaccctgaagaaggcctttgagcatagcgtgcaccgctacggccagtccactggagagttcctgcaggtgggcggaatccatgtggtgtatgatctt

SEQ ID NO: 318154 - DNA, 120 bp, Artificial Sequence
  ENSG00000135318_12 (sequence is synthesized)
tcccgaaaacctggagacagagtagtcaaattagatgttctttgcaccaagtgtcgagtgcccagttatgaccctctcaaaatggacgaggtatataaggtgatcctcccaaacttcctg

SEQ ID NO: 318155 - DNA, 120 bp, Artificial Sequence
  ENSG00000135318_13 (sequence is synthesized)
gccaatggtggagatgggttccagatgataaaagatgaattattaagacatgactctggtgaccaagatatcaacgtggtttctacatatatctccaaaatgaaagtaatttatccagca

SEQ ID NO: 318156 - DNA, 120 bp, Artificial Sequence
  ENSG00000135318_14 (sequence is synthesized)
tctttgttttataccaatagccaaaaattctccttgcctttaatgtgtgaaactgcattttttcaagtgagattcaaatctgccttttaggacctggctttgtgacagcaaaaaccatct

SEQ ID NO: 318157 - DNA, 120 bp, Artificial Sequence
  ENSG00000135318_15 (sequence is synthesized)
ttacaggctcctagaagctgaaggttagagcattataaaatgaagagacagacatgattactcagggtcagcaacctagtgagttagaaaaaaaattaacatagggccctataaggagaa

SEQ ID NO: 318158 - DNA, 120 bp, Artificial Sequence
  ENSG00000135318_16 (sequence is synthesized)
agccaactatgttaagtttacgtgtccaaattttaatgaaattttactaacaattttaaaccatatttttcttcttcatatccatttctaatccatcaaacagcttatgtttacataaaa

SEQ ID NO: 318159 - DNA, 120 bp, Artificial Sequence
  ENSG00000135318_17 (sequence is synthesized)
ttttatcattcacaaggaagttttaagcacactgtctcatttgatatccacaacttatttttggtaggaaagagagatgtttttcccacctgtcagatgaaaaaactgaagctcaaaaag

SEQ ID NO: 318160 - DNA, 120 bp, Artificial Sequence
  ENSG00000135318_18 (sequence is synthesized)
ggttgacttgaccatacagctaatgctgacagatccaagacctagacctaggtcttttgaactcaagtccagcattctcaactatatcaagttactgttcagaatacttaatatctcctc

SEQ ID NO: 318161 - DNA, 120 bp, Artificial Sequence
  ENSG00000135318_19 (sequence is synthesized)
tcttcataattatcaatagccccaagctcatggatgacaaatctctgctttatttcttgtctctattttttcactttatagctcctgttataatagcaagtttaatggtataaacacagg

SEQ ID NO: 318162 - DNA, 120 bp, Artificial Sequence
  ENSG00000135318_20 (sequence is synthesized)
ataccatcctctcttgcaacacccatgtgcctttgatgagtcaggtagcaagctgtagtagataatgagaaaggccagaggctgcaaaagacagtcaaaggacacgagagaaaggaaggg

SEQ ID NO: 318163 - DNA, 120 bp, Artificial Sequence
  ENSG00000135318_21 (sequence is synthesized)
gaagaacaggactccaggactgttttatattatagaaaagcaagagctaaagagcatttacacatgttaaacagatacttgttaagcatagtgcctgacacacggcattagctgttattt

SEQ ID NO: 318164 - DNA, 120 bp, Artificial Sequence
  ENSG00000135318_22 (sequence is synthesized)
tatgagattccatcagctctgcctctgtcctctttcttctaacatgaaggtatcatgagaagagaaccttctaacataagctgtaattctaaacctgcacttgtccctctccagcaagag

SEQ ID NO: 318165 - DNA, 120 bp, Artificial Sequence
  ENSG00000135318_23 (sequence is synthesized)
gctagcactgaattcattctactcatactacacacccagttatggaatgtccagagttctcgaagaaaataaatgactttaggaagaggtatacattttttaagtcgctctgcctccaaa

SEQ ID NO: 318166 - DNA, 120 bp, Artificial Sequence
  ENSG00000135318_24 (sequence is synthesized)
tctgaacagtcactgtaaatcattcttaagcccagatatgagaacttctgctggaaagtgggaccctctgagtgggtggtcagaaaatacccatgctgatgaaatgacctatgcccaaag

SEQ ID NO: 318167 - DNA, 120 bp, Artificial Sequence
  ENSG00000135318_25 (sequence is synthesized)
aacaaatacttaacgtgggagtggaaccacatgagcctgctcagctctgcataagtaattcaagaaatgggaggcttcaccttaaaaacagtgtgcaaatggcagctagaggttttgata

SEQ ID NO: 318168 - DNA, 120 bp, Artificial Sequence
  ENSG00000135318_26 (sequence is synthesized)
ggaagtatgtttgtttcttagtgtttacaaatattaagtactcttgatacaaaatatacttttaaacttcataacctttttataaaagttgttgcagcaaaataatagcctcggttctat

SEQ ID NO: 318169 - DNA, 120 bp, Artificial Sequence
  ENSG00000135318_27 (sequence is synthesized)
gcatatatggattagctataaaaaatgtcaataagattgtacaaggaaaattagagaaagtcacatttagggtttattttttacacttggccagtaaaatagggtaaatcctattagaat

SEQ ID NO: 318170 - DNA, 120 bp, Artificial Sequence
  ENSG00000135318_28 (sequence is synthesized)
tttttaaagaactttttttaagtttcctaaatctgtgtgtgtattgtgaagtggtataagaaatgactttgaaccactttgcaattgtagattcccaacaataaaattgaagataagctc

SEQ ID NO: 318171 - DNA, 120 bp, Artificial Sequence
  ENSG00000135318_29 (sequence is synthesized)
agcagcctactgcacagacatacctgaacacctggttctagtcccactgtgacctggggcaagttctcaacccctctgggcacagggagaaaacctttcctgtttatctcatggactgca

SEQ ID NO: 318172 - DNA, 120 bp, Artificial Sequence
  ENSG00000135318_30 (sequence is synthesized)
gtgaaagttgaatggaaataaatgcttcctaaattgccaagggcttctgaaacacttttgttaataattccacagtccagtgaattaatcctttaaaagcaatcttattttacctggaaa

SEQ ID NO: 318173 - DNA, 120 bp, Artificial Sequence
  ENSG00000135318_31 (sequence is synthesized)
tgtctcttttgcctttgtaactgttattactctttttactgctatttaatatgtaatgtatattatatgatctataatatatatgtaatatacattaaatgggaacatgtgcaaatctta

SEQ ID NO: 318174 - DNA, 120 bp, Artificial Sequence
  ENSG00000135318_32 (sequence is synthesized)
actcctcctctctgcccctcagctcgctcatctttcttcccgccccctctcttttccttctttggttctttgaagtgatgagctagcgcaaccacaaaccatacattccttttgtagaaa

SEQ ID NO: 318175 - DNA, 120 bp, Artificial Sequence
  ENSG00000135318_33 (sequence is synthesized)
aacccgtgcctcgaatgaggcgagactcagagaggacccaggcgcggggcggacccctccaattccttcctcgcgcccccgaaagagcggcgcaccagcagccgaactgccggcgcccag

SEQ ID NO: 318176 - DNA, 120 bp, Artificial Sequence
  ENSG00000135318_34 (sequence is synthesized)
gctccctggtccggccgggatgcggccggtacccgctccccgccgggaacaacctctccactcttcctgcagggagctggtgccagccgacagccgcgccagggccgctccgggtaccag

SEQ ID NO: 318177 - DNA, 120 bp, Artificial Sequence
  ENSG00000135318_35 (sequence is synthesized)
ggtcggatcgggtgacgtcgcgaacttgcgcctggccgccaagccggcctccaggctgaagaaggacccgccccggccttgacccgggccccgcccctccagccggggcaccgagccccg

SEQ ID NO: 318178 - DNA, 120 bp, Artificial Sequence
  ENSG00000135324_0 (sequence is synthesized)
tgggaggcggcggcggcggcggcgctcgcgcacctcggaggagccaggagccggaaccagggccgagcccgcgggccggggctagccagccggtcggagatgtccgcccagaggttaatt

SEQ ID NO: 318179 - DNA, 120 bp, Artificial Sequence
  ENSG00000135324_1 (sequence is synthesized)
tgtccgcccagaggttaatttctaacagaacctcccagcaatcggcatctaattctgattacacctgggaatatgaatattatgagattggaccagtttcctttgaaggactgaaggctc

SEQ ID NO: 318180 - DNA, 120 bp, Artificial Sequence
  ENSG00000135324_2 (sequence is synthesized)
ataaatattccattgtgattggattttgggttggtcttgcagtcttcgtgatttttatgttttttgtgctgaccttgctgaccaagacaggagccccacaccaagacaatgcagagtcct

SEQ ID NO: 318181 - DNA, 120 bp, Artificial Sequence
  ENSG00000135324_3 (sequence is synthesized)
cagagaagagattcagaatgaacagctttgtgtcagactttggaagacctctggagccagataaagtattttctcgccaaggcaacgaggagtccaggtctctctttcactgctacatca

SEQ ID NO: 318182 - DNA, 120 bp, Artificial Sequence
  ENSG00000135324_4 (sequence is synthesized)
atgaggtggaacgcttggacagagccaaagcttgtcaccagaccacagcccttgacagtgacgtccaactccaggaagccatcagaagcagtgggcagccagaggaggagctgaacaggc

SEQ ID NO: 318183 - DNA, 120 bp, Artificial Sequence
  ENSG00000135324_5 (sequence is synthesized)
tcatgaagtttgacatccccaactttgtgaacacagaccagaactactttggggaggatgatcttctgatttctgaaccacctattgttctggaaactaagccactttcccagacctcac

SEQ ID NO: 318184 - DNA, 120 bp, Artificial Sequence
  ENSG00000135324_6 (sequence is synthesized)
acaaagacctggattgagaaacatgctctgtaaagggtcttcctgaagatgtggattctatctttatgtagcaagaaatctacatccaccaaaattgtgtgtgtttgggggagagagaga

SEQ ID NO: 318185 - DNA, 120 bp, Artificial Sequence
  ENSG00000135324_7 (sequence is synthesized)
catagagatagagacagagaggcagagaagagacccctttagaagagagctgagctgattaagctgagtggttttttgttttgttttgtttttgctttttaatacatttggagctttggg

SEQ ID NO: 318186 - DNA, 120 bp, Artificial Sequence
  ENSG00000135324_8 (sequence is synthesized)
catgagttttgtttttttttttgctattttttttaaagctcgtcagctatcgttagtgttagtgtactttatgtgtggcccaagacaactcttcttccagtgtggcacagggaagctaaa

SEQ ID NO: 318187 - DNA, 120 bp, Artificial Sequence
  ENSG00000135324_9 (sequence is synthesized)
agattggacacctctgatttatactagctcgttttgcttgttgaaaaatttggccaaatacctattgtcagcattcttgggtgaggattagcctaccatgttctaatctggccctgccac

SEQ ID NO: 318188 - DNA, 120 bp, Artificial Sequence
  ENSG00000135324_10 (sequence is synthesized)
tactatgctctacctttggtgagttgctttacctctctgggctgccccatttttaactgtaggttgacaggtctagagtgatccatcccacctctaatattttgtgaatttatgactttg

SEQ ID NO: 318189 - DNA, 120 bp, Artificial Sequence
  ENSG00000135324_11 (sequence is synthesized)
ccttcagatgaggctgagctatacataaaacagtataaactagggtactgcctcgtatctcttgtaggctctctcaaatctctgtaccttccacttaaccctaattgagccaagctttag

SEQ ID NO: 318190 - DNA, 120 bp, Artificial Sequence
  ENSG00000135324_12 (sequence is synthesized)
tcaggggatctggttgtctaccagaatgtcaggagactcatcttacacagtcatggtggccaatgtttctggtgggttgtgctgaaacagctcttctgagaacttccaaccacccatgct

SEQ ID NO: 318191 - DNA, 120 bp, Artificial Sequence
  ENSG00000135324_13 (sequence is synthesized)
ctaacctggagacagccatcccctgcctcagaataagtaccaattcgtagtacatgtatggtactcttgtccccaagaaatgttaggaagcttgtcagctgaatgagaggaggtgccttc

SEQ ID NO: 318192 - DNA, 120 bp, Artificial Sequence
  ENSG00000135324_14 (sequence is synthesized)
tgggtatctctgtgttggtgtatctgtgccattggctacagaacaagaaaaatactatttgccatgctattaccttggcagatgtgtaggtgatagtcatctggctttgagctgagatgg

SEQ ID NO: 318193 - DNA, 120 bp, Artificial Sequence
  ENSG00000135324_15 (sequence is synthesized)
tcagtgggttgtaaattccccactagcagatattcagggtggcctgagttatgtaaacaagtgagcaacacagctttaatttcatggaggaatcaaagctgcacactggtattaaaacaa

SEQ ID NO: 318194 - DNA, 120 bp, Artificial Sequence
  ENSG00000135324_16 (sequence is synthesized)
cttgattttgcgcacacagttgcatgcatggcaagctgttaacctctgggtggcattttcattatgaatttgttcaccacctgtcttgcttaagctacaaaataaatgcatttgactgca

SEQ ID NO: 318195 - DNA, 120 bp, Artificial Sequence
  ENSG00000135333_0 (sequence is synthesized)
ggtctgcagtcggagacttgcaggcagcaaacacggtgcgagcgaacaggagtgggggggaaattaaaaaaagctaaacgtggagcagccgatcggggaccgagaaggggaatcgatgca

SEQ ID NO: 318196 - DNA, 120 bp, Artificial Sequence
  ENSG00000135333_1 (sequence is synthesized)
aggagcacaataaaacaaaagctacttcggaacaaacagcatttaaaaatccacgactcaagataactgaaacctaaaataaaacctgctcatgcaccatggtttttcaaactcggtacc

SEQ ID NO: 318197 - DNA, 120 bp, Artificial Sequence
  ENSG00000135333_2 (sequence is synthesized)
cttcatggattattttatgctacatctggctgctccgctttgcacacacaggggaggcgcaggctgcgaaggaagtactactgctggattctaaagcacaacaaacagagttggagtgga

SEQ ID NO: 318198 - DNA, 120 bp, Artificial Sequence
  ENSG00000135333_3 (sequence is synthesized)
tttcctctccacccaatgggtgggaagaaattagtggtttggatgagaactataccccgatacgaacataccaggtgtgccaagtcatggagcccaaccaaaacaactggctgcggacta

SEQ ID NO: 318199 - DNA, 120 bp, Artificial Sequence
  ENSG00000135333_4 (sequence is synthesized)
actggatttccaaaggcaatgcacaaaggatttttgtagaattgaaattcaccctgagggattgtaacagtcttcctggagtactgggaacttgcaaggaaacatttaatttgtactatt

SEQ ID NO: 318200 - DNA, 120 bp, Artificial Sequence
  ENSG00000135333_5 (sequence is synthesized)
atgaaacagactatgacactggcaggaatataagagaaaacctctatgtaaaaatagacaccattgctgcagatgaaagttttacccaaggtgaccttggtgaaagaaagatgaagctta

SEQ ID NO: 318201 - DNA, 120 bp, Artificial Sequence
  ENSG00000135333_6 (sequence is synthesized)
acactgaggtgagagagattggacctttgtccaaaaagggattctatcttgcctttcaggatgtaggggcttgcatagctttggtttctgtcaaagtgtactacaagaagtgctggtcca

SEQ ID NO: 318202 - DNA, 120 bp, Artificial Sequence
  ENSG00000135333_7 (sequence is synthesized)
ttattgagaacttagctatctttccagatacagtgactggttcagaattttcctctttagtcgaggttcgagggacatgtgtcagcagtgcagaggaagaagcggaaaacgcccccagga

SEQ ID NO: 318203 - DNA, 120 bp, Artificial Sequence
  ENSG00000135333_8 (sequence is synthesized)
tgcactgcagtgcagaaggagaatggttagtgcccattggaaaatgtatctgcaaagcaggctaccagcaaaaaggagacacttgtgaaccctgtggccgtgggttctacaagtcttcct

SEQ ID NO: 318204 - DNA, 120 bp, Artificial Sequence
  ENSG00000135333_9 (sequence is synthesized)
ctcaagatcttcagtgctctcgttgtccaactcacagtttttctgataaagaaggctcctccagatgtgaatgtgaagatgggtattacagggctccatctgacccaccatacgttgcgt

SEQ ID NO: 318205 - DNA, 120 bp, Artificial Sequence
  ENSG00000135333_10 (sequence is synthesized)
gcacaaggcctccatctgcaccacagaacctcattttcaacatcaaccaaaccacagtaagtttggaatggagtcctcctgcagacaatgggggaagaaacgatgtgacctacagaatat

SEQ ID NO: 318206 - DNA, 120 bp, Artificial Sequence
  ENSG00000135333_11 (sequence is synthesized)
tgtgtaagcggtgcagttgggagcagggcgaatgtgttccctgtgggagtaacattggatacatgccccagcagactggattagaggataactatgtcactgtcatggacctgctagccc

SEQ ID NO: 318207 - DNA, 120 bp, Artificial Sequence
  ENSG00000135333_12 (sequence is synthesized)
acgctaattatacttttgaagttgaagctgtaaatggagtttctgacttaagccgatcccagaggctctttgctgctgtcagtatcaccactggtcaagcagctccctcgcaagtgagtg

SEQ ID NO: 318208 - DNA, 120 bp, Artificial Sequence
  ENSG00000135333_13 (sequence is synthesized)
gagtaatgaaggagagagtactgcagcggagtgtcgagctttcctggcaggaaccagagcatcccaatggagtcatcacagaatatgaaatcaagtattacgagaaagatcaaagggaac

SEQ ID NO: 318209 - DNA, 120 bp, Artificial Sequence
  ENSG00000135333_14 (sequence is synthesized)
ggacctactcaacagtaaaaaccaagtctacttcagcctccattaataatctgaaaccaggaacagtgtatgttttccagattcgggcttttactgctgctggttatggaaattacagtc

SEQ ID NO: 318210 - DNA, 120 bp, Artificial Sequence
  ENSG00000135333_15 (sequence is synthesized)
ccagacttgatgttgctacactagaggaagctacaggtaaaatgtttgaagctacagctgtctccagtgaacagaatcctgttattatcattgctgtggttgctgtagctgggaccatca

SEQ ID NO: 318211 - DNA, 120 bp, Artificial Sequence
  ENSG00000135333_16 (sequence is synthesized)
ttttggtgttcatggtctttggcttcatcattgggagaaggcactgtggttatagcaaagctgaccaagaaggcgatgaagagctttactttcattttaaatttccaggcaccaaaacct

SEQ ID NO: 318212 - DNA, 120 bp, Artificial Sequence
  ENSG00000135333_17 (sequence is synthesized)
acattgaccctgaaacctatgaggacccaaatagagctgtccatcaattcgccaaggagctagatgcctcctgtattaaaattgagcgtgtgattggtgcaggagaattcggtgaagtct

SEQ ID NO: 318213 - DNA, 120 bp, Artificial Sequence
  ENSG00000135333_18 (sequence is synthesized)
gcagtggccgtttgaaacttccagggaaaagagatgttgcagtagccataaaaaccctgaaagttggttacacagaaaaacaaaggagagactttttgtgtgaagcaagcatcatggggc

SEQ ID NO: 318214 - DNA, 120 bp, Artificial Sequence
  ENSG00000135333_19 (sequence is synthesized)
agtttgaccacccgaatgttgtccatttggaaggggttgttacaagagggaaaccagtcatgatagtaatagagttcatggaaaatggagccctagatgcatttctcaggaaacatgatg

SEQ ID NO: 318215 - DNA, 120 bp, Artificial Sequence
  ENSG00000135333_20 (sequence is synthesized)
ggcaatttacagtcattcagttagtaggaatgctgagaggaattgctgctggaatgagatatttggctgatatgggatatgttcacagggaccttgcagctcgcaatattcttgtcaaca

SEQ ID NO: 318216 - DNA, 120 bp, Artificial Sequence
  ENSG00000135333_21 (sequence is synthesized)
gcaatctcgtttgtaaagtgtcagattttggcctgtcccgagttatagaggatgatccagaagctgtctatacaactactggtggaaaaattccagtaaggtggacagcacccgaagcca

SEQ ID NO: 318217 - DNA, 120 bp, Artificial Sequence
  ENSG00000135333_22 (sequence is synthesized)
tccagtaccggaaattcacatcagccagtgatgtatggagctatggaatagtcatgtgggaagttatgtcttatggagaaagaccttattgggacatgtcaaatcaagatgttataaaag

SEQ ID NO: 318218 - DNA, 120 bp, Artificial Sequence
  ENSG00000135333_23 (sequence is synthesized)
caatagaagaaggttatcgtttaccagcacccatggactgcccagctggccttcaccagctaatgttggattgttggcaaaaggagcgtgctgaaaggccaaaatttgaacagatagttg

SEQ ID NO: 318219 - DNA, 120 bp, Artificial Sequence
  ENSG00000135333_24 (sequence is synthesized)
gaattctagacaaaatgattcgaaacccaaatagtctgaaaactcccctgggaacttgtagtaggccaataagccctcttctggatcaaaacactcctgatttcactaccttttgttcag

SEQ ID NO: 318220 - DNA, 120 bp, Artificial Sequence
  ENSG00000135333_25 (sequence is synthesized)
ttggagaatggctacaagctattaagatggaaagatataaagataatttcacggcagctggctacaattcccttgaatcagtagccaggatgactattgaggatgtgatgagtttaggga

SEQ ID NO: 318221 - DNA, 120 bp, Artificial Sequence
  ENSG00000135333_26 (sequence is synthesized)
tcacactggttggtcatcaaaagaaaatcatgagcagcattcagactatgagagcacaaatgctacatttacatggaactggcattcaagtgtgatatgcatttctcccttttaagggag

SEQ ID NO: 318222 - DNA, 120 bp, Artificial Sequence
  ENSG00000135333_27 (sequence is synthesized)
gtactggccttcagtatatgcatagaatgctgctagaagacaagtgatgtcctgggtccttccaacagtgaagagaagatttaagaagcacctatagacttgaactcctaagtgccacca

SEQ ID NO: 318223 - DNA, 120 bp, Artificial Sequence
  ENSG00000135333_28 (sequence is synthesized)
gaatatataaaaagggaatttaggatccaccatcggtggccaggaaaatagcagtgacaataaacaaagtactacctgaaaaacatccaaacaccttgagctctctaacctcctttttgt

SEQ ID NO: 318224 - DNA, 120 bp, Artificial Sequence
  ENSG00000135333_29 (sequence is synthesized)
accttgagctctctaacctcctttttgtcttatagactttttaaaatgtacataaagaatttaagaaagaatatatttgtcaaataaaatcatgatcttattgttaaaattaatgaaata

SEQ ID NO: 318225 - DNA, 120 bp, Artificial Sequence
  ENSG00000135333_30 (sequence is synthesized)
ttcctttttaaaatcatttgtgtttattcttcataaggactttgttttagaaagctgtttatagctttggacctttttagtgttaaatctgtaacattactacactgggtacctttgaaa

SEQ ID NO: 318226 - DNA, 120 bp, Artificial Sequence
  ENSG00000135333_31 (sequence is synthesized)
gaatctcaaatttcaaaagaaatagcatgattgaagatacatctctgttagaacattggtatcctttttgtgccattttattctgtttaatcagtgctgttttgatattgtttgctaatt

SEQ ID NO: 318227 - DNA, 120 bp, Artificial Sequence
  ENSG00000135333_32 (sequence is synthesized)
ggcaggtagtcaagaaaatgcaagttgccaagagctctgatattttttaaaaagaatttttttgtaaagatcagacaacacactatcttttcaatgaaaaaagcaataatgatccataca

SEQ ID NO: 318228 - DNA, 120 bp, Artificial Sequence
  ENSG00000135333_33 (sequence is synthesized)
tactataaggcacttttaacagattgtttatagagtgattttactagaaagaatttaataaactcgaagtttaggtttatgagtatataaacaaatgaggcacttcatctgaagaatgtt

SEQ ID NO: 318229 - DNA, 120 bp, Artificial Sequence
  ENSG00000135333_34 (sequence is synthesized)
ggtgaaggcaagtctctgaaagcagaactatccagtgttatctaaaaattaatctgagcacatcaagattttttcattctcgtgacattaggaaatttaggataaatagttgacatatat

SEQ ID NO: 318230 - DNA, 120 bp, Artificial Sequence
  ENSG00000135333_35 (sequence is synthesized)
tttatatcctcttctgttgaatgcagtccaaacatgaaaggaaataattgttttatattataactctgaagcatgataaaggggcagttcacaattttcaccatttaaacacaaatttgc

SEQ ID NO: 318231 - DNA, 120 bp, Artificial Sequence
  ENSG00000135333_36 (sequence is synthesized)
tgcacagaatatcaccattgcagttcaaaacaaaacaaaacaaaaagtcttttgtttgtgaacactgatgcaagaaacttgttaaatgaaaggactctttaccctagaaggaagaggtga

SEQ ID NO: 318232 - DNA, 120 bp, Artificial Sequence
  ENSG00000135333_37 (sequence is synthesized)
aggatctggcttgtttttaaagctttatttattaaaccatattatttgattactgtgttagaatttcataagcaataattaaatgtgtctttatagatattgcaggaatgtatacatatt

SEQ ID NO: 318233 - DNA, 120 bp, Artificial Sequence
  ENSG00000135333_38 (sequence is synthesized)
gtgattaatgctttcaaaacttatgaaaatcatgaactaccccagaattgaactgttgtacttccaaagagaattgggctgtttataatgattttaatagagaaagatcccagggatcgg

SEQ ID NO: 318234 - DNA, 120 bp, Artificial Sequence
  ENSG00000135333_39 (sequence is synthesized)
tcataattggtcttgtttgataatgtgggcatccacaaacaaacaaacaaataacagaaacaaaatctgtaaatgttcctttgtaaaacttgtaaattttatttatactgtcttgttttg

SEQ ID NO: 318235 - DNA, 120 bp, Artificial Sequence
  ENSG00000135333_40 (sequence is synthesized)
tacacacatttctctgtagtgggctctgaatacattgaaaatgcactatatttttctattttacttgcagagcatcacaaaagaacaggtattttcagtgctacataatgtgttttccca

SEQ ID NO: 318236 - DNA, 120 bp, Artificial Sequence
  ENSG00000135333_41 (sequence is synthesized)
catttaggaccaaagacggctatagaaaaactcaaatggattgcttcccaaacccctccccaccctttttttttggttttaaatcactgtacagtgttatttgatattttaatttatttt

SEQ ID NO: 318237 - DNA, 120 bp, Artificial Sequence
  ENSG00000135333_42 (sequence is synthesized)
ttgattgactagaaaaatcattttaatttcactaaaatgttttttgtccctaaggaaaagtaatctgtaaaaataattttaattagcataatacagtcacctagacacttccatttgtaa

SEQ ID NO: 318238 - DNA, 120 bp, Artificial Sequence
  ENSG00000135333_43 (sequence is synthesized)
tctttgtaatagactgtaaatatatttttggaactataacacaatgtgcttgagggttatttttcagtgtctgcagtgtgtacaagtgtttatactaagtccagcactttacaattctaa

SEQ ID NO: 318239 - DNA, 120 bp, Artificial Sequence
  ENSG00000135333_44 (sequence is synthesized)
tcagtagcattggcctttgtgagaatgagtgaaagagtttgagtgagtgttcttaattccttttggattctagactcactaataatgaagttcttttcttgttcatagcttaaggtgctt

SEQ ID NO: 318240 - DNA, 120 bp, Artificial Sequence
  ENSG00000135333_45 (sequence is synthesized)
attttttctattaaaattaaattaacaaaagccattctagaaatagaagacatagtatggtacatgcaaacggtgtctttcctgcttttttctagcactagatttatagttgagtagtct

SEQ ID NO: 318241 - DNA, 120 bp, Artificial Sequence
  ENSG00000135333_46 (sequence is synthesized)
ttcttgagtagaagggcagaataaaagtttttttgagtttttttcaaaaataaatttttccttcagcaatatacctcatctgccttaaattttttacagctctttacagggaaaggggag

SEQ ID NO: 318242 - DNA, 120 bp, Artificial Sequence
  ENSG00000135333_47 (sequence is synthesized)
aagggatgggaaagacacacagcacaataggaagtgtatgattacatcactatctcgtttgtaagtttcttttcctaatcaacattatgatttcgaaatacatgtatgtgaaacaaatat

SEQ ID NO: 318243 - DNA, 120 bp, Artificial Sequence
  ENSG00000135333_48 (sequence is synthesized)
taagagaaaaagaattaacattgtaatgctgattgtaatactctcttccagaaagagatgagatggtataacgataagaatgtacaacttgcaccttgaaatctttttttttaaataaat

SEQ ID NO: 318244 - DNA, 120 bp, Artificial Sequence
  ENSG00000135333_49 (sequence is synthesized)
tagtgctcaggggaggaaaagtagagaaagtgaacgtcaaaaatagaattccaaaattataaaaatgcaaaaggaaatggcctccttgctttaatagagccaccttttttagaacactgt

SEQ ID NO: 318245 - DNA, 120 bp, Artificial Sequence
  ENSG00000135333_50 (sequence is synthesized)
cctcacacttgacctgtgttttgcattcagtactgaaataaaagtaacttgttctacatttgaatctaacattttctcagcaattgatctggtccttgtttactagaactggtggtttat

SEQ ID NO: 318246 - DNA, 120 bp, Artificial Sequence
  ENSG00000135333_51 (sequence is synthesized)
gcttgtcagagcactattagttgaatcatattgtatacttatgtaatctacattagctagtactgtttaggactatattttaattgctcttcttatccgtgtttttaagacaattaaaat

SEQ ID NO: 318247 - DNA, 120 bp, Artificial Sequence
  ENSG00000135333_52 (sequence is synthesized)
ggtgtgattcacctctcttttttatttaggtaatgctgatattctcccttttgtttcttgagtagcctagaactatgctactcactgatgtgcatgttcaaataaattactgatgtgtat

SEQ ID NO: 318248 - DNA, 120 bp, Artificial Sequence
  ENSG00000135333_53 (sequence is synthesized)
ttttttgctatatgtggagaaatcatggggaactcggggcgagatgtgcttttcgttggttgaatttgtccctccttgcctaagaaatactacaggggtcatccttttataaggacaaac

SEQ ID NO: 318249 - DNA, 120 bp, Artificial Sequence
  ENSG00000135333_54 (sequence is synthesized)
tgcttttgaacagtgtcttcaatgtatcaagcacaaataactctttcttcaacatgaatcataagtctctttttaccagcttaaaataataaacaagtctattagacaatgtaaagaaaa

SEQ ID NO: 318250 - DNA, 120 bp, Artificial Sequence
  ENSG00000135333_55 (sequence is synthesized)
atgtgtcctattaaaactccactttgcctttttaaatttcagtatcagacattttaaactttaatagttatttgaatacgtgaatctgctctgtaccagaagcgcaattcagtagatctt

SEQ ID NO: 318251 - DNA, 120 bp, Artificial Sequence
  ENSG00000135333_56 (sequence is synthesized)
aaacaaagtcaccgttgaacttagtgattgccctacagtagcatctgcactaagtgtatgtaatcaatataggtgataatgaaatttgttactaaaatttaatgtgtcctatgcttaaca

SEQ ID NO: 318252 - DNA, 120 bp, Artificial Sequence
  ENSG00000135333_57 (sequence is synthesized)
tggaagtcaatagttgcacgttgggctatggagtttagagaggagtctgggtagttggacatatagcctggcaagactgaggtgacatttaacaggatttaatgagatgccattcctcct

SEQ ID NO: 318253 - DNA, 120 bp, Artificial Sequence
  ENSG00000135333_58 (sequence is synthesized)
gtttttaaacccatattgtctgggcccttgagtagcagtaaataggaggttaagagggctgtgaataagagctctagtgacaggcagggcataaacgaatatatttacaaacttttagaa

SEQ ID NO: 318254 - DNA, 120 bp, Artificial Sequence
  ENSG00000135333_59 (sequence is synthesized)
ttatcttatataaatactataactttaatacaaaattttcaaatttcacttacaaaatctctgtggttacttctgagaaaggtgtgtgttttttttttttttttttggactaagtaccaa

SEQ ID NO: 318255 - DNA, 120 bp, Artificial Sequence
  ENSG00000135333_60 (sequence is synthesized)
aatgaccacatttttgtgaaagtgggccaaagtaaagttttaattattatagtacaccaattgcatgttttgaaacaatcatgtatgaattagtaaacttttttctttgttttataaaac

SEQ ID NO: 318256 - DNA, 120 bp, Artificial Sequence
  ENSG00000135333_61 (sequence is synthesized)
cgttttttttctttcctagcattatgtggctaaatatttaaaactatgtcatatggaccttcaagattgatagatattctgtttctaggtttcatgaaaataaattataaagttatgtta

SEQ ID NO: 318257 - DNA, 120 bp, Artificial Sequence
  ENSG00000135334_0 (sequence is synthesized)
agagttctacgagggaggggaagcggttggacgtgttcgcttgggttcctgctgcggcagctacctcgcaatctctctgcatcgatcgccgctcgcaagctactgaccgtactcgggcgt

SEQ ID NO: 318258 - DNA, 120 bp, Artificial Sequence
  ENSG00000135334_1 (sequence is synthesized)
attaggagccgcgttccagcctcacaccccacggtgctgttttcgacttcagaaaggatctagtctcagcacagaagcgcctcaggcgcggcgcaaagctcgagcggacggcgggggcgg

SEQ ID NO: 318259 - DNA, 120 bp, Artificial Sequence
  ENSG00000135334_2 (sequence is synthesized)
ccggagcctctctcgggggagccgcgcctgaggaggcggaagaacccccctgacgcgactggcgtgtgcttctgcccgccaccgcccctcccgctctcacccgggccgtccctggccact

SEQ ID NO: 318260 - DNA, 120 bp, Artificial Sequence
  ENSG00000135334_3 (sequence is synthesized)
gcccctgccgcggaggcagcggcggcagcggctctcctttccacagccggcgctccgcgacccgcttggctcctgagcccgtcgggtaggctctcctcgagttcccgctcttcacccctt

SEQ ID NO: 318261 - DNA, 120 bp, Artificial Sequence
  ENSG00000135334_4 (sequence is synthesized)
ccctcaccctcttctttcgtcacccgtccccgaccccacccgagcccggcgcctcagctgcccccggccatggcgtgcggagccactctgaaaaggactctggatttcgacccgctgttg

SEQ ID NO: 318262 - DNA, 120 bp, Artificial Sequence
  ENSG00000135334_5 (sequence is synthesized)
gttgagcccggcgtccccgaagcgcaggcgatgtgcgccattgtcggcgcccacctcggccgctgcctccccgttgtcggcggccgcggccaccgccgcctccttctccgctgcggccgc

SEQ ID NO: 318263 - DNA, 120 bp, Artificial Sequence
  ENSG00000135334_6 (sequence is synthesized)
ccgcagaagtatctccgaatggagccatcccccttcggcgacgtctcctcccgcctcaccacagaacaaattctgtacaacataaaacaagagtataaacgaatgcagaagagaagacat

SEQ ID NO: 318264 - DNA, 120 bp, Artificial Sequence
  ENSG00000135334_7 (sequence is synthesized)
tgcagcatcctcaccattaaaaaaagaacagcccttatttactctacggcaggttgggatgatctgtgaacgtttgttgaaagaacgtgaagagaaagttcgagaagaatatgaagaaat

SEQ ID NO: 318265 - DNA, 120 bp, Artificial Sequence
  ENSG00000135334_8 (sequence is synthesized)
attgaacacaaaacttgcagaacaatatgatgcgtttgtgaagtttacgcatgatcaaataatgcgacgatatggagaacagcctgctagctatgtttcatgaatcacgtatcctgcatt

SEQ ID NO: 318266 - DNA, 120 bp, Artificial Sequence
  ENSG00000135334_9 (sequence is synthesized)
tgtgggctgccttgttccttgttgagttgttgcaagaggtcccaattatgacatgcagcaatgccaataccccttctgtgaatacaggttatttcaagctttcgtcagtggcaaccactc

SEQ ID NO: 318267 - DNA, 120 bp, Artificial Sequence
  ENSG00000135334_10 (sequence is synthesized)
ttaggcagcagcaactggttttggaaatttccctgatgtcagtaccacctggatgtggacctttgctacctgtattaataccagtggcctcattttgctgtatcattacaatttggcttc

SEQ ID NO: 318268 - DNA, 120 bp, Artificial Sequence
  ENSG00000135334_11 (sequence is synthesized)
ttatattaatgtttgaaaaggattaaagctggtattctagaacatgcccttcactggttgtgtaaataaaactgtagaatgacacttcagatgaagttagtgtgattttaattgtgcact

SEQ ID NO: 318269 - DNA, 120 bp, Artificial Sequence
  ENSG00000135334_12 (sequence is synthesized)
acaaccgagctgtaaccagttactaattttagaatgtaatcccaggacaatattaagcaaatagcctgcagtgcttcctgtgaaatagtgaaggaggagggcatttctgtattccaggac

SEQ ID NO: 318270 - DNA, 120 bp, Artificial Sequence
  ENSG00000135334_13 (sequence is synthesized)
ttcttggggtttcagaatgggtttgtatgattttttttttttttgtagttttatttattctatcagtctttttaacaaatgtttattgctgcatttttttttttccagtgtatcattgtt

SEQ ID NO: 318271 - DNA, 120 bp, Artificial Sequence
  ENSG00000135334_14 (sequence is synthesized)
ttactgcccttgtagtactggaatttagttggaagaataaaacatttacttctattttgcttgtttcttaatgtacagatggggttagtatttgaataaagttggtgttttaaaacgtaa

SEQ ID NO: 318272 - DNA, 120 bp, Artificial Sequence
  ENSG00000135334_15 (sequence is synthesized)
gcggccgcctcgccgcagaagtatctccgaatggagccatcccccttcggcgacgtctcctcccgcctcaccacagcagggtcaacaacaaagaaaatgctcttcccgagtactgtaata

SEQ ID NO: 318273 - DNA, 120 bp, Artificial Sequence
  ENSG00000135334_16 (sequence is synthesized)
ttgcattgaaaattggggctgaggagttgcttttatttggaaatgttttatttttgcccaacaaagtatgctgggggaaaacaacctagccttgagaataatgaagaaatcaacccaaga

SEQ ID NO: 318274 - DNA, 120 bp, Artificial Sequence
  ENSG00000135334_17 (sequence is synthesized)
ttccaagggacttcagacttttgcttttcatcttgaaacatttcctgagagagactggggaatgtcttttggctgctttgtagggcatgtgtatgcccagttttttctgtactttgaaat

SEQ ID NO: 318275 - DNA, 120 bp, Artificial Sequence
  ENSG00000135336_0 (sequence is synthesized)
gagtgcatctggaatacgcagagtcagtaagaccatggctacgtcctcgatgtctaagggttgctttgtttttaagccaaactccaaaaagagaaagatctctctgccaatagaggacta

SEQ ID NO: 318276 - DNA, 120 bp, Artificial Sequence
  ENSG00000135336_1 (sequence is synthesized)
ttttaacaaagggaaaaatgagcctgaggacagtaagcttcgattcgaaacttatcagttgatatggcagcagatgaaatctgaaaatgagcgactacaagaggaattaaataaaaactt

SEQ ID NO: 318277 - DNA, 120 bp, Artificial Sequence
  ENSG00000135336_2 (sequence is synthesized)
gtttgacaatctgattgaatttctgcaaaaatcacattctggattccagaagaattcaagagacttgggcggtcaaataaaactcagagaaattccaactgctgctcttgttcttggtgt

SEQ ID NO: 318278 - DNA, 120 bp, Artificial Sequence
  ENSG00000135336_3 (sequence is synthesized)
gaatgtcacagatcatgatttgacattcggaagtctaacagaggcccttcagaataatgtcacaccatatgtagtctcattgcaagctaaagattgtccagatatgaaacattttttgca

SEQ ID NO: 318279 - DNA, 120 bp, Artificial Sequence
  ENSG00000135336_4 (sequence is synthesized)
aaagttgatctcacagttgatggactgctgtgtagatataaaatccaaagaggaggaaagtgttcacgtcacccaaagaaagacacattattcaatggattcactttccagttggtatat

SEQ ID NO: 318280 - DNA, 120 bp, Artificial Sequence
  ENSG00000135336_5 (sequence is synthesized)
gactgtcacacagaagacggacccaaaaatgctaagcaaaaaaaggactacttctagccaatggcagtctcctcctgttgtcgttatcttgaaggatatggaaagctttgccacaaaagt

SEQ ID NO: 318281 - DNA, 120 bp, Artificial Sequence
  ENSG00000135336_6 (sequence is synthesized)
actacaagacttcataattatcagcagtcaacatctccatgaatttccactaatactcatttttggaatagccacatctcctattatcatccaccgattgcttcctcatgcagtatcatc

SEQ ID NO: 318282 - DNA, 120 bp, Artificial Sequence
  ENSG00000135336_7 (sequence is synthesized)
tctattgtgcatagaactgttccaatctttgtcttgtaaggagcacctgactacggtactcgataagctacttcttacaactcagtttccctttaaaataaatgaaaaagtattacaggt

SEQ ID NO: 318283 - DNA, 120 bp, Artificial Sequence
  ENSG00000135336_8 (sequence is synthesized)
tctgaccaacatctttttgtatcatgatttctcagttcaaaactttataaaaggacttcagctttctctattagagcatttctattcccagcccttaagtgtcctgtgctgtaatcttcc

SEQ ID NO: 318284 - DNA, 120 bp, Artificial Sequence
  ENSG00000135336_9 (sequence is synthesized)
agaagccaaaagaagaataaattttttatcaaataatcaatgtgaaaacatccgacgtctaccatcttttaggaggtacgtggaaaagcaagcttcagaaaagcaagttgcgctcttgac

SEQ ID NO: 318285 - DNA, 120 bp, Artificial Sequence
  ENSG00000135336_10 (sequence is synthesized)
cctcttctcttcccaagtatccactaggtcgacagatcagagagttgtactgtacatgtttagaaaagaacatatgggattcagaggagtatgcatcagtcttgcagctgctgaggatgt

SEQ ID NO: 318286 - DNA, 120 bp, Artificial Sequence
  ENSG00000135336_11 (sequence is synthesized)
tggcaaaggatgaactgatgaccatacttgagaaatgtttcaaggtttttaagtcttattgtgaaaaccaccttggcagcacagctaagagaatagaggagttcctggcccagtttcaga

SEQ ID NO: 318287 - DNA, 120 bp, Artificial Sequence
  ENSG00000135336_12 (sequence is synthesized)
gcctcgatgcagaaaccaaagaggaagaagatgcttctgggtcacagccaaaggggcttcagaagacagacctctatcatcttcagaagtccttattggaaatgaaggagttaagaagaa

SEQ ID NO: 318288 - DNA, 120 bp, Artificial Sequence
  ENSG00000135336_13 (sequence is synthesized)
gtaagaagcaaaccaaatttgaagtactcagagaaaatgttgtgaacttcattgactgtctagtgagagaataccttctgcctcctgagacacagcctctccatgaggtggtgtacttca

SEQ ID NO: 318289 - DNA, 120 bp, Artificial Sequence
  ENSG00000135336_14 (sequence is synthesized)
gtgctgcccatgcccttcgtgagcatttaaatgctgctccgcgaattgccctccatactgcactcaacaatccttactattatctcaagaatgaagcactgaaaagcgaagaaggctgca

SEQ ID NO: 318290 - DNA, 120 bp, Artificial Sequence
  ENSG00000135336_15 (sequence is synthesized)
ttccgaatatcgccccagacatctgcatagcatacaaactgcacctagagtgtagcaggctcatcaacctcgtggactggtcagaggcttttgcaacagttgtgacagctgctgaaaaaa

SEQ ID NO: 318291 - DNA, 120 bp, Artificial Sequence
  ENSG00000135336_16 (sequence is synthesized)
tggatgcaaattctgcaacctcagaagaaatgaatgaaattatccatgctcggtttattagagctgtttctgaactagaacttttaggatttataaaacctaccaaacagaagactgacc

SEQ ID NO: 318292 - DNA, 120 bp, Artificial Sequence
  ENSG00000135336_17 (sequence is synthesized)
atgtggcaagactaacatggggaggctgctagaaagcaaataagcaaagccagaactatcacatttagcttaagagaaaaaggtgaccagtcatatttacatatattagaggagcctgtt

SEQ ID NO: 318293 - DNA, 120 bp, Artificial Sequence
  ENSG00000135336_18 (sequence is synthesized)
ttgttgagaagataaatgtgtaacccccattgatgtttaaccagaaaagtacattgctaaccccaaacaggcatgtatcaaaacacctgtggagtactttagactccaacaaataataat

SEQ ID NO: 318294 - DNA, 120 bp, Artificial Sequence
  ENSG00000135336_19 (sequence is synthesized)
gtaactaaaactgctcacacattttactgtactttccaaagtcattactaaattgtgagtaaatcattcttgaacttagagtatgtaaatgtaataaattccgttatccaggagtataaa

SEQ ID NO: 318295 - DNA, 120 bp, Artificial Sequence
  ENSG00000135336_20 (sequence is synthesized)
cttgaaaagtataatcttcattttaataccaactggataaaaatcaaagtattcaaattctttataattgaatattcaaagacttcctatcagattttccatttgctttttgagccaaga

SEQ ID NO: 318296 - DNA, 120 bp, Artificial Sequence
  ENSG00000135336_21 (sequence is synthesized)
atgagaatcaaaggcacatttagccagttttaaattgacatggtaagatagtattaaatatggtttttctcaccaagattgactgtctcttactcacccattaaatagataaactactcc

SEQ ID NO: 318297 - DNA, 120 bp, Artificial Sequence
  ENSG00000135336_22 (sequence is synthesized)
gcggtgagccgagatcacgccattgcaccctagcctgagcaacaagagcaaaactgcgtctcaaagaaaaaacaaaaaaagaataagaggactaataactatttgaatccctggcagttt

SEQ ID NO: 318298 - DNA, 120 bp, Artificial Sequence
  ENSG00000135336_23 (sequence is synthesized)
gaatccctggcagtttacatctgagtaccttctccaagtgacacattaagagttatgactaatgaagtttgcttccaaagttatatgaaataatgccctcttttttggtctcctggataa

SEQ ID NO: 318299 - DNA, 120 bp, Artificial Sequence
  ENSG00000135336_24 (sequence is synthesized)
gctaatccttcacatgctgctaacttgggttagatcttctgccagcagaacctcacccgtctttcccctccaagcaagtcagtgccggtgattccttggacaccagaaatgctaatcttg

SEQ ID NO: 318300 - DNA, 120 bp, Artificial Sequence
  ENSG00000135336_25 (sequence is synthesized)
tctatttgaataggcctaaaggatgttggcaaaggatgaactgatgaccatacttgagaaatgtttcaaggtttttaagtcttattgtgaaaaccaccttggcagcacagctaagagaat

SEQ ID NO: 318301 - DNA, 120 bp, Artificial Sequence
  ENSG00000135336_26 (sequence is synthesized)
atcccgagtgcatctggaatacgcagagtcagtaagaccatggctacgtcctcgatgtctaagggttgctttgtttttaagccaaactccaaaaagagaaagatctctctgccaatagca

SEQ ID NO: 318302 - DNA, 120 bp, Artificial Sequence
  ENSG00000135336_27 (sequence is synthesized)
tatggaatcacctggactataagtaaaggaattggagtgtgatcctgagcctgaccagctctatggctttggccctgctgtttaacctttccctaagtctcttcatctgtaaaatgagca

SEQ ID NO: 318303 - DNA, 120 bp, Artificial Sequence
  ENSG00000135336_28 (sequence is synthesized)
actatactcacttatcactaagatttctccctattctcattctatctctctaagagctaacatgtagtgctttgtaagactatcataaataccatgtgaataaatttgtgttattatgga

SEQ ID NO: 318304 - DNA, 120 bp, Artificial Sequence
  ENSG00000135338_0 (sequence is synthesized)
agtctaggcctccgcctccgttaccctggagcccaggttaccgccgctgccacccaggagccccgatcctcgcctctgtcccatccttgtgttcaaacctcccgcatctcggcaacctcg

SEQ ID NO: 318305 - DNA, 120 bp, Artificial Sequence
  ENSG00000135338_1 (sequence is synthesized)
gcacccgcccggcagcctccgcaggaaccaggcacccgctctttggcggtcagacgccgaggccccagctgggagtttggtcctaagagggaaggcaaggaggcgggacgccgcatcggc

SEQ ID NO: 318306 - DNA, 120 bp, Artificial Sequence
  ENSG00000135338_2 (sequence is synthesized)
tctgctgaagagcctgcgggttggagggcaaaaaagtttatcttctggatgccaatgtgaattgtggtctacaaatacattgtggagaaaatagattgcacagaaatgaatattatcagg

SEQ ID NO: 318307 - DNA, 120 bp, Artificial Sequence
  ENSG00000135338_3 (sequence is synthesized)
atctgaagactgtgaaaatgtttttcagtattgtcatagtctcctctggagaaaataatctgtgaaattatgtgaatagagaccatttttcaaaacaatgggggaaagagcaggaagtcc

SEQ ID NO: 318308 - DNA, 120 bp, Artificial Sequence
  ENSG00000135338_4 (sequence is synthesized)
aggtactgatcaagaaagaaaggcaggcaaacaccattattcttacttatctgattttgaaacgccacagtcttctggccgatcatcgctggtcagttcttcacctgcaagtgttaggag

SEQ ID NO: 318309 - DNA, 120 bp, Artificial Sequence
  ENSG00000135338_5 (sequence is synthesized)
aaaaaatcctaaaagacaaacttcagatggccaagtacatcaccaagcccctcggaaaccaagccctaagggtctaccaaacagaaagggagtccgagtgggatttcgctcccagagcct

SEQ ID NO: 318310 - DNA, 120 bp, Artificial Sequence
  ENSG00000135338_6 (sequence is synthesized)
caatagagagccacttcggaaagatactgatcttgttacaaaacggattctgtctgcaagactgctaaaaatcaatgagttgcagaatgaagtatctgaactccaggtcaagttagctga

SEQ ID NO: 318311 - DNA, 120 bp, Artificial Sequence
  ENSG00000135338_7 (sequence is synthesized)
gctgctaaaagaaaataaatctttgaaaaggcttcagtacagacaggagaaagccctgaataagtttgaagatgccgaaaatgaaatctcacaacttatatttcgtcataacaatgagat

SEQ ID NO: 318312 - DNA, 120 bp, Artificial Sequence
  ENSG00000135338_8 (sequence is synthesized)
tacagcactcaaagaacgcttaagaaaatctcaagagaaagaacgggcaactgagaaaagggtaaaagatacagaaagtgaactatttaggacaaaattttccttacagaaactgaaaga

SEQ ID NO: 318313 - DNA, 120 bp, Artificial Sequence
  ENSG00000135338_9 (sequence is synthesized)
gatctctgaagctagacacctacctgaacgagatgatttggcaaagaaactagtttcagcagagttaaagttagatgacaccgagagaagaattaaggagctatcgaaaaaccttgaact

SEQ ID NO: 318314 - DNA, 120 bp, Artificial Sequence
  ENSG00000135338_10 (sequence is synthesized)
gagtactaacagtttccaacgacagttgcttgctgaaaggaaaagggcatatgaggctcatgatgaaaataaagttcttcaaaaggaggtacagcgactatatcacaaattaaaggaaaa

SEQ ID NO: 318315 - DNA, 120 bp, Artificial Sequence
  ENSG00000135338_11 (sequence is synthesized)
ggagagagaactggatataaaaaatatatattctaatcgtctgccaaagtcctctccaaataaagagaaagaacttgcattaagaaaaaatgctgcatgccagagtgattttgcagacct

SEQ ID NO: 318316 - DNA, 120 bp, Artificial Sequence
  ENSG00000135338_12 (sequence is synthesized)
gtgtacaaaaggagtacaaaccatggaagacttcaagccagaagaatatcctttaactccagaaacaattatgtgttacgaaaacaaatgggaagaaccaggacatcttactttggactt

SEQ ID NO: 318317 - DNA, 120 bp, Artificial Sequence
  ENSG00000135338_13 (sequence is synthesized)
gcaatctcaaaagcaagacaggcatggagaagcagggattctaaacccaattatggaaagagaagaaaaatttgttacagatgaagaactccatgtcgtaaaacaggaggttgaaaagct

SEQ ID NO: 318318 - DNA, 120 bp, Artificial Sequence
  ENSG00000135338_14 (sequence is synthesized)
ggaggatgaatgggaaagagaagaacttgataaaaagcaaaaagaaaaggcatctttactggaaagagaagaaaagccagagtgggaaactggaaggtaccaactaggaatgtatccaat

SEQ ID NO: 318319 - DNA, 120 bp, Artificial Sequence
  ENSG00000135338_15 (sequence is synthesized)
tcagaatatggataaattgcaaggagaggaagaagaaagactgaagagagaaatgctacttgctaaactgaatgaaattgacagagaactccaagattctcgaaatctaaaataccctgt

SEQ ID NO: 318320 - DNA, 120 bp, Artificial Sequence
  ENSG00000135338_16 (sequence is synthesized)
tttgccattgttacctgattttgaatcaaaactacactccccagagagaagccccaaaacatacaggttctctgaatcctcagagagattatttaatgggcatcatttgcaagacatcag

SEQ ID NO: 318321 - DNA, 120 bp, Artificial Sequence
  ENSG00000135338_17 (sequence is synthesized)
tttctcaactccaaaaggagaaggtcagaattcaggaaatgttagaagtccagcctcccctaatgagttcgcatttggtagctacgtgccttcgtttgcaaaaacatcagagaggtcaaa

SEQ ID NO: 318322 - DNA, 120 bp, Artificial Sequence
  ENSG00000135338_18 (sequence is synthesized)
tccatttagtcaaaaaagtagttttttggatttccaaagaaacagtatggaaaaacttagtaaagatggtgtagatttaattacaagaaaagagaaaaaagctaatttgatggaacagtt

SEQ ID NO: 318323 - DNA, 120 bp, Artificial Sequence
  ENSG00000135338_19 (sequence is synthesized)
ggtgccagtggtagcagcaccatttcctccaaaagcagtgacccaaattctgtggcttccagtaaaggagacattgaccctctaaattttctccctgggaataaaggcagcagagatcaa

SEQ ID NO: 318324 - DNA, 120 bp, Artificial Sequence
  ENSG00000135338_20 (sequence is synthesized)
gaacatgatgaagatgaaggctttttcctcagtgaaggaagaagttttaatccaaataggcaccgattaaaacatgcagacgataaaccagcagtaaaagcagctgattctgtagaagat

SEQ ID NO: 318325 - DNA, 120 bp, Artificial Sequence
  ENSG00000135338_21 (sequence is synthesized)
agatgaaattgaagaagtagcactgagatgactgactagagtatacattttttctaattgtaaatattgaaatattttaatacagtatttattataaacatttagactttttaatgctaa

SEQ ID NO: 318326 - DNA, 120 bp, Artificial Sequence
  ENSG00000135338_22 (sequence is synthesized)
tccttattaaggaatgatttttaatagctaaatacaatgcagttaaaaagaagtagatcatacatacaccacatagatagtttgccaagaatgaaggaggcttttttgaatgaaaccaaa

SEQ ID NO: 318327 - DNA, 120 bp, Artificial Sequence
  ENSG00000135338_23 (sequence is synthesized)
aataaaaatatgtcttgaaaaatgaaatagattttaactcttcatccagtgctatggcaagtttaactgcactggaggtggtattccttttctacttttattcctatttatgtatttatt

SEQ ID NO: 318328 - DNA, 120 bp, Artificial Sequence
  ENSG00000135338_24 (sequence is synthesized)
tttaatcatattctcactgtgctaaatacagtcttcccactaattgttgaatgaaaattaagggtgaaagtctgtgttgggaagtgtagctccggatggtggagaaccagtgcttcttag

SEQ ID NO: 318329 - DNA, 120 bp, Artificial Sequence
  ENSG00000135338_25 (sequence is synthesized)
gagcccttccctttatggatagggccaggggtccctatcttacgtggcagtcctaagctactcttgagtgatagcagtcacaacattgggatttcccattcctctgaaagtacccacagc

SEQ ID NO: 318330 - DNA, 120 bp, Artificial Sequence
  ENSG00000135338_26 (sequence is synthesized)
taaacactactcatttcccaatttcagtatttactgaaatcacttacctacaattctgttagaatattatgttgagttcggaagacatttctctgtttgcaaggacagttagttgctctc

SEQ ID NO: 318331 - DNA, 120 bp, Artificial Sequence
  ENSG00000135338_27 (sequence is synthesized)
tgtcatagcccgcagaagcttggctacagtgtaattcctctccttgttctcctacactctttgtatctcagtgactgggtgtaagatttcatgccaaatgcaaggaatagtggaaataca

SEQ ID NO: 318332 - DNA, 120 bp, Artificial Sequence
  ENSG00000135338_28 (sequence is synthesized)
taccaactgcaaagaatagaaaaactttatcccaatatattatagaaagatcttcagttcaattatgtccagagtaatataatttggcaatgttaatgcttttaagatttgaacttgtcc

SEQ ID NO: 318333 - DNA, 120 bp, Artificial Sequence
  ENSG00000135338_29 (sequence is synthesized)
tcaaaccaaggagacaacaatagtgtaatactattggacttacaggattagttttaaagcaactttgaatagaagtgtttcagacataggacttctgccttgttgactagagtggatagt

SEQ ID NO: 318334 - DNA, 120 bp, Artificial Sequence
  ENSG00000135338_30 (sequence is synthesized)
tttctgtttaaatgcattggtcttttggctgtttgtaattcacttcagcttatagagaagttgatgaccttggatcatgctgggtatgattggtctttaaaaagcagtaatataccacca

SEQ ID NO: 318335 - DNA, 120 bp, Artificial Sequence
  ENSG00000135338_31 (sequence is synthesized)
gcccaaggagaaaacattgttaaaatgaagagtggtggaaatagtgtgttgggaagaataaaaaatttagattggcacttattctaaagtgagctgtttttttcaagaatttactagcat

SEQ ID NO: 318336 - DNA, 120 bp, Artificial Sequence
  ENSG00000135338_32 (sequence is synthesized)
ttgctcgtagtatgatttctgacgccagtcatatatactgatgaggggaaggagttactgtgttattctgagttcttataaatgcatattattgaatttcattgcatgactatttgtcaa

SEQ ID NO: 318337 - DNA, 120 bp, Artificial Sequence
  ENSG00000135338_33 (sequence is synthesized)
gacttacctggttaggtctccaattaaaagatgtaccacctgtcatcttctaaattgtgttcctttcatttattgggaacagaatctctcaaaagtgctaaactatattaaaaagttttc

SEQ ID NO: 318338 - DNA, 120 bp, Artificial Sequence
  ENSG00000135338_34 (sequence is synthesized)
aaccatttactataatatgttgcaaatcattctaatatatgtaaaacaatattatttgtaatgcagttattggtaaaatattatgtaatgttaattttgttcctagctgctaatttttct

SEQ ID NO: 318339 - DNA, 120 bp, Artificial Sequence
  ENSG00000135338_35 (sequence is synthesized)
aattttgttcctagctgctaatttttctgccaaaagtattctaattttcaggttgttttaaaggcttttaaaactttttagttaagttttttattcacgtcatttaaattagttttttgc

SEQ ID NO: 318340 - DNA, 120 bp, Artificial Sequence
  ENSG00000135338_36 (sequence is synthesized)
tttttttctacctgataatctctttaacaagatgcaacaagacagaattattaaaattaaacctaaagttaagttacagatttaaaggcattatgatattaagcattaaaattggagatt

SEQ ID NO: 318341 - DNA, 120 bp, Artificial Sequence
  ENSG00000135338_37 (sequence is synthesized)
aaaatgtacaaaacagggttttccttatgaacaaaccttacagggtaaattgtttttttttctaaatgtcattaaatttatttgtactcagaactgttactaataaaaattaaaaatgca

SEQ ID NO: 318342 - DNA, 120 bp, Artificial Sequence
  ENSG00000135338_38 (sequence is synthesized)
tctgctgaagagcctgcgggttggaggtgggctttgaagtgggcgtggagacggcgggggaggtggaggtgcgagtataaatgatcaaccagaaattatcttcaaaggaataaaaccaga

SEQ ID NO: 318343 - DNA, 120 bp, Artificial Sequence
  ENSG00000135338_39 (sequence is synthesized)
gagtgagcgtcttctaatatcttccagcttaactgtgaattgcttaggtagaacaaagaaaggtggatacagtggtaggggatggcttatcaggagccatacacatttgaataatgttat

SEQ ID NO: 318344 - DNA, 120 bp, Artificial Sequence
  ENSG00000135338_40 (sequence is synthesized)
taaggaaagaaaaaaattgaacactctaagtcatttgctatttagggttagggaataaggacaagttgcattcagaaaattctgatgaagtagaattcagatgccacttactaaagttac

SEQ ID NO: 318345 - DNA, 120 bp, Artificial Sequence
  ENSG00000135338_41 (sequence is synthesized)
tatacttgtggtgttcttacatattttaaaatttttaattttttcatttggaagtagtttcaaagttaaagtggcaagaatagctaaagaactatttgtgagtgagttgtgtcatgccca

SEQ ID NO: 318346 - DNA, 120 bp, Artificial Sequence
  ENSG00000135338_42 (sequence is synthesized)
tacctttaaatagttgtatgtatatttccccaaactaggacattctcttagactgtattctaatgtagttttcaacttcaggaaatttaactttgacacaacacatttatctgatctgtc

SEQ ID NO: 318347 - DNA, 120 bp, Artificial Sequence
  ENSG00000135338_43 (sequence is synthesized)
attcatattatgattttgtcagttgatacaatattgttcttgatagaattttcttccctctggtacaagatcatgaattgcatttagttttcatatctcttcagtcttctttaatctaga

SEQ ID NO: 318348 - DNA, 120 bp, Artificial Sequence
  ENSG00000135338_44 (sequence is synthesized)
gatttttgttacatatatatatagagagagagagagggaaggaaaaagagaatgtgtgtgagagattaacatttttgatgaatatagacccatttttaaaaatagaatgttcttcatttt

SEQ ID NO: 318349 - DNA, 120 bp, Artificial Sequence
  ENSG00000135338_45 (sequence is synthesized)
gggtttgtctgaagttttctcttaattagattcaagttaatgcatcttctgtcagaataccacataagtctatctcaggatatgacattgaaaggtttcatttatttttaagtgtagagt

SEQ ID NO: 318350 - DNA, 120 bp, Artificial Sequence
  ENSG00000135338_46 (sequence is synthesized)
ctttgctccatctatccatccatccatccccaccatacagcattatattagttataaaaaataggcaaagaacctttcttccccaccagtatctcaaagaacaaatttttttataaatga

SEQ ID NO: 318351 - DNA, 120 bp, Artificial Sequence
  ENSG00000135338_47 (sequence is synthesized)
gaatcttaaatgcaatacgtattaaatatattattctctaatcccagaatatcaagtatagaaatgaaatttatgatgtcttttctcacttgatttataatacccaaattaaatatggtg

SEQ ID NO: 318352 - DNA, 120 bp, Artificial Sequence
  ENSG00000135338_48 (sequence is synthesized)
gttttatgaaagttgatagttttcctatttaaaaatattgactgttacaaaatcccatttaaaaaatttgatttcatacagaatgggaaagagaagaacttgataaaaagcaaaaagaaa

SEQ ID NO: 318353 - DNA, 120 bp, Artificial Sequence
  ENSG00000135341_0 (sequence is synthesized)
ggcggaaaacgcagcggagccagagccggacacggctgtggccgctgcctctacccccgccacggatcgccgggtagtaggactgcgcggctccaggctgagggtcggtccggaggcggg

SEQ ID NO: 318354 - DNA, 120 bp, Artificial Sequence
  ENSG00000135341_1 (sequence is synthesized)
tgggcgcgggtctcacccggattgtccgggtggcaccgttcccggccccaccgggcgccgcgagggatcatgtctacagcctctgccgcctcctcctcctcctcgtcttcggccggtgag

SEQ ID NO: 318355 - DNA, 120 bp, Artificial Sequence
  ENSG00000135341_2 (sequence is synthesized)
atgatcgaagccccttcccaggtcctcaactttgaagagatcgactacaaggagatcgaggtggaagaggttgttggaagaggagcctttggagttgtttgcaaagctaagtggagagca

SEQ ID NO: 318356 - DNA, 120 bp, Artificial Sequence
  ENSG00000135341_3 (sequence is synthesized)
aaagatgttgctattaaacaaatagaaagtgaatctgagaggaaagcgtttattgtagagcttcggcagttatcccgtgtgaaccatcctaatattgtaaagctttatggagcctgcttg

SEQ ID NO: 318357 - DNA, 120 bp, Artificial Sequence
  ENSG00000135341_4 (sequence is synthesized)
aatccagtgtgtcttgtgatggaatatgctgaagggggctctttatataatgtgctgcatggtgctgaaccattgccatattatactgctgcccacgcaatgagttggtgtttacagtgt

SEQ ID NO: 318358 - DNA, 120 bp, Artificial Sequence
  ENSG00000135341_5 (sequence is synthesized)
tcccaaggagtggcttatcttcacagcatgcaacccaaagcgctaattcacagggacctgaaaccaccaaacttactgctggttgcaggggggacagttctaaaaatttgtgattttggt

SEQ ID NO: 318359 - DNA, 120 bp, Artificial Sequence
  ENSG00000135341_6 (sequence is synthesized)
acagcctgtgacattcagacacacatgaccaataacaaggggagtgctgcttggatggcacctgaagtttttgaaggtagtaattacagtgaaaaatgtgacgtcttcagctggggtatt

SEQ ID NO: 318360 - DNA, 120 bp, Artificial Sequence
  ENSG00000135341_7 (sequence is synthesized)
attctttgggaagtgataacgcgtcggaaaccctttgatgagattggtggcccagctttccgaatcatgtgggctgttcataatggtactcgaccaccactgataaaaaatttacctaag

SEQ ID NO: 318361 - DNA, 120 bp, Artificial Sequence
  ENSG00000135341_8 (sequence is synthesized)
cccattgagagcctgatgactcgttgttggtctaaagatccttcccagcgcccttcaatggaggaaattgtgaaaataatgactcacttgatgcggtactttccaggagcagatgagcca

SEQ ID NO: 318362 - DNA, 120 bp, Artificial Sequence
  ENSG00000135341_9 (sequence is synthesized)
ttacagtatccttgtcagtattcagatgaaggacagagcaactctgccaccagtacaggctcattcatggacattgcttctacaaatacgagtaacaaaagtgacactaatatggagcaa

SEQ ID NO: 318363 - DNA, 120 bp, Artificial Sequence
  ENSG00000135341_10 (sequence is synthesized)
gttcctgccacaaatgatactattaagcgcttagaatcaaaattgttgaaaaatcaggcaaagcaacagagtgaatctggacgtttaagcttgggagcctcccgtgggagcagtgtggag

SEQ ID NO: 318364 - DNA, 120 bp, Artificial Sequence
  ENSG00000135341_11 (sequence is synthesized)
agcttgcccccaacctctgagggcaagaggatgagtgctgacatgtctgaaatagaagctaggatcgccgcaaccacagcctattccaagcctaaacggggccaccgtaaaactgcttca

SEQ ID NO: 318365 - DNA, 120 bp, Artificial Sequence
  ENSG00000135341_12 (sequence is synthesized)
tttggcaacattctggatgtccctgagatcgtcatatcaggcaacggacagccaagacgtagatccatccaagacttgactgtaactggaacagaacctggtcaggtgagcagtaggtca

SEQ ID NO: 318366 - DNA, 120 bp, Artificial Sequence
  ENSG00000135341_13 (sequence is synthesized)
tccagtcccagtgtcagaatgattactacctcaggaccaacctcagaaaagccaactcgaagtcatccatggacccctgatgattccacagataccaatggatcagataactccatccca

SEQ ID NO: 318367 - DNA, 120 bp, Artificial Sequence
  ENSG00000135341_14 (sequence is synthesized)
atggcttatcttacactggatcaccaactacagcctctagcaccgtgcccaaactccaaagaatctatggcagtgtttgaacagcattgtaaaatggcacaagaatatatgaaagttcaa

SEQ ID NO: 318368 - DNA, 120 bp, Artificial Sequence
  ENSG00000135341_15 (sequence is synthesized)
acagaaattgcattgttattacagagaaagcaagaactagttgcagaactggaccaggatgaaaaggaccagcaaaatacatctcgcctggtacaggaacataaaaagcttttagatgaa

SEQ ID NO: 318369 - DNA, 120 bp, Artificial Sequence
  ENSG00000135341_16 (sequence is synthesized)
aacaaaagcctttctacttactaccagcaatgcaaaaaacaactagaggtcatcagaagtcagcagcagaaacgacaaggcacttcatgattctctgggaccgttacattttgaaatatg

SEQ ID NO: 318370 - DNA, 120 bp, Artificial Sequence
  ENSG00000135341_17 (sequence is synthesized)
caaagaaagactttttttttaaggaaaggaaaaccttataatgacgattcatgagtgttagctttttggcgtgttctgaatgccaactgcctatatttgctgcatttttttcattgttta

SEQ ID NO: 318371 - DNA, 120 bp, Artificial Sequence
  ENSG00000135341_18 (sequence is synthesized)
ttttccttttctcatggtggacatacaattttactgtttcattgcataacatggtagcatctgtgacttgaatgagcagcactttgcaacttcaaaacagatgcagtgaactgtggctgt

SEQ ID NO: 318372 - DNA, 120 bp, Artificial Sequence
  ENSG00000135341_19 (sequence is synthesized)
atatgcatgctcattgtgtgaaggctagcctaacagaacaggaggtatcaaactagctgctatgtgcaaacagcgtccattttttcatattagaggtggaacctcaagaatgactttatt

SEQ ID NO: 318373 - DNA, 120 bp, Artificial Sequence
  ENSG00000135341_20 (sequence is synthesized)
ctcaaaatattaataatttttttcccaaaagatggtatataccaagttaaagacagggtattataaatttagagtgattggtggtatattacggaaatacggaacctttagggatagttc

SEQ ID NO: 318374 - DNA, 120 bp, Artificial Sequence
  ENSG00000135341_21 (sequence is synthesized)
cgtgtaagggctttgatgccagcatccttggatcagtactgaactcagttccatccgtaaaatatgtaaaggtaagtggcagctgctctatttaatgaaagcagttttaccggattttgt

SEQ ID NO: 318375 - DNA, 120 bp, Artificial Sequence
  ENSG00000135341_22 (sequence is synthesized)
tagactaaaatttgattgtgatacattgaacaaaatggaactcatttttttttaaggagtaaagatttttaattctgtgattgtgtgtatgtgtgttgaaactgtaaagcttttatgact

SEQ ID NO: 318376 - DNA, 120 bp, Artificial Sequence
  ENSG00000135341_23 (sequence is synthesized)
ctaatattaatctcttaaatgaaattaaaaggcaaaagaacatgattgagcttaaatgatcatttcttcctgcagtgattcttggattgttttctcatgtatttgaaaaaaaaaaaatga

SEQ ID NO: 318377 - DNA, 120 bp, Artificial Sequence
  ENSG00000135341_24 (sequence is synthesized)
agaaaaataatggaaaatggaagtaattactccagctaaaaaaagcttggacttagatttctttttatgataccaaatgagaaataaaccaggcaaatcagaaggaagttaaagaagcaa

SEQ ID NO: 318378 - DNA, 120 bp, Artificial Sequence
  ENSG00000135341_25 (sequence is synthesized)
atataaattcaacaagtgtcctaattatcctggatattggaatatttgattttccttacaatcccgttctagaatgcctgccgcctttcaacactttcaagagaatttcaacacttacag

SEQ ID NO: 318379 - DNA, 120 bp, Artificial Sequence
  ENSG00000135341_26 (sequence is synthesized)
agtatttatattgttaacagtaattttgctaccaaaaccttcagaataactttaataataaaatgacactgaaataatagactatacaaactctatattttttcagttggtgttaaaata

SEQ ID NO: 318380 - DNA, 120 bp, Artificial Sequence
  ENSG00000135341_27 (sequence is synthesized)
agtcacattttgataccagtacaagatgtcttttaaataaggatgtcatcagtctgatttttatagcattaatgttttatgaagaaaaagttcaaaatgaaagcattaattgctgtgatt

SEQ ID NO: 318381 - DNA, 120 bp, Artificial Sequence
  ENSG00000135341_28 (sequence is synthesized)
attagaattctatcatgactgtattgtagtttttgctctatttcagataagcaagatctaagaagttatcaaaactattctttaaaatgctaaagcaggtaactttttcttccattattt

SEQ ID NO: 318382 - DNA, 120 bp, Artificial Sequence
  ENSG00000135341_29 (sequence is synthesized)
tttcctcctaccactgagttttgtaatgaattccttgtgtatacaagcaatacaggtgaatactaaactgttatttttagcttcttcaaaagctattttagaaagcttcctggaaataaa

SEQ ID NO: 318383 - DNA, 120 bp, Artificial Sequence
  ENSG00000135341_30 (sequence is synthesized)
tgtcttctgtcatttaatttaaataaaaggagtgttaattgttcccaaatttgattacctagctgaaacagatattggattcagcatagtaatagtaaaataaaattggcagagaaaata

SEQ ID NO: 318384 - DNA, 120 bp, Artificial Sequence
  ENSG00000135341_31 (sequence is synthesized)
actgtagactaggataaagcatgactcctccatagcattgttgcttgtatgtacatctgtcactccactgaaagggacctagtcactttaaagaggccttttatctcagcacgagatatc

SEQ ID NO: 318385 - DNA, 120 bp, Artificial Sequence
  ENSG00000135341_32 (sequence is synthesized)
caagcgtgaatgctaaggcttgatgtttccattaggatttagcattcgagatttcagattttatttatagtcattgatgtgttttgctgtattataacacatttaagggaaattttatta

SEQ ID NO: 318386 - DNA, 120 bp, Artificial Sequence
  ENSG00000135341_33 (sequence is synthesized)
tggtttttacatgtagtcatttcataaaaatatccagataggtaaatggaagaaaatagtagattttagtcatggtaccaaatgcaagaggctgttgaacagttgcttgtttgtttacag

SEQ ID NO: 318387 - DNA, 120 bp, Artificial Sequence
  ENSG00000135341_34 (sequence is synthesized)
taagttccttgagattttcagtactgtagttgccctggacattgagtacagttcagccttactctgtttttaagtagttgtgttgtcaatttcatgcttttaagtcctgatgatccttgg

SEQ ID NO: 318388 - DNA, 120 bp, Artificial Sequence
  ENSG00000135341_35 (sequence is synthesized)
agatgggagaaaaagataccagggataattaaaatccacagccagtttcatcagtttcctcatccatcctgcaaataaaaatgttaacaaggagccaaacttattcgttctggttttaca

SEQ ID NO: 318389 - DNA, 120 bp, Artificial Sequence
  ENSG00000135341_36 (sequence is synthesized)
atttattttgaccgttttttgggtgaaaattgcaaacagccaagcaagtggctggaatgccccagtctaagaaattcaaaaacaatcactgagtaagccctaattacattaattacattt

SEQ ID NO: 318390 - DNA, 120 bp, Artificial Sequence
  ENSG00000135341_37 (sequence is synthesized)
tactcttgactccaggaaaagaaagcaagcttttatctaatctagagggaagtattcgtgagcaataaaaatcacttttttgagttgaataataatcagttaagaatatttaccgcatag

SEQ ID NO: 318391 - DNA, 120 bp, Artificial Sequence
  ENSG00000135341_38 (sequence is synthesized)
caacacaacatataaagatttgttacaagttgtttacggatgtttgactatttttgctgaagtattttagagtattgaatgtcttctctcttcaagtttctttcatgttcctaatttcag

SEQ ID NO: 318392 - DNA, 120 bp, Artificial Sequence
  ENSG00000135341_39 (sequence is synthesized)
ctcctgtagccagagatcacaggtcttccctgtgaaactttggtttctttctataaatgtgtgtggttttcagcgctcaactcctgtcttcaaatggtagtaagttctacttctacttct

SEQ ID NO: 318393 - DNA, 120 bp, Artificial Sequence
  ENSG00000135341_40 (sequence is synthesized)
gtcattcagaacattttatgtcaaatgatgtaatgcagaaattcttgtgcatatttgtaactgaaggaagctttttagatttatttttgtttttaataaaattcagattcctattctaaa

SEQ ID NO: 318394 - DNA, 120 bp, Artificial Sequence
  ENSG00000135341_41 (sequence is synthesized)
ttttagacagctgatctctcacgttagaagatactgcataaacagctttattcccaaataaaagtgctgagtgaagccattgctcaattcattgttttgctgaggacttatatgtgtaga

SEQ ID NO: 318395 - DNA, 120 bp, Artificial Sequence
  ENSG00000135341_42 (sequence is synthesized)
attctctcataaattgatttttaattaaattaattataaacatagaagtttctaaagcagaattaacacaatagcccatttcaacaagctgtatatttgagaacagagtgacagttatta

SEQ ID NO: 318396 - DNA, 120 bp, Artificial Sequence
  ENSG00000135341_43 (sequence is synthesized)
acatccagtaggaaattaagagttgttgttcacaaataataaattactagattctgacaaagactaatggggattaagtaagcgtgactcaatataacaaatttaagcctaagcatcttc

SEQ ID NO: 318397 - DNA, 120 bp, Artificial Sequence
  ENSG00000135341_44 (sequence is synthesized)
taggccctgaaatgaacaaggtattgctgccagttaaagtcagttgtgtcttacaacctgctagctgtcttgctgtaaaaactgtaacgtaaggcccttgaaatagatgccgtcatcagc

SEQ ID NO: 318398 - DNA, 120 bp, Artificial Sequence
  ENSG00000135341_45 (sequence is synthesized)
cccagcccccaagcattcatctatttaaacacatgacagaagatggtggaagagagttcagcagctattcatgtggtagaagtggttattgtattaggacatactctgttgtaggccagc

SEQ ID NO: 318399 - DNA, 120 bp, Artificial Sequence
  ENSG00000135341_46 (sequence is synthesized)
aacttttgagttaaaacaccgcagctgtttctcttcctttctttacatctttctcttcttttttttttttcttagcaataaactcacttttttttccccacaaacattttgtgtagatcc

SEQ ID NO: 318400 - DNA, 120 bp, Artificial Sequence
  ENSG00000135341_47 (sequence is synthesized)
aaggagcaacaaattccaactttctgctgtagcaattacacgctttttgtctgtttgactagattttagtattttactttttttcttctttttaaaggcaacggacagccaagacgtaga

SEQ ID NO: 318401 - DNA, 120 bp, Artificial Sequence
  ENSG00000135341_48 (sequence is synthesized)
atgactcacttgatgcgggtataatccttcttttgaggggctttggatttaggggaatttaatatgtgctgagttttaatggaattttaaaagggatgttattactatattctgctttat

SEQ ID NO: 318402 - DNA, 120 bp, Artificial Sequence
  ENSG00000135341_49 (sequence is synthesized)
atattgctatgttttctaagtgagaatgggcatttattactcatagtcagaagaggaaacatttcgagagggaaaatctagttctttatcactggaaagatggctagactaggtttctag

SEQ ID NO: 318403 - DNA, 120 bp, Artificial Sequence
  ENSG00000135341_50 (sequence is synthesized)
acttgcttttttctttttgcttacattagtggacaagtatgtttgtctctgggcctgttgcctcatttgtaatgtgggagaaactgaaatagatagtctctaaagccatcacaggacttg

SEQ ID NO: 318404 - DNA, 120 bp, Artificial Sequence
  ENSG00000135341_51 (sequence is synthesized)
gatatattaatattatgacttcaatacatgataaactaaattttacatttttctgataccaattttcatcaagcatttagtcatttatgcaaggcaataggttgcattctcagacacatt

SEQ ID NO: 318405 - DNA, 120 bp, Artificial Sequence
  ENSG00000135341_52 (sequence is synthesized)
tatttgagtgacttttactatttggcctattttcaggtttttatatcccagtaaaaagttaaactttcttctatttagaagaacccttttaaatgattatcaaattttcctagtctgtga

SEQ ID NO: 318406 - DNA, 120 bp, Artificial Sequence
  ENSG00000135341_53 (sequence is synthesized)
atcaagcgcctttagaattatttggaatattttacgcctctggtttttggtacattaacaaaaactgtgaagtggtatcttggctttaaaaagttcaaatatctatgaaagtgcctgaat

SEQ ID NO: 318407 - DNA, 120 bp, Artificial Sequence
  ENSG00000135341_54 (sequence is synthesized)
tttgaaacagtttgttcagtagaagaatcttacaatctccttaaatatagactaagtaatttcctaaatggtaaaacgttgtttattcaatctattgaaaatttcttacgcaaagcagct

SEQ ID NO: 318408 - DNA, 120 bp, Artificial Sequence
  ENSG00000135341_55 (sequence is synthesized)
tgaactaatctactaaaagtttaccatcgtatttggataccagtcatatatagaagcctaggccttaaaggtgtgtgcataagaaaacaacttagtctctgtagtcagattacttaaaac

SEQ ID NO: 318409 - DNA, 120 bp, Artificial Sequence
  ENSG00000135341_56 (sequence is synthesized)
tttaggatatataagttattgcagttgtaattttgcttctctgttccttgtctaatttgaggagaatacgtttcctttttttctctaaattctaacatttttgtccagcagatactttga

SEQ ID NO: 318410 - DNA, 120 bp, Artificial Sequence
  ENSG00000135341_57 (sequence is synthesized)
gtattatgcctccagtttgtagaaagacattcataatctatcctcttaatatttaaaatgttctaacaattattctatggtatactagtctcagtcttcagactaacagtcactggaagt

SEQ ID NO: 318411 - DNA, 120 bp, Artificial Sequence
  ENSG00000135341_58 (sequence is synthesized)
ttacatcactactgtaagaacatgagtatgttttacataattatgagaaatgatactattttatttcatatgtttctctagagaaatatttgctgttttcttcaagactatctagactcc

SEQ ID NO: 318412 - DNA, 120 bp, Artificial Sequence
  ENSG00000135341_59 (sequence is synthesized)
aatgtaagctagattcttaggtaggtgcatggcattgatcaaagttgaaatccaagagtacattattgtaatctttgtaaaataaaaaacttaggcacctacaaatttagtatataactt

SEQ ID NO: 318413 - DNA, 120 bp, Artificial Sequence
  ENSG00000135346_0 (sequence is synthesized)
aaagtgtcagctttcaggatgttatgtgtatggctcaataaaattacgtacaaagtgacagcgtactctcttttcatgggctgaccttgtcgtcaccatcacctgaaaatggctccaaac

SEQ ID NO: 318414 - DNA, 120 bp, Artificial Sequence
  ENSG00000135346_1 (sequence is synthesized)
aaaaatgacctaagggttgaaacaagataagatcaaattgacgtcatggtaaaaattgacgtcatggtaattacaccaagtacccttcaatcattggatggaatttcctgttgatcccag

SEQ ID NO: 318415 - DNA, 120 bp, Artificial Sequence
  ENSG00000135346_2 (sequence is synthesized)
ggcttagatgcaggtggaaacactctgctggtataaaagcaggtgaggacttcattaactgcagttactgagaactcataagacgaagctaaaatccctcttcggatccacagtcaaccg

SEQ ID NO: 318416 - DNA, 120 bp, Artificial Sequence
  ENSG00000135346_3 (sequence is synthesized)
ccctgaacacatcctgcaaaaagcccagagaaaggagcgccatggattactacagaaaatatgcagctatctttctggtcacattgtcggtgtttctgcatgttctccattccgctcctg

SEQ ID NO: 318417 - DNA, 120 bp, Artificial Sequence
  ENSG00000135346_4 (sequence is synthesized)
cagccgggtgccccaatacttcagtgcatgggctgctgcttctctagagcatatcccactccactaaggtccaagaagacgatgttggtccaaaagaacgtcacctcagagtccacttgc

SEQ ID NO: 318418 - DNA, 120 bp, Artificial Sequence
  ENSG00000135346_5 (sequence is synthesized)
tgtgtagctaaatcatataacagggtcacagtaatggggggtttcaaagtggagaaccacacggcgtgccactgcagtacttgttattatcacaaatcttaaatgttttaccaagtgctg

SEQ ID NO: 318419 - DNA, 120 bp, Artificial Sequence
  ENSG00000135346_6 (sequence is synthesized)
tcttgatgactgctgattttctggaatggaaaattaagttgtttagtgtttatggctttgtgagataaaactctccttttccttaccataccactttgacacgcttcaaggatatactgc

SEQ ID NO: 318420 - DNA, 120 bp, Artificial Sequence
  ENSG00000135346_7 (sequence is synthesized)
agctttactgccttcctccttatcctacagtacaatcagcagtctagttcttttcatttggaatgaatacagcatttagcttgttccactgcaaataaagccttttaaatcatcattcaa

SEQ ID NO: 318421 - DNA, 120 bp, Artificial Sequence
  ENSG00000135346_8 (sequence is synthesized)
ccacagtcaaccgccctgaacacatcctgcaaaaagcccagagaaagcacttatgattgaattagaaggaagtctgtaaaatttggctgtgatcatagggagcgccatggattactacag

SEQ ID NO: 318422 - DNA, 120 bp, Artificial Sequence
  ENSG00000135346_9 (sequence is synthesized)
aaaatatgcagctatctttctggtcacattgtcggtgtttctgcatgttctccattccgctcctgatgtgcagggtgcgtgaccaaatttgtgattgcccagaatgcacgctacaggaaa

SEQ ID NO: 318423 - DNA, 120 bp, Artificial Sequence
  ENSG00000135346_10 (sequence is synthesized)
tacatcaataactccattaattacatttctaccaccttttcaaaagtaataagtctttgctgctggattcatatctaggcacttgtagattgtgaacataaaattaaattaggttcagaa

SEQ ID NO: 318424 - DNA, 120 bp, Artificial Sequence
  ENSG00000135346_11 (sequence is synthesized)
aatgtgcagtgaaaatgatatcttacacaaccatttatgcagcagcctatacattttcatcggaaatagattcctttttattcttgagtcttacaagaagaaaatgctccttattcagtt

SEQ ID NO: 318425 - DNA, 120 bp, Artificial Sequence
  ENSG00000135346_12 (sequence is synthesized)
agctcagttattttttacatttctcccggcagatttgagattttaacattgcctttgtagatgaattttcacatcagttaacaagtgagaaaaacaaaaccattttatacagtaaatttg

SEQ ID NO: 318426 - DNA, 120 bp, Artificial Sequence
  ENSG00000135346_13 (sequence is synthesized)
gcagttactgagaactcataagacgaagctaaaatccctcttcggatccacagtcaaccgccctgaacacatcctgcaaaaagcccagagaaagtgttatataaatggaatcatatagta

SEQ ID NO: 318427 - DNA, 120 bp, Artificial Sequence
  ENSG00000135346_14 (sequence is synthesized)
ttcagcctgcattcagcacaattctcttgagatccattcaagctgctgtgtgtatcaatagtgtgttcatttttttgttgctggacagtattccatggtatggctataccatcatttgta

SEQ ID NO: 318428 - DNA, 120 bp, Artificial Sequence
  ENSG00000135346_15 (sequence is synthesized)
cagcctctgtcgagcatttgtacaggtggggaatacatttctacccattaattaaaagagtcaattgtcttgtgggtatagactggatttattcagaatgaggagaataggggtagaggt

SEQ ID NO: 318429 - DNA, 120 bp, Artificial Sequence
  ENSG00000135346_16 (sequence is synthesized)
gacaaggggcaggttgggagaaagtacagcttacttgtgctaaaaatatttcctaaaaaggagactgtgcaaatgtagtatgcatctacttatttcagcagaatgcaaacaattttatgt

SEQ ID NO: 318430 - DNA, 120 bp, Artificial Sequence
  ENSG00000135346_17 (sequence is synthesized)
aatattcttcaattttgtctctatctatctatctatcatctaatctataatatgtttttttttccttcccctttaggtcacagtaatggggggtttcaaagtggagaaccacacggcgtg

SEQ ID NO: 318431 - DNA, 120 bp, Artificial Sequence
  ENSG00000135355_0 (sequence is synthesized)
atgggggactggaacttattgggtggcatcctagaggaagttcactcccactcaaccatagtggggaaaatctggctgaccatcctcttcatcttccgaatgctggtacttcgtgtggct

SEQ ID NO: 318432 - DNA, 120 bp, Artificial Sequence
  ENSG00000135355_1 (sequence is synthesized)
gctgaggatgtctgggatgatgaacagtcagcatttgcctgcaacacccggcagccaggttgcaacaatatctgttatgatgatgcattccctatctctttgatcaggttctgggtttta

SEQ ID NO: 318433 - DNA, 120 bp, Artificial Sequence
  ENSG00000135355_2 (sequence is synthesized)
cagatcatctttgtgtcttctccttctttggtctatatgggccatgcactttataggctcagggcctttgagaaagacaggcagaggaaaaagtcacaccttagagcccagatggagaat

SEQ ID NO: 318434 - DNA, 120 bp, Artificial Sequence
  ENSG00000135355_3 (sequence is synthesized)
ccagatcttgacttggaggagcagcaaagaatagatagggaactgaggaggttagaggagcagaagaggatccataaagtccctctgaaaggatgtctgctgcgtacttatgtcttacac

SEQ ID NO: 318435 - DNA, 120 bp, Artificial Sequence
  ENSG00000135355_4 (sequence is synthesized)
atcttgaccagatctgtgctggaagtaggattcatgataggccaatatattctctatgggtttcaaatgcaccccctttacaaatgcactcaacctccttgccccaatgcggtggattgc

SEQ ID NO: 318436 - DNA, 120 bp, Artificial Sequence
  ENSG00000135355_5 (sequence is synthesized)
tttgtatccaggcccactgagaagacaattttcatgctttttatgcacagcattgcagccatttccttgttactcaatatactggaaatatttcatctaggcatcagaaaaattatgagg

SEQ ID NO: 318437 - DNA, 120 bp, Artificial Sequence
  ENSG00000135355_6 (sequence is synthesized)
gatttgctcttcattgcctgaaagaatctctccacttcaagctaacaatcaacagcaagtcattcgagttaatgtgccaaagtctaaaaccatgtggcaaatcccacagccaaggcaact

SEQ ID NO: 318438 - DNA, 120 bp, Artificial Sequence
  ENSG00000135355_7 (sequence is synthesized)
tgaagtagacccttccaatgggaaaaaggactggtctgagaaggatcagcatagcggacagctccatgttcacagcccgtgtccctgggctggcagtgctggaaatcagcacctgggaca

SEQ ID NO: 318439 - DNA, 120 bp, Artificial Sequence
  ENSG00000135355_8 (sequence is synthesized)
gcaatcagaccattcctcatttggcctgcagaatacaatgtctcagtcctggctaggtacaactacggctcctagaaactgtccatcctttgcagtaggaacctgggagcagtcccagga

SEQ ID NO: 318440 - DNA, 120 bp, Artificial Sequence
  ENSG00000135355_9 (sequence is synthesized)
cccagaaccctcaggtgagcctctcacagatcttcatagtcactgcagagacagtgaaggcagcatgagagagagtggggtctggatagacagatctcgcccaggcagtcgcaaggccag

SEQ ID NO: 318441 - DNA, 120 bp, Artificial Sequence
  ENSG00000135355_10 (sequence is synthesized)
ctttctgtccagattgttgtctgaaaagcgacatctgcacagtgactcaggaagctctggttctcggaatagctcctgcttggattttcctcactgggaaaacagcccctcacctctgcc

SEQ ID NO: 318442 - DNA, 120 bp, Artificial Sequence
  ENSG00000135355_11 (sequence is synthesized)
ttcagtcactgggcacagaacatcaatggtaagacaggcagccctaccgatcatggaactatcacaagagctgttccattctggatgctttctttttcctttctttcttcctggggtgtg

SEQ ID NO: 318443 - DNA, 120 bp, Artificial Sequence
  ENSG00000135355_12 (sequence is synthesized)
tatgtatgtttgtgttgacagagaggcagatggagggggagattatttatggagagataaaattattcattcgatacattcagttaaattcaattcataaaatagacttagaaaaatctt

SEQ ID NO: 318444 - DNA, 87 bp, Artificial Sequence
  ENSG00000135355_13 (sequence is synthesized)
cgcatgtaatcccttgtcaacagatcaagaccatcctggccaacatgaacatgcttctagaactttcatctattatgaaaaaataat

SEQ ID NO: 318445 - DNA, 120 bp, Artificial Sequence
  ENSG00000135355_14 (sequence is synthesized)
aacatgcttctagaactttcatctattatgaaaaaataatgcatcaggagcagctggtacctgcaggaggagagttgtgcctttgtcagctcaaactgcaggaagcgctttgggacccac

SEQ ID NO: 318446 - DNA, 120 bp, Artificial Sequence
  ENSG00000135355_15 (sequence is synthesized)
accctctacagacacccaccaggcgaagggccctgttcagggtgctcccagcctgggctcacttccacaggagacccttcccttatgggggctggggacaggttctcaccctgcctgggc

SEQ ID NO: 318447 - DNA, 120 bp, Artificial Sequence
  ENSG00000135355_16 (sequence is synthesized)
ggagctgtacaccgtcagaggagatctagggacaagagcggctctgcctcgaggaggaggattggtatatgtcacctcttccccagtcccagcacagcctagtgggatattttgcaagac

SEQ ID NO: 318448 - DNA, 120 bp, Artificial Sequence
  ENSG00000135355_17 (sequence is synthesized)
agtaccccagctctgcagtggcagcaacagtagcagttggccccttaaacatgggtccagagcaggactggagctttgtgctcagcctgaggtcagatgtgcttcctgtctataaaggag

SEQ ID NO: 318449 - DNA, 120 bp, Artificial Sequence
  ENSG00000135355_18 (sequence is synthesized)
aggttgacaagaaacttttcaggcttttcctctcaccagttcatttcttgaggatgaaccagttggatttttaattcatcaatggcatggaaataaaatattgattaaaacactggcaaa

SEQ ID NO: 318450 - DNA, 120 bp, Artificial Sequence
  ENSG00000135362_0 (sequence is synthesized)
ggggcagctgggccgggggcgggggtcggctgcagatctcccgttgtgtgagagaaacgcaagcacggagctcccttgacctgctgcatcctcctcggcaattttttttttttaagtcaa

SEQ ID NO: 318451 - DNA, 120 bp, Artificial Sequence
  ENSG00000135362_1 (sequence is synthesized)
aaagcttggatttcctgaaattgttgaactggatgcgcgcggagtctggggcggaggcgagcggcgggtgtgcgcgactcggggtgattcacgccggggaccccaaggaggtgttggcta

SEQ ID NO: 318452 - DNA, 120 bp, Artificial Sequence
  ENSG00000135362_2 (sequence is synthesized)
cgtttgtggttttaagaaagcctgagggcctgaaggcagcccctggagaagccctttccgagggcattcggaaccttctggtcctagaggtgaagctgaactgtcaccaggacttatgac

SEQ ID NO: 318453 - DNA, 120 bp, Artificial Sequence
  ENSG00000135362_3 (sequence is synthesized)
ccgcggcttcgctcccattctgcccgtcgagttccacaagatgggctccttccgcaggcctagaccgcgcttcatgagctcccccgtgctcagcgaccttccccgattccaagcagctcg

SEQ ID NO: 318454 - DNA, 120 bp, Artificial Sequence
  ENSG00000135362_4 (sequence is synthesized)
gcaggctctgcagctgagctccagctcagcctggaacagcgttcagactgctgtgatcaacgttttcaaagggggtggcttgcaaagcaacgagctctatgccctgaacgaaaacatcag

SEQ ID NO: 318455 - DNA, 120 bp, Artificial Sequence
  ENSG00000135362_5 (sequence is synthesized)
gcggctgttgaagagtgaacttggatcattcattacagactattttcagaaccagcttcttgcaaaaggactgttctttgtggaggagaagatcaagctgtgtgaaggtgaaaatcgcat

SEQ ID NO: 318456 - DNA, 120 bp, Artificial Sequence
  ENSG00000135362_6 (sequence is synthesized)
tgaggttctggctgaagtctgggaccacttcttcactgagactctccctaccctgcaggcaatattttatccagttcagggccaggagctgactatccgccagatctccctgctgggctt

SEQ ID NO: 318457 - DNA, 120 bp, Artificial Sequence
  ENSG00000135362_7 (sequence is synthesized)
ccgagacctagtcttgctgaaggtgaagctgggtgacctgctgctgctggcccagtccaagctgccctcgtccattgtccagatgttgctcatcctgcagagtgttcacgagcccacagg

SEQ ID NO: 318458 - DNA, 120 bp, Artificial Sequence
  ENSG00000135362_8 (sequence is synthesized)
cccaagtgagagttatttgcaactggaggagctggtgaagcaagtggtttctcctttcctcggcatcagcggggaccgtagcttctcaggccccacgtacacgctggccaggcggcactc

SEQ ID NO: 318459 - DNA, 120 bp, Artificial Sequence
  ENSG00000135362_9 (sequence is synthesized)
cagggtccggcccaaggtgactgtcctgaactatgcctccccgataaccgcagtcagccggccactgaatgagatggtcttgaccccactgacagagcaggagggggaagcctacctgga

SEQ ID NO: 318460 - DNA, 120 bp, Artificial Sequence
  ENSG00000135362_10 (sequence is synthesized)
gaagtgtggcagcgtgcggcggcacacggtggccaatgcccactcggacatccagctgctggccatggccaccatgatgcactcgggcctgggggaggaggccagcagtgagaacaagtg

SEQ ID NO: 318461 - DNA, 120 bp, Artificial Sequence
  ENSG00000135362_11 (sequence is synthesized)
cctgctcctgccacccagcttccccccgccccaccggcagtgctccagtgagcccaacatcactgacaaccctgacggactggaggagggggccaggggcagccaggagggctcggagct

SEQ ID NO: 318462 - DNA, 120 bp, Artificial Sequence
  ENSG00000135362_12 (sequence is synthesized)
gaactgtgcttccctcagctgagtcgccacccctgggcctttccatctcctgttttgcaaccaggatgaggacccctccatctccgtggattactgaggggggctcttgctttatgcgat

SEQ ID NO: 318463 - DNA, 120 bp, Artificial Sequence
  ENSG00000135362_13 (sequence is synthesized)
gctgccttatttcctttagggtactgtcctggtcaaaatgacctaaggggaaaccgttgttgtaaacctctttattttggtgactgtgaccacttctttgtagccaccaattgtagtgac

SEQ ID NO: 318464 - DNA, 120 bp, Artificial Sequence
  ENSG00000135362_14 (sequence is synthesized)
cagttgcctaatggtcactttctgactccagccttgccagcctgactcagatcctcatctctgggcctttctccctccgatgttggactgcctgatgctcccaatgacatatccaatgct

SEQ ID NO: 318465 - DNA, 120 bp, Artificial Sequence
  ENSG00000135362_15 (sequence is synthesized)
cctggcatttctggagcaggaggttgtcaggacaacacatataaccaccaaggatgtgttggcctttggagttcccctttaggttcctagtgatgtggaggtttatgggtgaaaaattag

SEQ ID NO: 318466 - DNA, 120 bp, Artificial Sequence
  ENSG00000135362_16 (sequence is synthesized)
ttttagtttcagaattgctgggaaagttaccccactggtgggtgaggatctatcctcaacctacatccagatcctatgtgctgcttgcacagaggcctttggcttttgacccaggagggc

SEQ ID NO: 318467 - DNA, 120 bp, Artificial Sequence
  ENSG00000135362_17 (sequence is synthesized)
cgcgaggctggagctgccctgtctttcattgagccttagcatttccctctcaggcttcctctcaagctcaaggaactcacccccagataagaagctggtgcctcttgtctctctcatttc

SEQ ID NO: 318468 - DNA, 120 bp, Artificial Sequence
  ENSG00000135362_18 (sequence is synthesized)
agaaacggactttctcatcatgctttcctatggtgggtatgaggggccagctgataccaaccaactggcctgtatctatctatctggatttgacttgaatttttaaaatgtgtatcgttt

SEQ ID NO: 318469 - DNA, 120 bp, Artificial Sequence
  ENSG00000135362_19 (sequence is synthesized)
aaaaaaaaaaatgtttgcaaattttgcacataggatcttgcactgttcattttcagtggggtgagtcttcacactaaaaacacaagcagagctcctgggaaaagagactggaagtggttc

SEQ ID NO: 318470 - DNA, 120 bp, Artificial Sequence
  ENSG00000135362_20 (sequence is synthesized)
aggataaagagatccatggtgggcagggctgttaggtcacagagctctagaagcagctggacttgaacccacaatggcttgtgtaaattcgtaaatttcatggtttctaggaaaagctgc

SEQ ID NO: 318471 - DNA, 120 bp, Artificial Sequence
  ENSG00000135362_21 (sequence is synthesized)
attggggtggggagacccagtttgcctcataggcagaggattctccaggaagcatggaaaatggaatgtttccatgctttacagtgctgggagagaggggagatgtgggcaggacctttt

SEQ ID NO: 318472 - DNA, 120 bp, Artificial Sequence
  ENSG00000135362_22 (sequence is synthesized)
ggaaggatgtttattctctgtggttaaagaaatgctgagaatttctagcatgtgaagcacttgggggcagcaggccttggcacggtgctgcatccttctactgctccctccaggtctggg

SEQ ID NO: 318473 - DNA, 120 bp, Artificial Sequence
  ENSG00000135362_23 (sequence is synthesized)
ggcttttatccaccttgaatccctatcctcctctttgtagttgtcggtctcactgataacagctccagaaaaaaagacaaggctccccctctgacccttcctgttggtatttatgaaatc

SEQ ID NO: 318474 - DNA, 120 bp, Artificial Sequence
  ENSG00000135362_24 (sequence is synthesized)
tcaaagagatgagccaccttggcttccaatatggcaagagggtgctgggagaaggtgaagatcagtctaagctgccacggtgatgagaccttctcattatgtaactcttgatggcatttc

SEQ ID NO: 318475 - DNA, 120 bp, Artificial Sequence
  ENSG00000135362_25 (sequence is synthesized)
ccttctgagtgaagatttgaaatatgattgattagaattgtgctcttgatggctgggaatttagaaattttattttaagagttatttcattttcatcctaagagtgatgggagagaaatg

SEQ ID NO: 318476 - DNA, 120 bp, Artificial Sequence
  ENSG00000135362_26 (sequence is synthesized)
tccaaaagagatctgctgatctgctgagagtttcaaacaaacaaaaaaataatctctatgtatgtgttggataaagtctacagactgactaacatgcattagcaaatggagcatcagtag

SEQ ID NO: 318477 - DNA, 120 bp, Artificial Sequence
  ENSG00000135362_27 (sequence is synthesized)
gtagcaacatgataatttatgtaactgatagcttctgtccttattagtacacttaacatttgagactagtatttattgatccaggcaaagtaattaattaatcatgcttgggcttacttt

SEQ ID NO: 318478 - DNA, 120 bp, Artificial Sequence
  ENSG00000135362_28 (sequence is synthesized)
ttcagtttgtaaggttaagcatatgtgcatgcgtgcgtgtgtatataaatgccttttccatatcttaaatgtccctgatgaggagagcagtcatcaattaaatatataagctcttaaaat

SEQ ID NO: 318479 - DNA, 120 bp, Artificial Sequence
  ENSG00000135362_29 (sequence is synthesized)
gagaatggaagtgtcagtatagacccagtgtacttaagtgctgatgactgttagccagtttacaactttttaccatcgatgtacacatttgatatttgtgcagtaaatagactgtaccta

SEQ ID NO: 318480 - DNA, 120 bp, Artificial Sequence
  ENSG00000135362_30 (sequence is synthesized)
taaaaaattttattgatgtttatggtcatgttagctatcagagagctattggagtgagagctgaggtgtccttaaccactttttctctcctagattcattttcattatttatgctaggat

SEQ ID NO: 318481 - DNA, 120 bp, Artificial Sequence
  ENSG00000135362_31 (sequence is synthesized)
tttcttatggttgacatttgatgacaggaagcaatcatgactcttcaagtgagctcacagaaacctttcatgttgtctgtttccaaaatggattcaataaacaacattttgtccatgtta

SEQ ID NO: 318482 - DNA, 120 bp, Artificial Sequence
  ENSG00000135362_32 (sequence is synthesized)
agtcttcaggccccaggtcagtgagtggcaagccaggcccagagatctctgcgcccgttggaacatccccttctcgggaggctggaaggccatggtcattcacctctccccagcaaggtg

SEQ ID NO: 318483 - DNA, 120 bp, Artificial Sequence
  ENSG00000135362_33 (sequence is synthesized)
tttccctttaggccactcttgtcaatgctcccaacggcctcctccttcctccctgtgctgctctggggaggtctcttggctctgcccggcagtaggaacagtggagacaaagacagcttc

SEQ ID NO: 318484 - DNA, 120 bp, Artificial Sequence
  ENSG00000135362_34 (sequence is synthesized)
acattctcttcagctgtcaggattgagagtggcggattcgggaggagaaaaatgagtcagtggcaactcgttgtgtgtgactgtgcagtttatctgagtccgcgggagccatagtcgtag

SEQ ID NO: 318485 - DNA, 120 bp, Artificial Sequence
  ENSG00000135362_35 (sequence is synthesized)
gctgaaaatgacccttatttaagagaggctgagtgcgtggttgtggctgcccaggcgctttgctggactaggcagcctgggaacactaactgagaagtggacggggacaggagccagcct

SEQ ID NO: 318486 - DNA, 120 bp, Artificial Sequence
  ENSG00000135362_36 (sequence is synthesized)
accagagactcctgccttccattggcgaaccggtcaccggctccgtcctgaaaacagaacttgctccgagtgataagaggcaattcggacataaagagaaacatcaagggcatgagtgca

SEQ ID NO: 318487 - DNA, 120 bp, Artificial Sequence
  ENSG00000135362_37 (sequence is synthesized)
cagaggaaagaccatgtgacggcatggctacaaggcagccatctgtaaaccaaggagagagaccccaaaggaaatcaaccctgctgacaccttgatcgtggacttctagcctccagaact

SEQ ID NO: 318488 - DNA, 120 bp, Artificial Sequence
  ENSG00000135362_38 (sequence is synthesized)
cgtaagatgagagaggagggaaacgtgtcaccagcccggctgtgggagctccgcggccgaagcgtttgttgactcgcgctggagaggaaccgaggctggacgggaccccatctgagggca

SEQ ID NO: 318489 - DNA, 120 bp, Artificial Sequence
  ENSG00000135362_39 (sequence is synthesized)
gagctgggggaggagggagggacggagggagggagagctgggcagagcgcgacggggagaaccatccaggtcgctcatttctctccggtgagaaaacttcctcgggaagaccggaaactt

SEQ ID NO: 318490 - DNA, 120 bp, Artificial Sequence
  ENSG00000135362_40 (sequence is synthesized)
gggagatcaaaagcctgggaaccaagtccccaacaaaggacccgaggacggccttatccaggctttgcatctctctgggggtttgaaaggagctgctcttgctggctccggtgcagggga

SEQ ID NO: 318491 - DNA, 120 bp, Artificial Sequence
  ENSG00000135362_41 (sequence is synthesized)
agttgctgaaggggaggaggagtgagatggggtgaagcgcgcggagtctggggcggaggcgagcggcgggtgtgcgcgactcggggtgattcacgccggggaccccaaggagaagaggca

SEQ ID NO: 318492 - DNA, 120 bp, Artificial Sequence
  ENSG00000135362_42 (sequence is synthesized)
gaactgaaagggcttcagagttgcaaggaagctgatggcaaggggagctactggacacagacctcgtcctgggtatggtgctgggggtgctggatgctggaccatggagcagacactgct

SEQ ID NO: 318493 - DNA, 120 bp, Artificial Sequence
  ENSG00000135362_43 (sequence is synthesized)
attttccttgaggccgccgcccggggtgggaccaggctgtgtgcttgctaactgtgcttcaggaatccgctctgggatgccttcctgtctggcaaaaggggttacccccagttctaccca

SEQ ID NO: 318494 - DNA, 120 bp, Artificial Sequence
  ENSG00000135362_44 (sequence is synthesized)
ggtgattcacgccggggaccccaaggagagctagacccaatacagaattgatttgaaaaacagtgtgtgagttcctctgaaagatccttacaatgtctaatgttcatcattaaagtttat

SEQ ID NO: 318495 - DNA, 120 bp, Artificial Sequence
  ENSG00000135362_45 (sequence is synthesized)
ggcctttgtagattaatcctcggatttcatgtacgggagagagaaagagagaaaaaaagcaaagatgtctttgaggagaccacatcgactgctgccatcattttggagaactgtttcatc

SEQ ID NO: 318496 - DNA, 120 bp, Artificial Sequence
  ENSG00000135362_46 (sequence is synthesized)
gggcttcagagttgcaaggaagctgatggcaaggggagctactggacacagacctcgtcctggtctccaggtcacccgcagggtaggtgaccagagccagagaagcggtttattcccggg

SEQ ID NO: 318497 - DNA, 120 bp, Artificial Sequence
  ENSG00000135362_47 (sequence is synthesized)
gaaggaatttgaaaggtctagagtgcagccagtcaagaagatttctagaaattgggcccaaagtgtctttggatgatgaaatgaggatgacagtggcaatgttatcgtcatggttatttc

SEQ ID NO: 318498 - DNA, 120 bp, Artificial Sequence
  ENSG00000135362_48 (sequence is synthesized)
cttgagcatggcatggaagatgaggtgttctagtgaactttctcactggaccaaactgttgtgataaatcctttgaagttatatcaatccatccagtttcaacttccagagcttcgggaa

SEQ ID NO: 318499 - DNA, 120 bp, Artificial Sequence
  ENSG00000135362_49 (sequence is synthesized)
ggaacctggcactagaatgtgagcaaaaaagaggcaattctgctgacttcagagaagcttccttgcagaaggaatctgaaacacgagcaactctctggggaggatgagaagctcttctac

SEQ ID NO: 318500 - DNA, 120 bp, Artificial Sequence
  ENSG00000135362_50 (sequence is synthesized)
acatttattgtgcccaagacttttgtgggctctctgccaggaaagggcaggtcattgaatgggccctgggaaaaatgatgtctgagcttctctccagttctcagagaaagaagaggcaat

SEQ ID NO: 318501 - DNA, 120 bp, Artificial Sequence
  ENSG00000135363_0 (sequence is synthesized)
ccgggcgggcgcacaccatccccgcgggcggcgcggagccggcgacagcgcgcgagagggaccgggcggtggcggcggcgggaccgggatggaaggttaagtcctgagcagcagcagcag

SEQ ID NO: 318502 - DNA, 120 bp, Artificial Sequence
  ENSG00000135363_1 (sequence is synthesized)
cagcagcagcagctgcagccgcctggagccaggctgcgcgccccggcccccgcctcggccgcggcgcgcccgcagcccggtgattcgctctctctctttggcgtttgaagggagcgcggt

SEQ ID NO: 318503 - DNA, 120 bp, Artificial Sequence
  ENSG00000135363_2 (sequence is synthesized)
tttggcgtttgaagggagcgcggtgactgtccttgagcgcggaggggcgagctcgccggcggagcgccggagcaagcggaggcgcaggagcggcggcgacggcggcggcggcggcggcgc

SEQ ID NO: 318504 - DNA, 120 bp, Artificial Sequence
  ENSG00000135363_3 (sequence is synthesized)
cccggcagccggccagccccgcgccacaaagggagcgcccccgccgcccggcaccccgcctccctccccaatgtcctcggccatcgaaaggaagagcctggacccttcagaggaaccagt

SEQ ID NO: 318505 - DNA, 120 bp, Artificial Sequence
  ENSG00000135363_4 (sequence is synthesized)
ggatgaggtgctgcagatccccccatccctgctgacatgcggcggctgccagcagaacattggggaccgctacttcctgaaggccatcgaccagtactggcacgaggactgcctgagctg

SEQ ID NO: 318506 - DNA, 120 bp, Artificial Sequence
  ENSG00000135363_5 (sequence is synthesized)
cgacctctgtggctgccggctgggtgaggtggggcggcgcctctactacaaactgggccggaagctctgccggagagactatctcaggctttttgggcaagacggtctctgcgcatcctg

SEQ ID NO: 318507 - DNA, 120 bp, Artificial Sequence
  ENSG00000135363_6 (sequence is synthesized)
tgacaagcggattcgtgcctatgagatgacaatgcgggtgaaagacaaagtgtatcacctggaatgtttcaaatgcgccgcctgtcagaagcatttctgtgtaggtgacagatacctcct

SEQ ID NO: 318508 - DNA, 120 bp, Artificial Sequence
  ENSG00000135363_7 (sequence is synthesized)
tctgacatagtgtgcgaacaggacatctacgagtggactaagatcaatgggatgatataggcccgagtccccgggcatctttggggaggtgttcactgaagacgccgtctccatggcatc

SEQ ID NO: 318509 - DNA, 120 bp, Artificial Sequence
  ENSG00000135363_8 (sequence is synthesized)
ttcgtcttcactcttaggcactttgggggtttgagggtggggtaagggatttcttaggggatggtagacctttattgggtatcaagacatagcatccaagtggcataattcaggggctga

SEQ ID NO: 318510 - DNA, 120 bp, Artificial Sequence
  ENSG00000135363_9 (sequence is synthesized)
cacttcaaggtgacagaaggaccagcccttgagggagaacttatggccacagcccatccatagtaactgacatgattagcagaagaaaggaacatttaggggcaagcaggcgctgtgcta

SEQ ID NO: 318511 - DNA, 120 bp, Artificial Sequence
  ENSG00000135363_10 (sequence is synthesized)
tcatgatggaatttcatatctacagatagagagttgttgtgtacagacttgttgtgactttgacgcttgcgaactagagatgtgcaattgatttcttttcttcctggctttttaactccc

SEQ ID NO: 318512 - DNA, 120 bp, Artificial Sequence
  ENSG00000135363_11 (sequence is synthesized)
ctgtttcaatcactgtcctccacacaagggaaggacagaaaggagagtggccattctttttttcttggcccccttcccaaggccttaagctttggacccaaggaaaactgcatggagacg

SEQ ID NO: 318513 - DNA, 120 bp, Artificial Sequence
  ENSG00000135363_12 (sequence is synthesized)
catttcggttgagaatggaaaccacaacttttaaccaaacaattatttaaagcaatgctgatgaatcactgtttttagacaccttcattttgaggggaggagttccacagattgtttcta

SEQ ID NO: 318514 - DNA, 120 bp, Artificial Sequence
  ENSG00000135363_13 (sequence is synthesized)
tacaaatataaatcttaaaaagttgttcaactattttattatcctagattatatcaaagtatttgtcgtgtgtagaaaaaaaaacagctctgcaggcttaataaaaatgacagactgaaa

SEQ ID NO: 318515 - DNA, 120 bp, Artificial Sequence
  ENSG00000135363_14 (sequence is synthesized)
tgcttgctcgagctgttcgtgggttactttctgccttagttaaaccaaaagggaaaggcggaagaggggaagccctgaagaatgatttagtggttgcccagcctcctttccaaggagagg

SEQ ID NO: 318516 - DNA, 120 bp, Artificial Sequence
  ENSG00000135363_15 (sequence is synthesized)
tgttcgctgagcggctctccccgtccccgacactggcccctttaagaagccaagaaaaaggaaatgaaaccagagacagagggaagctgagcgaaaatagaccttcccgagagaggagga

SEQ ID NO: 318517 - DNA, 120 bp, Artificial Sequence
  ENSG00000135363_16 (sequence is synthesized)
aaaccctggatttgcaacatcctcaaagaacagcaacgggccttgagcagaattgagaaggaaatacccccacctgccctcagccgttaagtgggctttgctattcacaagggcctctgg

SEQ ID NO: 318518 - DNA, 120 bp, Artificial Sequence
  ENSG00000135363_17 (sequence is synthesized)
gtgtcctggcagagaggggagatggcacaggcaccaggtgctagggtgccagggcctcccgagaaggaacaggtgcaaagcaggcaattagcccagaaggtatccgtggggcaggcagcc

SEQ ID NO: 318519 - DNA, 120 bp, Artificial Sequence
  ENSG00000135363_18 (sequence is synthesized)
tagatctgatgggggaagccaccaggattacatcatctgctgtaacaactgctctgaaaagaagatatttttcaacctgaacttgcagtagctagtggagaggcaggaaaaaggaaatga

SEQ ID NO: 318520 - DNA, 120 bp, Artificial Sequence
  ENSG00000135363_19 (sequence is synthesized)
agagtgggaaaaagcagaaggagaccagaggtgcccaggtagtgctgggcatgggcaggggcacagtgccacctgcaattgcctttgatgcctcttggtgccctgtgtttacttcttaga

SEQ ID NO: 318521 - DNA, 120 bp, Artificial Sequence
  ENSG00000135363_20 (sequence is synthesized)
catctagggagtaaggtctggctctttcccgtcttaacccaaggttggttgggactctgcagtctggccaagggatgtgttgtcctgtcccttctcccttaggtcactgaaaggcagtca

SEQ ID NO: 318522 - DNA, 120 bp, Artificial Sequence
  ENSG00000135363_21 (sequence is synthesized)
gagcccgcagcccggagcccgcagcctggggcccgcagcccgtagcccgcagcccgcagagccgcgctgtccggggcatcccagtgcacggcgtccgtggacctgggacctcgaacctgg

SEQ ID NO: 318523 - DNA, 120 bp, Artificial Sequence
  ENSG00000135363_22 (sequence is synthesized)
gagagagacgcacggtcccctccccgcccctaggccgccgccccctctctgccctcggcggcgagcagcgcgccgcgacccgggccgaagggagcgcggtgactgtccttgagcgcggag

SEQ ID NO: 318524 - DNA, 120 bp, Artificial Sequence
  ENSG00000135365_0 (sequence is synthesized)
gtgagagagagaggagaggagaggaggaggaggaggagggagaagggaacaacctaccatcttaacacactaatatctaaaaagtgcgagaggcccagagcagcagcagaagcagcagca

SEQ ID NO: 318525 - DNA, 120 bp, Artificial Sequence
  ENSG00000135365_1 (sequence is synthesized)
gcagctccagcttcttccctccctccccatgaagaagagttccctcctcctcctcctcctgcttctcctgctcagagttcctgcctccagctgccaggggggacagccagccagcagcag

SEQ ID NO: 318526 - DNA, 120 bp, Artificial Sequence
  ENSG00000135365_2 (sequence is synthesized)
gaggggggctagagagctgaaggagagccagtttccccaaaattgctgcagtgagaagaggagtttgttactttaaacagaggctgaagaaactatagaattagcagagaaagtggagaa

SEQ ID NO: 318527 - DNA, 120 bp, Artificial Sequence
  ENSG00000135365_3 (sequence is synthesized)
ggtagaggatggagttgcagactctacaggaggctcttaaagtggaaattcaggttcaccagaaactggttgctcaaatgaagcaggatccacagaatgctgacttaaagaaacagcttc

SEQ ID NO: 318528 - DNA, 120 bp, Artificial Sequence
  ENSG00000135365_4 (sequence is synthesized)
atgaactccaagccaaaatcacagctttgagtgagaaacagaaaagagtagttgaacagctacggaagaacctgatagtaaagcaagaacaaccggacaagttccaaatacagccattgc

SEQ ID NO: 318529 - DNA, 120 bp, Artificial Sequence
  ENSG00000135365_5 (sequence is synthesized)
cacaatctgaaaacaaactacaaacagcacagcagcaaccactacagcaactacaacaacagcagcagtaccaccaccaccacgcccagcagtcagctgcagcctctcccaacctgactg

SEQ ID NO: 318530 - DNA, 120 bp, Artificial Sequence
  ENSG00000135365_6 (sequence is synthesized)
cttcacagaagactgtaactacagcttctatgattaccacaaagacactacctctcgtcttgaaagcagcaactgcgaccatgcctgcctctgtggtgggccagagacctaccattgcta

SEQ ID NO: 318531 - DNA, 120 bp, Artificial Sequence
  ENSG00000135365_7 (sequence is synthesized)
tggtgaccgccatcaacagtcagaaggctgtgctcagcactgatgtgcagaacacaccagtcaacctccagacgtctagtaaggtcactgggcctggggcagaggctgtccaaattgtgg

SEQ ID NO: 318532 - DNA, 120 bp, Artificial Sequence
  ENSG00000135365_8 (sequence is synthesized)
caaaaaacacagtcactctgcaggttcaggcaacacctcctcagcccatcaaagtaccacagtttatcccccctcctagactcactccacgtccaaactttcttccacaggttcgaccca

SEQ ID NO: 318533 - DNA, 120 bp, Artificial Sequence
  ENSG00000135365_9 (sequence is synthesized)
agcctgtggcccagaataacattcctattgccccagcaccacctcccatgctcgcagctcctcagcttatccagaggcccgtcatgctgaccaagttcacccccacaacccttcccacat

SEQ ID NO: 318534 - DNA, 120 bp, Artificial Sequence
  ENSG00000135365_10 (sequence is synthesized)
cccagaattccatccaccccgtccgtgtcgtcaatgggcagactgcaaccatagccaaaacgttccccatggcccagctcaccagcattgtgatagctactccagggaccagactcgctg

SEQ ID NO: 318535 - DNA, 120 bp, Artificial Sequence
  ENSG00000135365_11 (sequence is synthesized)
gacctcaaactgtacagcttagcaagccaagtcttgaaaaacagacagttaaatctcacacagaaacagatgagaaacaaacagagagccgcaccatcaccccacctgctgcacccaaac

SEQ ID NO: 318536 - DNA, 120 bp, Artificial Sequence
  ENSG00000135365_12 (sequence is synthesized)
caaaacgggaggagaaccctcagaaacttgccttcatggtgtctctagggttggtaacacatgaccatctagaagaaatccaaagcaagaggcaagagcgaaaaagaagaacaacagcaa

SEQ ID NO: 318537 - DNA, 120 bp, Artificial Sequence
  ENSG00000135365_13 (sequence is synthesized)
atccggtctacagtggagcagtctttgagccagagcgtaagaagagtgcagtgacatacctaaacagcacaatgcaccctgggacccggaagagagccaatgaggaacactggccaaagg

SEQ ID NO: 318538 - DNA, 120 bp, Artificial Sequence
  ENSG00000135365_14 (sequence is synthesized)
gtgatattcatgaggatttttgcagcgtttgcagaaaaagtggccagttactgatgtgcgacacatgttcccgtgtatatcatttggactgcttagacccccctctgaaaacaattccca

SEQ ID NO: 318539 - DNA, 120 bp, Artificial Sequence
  ENSG00000135365_15 (sequence is synthesized)
tagcaattgttcattcctatattgcctacaaagcagcaaaagaagaagagaaacagaagttacttaaatggagttcagatttaaaacaagaacgagaacaactagagcaaaaggtgaaac

SEQ ID NO: 318540 - DNA, 120 bp, Artificial Sequence
  ENSG00000135365_16 (sequence is synthesized)
agctcagcaattccataagtaaatgcatggaaatgaagaacaccatcctggcccggcagaaggagatgcacagctccctggagaaggtaaaacagctgattcgcctcatccacggcatcg

SEQ ID NO: 318541 - DNA, 120 bp, Artificial Sequence
  ENSG00000135365_17 (sequence is synthesized)
acctctccaaacctgtagactctgaggccactgtgggggccatctccaatggcccggactgcaccccccctgccaatgccgccacctccacgccggccccttccccctcctcccagagct

SEQ ID NO: 318542 - DNA, 120 bp, Artificial Sequence
  ENSG00000135365_18 (sequence is synthesized)
gcacagcgaactgtaaccagggggaagagactaaataacagagcccctctaggagaagccacgggatcccggcggcaaggagaacagaacactgaagactctagaaaagcaaagccggat

SEQ ID NO: 318543 - DNA, 120 bp, Artificial Sequence
  ENSG00000135365_19 (sequence is synthesized)
ttctggaaagtgcagaattcttttggttctttggttccagagagagagaagatgcttgtgccaggtggcaccagagtttgccaattgatccttcttattctgtgtgtacatgcaaagatt

SEQ ID NO: 318544 - DNA, 120 bp, Artificial Sequence
  ENSG00000135365_20 (sequence is synthesized)
ggaccatgttacatgaaatagtgccagctggaggttctttgccagcaccatgccaagtgaaataatatatttactctctctattatacaccagtgtgtgcctgcagcagcctccacagcc

SEQ ID NO: 318545 - DNA, 120 bp, Artificial Sequence
  ENSG00000135365_21 (sequence is synthesized)
acgatgggtttgtttctgttttcttgggtggggagcagggacgggcggagggaggagagcaggtttcagatccttacttgccgagccgtttgtttaggtagagaagacaagtccaaagag

SEQ ID NO: 318546 - DNA, 120 bp, Artificial Sequence
  ENSG00000135365_22 (sequence is synthesized)
tgtgtgggctttcctgtttctaaactttcgctactataaaaccaaaaaaaggaattgagatttcaccaaccccagtgcccagaagagggaaggggagtggctggagggagcagggggtgg

SEQ ID NO: 318547 - DNA, 120 bp, Artificial Sequence
  ENSG00000135365_23 (sequence is synthesized)
gacagtgtatcaaataagcagtatttaatcacctctggcgggggcctcgtgcaaggggagactgacaccaagaacagccagtaggttcttctcccctgcactctgctccctgcgcggtaa

SEQ ID NO: 318548 - DNA, 120 bp, Artificial Sequence
  ENSG00000135365_24 (sequence is synthesized)
ccccaccactcctgaagcctgcccagtctccttccttccctgcttggtgagtcgcgcatctccgtggttatcccgctgtctcctctccaagaacaagcagagcccgggccactggccctt

SEQ ID NO: 318549 - DNA, 120 bp, Artificial Sequence
  ENSG00000135365_25 (sequence is synthesized)
gcccaaggcagggaagaaggatgtgtgtgtccaggaaggaaaaaaaggtggatcagtgattttacttgaaaacaagctccatcccttttctatatttataagaagagaagatcttgagtg

SEQ ID NO: 318550 - DNA, 120 bp, Artificial Sequence
  ENSG00000135365_26 (sequence is synthesized)
aagcagcacgcgacccaggtgtgtgtgaattgaatggagacgtttcttttctctttctttaatttttgtttttgttctttttttctttaaggaaagttttattttactgttcattttact

SEQ ID NO: 318551 - DNA, 120 bp, Artificial Sequence
  ENSG00000135365_27 (sequence is synthesized)
ttcttggtaacaaaaactaaaataaggaatagaaaagctgtttttcaggctgacagtccaattaagggtagccaagaccttgcatggtagagtaggaatcatagtgtcagtgaggtcccg

SEQ ID NO: 318552 - DNA, 120 bp, Artificial Sequence
  ENSG00000135365_28 (sequence is synthesized)
tgagtctttgtgagtccttgtgtcatcgttcgggcactgtttttttatgcaagggcaaaaatctttgtatctggggaaaaaaaacttttttttaaattaaaaaggaaaataaaagatatt

SEQ ID NO: 318553 - DNA, 120 bp, Artificial Sequence
  ENSG00000135365_29 (sequence is synthesized)
gaggtcttcctagtgttacttaaattaagatcaaggtaagaaacattgtaaaaaaaaattacaaaagtgctatttgtttcctaaaaacagtgatttctattaaaaaggtgtcagaactgg

SEQ ID NO: 318554 - DNA, 120 bp, Artificial Sequence
  ENSG00000135365_30 (sequence is synthesized)
ccccaacatccccccaatccagtcatcctgactcccctgaaaatgaaaagacagagaccacattcactttccctgcacctgttcagcctgtgtccctgcccagccccacctccacagacg

SEQ ID NO: 318555 - DNA, 120 bp, Artificial Sequence
  ENSG00000135365_31 (sequence is synthesized)
gtttatgagcagcctcggaagcctgggcgcagagtgcagggccggagccggtgacagaggcggcgtgccgggggcggcggggagggggcgtcacattgtcccggcggggggccggccggg

SEQ ID NO: 318556 - DNA, 120 bp, Artificial Sequence
  ENSG00000135365_32 (sequence is synthesized)
gtgcacgcagttcccaacacttctcgtcatcctctctttggtctctttattctgctgagcggtgctgttaggatttcttttttttttttttcccctgaccacgttcgcgatgcattgttg

SEQ ID NO: 318557 - DNA, 120 bp, Artificial Sequence
  ENSG00000135365_33 (sequence is synthesized)
gaaactgttactacatttttactggaaatactattattcattttaattttgctttgaagggtccatcctttttcctattcagtcttctggaaggagctgcctctgaaatactcttcttct

SEQ ID NO: 318558 - DNA, 120 bp, Artificial Sequence
  ENSG00000135365_34 (sequence is synthesized)
tgcctacaaagcagcaaaagaagaagagaaacagaagttacttaaatggagttcagatttaaaacaagaacgagaacaactagagcaaaaggtgaaacagctcagcaattccataagttg

SEQ ID NO: 318559 - DNA, 120 bp, Artificial Sequence
  ENSG00000135365_35 (sequence is synthesized)
ctaaatgctatccagcaggaggtgctacagcaagataaaggaaatttttgaattttgagggtcttgctacttattacagctctgcttagcttcagctaagcaacaggattaacaccttaa

SEQ ID NO: 318560 - DNA, 120 bp, Artificial Sequence
  ENSG00000135365_36 (sequence is synthesized)
agttccagaaagattttgaggggctagagagctgaaggagagccagtttccccaaaattggacttctcagaacctttaatatgctaatgtgcattgtgaatctccaagagggggatatga

SEQ ID NO: 318561 - DNA, 120 bp, Artificial Sequence
  ENSG00000135365_37 (sequence is synthesized)
acacagtcactctggtaagccagcagctgctcctcatgtgtgatcacatgagaaggttaggatacgcatttgtatagtatatcccttctaggctcctgctggatttctcagtttccatca

SEQ ID NO: 318562 - DNA, 120 bp, Artificial Sequence
  ENSG00000135365_38 (sequence is synthesized)
ttcttctagcataccaaattcccctttggggctgacaagggaatatggcatttctgctatctgctcaaatcactacagaagcgtcctgacaccaaggactaaattcagtgcattatctga

SEQ ID NO: 318563 - DNA, 120 bp, Artificial Sequence
  ENSG00000135365_39 (sequence is synthesized)
ggtcaaagtatgacttgattttagggggaaggtctccttcacagaggcatacacactgtttcatttatgtctccctctcccttcactctctctacagtgttttcctgtgaaacttgagtg

SEQ ID NO: 318564 - DNA, 120 bp, Artificial Sequence
  ENSG00000135365_40 (sequence is synthesized)
cttaaactctcttgtgctgtattactgccttggtgaaaactccctgataattcttttagttttaatatctctttaaattgattgtacccagaaagaactggagttagttgaggcacttta

SEQ ID NO: 318565 - DNA, 120 bp, Artificial Sequence
  ENSG00000135365_41 (sequence is synthesized)
aaaatattcaagaaactcacaaattaaccgtgtcagtgcccaagttttgttcaggaaaaaaaaaaaatccctttaaggaggaagtacttgaacaagaattttcatgagagttctaggatc

SEQ ID NO: 318566 - DNA, 120 bp, Artificial Sequence
  ENSG00000135365_42 (sequence is synthesized)
aagccatttagaaaactgatattctcagaagcttgggagaaatatatctaaattttgatgtaaaattcccttaaaatggcacctaagagctcttggtggcttttgaataataccagtggt

SEQ ID NO: 318567 - DNA, 120 bp, Artificial Sequence
  ENSG00000135365_43 (sequence is synthesized)
gagtgaaactagagagcaataaagtgaaggttcaccgcttatccaggaatccttagagaagcaacgaggtcactcaaccagatactgagagttagaaaattttctataggaataaagcca

SEQ ID NO: 318568 - DNA, 120 bp, Artificial Sequence
  ENSG00000135365_44 (sequence is synthesized)
ttcactgttagcttatatcaggaaaaagcctatttggctaagcagcaagtttgattttactttggatccagtcttgacttttaaaatatgttaatgcaaaagttcttgagtgtcaaagaa

SEQ ID NO: 318569 - DNA, 120 bp, Artificial Sequence
  ENSG00000135365_45 (sequence is synthesized)
aattgtctaagatttactgagcctgctatgttctccattaggtgtaggaggaaacagaagtgtggttggttcattttatagggtaaagcacacaggtgggagagttaaaaagtttcctaa

SEQ ID NO: 318570 - DNA, 120 bp, Artificial Sequence
  ENSG00000135365_46 (sequence is synthesized)
tgcagtgttaattcagatgattaacttacgatgaaagcttgtagaaaatattgtctgatccaaagaatagtgatgctaaaaatactagctttgatattgaagagtaattgttctctctgg

SEQ ID NO: 318571 - DNA, 120 bp, Artificial Sequence
  ENSG00000135365_47 (sequence is synthesized)
tgtaagtaaacctcatgccttcagcagtcgatacataggtgcagagacctaggcctttccaatatacgtaacagtacgtgtgggccccaggctgtttcgggtccttctgtttattaacgt

SEQ ID NO: 318572 - DNA, 120 bp, Artificial Sequence
  ENSG00000135365_48 (sequence is synthesized)
gattaacttgggcaaatgcagtttgccatccagttagagttcagacctcaggtacaggcggccagttggtaggtggtgccttacccaagctctgtaacatcctcttggctttaatcagag

SEQ ID NO: 318573 - DNA, 120 bp, Artificial Sequence
  ENSG00000135365_49 (sequence is synthesized)
agaggattttcagtcttcaggctgaataagtaacagctacaacagtgtagccatggccctgcgtattcctgacagtgtgtggggggagtgtagcgcctcacctgacactgagcagacaca

SEQ ID NO: 318574 - DNA, 120 bp, Artificial Sequence
  ENSG00000135365_50 (sequence is synthesized)
gaccaggtcccctcgtgtgattcttcctagtcacctgagcgagtgggcccatccgtacggccctccctcgctctttcttccacaccatgctgattgcatttcccggttttcctgaccagt

SEQ ID NO: 318575 - DNA, 120 bp, Artificial Sequence
  ENSG00000135365_51 (sequence is synthesized)
gtgaggaagcgggctttctagagacaagtattggaagtaagtactgcccagcccggcctgtccaagtgggaaagagggttgtatttgcagcagggggacagaggcttctcccaggcaagg

SEQ ID NO: 318576 - DNA, 120 bp, Artificial Sequence
  ENSG00000135365_52 (sequence is synthesized)
agccagtcttcttttccattgagtaggtcacccttgttggagtgaagtgacctcagccctcatggataccaggtggtgccttgtacttggtggcagttgaactgtcctgcttacctgctt

SEQ ID NO: 318577 - DNA, 120 bp, Artificial Sequence
  ENSG00000135365_53 (sequence is synthesized)
tctcctcctcaccatacctacccatggcatgcagatttaacacctctttcctctctttccctgcctaaaatagaagccagcaggtgtgggaagctgagggcaaaagggcaaaagactcta

SEQ ID NO: 318578 - DNA, 120 bp, Artificial Sequence
  ENSG00000135365_54 (sequence is synthesized)
agtccccggctgagcagaaggtgtactggctgcaggcctttgtccttggggcttcgatcctcctaaatgctgctggcctgtcgtctcacttcctgctgccctcagatggaatccagatag

SEQ ID NO: 318579 - DNA, 120 bp, Artificial Sequence
  ENSG00000135365_55 (sequence is synthesized)
cactgtgtgttttccaccctggagagctcagtccagtcctgaaggctccccagttagcatgacagaagcatatcaaaacctgcctaaacaggctgcaggacagctgtgggaacttttttt

SEQ ID NO: 318580 - DNA, 120 bp, Artificial Sequence
  ENSG00000135365_56 (sequence is synthesized)
ttttttttaaacaacctttgtttggaagtctgatggcggctctgccggtttgtttttaagcgttagtactcctgtgtgttggtgcccgcatgctctttctccctctgttgcctctgggac

SEQ ID NO: 318581 - DNA, 120 bp, Artificial Sequence
  ENSG00000135365_57 (sequence is synthesized)
ctgggaccccccagcctacccactccacccgccctgttccttaggtggtagccgcccactccactgaggaacacagcaaggcccaggggctgcacagcagccagcagagcttcttctccc

SEQ ID NO: 318582 - DNA, 120 bp, Artificial Sequence
  ENSG00000135365_58 (sequence is synthesized)
aaatgccgtgtagttataattttttagcacagaccctgctgatcacgatgacattttgccgtgtgtgtgtctctagactggtgggccagtctccttgaaggacagaggcggagctcccca

SEQ ID NO: 318583 - DNA, 120 bp, Artificial Sequence
  ENSG00000135365_59 (sequence is synthesized)
cccttctctctcctcagaaaagaccgtgctctcttcttggtgcagggatcttgtctcctgttgtgaagcccaaatggaagcgtggatggtatcagggccctacccgtggtcttctcagat

SEQ ID NO: 318584 - DNA, 120 bp, Artificial Sequence
  ENSG00000135365_60 (sequence is synthesized)
tctgctagagcaaaaggctggtgcctaaataagatcccttcctttggtgctgcttttggtctttcagccaccagcattatgagtgcctgggggacacctccgagggaactggccagcgga

SEQ ID NO: 318585 - DNA, 120 bp, Artificial Sequence
  ENSG00000135365_61 (sequence is synthesized)
gctctgtggtgcgcacgcaccctggccgtgacaggagggtgcgggagtacaggctggctgcatcagcccttggtgcttagaacagaggaggagtgacatgttttgagggtacgtctctga

SEQ ID NO: 318586 - DNA, 120 bp, Artificial Sequence
  ENSG00000135365_62 (sequence is synthesized)
gacagagccccagcgtggccttcgctctgtcttgcctttggggagaggtctgaagctcccactcctttctctgcctgttggctccaggcaccagaaatttactccactccacccacccac

SEQ ID NO: 318587 - DNA, 120 bp, Artificial Sequence
  ENSG00000135365_63 (sequence is synthesized)
aagcctcctgggtgaccctgggctagaattgctgcgcttgcctcggcttggccggttgtggcctctccttgagaaaaccagggttgtgaaagactcagaccattctctcatcttgccttg

SEQ ID NO: 318588 - DNA, 120 bp, Artificial Sequence
  ENSG00000135365_64 (sequence is synthesized)
tcagaagtaaattgtgtcagatttgtgctctcgctggagacctttgccccttgcgtgcccctggccgatgggagggcggtggaggctctgtaccctggccctgctggagcatctccccca

SEQ ID NO: 318589 - DNA, 120 bp, Artificial Sequence
  ENSG00000135365_65 (sequence is synthesized)
agcccactccaggccctgggaatggccagagtctaggagaggtagaaacgatcctatcagcttctctcccacccaattaggcccagagagacaaagacagatctgaaagcaaatgcaaca

SEQ ID NO: 318590 - DNA, 120 bp, Artificial Sequence
  ENSG00000135365_66 (sequence is synthesized)
gagaagagacacttcttagagtaaaatgtgtctcatctctatcagccatcgcctttcatcttcccaggggcctcagaagaaggaattaagttaggctgaacaggcctcagagttaggccc

SEQ ID NO: 318591 - DNA, 120 bp, Artificial Sequence
  ENSG00000135365_67 (sequence is synthesized)
tggctgcttgattggctgagggggaaagagttcccttttctcattcagaaaccaaggtgctgtgtctagtcagggagccttggagatgcctggactagttggaggaatcgttggcagagg

SEQ ID NO: 318592 - DNA, 120 bp, Artificial Sequence
  ENSG00000135365_68 (sequence is synthesized)
atcagagaccagcagcaggctgtctgccctgtctagagctcttcccctcaacttgtctgggcccatctgggggttgccacacaacacctaacttaccttttcctgaaagaagttgggaaa

SEQ ID NO: 318593 - DNA, 120 bp, Artificial Sequence
  ENSG00000135365_69 (sequence is synthesized)
ccatcatcactagaggcctttgctcagagaggagctgccttaggagtcttgggtcggaggacggggctaggaattgaccagggctttgcctgccgccctcagcagtgtcgggtacattct

SEQ ID NO: 318594 - DNA, 120 bp, Artificial Sequence
  ENSG00000135365_70 (sequence is synthesized)
gacctcgcctgcagctgggctgtggattcttcctgacattcagatgtgagctgttttgggagtcagctagtatggagtacgagatgcaacccagcccccaaacctacattctgcactcaa

SEQ ID NO: 318595 - DNA, 120 bp, Artificial Sequence
  ENSG00000135365_71 (sequence is synthesized)
attccaaaacactgctttactgtaaagaagaggcccctggcacccaatctccctgtccttcactgtcccctcagacctgggcggggaggggggggggcctgtgaccacctgagacatacg

SEQ ID NO: 318596 - DNA, 120 bp, Artificial Sequence
  ENSG00000135365_72 (sequence is synthesized)
ctcgtgacactgccccaccccagccacctccacttgcttcctcctccttccctccgctgctctttccccacggcccagaatttagctgctctgacagccacttttgagaccagctggctt

SEQ ID NO: 318597 - DNA, 120 bp, Artificial Sequence
  ENSG00000135365_73 (sequence is synthesized)
tgtagtcacttcagagagctggagcggctgcccactgggccctgactgggagtcccctgccagctcctgatcaggcgctgcgccctggtggcagtgatgactgggagtcccctgccagct

SEQ ID NO: 318598 - DNA, 120 bp, Artificial Sequence
  ENSG00000135365_74 (sequence is synthesized)
cctgtccaggcgctgcatcctggtaacagtgaggccatgttgctgtcatctccacctctgcattcttgctgcctgtgggtcctttttctttcatggagcctgctgggtcttgtctcacct

SEQ ID NO: 318599 - DNA, 120 bp, Artificial Sequence
  ENSG00000135365_75 (sequence is synthesized)
gtgctgagctcctctggggttttgatttcttccttccttatcaggccctttggggtaagcctgctggttgtacctgacatagggaggcagttaggggcagtccctggtggggccgccctg

SEQ ID NO: 318600 - DNA, 120 bp, Artificial Sequence
  ENSG00000135365_76 (sequence is synthesized)
gcagcctccagctggcaccatcgtgtgcctggtttccctgcaacacctgcctctctgtccctgctgctgcttggctcaggcccaacaggcagcgtgcatggaggtggttacacacagctg

SEQ ID NO: 318601 - DNA, 120 bp, Artificial Sequence
  ENSG00000135365_77 (sequence is synthesized)
tttccgtgagggtgaccgtgtctgcagcacgcttccgtctccgcatgcacggctgcctctccagccacctctgatacttctctcttggggccatcagagcctcccttgggctgtcacctc

SEQ ID NO: 318602 - DNA, 120 bp, Artificial Sequence
  ENSG00000135365_78 (sequence is synthesized)
ccagctcacacacactcttcagtggtttcctctcttcattctcttatagggcgtggtccttcttatttatctaaagggctgaatttaggagactttttacccaggggcaaaaggctctta

SEQ ID NO: 318603 - DNA, 120 bp, Artificial Sequence
  ENSG00000135365_79 (sequence is synthesized)
gggtaatgagatggatggtggcccaggtgcattttccagggcctgggttctccagatcccgtggcttctgttgagtggaggcaactttgctctgtgtgaacctcgcccctgtccctctgc

SEQ ID NO: 318604 - DNA, 120 bp, Artificial Sequence
  ENSG00000135365_80 (sequence is synthesized)
cgggcacccctggcaggaagcaggactcccatcctcaccctgacttagactgtcctctgagtcagctcctctccaagacaggagtgggcagccctgggcagtcttctggccccttgctaa

SEQ ID NO: 318605 - DNA, 120 bp, Artificial Sequence
  ENSG00000135365_81 (sequence is synthesized)
agtgaggggcaggaagctggggctgccctccagaaagccggggtaggaactctgaaaaatacctcctctaaacggaagcagggctctccagttccacttggcgccccctcccacaaggcc

SEQ ID NO: 318606 - DNA, 120 bp, Artificial Sequence
  ENSG00000135365_82 (sequence is synthesized)
cttcctccctgaggaccccacccccctaccccttccccagcagcctttggaccctcacctctctccggtgtccgtgggtcctcagcccagggtgagctgcagtcaggcgggatgggacgg

SEQ ID NO: 318607 - DNA, 120 bp, Artificial Sequence
  ENSG00000135365_83 (sequence is synthesized)
gcaggccagaggtcagccagctcctagcagagaagagccagccagaccccaaccctgtctcttgtccatgccctttgtgatttcagtcttggtagacttgtatttggagttttgtgcttc

SEQ ID NO: 318608 - DNA, 120 bp, Artificial Sequence
  ENSG00000135365_84 (sequence is synthesized)
aaagtttttgtttttgtttgtttggtttttgttttgagggggtggggggggatacagagcagctgatcaatttgtatttatttattttaacattttactaaataaagccaaataaagcct

SEQ ID NO: 318609 - DNA, 120 bp, Artificial Sequence
  ENSG00000135365_85 (sequence is synthesized)
gaaaagataggaatgctcagccaagtcccagctccttctaagcctgggctcaagtgtcctggctcttcctgccttgaacttgattctcctaagctgatatttggaactttttagtccaga

SEQ ID NO: 318610 - DNA, 120 bp, Artificial Sequence
  ENSG00000135365_86 (sequence is synthesized)
accataaatccttcctggattttatctgccagtagccacagataccactgctagctgttacatagaggatgtgtgtttaaacctccttctcaaggtaaaattctaaaaatcttttcagat

SEQ ID NO: 318611 - DNA, 120 bp, Artificial Sequence
  ENSG00000135365_87 (sequence is synthesized)
gagagctgaaggagagccagtttccccaaaattggtttctttactgcaggacttctcagaacctttaatatgctaatgtgcattgtgaatctccaagagggggatatgatatgcagcatt

SEQ ID NO: 318612 - DNA, 120 bp, Artificial Sequence
  ENSG00000135365_88 (sequence is synthesized)
acacatcagataggaatgatgatttgcgtgcatgtgtgcgtgtgtgttcctgctctcagacttttaatttttcagaaaaggattccttttcctacataaaaatggagaatgctagcaaaa

SEQ ID NO: 318613 - DNA, 120 bp, Artificial Sequence
  ENSG00000135365_89 (sequence is synthesized)
gcagattttctgtgttccaaacactcaacagtctctccagtggacctctgggcatttttcaatgctgggagaagacctttggtgggccaggcatttaaagatgtaaggccttctcagcat

SEQ ID NO: 318614 - DNA, 120 bp, Artificial Sequence
  ENSG00000135372_0 (sequence is synthesized)
agttcctgagagggacgcgtgccgcggagccaggcttactacgtgacccggacaccaggcatacgctaggggcagtcagctgtgccttctctttcggagttgttccgtgctcccacgtgc

SEQ ID NO: 318615 - DNA, 120 bp, Artificial Sequence
  ENSG00000135372_1 (sequence is synthesized)
ttccccttctccactggctgggatcccccgggctcggggcgcagtaataatttttcaccatgcatcggaaaaaggtggataaccgaatccggattctcattgagaatggagtagctgagc

SEQ ID NO: 318616 - DNA, 120 bp, Artificial Sequence
  ENSG00000135372_2 (sequence is synthesized)
ggcaaagatctctctttgttgtagttggggatcgaggaaaagatcaggtggtaatacttcatcacatgttatccaaagcaactgtgaaggctcggccttcagtgctgtggtgttataaga

SEQ ID NO: 318617 - DNA, 120 bp, Artificial Sequence
  ENSG00000135372_3 (sequence is synthesized)
aagagctggggtttagcagtcaccggaagaaaagaatgcgacagctgcagaagaaaataaagaatggaacactgaacataaagcaggacgacccctttgaactcttcatagcagccacaa

SEQ ID NO: 318618 - DNA, 120 bp, Artificial Sequence
  ENSG00000135372_4 (sequence is synthesized)
acattcgctactgctactacaacgagacccacaagatcctgggcaataccttcggcatgtgtgtgctgcaggattttgaagccttaactccaaacttgctggccaggactgtagaaacag

SEQ ID NO: 318619 - DNA, 120 bp, Artificial Sequence
  ENSG00000135372_5 (sequence is synthesized)
tggaaggtggtgggctagtggtcatcctcctacggaccatgaactcactcaagcaattgtacacagtgactatggatgtgcattccaggtacagaactgaggcccatcaggatgtggtgg

SEQ ID NO: 318620 - DNA, 120 bp, Artificial Sequence
  ENSG00000135372_6 (sequence is synthesized)
gaagatttaatgaaaggtttattctgtctctggcctcttgtaagaagtgtctcgtcattgatgaccagctcaacatcctgcccatctcctcccacgttgccaccatggaggccctgcctc

SEQ ID NO: 318621 - DNA, 120 bp, Artificial Sequence
  ENSG00000135372_7 (sequence is synthesized)
cccagactccggatgagagtcttggtccttctgatctggagctgagggagttgaaggagagcttgcaggacacccagcctgtgggtgtgttggtggactgctgtaagactctagaccagg

SEQ ID NO: 318622 - DNA, 120 bp, Artificial Sequence
  ENSG00000135372_8 (sequence is synthesized)
ccaaagctgtcttgaaatttatcgagggcatctctgaaaagaccctgaggagtactgttgcactcacagctgctcgaggacggggaaaatctgcagccctgggattggcgattgctgggg

SEQ ID NO: 318623 - DNA, 120 bp, Artificial Sequence
  ENSG00000135372_9 (sequence is synthesized)
cggtggcatttgggtactccaatatctttgttacctccccaagccctgataacctccatactctgtttgaatttgtatttaaaggatttgatgctctgcaatatcaggaacatctggatt

SEQ ID NO: 318624 - DNA, 120 bp, Artificial Sequence
  ENSG00000135372_10 (sequence is synthesized)
atgagattatccagtctctaaatcctgaatttaacaaagcagtgatcagagtgaatgtatttcgagaacacaggcagactattcagtatatacatcctgcagatgctgtgaagctgggcc

SEQ ID NO: 318625 - DNA, 120 bp, Artificial Sequence
  ENSG00000135372_11 (sequence is synthesized)
aggctgaactagttgtgattgatgaagctgccgccatccccctccccttggtgaagagcctacttggcccctaccttgttttcatggcatccaccatcaatggctatgagggcactggcc

SEQ ID NO: 318626 - DNA, 120 bp, Artificial Sequence
  ENSG00000135372_12 (sequence is synthesized)
ggtcactgtccctcaagctaattcagcagctccgtcaacagagcgcccagagccaggtcagcaccactgctgagaataagaccacgacgacagccagattggcatcagcgcggacactgt

SEQ ID NO: 318627 - DNA, 120 bp, Artificial Sequence
  ENSG00000135372_13 (sequence is synthesized)
atgaggtttccctccaggagtcaatccgatacgcccctggggatgcagtggagaagtggctgaatgacttgctgtgcctggattgcctcaacatcactcggatagtctcaggctgcccct

SEQ ID NO: 318628 - DNA, 120 bp, Artificial Sequence
  ENSG00000135372_14 (sequence is synthesized)
tgcctgaagcttgtgaactgtactatgttaatagagataccctcttttgctaccacaaggcctctgaagttttcctccaacggcttatggccctctacgtggcttctcactacaagaact

SEQ ID NO: 318629 - DNA, 120 bp, Artificial Sequence
  ENSG00000135372_15 (sequence is synthesized)
ctcccaatgatctccagatgctctccgatgcacctgctcaccatctcttctgccttctgcctcccgtgccccccacccagaatgcccttccagaagtgcttgctgttatccaggtgtgcc

SEQ ID NO: 318630 - DNA, 120 bp, Artificial Sequence
  ENSG00000135372_16 (sequence is synthesized)
ttctcgccagtccatcttgaacagtctgtctcgaggcaagaaggcttcaggggacctgattccatggacagtgtcagaacagttccaagatccagactttggtggtctgtctggtggaag

SEQ ID NO: 318631 - DNA, 120 bp, Artificial Sequence
  ENSG00000135372_17 (sequence is synthesized)
ggtcgttcgcattgctgttcacccagattatcaagggatgggctatggcagccgtgctctgcagctgctgcagatgtactatgaaggcaggtttccttgtctggaggaaaaggtccttga

SEQ ID NO: 318632 - DNA, 120 bp, Artificial Sequence
  ENSG00000135372_18 (sequence is synthesized)
gacaccacaggaaattcacaccgtaagcagcgaggctgtcagcttgttggaagaggtcatcactccccggaaggacctgcctcctttactcctcaaattgaatgagaggcctgccgaacg

SEQ ID NO: 318633 - DNA, 120 bp, Artificial Sequence
  ENSG00000135372_19 (sequence is synthesized)
cctggattacctgggtgtttcctatggcttgacccccaggctcctcaagttctggaaacgagctggatttgttcctgtttatctgagacagaccccgaatgacctgaccggagagcactc

SEQ ID NO: 318634 - DNA, 120 bp, Artificial Sequence
  ENSG00000135372_20 (sequence is synthesized)
gtgcatcatgctgaagacgctcactgatgaggatgaggctgaccagggaggctggcttgcagccttctggaaagatttccgacggcggttcctagccttgctctcctaccagttcagtac

SEQ ID NO: 318635 - DNA, 120 bp, Artificial Sequence
  ENSG00000135372_21 (sequence is synthesized)
cttctctccttccctggctctgaacatcattcagaacaggaacatggggaagccagcccagcctgccctgagccgggaggagctggaagcactcttcctcccctatgacctgaagcggct

SEQ ID NO: 318636 - DNA, 120 bp, Artificial Sequence
  ENSG00000135372_22 (sequence is synthesized)
ggagatgtattcacggaatatggtggactatcacctcatcatggacatgatcccggccatctctcgcatctatttcctgaaccagctgggggacctggccctgtctgcggctcagtcggc

SEQ ID NO: 318637 - DNA, 120 bp, Artificial Sequence
  ENSG00000135372_23 (sequence is synthesized)
tcttctcttggggattggcctgcagcataagtctgtggaccagctggaaaaggagattgagctgccctcgggccagttgatgggacttttcaaccggatcatccgcaaagttgtgaagct

SEQ ID NO: 318638 - DNA, 120 bp, Artificial Sequence
  ENSG00000135372_24 (sequence is synthesized)
atttaatgaagttcaggaaaaggccattgaggagcagatggtggcagcgaaggatgtggtcatggagcccacgatgaagaccctcagtgacgacctagatgaagcagcaaaggaatttca

SEQ ID NO: 318639 - DNA, 120 bp, Artificial Sequence
  ENSG00000135372_25 (sequence is synthesized)
ggagaaacacaagaaggaagtagggaagctgaagagcatggacctctctgaatacataatccgtggggacgatgaagagtggaatgaagttttgaacaaagctgggccgaacgcctcgat

SEQ ID NO: 318640 - DNA, 120 bp, Artificial Sequence
  ENSG00000135372_26 (sequence is synthesized)
catcagcctgaaaagtgacaagaaaaggaagttagaggccaaacaagaacccaaacagagcaagaagttgaagaacagagagacaaagaacaaaaaagatatgaaactgaagcggaagaa

SEQ ID NO: 318641 - DNA, 120 bp, Artificial Sequence
  ENSG00000135372_27 (sequence is synthesized)
atagtgaagagaaactcgggcatctgtgtttgatcatgggaagatactctcactaactgaaccctctctggctggactgttaaaagcaacgagaggccccggcacacctggaagctggcc

SEQ ID NO: 318642 - DNA, 120 bp, Artificial Sequence
  ENSG00000135372_28 (sequence is synthesized)
gcgaattcggcctctgggcctgtgtgtctgtgagctcaacctggctaaaggcagagtcactcccaaatgggtctctttagaacttgatggctgggcactgccatctctagaattgccacg

SEQ ID NO: 318643 - DNA, 120 bp, Artificial Sequence
  ENSG00000135372_29 (sequence is synthesized)
agtctctctcttcctgcccagtccagggccctcctttcctataagttcatattttgctttgagccagctttttagtctcattcccacacatgtggaagccacgttgcctctcgaccgcct

SEQ ID NO: 318644 - DNA, 120 bp, Artificial Sequence
  ENSG00000135372_30 (sequence is synthesized)
gaggcccttaagtacatcgctttctggtggtgcccaggaggctgctgctgggccgctgggtctctctttgtggacttgtacctggagcaggaggaactccagtccgtcccggcatccatg

SEQ ID NO: 318645 - DNA, 120 bp, Artificial Sequence
  ENSG00000135372_31 (sequence is synthesized)
gcagcccgcggttaggtgcgccagggtttgctgatgttgtcttgtgctgttccactcttggctccagcagacccactgtcccagaaaagcctgatcctgtagtttatgtagaatgccaca

SEQ ID NO: 318646 - DNA, 120 bp, Artificial Sequence
  ENSG00000135372_32 (sequence is synthesized)
tctgcgtcctcaagacctgtttcatccatttgggaaaagatgttgggaaaggccactttgctcgcaggggtgaggggaaggatagagaatctatttttaataaataacattctagaaaga

SEQ ID NO: 318647 - DNA, 120 bp, Artificial Sequence
  ENSG00000135372_33 (sequence is synthesized)
aagtagtgcctgtaactggggagtcggggtgaatgggtgggtgacaacagttgttttccgtggagcttgcccgcagtgcctggctgcaggtctgggcattatacttaggtaataattttt

SEQ ID NO: 318648 - DNA, 120 bp, Artificial Sequence
  ENSG00000135372_34 (sequence is synthesized)
ctgaacctgcctttcaaagagggttttcttagaccgtggccagaagcagagtcacatgctcaaatggtcagagctggatgggactgtgcaagttgtccaggcatatcatcctacaggtaa

SEQ ID NO: 318649 - DNA, 61 bp, Artificial Sequence
  ENSG00000135372_35 (sequence is synthesized)
accaccactcccggcgagaacttttgagtaataatttttcaccatgcatcggaaaaaggtg

SEQ ID NO: 318650 - DNA, 83 bp, Artificial Sequence
  ENSG00000135372_36 (sequence is synthesized)
gggagtcggggtgaatgtggcacaccatctcggctcactgcaacttccgcctaccggattcaagtgattctcttgcctcagcc

SEQ ID NO: 318651 - DNA, 120 bp, Artificial Sequence
  ENSG00000135372_37 (sequence is synthesized)
gagaggagcacatatttccctcccgcacgtcccgagcaagaggcaggcccagaagagccagcagctcttctctgtgtctgtgacacttttgaggagattgcaggacagtgatctttgcag

SEQ ID NO: 318652 - DNA, 120 bp, Artificial Sequence
  ENSG00000135372_38 (sequence is synthesized)
ctgttgtgtgtgaactgaggtgatatgaggaaggtgaaggcgagggctgtttgagaagggcgcctacccccagcctggaaagaaggagaggcctgcggaagcactaagcctttcttctct

SEQ ID NO: 318653 - DNA, 120 bp, Artificial Sequence
  ENSG00000135372_39 (sequence is synthesized)
cacacaggcctagagttgtgcctcccactgattgtgtgtgtgtgttgtgaatgtaggattccagcatctgttggaaatgttttgtcttttttggtgacttcttaaatgcatagtttataa

SEQ ID NO: 318654 - DNA, 120 bp, Artificial Sequence
  ENSG00000135372_40 (sequence is synthesized)
cagagctaccttaaaataatcaaagctgcctacaaggtttttgcaggtagatggaagagaaggaaatgttttctcatcattgtgccattccaccccagcttcaccttttcctgtgtttgg

SEQ ID NO: 318655 - DNA, 120 bp, Artificial Sequence
  ENSG00000135373_0 (sequence is synthesized)
acttgataacacccgtggtgccccatccctataggagctggtgagattgcagcctgctgcctcccctccaacagccacagctattggatttcccacccagaatctttaggtaaatgagat

SEQ ID NO: 318656 - DNA, 120 bp, Artificial Sequence
  ENSG00000135373_1 (sequence is synthesized)
catgattctggaaggaggtggtgtaatgaatctcaaccccggcaacaacctccttcaccagccgccagcctggacagacagctactccacgtgcaatgtttccagtgggttttttggagg

SEQ ID NO: 318657 - DNA, 120 bp, Artificial Sequence
  ENSG00000135373_2 (sequence is synthesized)
ccagtggcatgaaattcatcctcagtactggaccaagtaccaggtgtgggagtggctccagcacctcctggacaccaaccagctggatgccaattgtatccctttccaagagttcgacat

SEQ ID NO: 318658 - DNA, 120 bp, Artificial Sequence
  ENSG00000135373_3 (sequence is synthesized)
caacggcgagcacctctgcagcatgagtttgcaggagttcacccgggcggcagggacggcggggcagctcctctacagcaacttgcagcatctgaagtggaacggccagtgcagtagtga

SEQ ID NO: 318659 - DNA, 120 bp, Artificial Sequence
  ENSG00000135373_4 (sequence is synthesized)
cctgttccagtccacacacaatgtcattgtcaagactgaacaaactgagccttccatcatgaacacctggaaagacgagaactatttatatgacaccaactatggtagcacagtagattt

SEQ ID NO: 318660 - DNA, 120 bp, Artificial Sequence
  ENSG00000135373_5 (sequence is synthesized)
gttggacagcaaaactttctgccgggctcagatctccatgacaaccaccagtcaccttcctgttgcagagtcacctgatatgaaaaaggagcaagacccccctgccaagtgccacaccaa

SEQ ID NO: 318661 - DNA, 120 bp, Artificial Sequence
  ENSG00000135373_6 (sequence is synthesized)
aaagcacaacccgagagggactcacttatgggaattcatccgcgacatcctcttgaacccagacaagaacccaggattaataaaatgggaagaccgatctgagggcgtcttcaggttctt

SEQ ID NO: 318662 - DNA, 120 bp, Artificial Sequence
  ENSG00000135373_7 (sequence is synthesized)
gaaatcagaggcagtggctcagctatggggtaaaaagaagaacaacagcagcatgacctatgaaaagctcagccgagctatgagatattactacaaaagagaaattctggagcgtgtgga

SEQ ID NO: 318663 - DNA, 120 bp, Artificial Sequence
  ENSG00000135373_8 (sequence is synthesized)
tggacgaagactggtatataaatttgggaagaatgcccgaggatggagagaaaatgaaaactgaagctgccaatactttggacacaaaccaaaacacacaccaaataatcagaaacaaag

SEQ ID NO: 318664 - DNA, 120 bp, Artificial Sequence
  ENSG00000135373_9 (sequence is synthesized)
aactcctggacgtaaatatttcaaagactacttttctctgatatttatgtaccatgaggggaacaagaaactacttctaacgggaagaagaaacactacggtcgattaaaaaaattattt

SEQ ID NO: 318665 - DNA, 120 bp, Artificial Sequence
  ENSG00000135373_10 (sequence is synthesized)
tgttacttcgaagtatgtcctatatggggaaaaaacgtacacagttttctgtgaaatatgatgctgtatgtggttgtgattttttttcacctctattgtgaattctttttcactgcaaga

SEQ ID NO: 318666 - DNA, 120 bp, Artificial Sequence
  ENSG00000135373_11 (sequence is synthesized)
gtaacaggatttgtagccttgtgcttcttgctaagagaaagaaaaacaaaatcagagggcattaaatgttttgtatgtgacatgatttagaaaaaggtgatgcatcctcctcacataagc

SEQ ID NO: 318667 - DNA, 120 bp, Artificial Sequence
  ENSG00000135373_12 (sequence is synthesized)
atccatatggcttcgtcaagggaggtgaacattgttgctgagttaaattccagggtctcagatggttaggacaaagtggatggatgccgggaagtttaacctgagccttaggatccaatg

SEQ ID NO: 318668 - DNA, 120 bp, Artificial Sequence
  ENSG00000135373_13 (sequence is synthesized)
gttggctataatctctgcataaccacatgacttggaatgcttaaatcagcaagaagaataatggtggggtctttatactcattcaggaatggtttatctgatgccagggctgtcttcctt

SEQ ID NO: 318669 - DNA, 120 bp, Artificial Sequence
  ENSG00000135373_14 (sequence is synthesized)
tctcccctttggatggttggtgaaatactttaattgccctgtctgctcacttctagctatttaagagagaacccagcttggttcttttttgctccaagtgcttaaaaataagttggaaaa

SEQ ID NO: 318670 - DNA, 120 bp, Artificial Sequence
  ENSG00000135373_15 (sequence is synthesized)
aggagacggtggtgtggaaatggctgaagagtttgctcttgtatccctatagtccaaggtttctcaatctgcacaattgacatttttggccggagtgttctttgtggtgagggctttcct

SEQ ID NO: 318671 - DNA, 120 bp, Artificial Sequence
  ENSG00000135373_16 (sequence is synthesized)
gtgcattgtaagatgttcagcagtatccactcatggtctctaaccacttgacaccagaaaccccccagctgtgataacgcaaaatgtctctagacatcaccaaatgttccctgggggtgg

SEQ ID NO: 318672 - DNA, 120 bp, Artificial Sequence
  ENSG00000135373_17 (sequence is synthesized)
caaatttgcccttgattgagaaccaccagtttagctagtcaatatgaggatggtggtttattctcagaagaaaaagatatgtaaggtcttttagctccttagagtgaagcaaaagcaaga

SEQ ID NO: 318673 - DNA, 120 bp, Artificial Sequence
  ENSG00000135373_18 (sequence is synthesized)
cttcaacctcaacctatctttatgttttaaatgttagggacaataagttgaaatagctagaggagcttcttttcagaaccccagatgagagccaatgtcagataaagtaagcatagtaat

SEQ ID NO: 318674 - DNA, 120 bp, Artificial Sequence
  ENSG00000135373_19 (sequence is synthesized)
gtagcaggaactacaatagaagacattttcactggaattacaaagcagaattaaaattatattgtagaaggaaacaccaagaaaagaatttccagggaaaatcctctttgcaggtattaa

SEQ ID NO: 318675 - DNA, 120 bp, Artificial Sequence
  ENSG00000135373_20 (sequence is synthesized)
ttcttataattttttgtcttttggattatctgtttactgtctcatctgaactgatcccaggtgaacggtttattgcctagatttgtactcagaggaattttttttgttttgttttgtctt

SEQ ID NO: 318676 - DNA, 120 bp, Artificial Sequence
  ENSG00000135373_21 (sequence is synthesized)
ttaagaaaggaaagaaaggatgaaaaaaataaacagaaaactcagctcaggcacaattgtcaccaaggagttaaaagcttcttcttcaatagaggaattgttctgggggtcctggagact

SEQ ID NO: 318677 - DNA, 120 bp, Artificial Sequence
  ENSG00000135373_22 (sequence is synthesized)
taccattgagccatgcaatctgggaagcacaggaataagtagacactttgaaaatggatttgaatgttctcatcccttttgcagcttttctttttggctctctcatgtccttggcttgct

SEQ ID NO: 318678 - DNA, 120 bp, Artificial Sequence
  ENSG00000135373_23 (sequence is synthesized)
cctctattctacctctctttctccagcaataatatgcaaatgaagacatgtatccataagaaggagtgctcttcatcaactaatagagcacctaccacagtgtcatacctggtagaggtg

SEQ ID NO: 318679 - DNA, 120 bp, Artificial Sequence
  ENSG00000135373_24 (sequence is synthesized)
agcaattcatattcaaaggttgcaaagtgtttgtaatatattcatgaggctggaagtaagaagaattaaaaatttgtcctaattacaatgagaaccattctaggtagtgatcttggagca

SEQ ID NO: 318680 - DNA, 120 bp, Artificial Sequence
  ENSG00000135373_25 (sequence is synthesized)
cacatgaataactttctgaaggtgcaaccaaatccatttttatttctgcctggcttggtcacttctgtaaaggtttaacttagtgttgtcaagtaacagttactgaaagagctgagaaaa

SEQ ID NO: 318681 - DNA, 120 bp, Artificial Sequence
  ENSG00000135373_26 (sequence is synthesized)
ctcagcagcaacaaatgccttctgagacagggattcttttgattttgcttggacattgtggagaagtgttagccccaatgtggactgatctgggaacagtgggaaattaacttcttgttg

SEQ ID NO: 318682 - DNA, 120 bp, Artificial Sequence
  ENSG00000135373_27 (sequence is synthesized)
attttcaccgtccatctttgctgatttaccatgctcccaggatggtgggagtgtgtgtttttaagatggagagtgtatgcttctgggttcaagttcacaggtgtctctgctggttatctg

SEQ ID NO: 318683 - DNA, 120 bp, Artificial Sequence
  ENSG00000135373_28 (sequence is synthesized)
gtccgagctcccacacaggtgctggggctgtgctgccaccagcttggattttcattgtttgaaattgcactttaaatactttaaataaaatctccttggcattttcacttttgtaaaaaa

SEQ ID NO: 318684 - DNA, 120 bp, Artificial Sequence
  ENSG00000135373_29 (sequence is synthesized)
actctgatgagggctcagacttgataacacccgtggtgccccatccctataggagctggtgagattgcagcctgctgcctcccctccaacagccacagctattggatttcccacccagaa

SEQ ID NO: 318685 - DNA, 120 bp, Artificial Sequence
  ENSG00000135373_30 (sequence is synthesized)
tctttaggtaaatgagaaatgggcagtgtctgtcagagaaaccaactgattcctgatattatcacaaagccagatacttgaagagctctattaaaatatgactgaggccctttgatgacc

SEQ ID NO: 318686 - DNA, 120 bp, Artificial Sequence
  ENSG00000135373_31 (sequence is synthesized)
aacccactgctttattctgccctgagtggagattggttttggctcaggctgctttgtgaaactcagaagcattatcctctctgccaactccacgtcctagtcagagttttctgtgaaggc

SEQ ID NO: 318687 - DNA, 120 bp, Artificial Sequence
  ENSG00000135373_32 (sequence is synthesized)
acaagaaagagtggtctcacctccaaattaccatgtcccaagacagagaaatggaaggaagatgaaaggacaggattgaagcatagggtacctggtgtgcctaatcccttataaatgcca

SEQ ID NO: 318688 - DNA, 120 bp, Artificial Sequence
  ENSG00000135374_0 (sequence is synthesized)
gtaggtgtcacttatatcacaaggctacaggtgtctttatttccactgcacgctggtgctgggagcgcctgccttctcttgccttgaaagcctcctctttggacctagccaccgctgccc

SEQ ID NO: 318689 - DNA, 120 bp, Artificial Sequence
  ENSG00000135374_1 (sequence is synthesized)
tcacggtaatgttggactcggtgacacacagcaccttcctgcctaatgcatccttctgcgatcccctgatgtcgtggactgatctgttcagcaatgaagagtactaccctgcctttgagc

SEQ ID NO: 318690 - DNA, 120 bp, Artificial Sequence
  ENSG00000135374_2 (sequence is synthesized)
atcagacagcctgtgactcatactggacatcagtccaccctgaatactggactaagcgccatgtgtgggagtggctccagttctgctgcgaccagtacaagttggacaccaattgcatct

SEQ ID NO: 318691 - DNA, 120 bp, Artificial Sequence
  ENSG00000135374_3 (sequence is synthesized)
ccttctgcaacttcaacatcagtggcctgcagctgtgcagcatgacacaggaggagttcgtcgaggcagctggcctctgcggcgagtacctgtacttcatcctccagaacatccgcacac

SEQ ID NO: 318692 - DNA, 120 bp, Artificial Sequence
  ENSG00000135374_4 (sequence is synthesized)
aaggttactccttttttaatgacgctgaagaaagcaaggccaccatcaaagactatgctgattccaactgcttgaaaacaagtggcatcaaaagtcaagactgtcacagtcatagtagaa

SEQ ID NO: 318693 - DNA, 120 bp, Artificial Sequence
  ENSG00000135374_5 (sequence is synthesized)
caagcctccaaagttctcatctatgggaatttgtacgagacctgcttctatctcctgaagaaaactgtggcattctggaatgggaagatagggaacaaggaatttttcgggtggttaaat

SEQ ID NO: 318694 - DNA, 120 bp, Artificial Sequence
  ENSG00000135374_6 (sequence is synthesized)
cggaagccctggcaaagatgtggggacaaaggaagaaaaatgacagaatgacatatgaaaagttgagcagagccctgagatactactataaaacaggaattttggagcgggttgaccgaa

SEQ ID NO: 318695 - DNA, 120 bp, Artificial Sequence
  ENSG00000135374_7 (sequence is synthesized)
ggttagtgtacaaatttggaaaaaatgcacacgggtggcaggaagacaagctatgatctgctccaggcatcaagctcattttatggatttctgtcttttaaaacaatcagattgcaatag

SEQ ID NO: 318696 - DNA, 120 bp, Artificial Sequence
  ENSG00000135374_8 (sequence is synthesized)
acattcgaaaggcttcattttcttctctttttttttaacctgcaaacatgctgataaaatttctccacatctcagcttacatttggattcagagttgttgtctatggagggtgagagcag

SEQ ID NO: 318697 - DNA, 120 bp, Artificial Sequence
  ENSG00000135374_9 (sequence is synthesized)
ggatgatcttttgtggtgtcttgatcaaactttattttcctagagttgtggaatgacaacagcccatgccattgatgctgatcagagaaaaactattcaattctgccattagagacacat

SEQ ID NO: 318698 - DNA, 120 bp, Artificial Sequence
  ENSG00000135374_10 (sequence is synthesized)
ccaatgctcccatcccaaaggttcaaaagttttcaaataactgtggcagctcaccaaaggtgggggaaagcatgattagtttgcaggttatggtaggagagggtgagatataagacatac

SEQ ID NO: 318699 - DNA, 120 bp, Artificial Sequence
  ENSG00000135374_11 (sequence is synthesized)
atactttagattttaaattattaaagtcaaaaatccatagaaaagtatccctttttttttttttgagacgggttctcactatgttgcccagggctggtcttgaactcctatgctcaagtg

SEQ ID NO: 318700 - DNA, 120 bp, Artificial Sequence
  ENSG00000135374_12 (sequence is synthesized)
tcccacctcagcctcccaaagtactgtgattacaagcgtgagccacggcacctgggcagaaaagtatcttaattaatgaaagagctaagccatcaagctgggacttaattggatttaaca

SEQ ID NO: 318701 - DNA, 120 bp, Artificial Sequence
  ENSG00000135374_13 (sequence is synthesized)
aacataggttcacagaaagtttcctaaccagagcatctttttgaccactcagcaaaacttccacagacatccttctggacttaaacacttaacattaaccacattattaattgttgctga

SEQ ID NO: 318702 - DNA, 120 bp, Artificial Sequence
  ENSG00000135374_14 (sequence is synthesized)
gtttattcccccttctaactgatggctggcatctgatatgcagagttagtcaacagacactggcatcaattacaaaatcactgctgtttctgtgattcaagctgtcaacacaataaaatc

SEQ ID NO: 318703 - DNA, 120 bp, Artificial Sequence
  ENSG00000135374_15 (sequence is synthesized)
gaaattcattgattccatctcaggtccagatgttaaacgtttataaaaccggaaatgtcctaacaactctgtaatggcaaattaaattgtgtgtcttttttgttttgtctttctacctga

SEQ ID NO: 318704 - DNA, 120 bp, Artificial Sequence
  ENSG00000135374_16 (sequence is synthesized)
tgtgtattcaagcgctataacacgtatttccttgacaaaaatagtgacagtgaattcacactaataaatgttcataggttaaagtctgcactgacattttctcatcaatcactggtatgt

SEQ ID NO: 318705 - DNA, 120 bp, Artificial Sequence
  ENSG00000135374_17 (sequence is synthesized)
aagttatcagtgactgacagctaggtggactgcccctaggacttctgtttcaccagagcaggaatcaagtggtgaggcactgaatcgctgtacaggctgaagacctccttattagagttg

SEQ ID NO: 318706 - DNA, 120 bp, Artificial Sequence
  ENSG00000135374_18 (sequence is synthesized)
aacttcaaagtaacttgttttaaaaaatatgaattactgtaaaataatctattttggattcatgtgttttccaggtggatatagtttgtaaacaatgtgaataaagtatttaacatgttc

SEQ ID NO: 318707 - DNA, 120 bp, Artificial Sequence
  ENSG00000135374_19 (sequence is synthesized)
gaattttcctcctctggcaaactggccaaggctgagtggtttgctccttcccctctctctgggaggctgagcaggggtgccgggttgctcaggccatgggagccacacctgttattgctg

SEQ ID NO: 318708 - DNA, 120 bp, Artificial Sequence
  ENSG00000135374_20 (sequence is synthesized)
cctctgatttgtgtgacactgagaagcccacaggcctgtccctccaactcggtggaccctctctgtgtgcatttggtgtgtgagccagctctgagaagggttcagaagccactggaggca

SEQ ID NO: 318709 - DNA, 120 bp, Artificial Sequence
  ENSG00000135374_21 (sequence is synthesized)
gggaccaggattaggaccaaacaactttgagaagtcctttcccatcgtgtgaattgcacagcaaaattttactaactggagttctcgttaatccaaaccttcaataactggaagctagta

SEQ ID NO: 318710 - DNA, 120 bp, Artificial Sequence
  ENSG00000135374_22 (sequence is synthesized)
tgccagaattggggattttagggaaaagggagcgagttacaaaaatgcaaattgagtgcatttaaaaaaagagaaagaaaaacggacaccacgttcagggactgcccaggcaccaggctg

SEQ ID NO: 318711 - DNA, 120 bp, Artificial Sequence
  ENSG00000135374_23 (sequence is synthesized)
ataataatacagtatattcataatgatttgaaaccacacaggatggacaaaaaagaggtttgtgcttcatctctcattaagcagaagaggaataaaattaaatagactaccttccctttt

SEQ ID NO: 318712 - DNA, 120 bp, Artificial Sequence
  ENSG00000135374_24 (sequence is synthesized)
ctacaggagtccaactaattatcatttcatcacattcctaatggtcaaggatcaagtggccagaaggtggcgccaatagcattatttaactcttcaacaggccttttgcatgcagaatgt

SEQ ID NO: 318713 - DNA, 120 bp, Artificial Sequence
  ENSG00000135374_25 (sequence is synthesized)
cgatgaacattttttcaatccagaaaggttctttgagaacatcgagctctaatgtctcaaagtcacacatagataaaggaactgatatcctgagacattaagtgacttcctcaaggtcac

SEQ ID NO: 318714 - DNA, 120 bp, Artificial Sequence
  ENSG00000135374_26 (sequence is synthesized)
agatccgaaagacctgtgttccaaccctggctccaatactccgagctacggaacctctggcgagtggcttaagctgtctgaatccccactgcctcatctgtccaatgggataatgacacc

SEQ ID NO: 318715 - DNA, 120 bp, Artificial Sequence
  ENSG00000135374_27 (sequence is synthesized)
tccatgggctttttgagaggattcagggaaatattacctagaacagcatatgaagatggaaatgcagtaaatggcagctgtttttccatcatcattaatataatcaagaggcatattata

SEQ ID NO: 318716 - DNA, 120 bp, Artificial Sequence
  ENSG00000135374_28 (sequence is synthesized)
ggatgttaaaggaagcctatctcagctcagttttaagaaggatctttttaaaggttagtaccttcttttgaaaaggtaattcagaagatacaggagataggacgatccccaccactggag

SEQ ID NO: 318717 - DNA, 120 bp, Artificial Sequence
  ENSG00000135374_29 (sequence is synthesized)
ataatcaagtagtctaatagccccctgcttgaagaggaggatatgacagcgcctcttgtttgcacagaaaaaccacagaggaccctcctgctctgtgattctttggcctcctcttgatcc

SEQ ID NO: 318718 - DNA, 120 bp, Artificial Sequence
  ENSG00000135374_30 (sequence is synthesized)
tcatccatcatgagcgcttgaaggcagaaaagctaagaatggtggcccttgggcactacatggctggggccctgggagccaaaactccagtgacaatgacctgccaagagctgggatctg

SEQ ID NO: 318719 - DNA, 120 bp, Artificial Sequence
  ENSG00000135374_31 (sequence is synthesized)
tgtcctgtgctcagagtgggcactccctgaaagaggacaagtttgaccaagtcacaacggctccagaagaaggagcttgggactccatttaggatcctcccaagggaacaggctcgcaca

SEQ ID NO: 318720 - DNA, 120 bp, Artificial Sequence
  ENSG00000135374_32 (sequence is synthesized)
aaaatcctagggccacagagaggggtgtattttattctggaaaaagatgcagtttggcaatgccagcttggccaaatgtcaagtcaacctcatttgtctccatgctcttgtgcagcccct

SEQ ID NO: 318721 - DNA, 120 bp, Artificial Sequence
  ENSG00000135374_33 (sequence is synthesized)
gtgctggcatctcccaccacaagcacctctcttccctggcaatggttgcatcaaaaaacaaacaaacaaaaaaaacctgttggccaggcacagttgctcaggcctgtaatcccaatactt

SEQ ID NO: 318722 - DNA, 120 bp, Artificial Sequence
  ENSG00000135378_0 (sequence is synthesized)
ctccgtcggccgcctccccggaccgaggcaggacctcaccccgcgcgtgttccccgggcgcccctctgcgaaccccaggcccttcccaggtttgcgcgcgggggccatccagaccctgcg

SEQ ID NO: 318723 - DNA, 120 bp, Artificial Sequence
  ENSG00000135378_1 (sequence is synthesized)
gagagcgaggcccggagcgtcgccgaggtttgagggcgccggagaccgagggcctggcggccgaaggaaccgccccaagaagagcctctggcccgggggctgctggaacatgtgcggggg

SEQ ID NO: 318724 - DNA, 120 bp, Artificial Sequence
  ENSG00000135378_2 (sequence is synthesized)
gacacagtttgtttgacagttgccagactatgtttacgcttctggttctactcagccaactgcccacagttaccctggggtttcctcattgcgcaagaggtccaaaggcttctaagcatg

SEQ ID NO: 318725 - DNA, 120 bp, Artificial Sequence
  ENSG00000135378_3 (sequence is synthesized)
cgggagaagaagtgtttacatcaaaagaagaagcaaactttttcatacatagacgccttctgtataatagatttgatctggagctcttcactcccggcaacctagaaagagagtgcaatg

SEQ ID NO: 318726 - DNA, 120 bp, Artificial Sequence
  ENSG00000135378_4 (sequence is synthesized)
aagaactttgcaattatgaggaagccagagagatttttgtggatgaagataaaacgattgcattttggcaggaatattcagctaaaggaccaaccacaaaatcagatggcaacagagaga

SEQ ID NO: 318727 - DNA, 120 bp, Artificial Sequence
  ENSG00000135378_5 (sequence is synthesized)
aaatagatgttatgggccttctgactggattaattgctgctggagtatttttggttatttttggattacttggctactatctttgtatcactaagtgtaataggctacaacatccatgct

SEQ ID NO: 318728 - DNA, 120 bp, Artificial Sequence
  ENSG00000135378_6 (sequence is synthesized)
cttcagccgtctatgaaagggggaggcacactccctccatcattttcagaagacctgaggaggctgccttgtctccattgccgccttctgtggaggatgcaggattaccttcttatgaac

SEQ ID NO: 318729 - DNA, 120 bp, Artificial Sequence
  ENSG00000135378_7 (sequence is synthesized)
aggcagtggcgctgaccagaaaacacagtgtttcaccaccaccaccatatcctgggcacacaaaaggatttagggtatttaaaaaatctatgtctctcccatctcactgactaccttgtc

SEQ ID NO: 318730 - DNA, 68 bp, Artificial Sequence
  ENSG00000135378_8 (sequence is synthesized)
aaaaaatctatgtctctcccatctcactgactaccttgtcattttggtataagaaatttgtgttattt

SEQ ID NO: 318731 - DNA, 71 bp, Artificial Sequence
  ENSG00000135378_9 (sequence is synthesized)
gaagaagaaaagagaagaaggagaaggagatgaaggaggaggaggaggagaaggagaagaagaagaagaag

SEQ ID NO: 318732 - DNA, 120 bp, Artificial Sequence
  ENSG00000135378_10 (sequence is synthesized)
gagaaggagaagaagaagaagaagaagaccacaaaagacatgactatccaactttttatgacaaactgcaaggaataaaggaagaataagtccatgtactgtaccacagaagttctgtct

SEQ ID NO: 318733 - DNA, 120 bp, Artificial Sequence
  ENSG00000135378_11 (sequence is synthesized)
ttctgtctgcatcttggacctgaacttgatcattatcagcttgataagagactttttgactctatatccttgcagttaagaagaaagcacttttttgtaatgtttgttttaatggttcaa

SEQ ID NO: 318734 - DNA, 120 bp, Artificial Sequence
  ENSG00000135378_12 (sequence is synthesized)
aaaaaatctttcttataaagagcataggtagaattagtgaactctttggatcctttgtacagataaaggttatagatttcttgtgttgaatattaaaaaagcaaggatgtctaaccatta

SEQ ID NO: 318735 - DNA, 69 bp, Artificial Sequence
  ENSG00000135378_13 (sequence is synthesized)
ttgtgttgaatattaaaaaagcaaggatgtctaaccattaagattatccaaaataggtgggcggatcac

SEQ ID NO: 318736 - DNA, 74 bp, Artificial Sequence
  ENSG00000135378_14 (sequence is synthesized)
acatggcaaaaccccgtctctacaaaaatacaaaagaaattagccagacatgatggcgggtgcctccgggaggt

SEQ ID NO: 318737 - DNA, 76 bp, Artificial Sequence
  ENSG00000135378_15 (sequence is synthesized)
tatccaaaaagatattggacctactctttcttaggatttttttggcggggggttagaaatacttcacagaatttga

SEQ ID NO: 318738 - DNA, 120 bp, Artificial Sequence
  ENSG00000135378_16 (sequence is synthesized)
tttttttggcggggggttagaaatacttcacagaatttgacatttcagtataaatctgtgaccttaatataatcacttggttttatatgttaaattattgcacagcagtcatcatatttt

SEQ ID NO: 318739 - DNA, 120 bp, Artificial Sequence
  ENSG00000135378_17 (sequence is synthesized)
gcagagtttagttcttaactcttgctgtcagtcatgttttattataggtagtggggtcagtagttttcttcttctaaaaaatactatttgctatgaagttagttcttcagaagatacaag

SEQ ID NO: 318740 - DNA, 120 bp, Artificial Sequence
  ENSG00000135378_18 (sequence is synthesized)
tttgcaatgaaaaggatttgcaagggttgttatgctatcaaataaacagacctaaaatctaggagacactagaacttaatgaagttgcccctgttactgattagtaaatactcccatctt

SEQ ID NO: 318741 - DNA, 120 bp, Artificial Sequence
  ENSG00000135378_19 (sequence is synthesized)
cgttgcaaaattatctctctgtataactacatatgattattttgaaatttgttaaacttcataagtaatagtttgagaatgtggaaaaagtaatttgcttttctgctcttaaaataatat

SEQ ID NO: 318742 - DNA, 120 bp, Artificial Sequence
  ENSG00000135378_20 (sequence is synthesized)
tgattaatgttaccagaaaccttttgcatctcttaatatgtctgaacacaaaaggaaaacaccataatcatataaacccattctttgtctcttcttctaaatcatatgtataaccagttt

SEQ ID NO: 318743 - DNA, 120 bp, Artificial Sequence
  ENSG00000135378_21 (sequence is synthesized)
ttccttaagaatgtagcagcatataagctataaatttctggagtatatgcacacaaatttatctgggtgggtatgtaggtatatgtgagtttgtttcctcttccaggagctcaagaaata

SEQ ID NO: 318744 - DNA, 120 bp, Artificial Sequence
  ENSG00000135378_22 (sequence is synthesized)
gaaatttctgtgctttatgtttttgccaggctattacattttcttatcatttaggatcacttataaaatgatcattgtttattttgttttataatttttacaggagtgagactgcaaacc

SEQ ID NO: 318745 - DNA, 120 bp, Artificial Sequence
  ENSG00000135378_23 (sequence is synthesized)
cacatgtttgatagttcctaccaaattaaaagtttagaaagcataaatcatattacagtgcatatgtgagtgtatgtctctcttttaagatgcatcatcttaaggcagataaaagtaagt

SEQ ID NO: 318746 - DNA, 120 bp, Artificial Sequence
  ENSG00000135378_24 (sequence is synthesized)
ccttaatcattacagactgccaaagactttatccttttagattctcagtctctttgttgcttgttgcaaataaatcatctagcaacatttacatttaattaggaaatctaacttgctttt

SEQ ID NO: 318747 - DNA, 120 bp, Artificial Sequence
  ENSG00000135378_25 (sequence is synthesized)
aaaagttacccacgttgcatataaaaatcttgctattccttgtgtcttggctttacataagcacttttgctcatgtgactttgcactttgcacttattttaatcctctttaaagggctac

SEQ ID NO: 318748 - DNA, 120 bp, Artificial Sequence
  ENSG00000135378_26 (sequence is synthesized)
aggcaaattctactttgccataatcacactaaggcatggaagaacaacttgcccagaatctagcaggttggtgacaactgggtttagaatgagtgagcacacttttctagtcccatgtca

SEQ ID NO: 318749 - DNA, 120 bp, Artificial Sequence
  ENSG00000135378_27 (sequence is synthesized)
tgcctataaaattacactgcctcgaattatgaaattcagggatcttgtacataattctaagtttgggacagaaatttacaagcatttctcatatatacatacatttatatatgtacatgt

SEQ ID NO: 318750 - DNA, 120 bp, Artificial Sequence
  ENSG00000135378_28 (sequence is synthesized)
tattctcatatacatatgaaaatatttatgatgaatagaattataagatatgtatgtatcttgcactgaatcataatttgaaatatttcatgaattcatttacttctattgactcccaaa

SEQ ID NO: 318751 - DNA, 120 bp, Artificial Sequence
  ENSG00000135378_29 (sequence is synthesized)
tctattgactcccaaaattctaactgcaagctagcttcagaacctgtgagaaccccaccccacccaagcagctgcctagatttgtctactgctatcattttgtgtaaagcagttgctcta

SEQ ID NO: 318752 - DNA, 120 bp, Artificial Sequence
  ENSG00000135378_30 (sequence is synthesized)
acttgaatgagtctagaattcatcattaagattgtgatatttatagagcatccaatgtggagatcatgatactttaaatataaaaaggaaaatatgatagaactgttattgacaaatgct

SEQ ID NO: 318753 - DNA, 120 bp, Artificial Sequence
  ENSG00000135378_31 (sequence is synthesized)
tataatgattgaagggaaagtatctcaacattgtatcagtcacatatatttctgttgctttcaccattttctattcctgttgtaagtttggtggtagatttagttttgtttggtttatct

SEQ ID NO: 318754 - DNA, 120 bp, Artificial Sequence
  ENSG00000135378_32 (sequence is synthesized)
gttttgtttgtgttttgtctcctggcaattgattagtgttaatcattaaatctattttgacacaaggttttatatataattagatcagttttccactttattacaattaagaaatgagta

SEQ ID NO: 318755 - DNA, 120 bp, Artificial Sequence
  ENSG00000135378_33 (sequence is synthesized)
aaatatggatataaaaggagaattggattgaaaagacaaatacacatttacaaggtcatacctttggtaggacagacaattccatatagaatattctcttttgataatgaaaaaaattaa

SEQ ID NO: 318756 - DNA, 120 bp, Artificial Sequence
  ENSG00000135378_34 (sequence is synthesized)
tcttttgataatgaaaaaaattaaagagagcacaaactttgactatgtcaaagtatttttatttttaattttttgagacaaggtcttgctctgctacccaggctggagtgcagtggtgca

SEQ ID NO: 318757 - DNA, 66 bp, Artificial Sequence
  ENSG00000135378_35 (sequence is synthesized)
ggagtgcagtggtgcaatcacaactcactgtagcctgaacttccacctcggtacacctggctaatt

SEQ ID NO: 318758 - DNA, 72 bp, Artificial Sequence
  ENSG00000135378_36 (sequence is synthesized)
actgctgtgtcaaagttttgcatcttttttttttttttttccagaaggagtctcactttgtcacccaggctg

SEQ ID NO: 318759 - DNA, 63 bp, Artificial Sequence
  ENSG00000135378_37 (sequence is synthesized)
cacactggactgctgtgtcaaagttttgcatcttttttttttttttttccagaaacctccgcc

SEQ ID NO: 318760 - DNA, 120 bp, Artificial Sequence
  ENSG00000135378_38 (sequence is synthesized)
gcgtgagccactgtgcctggccccaagttttgcatcttttaatgccctctgaacaaatacatagagaaaactctcagaacaattaaaacctgcagagcaacagtgtcctccatgtcttag

SEQ ID NO: 318761 - DNA, 120 bp, Artificial Sequence
  ENSG00000135378_39 (sequence is synthesized)
cagagcaacagtgtcctccatgtcttaggtttcaagtttgcctctaaaattctaatccatatttttctacttctcagataatttatgtgtgtgtactcttcctagacgtacaagagactt

SEQ ID NO: 318762 - DNA, 120 bp, Artificial Sequence
  ENSG00000135378_40 (sequence is synthesized)
tttaatgctaaatatttgtcagtgcttaacaaaaactcaatttcacattactcatattgtttttgttttaattgaatgtgaattaaatttttattagttatttgatttggaatgttatgt

SEQ ID NO: 318763 - DNA, 120 bp, Artificial Sequence
  ENSG00000135378_41 (sequence is synthesized)
atgccattaacactattaggggaatctctagcatttctgtatttttaaagaatttgattcttttgtagattctgcctgtgtggtcattttaaaacatgtgtgacatatatcagtaccttc

SEQ ID NO: 318764 - DNA, 120 bp, Artificial Sequence
  ENSG00000135378_42 (sequence is synthesized)
attcttctatattttgtgtctcctccaacctccaactttttttgttttttgaaaaatgtttctctaacacctcaacagtttaaggtaatttagtacacatatatcagtatttttgtgatc

SEQ ID NO: 318765 - DNA, 120 bp, Artificial Sequence
  ENSG00000135378_43 (sequence is synthesized)
tgaaaaagcaacccattttctaaattcatatttttcctaaaactttactatgtttttattttaagaggtttcctgttatatacactttttacacatgcaaataaactttataccaagtga

SEQ ID NO: 318766 - DNA, 120 bp, Artificial Sequence
  ENSG00000135387_0 (sequence is synthesized)
cactaggagcggctctcggtgcagcgggacagggcgaagcggcctgcgcccacggagcgcgcgacactgcccggaagggaccaccacccttgccccctcagctgcccactcgtgatttcc

SEQ ID NO: 318767 - DNA, 120 bp, Artificial Sequence
  ENSG00000135387_1 (sequence is synthesized)
ttccagcggcctccgcgcgcgcacgatgccctcggccaccagccacagcgggagcggcagcaagtcgtccggaccgccaccgccgtcgggttcctccgggagtgaggcggccgcgggagc

SEQ ID NO: 318768 - DNA, 120 bp, Artificial Sequence
  ENSG00000135387_2 (sequence is synthesized)
gccgccgcgccggcttctcagcaccccgcaaccggcaccggcgctgtccagaccgaggccatgaagcagattctcggggtgatcgacaagaaacttcggaacctggagaagaaaaagggt

SEQ ID NO: 318769 - DNA, 120 bp, Artificial Sequence
  ENSG00000135387_3 (sequence is synthesized)
aagcttgatgattaccaggaacgaatgaacaaaggggaaaggcttaatcaagatcagctggatgccgtttctaagtaccaggaagtcacaaataatttggagtttgcaaaagaattacag

SEQ ID NO: 318770 - DNA, 120 bp, Artificial Sequence
  ENSG00000135387_4 (sequence is synthesized)
aggagtttcatggcactaagtcaagatattcagaaaacaataaagaagacagcacgtcgggagcagcttatgagagaagaagctgaacagaaacgtttaaaaactgtacttgagctacag

SEQ ID NO: 318771 - DNA, 120 bp, Artificial Sequence
  ENSG00000135387_5 (sequence is synthesized)
tatgttttggacaaattgggagatgatgaagtgcggactgacctgaaacaaggtttgaatggagtgccaatattgtccgaagaggagttgtcattgttggatgaattctataagctagta

SEQ ID NO: 318772 - DNA, 120 bp, Artificial Sequence
  ENSG00000135387_6 (sequence is synthesized)
gaccctgaacgggacatgagcttgaggttgaatgaacagtatgaacatgcctccattcacctgtgggacctgctggaagggaaggaaaaacctgtatgtggaaccacctataaagttcta

SEQ ID NO: 318773 - DNA, 120 bp, Artificial Sequence
  ENSG00000135387_7 (sequence is synthesized)
aaggaaattgttgagcgtgtttttcagtcaaactactttgacagcacccacaaccaccagaatgggctgtgtgaggaagaagaggcagcctcagcacctgcagttgaagaccaggtacct

SEQ ID NO: 318774 - DNA, 120 bp, Artificial Sequence
  ENSG00000135387_8 (sequence is synthesized)
gaagctgaacctgagccagcagaagagtacactgagcaaagtgaagttgaatcaacagagtatgtaaatagacagttcatggcagaaacacagttcaccagtggtgaaaaggagcaggta

SEQ ID NO: 318775 - DNA, 120 bp, Artificial Sequence
  ENSG00000135387_9 (sequence is synthesized)
gatgagtggacagttgaaacggttgaggtggtaaattcactccagcagcaacctcaggctgcatccccttcagtaccagagccccactctttgactccagtggctcaggcagatcccctt

SEQ ID NO: 318776 - DNA, 120 bp, Artificial Sequence
  ENSG00000135387_10 (sequence is synthesized)
gtgagaagacagcgagtacaagaccttatggcacaaatgcagggtccctataatttcatacaggattcaatgctggattttgaaaatcagacacttgatcctgccattgtatctgcacag

SEQ ID NO: 318777 - DNA, 120 bp, Artificial Sequence
  ENSG00000135387_11 (sequence is synthesized)
cctatgaatccaacacaaaacatggacatgccccagctggtttgccctccagttcattctgaatctagacttgctcagcctaatcaagttcctgtacaaccagaagcgacacaggttcct

SEQ ID NO: 318778 - DNA, 120 bp, Artificial Sequence
  ENSG00000135387_12 (sequence is synthesized)
ttggtatcatccacaagtgaggggtacacagcatctcaacccttgtaccagccttctcatgctacagagcaacgaccacagaaggaaccaattgatcagattcaggcaacaatctcttta

SEQ ID NO: 318779 - DNA, 120 bp, Artificial Sequence
  ENSG00000135387_13 (sequence is synthesized)
aatacagaccagactacagcatcatcatcccttcctgctgcgtctcagcctcaagtatttcaggctgggacaagcaaacctttacatagcagtggaatcaatgtaaatgcagctccattc

SEQ ID NO: 318780 - DNA, 120 bp, Artificial Sequence
  ENSG00000135387_14 (sequence is synthesized)
caatccatgcaaacggtgttcaatatgaatgccccagttcctcctgttaatgaaccagaaactttaaaacagcaaaatcagtaccaggccagttataaccagagcttttctagtcagcct

SEQ ID NO: 318781 - DNA, 120 bp, Artificial Sequence
  ENSG00000135387_15 (sequence is synthesized)
caccaagtagaacaaacagagcttcagcaagaacagcttcaaacagtggttggcacttaccatggttccccagaccagtcccatcaagtgactggtaaccaccagcagcctcctcagcag

SEQ ID NO: 318782 - DNA, 120 bp, Artificial Sequence
  ENSG00000135387_16 (sequence is synthesized)
aacactggatttccacgtagcaatcagccctattacaatagtcgtggtgtgtctcgtggaggctcccgtggtgctagaggcttgatgaatggataccggggccctgccaatggattcaga

SEQ ID NO: 318783 - DNA, 120 bp, Artificial Sequence
  ENSG00000135387_17 (sequence is synthesized)
ggaggatatgatggttaccgcccttcattctctaacactccaaacagtggttatacacagtctcagttcagtgctccccgggattactctggctatcaacgggatggatatcagcagaat

SEQ ID NO: 318784 - DNA, 120 bp, Artificial Sequence
  ENSG00000135387_18 (sequence is synthesized)
ttcaagcgaggctctgggcagagtggaccacggggagccccacgaggtcgtggagggcccccaagacccaacagagggatgccgcaaatgaacactcagcaagtgaattaatctgattca

SEQ ID NO: 318785 - DNA, 120 bp, Artificial Sequence
  ENSG00000135387_19 (sequence is synthesized)
caggattatgtttaatcgccaaaaacacactggccagtgtaccataatatgttaccagaagagttattatctatttgttctccctttcaggaaacttattgtaaagggactgttttcatc

SEQ ID NO: 318786 - DNA, 120 bp, Artificial Sequence
  ENSG00000135387_20 (sequence is synthesized)
ccataaagacaggactacaattgtcagctttctattacctggatatggaaggaaactatttttactctgcatgttctgtcctaagcgtcatcttgagccttgcacatgatactcagattc

SEQ ID NO: 318787 - DNA, 120 bp, Artificial Sequence
  ENSG00000135387_21 (sequence is synthesized)
ctcacccttgcttaggagtaaaacaatatactttacagggtgataataatctccatagttatttgaagtggcttgaaaaaggcaagattgacttttatgacattggataaaatctacaaa

SEQ ID NO: 318788 - DNA, 120 bp, Artificial Sequence
  ENSG00000135387_22 (sequence is synthesized)
ttaaattggagcactgaacgttcagatgcataccaaattatgcatgggtcctaatcacacatataaggctggctaccagctttgacacagcactgttcatctggccaaacaactgtggtt

SEQ ID NO: 318789 - DNA, 120 bp, Artificial Sequence
  ENSG00000135387_23 (sequence is synthesized)
aaaaacacatgtaaaatgctttttaacagctgatactgtataagacaaagccaagatgcaaaattaggctttgattggcactttttgaaaaatatgcaacaaatatgggatgtaatccgg

SEQ ID NO: 318790 - DNA, 120 bp, Artificial Sequence
  ENSG00000135387_24 (sequence is synthesized)
atggccgcttctgtacttaatgtgaaatatttagatacctttttgaacacttaacagtttctttgagacaatgacttttgtaaggattggtactatctatcattccttatgacatgtaca

SEQ ID NO: 318791 - DNA, 120 bp, Artificial Sequence
  ENSG00000135387_25 (sequence is synthesized)
ttgtctgtcactaatccttggattttgctgtattgtcacctaaattggtacaggtactgatgaaaatctctagtggataatcataacactctcggtcacatgtttttccttcagcttgaa

SEQ ID NO: 318792 - DNA, 120 bp, Artificial Sequence
  ENSG00000135387_26 (sequence is synthesized)
agcttttttttaaaaggaaaagataccaaatgcctgctgctaccacccttttcaattgctatcttttgaaaggcaccagtatgtgttttagattgatttccctgtttcagggaaatcacg

SEQ ID NO: 318793 - DNA, 120 bp, Artificial Sequence
  ENSG00000135387_27 (sequence is synthesized)
gacagtagtttcagttctgatggtataagcaaaacaaataaaacgtttataaaagttgtatcttgaaacactggtgttcaacagctagcagcttatgtgattcaccccatgccacgttag

SEQ ID NO: 318794 - DNA, 120 bp, Artificial Sequence
  ENSG00000135387_28 (sequence is synthesized)
tgtcacaaattttatggtttatctccagcaacatttctctagtacttgcacttattatcttttgtctaatttaaccttaactgaattctccgtttctcctggaggcatttatattcagtg

SEQ ID NO: 318795 - DNA, 120 bp, Artificial Sequence
  ENSG00000135387_29 (sequence is synthesized)
ataattccttcccttagatgcatagggagagtctctaaatttgatggaaatggacacttgagtagtgacttagccttatgtactctgttggaatttgtgctagcagtttgagcactagtt

SEQ ID NO: 318796 - DNA, 120 bp, Artificial Sequence
  ENSG00000135387_30 (sequence is synthesized)
ctgtgtgcctaggaagttaatgctgcttattgtctcattctgacttcatggagaattaatcccacctttaagcaaaggctactaagttaatggtattttctgtgcagaaattaaatttta

SEQ ID NO: 318797 - DNA, 120 bp, Artificial Sequence
  ENSG00000135387_31 (sequence is synthesized)
ttttcagcatttagcccaggaattcttccagtaggtgctcagctatttaaaaacaaaactattctcaaacattcatcattagacaactggagtttttgctggttttgtaacctaccaaaa

SEQ ID NO: 318798 - DNA, 120 bp, Artificial Sequence
  ENSG00000135387_32 (sequence is synthesized)
tggataggctgttgaacattccacattcaaaagttttgtagggtggtgggaaatgggggatcttcaatgtttattttaaaataaaataaaataagttcttgacttttctcatgtgtggtt

SEQ ID NO: 318799 - DNA, 120 bp, Artificial Sequence
  ENSG00000135387_33 (sequence is synthesized)
gtggtacatcatattggaagggttaacctgttactttggcaaatgagtatttttttgctagcacctccccttgcgtgctttaaatgacatctgcctgggatgtaccacaaccatatgtta

SEQ ID NO: 318800 - DNA, 120 bp, Artificial Sequence
  ENSG00000135387_34 (sequence is synthesized)
cctgtatcttaggggaatggataaaatatttgtggtttactgggtaatccctagatgatgtatgcttgcagtcctatataaaactaaatttgctatctgtgtagaaaataatttcatgac

SEQ ID NO: 318801 - DNA, 120 bp, Artificial Sequence
  ENSG00000135387_35 (sequence is synthesized)
atttacaatcaggactgaagtaagttcttcacacagtgacctctgaatcagtttcagagaagggatgggggagaaaatgccttctaggttttgaacttctatgcattagtgcagatgttg

SEQ ID NO: 318802 - DNA, 120 bp, Artificial Sequence
  ENSG00000135387_36 (sequence is synthesized)
tgaatgtgtaaaggtgttcatagtttgactgtttctatgtatgttttttcaaagaattgttcctttttttgaactataatttttctttttttggttattttaccatcacagtttaaatgt

SEQ ID NO: 318803 - DNA, 120 bp, Artificial Sequence
  ENSG00000135387_37 (sequence is synthesized)
atatcttttatgtctctactcagaccatatttttaaaggggtgcctcattatggggcagagaacttttcaataagtctcattaagatctgaatcttggttctaagcattctgtataatat

SEQ ID NO: 318804 - DNA, 120 bp, Artificial Sequence
  ENSG00000135387_38 (sequence is synthesized)
gtgattgcttgtcctagctgcagaaggccttttgtttggtcaaatgcatattttagcagagtttcaaggaaatgattgtcacacatgtcactgtagcctcttggtgtagcaagctcacat

SEQ ID NO: 318805 - DNA, 120 bp, Artificial Sequence
  ENSG00000135387_39 (sequence is synthesized)
acaaaatacttttgtatatgcataatataaatcatctcatgtggatatgaaacttcttttttaaaacttaaaaaggtagaatgttattgattaccttgattagggcagttttatttccag

SEQ ID NO: 318806 - DNA, 120 bp, Artificial Sequence
  ENSG00000135387_40 (sequence is synthesized)
atcctaataattcctaaaaaatatggaaaagttttttttcaatcattgtaccttgatattaaaacaaatatcctttaagtatttctaatcagttagcttctacagttcttttgtctcctt

SEQ ID NO: 318807 - DNA, 120 bp, Artificial Sequence
  ENSG00000135387_41 (sequence is synthesized)
ttatatgcagctcttacgtgggagacttttccacttaaaggagacatagaatgtgtgcttattctcagaaggttcattaactgaggtgatgagttaacaactagttgagcagtcagcttc

SEQ ID NO: 318808 - DNA, 120 bp, Artificial Sequence
  ENSG00000135387_42 (sequence is synthesized)
ctaagtgttttaggacatttgttcattatattttccgtcatataactagaggaagtggaatgcagataagtgccgaattcaaacccttcattttatgtttaagctcctgaatctgcattc

SEQ ID NO: 318809 - DNA, 120 bp, Artificial Sequence
  ENSG00000135387_43 (sequence is synthesized)
cacttgggttgtttttaagcattctaaattttagttgattataagttagatttcacagaatcagtattgcccttgatcttgtcctttttatggagttaacggggaggaagacccctcagg

SEQ ID NO: 318810 - DNA, 120 bp, Artificial Sequence
  ENSG00000135387_44 (sequence is synthesized)
aaaacgaaagtaaattgttaaggctcatcttcatacctttttccattttgaatcctacaaaaatactgcaaaagactagtgaatgtttaaaattacactagattaaataatatgaaagtc

SEQ ID NO: 318811 - DNA, 120 bp, Artificial Sequence
  ENSG00000135387_45 (sequence is synthesized)
gcgggtcgcgcgcgcgcccgcgcactcttcctgccctcgaggcgcgccgcgccccctcccccacccgctcgcgtaggctaccgctcgctgcgcgttttgtcccgcgtctcgccccgtccg

SEQ ID NO: 318812 - DNA, 120 bp, Artificial Sequence
  ENSG00000135387_46 (sequence is synthesized)
agagtggaccacggggagccccacgaggtaatattttgtggtggtgatcctagctcctaagtggagcttctgttctggccttggaagagctgttaatagtctgcatgttaggaatacatt

SEQ ID NO: 318813 - DNA, 120 bp, Artificial Sequence
  ENSG00000135387_47 (sequence is synthesized)
tatcctttccagacttgttgctagggattaaatgaaatgctctgtttctaaaacttaatcttggacccaaattttaatttttgaatgatttaattttccctgttactatataaactgtct

SEQ ID NO: 318814 - DNA, 120 bp, Artificial Sequence
  ENSG00000135387_48 (sequence is synthesized)
tgaaaactagaacatattctcttctcagaaaaagtgtttttccaactgaaaattatttttcaggtcctaaaacctgctaaatgtttttaggaagtacttactgaaacatttttgtaagac

SEQ ID NO: 318815 - DNA, 120 bp, Artificial Sequence
  ENSG00000135387_49 (sequence is synthesized)
atttttggaatgagattgaacatttatataaatttattattcctctttcatttttttgaaacatgcctattatattttagggccagacaccctttaatggccggataagccatagttaac

SEQ ID NO: 318816 - DNA, 120 bp, Artificial Sequence
  ENSG00000135387_50 (sequence is synthesized)
atttagagaaccatttagaagtgatagaactaatggaatttgcaatgccttttggacctctattagtgatataaatatcaagttatttctgacttttaaacaaaactcccaaattcctaa

SEQ ID NO: 318817 - DNA, 120 bp, Artificial Sequence
  ENSG00000135387_51 (sequence is synthesized)
cttattgagctatacttaaaaaaaattacaggtttagagagttttttgtttttcttttactgttggaaaactacttcccattttggcaggaagttaacctatttaacaattagagctagc

SEQ ID NO: 318818 - DNA, 120 bp, Artificial Sequence
  ENSG00000135387_52 (sequence is synthesized)
atttcatgtagtctgaaattctaaatggttctctgatttgagggaggttaaacatcaaacaggtttcctctattggccataacatgtataaaatgtgtgttaaggaggaattacaacgta

SEQ ID NO: 318819 - DNA, 120 bp, Artificial Sequence
  ENSG00000135387_53 (sequence is synthesized)
ctttgatttgaatactagtagaaactggccaggaaaaaggtacatttttctaaaaattaatggatcacttgggaattactgacttgactagaagtatcaaaggatgtttgcatgtgaatg

SEQ ID NO: 318820 - DNA, 120 bp, Artificial Sequence
  ENSG00000135387_54 (sequence is synthesized)
tgggttatgttctttcccaccttgtagcatattcgatgaaagttgagttaactgatagctaaaaatctgttttaacagcatgtaaaaagttattttatctgttaaaagtcattatacagt

SEQ ID NO: 318821 - DNA, 120 bp, Artificial Sequence
  ENSG00000135387_55 (sequence is synthesized)
tttgaatgttatgtagtttctttttaacagtttaggtaataaggtctgttttcattctggtgcttttattaattttgatagtatgatgttacttactactgaaatgtaagctagagtgta

SEQ ID NO: 318822 - DNA, 120 bp, Artificial Sequence
  ENSG00000135387_56 (sequence is synthesized)
cactagaatgtaagctccatgagagcaggtaccttgtctgtcttctctgctgtatctattcccaacgcttgatgatggtgcctggcacatagtaggcactcaataaatatttgttgaatg

SEQ ID NO: 318823 - DNA, 120 bp, Artificial Sequence
  ENSG00000135387_57 (sequence is synthesized)
gtctctgaggcccgatttctctgacgagggcccaaaatgaagaggtccctgcgcggggggctccgggttcaaccgaccgcctcgtggagttggggcggcctgcgtcctgcagccttgggg

SEQ ID NO: 318824 - DNA, 120 bp, Artificial Sequence
  ENSG00000135387_58 (sequence is synthesized)
tatacaaatttaaagagagatggtaatattaatttctcccttctttagcagttgtatctatttcttagccttatgcgtcttagaggtaacttgtttttttaacagtcaattttgtaagca

SEQ ID NO: 318825 - DNA, 120 bp, Artificial Sequence
  ENSG00000135387_59 (sequence is synthesized)
aatacatactgaaagattgccgtgttaataatggagattcaacaaactgcacaaagcttataaagagtacatgaatgtttagcaaagagaagaaatacagctgtgataatcaagtgtaaa

SEQ ID NO: 318826 - DNA, 120 bp, Artificial Sequence
  ENSG00000135387_60 (sequence is synthesized)
gagcacaaagcgaaagcagagggggagggcagagaccaggcagccgccccgactggcctccttaggcccccctctaaaaaaaaaaaaaatcgagccacacccacgattttttggattcaa

SEQ ID NO: 318827 - DNA, 120 bp, Artificial Sequence
  ENSG00000135387_61 (sequence is synthesized)
tatttagtccttgtagatcaaactactgagaagcaaagcccaggaggacatctatcatggatatccctcttctggcaccctaatggcacctactgaacttaatttaaaaaatccatttca

SEQ ID NO: 318828 - DNA, 120 bp, Artificial Sequence
  ENSG00000135387_62 (sequence is synthesized)
tgattggagaaaggaagaaaacagcagcagcagaggcagagctggaatgtagcaacagctggaatccagaatgacattctaagggggagggttgttaaggcacaaatgatttttctggga

SEQ ID NO: 318829 - DNA, 120 bp, Artificial Sequence
  ENSG00000135387_63 (sequence is synthesized)
tttaagaccttacttagggtaagcttgatgattaccaggaacgaatgaacaaaggggaaaggcttaatcaagatcagctggatgccgtttctaagtaccaggaagtcacaaataatttgg

SEQ ID NO: 318830 - DNA, 120 bp, Artificial Sequence
  ENSG00000135387_64 (sequence is synthesized)
cccctcctcccaccccctggcccacacgccccgtctccacgttcagcgggagcttcgtgcccagaaaacgggctcttggaagaggcacttgtcacctgactcggacgcggcactgtaccc

SEQ ID NO: 318831 - DNA, 120 bp, Artificial Sequence
  ENSG00000135387_65 (sequence is synthesized)
gtagggaccgttgcagtggccgttggcggccggcgcggcgatgccccgcctccggcgcgagcctcggagcccccgggctgatgccctcggccaccagccacagcgggagcggcagcaagt

SEQ ID NO: 318832 - DNA, 120 bp, Artificial Sequence
  ENSG00000135387_66 (sequence is synthesized)
aaagtaacttttttttctgtcttctcagtgttttaagtggtagatagcagcaaaaaggtcaagttacagcttataaagagtacatgaatgtttagcaaagagaagaaatacagctgtgat

SEQ ID NO: 318833 - DNA, 120 bp, Artificial Sequence
  ENSG00000135387_67 (sequence is synthesized)
tgtaaaagcatttccaaggctgctgattgcatgtctttttattttttttaattccctacttccatttcacagcatattatactcccctttaagtactatatggtatatatgtctttttcc

SEQ ID NO: 318834 - DNA, 120 bp, Artificial Sequence
  ENSG00000135387_68 (sequence is synthesized)
acattgaatcacttggagggatttttgtatgtgtgtgtgatgtttttgtgtttgagacctctgtgatgtctttatttatgtctgaggtaaaaccaccattgagtttggccatgttataaa

SEQ ID NO: 318835 - DNA, 120 bp, Artificial Sequence
  ENSG00000135387_69 (sequence is synthesized)
tcttgtgctaaaaagtagatgcctttcagaagacgttaatatagcctttcaaataatttgtttggaaggatcaatcatgcaccctgctttcaaaggtttggaattgtggttggagaattt

SEQ ID NO: 318836 - DNA, 120 bp, Artificial Sequence
  ENSG00000135387_70 (sequence is synthesized)
tacccccaatagctgagtctaagggtaggagaaaggtaagagactttattcatgtgtagtttttcttatcattgtatgcaaatttaaggattaaactttaaggagactgtataagacact

SEQ ID NO: 318837 - DNA, 120 bp, Artificial Sequence
  ENSG00000135390_0 (sequence is synthesized)
ccacgttacggatcggcttactccgcggagttggcctcatttctgcagtcggcgctccctgtagtttctcctctcgaacgccaggtggagcaaccggccggataccgccacagccctggc

SEQ ID NO: 318838 - DNA, 120 bp, Artificial Sequence
  ENSG00000135390_1 (sequence is synthesized)
aggcggcgctgtgatgcctgagctgatcctgtatgttgcaatcactctatccgtggctgagcgactcgttggcccgggtcacgcatgcgctgagccttcctttcgctcttcccgctgctc

SEQ ID NO: 318839 - DNA, 120 bp, Artificial Sequence
  ENSG00000135390_2 (sequence is synthesized)
cgcccctctctgtcttctctgcagtgggagcagctctcctgccacagctcctcaccccctgaaaatgttcgcctgctccaagtttgtctccactccctccttggtcaagagcacctcaca

SEQ ID NO: 318840 - DNA, 120 bp, Artificial Sequence
  ENSG00000135390_3 (sequence is synthesized)
gaccggagatactgacagatgagagcctcagcagcttggcagtctcatgtccccttacctcacttgtctctagccgcagcttccaaaccagcgccatttcaagggacatcgacacagcag

SEQ ID NO: 318841 - DNA, 120 bp, Artificial Sequence
  ENSG00000135390_4 (sequence is synthesized)
ccaagttcattggagctggggctgccacagttggggtggctggttctggggctgggattggaactgtgtttgggagcctcatcattggttatgccaggaacccttctctgaagcaacagc

SEQ ID NO: 318842 - DNA, 120 bp, Artificial Sequence
  ENSG00000135390_5 (sequence is synthesized)
tcttctcctacgccattctgggctttgccctctcggaggccatggggctcttttgtctgatggtagcctttctcatcctctttgccatgtgaaggagccgtctccacctcccatagttct

SEQ ID NO: 318843 - DNA, 120 bp, Artificial Sequence
  ENSG00000135390_6 (sequence is synthesized)
cccgcgtctggttggccccgtgtgttccttttcctatacctccccaggcagcctggggaacgtggttggctcagggtttgacagagaaaagacaaataaatactgtattaataagatgtt

SEQ ID NO: 318844 - DNA, 120 bp, Artificial Sequence
  ENSG00000135390_7 (sequence is synthesized)
gcaaaattacattcctgtaatggcgtcgctcggggtcccgggaaattgctccgtgggctttcagcggcggtttttatcgccggccggggtgtgcctgtctgcggctcgcctctcctccgg

SEQ ID NO: 318845 - DNA, 120 bp, Artificial Sequence
  ENSG00000135390_8 (sequence is synthesized)
gaccgtaaagctgctgccgtgatttatcctccccttctcccaaatccgattaaatggaggagctcggggccggggcgccgcggggcccgggagccgggagggggcggcgggaaggacggg

SEQ ID NO: 318846 - DNA, 120 bp, Artificial Sequence
  ENSG00000135390_9 (sequence is synthesized)
gccaaggaggggaggacaaacggcccctcagagagtggcggatttgcctttatttacagccgcggctttctttttattttttattttttatggggtttggtgagcttttcccgtctttct

SEQ ID NO: 318847 - DNA, 120 bp, Artificial Sequence
  ENSG00000135390_10 (sequence is synthesized)
cgtgctgcgttcaagcacgatgcagggacggcaggggtttggaactggataggccttgtcgccctgttccaaagggcagggcaggtcctgtctgggagacaaggaggcctaggaaagatg

SEQ ID NO: 318848 - DNA, 120 bp, Artificial Sequence
  ENSG00000135390_11 (sequence is synthesized)
agggccaggaagcctcccccacctccttccatcaggggaagggcgagcgaaaggggagagaaaacccacgttcaggagagcatgggggcgggaggggagggcgctgcttatcccaactcg

SEQ ID NO: 318849 - DNA, 120 bp, Artificial Sequence
  ENSG00000135390_12 (sequence is synthesized)
cgtagttgaaacctgagcagaggctcgggcaagcctggagtgacctcgcaaccttacagcgggtcgcaggtgcccgttattcctagactgtcccaggagccaggaaagagggattcggat

SEQ ID NO: 318850 - DNA, 120 bp, Artificial Sequence
  ENSG00000135390_13 (sequence is synthesized)
catatttaaccctatcttctggctcgctgatgctgcttctctcatggtttatcaccggaatggaaaggaggaaacggggagtgggggaaagggcgaagccaccagaagcagctgcggcat

SEQ ID NO: 318851 - DNA, 120 bp, Artificial Sequence
  ENSG00000135390_14 (sequence is synthesized)
tttgctgactattcgcccatggagccggtttgccatccagtgatgccagagtcccggcgcgacagaaagcaggactcccaagatcttcctcctgctgcattttaggcactgaaccccaat

SEQ ID NO: 318852 - DNA, 74 bp, Artificial Sequence
  ENSG00000135390_15 (sequence is synthesized)
ccacagccctggcaggcggcgctgtgatgcctgagctgatccttttccgtagcctctgcctcctggattcaagc

SEQ ID NO: 318853 - DNA, 120 bp, Artificial Sequence
  ENSG00000135390_16 (sequence is synthesized)
ccctctctgtcttctctgcagtgggagcagctctcctgccacagctcctcaccccctgaaaatgttcgcctgctccaagtttgtctccactccctccttgactttgctaaaaggaagaat

SEQ ID NO: 318854 - DNA, 120 bp, Artificial Sequence
  ENSG00000135390_17 (sequence is synthesized)
gatccaaaactctaacgtacatgtgaagatggaaaggccatgagaggaaagaaaatcttgtctgatgatgtaacaacgtggcatagttctgaaactcctctccagtcttccttgaccttc

SEQ ID NO: 318855 - DNA, 120 bp, Artificial Sequence
  ENSG00000135390_18 (sequence is synthesized)
atgcattttttaatacgtacaccacccagataattctagttcagatgggcttctcacttcacttggagaaaccctgcctttaggtttttaactcaccttctgtttgaggtaagttcactt

SEQ ID NO: 318856 - DNA, 120 bp, Artificial Sequence
  ENSG00000135390_19 (sequence is synthesized)
ctaccaacttagatacctatagggtgtcagatcttctttagatcttggggagacacaatttaatacttttttttttttttttgagacagtttccctcttgttgcccaggctggagtacaa

SEQ ID NO: 318857 - DNA, 120 bp, Artificial Sequence
  ENSG00000135390_20 (sequence is synthesized)
actaataccttttggatagactaataacagagttcctccttgatcttcctcatcttattaatacaggaaattgaagtattttcaggaatcagatacttccagggatcagcaaagagattg

SEQ ID NO: 318858 - DNA, 120 bp, Artificial Sequence
  ENSG00000135390_21 (sequence is synthesized)
ttccagggatcagcaaagagattgttggagaccttccagtgtcttggccttcaacaaatatctcccaaaactacaaagactctaaagggcaactttttgtttgtttgtttgtttgtttgt

SEQ ID NO: 318859 - DNA, 120 bp, Artificial Sequence
  ENSG00000135390_22 (sequence is synthesized)
tcttgagaagcgttccttttgaataaaaactaaggaaaacttaggcaaaagacactctgggaaaattcctgtggcaactgcaaatcatgaggctatggaaatgggtaacaggtcttacct

SEQ ID NO: 318860 - DNA, 120 bp, Artificial Sequence
  ENSG00000135390_23 (sequence is synthesized)
gaacccaagtgttcacttgttcagaccaggggaagtcacttcattataaggaaatcttgggagctgtgtggggtttctggaagaagtcatgacttcagggttttaattctatttctgcca

SEQ ID NO: 318861 - DNA, 120 bp, Artificial Sequence
  ENSG00000135390_24 (sequence is synthesized)
atgacttaaggtcagtcactgttttctgggccagttaagctttctagggccccttttctgctaataaggatatagtttagtgaataaggagcgtttacaatactgcttctgtaattccag

SEQ ID NO: 318862 - DNA, 120 bp, Artificial Sequence
  ENSG00000135390_25 (sequence is synthesized)
tctgaggcttagatttcttcttgttctcaagagctataaaaggatatagcaaggttggatgctcccttatggcccaaaggaagtagactttctttccttaaagcaaagtctgagaagcaa

SEQ ID NO: 318863 - DNA, 120 bp, Artificial Sequence
  ENSG00000135390_26 (sequence is synthesized)
ggggtggctggttctggggctgggattggaactgtgtttgggagcctcatcattggttatgccaggtgcatccacggagtgggcttcaagaagcgttccccttgggcatgcaaagagatc

SEQ ID NO: 318864 - DNA, 120 bp, Artificial Sequence
  ENSG00000135390_27 (sequence is synthesized)
gtctgggccaaaggaataaggaatgtccaagaccttatccgtatgcggttgtccagaaaacataatgaggatgaagattcaccaaataagctctatactttggttaccaatgtacccgtt

SEQ ID NO: 318865 - DNA, 120 bp, Artificial Sequence
  ENSG00000135390_28 (sequence is synthesized)
tggttaccaatgtacccgttaccgctttcaaaaatctacaggcaatgtggatgagaactaactgctgatagtcagatacatcaaataaagttataaaattgctttcaaaaataaaaataa

SEQ ID NO: 318866 - DNA, 120 bp, Artificial Sequence
  ENSG00000135390_29 (sequence is synthesized)
cgaccgtatgttaacactgaattctgagtaggagttttgttttggcagtgtgacgactgcgcatgctcggaaaggggacgcaagtccgagatcccaaacgcggtacagaccaaaccgcag

SEQ ID NO: 318867 - DNA, 120 bp, Artificial Sequence
  ENSG00000135392_0 (sequence is synthesized)
tggaagtaggcccaggtcgccggcggccgcggggacggaaggcggaagcagagcgtgagcgggaggcggagccgggagagcggctctcgtagctcaccctggccccaggccgggcggctc

SEQ ID NO: 318868 - DNA, 120 bp, Artificial Sequence
  ENSG00000135392_1 (sequence is synthesized)
gagggggaggagttaccgccgttcttcggcatcagaacacaccatgatggctgtgacctaagaccctcaggaagccccggggtcatggcccagaagcaccccggagaaagagggttgtat

SEQ ID NO: 318869 - DNA, 120 bp, Artificial Sequence
  ENSG00000135392_2 (sequence is synthesized)
ggagcccaccacagtggtggtgcctccctcaggactttaggaccctccgtggaccctgaaataccttcattctcaggactcagggactcagcagggactgctcctaatggtacccgctgc

SEQ ID NO: 318870 - DNA, 120 bp, Artificial Sequence
  ENSG00000135392_3 (sequence is synthesized)
ctcacagagcactctggtcctaagcacacacagcacccaaacccagcccattggttggacccaagccatggccccccagggggtccaggaccacctagagatgcagaggaccctgatcag

SEQ ID NO: 318871 - DNA, 120 bp, Artificial Sequence
  ENSG00000135392_4 (sequence is synthesized)
agtgagacgtcttcagaagaagaatcaggagtggaccaggaactctcaaaagaaaacgagactgggaaccagaaggatgggaactcttttctttccattccatctgcttgcaactgccag

SEQ ID NO: 318872 - DNA, 120 bp, Artificial Sequence
  ENSG00000135392_5 (sequence is synthesized)
ggaacacctggaattccagaagggccttactctgagggaggaaatggttcttctagcaacttttgccaccactgtacctctccagctttgggggaagatgagttggaagaggaatatgat

SEQ ID NO: 318873 - DNA, 120 bp, Artificial Sequence
  ENSG00000135392_6 (sequence is synthesized)
gatgaagaatctctcaagttccccagtgatttttcacgtgtgtccagcggaaagaaacccccatcccggagacagcggcaccgctttccaacgaaggaggatactcgggagggtggacgt

SEQ ID NO: 318874 - DNA, 120 bp, Artificial Sequence
  ENSG00000135392_7 (sequence is synthesized)
agggatcccaggtcccctggtcgacatcggctgggtcggaaacgaagtcaggcagataagcgcaaaggcctgggattgtggggagccgaggaactatgtcaacttggacaggcaggcttt

SEQ ID NO: 318875 - DNA, 120 bp, Artificial Sequence
  ENSG00000135392_8 (sequence is synthesized)
tggtggctgattgaactgctggtattggtgggagagtacgtagaaacttgtggccatctcatctatgcctgcaggcaactgaaaagcagtgatttggacctttttcgagtttggatggga

SEQ ID NO: 318876 - DNA, 120 bp, Artificial Sequence
  ENSG00000135392_9 (sequence is synthesized)
gtgtggacagggcggttagggggctgggcccaggtcatgtttcagtttctaagccaggggttttactgtggagtaggactgtttactcgttttcttaagctgctgggtgctttgctgctc

SEQ ID NO: 318877 - DNA, 120 bp, Artificial Sequence
  ENSG00000135392_10 (sequence is synthesized)
ctggctctggccctctttttgggctttctacagttgggatggcggtttctggtgggactaggtgaccggttaggctggagggataaggctacctggctcttctcttggctggattctcca

SEQ ID NO: 318878 - DNA, 120 bp, Artificial Sequence
  ENSG00000135392_11 (sequence is synthesized)
gccttgcagcgttgcttgactctgctgagagatagcaggccatggcagcggctggtaagaatagttcagtggggctggctggagttgccttgggtcaagcagaatattaataggcagggg

SEQ ID NO: 318879 - DNA, 120 bp, Artificial Sequence
  ENSG00000135392_12 (sequence is synthesized)
aatgcacctgtagctagtgggcgctactgccagcctgaagaggaagtggctcgactcttgaccatggctggggttcctgaggatgagctaaaccctttccatgtactgggggttgaggcc

SEQ ID NO: 318880 - DNA, 120 bp, Artificial Sequence
  ENSG00000135392_13 (sequence is synthesized)
gccttcaaggttttgcgagcagcttgggacattgtcagcaatgctgaaaagcgaaaggagtatgagatgaaacgaatggcagagaatgagctgagccggtcagtaaatgagtttctgtcc

SEQ ID NO: 318881 - DNA, 120 bp, Artificial Sequence
  ENSG00000135392_14 (sequence is synthesized)
aagctgcaagatgacctcaaggaggcaatgaatactatgatgtgtagccgatgccaaggaaagcataggaggtttgaaatggaccgggaacctaagagtgccagatactgtgctgagtgt

SEQ ID NO: 318882 - DNA, 120 bp, Artificial Sequence
  ENSG00000135392_15 (sequence is synthesized)
aataggctgcatcctgctgaggaaggagacttttgggcagagtcaagcatgttgggcctcaagatcacctactttgcactgatggatggaaaggtgtatgacatcacagagtgggctgga

SEQ ID NO: 318883 - DNA, 120 bp, Artificial Sequence
  ENSG00000135392_16 (sequence is synthesized)
tgccagcgtgtaggtatctccccagatacccacagagtcccctatcacatctcatttggttctcggattccaggcaccagagggcggcagagagccaccccagatgcccctcctgctgat

SEQ ID NO: 318884 - DNA, 120 bp, Artificial Sequence
  ENSG00000135392_17 (sequence is synthesized)
cttcaggatttcttgagtcggatctttcaagtacccccagggcagatgcccaatgggaacttctttgcagctcctcagcctgcccctggagccgctgcagcctctaagcccaacagcaca

SEQ ID NO: 318885 - DNA, 120 bp, Artificial Sequence
  ENSG00000135392_18 (sequence is synthesized)
gtacccaagggagaagccaaacctaagcggcggaagaaagtgaggaggcccttccaacgttgatgccccttctctttcctcaaatcaatgtcagggagtcaaaagggctgtagcacagga

SEQ ID NO: 318886 - DNA, 120 bp, Artificial Sequence
  ENSG00000135392_19 (sequence is synthesized)
caaatcaatgtcagggagtcaaaagggctgtagcacaggatggagtttgatttatccctcctcccccaacacctaggaactgaatctttttctttttattttttgagatggagtcttgct

SEQ ID NO: 318887 - DNA, 120 bp, Artificial Sequence
  ENSG00000135392_20 (sequence is synthesized)
tgtcttttgacaataccaaagaaatagggggtagctagagtaaagaacctagggcctggacctgggctggacagtgtatccctttaggtgtgggaactgggtatttccctggggtctgta

SEQ ID NO: 318888 - DNA, 120 bp, Artificial Sequence
  ENSG00000135392_21 (sequence is synthesized)
tgcctttgtcttgtcatttgcttttagggcagatgacactttttcccacccttttaaagctacaagtctatcttctttcttgacccatttcaggagggagccctctcctttatcctgata

SEQ ID NO: 318889 - DNA, 120 bp, Artificial Sequence
  ENSG00000135392_22 (sequence is synthesized)
taatatttaaaagagaacaagaaagcatgtagccctaatgataggagattatcgcatagagttcagagactggaaactgaattttccctcgactttcactttgtgggtaaatcacccaat

SEQ ID NO: 318890 - DNA, 120 bp, Artificial Sequence
  ENSG00000135392_23 (sequence is synthesized)
tttaggctcttttctgcaaggatggccaaaattaatcatttttaaaaagtagattcatgcccactgcccttgggtgagggggaagaatacgggggttcccagaagcccccatgtgatcca

SEQ ID NO: 318891 - DNA, 120 bp, Artificial Sequence
  ENSG00000135392_24 (sequence is synthesized)
agggtttgtattttttttttaagtttgttcatatttgtatgtacatgactatttaaagccaggggattatctttctataaatgtataactggcaacctgtatcttccctctttgttgccc

SEQ ID NO: 318892 - DNA, 120 bp, Artificial Sequence
  ENSG00000135392_25 (sequence is synthesized)
agagaattggagtattgtctcctggagaaccgggtggtcgggatcgtggaccagggaaggggcttttgctggtcggggagcgccaactgggggttcatgggtggaaaaactttcggatca

SEQ ID NO: 318893 - DNA, 120 bp, Artificial Sequence
  ENSG00000135392_26 (sequence is synthesized)
agacggggtataaggctagaggcgtgtgcagaggaggggaccgacggaacggggacccaactgggtctacgtgggggcgggggcgcttgtggacgtccaccaaatagcttggtatgcaga

SEQ ID NO: 318894 - DNA, 120 bp, Artificial Sequence
  ENSG00000135392_27 (sequence is synthesized)
tgagatgtcaagcagcaggtagatgagttcagtgttctttggctcacgggcaaagttctgagccgagccaagttacgctcccagttcctaggcaccgctcggtgatcgggcctggggagc

SEQ ID NO: 318895 - DNA, 120 bp, Artificial Sequence
  ENSG00000135392_28 (sequence is synthesized)
gacggaaggcggaagcagagcgtgagcgggaggcggagccgggagagcggctctcgtagctcaccctggccccaggccgggcggctcgagggggaggagttaccgccgttcttcggtacg

SEQ ID NO: 318896 - DNA, 120 bp, Artificial Sequence
  ENSG00000135392_29 (sequence is synthesized)
gtgcgcgcggtggggggaggaggggtgacatcacaaggcaggcccctccaattctttcccgtgtgtgtggggggacccaggttgcctactgctctagtccaggaccagagacccccaact

SEQ ID NO: 318897 - DNA, 120 bp, Artificial Sequence
  ENSG00000135404_0 (sequence is synthesized)
cgggggtgggcgccttcttccgggtaggggccacgtggccctggccgggcggggggctcggcccaccccgcgccgggcccagtgactcaggccgcagctgttaccgcgtcacatgaggga

SEQ ID NO: 318898 - DNA, 80 bp, Artificial Sequence
  ENSG00000135404_1 (sequence is synthesized)
ttaccgcgtcacatgagggaggccggcggccactcggcgggggaggggaccgtggctggagcccggggcggggccgcgcg

SEQ ID NO: 318899 - DNA, 120 bp, Artificial Sequence
  ENSG00000135404_2 (sequence is synthesized)
aacgcgcagccagccttgggaagcccaggcccggcagccatggcggtggaaggaggaatgaaatgtgtgaagttcttgctctacgtcctcctgctggccttttgcgcctgtgcagtggga

SEQ ID NO: 318900 - DNA, 120 bp, Artificial Sequence
  ENSG00000135404_3 (sequence is synthesized)
ctgattgccgtgggtgtcggggcacagcttgtcctgagtcagaccataatccagggggctacccctggctctctgttgccagtggtcatcatcgcagtgggtgtcttcctcttcctggtg

SEQ ID NO: 318901 - DNA, 120 bp, Artificial Sequence
  ENSG00000135404_4 (sequence is synthesized)
ctatgtgtttagagataaggtgatgtcagagtttaataacaacttccggcagcagatggagaattacccgaaaaacaaccacactgcttcgatcctggacaggatgcaggcagattttaa

SEQ ID NO: 318902 - DNA, 120 bp, Artificial Sequence
  ENSG00000135404_5 (sequence is synthesized)
gtgctgtggggctgctaactacacagattgggagaaaatcccttccatgtcgaagaaccgagtccccgactcctgctgcattaatgttactgtgggctgtgggattaatttcaacgagaa

SEQ ID NO: 318903 - DNA, 120 bp, Artificial Sequence
  ENSG00000135404_6 (sequence is synthesized)
ggcgatccataaggagggctgtgtggagaagattgggggctggctgaggaaaaatgtgctggtggtagctgcagcagcccttggaattgcttttgtcgaggttttgggaattgtctttgc

SEQ ID NO: 318904 - DNA, 120 bp, Artificial Sequence
  ENSG00000135404_7 (sequence is synthesized)
ctgctgcctcgtgaagagtatcagaagtggctacgaggtgatgtaggggtctggtctcctcagcctcctcatctgggggagtggaatagtatcctccaggtttttcaattaaacggatta

SEQ ID NO: 318905 - DNA, 80 bp, Artificial Sequence
  ENSG00000135404_8 (sequence is synthesized)
cgcccggagactggcgggccgagggtcggcgtcaggctcaagcccctgccggcgcccttggatctgtcctgggccccaga

SEQ ID NO: 318906 - DNA, 120 bp, Artificial Sequence
  ENSG00000135404_9 (sequence is synthesized)
gtggcttcggggaagggcttcctccccttttctcagactaggatccctggaaaatggagaagctgtgctaatagaggggggccagaaatccccactctagaatgctgtagaatgttggga

SEQ ID NO: 318907 - DNA, 120 bp, Artificial Sequence
  ENSG00000135404_10 (sequence is synthesized)
gacacccaggatgtgagccagggactttctggaagtgtttgttctggccccacccgaccccaggcagtccccagctgtctgcacagtcggatggggagggggcttgcacagagttggagc

SEQ ID NO: 318908 - DNA, 120 bp, Artificial Sequence
  ENSG00000135404_11 (sequence is synthesized)
cagaggagagagctggctcatcccctacggtaggatggggaaacctcacagaccacattgtcacccggcctcagctctccgccccggcgctcagagggtaactctcacccacctcgtccg

SEQ ID NO: 318909 - DNA, 120 bp, Artificial Sequence
  ENSG00000135404_12 (sequence is synthesized)
gcgggtttccgggtgggaggggccgggaatcggggccgtgaagggaagccctcgagggccggccgggagcccggaaaccgaggtcccccttcggccagttttaatccccccgccctcccc

SEQ ID NO: 318910 - DNA, 120 bp, Artificial Sequence
  ENSG00000135404_13 (sequence is synthesized)
gcgcagccagccttgggaagcccaggtgaggccgcggggacccggcggacttcggcgcgggctgggagagaccacccgcagtcccttcctccagggctcgccccaggcccgcggagactc

SEQ ID NO: 318911 - DNA, 120 bp, Artificial Sequence
  ENSG00000135404_14 (sequence is synthesized)
ggcttgagaggctactgtttgtctagggagggacacatcactcttgctcccttttcctcttcccttctcctggcctaactggccagaggaaccttagtcacagctgatgcgcgcgtggga

SEQ ID NO: 318912 - DNA, 120 bp, Artificial Sequence
  ENSG00000135404_15 (sequence is synthesized)
atgcttgattccttcctttccttactgatgttccctgtcctctgggaccttaatgcatgtgtacttcgaggtctattttggggggtgtttgggaaaggaggactttgcgaaggtgttggt

SEQ ID NO: 318913 - DNA, 120 bp, Artificial Sequence
  ENSG00000135404_16 (sequence is synthesized)
tggaaaatggagaagctgtgctaatagaggggggccagaaatccccactctagaatgctgtagaatgttgggagacacccaggatctctccgccccggcgctcagagggtaactctcacc

SEQ ID NO: 318914 - DNA, 120 bp, Artificial Sequence
  ENSG00000135404_17 (sequence is synthesized)
gaagacctttgtgagtgtccagggaccggctgtgccaaaacgggcccctgtaatgcatagactccaaacttgacttctgtcctttgctcctgcagtttgccatctttctgtctcttatca

SEQ ID NO: 318915 - DNA, 120 bp, Artificial Sequence
  ENSG00000135404_18 (sequence is synthesized)
cggcagccatggcggtggaaggaggaatgaaatgtgtgaagttcttgctctacgtcctcctgctggccttttgcggggctacccctggctctctgttgccagtggtcatcatcgcagtgg

SEQ ID NO: 318916 - DNA, 120 bp, Artificial Sequence
  ENSG00000135406_0 (sequence is synthesized)
cttcccagcccccggcctagctctgcgaacggtgactgcccatccttggccgcaatgagccaccacccgtcgggcctccgggccggcttcagctccacctcataccgccgtaccttcggt

SEQ ID NO: 318917 - DNA, 120 bp, Artificial Sequence
  ENSG00000135406_1 (sequence is synthesized)
ccaccgccctcactatcccccggggccttctcctactcgtccagctcccgcttctccagcagccgcctgctgggctccgcgtccccgagctcctcggtgcgcctgggcagcttccgtagc

SEQ ID NO: 318918 - DNA, 120 bp, Artificial Sequence
  ENSG00000135406_2 (sequence is synthesized)
ccccgagcgggagcgggcgccctcctgcgcctgccctcggagcgcctcgacttctccatggccgaggccctcaaccaggagttcctggccacgcgcagcaacgagaagcaggagctgcag

SEQ ID NO: 318919 - DNA, 120 bp, Artificial Sequence
  ENSG00000135406_3 (sequence is synthesized)
gagctcaacgaccgcttcgccaacttcatcgagaaggtacgctttctggagcagcagaacgcggccctgcgcggggagctgagccaagcccggggccaggagccggcgcgcgccgaccag

SEQ ID NO: 318920 - DNA, 120 bp, Artificial Sequence
  ENSG00000135406_4 (sequence is synthesized)
ctgtgccagcaggagctgcgcgagctgcggcgagagctggagctgttgggccgcgagcgtgaccgggtgcaggtggagcgcgacgggctggcggaggacctggcggcgctcaagcagagg

SEQ ID NO: 318921 - DNA, 120 bp, Artificial Sequence
  ENSG00000135406_5 (sequence is synthesized)
ttggaggaggagacgcgcaagcgggaggacgcggagcacaacctcgtgctcttccgcaaggacgtggacgatgccactctgtcccgcctggaactagagcgcaagattgagtctctgatg

SEQ ID NO: 318922 - DNA, 120 bp, Artificial Sequence
  ENSG00000135406_6 (sequence is synthesized)
gatgagattgagttcctcaagaagctgcacgaggaggagctgcgagacctgcaggtgagtgtggagagccagcaggtgcagcaggtggaggtggaagccacggtgaagcccgagctgacg

SEQ ID NO: 318923 - DNA, 120 bp, Artificial Sequence
  ENSG00000135406_7 (sequence is synthesized)
gcagcgctgagggacatccgcgcgcagtacgagagcatcgccgcgaagaacctgcaggaggcggaggagtggtacaagtccaagtacgcggacctgtccgacgctgccaaccggaaccac

SEQ ID NO: 318924 - DNA, 120 bp, Artificial Sequence
  ENSG00000135406_8 (sequence is synthesized)
gaggccctgcgccaggccaagcaggagatgaacgagtcccgacgccagatccagagtctaacgtgcgaggtggacgggctgcgcggcacgaacgaggcgctgctcaggcagttgagagag

SEQ ID NO: 318925 - DNA, 120 bp, Artificial Sequence
  ENSG00000135406_9 (sequence is synthesized)
ctggaggagcagttcgccctggaggcggggggctaccaggcgggcgctgcgcggctcgaggaggagctgcgacagctaaaagaggagatggcgcggcacctgagggagtaccaggagctc

SEQ ID NO: 318926 - DNA, 120 bp, Artificial Sequence
  ENSG00000135406_10 (sequence is synthesized)
ctcaacgtcaagatggccctggacatcgagatcgccacctaccgcaagctgctggagggcgaggagagccggatctccgtgcccgtccattcttttgcctccttaaatataaagacgact

SEQ ID NO: 318927 - DNA, 120 bp, Artificial Sequence
  ENSG00000135406_11 (sequence is synthesized)
gtgcctgaggtggagcctccccaggacagccacagccggaagacggttctgatcaagaccattgagacccggaatggggaggtggtgacagagtcccagaaggagcagcgcagtgagctg

SEQ ID NO: 318928 - DNA, 120 bp, Artificial Sequence
  ENSG00000135406_12 (sequence is synthesized)
gacaagtcttctgcccacagttactgaaccccttggtccggagccttgactctgccctaggcctgctcaaagcccaaaccctaagaccactcctgaattgtctcctctccctctgcatgt

SEQ ID NO: 318929 - DNA, 120 bp, Artificial Sequence
  ENSG00000135406_13 (sequence is synthesized)
gtctaaaaggtggtaccaggcatccctttcctggcttatggccaagccctacccggccagcagtcgctgggcctctccctgccctgacacttgatgtgacctatgtgcttcccttttcat

SEQ ID NO: 318930 - DNA, 120 bp, Artificial Sequence
  ENSG00000135406_14 (sequence is synthesized)
gtcccgataagaagccaatgatcccccctcaggacaaatctactccagccacgatgagaagtgggtgagccagggtctgagtttcacatttgaaccaaataaaatgctgtcaagagaaaa

SEQ ID NO: 318931 - DNA, 120 bp, Artificial Sequence
  ENSG00000135406_15 (sequence is synthesized)
ggggcagggctgggccgctgccgtcgaggcgaggtcgaagcggccgtcgaggcggctgctcttgcctcccctcgcttcccctctccatcagcagcccaagggtgtggctccccttaccaa

SEQ ID NO: 318932 - DNA, 120 bp, Artificial Sequence
  ENSG00000135406_16 (sequence is synthesized)
cccaggtgtgtgcgggcagcatccctgcccacgggctccaagtgccccccgctacccctttgctctgagtgtttggggaggtgggagaagtgggtatctgtgcctcccctgagtaatgag

SEQ ID NO: 318933 - DNA, 120 bp, Artificial Sequence
  ENSG00000135406_17 (sequence is synthesized)
gaaacccccttttcagctcccagtccgttagagacaatgcggggcaattccattagacagcctcagccctccatttagagtcctgggcagcagaacagcctctaaccggatcctgggggg

SEQ ID NO: 318934 - DNA, 120 bp, Artificial Sequence
  ENSG00000135406_18 (sequence is synthesized)
ggggctcagtgcccaggactgcggcaggaagcaccaaggcttccctagcccctcctcacacccaccaagcctcccggccctatcccgggtgggaccctacccctcccaattcccaggagt

SEQ ID NO: 318935 - DNA, 120 bp, Artificial Sequence
  ENSG00000135406_19 (sequence is synthesized)
taggggaggccaagctgtcatttattcgtcctgtcccatctctcccttcctcccgcttcccactcccctggcaaccaaaccagacccatcaaggagaaggaactggcagctgtgcaggga

SEQ ID NO: 318936 - DNA, 120 bp, Artificial Sequence
  ENSG00000135406_20 (sequence is synthesized)
cgctggagtccccagcagcagcagcagccccagccctatggttcctggcaaacccagcagacctcagcaacccggctcctgcagaccatccgagctgcctctgtccactcctgggcaggt

SEQ ID NO: 318937 - DNA, 120 bp, Artificial Sequence
  ENSG00000135406_21 (sequence is synthesized)
tgtgcttgcattctggaagctgtttgacatacaaaggccagatatcagccttctcgctaactctggagtaggggagggtgtggtgggatgtgtgattgtgtgtgtatgtgtgtgtatgta

SEQ ID NO: 318938 - DNA, 120 bp, Artificial Sequence
  ENSG00000135406_22 (sequence is synthesized)
agtgggcccggtatcaggggcggtttctgaggttgtggggtggtctcgctggagctggcgggtggagcggaggcatcgccctggggatcaggacgatgctgggtagacgcagcccctcca

SEQ ID NO: 318939 - DNA, 120 bp, Artificial Sequence
  ENSG00000135406_23 (sequence is synthesized)
ccctagtctacaggtggttagactcccacccttgcgccacctggcggcgggcagcggggctgtacctccgaaacctggcctctggtctcgcgcccgcgggggcgcagggctgtacgccct

SEQ ID NO: 318940 - DNA, 120 bp, Artificial Sequence
  ENSG00000135406_24 (sequence is synthesized)
gccctccctggcgcccacttctgttcgttcaagcgtttcttctcttttctgtgcacgaactgcgtggcccgcgtggaatttgcgccgctgtccatcctctgcctgctcccggccgtagga

SEQ ID NO: 318941 - DNA, 120 bp, Artificial Sequence
  ENSG00000135407_0 (sequence is synthesized)
agagtgtgatcttgtacaagttattcagcctttgcaaacctcagattcacacaatgtaagatgaagaaactcaccttctgaaaattagagataacatatgcaaagtgaatcaatacaggg

SEQ ID NO: 318942 - DNA, 120 bp, Artificial Sequence
  ENSG00000135407_1 (sequence is synthesized)
cttaacatatttatcacccctttggtaaataaccatgacgattaccagagctcttaagggcaatggcaggtgggaagcagaactcatgggtggtaatccccaggccagccaggctcacca

SEQ ID NO: 318943 - DNA, 120 bp, Artificial Sequence
  ENSG00000135407_2 (sequence is synthesized)
tgtgcacttggacaagtccttgcccccatcattgtgaaatggtgcagggatgcaccatgagggtgtggcaggatggctgacaacagactgggaagcagctcggcagaaaaactggattga

SEQ ID NO: 318944 - DNA, 120 bp, Artificial Sequence
  ENSG00000135407_3 (sequence is synthesized)
tgcccactatggcaagagatatcatctcccctcttgttctgtgatgtttcagtcctggaaagacaagcatcatgcctctgaccagtgccttcagggctgtggacaacgaccctgggatca

SEQ ID NO: 318945 - DNA, 120 bp, Artificial Sequence
  ENSG00000135407_4 (sequence is synthesized)
ttgtctggagaatagagaaaatggagctggcgctggtgcctgtgagcgcccacggcaacttctatgagggggactgctacgtcatcctctcgacccggagagtggccagtctcctatccc

SEQ ID NO: 318946 - DNA, 120 bp, Artificial Sequence
  ENSG00000135407_5 (sequence is synthesized)
aggacatccacttctggatcgggaaggactcctcccaggatgagcaaagctgcgcagccatatataccacacagctggacgactacctgggaggcagccctgtgcagcaccgagaggtcc

SEQ ID NO: 318947 - DNA, 120 bp, Artificial Sequence
  ENSG00000135407_6 (sequence is synthesized)
agtaccatgagtcagacactttccgtggctacttcaagcagggcatcatctacaagcaggggggtgtcgcctctgggatgaagcacgtggagaccaatacctacgacgtgaagcggctgc

SEQ ID NO: 318948 - DNA, 120 bp, Artificial Sequence
  ENSG00000135407_7 (sequence is synthesized)
tacatgtgaaagggaaaagaaacatcagggctaccgaggtggaaatgagctgggacagtttcaaccgaggtgatgtcttcttgctggaccttgggaaagtcatcatccaatggaatggcc

SEQ ID NO: 318949 - DNA, 120 bp, Artificial Sequence
  ENSG00000135407_8 (sequence is synthesized)
cagagagcaacagtggggagcgcctgaaggctatgcttctggcaaaggatattcgagacagggagcgagggggccgtgctaaaataggagtgatcgagggagacaaggaggcagccagcc

SEQ ID NO: 318950 - DNA, 120 bp, Artificial Sequence
  ENSG00000135407_9 (sequence is synthesized)
cagagctgatgaaggtccttcaggacacccttggccgacgctccattatcaagcctacagtccctgatgagatcatagatcagaagcagaaatcaactatcatgttgtatcatatctcag

SEQ ID NO: 318951 - DNA, 120 bp, Artificial Sequence
  ENSG00000135407_10 (sequence is synthesized)
attcagctgggcagctggcagtcacagaggtagcaacaaggcctctggtccaggacttactgaaccatgatgactgctacatcctggaccaaagtggaaccaaaatctacgtgtggaaag

SEQ ID NO: 318952 - DNA, 120 bp, Artificial Sequence
  ENSG00000135407_11 (sequence is synthesized)
gaaaaggagccacaaaggctgaaaaacaggcagccatgtctaaagcgctgggcttcatcaagatgaagagctaccccagcagcaccaatgtggagaccgtcaacgatggtgctgagtcgg

SEQ ID NO: 318953 - DNA, 120 bp, Artificial Sequence
  ENSG00000135407_12 (sequence is synthesized)
cagctgttccagaagtggtcagtaaaggaccagaccatgggcctggggaaaacgttcagcattggtaaaattgctaaagttttccaggataaatttgatgtgactctgctacacaccaag

SEQ ID NO: 318954 - DNA, 120 bp, Artificial Sequence
  ENSG00000135407_13 (sequence is synthesized)
ccagaggtagctgcccaggaaagaatggtcgatgatggcaacggaaaagttgaggtctggagaattgagaacctggagctggtccctgtggagtatcaatggtatggcttcttttatggg

SEQ ID NO: 318955 - DNA, 120 bp, Artificial Sequence
  ENSG00000135407_14 (sequence is synthesized)
ggagactgttatctggtcctctacacatacgaggtaaatgggaagccacatcacatcttgtacatctggcagggccgccacgcctcacaggatgagctggcagcctcagcataccaggca

SEQ ID NO: 318956 - DNA, 120 bp, Artificial Sequence
  ENSG00000135407_15 (sequence is synthesized)
gtggaggtggatcggcagtttgatggggctgctgtgcaggttcgagtcaggatgggaacggagccacgccacttcatggccatcttcaaagggaagctagttatctttgagggtgggact

SEQ ID NO: 318957 - DNA, 120 bp, Artificial Sequence
  ENSG00000135407_16 (sequence is synthesized)
tccaggaagggaaatgccgagcctgaccctccagtaagactcttccaaattcatggaaatgacaaatctaacaccaaagcagtggaagttccagcctttgcctcctccctaaactccaat

SEQ ID NO: 318958 - DNA, 120 bp, Artificial Sequence
  ENSG00000135407_17 (sequence is synthesized)
gatgtctttctgctgcgaactcaggcagagcactacctgtggtatggcaaggggtctagtggggatgagcgggcaatggctaaggagctggccagccttctctgtgatggcagcgagaac

SEQ ID NO: 318959 - DNA, 120 bp, Artificial Sequence
  ENSG00000135407_18 (sequence is synthesized)
actgtggccgagggccaggagccagccgagttctgggacctactgggagggaaaactccctatgccaatgataaaagacttcagcaggaaatcctagatgtccagtctcgtctctttgaa

SEQ ID NO: 318960 - DNA, 120 bp, Artificial Sequence
  ENSG00000135407_19 (sequence is synthesized)
tgttccaataagaccggccaattcgttgtcactgagatcacagacttcacccaggatgacctgaaccctactgacgtgatgctcctagatacctgggaccaggtgttcttgtggattggg

SEQ ID NO: 318961 - DNA, 120 bp, Artificial Sequence
  ENSG00000135407_20 (sequence is synthesized)
gctgaggccaatgccacggagaaggagagtgcccttgccacagcacagcagtacctgcacactcaccccagcggccgagatcccgacacaccaatcctgatcattaagcaggggtttgag

SEQ ID NO: 318962 - DNA, 120 bp, Artificial Sequence
  ENSG00000135407_21 (sequence is synthesized)
cctcccatcttcacaggctggttcctagcctgggaccctaacatttggagtgcaggaaaaacatatgaacaattaaaagaagagctgggagatgctgctgctatcatgcgaatcactgct

SEQ ID NO: 318963 - DNA, 120 bp, Artificial Sequence
  ENSG00000135407_22 (sequence is synthesized)
gacatgaagaatgcaaccctctccctgaattctaatgacagtgagccaaaatattaccctatagcagttctgttgaaaaaccagaatcaggagctgcctgaggatgtaaaccctgccaaa

SEQ ID NO: 318964 - DNA, 120 bp, Artificial Sequence
  ENSG00000135407_23 (sequence is synthesized)
aaggagaattacctctctgaacaggactttgtgtctgtgtttggcatcacaagagggcaatttgcagctctgcctggctggaaacagctccaaatgaagaaagaaaaggggcttttctaa

SEQ ID NO: 318965 - DNA, 120 bp, Artificial Sequence
  ENSG00000135407_24 (sequence is synthesized)
gctttggagtggttcttcaatactgctgctgcttacgcgccgggaaactgggaaggctggtgagcgagaaggcaagtcctggaaagacaagcatcatgcctctgaccagtgccttcaggg

SEQ ID NO: 318966 - DNA, 120 bp, Artificial Sequence
  ENSG00000135407_25 (sequence is synthesized)
gagcactacctgtggtatggcaagacttcagcaggaaatcctagatgtccagtctcgtctctttgaatgttccaataagaccggccaattcgttgtcactgagatcacagacttcaccca

SEQ ID NO: 318967 - DNA, 120 bp, Artificial Sequence
  ENSG00000135407_26 (sequence is synthesized)
ggttaccatcaaagaatgtgcgttatgtttaagcacctttcaagcctgcatggacccaaaaggggggattttcatttttacttatccttgaaatgtcttctgactccctggctcttttgc

SEQ ID NO: 318968 - DNA, 120 bp, Artificial Sequence
  ENSG00000135407_27 (sequence is synthesized)
ttttcctgaagacacagaccagacctaagatgtccctcccctataagaaagacctcatcctgtgttttctctctcttcttctcaggcaggaaaaacatatgaacaattaaaagaagagct

SEQ ID NO: 318969 - DNA, 120 bp, Artificial Sequence
  ENSG00000135407_28 (sequence is synthesized)
cctggaaagacaagcatcatgcctctgaccagtgccttcagggctgtggacaacgaccctgggatcattgtctggagaatagaggaaacaccctggaaagacaggtgggacctactcagc

SEQ ID NO: 318970 - DNA, 120 bp, Artificial Sequence
  ENSG00000135407_29 (sequence is synthesized)
gcaaggccacagaaaagagcagatagtgccaatatcaggaaataatttatccaccaatttctgcctgacattcagctacttaatttagatataatagagtctgcaaatcacggcatgttc

SEQ ID NO: 318971 - DNA, 120 bp, Artificial Sequence
  ENSG00000135407_30 (sequence is synthesized)
tggtatggcaaggtaggatggctgggccccgggtcagaccagcccctcggagcccagacctgcactcccctcctcctgtcagcaaggtcaaaggacctagagtaggctggagtgcttgct

SEQ ID NO: 318972 - DNA, 120 bp, Artificial Sequence
  ENSG00000135407_31 (sequence is synthesized)
tgctttggcagcacatatactaaaactggaatgatacagagaagattagcatggtccctgtgcaaggatggcatgcaaattcatgaagcgtttgatattaaaaaaaaaaaaaaaaaaaaa

SEQ ID NO: 318973 - DNA, 120 bp, Artificial Sequence
  ENSG00000135407_32 (sequence is synthesized)
aagatacaaaaaaaattatccaggcatggtggcgcatgccggtagtccaggctacctggcagggcactgagataggaaaatcacttgaacccgggaggctgcagtgagccgagatcacgc

SEQ ID NO: 318974 - DNA, 120 bp, Artificial Sequence
  ENSG00000135407_33 (sequence is synthesized)
gcgagactctgtctaaaaaaaaaaaaagcactcagaacagttcttggcacacagtacctgctgaataaaaggtggctgttattattgaaggggatatcacatatcaaggttaatggccct

SEQ ID NO: 318975 - DNA, 120 bp, Artificial Sequence
  ENSG00000135407_34 (sequence is synthesized)
tcacatatcaaggttaatggccctgtcctcaaggagcttatatttgtgcagatccatgcagatgaaccaagccagaagcaataaatgagcaaacaaatgtgatgcaaagtcagtaaggac

SEQ ID NO: 318976 - DNA, 120 bp, Artificial Sequence
  ENSG00000135407_35 (sequence is synthesized)
aaaagtactgaaagaacacagcataatcatcctaaaaattaacaaccataatcaccgcaagccaataaacagatccaaaaatgttccactcagtcattttttttttaggcaggtaccttg

SEQ ID NO: 318977 - DNA, 120 bp, Artificial Sequence
  ENSG00000135407_36 (sequence is synthesized)
gtccttagacaaaagtgagttagaatttgactctgactcccagaggggagacgcttatatcatgtggcttcatagaggtgaattaccagacaagcaaagaactcagtgtattccaccact

SEQ ID NO: 318978 - DNA, 120 bp, Artificial Sequence
  ENSG00000135407_37 (sequence is synthesized)
cggcttttcccaaccctttctccacagctaaagttttccaggataaatttgatgtgactctgctacacaccaagccagaggtagctgcccaggaaagaatggtcgatgatggcaacggaa

SEQ ID NO: 318979 - DNA, 120 bp, Artificial Sequence
  ENSG00000135407_38 (sequence is synthesized)
cctgggcaacagagcgagagtccgtctcaaaaacacaacaacaaaaaaatgaatatttgttttattattcaactctgccgtttaaggagagattaaagtcattggcagtatttttcagaa

SEQ ID NO: 318980 - DNA, 120 bp, Artificial Sequence
  ENSG00000135407_39 (sequence is synthesized)
ataagcttctaacccaaatgacatttttattcatttctgacagtgaagtccacagaaacttaggccatttacacctattttaatggttaaaagaagtggagcctctagccaggaatccag

SEQ ID NO: 318981 - DNA, 120 bp, Artificial Sequence
  ENSG00000135407_40 (sequence is synthesized)
cagttctttaacctcaggaggagtgcatggcaccaggtgttcaaaccatctggcaattctgtcctttgtgctctacaaactcagattccaaagctaatgttgatgtagtatctttaaatt

SEQ ID NO: 318982 - DNA, 120 bp, Artificial Sequence
  ENSG00000135407_41 (sequence is synthesized)
gtatttaagtaggactacaacctaaagtcatttaaaggctggaaatgcagggctaaataaaagtaccaagagaaggtatgtgatcccaatattcaaatgagatccagacacaagatgtat

SEQ ID NO: 318983 - DNA, 120 bp, Artificial Sequence
  ENSG00000135407_42 (sequence is synthesized)
gccaaactagctatacaggacttgccttggacttactgaatcagctttcccaagaacaaccccaaaatctgaatattttctattcccagatgattctgacatgcagccaggtttggggag

SEQ ID NO: 318984 - DNA, 120 bp, Artificial Sequence
  ENSG00000135407_43 (sequence is synthesized)
cattgttatcaaagatgattacagagggtgaagtggcataagtcaaaatgttaaatattatacacattcagaactgtaaccacacagacactgaggagtcttttccctgtgcctacattc

SEQ ID NO: 318985 - DNA, 120 bp, Artificial Sequence
  ENSG00000135407_44 (sequence is synthesized)
ttttttctcatccttgcattccttgcttgttatatacctaaaatgttaaccatatagtttttgggttttgtggccctctagctaaagcctcagcagaaagcactaaaactgcataaatct

SEQ ID NO: 318986 - DNA, 120 bp, Artificial Sequence
  ENSG00000135407_45 (sequence is synthesized)
ggagaaatcaaaagaaagagaaccaaaaaacaatgcttaaaatgtttaataactttatgtttaatattataccaggacctacctttgttttcaattttaagatgattatttctaaaatct

SEQ ID NO: 318987 - DNA, 120 bp, Artificial Sequence
  ENSG00000135407_46 (sequence is synthesized)
atttagcctgtaaatcattgaaatcatatatgcactccataggcaaaatccaaatacccagatctgtaatgtgtcaaagcatttttcacttttcaaataaagatacctataatgaacaaa

SEQ ID NO: 318988 - DNA, 120 bp, Artificial Sequence
  ENSG00000135409_0 (sequence is synthesized)
gtatctgaagaaagatttggccaggggcagctgtgctggcttatgctcttctccttctgctgctgccatcctccagcaagatgctagggtctttggggctttgggcattacttcccacag

SEQ ID NO: 318989 - DNA, 120 bp, Artificial Sequence
  ENSG00000135409_1 (sequence is synthesized)
ctgtggaagcacccccaaacaggcgaacctgtgtgttctttgaggcccctggagtgcggggaagcacaaagacactgggagagctgctagatacaggcacagagctccccagagctatcc

SEQ ID NO: 318990 - DNA, 120 bp, Artificial Sequence
  ENSG00000135409_2 (sequence is synthesized)
gctgcctctacagccgctgctgctttgggatctggaacctgacccaagaccgggcacaggtggaaatgcaaggatgccgagacagtgatgagccaggctgtgagtccctccactgtgacc

SEQ ID NO: 318991 - DNA, 120 bp, Artificial Sequence
  ENSG00000135409_3 (sequence is synthesized)
caagtccccgagcccaccccagccctggctccactctcttcacctgctcctgtggcactgacttctgcaatgccaattacagccatctgcctcctccagggagccctgggactcctggct

SEQ ID NO: 318992 - DNA, 120 bp, Artificial Sequence
  ENSG00000135409_4 (sequence is synthesized)
cccagggtccccaggctgccccaggtgagtccatctggatggcactggtgctgctggggctgttcctcctcctcctgctgctgctgggcagcatcatcttggccctgctacagcgaaaga

SEQ ID NO: 318993 - DNA, 120 bp, Artificial Sequence
  ENSG00000135409_5 (sequence is synthesized)
actacagagtgcgaggtgagccagtgccagagccaaggccagactcaggcagggactggagtgtggagctgcaggagctgcctgagctgtgtttctcccaggtaatccgggaaggaggtc

SEQ ID NO: 318994 - DNA, 120 bp, Artificial Sequence
  ENSG00000135409_6 (sequence is synthesized)
atgcagtggtttgggccgggcagctgcaaggaaaactggttgccatcaaggccttcccaccgaggtctgtggctcagttccaagctgagagagcattgtacgaacttccaggcctacagc

SEQ ID NO: 318995 - DNA, 120 bp, Artificial Sequence
  ENSG00000135409_7 (sequence is synthesized)
acgaccacattgtccgatttatcactgccagccgggggggtcctggccgcctgctctctgggcccctgctggtactggaactgcatcccaagggctccctgtgccactacttgacccagt

SEQ ID NO: 318996 - DNA, 120 bp, Artificial Sequence
  ENSG00000135409_8 (sequence is synthesized)
agaatggccaatataaaccaggtattgcccaccgagatctgagcagccagaatgtgctcattcgggaagatggatcgtgtgccattggagacctgggccttgccttggtgctccctggcc

SEQ ID NO: 318997 - DNA, 120 bp, Artificial Sequence
  ENSG00000135409_9 (sequence is synthesized)
tcactcagccccctgcctggacccctactcaaccacaaggcccagctgccatcatggaagctggcacccagaggtacatggcaccagagctcttggacaagactctggacctacaggatt

SEQ ID NO: 318998 - DNA, 120 bp, Artificial Sequence
  ENSG00000135409_10 (sequence is synthesized)
ggggcatggccctccgacgagctgatatttactctttggctctgctcctgtgggagatactgagccgctgcccagatttgaggcctgacagcagtccaccacccttccaactggcctatg

SEQ ID NO: 318999 - DNA, 120 bp, Artificial Sequence
  ENSG00000135409_11 (sequence is synthesized)
aggcagaactgggcaatacccctacctctgatgagctatgggccttggcagtgcaggagaggaggcgtccctacatcccatccacctggcgctgctttgccacagaccctgatgggctga

SEQ ID NO: 319000 - DNA, 120 bp, Artificial Sequence
  ENSG00000135409_12 (sequence is synthesized)
gggagctcctagaagactgttgggatgcagacccagaagcacggctgacagctgagtgtgtacagcagcgcctggctgccttggcccatcctcaagagagccacccctttccagagagct

SEQ ID NO: 319001 - DNA, 120 bp, Artificial Sequence
  ENSG00000135409_13 (sequence is synthesized)
gtccacgtggctgcccacctctctgcccagaagactgtacttcaattcctgcccctaccatcctcccctgtaggcctcagcggagtgcctgccacttcagcgttcagcaaggcccttgtt

SEQ ID NO: 319002 - DNA, 120 bp, Artificial Sequence
  ENSG00000135409_14 (sequence is synthesized)
ccaggaatcctcagcctgcctgtaccctttctcctgtgtaaatatgcagtttatgtgtcatcaatgtacatgccaacataaatatggcgattgtatagctgtcttgtctgcctcatcact

SEQ ID NO: 319003 - DNA, 120 bp, Artificial Sequence
  ENSG00000135409_15 (sequence is synthesized)
gcatttcccacctgccgaatccttggattcttctgcgggcatccagtccacatcagttctgaccagtgacttggggtaggtgtgcacaggaaagagaataaagtcagctttcctgatgca

SEQ ID NO: 319004 - DNA, 120 bp, Artificial Sequence
  ENSG00000135409_16 (sequence is synthesized)
agacgcaagctctcaggaggggaagagcagagagcaggtttgggtcagtgctctccagcctgcattcttgccttgatgtccagccctgctacagcgaaagaactacagagtgcgagcagg

SEQ ID NO: 319005 - DNA, 120 bp, Artificial Sequence
  ENSG00000135409_17 (sequence is synthesized)
ctggacccctactcaaccacaaggcccagctgccatcatggaagtgagttctctggataactggtgaggcccaggatgatgttggtgctgctgatggcaatgcagccattgtgtgtcaac

SEQ ID NO: 319006 - DNA, 120 bp, Artificial Sequence
  ENSG00000135409_18 (sequence is synthesized)
agttgtagcaatacctatagcatttgggacattgctgagtctgtagttggggggatattgcatggaccattgctgcaatgaggattgccacagagatgattcttggcccttcgtgccttg

SEQ ID NO: 319007 - DNA, 120 bp, Artificial Sequence
  ENSG00000135409_19 (sequence is synthesized)
ctgggaacctggagagtgggggctgggcatgggcttcaaggacgtctctgccagagtgtctgtctactcctatctccacttatctcccatcactccttggttcatgctcagctggaactg

SEQ ID NO: 319008 - DNA, 120 bp, Artificial Sequence
  ENSG00000135409_20 (sequence is synthesized)
ggcaagcctcctctccccgtcagttcatcctcttccaccctaagtctcacacagtcgattccatctacctgagacacacaccttcctcctgctcaaccttgcccagcctgtctctcctct

SEQ ID NO: 319009 - DNA, 120 bp, Artificial Sequence
  ENSG00000135409_21 (sequence is synthesized)
ctgccatcagttagccctgttcctcagtccccttctccaggaagccctccttggctttgctcttgccctgagctctgccccatctgctctcctaatacagtaaagcccaaaaatcaattc

SEQ ID NO: 319010 - DNA, 120 bp, Artificial Sequence
  ENSG00000135409_22 (sequence is synthesized)
aataagtccccattctgtcatacattgatgatgtttctgctgtgacccaataaaaggcagttctaggtataaaaggtgaaagcagtggcgtcacagtgaaagttcagggctttgcacaaa

SEQ ID NO: 319011 - DNA, 120 bp, Artificial Sequence
  ENSG00000135409_23 (sequence is synthesized)
tacttttttaacaaaatgtcccttctgtacctgatctgaaatttccacggcacaagtcttaggttggctgacagaaactgggcattacttgcagaagactctggctctctgagaggaaag

SEQ ID NO: 319012 - DNA, 120 bp, Artificial Sequence
  ENSG00000135409_24 (sequence is synthesized)
agagtaatttcccattagcatattaagctgtcaacctacattagctcctcagaggaaacagtgggctatacagaaggcccccagagagcctgtttcatagggagcaagactcagagggct

SEQ ID NO: 319013 - DNA, 120 bp, Artificial Sequence
  ENSG00000135409_25 (sequence is synthesized)
ggaattcagcaagagggagaggagggaggctccaggaaagatcagaagtggatgttgaaagcaggagagtgatggacactgaagatggcttttaaccctggggcccactcaagatcctag

SEQ ID NO: 319014 - DNA, 120 bp, Artificial Sequence
  ENSG00000135409_26 (sequence is synthesized)
ggtcaacccttcctccctgtcattccccccaggaccctgatgggctgagggagctcctagaagactgttgggatgcagacccagaagcacggctgacagctgagtgtgtacagcagcgcc

SEQ ID NO: 319015 - DNA, 120 bp, Artificial Sequence
  ENSG00000135409_27 (sequence is synthesized)
tccccaggctgccccaggtagccacccaagggtactgaagcctgatgggggctggggcccaggttaggatgagaggtggaaccagggccagttctcaccctactcccgccccacgctttc

SEQ ID NO: 319016 - DNA, 120 bp, Artificial Sequence
  ENSG00000135409_28 (sequence is synthesized)
ctcctcctggccttgggaagttggttgccctggtgactgggagataaggggtcttgtgaccagggtgggggtgggttgagacgcaagctctcaggaggggaagagcagagagcaggtttg

SEQ ID NO: 319017 - DNA, 120 bp, Artificial Sequence
  ENSG00000135413_0 (sequence is synthesized)
attccccagaccttctgcagattctgtggttatactcactcctcatcccaaagaatgaaatttaccactctcctcttcttggcagctgtagcaggggccctggtctatgctgaagatgcc

SEQ ID NO: 319018 - DNA, 120 bp, Artificial Sequence
  ENSG00000135413_1 (sequence is synthesized)
tcctctgactcgacgggtgctgatcctgcccaggaagctgggacctctaagcctaatgaagagatctcaggtccagcagaaccagcttcacccccagagacaaccacaacagcccaggag

SEQ ID NO: 319019 - DNA, 120 bp, Artificial Sequence
  ENSG00000135413_2 (sequence is synthesized)
atagtggagaaaagtatcttactaacagaacaagcccttgcaaaagcaggaaaaggaatgcacggaggcgtgccaggtggaaaacaattcatcgaaaatggaagtgaatttgcacaaaaa

SEQ ID NO: 319020 - DNA, 120 bp, Artificial Sequence
  ENSG00000135413_3 (sequence is synthesized)
ttactgaagaaattcagtctattaaaaccatgggcatgagaagctgaaaagaatgggatcattggacttaaagccttaaatacccttgtagcccagagctattaaaacgaaagcatccaa

SEQ ID NO: 319021 - DNA, 120 bp, Artificial Sequence
  ENSG00000135413_4 (sequence is synthesized)
gggacagccaaggtcacctcaagcaggcaggaactaaaccccctgagtaagtctctgtctctatgccagatcaacaacctagaaaagtctctggctgcaggcccacatcacacctccacg

SEQ ID NO: 319022 - DNA, 120 bp, Artificial Sequence
  ENSG00000135413_5 (sequence is synthesized)
cacagagataagcctggtgagaagcaggtagactcaaacagctgaacacaaaggcacaaatgggattgtgcattgcacccacacacaacgttttcacaatagtagatgttgcagcctgca

SEQ ID NO: 319023 - DNA, 120 bp, Artificial Sequence
  ENSG00000135413_6 (sequence is synthesized)
caatacatggtttctgtcctggctcacacaacttcctatgagagaagtgctggagccctcagcaaaacttctgcactttaggactttctgtagggatgatgtcctgggtggagtgggggt

SEQ ID NO: 319024 - DNA, 80 bp, Artificial Sequence
  ENSG00000135414_0 (sequence is synthesized)
ggcagcccccaatcccgcgccgcccggaccccctcctcctccctccctcctccctccgccccctccccgcgggactccgg

SEQ ID NO: 319025 - DNA, 120 bp, Artificial Sequence
  ENSG00000135414_1 (sequence is synthesized)
ctcctcctccctccctcctccctccgccccctccccgcgggactccggcgtccccgccccccagtcctccctcccctcccctccagcatggtgctcgcggccccgctgctgctgggcttc

SEQ ID NO: 319026 - DNA, 80 bp, Artificial Sequence
  ENSG00000135414_2 (sequence is synthesized)
cgggggtcgggggggagcgctccagccggccagccccgtccgtggcgcccgagccggacggctgccccgtgtgcgtttgg

SEQ ID NO: 319027 - DNA, 120 bp, Artificial Sequence
  ENSG00000135414_3 (sequence is synthesized)
gcgcccgagccggacggctgccccgtgtgcgtttggcggcagcacagccgcgagctgcgcctagagagcatcaagtcgcagatcttgagcaaactgcggctcaaggaggcgcccaacatc

SEQ ID NO: 319028 - DNA, 120 bp, Artificial Sequence
  ENSG00000135414_4 (sequence is synthesized)
agccgcgaggtggtgaagcagctgctgcccaaggcgccgccgctgcagcagatcctggacctacacgacttccagggcgacgcgctgcagcccgaggacttcctggaggaggacgagtac

SEQ ID NO: 319029 - DNA, 120 bp, Artificial Sequence
  ENSG00000135414_5 (sequence is synthesized)
cacgccaccaccgagaccgtcattagcatggcccaggagacggacccagcagtacagacagatggcagccctctctgctgccattttcacttcagccccaaggtgatgttcacaaaggta

SEQ ID NO: 319030 - DNA, 120 bp, Artificial Sequence
  ENSG00000135414_6 (sequence is synthesized)
ctgaaggcccagctgtgggtgtacctacggcctgtaccccgcccagccacagtctacctgcagatcttgcgactaaaacccctaactggggaagggaccgcagggggagggggcggaggc

SEQ ID NO: 319031 - DNA, 120 bp, Artificial Sequence
  ENSG00000135414_7 (sequence is synthesized)
cggcgtcacatccgtatccgctcactgaagattgagctgcactcacgctcaggccattggcagagcatcgacttcaagcaagtgctacacagctggttccgccagccacagagcaactgg

SEQ ID NO: 319032 - DNA, 120 bp, Artificial Sequence
  ENSG00000135414_8 (sequence is synthesized)
ggcatcgagatcaacgcctttgatcccagtggcacagacctggctgtcacctccctggggccgggagccgaggggctgcatccattcatggagcttcgagtcctagagaacacaaaacgt

SEQ ID NO: 319033 - DNA, 120 bp, Artificial Sequence
  ENSG00000135414_9 (sequence is synthesized)
tcccggcggaacctgggtctggactgcgacgagcactcaagcgagtcccgctgctgccgatatcccctcacagtggactttgaggctttcggctgggactggatcatcgcacctaagcgc

SEQ ID NO: 319034 - DNA, 120 bp, Artificial Sequence
  ENSG00000135414_10 (sequence is synthesized)
tacaaggccaactactgctccggccagtgcgagtacatgttcatgcaaaaatatccgcatacccatttggtgcagcaggccaatccaagaggctctgctgggccctgttgtacccccacc

SEQ ID NO: 319035 - DNA, 120 bp, Artificial Sequence
  ENSG00000135414_11 (sequence is synthesized)
aagatgtccccaatcaacatgctctacttcaatgacaagcagcagattatctacggcaagatccctggcatggtggtggatcgctgtggctgctcttaaggtgggggatagaggatgcct

SEQ ID NO: 319036 - DNA, 120 bp, Artificial Sequence
  ENSG00000135414_12 (sequence is synthesized)
cccccacagaccctaccccaagacccctagccctgcccccatccccccaagccctagagctccctccactcttcccgcgaacatcacaccgttccccgaccaagccgtgtgcaatacaac

SEQ ID NO: 319037 - DNA, 120 bp, Artificial Sequence
  ENSG00000135414_13 (sequence is synthesized)
agagggaggcaggtgggaattgagggtgaggggtttgggggaaaggggaagcaggggcatagtcagggtggggagtgtttgaagtttgcagatgagaaggtttgacaaaaagacagagag

SEQ ID NO: 319038 - DNA, 120 bp, Artificial Sequence
  ENSG00000135414_14 (sequence is synthesized)
atgtagagacagtgatagagacagaggaacaaaaagagcagcagtgagaaggcaaagagagaggcagaagagacagacgaggcagagacaaaacactgagaaagagactgaaatggagta

SEQ ID NO: 319039 - DNA, 120 bp, Artificial Sequence
  ENSG00000135414_15 (sequence is synthesized)
ataaatgaaagccccacaccaagcctcctttcttccactggcaaggtgaggggcttggtatagtttggggagatcccctgactattcagtaggagaagaaatcaaaaatccattcttttc

SEQ ID NO: 319040 - DNA, 120 bp, Artificial Sequence
  ENSG00000135414_16 (sequence is synthesized)
tccttctctccctccaacagtggccaggggaaggggaagtgagggcaggggcaaaaagatttgggaatttttatttatttatttattgtgacttttcatttttttggtatttggctttac

SEQ ID NO: 319041 - DNA, 120 bp, Artificial Sequence
  ENSG00000135414_17 (sequence is synthesized)
tggaataggagggcccctgcccactgtgccccgtttatcccttattccccaaaccctgctctccccaacacctactcacttaagcacttgtataaagcctccagggttgggaatgggagt

SEQ ID NO: 319042 - DNA, 120 bp, Artificial Sequence
  ENSG00000135414_18 (sequence is synthesized)
aaagggcaagagggcggacacatgaagtttagtttctaacccatcatcaccctaactcaaccttttctgagccaaatggcttgaattgaagccagttgtcatggaaatagtaagaggtta

SEQ ID NO: 319043 - DNA, 120 bp, Artificial Sequence
  ENSG00000135414_19 (sequence is synthesized)
gggtttaagagctggggatgcgggggtgggagagagaaccctcaacatccaggatctatataatgagagctactttaaaccctcaggtccaccctcatgatgctgagttatttagccaga

SEQ ID NO: 319044 - DNA, 120 bp, Artificial Sequence
  ENSG00000135414_20 (sequence is synthesized)
gggtgcagcctgcttatgcccaaattccctcagccaagagagagaccaaagagcctctggaatggccctgctcccagcctctatcttcaggtcaattagagagagtatagagaccccaga

SEQ ID NO: 319045 - DNA, 120 bp, Artificial Sequence
  ENSG00000135414_21 (sequence is synthesized)
gtcccctgggtctggaaagcgttaggagaggtcaagaaaggagcagtaaggaggctgaaggttacagggcatttgaatccaaatcactgctctgggctagggaatagagccagcagacca

SEQ ID NO: 319046 - DNA, 120 bp, Artificial Sequence
  ENSG00000135414_22 (sequence is synthesized)
aggtgggaaggattctggaagggggacattttagtctcctaaccccaaagctcagggtggaagaggggagaacaaggaagcagagtgtataattattttttccttttatttttggaatct

SEQ ID NO: 319047 - DNA, 120 bp, Artificial Sequence
  ENSG00000135414_23 (sequence is synthesized)
aacagtacctggcagcagggaggggaaagtacagtggggaaaagcatctgacaaggccagttagaacagaggatgggaaggatggagactcccgggcttggaaggctaggaagcaggcag

SEQ ID NO: 319048 - DNA, 120 bp, Artificial Sequence
  ENSG00000135414_24 (sequence is synthesized)
agactggttgccatttcaagtcactagctaggcccattcattcctcccacaaccctgacccattctcctctggactcactgtgcctcagtttcttcccctcaatggaatgagaaatgaca

SEQ ID NO: 319049 - DNA, 120 bp, Artificial Sequence
  ENSG00000135414_25 (sequence is synthesized)
gcacccgccacagccaagagatgaattctgagcacttaccacgggcactttatggacataaaatacctctcgctgtgggacagataaccagggcaccagagtagtggtgaagagatgtga

SEQ ID NO: 319050 - DNA, 120 bp, Artificial Sequence
  ENSG00000135414_26 (sequence is synthesized)
ggcttaagaggagtcacaggcttcagagtacaagttcccctctgcctcccagctggacagtgcctagaagccaaggagttgagaatctcctgatccacaccctatccttacttcaccacc

SEQ ID NO: 319051 - DNA, 120 bp, Artificial Sequence
  ENSG00000135414_27 (sequence is synthesized)
aggcctcttggctccaggcaagagcttagaggatgtcaggagaggtgggggtaagaatcttcagcaaaactgtcactctaagtagagccagcagttacgggtctgataaaaacagtactg

SEQ ID NO: 319052 - DNA, 120 bp, Artificial Sequence
  ENSG00000135414_28 (sequence is synthesized)
aactaaagtaaagcccaagctggtgagcaaaactggatggctcattcttcccaagagcatgactctcccccttggccagttggtggaaggggcaaaggtatgtgaccacccttgagaagg

SEQ ID NO: 319053 - DNA, 120 bp, Artificial Sequence
  ENSG00000135414_29 (sequence is synthesized)
tgatgttggtgagctttaacatcttattcctattcttatagtgagaaagtgaaacaagatctttcagtagaggaatgggcagggctgttaggctcttcagcttgccttcacccatatagc

SEQ ID NO: 319054 - DNA, 120 bp, Artificial Sequence
  ENSG00000135414_30 (sequence is synthesized)
agctatgctaaccccaagcctctctggccctgttcttcatccttccttctgccccaatcctgaaggacaagacacacccggccatcaacaccactcacatttccttggtggaaggaaagg

SEQ ID NO: 319055 - DNA, 120 bp, Artificial Sequence
  ENSG00000135414_31 (sequence is synthesized)
aacagagaagtgaagaacagatacctccctccaaggtcaaatgcctcgtgatcttggcagagtagggattgggcaataagcatcaggtatcttccctctacagattctagagagctgggg

SEQ ID NO: 319056 - DNA, 120 bp, Artificial Sequence
  ENSG00000135414_32 (sequence is synthesized)
cattaaatatgggggacacttagaatacagctccttaaataccaccaaataaagacctttgtgtgtgtgtggtgggtggggggggggcaggggtctttctcttatgaacataaatctgtg

SEQ ID NO: 319057 - DNA, 120 bp, Artificial Sequence
  ENSG00000135414_33 (sequence is synthesized)
agctgaagtctcattcccctgttcctccctacccccaaagaggcacagagtgaagggacttggggggcacagctcagcaacccagtgggagttagcaccccctcccaccttatgatgtgt

SEQ ID NO: 319058 - DNA, 120 bp, Artificial Sequence
  ENSG00000135414_34 (sequence is synthesized)
gtggacctggccagtgcccctctgaacatatcattattagtgtaattatcatttattttgtgtatttgtcacattgtgtgcatgacagcctttgttaagggtgtctgaggagtatggagc

SEQ ID NO: 319059 - DNA, 120 bp, Artificial Sequence
  ENSG00000135414_35 (sequence is synthesized)
tgacaggggcattggaatgccaggaaagaacttcttcaactgagatcaaggcttcctggagggaaccactgcaaaaaggccatcaggcagttttcaagttatgtgacagagggcaaagac

SEQ ID NO: 319060 - DNA, 120 bp, Artificial Sequence
  ENSG00000135414_36 (sequence is synthesized)
aatccagcacttgaacctgaaaaaaaaaataaaagcggtcaaagagtttagaattcagtgctgagctcttctccctaatcaagtgccacatttacaccttggagaaccggaggtgaagag

SEQ ID NO: 319061 - DNA, 120 bp, Artificial Sequence
  ENSG00000135414_37 (sequence is synthesized)
gatctgagacaggaaacctcgtgttcaatgactaagaagatggggtcctggagcaagacagaaaacactaagggcatggtggtataaggtttgggacatgcaggccaaggaaggatggaa

SEQ ID NO: 319062 - DNA, 120 bp, Artificial Sequence
  ENSG00000135414_38 (sequence is synthesized)
agaggacaggaaactgggggtacctagaacaacccctctctgaaaagcttgagccaaaacagtcccaaagacaacaagacccctctcccagcctccacagaatggaagatctaaaggttc

SEQ ID NO: 319063 - DNA, 120 bp, Artificial Sequence
  ENSG00000135414_39 (sequence is synthesized)
tcttgagatgatccagctagtatggaagatctaaaggttctcttgagatgatccagctagtgtcctattctcctgcagtccctgttcctaggtttcctcaacgaagtttgacaaaaatct

SEQ ID NO: 319064 - DNA, 120 bp, Artificial Sequence
  ENSG00000135414_40 (sequence is synthesized)
aaaccaacatagccaacgaacttgccttgttacacaagagtggctaaaatagcatctcaaatattctttcagttcactgtaaaaatttttcccatgtacctagagcacaattccccagga

SEQ ID NO: 319065 - DNA, 120 bp, Artificial Sequence
  ENSG00000135414_41 (sequence is synthesized)
tagagcacaattccccaggaatatgagttgggaatggcaaaagaatattgcctgactcacatttttcaaaaataaggaaagctggctgggcgcagtggcttacatctgtaatcccagcac

SEQ ID NO: 319066 - DNA, 120 bp, Artificial Sequence
  ENSG00000135414_42 (sequence is synthesized)
tttggggggccgaggcgggcggatcatgcaaggtccggagttcgagaccatgctggccaacattgtgaaacctcatctctactaaaatacccaaaattagccgggcgtggtggcgtgcgc

SEQ ID NO: 319067 - DNA, 120 bp, Artificial Sequence
  ENSG00000135414_43 (sequence is synthesized)
aaaaaaaaaaaggaaagcaggacccagtggtgtgctcctgtagttccagctattcaggaggctgtggcaggaggaccacttgaggccagagggtcaaggctgcagtgtgctataattggg

SEQ ID NO: 319068 - DNA, 120 bp, Artificial Sequence
  ENSG00000135414_44 (sequence is synthesized)
cctgtaaatagccactgtactccaagctgagcaacacagtaagacactgtctctaaaaataattaaagtaaaataaaaataaggaaagctcctgtgacatcaacctgatccagaattggg

SEQ ID NO: 319069 - DNA, 120 bp, Artificial Sequence
  ENSG00000135414_45 (sequence is synthesized)
gacagcgctactgcgggttcaatgtactgccatgttttccctgtcttatcagttctatcagcacactgaccccactcgagaccaactacaagactaaggctggaagtggttgagtagcag

SEQ ID NO: 319070 - DNA, 120 bp, Artificial Sequence
  ENSG00000135414_46 (sequence is synthesized)
aagtgttatgtattctatcttcccaagggaaccatatccacatctacccctaactttggcctgagctgaaaatgggttttctctccctgtggctcatttgtttcctatattgagagaaca

SEQ ID NO: 319071 - DNA, 120 bp, Artificial Sequence
  ENSG00000135414_47 (sequence is synthesized)
cccaaaaaaagactactcaagatgactttttacaagtcttttctttatcctaaaacatcctccaaccgaaggcatgggaagctatcctatactctgaccttgcctatattttaaatggca

SEQ ID NO: 319072 - DNA, 120 bp, Artificial Sequence
  ENSG00000135414_48 (sequence is synthesized)
ggggccccaagctaagaatcagcaggcagtggcatctacagcttctggtctgtagtggcgtagaagcaggaaaatcaatgctccaaagcaacaatgtccagctttcctgccagtgagctg

SEQ ID NO: 319073 - DNA, 120 bp, Artificial Sequence
  ENSG00000135414_49 (sequence is synthesized)
ggcttgagggagtgaatgggactctttctgccttttctttttctcaaaatacgactgcattaactgggtgtatgcacacacaaacatgttcaaactagggcactcatacctagctagaac

SEQ ID NO: 319074 - DNA, 120 bp, Artificial Sequence
  ENSG00000135414_50 (sequence is synthesized)
ctactcagggaaagaaatatgtatttccacagtaccctgatcacccagtaaaagctaatatttattgaataattactatgcaaattatggtaagcaaattgtagtgtgaatacatgatat

SEQ ID NO: 319075 - DNA, 120 bp, Artificial Sequence
  ENSG00000135414_51 (sequence is synthesized)
gagaatatcacttaattcacacagcaaccttcacaatggggttccttttggtacagtctgaaaagagaatgattatctgcgcagggtctcagagctagtgtggtagaataagaaattaaa

SEQ ID NO: 319076 - DNA, 120 bp, Artificial Sequence
  ENSG00000135414_52 (sequence is synthesized)
cctaagtagttgctaaacaatattacattctaatctatcctattgaaagtgatccgggaggtagaaacctaaatacaggaataacataagggaaagagataacaagaaagttagggacac

SEQ ID NO: 319077 - DNA, 120 bp, Artificial Sequence
  ENSG00000135414_53 (sequence is synthesized)
cttggactcaaagaatctggaaagatgtgaaacctgtaattttaaatccctttggaagggaaaaacaagaaaagtctagatatggcaagagaaggggaggttaaattttggggggattcc

SEQ ID NO: 319078 - DNA, 120 bp, Artificial Sequence
  ENSG00000135414_54 (sequence is synthesized)
aataatcagaaataagtggcattgccagaggccctcatataagagaacagcaaaaaagttatcctcccttaagttcctccctcactcctcatatcagacacagcaagagaactcagctca

SEQ ID NO: 319079 - DNA, 120 bp, Artificial Sequence
  ENSG00000135414_55 (sequence is synthesized)
acaccaagaagtcctgcccttattcacaccttccttcctatagccctcatcctcacagaagcttctagcctctatcttcagcagttcttaagaggtggggtggggggctgggcagtttag

SEQ ID NO: 319080 - DNA, 120 bp, Artificial Sequence
  ENSG00000135414_56 (sequence is synthesized)
agtgagagtggaaaaaaagaataatcctagagaaccataaaaaagtacagatttacagctgaggaagctagttctccccacagcttttatagactccctcattaagagcttccaggtatg

SEQ ID NO: 319081 - DNA, 120 bp, Artificial Sequence
  ENSG00000135414_57 (sequence is synthesized)
cagagaatgtcacagcttcaggaattggaatcagttaaccacatctggatgctggatcaactatagtagggaaacggggagaggaaggaagggtactaagatctcaggtaaacaattaca

SEQ ID NO: 319082 - DNA, 120 bp, Artificial Sequence
  ENSG00000135414_58 (sequence is synthesized)
agcctcaatgtctgttccatctccaaacggaattactattttaaaactgaattgggaaaaaggcatcctgaactattcatgctcaaagagtatgtggagaatgactataatgagatagga

SEQ ID NO: 319083 - DNA, 120 bp, Artificial Sequence
  ENSG00000135414_59 (sequence is synthesized)
aggggaggacttcatctggcttggaggttagagacttctgaccaacataggaacagctgctgaaatgggatgaaagaggttaataagaaaaaaaaaaaaatcctcacaaattggaaaaca

SEQ ID NO: 319084 - DNA, 120 bp, Artificial Sequence
  ENSG00000135414_60 (sequence is synthesized)
ctgttcaaagatctaggggaagtaagatgagtgaggagaataattaggcttcaagaagagaatcctggcaagtaaggctgaatatctttctggaaggttatagaggataaagagacgaag

SEQ ID NO: 319085 - DNA, 120 bp, Artificial Sequence
  ENSG00000135414_61 (sequence is synthesized)
aaaacttccaaaagatccactgttccacttcataatcagcatctgctctattccctcatgtatttttctctttttaaaaccatattcaggaagaaaccattagtgaatctataatctctc

SEQ ID NO: 319086 - DNA, 120 bp, Artificial Sequence
  ENSG00000135414_62 (sequence is synthesized)
aagttacaaatcagatctattctgttttcagatgaaggcagagtagagagaggaaaagctagccccaagatcagagcctgaggtaaagaaaaggaaggcagacagaaaagagggaaaagg

SEQ ID NO: 319087 - DNA, 120 bp, Artificial Sequence
  ENSG00000135414_63 (sequence is synthesized)
gaaggtcattccaattttaaggtttatttggttgaagaggtgtcaaaaatttaaccagcattcccttttgttcacttctccaaagtctcagaatggggcaaacttcacaacaaatgggca

SEQ ID NO: 319088 - DNA, 120 bp, Artificial Sequence
  ENSG00000135414_64 (sequence is synthesized)
gcagtttttggatctgctctccaaggcacaatttttctaaattatctaaactttaggtccctgctttcctcaccaaccagagactttggagaaataaagagatatcttgacattagaaag

SEQ ID NO: 319089 - DNA, 120 bp, Artificial Sequence
  ENSG00000135414_65 (sequence is synthesized)
gtgatcaaactattaccatttcattaagcacaaaaccaggcaggttttagtagaaataaggataaaggattacaccacagcaacatgggacctgatcatagtaccaaagtcttcaggtaa

SEQ ID NO: 319090 - DNA, 120 bp, Artificial Sequence
  ENSG00000135414_66 (sequence is synthesized)
ggtgtcaggctcctaagtcttattaccaaaaatagctcaaacaaaaaccgagcttatataaagattaagaggagaaattctgcaataacatatccaaaaagattaagcaggtttcagatc

SEQ ID NO: 319091 - DNA, 120 bp, Artificial Sequence
  ENSG00000135414_67 (sequence is synthesized)
tacatgaacttgaagcctccagttccactgcttatgttcccaatgatttagctaacaatgcgtaacagctctgacatcctctgtcatgctttgattctgcatacaaaatttcttctgtct

SEQ ID NO: 319092 - DNA, 120 bp, Artificial Sequence
  ENSG00000135414_68 (sequence is synthesized)
ctgagggatatccagcccatctcccttcctgaactgactgaccaacatagtatcgtatcacatcacccttgaaatcagggcccttttcctttaatgtgggaccctggactccattttatc

SEQ ID NO: 319093 - DNA, 120 bp, Artificial Sequence
  ENSG00000135414_69 (sequence is synthesized)
caagaaaaagtctgcattattagctaataacagaaggctactaatcactgcccttgtatttatatcctttgcaacacctaaaacctcccatgttctgttttatttcagtgggtcactaca

SEQ ID NO: 319094 - DNA, 120 bp, Artificial Sequence
  ENSG00000135414_70 (sequence is synthesized)
agctgctggagcaaagacttggtgggtgggtaacttaacctcttcacagaggataaaaaatgcttgtgagtatgacagaagggaataaacaggcttaaagggtaaactcagtccttttcc

SEQ ID NO: 319095 - DNA, 120 bp, Artificial Sequence
  ENSG00000135414_71 (sequence is synthesized)
ttgtcttctcttctaagggataaaggtattatggccaattctctataatatttgcccctgaagctccccttatctggtctaatctagctccaataaatcaaaggagcacctaataaaaca

SEQ ID NO: 319096 - DNA, 120 bp, Artificial Sequence
  ENSG00000135414_72 (sequence is synthesized)
ttaagtgggtcactacaagctgctggagcaaagacttggtgggtgggtaacttaacctcttcacagaggataaaaaatgcttgtgagtatgacagaagggaataaacaggcttaaagggt

SEQ ID NO: 319097 - DNA, 120 bp, Artificial Sequence
  ENSG00000135423_0 (sequence is synthesized)
agaggtcccgggcgcacctgcagagccggaggcttgctggggcatgcgctccatgaaggctctgcagaaggccctgagccgggctggcagtcactgcgggcgaggaggctggggtcaccc

SEQ ID NO: 319098 - DNA, 120 bp, Artificial Sequence
  ENSG00000135423_1 (sequence is synthesized)
gagccggagccccctccttggcgggggcgtccggcaccacctcagtgaggccgcggcgcagggcagagagacgccacacagccaccagccgcagcaccaggatcatgattcatcagaaag

SEQ ID NO: 319099 - DNA, 120 bp, Artificial Sequence
  ENSG00000135423_2 (sequence is synthesized)
tggcatgctgtcccgcctgggtgatttgctcttttacactattgctgaaggacaggaacgaatccctatccacaagttcaccactgcactaaaggccactggactgcagacatcagatcc

SEQ ID NO: 319100 - DNA, 120 bp, Artificial Sequence
  ENSG00000135423_3 (sequence is synthesized)
tcggctccgagactgcatgagcgagatgcaccgcgtggtccaagagtccagtagtggtggcctcttggaccgagatctcttccgaaagtgtgtgagcagcaacattgtgctcctgaccca

SEQ ID NO: 319101 - DNA, 120 bp, Artificial Sequence
  ENSG00000135423_4 (sequence is synthesized)
ggcattccgaaagaagtttgtcattcctgattttgaggagttcacgggccatgtggatcgcatctttgaggatgtcaaagagctcactggaggcaaagtggcagcctacatccctcagct

SEQ ID NO: 319102 - DNA, 120 bp, Artificial Sequence
  ENSG00000135423_5 (sequence is synthesized)
ggccaagtcaaacccagacctgtggggtgtctccctgtgcactgtggatggtcaacggcactctgtgggccacacaaagatccccttctgcctgcagtcctgtgtgaagcccctcaccta

SEQ ID NO: 319103 - DNA, 120 bp, Artificial Sequence
  ENSG00000135423_6 (sequence is synthesized)
tgccatctccataagcaccctaggcactgactacgtgcacaagtttgtgggcaaagagccaagtggcctgcgctacaacaagctctccctcaatgaggaaggaatcccccataaccccat

SEQ ID NO: 319104 - DNA, 120 bp, Artificial Sequence
  ENSG00000135423_7 (sequence is synthesized)
ggtcaatgctggtgccattgttgtcagctccctgatcaagatggactgtaacaaagcagagaagtttgattttgtgttgcagtatctcaacaaaatggctgggaatgaatacatgggttt

SEQ ID NO: 319105 - DNA, 120 bp, Artificial Sequence
  ENSG00000135423_8 (sequence is synthesized)
cagcaatgccacattccagtcagagaaggaaacaggggatcggaattatgccatcggctattatctcaaggaaaagaagtgctttcctaagggggtggacatgatggctgcccttgatct

SEQ ID NO: 319106 - DNA, 120 bp, Artificial Sequence
  ENSG00000135423_9 (sequence is synthesized)
gtgctgaagcagtgcgcaacaccctcagcctcatgcattcctgcggcatgtatgacttctctggccagtttgccttccacgtgggcctgccagccaagtcagctgtatcaggagccatcc

SEQ ID NO: 319107 - DNA, 120 bp, Artificial Sequence
  ENSG00000135423_10 (sequence is synthesized)
tcctggtggtacccaatgtcatgggaatgatgtgcctgtcacccccattggacaagctggggaacagccatagggggaccagcttctgccagaagttggtgtctctcttcaatttccaca

SEQ ID NO: 319108 - DNA, 120 bp, Artificial Sequence
  ENSG00000135423_11 (sequence is synthesized)
actatgacaacctgaggcactgtgctcggaagttagacccacggcgtgaaggggcagaaattcggaacaagactgtggtcaacctgttatttgctgcctatagtggcgatgtctcagctc

SEQ ID NO: 319109 - DNA, 120 bp, Artificial Sequence
  ENSG00000135423_12 (sequence is synthesized)
ttcgaaggtttgccttgtcagccatggatatggaacagaaagactatgactcgcgcacagctctgcatgttgctgcagctgaaggacacatcgaagttgttaaattcctgatcgaggctt

SEQ ID NO: 319110 - DNA, 120 bp, Artificial Sequence
  ENSG00000135423_13 (sequence is synthesized)
gcaaagtgaatccttttgccaaggacaggtggggcaacattcccctggatgatgctgtgcagttcaaccatctggaggtggtcaaactgcttcaagattaccaggactcctacacactct

SEQ ID NO: 319111 - DNA, 120 bp, Artificial Sequence
  ENSG00000135423_14 (sequence is synthesized)
ctgaaactcaggctgaggcagcagctgaggccctgtccaaagagaacttagaaagcatggtatgagcacaggtcatggacagcccctgctcaagaaaaagcatgagctggccacacatgt

SEQ ID NO: 319112 - DNA, 120 bp, Artificial Sequence
  ENSG00000135423_15 (sequence is synthesized)
aatccataaccaccaaaaatactatggagagctacactgcttcagtggggaccaagcagtcatttggtgacttaggctagtgctttctatgggagtcaaaataccccattccctcagcag

SEQ ID NO: 319113 - DNA, 120 bp, Artificial Sequence
  ENSG00000135423_16 (sequence is synthesized)
acagagtacagagaagggcctcagaggacacctgcagtacagctatccagagagactgggcttcaaggtacagcctaatggcttgccccactcaaaaccatcccagctcttcacccaggt

SEQ ID NO: 319114 - DNA, 120 bp, Artificial Sequence
  ENSG00000135423_17 (sequence is synthesized)
ctcctcttcctctccctgaagaaaccatcatgagagagatactctggtggagggactctagctaccatgcacatgtacatatccacagaatatgggaagtgggaatggctatatacatgg

SEQ ID NO: 319115 - DNA, 120 bp, Artificial Sequence
  ENSG00000135423_18 (sequence is synthesized)
ctttagtagtctggagaaatctactccccttggccaggacatgctgctgctactgctaacagccaattttatagacagagaaagtattttgtgttcaaataaactttaattaccaaatca

SEQ ID NO: 319116 - DNA, 120 bp, Artificial Sequence
  ENSG00000135423_19 (sequence is synthesized)
aacgctcctcacctagcccctgtcctgagggtgcccctaaccctggagccagctttaaaggggcaggccccttctcctgccccagccccagccccacccaccgggcccacattctccgtc

SEQ ID NO: 319117 - DNA, 120 bp, Artificial Sequence
  ENSG00000135423_20 (sequence is synthesized)
agttcccttgctacttagcccctggctgcatttcgccatggcatgctgtcctctccagctgccccagtggctctctaaccccactaccaggtgcaccagcccatactagaagccttattt

SEQ ID NO: 319118 - DNA, 120 bp, Artificial Sequence
  ENSG00000135423_21 (sequence is synthesized)
agagcagtgtcctaggaagtaggtaccctgcctcaaatgggcacttaccacaggtaggcagtgagtgatatttctggaaggatcacattcccatctctctaatatgagtataacagtctc

SEQ ID NO: 319119 - DNA, 120 bp, Artificial Sequence
  ENSG00000135423_22 (sequence is synthesized)
atctggatatggaaaaaagattattcagagccaacaaatctggctataggctgtttcactttctctgaaactcatccagtctgacaccagttcacaaagaacacctgtgattccagtctg

SEQ ID NO: 319120 - DNA, 120 bp, Artificial Sequence
  ENSG00000135423_23 (sequence is synthesized)
atctaggcaactctagctgctttcccactaccctcaggtttgccttgtcagccatggatatggaacagaaagactatgactcgcgcacagctctgcatgttgctgcagctgaaggtactg

SEQ ID NO: 319121 - DNA, 120 bp, Artificial Sequence
  ENSG00000135423_24 (sequence is synthesized)
aagggttaaggaggggaggaggagggtaatcataagaccctttctttttcaccaaaagtaccttcattatatgtgccctcaaggttataggggcagcaactagttttatctagacaccct

SEQ ID NO: 319122 - DNA, 120 bp, Artificial Sequence
  ENSG00000135423_25 (sequence is synthesized)
tcggtttgcagctagactatgactgagtgctgcagggtacaaaatgggaagaggccttttcccctcccctcttggtaaagacttcagtggctaagtgtctgcaccaaagggttcaagacc

SEQ ID NO: 319123 - DNA, 120 bp, Artificial Sequence
  ENSG00000135423_26 (sequence is synthesized)
ttcaattcctcattttattttattacttattacataagttatacatgaatactcatcataagagttcaaacaatatagaaatacatgttctcctttccctccctactcaatccctgtcct

SEQ ID NO: 319124 - DNA, 120 bp, Artificial Sequence
  ENSG00000135423_27 (sequence is synthesized)
cagaagggctagtcaacctgtgaggtattaatagagcttcttaaccaagtggagcctcaatgtccctttttctcttccaggtgttgcagtatctcaacaaaatggctgggaatgaataca

SEQ ID NO: 319125 - DNA, 120 bp, Artificial Sequence
  ENSG00000135423_28 (sequence is synthesized)
agtcctcgtgtgtattttaggagatgcgtggatgtggaacagcctcctgcctccggtccaggtgtactggggtctgtgtgttgtgtttctgcgtgttctcggcagtgattcatcagaaag

SEQ ID NO: 319126 - DNA, 120 bp, Artificial Sequence
  ENSG00000135423_29 (sequence is synthesized)
tatccatctgtcatgagcccagtgctaagaagagagaacactgactctctcaagatagaggtggaagcttgttcctgcctctcattcactaacttccaggaaggcaattaggttgagact

SEQ ID NO: 319127 - DNA, 120 bp, Artificial Sequence
  ENSG00000135424_0 (sequence is synthesized)
gccggagctgcggctgctgtagttgtcctagccggtgctggggcggcggggtggcggagcggcgggcgggcgggagggctggcggggcgaacgtctgggagacgtctgaaagaccaacga

SEQ ID NO: 319128 - DNA, 120 bp, Artificial Sequence
  ENSG00000135424_1 (sequence is synthesized)
gactttggagaccagagacgcgcctggggggacctggggcttggggcgtgcgagatttcccttgcattcgctgggagctcgcgcagggatcgtcccatggccggggctcggagccgcgac

SEQ ID NO: 319129 - DNA, 120 bp, Artificial Sequence
  ENSG00000135424_2 (sequence is synthesized)
ccttggggggcctccgggatttgctacctttttggctccctgctcgtcgaactgctcttctcacgggctgtcgccttcaatctggacgtgatgggtgccttgcgcaaggagggcgagcca

SEQ ID NO: 319130 - DNA, 120 bp, Artificial Sequence
  ENSG00000135424_3 (sequence is synthesized)
ggcagcctcttcggcttctctgtggccctgcaccggcagttgcagccccgaccccagagctggctgctggtgggtgctccccaggccctggctcttcctgggcagcaggcgaatcgcact

SEQ ID NO: 319131 - DNA, 120 bp, Artificial Sequence
  ENSG00000135424_4 (sequence is synthesized)
ggaggcctcttcgcttgcccgttgagcctggaggagactgactgctacagagtggacatcgaccagggagctgatatgcaaaaggaaagcaaggagaaccagtggttgggagtcagtgtt

SEQ ID NO: 319132 - DNA, 120 bp, Artificial Sequence
  ENSG00000135424_5 (sequence is synthesized)
cggagccaggggcctgggggcaagattgttacctgtgcacaccgatatgaggcaaggcagcgagtggaccagatcctggagacgcgggatatgattggtcgctgctttgtgctcagccag

SEQ ID NO: 319133 - DNA, 120 bp, Artificial Sequence
  ENSG00000135424_6 (sequence is synthesized)
gacctggccatccgggatgagttggatggtggggaatggaagttctgtgagggacgcccccaaggccatgaacaatttgggttctgccagcagggcacagctgccgccttctcccctgat

SEQ ID NO: 319134 - DNA, 120 bp, Artificial Sequence
  ENSG00000135424_7 (sequence is synthesized)
agccactacctcctctttggggccccaggaacctataattggaaggggttgctttttgtgaccaacattgatagctcagaccccgaccagctggtgtataaaactttggaccctgctgac

SEQ ID NO: 319135 - DNA, 120 bp, Artificial Sequence
  ENSG00000135424_8 (sequence is synthesized)
cggctcccaggaccagccggagacttggccctcaatagctacttaggcttctctattgactcggggaaaggtctggtgcgtgcagaagagctgagctttgtggctggagccccccgcgcc

SEQ ID NO: 319136 - DNA, 120 bp, Artificial Sequence
  ENSG00000135424_9 (sequence is synthesized)
aaccacaagggtgctgtggtcatcctgcgcaaggacagcgccagtcgcctggtgcccgaggttatgctgtctggggagcgcctgacctccggctttggctactcactggctgtggctgac

SEQ ID NO: 319137 - DNA, 120 bp, Artificial Sequence
  ENSG00000135424_10 (sequence is synthesized)
ctcaacagtgatggctggccagacctgatagtgggtgccccctacttctttgagcgccaagaagagctggggggtgctgtgtatgtgtacttgaaccaggggggtcactgggctgggatc

SEQ ID NO: 319138 - DNA, 120 bp, Artificial Sequence
  ENSG00000135424_11 (sequence is synthesized)
tcccctctccggctctgcggctcccctgactccatgttcgggatcagcctggctgtcctgggggacctcaaccaagatggctttccagatattgcagtgggtgccccctttgatggtgat

SEQ ID NO: 319139 - DNA, 120 bp, Artificial Sequence
  ENSG00000135424_12 (sequence is synthesized)
gggaaagtcttcatctaccatgggagcagcctgggggttgtcgccaaaccttcacaggtgctggagggcgaggctgtgggcatcaagagcttcggctactccctgtcaggcagcttggat

SEQ ID NO: 319140 - DNA, 120 bp, Artificial Sequence
  ENSG00000135424_13 (sequence is synthesized)
atggatgggaaccaataccctgacctgctggtgggctccctggctgacaccgcagtgctcttcagggccagacccatcctccatgtctcccatgaggtctctattgctccacgaagcatc

SEQ ID NO: 319141 - DNA, 120 bp, Artificial Sequence
  ENSG00000135424_14 (sequence is synthesized)
gacctggagcagcccaactgtgctggcggccactcggtctgtgtggacctaagggtctgtttcagctacattgcagtccccagcagctatagccctactgtggccctggactatgtgtta

SEQ ID NO: 319142 - DNA, 120 bp, Artificial Sequence
  ENSG00000135424_15 (sequence is synthesized)
gatgcggacacagaccggaggctccggggccaggttccccgtgtgacgttcctgagccgtaacctggaagaacccaagcaccaggcctcgggcaccgtgtggctgaagcaccagcatgac

SEQ ID NO: 319143 - DNA, 120 bp, Artificial Sequence
  ENSG00000135424_16 (sequence is synthesized)
cgagtctgtggagacgccatgttccagctccaggaaaatgtcaaagacaagcttcgggccattgtagtgaccttgtcctacagtctccagacccctcggctccggcgacaggctcctggc

SEQ ID NO: 319144 - DNA, 120 bp, Artificial Sequence
  ENSG00000135424_17 (sequence is synthesized)
agcccagcacccagcgggcagagatccacttcctgaagcaaggctgtggtgaagacaagatctgccagagcaatctgcagctggtccgcgcccgcttctgtacccgggtcagcgacacgg

SEQ ID NO: 319145 - DNA, 120 bp, Artificial Sequence
  ENSG00000135424_18 (sequence is synthesized)
aattccaacctctgcccatggatgtggatggaacaacagccctgtttgcactgagtgggcagccagtcattggcctggagctgatggtcaccaacctgccatcggacccagcccagcccc

SEQ ID NO: 319146 - DNA, 120 bp, Artificial Sequence
  ENSG00000135424_19 (sequence is synthesized)
aggctgatggggatgatgcccatgaagcccagctcctggtcatgcttcctgactcactgcactactcaggggtccgggccctggaccctgcggagaagccactctgcctgtccaatgaga

SEQ ID NO: 319147 - DNA, 120 bp, Artificial Sequence
  ENSG00000135424_20 (sequence is synthesized)
atgcctcccatgttgagtgtgagctggggaaccccatgaagagaggtgcccaggtcaccttctacctcatccttagcacctccgggatcagcattgagaccacggaactggaggtagagc

SEQ ID NO: 319148 - DNA, 120 bp, Artificial Sequence
  ENSG00000135424_21 (sequence is synthesized)
tgctgttggccacgatcagtgagcaggagctgcatccagtctctgcacgagcccgtgtcttcattgagctgccactgtccattgcaggaatggccattccccagcaactcttcttctctg

SEQ ID NO: 319149 - DNA, 120 bp, Artificial Sequence
  ENSG00000135424_22 (sequence is synthesized)
gtgtggtgaggggcgagagagccatgcagtctgagcgggatgtgggcagcaaggtcaagtatgaggtcacggtttccaaccaaggccagtcgctcagaaccctgggctctgccttcctca

SEQ ID NO: 319150 - DNA, 120 bp, Artificial Sequence
  ENSG00000135424_23 (sequence is synthesized)
acatcatgtggcctcatgagattgccaatgggaagtggttgctgtacccaatgcaggttgagctggagggcgggcaggggcctgggcagaaagggctttgctctcccaggcccaacatcc

SEQ ID NO: 319151 - DNA, 120 bp, Artificial Sequence
  ENSG00000135424_24 (sequence is synthesized)
tccacctggatgtggacagtagggataggaggcggcgggagctggagccacctgagcagcaggagcctggtgagcggcaggagcccagcatgtcctggtggccagtgtcctctgctgaga

SEQ ID NO: 319152 - DNA, 120 bp, Artificial Sequence
  ENSG00000135424_25 (sequence is synthesized)
agaagaaaaacatcaccctggactgcgcccggggcacggccaactgtgtggtgttcagctgcccactctacagctttgaccgcgcggctgtgctgcatgtctggggccgtctctggaaca

SEQ ID NO: 319153 - DNA, 120 bp, Artificial Sequence
  ENSG00000135424_26 (sequence is synthesized)
gcacctttctggaggagtactcagctgtgaagtccctggaagtgattgtccgggccaacatcacagtgaagtcctccataaagaacttgatgctccgagatgcctccacagtgatcccag

SEQ ID NO: 319154 - DNA, 120 bp, Artificial Sequence
  ENSG00000135424_27 (sequence is synthesized)
tgatggtatacttggaccccatggctgtggtggcagaaggagtgccctggtgggtcatcctcctggctgtactggctgggctgctggtgctagcactgctggtgctgctcctgtggaaga

SEQ ID NO: 319155 - DNA, 120 bp, Artificial Sequence
  ENSG00000135424_28 (sequence is synthesized)
tgggattcttcaaacgggcgaagcaccccgaggccaccgtgccccagtaccatgcggtgaagattcctcgggaagaccgacagcagttcaaggaggagaagacgggcaccatcctgagga

SEQ ID NO: 319156 - DNA, 120 bp, Artificial Sequence
  ENSG00000135424_29 (sequence is synthesized)
acaactggggcagcccccggcgggagggcccggatgcacaccccatcctggctgctgacgggcatcccgagctgggccccgatgggcatccagggccaggcaccgcctaggttcccatgt

SEQ ID NO: 319157 - DNA, 120 bp, Artificial Sequence
  ENSG00000135424_30 (sequence is synthesized)
cccagcctggcctgtggctgccctccatcccttccccagagatggctccttgggatgaagagggtagagtgggctgctggtgtcgcatcaagatttggcaggatcggcttcctcaggggc

SEQ ID NO: 319158 - DNA, 120 bp, Artificial Sequence
  ENSG00000135424_31 (sequence is synthesized)
acagacctctcccacccacaagaactcctcccacccaacttccccttagagtgctgtgagatgagagtgggtaaatcagggacagggccatggggtagggtgagaagggcaggggtgtcc

SEQ ID NO: 319159 - DNA, 120 bp, Artificial Sequence
  ENSG00000135424_32 (sequence is synthesized)
tgatgcaaaggtggggagaagggatcctaatcccttcctctcccattcaccctgtgtaacaggaccccaaggacctgcctccccggaagtgccttaacctagagggtcggggaggaggtt

SEQ ID NO: 319160 - DNA, 120 bp, Artificial Sequence
  ENSG00000135424_33 (sequence is synthesized)
gtgtcactgactcaggctgctccttctctagtttcccctctcatctgaccttagtttgctgccatcagtctagtggtttcgtggtttcgtctatttattaaaaaatatttgagaacaaaa

SEQ ID NO: 319161 - DNA, 120 bp, Artificial Sequence
  ENSG00000135424_34 (sequence is synthesized)
gacacagagtgagtagacaaggcttcacatactgggagatctggctgggcttcaagagagggggttggtggtggtgtggctaagttccaaatgttggcctgaagccagtgctcaaagaaa

SEQ ID NO: 319162 - DNA, 120 bp, Artificial Sequence
  ENSG00000135424_35 (sequence is synthesized)
gggggcccttgagacagtccaaatggctccctttgccactcccatggttcaagctttgactacaaccagaattcagaggcaggcagaaggattccagtgctggagagaatgtggaacaag

SEQ ID NO: 319163 - DNA, 120 bp, Artificial Sequence
  ENSG00000135424_36 (sequence is synthesized)
ctacctcctctttggggccccaggaacctataattggaagggcacggccagggtggagctctgtgcacagggctcagcggacctggcacacctggacgacggtccctacgaggcgggggg

SEQ ID NO: 319164 - DNA, 120 bp, Artificial Sequence
  ENSG00000135424_37 (sequence is synthesized)
accgctgtgtcacgtgaggttgggaaccgccctcttgagaccttgggtgaagatcttggcggggaagagaggtagagggttgcggagggcaggtgaagtgttctttattgggagcttagt

SEQ ID NO: 319165 - DNA, 120 bp, Artificial Sequence
  ENSG00000135424_38 (sequence is synthesized)
ggacatcgaccagggaggtgtggccctgcatgaacagagtgggggaagcgtgtgagcggggaggagaggacttgggctcctcttccctcccctaattcccagtgtcctgcctctagctga

SEQ ID NO: 319166 - DNA, 120 bp, Artificial Sequence
  ENSG00000135424_39 (sequence is synthesized)
tatgcaaaaggaaagcaaggagaaccagtggttgggagtcagtgttcggagccaggggcctgggggcaagattgttgtgagtattgcttctcatgactgaatgcacggatggggtgtgtg

SEQ ID NO: 319167 - DNA, 120 bp, Artificial Sequence
  ENSG00000135424_40 (sequence is synthesized)
aaagaccggagcggtcaagctgtttccccactgaattccctcaatcacatttatgttcttttcctcccagccactcccatggttcaagctttgactacaaccagaattcagaggcaggca

SEQ ID NO: 319168 - DNA, 120 bp, Artificial Sequence
  ENSG00000135424_41 (sequence is synthesized)
cctcctctttggggccccaggaacctataattggaagggtgagtcactcctcgggaaggggagaaggggaccaaaacctcctcttacctcagagacagggttggggatggcacatggcca

SEQ ID NO: 319169 - DNA, 120 bp, Artificial Sequence
  ENSG00000135424_42 (sequence is synthesized)
tgtgcactgctgtatggccccagggcactgccatgccttccaccccattgagctagtgcacacatgaatggggggtgcctcctttccctcgcacggccaagtgttcctcaacatgctggc

SEQ ID NO: 319170 - DNA, 120 bp, Artificial Sequence
  ENSG00000135424_43 (sequence is synthesized)
atgggccccaagtgcacgctgggcctgcagctggggcctgcatgctccaacacactagcccacacctcatcactgccattcccgtctccgcacgctgctgctggctgagctgacactcgg

SEQ ID NO: 319171 - DNA, 120 bp, Artificial Sequence
  ENSG00000135424_44 (sequence is synthesized)
gggactttccctgaggggatggatggtgggcacatattgaagaaagggctaatgttgttggcttctctattgactcggggaaaggtctggtgcgtgcagaagagctgagctttgtggctg

SEQ ID NO: 319172 - DNA, 120 bp, Artificial Sequence
  ENSG00000135424_45 (sequence is synthesized)
ctctgcccatgtgaggggggcagagagcagggtgggggtgggagggcaagagttcaaggattgagagaaagccctctcaggaggaccagtcagagggaagggctgagcctgcagaaaagg

SEQ ID NO: 319173 - DNA, 120 bp, Artificial Sequence
  ENSG00000135424_46 (sequence is synthesized)
cagaaggtggaagaggacctgccgatggacttggagactgagatgagggtcagtgatggggccacgggggctcccatggcaaggaatagcaatccttcacagtacactaataatatgcag

SEQ ID NO: 319174 - DNA, 120 bp, Artificial Sequence
  ENSG00000135424_47 (sequence is synthesized)
gaagcctagagaggttaagttacttggccaaggtaagtaatggtggagctgagatgagaacggaggtcccctgactcccagtcgtgtgtacagaggcctgaggcttggacgggtgtgatg

SEQ ID NO: 319175 - DNA, 120 bp, Artificial Sequence
  ENSG00000135424_48 (sequence is synthesized)
gggacctggggtgggaagagaggctcagggagtgaaggcaggtactgggggagcagactgggcgggggaatggtagggggaggtgttcagaacttagcaggagtggggtctgactctcca

SEQ ID NO: 319176 - DNA, 120 bp, Artificial Sequence
  ENSG00000135424_49 (sequence is synthesized)
agagaaggagcaggacccccgcctcatcccggtccctgccaacagctactttggtagggacctctccccggcccagaactgctctaaccctctgctcctctctcttgtcctctctctcca

SEQ ID NO: 319177 - DNA, 120 bp, Artificial Sequence
  ENSG00000135424_50 (sequence is synthesized)
tgctcccatccttctgtctctgtttctgtctctcaccttgtctctctctgtctttctgtctctggctgtgatctctctggtctctttttctctctccacctcttcttcttccaccatttt

SEQ ID NO: 319178 - DNA, 120 bp, Artificial Sequence
  ENSG00000135424_51 (sequence is synthesized)
gtatgtagagtgcctgggattttgtagcctctcaataaaatagaaaacatacctgagtgactggggggagttgaggcctggatcttgtctgcaaggcccccagccagcgtgactgccttt

SEQ ID NO: 319179 - DNA, 120 bp, Artificial Sequence
  ENSG00000135426_0 (sequence is synthesized)
aagtgtggcaggaggaaggctgtatgatataaaggaagaaagcatgcatctggaactcagaacttgacggcattactgttacgggaggccctgaagtctgagccagggccatggaggcct

SEQ ID NO: 319180 - DNA, 120 bp, Artificial Sequence
  ENSG00000135426_1 (sequence is synthesized)
ctgtgctgagccccacatcctgggagaaacggcgggcctggctccgtcagagccgtaactggcagacccaggtcctagaagaggaggctgccgccgccctgcaggatgtcccagatcctg

SEQ ID NO: 319181 - DNA, 120 bp, Artificial Sequence
  ENSG00000135426_2 (sequence is synthesized)
agccttccagcctggatgacgttttccaagaagggaatccaatcaataaaattgaagactggctgcaggattgcggatactctgaagaaggattttctgaggaagcaggacagtttatct

SEQ ID NO: 319182 - DNA, 120 bp, Artificial Sequence
  ENSG00000135426_3 (sequence is synthesized)
acaatggcttctgcagccatgggaccagctttgaagatgacttgaccctgggagcggaggccacactactggccgccaatggcaaactcttctccaggagtttcctcgagacagccaggc

SEQ ID NO: 319183 - DNA, 120 bp, Artificial Sequence
  ENSG00000135426_4 (sequence is synthesized)
cttgccagctacttgatcttggctgtagtttggcttccagcagcatgactggggggaccaacaagactagttcaagcatctcagaaattctggacaaagtgcaagaagatgcagaagatg

SEQ ID NO: 319184 - DNA, 120 bp, Artificial Sequence
  ENSG00000135426_5 (sequence is synthesized)
tcctcttcagtctgggctttggccaagaggatcacaaagacacttctcggatacccgcccgatttttcaccaccccctctcaggccaagggcattgatttccagctcttcctgaagtccc

SEQ ID NO: 319185 - DNA, 120 bp, Artificial Sequence
  ENSG00000135426_6 (sequence is synthesized)
aggtgcggaggattgaaatggaagacccctgcctcatgctggccagcaggtttaagcaggtgcaaacactggctgtcactgctgatgccttcttctgtctctactcctatgtgtctaaga

SEQ ID NO: 319186 - DNA, 120 bp, Artificial Sequence
  ENSG00000135426_7 (sequence is synthesized)
cagtcacccagagaccgccttcggaaagccatctccaagatgtgtctgtacacatgcccccgagaccggccaccaccaccccacaacacccccaaaaggaacagtttggaccaagttgtg

SEQ ID NO: 319187 - DNA, 120 bp, Artificial Sequence
  ENSG00000135426_8 (sequence is synthesized)
ttggaagtgatggacaaagtgaaagaagagaagcagttcctccagcaagactctgatttggggcaattctcacaggaagatcctgtgccccctgctgagggtaagaagttgcccacttct

SEQ ID NO: 319188 - DNA, 120 bp, Artificial Sequence
  ENSG00000135426_9 (sequence is synthesized)
ccctatccatgtgtcttctgctgtgaagaggaaacacagcagaggatgtccacagtgctagcaccatcccaaactctggattcgaaccccaaggtaccctgttgcacacattctctgccc

SEQ ID NO: 319189 - DNA, 120 bp, Artificial Sequence
  ENSG00000135426_10 (sequence is synthesized)
atagaagatccacagtggagcacagacccagctcagataaggagagagctgtgtagtctaccagccaccaatacggaaacccatccagccaaggatgagactttctggaaaagaaagagc

SEQ ID NO: 319190 - DNA, 120 bp, Artificial Sequence
  ENSG00000135426_11 (sequence is synthesized)
agagcaagaaagagcctcttccagaagaatctcatgggcaggaaggttaagtccttggacctgtccatcacccagcagaaatggaagcagagtgtagacagaccagaactgcgtcggtct

SEQ ID NO: 319191 - DNA, 120 bp, Artificial Sequence
  ENSG00000135426_12 (sequence is synthesized)
ttaagccagcagccacaggacacttttgacttggaggaggtgcaaagcaacagtgaggaggagcagagtcagagtcgctggcccagcagacccaggcacccccaccaccaccagactttt

SEQ ID NO: 319192 - DNA, 120 bp, Artificial Sequence
  ENSG00000135426_13 (sequence is synthesized)
gctggcaaagactcgtgaagctttctccaccaccacaacagcatgtggtctgacagaattggcttcaaagaagaaactaaaagccacctcttgcaggaaactgcactgccctcaacatcc

SEQ ID NO: 319193 - DNA, 120 bp, Artificial Sequence
  ENSG00000135426_14 (sequence is synthesized)
agcccctactccttggtcctccaaacccccaaactctgcaggagaaaggcagcatggtacatggggaggaagaccagactgagcgatttggaatccacatcctaatgctgccacaagctg

SEQ ID NO: 319194 - DNA, 120 bp, Artificial Sequence
  ENSG00000135426_15 (sequence is synthesized)
ctcatttccgcttccccttttgagcaggcaacagcagttgaatgagttcagggagaaaggcataatctacaacatgatactttctcacttgcttcacctctgtgcccacacctgtgaagg

SEQ ID NO: 319195 - DNA, 120 bp, Artificial Sequence
  ENSG00000135426_16 (sequence is synthesized)
ctcccaagctttgacattgccaagggcagttaggagacttcaggatcaagtttaggggacaagtttttttctaatactttcaaaaggcccaagtgaagagaggaaggacacctcactttc

SEQ ID NO: 319196 - DNA, 120 bp, Artificial Sequence
  ENSG00000135426_17 (sequence is synthesized)
tggctctaaaagcatggtacatctcacactaggattccctctgcacctctgttcatccctgtattcctaactaaattccagaaaatcttctacaacactggagtcctatttttcttcttg

SEQ ID NO: 319197 - DNA, 120 bp, Artificial Sequence
  ENSG00000135426_18 (sequence is synthesized)
agacctcctttgaagaaatcaacttggagactcctccttaaatccagtttctttctctacccaaaattttgcatctttatagaaaaagagataagtaggattcagagtctcttctcctag

SEQ ID NO: 319198 - DNA, 120 bp, Artificial Sequence
  ENSG00000135426_19 (sequence is synthesized)
ccattgtggggggaaaaaatgctatttctgttggcagaaaacaatacaaatattttttttaaatcatggcatgtttttaaagttaactaacagctgtagtttgctttggaagttaaatgt

SEQ ID NO: 319199 - DNA, 120 bp, Artificial Sequence
  ENSG00000135426_20 (sequence is synthesized)
tttgtcaataaacagggcttgagcacatgcagtgctctcttaggcagtatgtggtttcagagcatcttggacacatttctcccctgagaaaatattaatattaatagaatgggagaagta

SEQ ID NO: 319200 - DNA, 120 bp, Artificial Sequence
  ENSG00000135426_21 (sequence is synthesized)
agatgcacgcatttccagaagtatattatttggctgcctaataaattgtgagacaaaagaaaaaaaaaaaaaaaacaggaagagagggacttgagggaatttgagggaaatcataaccaa

SEQ ID NO: 319201 - DNA, 120 bp, Artificial Sequence
  ENSG00000135426_22 (sequence is synthesized)
aagtttaaaggaaaaaattacaccagacatgataagcagaagttgattttgttctggtgctattgccagcattaggggagaaggcacaaactgagtctgatacgtagtgaggcagagaca

SEQ ID NO: 319202 - DNA, 120 bp, Artificial Sequence
  ENSG00000135426_23 (sequence is synthesized)
aaagggctagggtggaaaaatttttaaaccatctgtgtttactaattccccataccaaaagaacaaaatgaactttctcctatttcatgataaaagatagtttcacaatttggaaaaagc

SEQ ID NO: 319203 - DNA, 120 bp, Artificial Sequence
  ENSG00000135426_24 (sequence is synthesized)
ccccccactccaagtttcctacccttcccacccacagaaaccaggagacaggggaactatcttccttgatgttaacatttcaaagaggtggttctcaggtcctagagaaagatattcctg

SEQ ID NO: 319204 - DNA, 120 bp, Artificial Sequence
  ENSG00000135426_25 (sequence is synthesized)
agttgtaaaactgggaagaggctggaagaagatttagatctcaagaaatagaaagaactacagcaaattttctaaagcaaatattcttaagggaggtcaagggcctgaagtcaggaagaa

SEQ ID NO: 319205 - DNA, 120 bp, Artificial Sequence
  ENSG00000135426_26 (sequence is synthesized)
acctatttggtcaagctgaggggaaagttaaggctatcttgtcacaagagaacagaaatatctgacaatatttcatttaaagaactgtattagtccattctcacactgctataaataaat

SEQ ID NO: 319206 - DNA, 120 bp, Artificial Sequence
  ENSG00000135426_27 (sequence is synthesized)
gaaaagaggtttaattggctcacagttccgcaggctgtacaggaagcatggcaacatcagtttctggggaggcctcagggagctttaactcatggtggaaagcaaagtgggagcaggcat

SEQ ID NO: 319207 - DNA, 120 bp, Artificial Sequence
  ENSG00000135426_28 (sequence is synthesized)
ggaaagcaaagtgggagcaggcatcttacatggtatgagcaggaggaacaaaggaaaggggaggtgctaacacttttaaatgaccagatcttgtaagaactcactcattatacagtacca

SEQ ID NO: 319208 - DNA, 120 bp, Artificial Sequence
  ENSG00000135426_29 (sequence is synthesized)
aggggagatggtgctaaacgattaatgaaaactctacccagtaatccaatcaccacccaccaggccccacctccaacaatggggattacagtttgacatgagatttgggtgaggacacag

SEQ ID NO: 319209 - DNA, 69 bp, Artificial Sequence
  ENSG00000135426_30 (sequence is synthesized)
atcacaaaagaagtgaaaatggcctgttgctgccttaacagatgacattactttgtgaaattccttctt

SEQ ID NO: 319210 - DNA, 120 bp, Artificial Sequence
  ENSG00000135426_31 (sequence is synthesized)
atgagaccacagtcataagagtaaaacaaaaattctgatggaaataaatgcttatttggtaggaagcaaaaagcacaaaaacaagattgtctttctttttctttttctttttaaatgaga

SEQ ID NO: 319211 - DNA, 120 bp, Artificial Sequence
  ENSG00000135426_32 (sequence is synthesized)
aggatccacccttgtgggaaaggaactctcaaaagacagcagtgggcctgacatcttgggcactttccaggttcttgggaggaagggagaaaagaagcagagagagagaagaaatatcta

SEQ ID NO: 319212 - DNA, 120 bp, Artificial Sequence
  ENSG00000135426_33 (sequence is synthesized)
ctatttttatatacggtgtattcctctcatatcttaaagaaaagctttatgtagaaaaaaagattcatgacgcagcttatgtaagaataaacttgtggaatggaattagttgcagggagg

SEQ ID NO: 319213 - DNA, 120 bp, Artificial Sequence
  ENSG00000135426_34 (sequence is synthesized)
atttcgttcagttctcacagtgatctagtgtctgacttttctagggaatccaatcaataaaattgaagactggctgcaggattgcggcaaattaaatactactgactctcactggaaaag

SEQ ID NO: 319214 - DNA, 120 bp, Artificial Sequence
  ENSG00000135426_35 (sequence is synthesized)
aatatgaatatgtgtgagtttttccatgaaaaagctccttggaaaatgtagtaagtgacttcaacctataagactgtttttggtttagatactctgaagaaggattttctgaggaagcag

SEQ ID NO: 319215 - DNA, 120 bp, Artificial Sequence
  ENSG00000135426_36 (sequence is synthesized)
caaactcagctttctaccagcagacaggccctactctagtgtccatagctccaaccattgagagtacctggctgaaatcaactttgctttctgtgggtatgacctctttcttcagaagct

SEQ ID NO: 319216 - DNA, 120 bp, Artificial Sequence
  ENSG00000135426_37 (sequence is synthesized)
gtagaagaaacttgttgagataaactgcagcaagatatattgaggtcagctacgagggaggatgtacacacttgagtgaggcactgcttggggcataggtacaaaacagacagaagagaa

SEQ ID NO: 319217 - DNA, 120 bp, Artificial Sequence
  ENSG00000135426_38 (sequence is synthesized)
agaaaagaagcagagagagagaagaaatatctactatttttatatacggtgtattcctctcatatcttaaagaaaagctttatgtagaaaaaaagattcatgacgcagcttattgtctga

SEQ ID NO: 319218 - DNA, 120 bp, Artificial Sequence
  ENSG00000135436_0 (sequence is synthesized)
agttggaacctggtgtttggcagttaccagaggagctgtgcctgggcagagggtacccaggagacaccctggtgcccttaacctccaaagcaggcaacattgtgtgtccaggcctgtgga

SEQ ID NO: 319219 - DNA, 120 bp, Artificial Sequence
  ENSG00000135436_1 (sequence is synthesized)
ccagaaacacaggatgttttgtgactgacagagtgatccaaaatggagaaggatgaccccccacagttggtgactcccacatcagtgaaagccatcatcctgaggattgaggctgcccag

SEQ ID NO: 319220 - DNA, 120 bp, Artificial Sequence
  ENSG00000135436_2 (sequence is synthesized)
ctaactcgggctcaagaggatatttctacccagctctcagacattttggacaatgtcaattgtgtcatcaaccgcttccaggaagaattaggatatgatttaaaagaaaatgccaaatct

SEQ ID NO: 319221 - DNA, 120 bp, Artificial Sequence
  ENSG00000135436_3 (sequence is synthesized)
cagcagagagatccaaagggcaagaagagattcatcttgctggaaaaaattgcctccttctccaaagatgctatgatgaaggagaagcacctgtatgacattctccgctggctgggtgac

SEQ ID NO: 319222 - DNA, 120 bp, Artificial Sequence
  ENSG00000135436_4 (sequence is synthesized)
tggggtgacactctgacctatgagattgggcccaggaagagtgaagaggaagcagcagctctggacgaatggattgaagtgacggagaaagtgttaccgctgtccctcattgccaccaaa

SEQ ID NO: 319223 - DNA, 120 bp, Artificial Sequence
  ENSG00000135436_5 (sequence is synthesized)
agaggcatcgagtcactcactgccctttgctccactctcattgaaggacaaaagaaaaggtcacaagtgtccaaacgcaccttctggcagggctggcagggaagaagcccacagacatct

SEQ ID NO: 319224 - DNA, 120 bp, Artificial Sequence
  ENSG00000135436_6 (sequence is synthesized)
ccatcccatcctcagccactaagcccagaacagatgctccaggaccagcataccatgaacacgaaggcctcggaggtgacgtccatgctgcaggagctcctggactctaccatgttcagc

SEQ ID NO: 319225 - DNA, 120 bp, Artificial Sequence
  ENSG00000135436_7 (sequence is synthesized)
aagggggaggtcagggccatcaggtacatggccactgtggtggagaacctcaacaaggccttgatcctccaacacaaggagaacaggagcctggagaccaaatacaggcacctgcaaatg

SEQ ID NO: 319226 - DNA, 120 bp, Artificial Sequence
  ENSG00000135436_8 (sequence is synthesized)
caggcgaccaaagagctcagcagccagaggctgcacttccagcagttcatggaggtccttgagagcaggagggatgctctgctgaagcaggtagagatcttagggggaaggtaccatgac

SEQ ID NO: 319227 - DNA, 120 bp, Artificial Sequence
  ENSG00000135436_9 (sequence is synthesized)
cttctcctgatgaagcaggccttggagttccagctgaagaaggctcagaatgctacaggtcaggcagaagacctggctgaggtttctgttgactccccaggtccctctgagagagagacc

SEQ ID NO: 319228 - DNA, 120 bp, Artificial Sequence
  ENSG00000135436_10 (sequence is synthesized)
ctcccaaggaaagaaacagtcatggaggaaagccaacaggaaccgatgaaggaggagcagttgttctcgccacttcccccaagtcccatggccatgatacgggacagtggtgctatagct

SEQ ID NO: 319229 - DNA, 120 bp, Artificial Sequence
  ENSG00000135436_11 (sequence is synthesized)
gcagggcaccagccactttccaccatgactgtgcgctcgagggtcgcagatgtgttcggcagcaaggacactgagagccttgagcctgtgcttttacccttagtagatcgcaggtttcct

SEQ ID NO: 319230 - DNA, 120 bp, Artificial Sequence
  ENSG00000135436_12 (sequence is synthesized)
tccagaagggaggactccaaattaagttccactgtagcaagcagctgtctctagagagctccaggcaggtgacctctgagagccaagaggagccctgggaggaggaattcggccgggaga

SEQ ID NO: 319231 - DNA, 120 bp, Artificial Sequence
  ENSG00000135436_13 (sequence is synthesized)
tgcggaggcagctgtggctggaggaggaggagatgtggcagcagcggcagaagaagtgggccctgctggagcaggagcatcaggagaagctgcggcagtggaatctggaagacctggcca

SEQ ID NO: 319232 - DNA, 120 bp, Artificial Sequence
  ENSG00000135436_14 (sequence is synthesized)
gggagcaacagcggagatgggtccagctagaaaaggagcaggagagcccacggagagagccagagcagctaggggaggatgtggagaggaggatcttcacacccaccagtcgatggaggg

SEQ ID NO: 319233 - DNA, 120 bp, Artificial Sequence
  ENSG00000135436_15 (sequence is synthesized)
acttggagaaggcagagctatcattagtgcctgccccaagccggacccaatctgctcaccaaagcaggaggccacacttgcccatgtctcctagtacccagcagcctgccctgggaaagc

SEQ ID NO: 319234 - DNA, 120 bp, Artificial Sequence
  ENSG00000135436_16 (sequence is synthesized)
agagacctatgagttcagtggagtttacctacagaccacggacccgccgagttcccacaaagcccaagaaatctgcctcctttcctgtcactgggacatccatccgaaggctgacctggc

SEQ ID NO: 319235 - DNA, 120 bp, Artificial Sequence
  ENSG00000135436_17 (sequence is synthesized)
cctctttgcagatatcccctgcaaatattaagaagaaggtgtaccacatggacatggaggcccagaggaagaacctgcagctcctgagtgaggagtctgagttgaggctgccccactacc

SEQ ID NO: 319236 - DNA, 120 bp, Artificial Sequence
  ENSG00000135436_18 (sequence is synthesized)
tgcgcagcaaagcactggagctcaccaccaccaccatggagctgggcgcgctcaggctgcagtacctgtgccataagtacatcttctatagacgcctccagagcctccggcaagaagcga

SEQ ID NO: 319237 - DNA, 120 bp, Artificial Sequence
  ENSG00000135436_19 (sequence is synthesized)
tcaaccatgtacaaatcatgaaagaaacggaggcttcctacaaggcccagaacctctacatcttcctggaaaacattgaccgcctgcagagtctcaggctgcaggcctggacggacaagc

SEQ ID NO: 319238 - DNA, 120 bp, Artificial Sequence
  ENSG00000135436_20 (sequence is synthesized)
agaaggggctggaggagaagcaccgagagtgcctgagcagcatggtgaccatgttccccaagctccagctggagtggaacgttcacctgaacatccctgaggtcacctcgccaaagccaa

SEQ ID NO: 319239 - DNA, 120 bp, Artificial Sequence
  ENSG00000135436_21 (sequence is synthesized)
agaaatgcaagttgcctgcagcctcaccccggcacatccgccccagtggccccacctacaagcagccctttctgtctaggcaccgggcatgtgtgcccctgcagatggcccgccaacagg

SEQ ID NO: 319240 - DNA, 120 bp, Artificial Sequence
  ENSG00000135436_22 (sequence is synthesized)
ggaagcagatggaggctgtctggaagaccgaggtggcctcctccagttacgcaatagaaaaaaagacccctgccagccttccccgggaccagctgaggggacacccagatattccccggc

SEQ ID NO: 319241 - DNA, 120 bp, Artificial Sequence
  ENSG00000135436_23 (sequence is synthesized)
tgttgacactggacgtgtagtcctcctgccacaaaagcctgaacttcctgaaggcccagtaaggtgcgaggctgatggtcaatgtggattctccccaataaatctctctccaggctttaa

SEQ ID NO: 319242 - DNA, 120 bp, Artificial Sequence
  ENSG00000135436_24 (sequence is synthesized)
gcgagtcactccctggaacccaaataagccagaaggatcaagacagccccagtctccactgcatccctcagccagtgattctcaaccttctgagggacggaaacccacagagaacttggt

SEQ ID NO: 319243 - DNA, 120 bp, Artificial Sequence
  ENSG00000135436_25 (sequence is synthesized)
caaaatgcaggttcccagctggtgcttttaaagaaaccctctgggggttgctgagtactcctagaactttgagaaacactgcttccctcctgcagtccccaaactctacattttaataaa

SEQ ID NO: 319244 - DNA, 120 bp, Artificial Sequence
  ENSG00000135436_26 (sequence is synthesized)
tattttaaaattctgtctcattgctgaaacccacacctcctcaactcagttttagaaccctctgagtgttgtctgtgtcctttgggagcaaacatgccgagatagctgtgattggcacct

SEQ ID NO: 319245 - DNA, 120 bp, Artificial Sequence
  ENSG00000135436_27 (sequence is synthesized)
ggcacttagtaggtgtaactcttcatttaatcaaaatatggacagatatgtcactgacatgccagtgatctgcatgaaagctcagaaggtgagaacaaaaggagataccaaatacagacc

SEQ ID NO: 319246 - DNA, 120 bp, Artificial Sequence
  ENSG00000135436_28 (sequence is synthesized)
agagccaggtgtcataaggtgggaggcaaaggtgagcgtgtctctgaggacaaaggtggaagacatggagacatgaggttcaaatatagacggtgtgggctaaggaggccgtctctggca

SEQ ID NO: 319247 - DNA, 120 bp, Artificial Sequence
  ENSG00000135436_29 (sequence is synthesized)
agcgtctgtcagttcagttaagacactaattcggttagttcaatcagctcacgagcacctacacaccctcctcttgacacacagctgcttgcctggtccctgctgagtctcccccaccct

SEQ ID NO: 319248 - DNA, 120 bp, Artificial Sequence
  ENSG00000135436_30 (sequence is synthesized)
gtccttctccactcaccagcacccttggcctagggaacaggcatacaaataggaaattaccccatcctcagagaacccatgtccagcggttctcttcctcaggaatggcgcccatccttg

SEQ ID NO: 319249 - DNA, 120 bp, Artificial Sequence
  ENSG00000135436_31 (sequence is synthesized)
cttccagcctaaggctgagactccagaaagctgaggaggatgtggggtgtgaacagctggttctgtggatgatgccaggagtaggatttgttttctgagtcgcagcttaagatatcgcga

SEQ ID NO: 319250 - DNA, 120 bp, Artificial Sequence
  ENSG00000135436_32 (sequence is synthesized)
ggatgcctagtgtgggaggaaggggagttggcatcatgatgcaggacacatgcacagcacagctgtgctggccctgggctgtttccagcctctcgggtcccaggctctttcttttctgga

SEQ ID NO: 319251 - DNA, 120 bp, Artificial Sequence
  ENSG00000135436_33 (sequence is synthesized)
ggcctcaccccaatgatacttaacatcttaaaatgccctcacactaaatgtatcgctctaaataattagaaagcatttttataaccttgcttcagaaattaactggctatgagtaagtta

SEQ ID NO: 319252 - DNA, 120 bp, Artificial Sequence
  ENSG00000135436_34 (sequence is synthesized)
tttaatgtgtacttagctgtgagtgacatctcagcaatcagaatgcacagagaagaaattgaacaagttttataaatgtaatgagactattttgaatattaaatttgacagtgaatgaaa

SEQ ID NO: 319253 - DNA, 120 bp, Artificial Sequence
  ENSG00000135436_35 (sequence is synthesized)
tgaaggcccagtaaggctcttggcactgtgcttaaggggcctggtggctgaacttgctctggtgatggaggactttgaccttctgcacgtcctctagcgagctctctggcaagcatgcag

SEQ ID NO: 319254 - DNA, 120 bp, Artificial Sequence
  ENSG00000135436_36 (sequence is synthesized)
agtgtctgacattcttctcctgctttggtaacaatttcatcttcttaaaggcaaagaaagcctgcacgggccaagctgtgaagccaagagggttggaagacaaatatatatgtgtgtgta

SEQ ID NO: 319255 - DNA, 120 bp, Artificial Sequence
  ENSG00000135436_37 (sequence is synthesized)
caagaggtagcccctgagatgaaggaatcactcttacattgggatctgatgcggagactgggggctgatcccaggtttgagtgagattccagctctgggtcctcagaggccctgggatat

SEQ ID NO: 319256 - DNA, 120 bp, Artificial Sequence
  ENSG00000135437_0 (sequence is synthesized)
ggactttggccttagcagtagttagtgtgggaggctgggaagactgggagcagtctcttaaacaaaagcaaaagaataagcttcgggcgctgtagtacctgccagctttcgccacaggag

SEQ ID NO: 319257 - DNA, 120 bp, Artificial Sequence
  ENSG00000135437_1 (sequence is synthesized)
gctgccacctgtaggtcacttgggctccagctatgtggctgcctcttctgctgggtgccttactctgggcagtgctgtggttgctcagggaccggcagagcctgcccgccagcaatgcct

SEQ ID NO: 319258 - DNA, 120 bp, Artificial Sequence
  ENSG00000135437_2 (sequence is synthesized)
ttgtcttcatcaccggctgtgactcaggctttgggcgccttctggcactgcagctggaccagagaggcttccgagtcctggccagctgcctgaccccctccggggccgaggacctgcagc

SEQ ID NO: 319259 - DNA, 120 bp, Artificial Sequence
  ENSG00000135437_3 (sequence is synthesized)
gggtggcctcctcccgcctccacaccaccctgttggatatcactgatccccagagcgtccagcaggcagccaagtgggtggagatgcacgttaaggaagcagggctttttggtctggtga

SEQ ID NO: 319260 - DNA, 120 bp, Artificial Sequence
  ENSG00000135437_4 (sequence is synthesized)
ataatgctggtgtggctggtatcatcggacccacaccatggctgacccgggacgatttccagcgggtgctgaatgtgaacacaatgggtcccatcggggtcacccttgccctgctgcctc

SEQ ID NO: 319261 - DNA, 120 bp, Artificial Sequence
  ENSG00000135437_5 (sequence is synthesized)
ggggctactgtgtctccaaatttggcctggaggccttctctgacagcctgaggcgggatgtagctcattttgggatacgagtctccatcgtggagcctggcttcttccgaacccctgtga

SEQ ID NO: 319262 - DNA, 120 bp, Artificial Sequence
  ENSG00000135437_6 (sequence is synthesized)
ccaacctggagagtctggagaaaaccctgcaggcctgctgggcacggctgcctcctgccacacaggcccactatgggggggccttcctcaccaagtacctgaaaatgcaacagcgcatca

SEQ ID NO: 319263 - DNA, 120 bp, Artificial Sequence
  ENSG00000135437_7 (sequence is synthesized)
tgaacctgatctgtgacccggacctaaccaaggtgagccgatgcctggagcatgccctgactgctcgacacccccgaacccgctacagcccaggttgggatgccaagctgctctggctgc

SEQ ID NO: 319264 - DNA, 120 bp, Artificial Sequence
  ENSG00000135437_8 (sequence is synthesized)
ctgcctcctacctgccagccagcctggtggatgctgtgctcacctgggtccttcccaagcctgcccaagcagtctactgaatccagccttccagcaagagattgtttttcaaggacaagg

SEQ ID NO: 319265 - DNA, 120 bp, Artificial Sequence
  ENSG00000135437_9 (sequence is synthesized)
actttgatttatttctgcccccaccctggtactgcctggtgcctgccacaaaataagcactaacaaaagtgtattgtttaaaaaataaaaagaaggtgggcagaaatgtgcccagtggaa

SEQ ID NO: 319266 - DNA, 120 bp, Artificial Sequence
  ENSG00000135437_10 (sequence is synthesized)
cagcctgaggtgaggggtacagggctctgggttccaggactaacagcagcccactcaacaaacgtgggccagcagaggtggttaagatacagcacattggaatagttaagaagagacagt

SEQ ID NO: 319267 - DNA, 120 bp, Artificial Sequence
  ENSG00000135437_11 (sequence is synthesized)
ttagggctagacttcatgggttcaatgaagtctacccttatgtaagctttgtgaccataagtagattacttctctttacccatttttaacgtgtttgttttttgttttttgagatggagt

SEQ ID NO: 319268 - DNA, 120 bp, Artificial Sequence
  ENSG00000135437_12 (sequence is synthesized)
caggtgtgagccaccacgcccggccttgcctctcgtctttaaacaataaggttcaaagttccgtgggagcacaaaggagacatgatgaggacaacgggagtagggcctgagttttttttt

SEQ ID NO: 319269 - DNA, 62 bp, Artificial Sequence
  ENSG00000135437_13 (sequence is synthesized)
gagacatgatgaggacaacgggagtagggcctgagtttttttttgtttttttttttttaagc

SEQ ID NO: 319270 - DNA, 120 bp, Artificial Sequence
  ENSG00000135437_14 (sequence is synthesized)
gatgtatccccactttccccatcagcttaccctccagcaaatacgagactatacccttcaatatccagcactcagggctcaaccatgtgttttgggagcaagggaatggggttcctctag

SEQ ID NO: 319271 - DNA, 120 bp, Artificial Sequence
  ENSG00000135437_15 (sequence is synthesized)
gtcaggaatcggcaaactcagtactcaagccagatctggccagctgcctacaagctgataatggttttttttatttttaaatggttacattgtaaactgttatataagtacctgataata

SEQ ID NO: 319272 - DNA, 120 bp, Artificial Sequence
  ENSG00000135437_16 (sequence is synthesized)
tcattaattttgtttcttggcctgccatgcttaaaatattaactctctggccctttaagaaaaaaacgtgctgacccctgctctagatcaaagaaaacaaacctcaaaaatactttcctc

SEQ ID NO: 319273 - DNA, 120 bp, Artificial Sequence
  ENSG00000135437_17 (sequence is synthesized)
cctctaccccacttgacccttgtcccggggcagtaggcatctccgtcaaaactcttgtccctggtctgtggtaactttctcagctccccaacccatgtccctcaaagtcccctccctata

SEQ ID NO: 319274 - DNA, 120 bp, Artificial Sequence
  ENSG00000135437_18 (sequence is synthesized)
tggacctggtgggtcttagccccacttggtagatgagaaaataggttgagagagacagtgagatgctcagtatcacacagcaaacctcttggccctatacatcattccaaacacaagacc

SEQ ID NO: 319275 - DNA, 120 bp, Artificial Sequence
  ENSG00000135439_0 (sequence is synthesized)
ggggccttctgaggtttgggggctgtagggccatgggcctcagggccagaggtggttgttagcctggcaagacaggtctgggcaacatgcatgcccagaggcagttcgttgtagctgcag

SEQ ID NO: 319276 - DNA, 120 bp, Artificial Sequence
  ENSG00000135439_1 (sequence is synthesized)
tgagagcagaagtcagacgacatgaggtggccaagcaggctctaaaccgcctcaggaagctggcagagagggtggacgaccccgaactccaggacagcatccaggcctcattggacagca

SEQ ID NO: 319277 - DNA, 120 bp, Artificial Sequence
  ENSG00000135439_2 (sequence is synthesized)
ttcgagaggctgtgatcaatagccaggaatggactttgagccgctccattcctgaactgcgcctgggtgtgctgggcgatgccaggagtgggaagtcatcgctcatccaccgattcctga

SEQ ID NO: 319278 - DNA, 120 bp, Artificial Sequence
  ENSG00000135439_3 (sequence is synthesized)
ctggctcataccaggtgctggagaagacagagagtgagcagtacaagaaagaaatgttggtggatggacagacacatctggtgctaatccgagaggaagctggggcacctgatgccaagt

SEQ ID NO: 319279 - DNA, 120 bp, Artificial Sequence
  ENSG00000135439_4 (sequence is synthesized)
tctcaggctgggcagatgctgtgatcttcgtcttcagcctggaggatgagaacagtttccaggctgtgagccgtctccatgggcagctgagttcccttcgcggggagggacgaggaggcc

SEQ ID NO: 319280 - DNA, 120 bp, Artificial Sequence
  ENSG00000135439_5 (sequence is synthesized)
tggccttggcactggtggggacacaagacaggatcagtgcttcctcccctcgggtggtgggagatgctcgtgccagagctctgtgcgcggacatgaaacgctgcagctactatgagactt

SEQ ID NO: 319281 - DNA, 120 bp, Artificial Sequence
  ENSG00000135439_6 (sequence is synthesized)
gtgcaacctatgggctcaatgtggatcgggtcttccaggaggtggcccagaaggtggtgaccttgcgcaagcagcaacagcttctggctgcctgcaagtccctgcccagctccccaagcc

SEQ ID NO: 319282 - DNA, 120 bp, Artificial Sequence
  ENSG00000135439_7 (sequence is synthesized)
actcagctgcatccactccggtagctggccaggctagtaacgggggccacactagcgactactcttcttccctcccgtcctcaccgaatgttggtcaccgggagctccgagccgaggcag

SEQ ID NO: 319283 - DNA, 120 bp, Artificial Sequence
  ENSG00000135439_8 (sequence is synthesized)
ctgcagtggctggattgagcaccccagggtccctgcaccgggcagccaagcgcaggaccagcctttttgcgaatcgtcggggtagtgactccgagaaacgaagcttggatagtcggggag

SEQ ID NO: 319284 - DNA, 120 bp, Artificial Sequence
  ENSG00000135439_9 (sequence is synthesized)
agacaacagggagtgggcgagccatccccatcaaacagagcttcctactaaaacgaagtggcaattccttgaacaaagaatggaagaagaaatatgtaaccctgtccagtaatggctttc

SEQ ID NO: 319285 - DNA, 120 bp, Artificial Sequence
  ENSG00000135439_10 (sequence is synthesized)
tactctaccaccccagtattaacgattacatccacagtacccacggcaaggagatggacttgctgcgaacaacagtcaaagtcccgggcaagcggcccccgagggccatctctgcctttg

SEQ ID NO: 319286 - DNA, 120 bp, Artificial Sequence
  ENSG00000135439_11 (sequence is synthesized)
gcccctcagccagcattaacgggctcgtcaaggacatgagcactgtccagatgggtgaaggcctggaagccactactcccatgccaagccctagccccagccccagttccctgcagccac

SEQ ID NO: 319287 - DNA, 120 bp, Artificial Sequence
  ENSG00000135439_12 (sequence is synthesized)
caccagatcagacatccaaacacctgctgaagccagaccggaatttggcccgagccctcagcacggactgtaccccatctggagacctgagccccctgagtcgggaaccccctccttctc

SEQ ID NO: 319288 - DNA, 120 bp, Artificial Sequence
  ENSG00000135439_13 (sequence is synthesized)
ccatggtgaagaagcagaggaggaaaaaattgacaacaccatccaagactgaaggctcggctgggcaggctgaagaggaaaactttgagttcctgatcgtgtccagcacgggtcagacgt

SEQ ID NO: 319289 - DNA, 120 bp, Artificial Sequence
  ENSG00000135439_14 (sequence is synthesized)
ggcactttgaggcagccagttttgaggagcgggatgcctgggtccaggccatcgagagtcagatcctagccagtctgcaatgctgtgagagcagcaaggtcaagctgcgcacagacagcc

SEQ ID NO: 319290 - DNA, 120 bp, Artificial Sequence
  ENSG00000135439_15 (sequence is synthesized)
aaagcgaggccgtggccatccaggcgatccggaacgccaaggggaattcaatctgcgtggactgcggggcccccaaccccacgtgggccagcttgaacctgggcgccctcatctgcatcg

SEQ ID NO: 319291 - DNA, 120 bp, Artificial Sequence
  ENSG00000135439_16 (sequence is synthesized)
agtgttctggcatccaccgcaacctgggcacacacctgtcccgcgttcgctcgctggacttggacgactggccacgggagctgaccctggtgctgacggctattggcaacgacacggcca

SEQ ID NO: 319292 - DNA, 120 bp, Artificial Sequence
  ENSG00000135439_17 (sequence is synthesized)
accgcgtgtgggaaagcgacacgcgaggccgtgccaagccctcgcgggactcttcgcgggaggagcgcgagtcgtggattcgcgccaagtacgagcagctactgttcctggcgccgctga

SEQ ID NO: 319293 - DNA, 120 bp, Artificial Sequence
  ENSG00000135439_18 (sequence is synthesized)
gcacctcggaggagccgctgggccgccagctgtgggccgccgtgcaggcccaggacgtggctaccgttctcctgcttttggcccatgcgcgacacgggccgctcgacaccagcgtagagg

SEQ ID NO: 319294 - DNA, 120 bp, Artificial Sequence
  ENSG00000135439_19 (sequence is synthesized)
acccacagctgcgctccccactccacctggcggccgagctcgcccacgtcgtcatcacgcaactgctgctgtggtacggcgcggacgtggcggcccgtgacgcccagggccgcacggcgc

SEQ ID NO: 319295 - DNA, 120 bp, Artificial Sequence
  ENSG00000135439_20 (sequence is synthesized)
tgttctacgcccgccaggctggaagccagctgtgcgccgacatccttctccagcacggctgcccgggtgagggcggcagcgcggccaccacgcccagcgcggccaccacgcccagcatca

SEQ ID NO: 319296 - DNA, 120 bp, Artificial Sequence
  ENSG00000135439_21 (sequence is synthesized)
atcaccgccacgcccagcccccgccgccggagcagcgccgctagcgtgggccgcgccgacgccccggttgcgctggtatagttgcccagcgggagagacacccccatccccacgcgggcc

SEQ ID NO: 319297 - DNA, 120 bp, Artificial Sequence
  ENSG00000135439_22 (sequence is synthesized)
cttccagaagacacaaactcacctccctctccccaacgaggcatggagaccccagctcaacacgccccctctccattgtttccacactcggattgctctgggtctacccgctcggggttc

SEQ ID NO: 319298 - DNA, 120 bp, Artificial Sequence
  ENSG00000135439_23 (sequence is synthesized)
gcggaaggggaggtccccagcggtacgggctcctaggcgcttggacatgcccgcttgtgccccctaggggcggaaagaagacccggtcctgcccgagctcaacaatcccagggcgggagc

SEQ ID NO: 319299 - DNA, 120 bp, Artificial Sequence
  ENSG00000135439_24 (sequence is synthesized)
ccatacccaggctggctcctggggcgacgccacgccagagggagggtttagtacatgggagggctagccccgggacttggggccaatacggaaaccctaccccttccatgctcatctcac

SEQ ID NO: 319300 - DNA, 120 bp, Artificial Sequence
  ENSG00000135439_25 (sequence is synthesized)
tgcccagtgaagggggcaagggcagcgaggggcaggacccctgctgctcatgggggtgggggttcccaaccctttccgtgaaagggaccgtgagtagtggaaaccaggacgtcccctaca

SEQ ID NO: 319301 - DNA, 120 bp, Artificial Sequence
  ENSG00000135439_26 (sequence is synthesized)
cctacccatgggtggaagctaaagagtccggggggaaccaagagcctgggtccctcccactactatcttgggagggagaagggatggagcaggagcgggctaagagggctgcgggggcct

SEQ ID NO: 319302 - DNA, 120 bp, Artificial Sequence
  ENSG00000135439_27 (sequence is synthesized)
tgtaatttattgctttgttccccaacatggggatgggggcgggcaggggcgtggggagggcgttttggggtaggggaagcccagggtgggcagggggtgggttggggtgggggtgctctc

SEQ ID NO: 319303 - DNA, 120 bp, Artificial Sequence
  ENSG00000135439_28 (sequence is synthesized)
gggttgtgtctgtgaccgtgactgcgtacctgtgactgtgcagcgcccgtggtgatctggggtagggggcacccctacagtgggacccctcccccattattctttctgtccagcccctcc

SEQ ID NO: 319304 - DNA, 120 bp, Artificial Sequence
  ENSG00000135439_29 (sequence is synthesized)
ctcccactggagcagctccagagccattcctcacccccgtgacctctcccagccagggctgagaggattcgaggtggctgggagggtttccaggccccctgccccttccccacaaactgg

SEQ ID NO: 319305 - DNA, 120 bp, Artificial Sequence
  ENSG00000135439_30 (sequence is synthesized)
gtgatagggcggacttacctggcccagccctgcctccctcagccaacccagcccttgggctgtctgtgtcagtggtttccggtctttttttttttttttttttctggctaaaatagtttg

SEQ ID NO: 319306 - DNA, 120 bp, Artificial Sequence
  ENSG00000135439_31 (sequence is synthesized)
caaaggaccaggtaattggggaggggagagaggtgggggcaagggggaaatgcccccccatctccttggaggcagtggtgtgaatcttcttcaacagcaattaaagaggaagtgattttg

SEQ ID NO: 319307 - DNA, 120 bp, Artificial Sequence
  ENSG00000135439_32 (sequence is synthesized)
tctagggggtgagctgctggtctgttcttggaggcaggtcagggcatggccttggtcaagatggggtactggggttggacagggacaggcagaggtgcctcccactggggctggtggcag

SEQ ID NO: 319308 - DNA, 120 bp, Artificial Sequence
  ENSG00000135439_33 (sequence is synthesized)
gacagtacccatgggcatggaggtggttccatcatgtacaacagttctgggttcatgtagtggaggacgtgggcaggttggagtcagtggggaccctgggaacagagaaggcactgactc

SEQ ID NO: 319309 - DNA, 120 bp, Artificial Sequence
  ENSG00000135439_34 (sequence is synthesized)
ttaagatgatgccagtcctgggagagttgggatatggtacttagaggagaggacaggcccatggagaggggtgggaagatgggacagctttgtttaagagcaggaactttggagacagat

SEQ ID NO: 319310 - DNA, 120 bp, Artificial Sequence
  ENSG00000135439_35 (sequence is synthesized)
ctgattttgaaacctgcccctccactgcacagctaggggaccttggtggcatctgtttatctgtattctgaacagtatctgttcagagggcacctgaaaggcgctccagctctgaggagg

SEQ ID NO: 319311 - DNA, 120 bp, Artificial Sequence
  ENSG00000135439_36 (sequence is synthesized)
gctgccccgagccagcctgctcaccgtgagcactaggtaccagagtagaacatagagtaggggttcctcccctggcctcgtcagggggtgttccagagggaaggggtgggagacctcctg

SEQ ID NO: 319312 - DNA, 120 bp, Artificial Sequence
  ENSG00000135439_37 (sequence is synthesized)
ggaaagatttcccagctagctgcagaggtccctggtgtccacaaactcagtgtcagctgatgcaggcatttatccacctccgtgccatcaaagggaccaccaaggccacagcggcctgaa

SEQ ID NO: 319313 - DNA, 120 bp, Artificial Sequence
  ENSG00000135439_38 (sequence is synthesized)
gccggtgctgcctccatgagctgcagtgccactaggctcagcacatagccaatcctaccatttctcgagggcagctgaaagtgtttactcaggtagaggggctggacagggtagggttgg

SEQ ID NO: 319314 - DNA, 120 bp, Artificial Sequence
  ENSG00000135439_39 (sequence is synthesized)
gtcagcagccagtgcaggttgggcacagccatatgttgttatctaccttgaggagttagttggtagcaccagcatctttgggtagaattgcttctgacccttggtgcccaccagccccaa

SEQ ID NO: 319315 - DNA, 120 bp, Artificial Sequence
  ENSG00000135439_40 (sequence is synthesized)
gaggttcagctgcaagtgtgccactgaactgaggacacagcaccagacctgaatccagttcacatggaggctgcggctctacagggtcctaggctgtgaccacccagcacagcggcgtga

SEQ ID NO: 319316 - DNA, 120 bp, Artificial Sequence
  ENSG00000135439_41 (sequence is synthesized)
cccaggaaaggtggattcaacagtgcaggtgcagtgacaagtacagaggcaggtgtgtggtctgggcaaagcgacaagaggggggaggtagcaaagaagattggactagaggacctggcc

SEQ ID NO: 319317 - DNA, 120 bp, Artificial Sequence
  ENSG00000135439_42 (sequence is synthesized)
gttcccccttcacctccaagaccctggactctcttatttcagctccactccttcctcgtggccaaagtttgctcccttcttcagaagtttgggagtgtgagagaatatgggaaggaaata

SEQ ID NO: 319318 - DNA, 120 bp, Artificial Sequence
  ENSG00000135439_43 (sequence is synthesized)
aggaccctggagagaatgaaattgccttcaaagagcaagtgggaagttcctttcatttccagccagtgaaaaatggtcaaggtgtcagcaaacctcacaacaaatcccaacaccaagtaa

SEQ ID NO: 319319 - DNA, 120 bp, Artificial Sequence
  ENSG00000135439_44 (sequence is synthesized)
atgagccggggcgcgggcgcgcttcagcgccggacaacgacctacctcatctcgctgaccctggttaagctcgagtcggtgcctccgccgccgccttctccgtctgcggccgcggccggc

SEQ ID NO: 319320 - DNA, 120 bp, Artificial Sequence
  ENSG00000135439_45 (sequence is synthesized)
gccgccggtgccagaggctccgagactggggatcctggcagcccccgaggcgcggaggagccgggcaagaagcggcacgaacgtctcttccaccggcaggatgcgctgtggatcagcacg

SEQ ID NO: 319321 - DNA, 120 bp, Artificial Sequence
  ENSG00000135439_46 (sequence is synthesized)
ctcttccaccggcaggatgcgctgtggatcagcacgagcagcgcgggcaccgggggcgcggagcccccagccctgtccccggctccggccagtccggcccgcccagtctcccccgctccc

SEQ ID NO: 319322 - DNA, 80 bp, Artificial Sequence
  ENSG00000135439_47 (sequence is synthesized)
cccccgctctccgggggactgagccccgaccccaagcctgggggcgcccccacctcctcccggcgccccctgctcagcag

SEQ ID NO: 319323 - DNA, 120 bp, Artificial Sequence
  ENSG00000135439_48 (sequence is synthesized)
ggcggcatccctggctcatcctctccgcaccctggcaccggcagccggaggctcaaggtggcgcctcctccgccggctcccaagccttgcaagaccgtgaccacgagtggagccaaagcc

SEQ ID NO: 319324 - DNA, 120 bp, Artificial Sequence
  ENSG00000135439_49 (sequence is synthesized)
ggcgggggcaagggcgcgggtagccgcctgtcatggcccgaaagcgagggcaagcccagggtcaaggggtcaaagagcagcgccgggactggagcttcggtctctgccgccgccaccgcc

SEQ ID NO: 319325 - DNA, 120 bp, Artificial Sequence
  ENSG00000135439_50 (sequence is synthesized)
gccgccgccgggggagggggctctacagcttcgacctctggtggggtcggggctggggctggagcccgagggaagttgtcccctcggaaaggcaagagtaagaccttggacaacagtgac

SEQ ID NO: 319326 - DNA, 120 bp, Artificial Sequence
  ENSG00000135439_51 (sequence is synthesized)
ttgcatccgggaccgcctgccggctctcctcctccgctaaccctcccaccaactccgagtccagccactgctgtcaccgctgcttccgcgcagccccccgggcctgcacctccaatcact

SEQ ID NO: 319327 - DNA, 120 bp, Artificial Sequence
  ENSG00000135439_52 (sequence is synthesized)
ctggagcctccagctccggggctgaaacggggccgggaggggggccgagcatccactcgtgaccgcaagatgctcaagtttatcagcggcatcttcaccaagagcacaggagggcctcct

SEQ ID NO: 319328 - DNA, 120 bp, Artificial Sequence
  ENSG00000135439_53 (sequence is synthesized)
cagcacgggtcagtggggatgaccttccatctgctgtcttccacacccaaataggatgagtgtgggaaatgaatatggggtgaaggcttggaggctggaataaatgcatgagtgaacaca

SEQ ID NO: 319329 - DNA, 120 bp, Artificial Sequence
  ENSG00000135441_0 (sequence is synthesized)
cagcggtcacgtgacatggccccggggagccgaggtgagcgttccagcttccggagccggagggggcccggcgtacccagcccccagcccgacgtgaccatgctgtcccgcctcctaaaa

SEQ ID NO: 319330 - DNA, 120 bp, Artificial Sequence
  ENSG00000135441_1 (sequence is synthesized)
gaacaccaggccaagcagaatgaacgcaaggagctgcaggaaaagaggaggcgagaggctatcactgcagcgacctgcctgacagaagctttggtggatcacctcaatgtgggtgtggcc

SEQ ID NO: 319331 - DNA, 120 bp, Artificial Sequence
  ENSG00000135441_2 (sequence is synthesized)
tcggaatggtggagaacttcaaccaggcactcaaggaaattggggatgtggagaactgggctcggagcatcgagctggacatgcgcaccattgccactgcactggaatatgtctacaaag

SEQ ID NO: 319332 - DNA, 120 bp, Artificial Sequence
  ENSG00000135441_3 (sequence is synthesized)
ggcagctgcagtctgccccttcctagcccctgttccctcccccaaccctatccctcctacctcacccgcagggggaaggagggaggctgacaagccttgaataaaacacaagcctccgtt

SEQ ID NO: 319333 - DNA, 120 bp, Artificial Sequence
  ENSG00000135441_4 (sequence is synthesized)
ggtgtggggaaccccccagagatgggcttcttggaggcctgaaaccaccggaacggaggtggggcacttgtttcctgagtccgggctggaaatctcggagttaccgattctgcggccgag

SEQ ID NO: 319334 - DNA, 120 bp, Artificial Sequence
  ENSG00000135441_5 (sequence is synthesized)
tagtggagaaagagtgcctgggagtcaggagtcctgggcgctgccgctgacttcctggcgtccctgatgtggcccaggcctacatgaaccagagaaagctggaccatgaggtgaagaccc

SEQ ID NO: 319335 - DNA, 120 bp, Artificial Sequence
  ENSG00000135441_6 (sequence is synthesized)
tcaaggtgggccatactccctacctcaccaccccaatcctgggcccccattggctgcctccagtcaggttacctcaggtttaggttaaggaggaagtagggtggtcccagaaaccccatc

SEQ ID NO: 319336 - DNA, 120 bp, Artificial Sequence
  ENSG00000135441_7 (sequence is synthesized)
tatagccccagtgtcagaaaaggtagagaaagaaagaaaagcagttggtgggtccaagtaaagccttttccaggagatgaataaaacgtattccccagactggaagccatactctaccca

SEQ ID NO: 319337 - DNA, 120 bp, Artificial Sequence
  ENSG00000135441_8 (sequence is synthesized)
tactagctccagtgtcgggggtgggagtggaaggttcaaaggtggtttccctgagggacaggtaccttttggggagagggtggaactagcttcctcttactatcccaactctcttctcct

SEQ ID NO: 319338 - DNA, 120 bp, Artificial Sequence
  ENSG00000135441_9 (sequence is synthesized)
ccatggcccttgtgcaggtgtctgttaggcaagcagagggtgggagttcccatccctcctgagagaaggtcctagtagccctgccccaagcttcctaattcaggacttgtttcctacaga

SEQ ID NO: 319339 - DNA, 120 bp, Artificial Sequence
  ENSG00000135441_10 (sequence is synthesized)
agagaaacaaggcaaggtacaggcctggtccccagctctggctttctgcctctccacgtgctcatggcctctcccaggctaactctaagcagtgtcatgagtctgagccaggtgggagat

SEQ ID NO: 319340 - DNA, 120 bp, Artificial Sequence
  ENSG00000135441_11 (sequence is synthesized)
gacgccagctagcgggcaacgggcatgggggagagggaatttcagagaggctttttttgaaactcctttcccttgccaactggctccggtcccttgggcaatactccggtcccctcggca

SEQ ID NO: 319341 - DNA, 120 bp, Artificial Sequence
  ENSG00000135441_12 (sequence is synthesized)
cagcttccggagccggagggggcccggcgtacccagcccccagcccgacgtgaccatgctgtcccgcctcctaaaagaacaccaggccaagcagaatgaacgcaaggagctgcaggtgtg

SEQ ID NO: 319342 - DNA, 120 bp, Artificial Sequence
  ENSG00000135443_0 (sequence is synthesized)
agaaggatcctgagcctcgcactctgccgcccgcaccaccttccgctgcctctcagactctgctcagcctcacacgatgtcgtgccgctcctacaggatcagctcaggatgcggggtcac

SEQ ID NO: 319343 - DNA, 120 bp, Artificial Sequence
  ENSG00000135443_1 (sequence is synthesized)
caggaacttcagctcctgctcagctgtggcccccaaaactggcaaccgctgctgcatcagcgccgccccctaccgaggggtgtcctgctaccgagggctgacgggcttcggcagccgcag

SEQ ID NO: 319344 - DNA, 120 bp, Artificial Sequence
  ENSG00000135443_2 (sequence is synthesized)
cctctgcaacctgggctcctgcgggccccggatagctgtaggtggcttccgagccggctcctgcggacgcagcttcggctaccgctccgggggcgtgtgcggacccagccccccatgcat

SEQ ID NO: 319345 - DNA, 120 bp, Artificial Sequence
  ENSG00000135443_3 (sequence is synthesized)
cactaccgtgtcggtcaacgagagcctcctcacgcccctcaacctggagatcgaccccaacgcacagtgcgtgaagcaggaggagaaggagcagatcaagtccctcaacagcaggttcgc

SEQ ID NO: 319346 - DNA, 120 bp, Artificial Sequence
  ENSG00000135443_4 (sequence is synthesized)
ggccttcatcgacaaggtgcgcttcctggagcagcagaacaagctgctggagaccaagtggcagttctaccagaaccagcgctgctgcgagagcaacctggagccactgttcagtggcta

SEQ ID NO: 319347 - DNA, 120 bp, Artificial Sequence
  ENSG00000135443_5 (sequence is synthesized)
catcgagactctgcggcgggaggccgagtgcgtggaggccgacagcgggaggctggcctcagagctcaaccatgtgcaggaggtgctggagggctacaagaagaagtatgaagaggaggt

SEQ ID NO: 319348 - DNA, 120 bp, Artificial Sequence
  ENSG00000135443_6 (sequence is synthesized)
ggccctgagagccacagcagagaatgagtttgtcgttctaaagaaggacgtggactgtgcctacctgcggaaatcagacctggaggccaatgtggaggccctggtggaggagtctagctt

SEQ ID NO: 319349 - DNA, 120 bp, Artificial Sequence
  ENSG00000135443_7 (sequence is synthesized)
cctgaggcgcctctatgaagaggagatccgcgttctccaagcccacatctcagacacctcggtcatagtcaagatggacaacagccgagacctgaacatggactgcatcatcgctgagat

SEQ ID NO: 319350 - DNA, 120 bp, Artificial Sequence
  ENSG00000135443_8 (sequence is synthesized)
caaggctcagtatgacgatgttgccagccgcagccgggccgaggctgagtcctggtaccgtagcaagtgtgaggagatgaaggccacggtgatcaggcatggggagaccctgcgccgcac

SEQ ID NO: 319351 - DNA, 120 bp, Artificial Sequence
  ENSG00000135443_9 (sequence is synthesized)
caaggaggagatcaacgagctgaaccgcatgatccagaggctgacggccgagattgagaatgccaagtgccagcgtgccaagctggaggctgctgtggctgaggcagagcagcagggtga

SEQ ID NO: 319352 - DNA, 120 bp, Artificial Sequence
  ENSG00000135443_10 (sequence is synthesized)
ccctgcagaaggccaagcaggacatggcctgcctgctcaaggagtaccaggaggtgatgaactccaagctgggcctggacatcgagatcgccacctacaggcgcctgctggagggcgagg

SEQ ID NO: 319353 - DNA, 120 bp, Artificial Sequence
  ENSG00000135443_11 (sequence is synthesized)
aacacaggctgtgtgaaggtgtgggctctgtgaatgtctgtgtcagcagctcccgtggtggagtctcctgtgggggcctctcctacagcaccaccccagggcgccagatcacttctggcc

SEQ ID NO: 319354 - DNA, 120 bp, Artificial Sequence
  ENSG00000135443_12 (sequence is synthesized)
cctcagccataggcggcagcatcacggtggtggcccctgactcctgtgccccctgccagcctcgttcctccagcttcagctgcgggagtagccggtcggtccgctttgcctagtagagtc

SEQ ID NO: 319355 - DNA, 120 bp, Artificial Sequence
  ENSG00000135443_13 (sequence is synthesized)
atggagccagggcttcctgccaagcacctgcctgcctgcatcactgcactgaatggcatgtgaatggaaaatgtgtgcttgcttccagaatcttctggatgttcctacagagggaaagac

SEQ ID NO: 319356 - DNA, 120 bp, Artificial Sequence
  ENSG00000135443_14 (sequence is synthesized)
ctacagagggaaagaccctcgggccgctcccctgcgccttttcatgctagggagatgcatcctagttgtcctcctggcagctgttttcagaggcattcccagcccttcacttaactccta

SEQ ID NO: 319357 - DNA, 120 bp, Artificial Sequence
  ENSG00000135443_15 (sequence is synthesized)
cttagctccaaaatacctgtatccaatttgtattattcccccagctctcagggacaagaccagtcccccagcgtggtggtcagcacggaagctccaccttctgggtggaggcgccatcct

SEQ ID NO: 319358 - DNA, 120 bp, Artificial Sequence
  ENSG00000135443_16 (sequence is synthesized)
aaccatccagccaggccacccacaacccgagaatcagggagaaagtccctccccagcagccccctcctcctggctgggaagaatggtcccccagcaagcacttgcctgttcattcctgtt

SEQ ID NO: 319359 - DNA, 120 bp, Artificial Sequence
  ENSG00000135443_17 (sequence is synthesized)
catgttttgcttctctctcagactgccttcctgcttctgggctaacctgttccagccaggctcctcatgtgacctcgcagttgagaagcccattatcgtggggcatccttttgcctacag

SEQ ID NO: 319360 - DNA, 120 bp, Artificial Sequence
  ENSG00000135443_18 (sequence is synthesized)
cccctggttagggcactttggacaggtcttgctattcagtgaacctttgtacatttcaaagaagactccatggctgctccagatgcccccttgctgggtgcaggtggggactgtccaatg

SEQ ID NO: 319361 - DNA, 120 bp, Artificial Sequence
  ENSG00000135443_19 (sequence is synthesized)
cagagctggcgggacagagagttaagccacttcctgggtctccttcttgtgactgtctatgggtgcattgccttctgggttgtctcgatctgtgtttcaataaatgccgctgcaatgcaa

SEQ ID NO: 319362 - DNA, 120 bp, Artificial Sequence
  ENSG00000135443_20 (sequence is synthesized)
aggatgcacagatgattttagacttgggggaaggaatgtgcattcctaaccccatctcagaggcagaaggactgcggcggaatgaagccaggctaggacaagggctggcccatgaataat

SEQ ID NO: 319363 - DNA, 120 bp, Artificial Sequence
  ENSG00000135443_21 (sequence is synthesized)
acaaaaaatagatcctggaggggccaagacaacatctggaggggattaatcccttttcaatccccggaagaacttgcccaggagttgggatggtattcaaggtccagtttctcagctcca

SEQ ID NO: 319364 - DNA, 120 bp, Artificial Sequence
  ENSG00000135446_0 (sequence is synthesized)
agcttgcggcctgtgtctatggtcgggccctctgcgtccagctgctccggaccgagctcgggtgtatggggccgtaggaaccggctccggggccccgataacgggccgcccccacagcac

SEQ ID NO: 319365 - DNA, 120 bp, Artificial Sequence
  ENSG00000135446_1 (sequence is synthesized)
cccgggctggcgtgagggtctcccttgatctgagaatggctacctctcgatatgagccagtggctgaaattggtgtcggtgcctatgggacagtgtacaaggcccgtgatccccacagtg

SEQ ID NO: 319366 - DNA, 120 bp, Artificial Sequence
  ENSG00000135446_2 (sequence is synthesized)
gccactttgtggccctcaagagtgtgagagtccccaatggaggaggaggtggaggaggccttcccatcagcacagttcgtgaggtggctttactgaggcgactggaggcttttgagcatc

SEQ ID NO: 319367 - DNA, 120 bp, Artificial Sequence
  ENSG00000135446_3 (sequence is synthesized)
ccaatgttgtccggctgatggacgtctgtgccacatcccgaactgaccgggagatcaaggtaaccctggtgtttgagcatgtagaccaggacctaaggacatatctggacaaggcacccc

SEQ ID NO: 319368 - DNA, 120 bp, Artificial Sequence
  ENSG00000135446_4 (sequence is synthesized)
caccaggcttgccagccgaaacgatcaaggatctgatgcgccagtttctaagaggcctagatttccttcatgccaattgcatcgttcaccgagatctgaagccagagaacattctggtga

SEQ ID NO: 319369 - DNA, 120 bp, Artificial Sequence
  ENSG00000135446_5 (sequence is synthesized)
caagtggtggaacagtcaagctggctgactttggcctggccagaatctacagctaccagatggcacttacacccgtggttgttacactctggtaccgagctcccgaagttcttctgcagt

SEQ ID NO: 319370 - DNA, 120 bp, Artificial Sequence
  ENSG00000135446_6 (sequence is synthesized)
ccacatatgcaacacctgtggacatgtggagtgttggctgtatctttgcagagatgtttcgtcgaaagcctctcttctgtggaaactctgaagccgaccagttgggcaaaatctttgacc

SEQ ID NO: 319371 - DNA, 120 bp, Artificial Sequence
  ENSG00000135446_7 (sequence is synthesized)
cccagagggccccgcccagtgcagtcggtggtacctgagatggaggagtcgggagcacagctgctgctggaaatgctgacttttaacccacacaagcgaatctctgcctttcgagctctg

SEQ ID NO: 319372 - DNA, 120 bp, Artificial Sequence
  ENSG00000135446_8 (sequence is synthesized)
cagcactcttatctacataaggatgaaggtaatccggagtgagcaatggagtggctgccatggaaggaagaaaagctgccatttcccttctggacactgagagggcaatctttgccttta

SEQ ID NO: 319373 - DNA, 120 bp, Artificial Sequence
  ENSG00000135446_9 (sequence is synthesized)
tctctgaggctatggagggtcctcctccatctttctacagagattactttgctgccttaatgacattcccctcccacctctccttttgaggcttctccttctccttcccatttctctaca

SEQ ID NO: 319374 - DNA, 120 bp, Artificial Sequence
  ENSG00000135446_10 (sequence is synthesized)
ctaaggggtatgttccctcttgtccctttccctacctttatatttggggtccttttttatacaggaaaaacaaaacaaagaaataatggtcttttttttttttttaatgtttcttcctct

SEQ ID NO: 319375 - DNA, 120 bp, Artificial Sequence
  ENSG00000135446_11 (sequence is synthesized)
gtttggctttgccattgtgcgatttggaaaaaccacttggaagaagggactttcctgcaaaaccttaaagactggttaaattacagggcctaggaagtcagtggagccccttgactgaca

SEQ ID NO: 319376 - DNA, 88 bp, Artificial Sequence
  ENSG00000135446_12 (sequence is synthesized)
ttacagggcctaggaagtcagtggagccccttgactgacaaagcttagaaaggaactgaaattgcttctttgaatatggattttaggc

SEQ ID NO: 319377 - DNA, 120 bp, Artificial Sequence
  ENSG00000135446_13 (sequence is synthesized)
atgcaaggcatgtgtcatgtgtgatctttgtgcggggcgcgattgtcccaaaggaaaaagcgttttctattgcagggcctcacgtggctggagggggtctcccttgatctgagaatggct

SEQ ID NO: 319378 - DNA, 120 bp, Artificial Sequence
  ENSG00000135446_14 (sequence is synthesized)
gccccaaggaagactgggagcgggggatgggatgctggtggtgttctttgcgctttttttttgggagtccctttgttgctgcaggctcataccatcctaactctgtaagcgacttttggt

SEQ ID NO: 319379 - DNA, 120 bp, Artificial Sequence
  ENSG00000135446_15 (sequence is synthesized)
cgtccagctgctccggaccgagctcgggtgtatggggccgtaggaaccggctccggggccccgataacgggccgcccccacagcaccccgggctggcgtgagtgtacaaggcccgtgatc

SEQ ID NO: 319380 - DNA, 120 bp, Artificial Sequence
  ENSG00000135446_16 (sequence is synthesized)
cacctcctgtccgcccctcagcgcatgggtggcggtcacgtgcccagaacgtccggcgttcgccccgccctcccagtttccgcgcgcctctttggcagctggtcacatggtgagggtggg

SEQ ID NO: 319381 - DNA, 89 bp, Artificial Sequence
  ENSG00000135446_17 (sequence is synthesized)
acctggcatttctttttttttaaaaaaagagacaaggtcttgcttgcccaggctgatctagaactcctgggctcaagcagtcctctcac

SEQ ID NO: 319382 - DNA, 120 bp, Artificial Sequence
  ENSG00000135446_18 (sequence is synthesized)
aggctgatctagaactcctgggctcaagcagtcctctcacctcagcatcccaaagtgctggaattgttggcctttattccctatacttcctattttgagccactaagcagtaaccattca

SEQ ID NO: 319383 - DNA, 78 bp, Artificial Sequence
  ENSG00000135446_19 (sequence is synthesized)
ttcccaactagctgacactacaggcctctcttctgtggaaactctgaagccgaccagttgggcaaaatctttgacctg

SEQ ID NO: 319384 - DNA, 120 bp, Artificial Sequence
  ENSG00000135446_20 (sequence is synthesized)
taccagatggcacttacacccgtggtcagtagaaagatggtaccaaaatgggttctggttgggagtaggagagtgattgcccgtagcaattgagaagtcatgtgcttcatgtgttcagtc

SEQ ID NO: 319385 - DNA, 80 bp, Artificial Sequence
  ENSG00000135447_0 (sequence is synthesized)
cgagctgggagcgctgtgccgggagccgggagccgagcgcgccgggctggggccggggccggagcggagcggagagggag

SEQ ID NO: 319386 - DNA, 120 bp, Artificial Sequence
  ENSG00000135447_1 (sequence is synthesized)
cgccgccttccctcccgccgcagcgcgggcccaccggccgccgccccagccatggagcaagacaacagcccccgaaagatccagttcacggtcccgctgctggagccgcaccttgacccc

SEQ ID NO: 319387 - DNA, 120 bp, Artificial Sequence
  ENSG00000135447_2 (sequence is synthesized)
gaggcggcggagcagattcggaggcgccgccccacccctgccaccctcgtgctgaccagtgaccagtcatccccagagatagatgaagaccggatccccaacccacatctcaagtccact

SEQ ID NO: 319388 - DNA, 120 bp, Artificial Sequence
  ENSG00000135447_3 (sequence is synthesized)
ttggcaatgtctccacggcaacggaagaagatgacaaggatcacacccacaatgaaagagctccagatgatggttgaacatcacctggggcaacagcagcaaggagaggaacctgagggg

SEQ ID NO: 319389 - DNA, 120 bp, Artificial Sequence
  ENSG00000135447_4 (sequence is synthesized)
gccgctgagagcacaggaacccaggagtcccgcccacctgggatcccagacacagaagtggagtcaaggctgggcacctctgggacagcaaaaaaaactgcagaatgcatccctaaaact

SEQ ID NO: 319390 - DNA, 120 bp, Artificial Sequence
  ENSG00000135447_5 (sequence is synthesized)
cacgagagaggcagtaaggaacccagcacaaaagaaccctcaacccatataccaccactggattccaagggagccaactcggtctgagagaggaggaggtatcttgggatcaagactgca

SEQ ID NO: 319391 - DNA, 120 bp, Artificial Sequence
  ENSG00000135447_6 (sequence is synthesized)
gtttgggaatgcatggacaccggatttgtttcttattccttcacttttggggaaaatctcttgtttttaaaaagtgataaatttggtgttaggtccttggcactttccttcttttccaac

SEQ ID NO: 319392 - DNA, 120 bp, Artificial Sequence
  ENSG00000135447_7 (sequence is synthesized)
gccctgccctctctgtagcccccaccctcctgccaagctgcctctgggaaggaagaaacaggagctaggcagaagccttgagcagggaagagttcttcccttagccctgactttacttgc

SEQ ID NO: 319393 - DNA, 120 bp, Artificial Sequence
  ENSG00000135447_8 (sequence is synthesized)
tgtgggaagagagatgagggtcagataggtgggaggactaacttccagggtgccaagaaggaagaaaagccccaggttctcttttcttattgaggaacgatccgaccacctcacaggcct

SEQ ID NO: 319394 - DNA, 120 bp, Artificial Sequence
  ENSG00000135447_9 (sequence is synthesized)
gccctgcagctggaagactcggcgctctaaggcctgtgccgtgtccagctgtgactgtgcggtgggctccatctgctggacaaaaggggaactgcaccatggcacttggcccatgggaaa

SEQ ID NO: 319395 - DNA, 120 bp, Artificial Sequence
  ENSG00000135447_10 (sequence is synthesized)
gagggtatggtggtgtgccgatacctcctcgcctgccctccaagccccagctgccttccttttggattcccaagcttcaggatgtgttccctcttccagctgtgggaccgctgtccctta

SEQ ID NO: 319396 - DNA, 120 bp, Artificial Sequence
  ENSG00000135447_11 (sequence is synthesized)
tttcaacccgttagcaacaatggatagagaacacagtggctattaatgaagaggcccatgctggagactggaagggttcccttgtcctagacattgaggggcccagataagaccaaaacc

SEQ ID NO: 319397 - DNA, 120 bp, Artificial Sequence
  ENSG00000135447_12 (sequence is synthesized)
aagcataagagaagaaactgtctcagatctcacggccaggcctctctcctgctgctgtttttgattttcccaggtagtgggagagaggaaaggagggaaggcaagattctttccccctcc

SEQ ID NO: 319398 - DNA, 120 bp, Artificial Sequence
  ENSG00000135447_13 (sequence is synthesized)
ctgctgaagcatgtggtacagaggcaagagcagagcctgagaagcgtcaggtcccacttctgccatgcagctactatgagccctcggggcctcctcctgggcctcagcttgcccagatac

SEQ ID NO: 319399 - DNA, 120 bp, Artificial Sequence
  ENSG00000135447_14 (sequence is synthesized)
atacctaaatatatatatatatatatatgagggagaacgcctcacccagattttatcatgctggaaagagtgtatgtatgtgaagatgcttggtcaacttgtacccagtgaacacacaca

SEQ ID NO: 319400 - DNA, 120 bp, Artificial Sequence
  ENSG00000135447_15 (sequence is synthesized)
ggattccaagggagccaactcgtttgggaatgcatggacaccggatttgtttcttattccttcacttttggggaaaatctcttgtttttaaaaagtgataaatttggtgttaggtccttg

SEQ ID NO: 319401 - DNA, 120 bp, Artificial Sequence
  ENSG00000135447_16 (sequence is synthesized)
aggatttccctgctccacccacactttggctccattctatgtcttcactcgctccattttactgctcaaaaggggagagagaatgtcgcatccactggagcccagagacgacccaacaaa

SEQ ID NO: 319402 - DNA, 120 bp, Artificial Sequence
  ENSG00000135447_17 (sequence is synthesized)
gatgccatgatagacaccagctctcctacaccctccaccacaacaggctcacctgggccagccccagggctaatccagattcccattctggttgtgttcatcttcggcaggggatggggg

SEQ ID NO: 319403 - DNA, 120 bp, Artificial Sequence
  ENSG00000135447_18 (sequence is synthesized)
ggcctcttcttcacagggggacagctcgtcaatggacatctggttggtgatgcctgtagaggagcataaaggaggctgagcttaggccaagaagtattcttccccagaacccaaggagta

SEQ ID NO: 319404 - DNA, 120 bp, Artificial Sequence
  ENSG00000135447_19 (sequence is synthesized)
tgtggagacatgtaagggattctcatccatcaacctgccttcaagctgaactacattcaacccatccccacttgggaagagcctctccagccttgctaaaactcagaaccctcaacacca

SEQ ID NO: 319405 - DNA, 120 bp, Artificial Sequence
  ENSG00000135447_20 (sequence is synthesized)
ccctaccaccccctcacacaggaagagatttcccagccagggccaccaaattagccaaatctacaggggcaccatttacagggaccacagtgtgcacagggacccttgggttgtggaata

SEQ ID NO: 319406 - DNA, 120 bp, Artificial Sequence
  ENSG00000135447_21 (sequence is synthesized)
tctgactgtctctatcatctctacggcccccattcttagaacattccaggccactcagccagtctttcctgtgatctaactggtctgatcagctccactcccaaatcaaggagtccggca

SEQ ID NO: 319407 - DNA, 120 bp, Artificial Sequence
  ENSG00000135447_22 (sequence is synthesized)
aagggtttccccaggggcttaagaaaaatggacctcctagtgctccatgatccacccacacaagttctcacccctgccctctgccatggtacccaccacttgctgcccgttccttccatt

SEQ ID NO: 319408 - DNA, 120 bp, Artificial Sequence
  ENSG00000135447_23 (sequence is synthesized)
ctggcgccactgaaagctagaagcagaacccccaaaagccgcaagaggtaagccccagcccactccagaaccaccttagccctgggagtgcaggacatggaagaccaggagaaggttcag

SEQ ID NO: 319409 - DNA, 120 bp, Artificial Sequence
  ENSG00000135447_24 (sequence is synthesized)
ggaacttcatcttcctcttttcctctactagatattccccaagtccctgtccctctccccctcatttcacccctccctctccacatcttccctcctggtagaaggaaaattaaaacaaga

SEQ ID NO: 319410 - DNA, 120 bp, Artificial Sequence
  ENSG00000135447_25 (sequence is synthesized)
ttagccagaaggcagaaagacagctaatggaagaaacaaaaatatggtgaaggggagcataggtacaggtcacacccttctgatcccatccttctgtccctgacggcagagggactccca

SEQ ID NO: 319411 - DNA, 120 bp, Artificial Sequence
  ENSG00000135447_26 (sequence is synthesized)
agcttgaagcagtctgcctccccaccaccccaccatggctgtgagtcggtcctctctgtgagtccaaatccctccctaccactgccttcctgaaccaagatatctggctaccccagccac

SEQ ID NO: 319412 - DNA, 120 bp, Artificial Sequence
  ENSG00000135447_27 (sequence is synthesized)
cctcacctgggctggtttttagacttggagtcctcatccgccaggggctgaacactcttctctgccacgtcagtcagcacagagaatgtgggctccacaatgaagtcgatgaaccctgca

SEQ ID NO: 319413 - DNA, 120 bp, Artificial Sequence
  ENSG00000135447_28 (sequence is synthesized)
gtggaggagcaatgccgtagagatgtcttactattatctggagggctaggcagagcatgcagctggcatggccaggacccctggctgcttatgaaagaggatggagaggtaacctggggc

SEQ ID NO: 319414 - DNA, 120 bp, Artificial Sequence
  ENSG00000135447_29 (sequence is synthesized)
tgaaaacttcccaatgcagggcaggctttgggatgatgtcttggtgccccagagagctccttcctgccattgcagccccctggcctcctaacccaggaccccatgctctagcacagtagg

SEQ ID NO: 319415 - DNA, 120 bp, Artificial Sequence
  ENSG00000135447_30 (sequence is synthesized)
ctttcctctacaggaagaatggtttggggggattgaggacttggagcaatcctgacccaggcagcatcttttccccctcccagtcctccccttcctgcaggagaggacactcacctatct

SEQ ID NO: 319416 - DNA, 120 bp, Artificial Sequence
  ENSG00000135447_31 (sequence is synthesized)
gagactgtgccactagagtggaagtgcggtcacagagtggagaaaagggcaggcccaactctgcctccttgtcaccctagaggagggaacagggtaggaaagctggagaggatacctcag

SEQ ID NO: 319417 - DNA, 120 bp, Artificial Sequence
  ENSG00000135447_32 (sequence is synthesized)
acctaccagatctggggtacaggtggcaagtggtgggggtggggggttgttgtgtgaaatttctgcactgttgacctggaaattagtaatatgcaaatgaaatatatgcaaatgaaatgc

SEQ ID NO: 319418 - DNA, 120 bp, Artificial Sequence
  ENSG00000135451_0 (sequence is synthesized)
gtattttacaaactgagaaagtagctccagcagcacccgagagggtcaggagaaaagcggaggaagctgggtaggccctgaggggcctcggtaagccatcatgaccacccggcaagccac

SEQ ID NO: 319419 - DNA, 120 bp, Artificial Sequence
  ENSG00000135451_1 (sequence is synthesized)
gaaggatcccctcctccggggtgtatctcctacccctagcaagattccggtacgctctcagaaacgcacgcctttccccactgttacatcgtgcgccgtggaccaggagaaccaagatcc

SEQ ID NO: 319420 - DNA, 120 bp, Artificial Sequence
  ENSG00000135451_2 (sequence is synthesized)
aaggagatgggtgcagaaaccaccgctcaatattcaacgccccctcgttgattcagcaggccccaggccgaaagccaggcaccaggcagagacatcacaaagattggtggggatcagtca

SEQ ID NO: 319421 - DNA, 120 bp, Artificial Sequence
  ENSG00000135451_3 (sequence is synthesized)
gcctcggaaccccttggaagagctcaggcctagccctaggggtcaaaatgtggggcctgggccccctgcccagacagaggctccagggaccatagagtttgtggctgaccctgcagccct

SEQ ID NO: 319422 - DNA, 120 bp, Artificial Sequence
  ENSG00000135451_4 (sequence is synthesized)
ggccaccatcctgtcaggtgagggtgtgaagagctgtcacctggggcgccagcctagtctggctaaaagagtactggttcgaggaagtcagggaggcaccacccagagggtccagggtgt

SEQ ID NO: 319423 - DNA, 120 bp, Artificial Sequence
  ENSG00000135451_5 (sequence is synthesized)
tcgggcctctgcatatttggcccccagaacccccacccaccgactggaccctgccagggcttcctgcttctctaggctggagggaccaggacctcgaggccggacattgtgcccccagag

SEQ ID NO: 319424 - DNA, 120 bp, Artificial Sequence
  ENSG00000135451_6 (sequence is synthesized)
gctacaggctctgatttcaccttcaggaccttcctttcacccttccactcgccccagtttccaggagctaagaagggagacagctggcagcagccggacttcagtgagccaggcctcagg

SEQ ID NO: 319425 - DNA, 120 bp, Artificial Sequence
  ENSG00000135451_7 (sequence is synthesized)
attgctcctggagaccccagtccagcctgctttctctcttcctaaaggagaacgcgaggttgtcactcactcagatgaaggaggtgtggcctctcttggtctggcccagcgagtaccatt

SEQ ID NO: 319426 - DNA, 120 bp, Artificial Sequence
  ENSG00000135451_8 (sequence is synthesized)
aagagaaaaccgagaaatgtcacataccagggacagccatgactcccacctgatgccctcccctgcccctgtggcccagcccttgcctggccatgtggtgccatgtccatcaccctttgg

SEQ ID NO: 319427 - DNA, 120 bp, Artificial Sequence
  ENSG00000135451_9 (sequence is synthesized)
acgggctcagcgtgtaccctccccaggccctccaactctgacctcatattcagtgttgcggcgtctcaccgttcaacctaaaacccggttcacacccatgccatcaacccccagagttca

SEQ ID NO: 319428 - DNA, 120 bp, Artificial Sequence
  ENSG00000135451_10 (sequence is synthesized)
cagtcctgctctgaagatcctgccctgccctgggagcaggttgccgtccggttgtttgaccaggagagttgtataaggtcactggagggttctgggaaaccaccggtggccactccttct

SEQ ID NO: 319429 - DNA, 120 bp, Artificial Sequence
  ENSG00000135451_11 (sequence is synthesized)
ggaccccactctaacagaacccccagcctccaggaggtgaagattcaacgcatcggtatcctgcaacagctgttgagacaggaagtagaggggctggtagggggccagtgtgtccctctt

SEQ ID NO: 319430 - DNA, 120 bp, Artificial Sequence
  ENSG00000135451_12 (sequence is synthesized)
aatggaggctcttctctggatatggttgaacttcagcccctgctgactgagatttctagaactctgaatgccacagagcataactctgggacttcccaccttcctggactgttaaaacac

SEQ ID NO: 319431 - DNA, 120 bp, Artificial Sequence
  ENSG00000135451_13 (sequence is synthesized)
tcagggctgccaaagccctgtcttccagaggagtgcggggaaccacagccctgccctccggcagagcctgggcccccagaggccttctgtaggagtgagcctgagataccagagccctcc

SEQ ID NO: 319432 - DNA, 120 bp, Artificial Sequence
  ENSG00000135451_14 (sequence is synthesized)
ctccaggaacagcttgaagtaccagagccctaccctccagcagaacccaggcccctagagtcctgctgtaggagtgagcctgagataccggagtcctctcgccaggaacagcttgaggta

SEQ ID NO: 319433 - DNA, 120 bp, Artificial Sequence
  ENSG00000135451_15 (sequence is synthesized)
cctgagccctgccctccagcagaacccaggcccctagagtcctactgtaggattgagcctgagataccggagtcctctcgccaggaacagcttgaggtacctgagccctgccctccagca

SEQ ID NO: 319434 - DNA, 120 bp, Artificial Sequence
  ENSG00000135451_16 (sequence is synthesized)
gaacccgggccccttcagcccagcacccaggggcagtctggacccccagggccctgccctagggtagagctgggggcatcagagccctgcaccctggaacatagaagtctagagtccagt

SEQ ID NO: 319435 - DNA, 120 bp, Artificial Sequence
  ENSG00000135451_17 (sequence is synthesized)
ctaccaccctgctgcagtcagtgggctccagcaaccaccagcctgatcttctcttcccaacacccgctttgtgccagcccccctatctgctcactccagtctttgagacccccagcaggc

SEQ ID NO: 319436 - DNA, 120 bp, Artificial Sequence
  ENSG00000135451_18 (sequence is synthesized)
caggcaggcctcagcaatctggcccctcgaaccctagccctgagggagcgcctcaaatcgtgtttaaccgccatccactgcttccacgaggctcgtctggacgatgagtgtgccttttac

SEQ ID NO: 319437 - DNA, 120 bp, Artificial Sequence
  ENSG00000135451_19 (sequence is synthesized)
accagccgagcccctccctcaggccccacccgggtctgcaccaaccctgtggctacattactcgaatggcaggatgccctgtgtttcattccagttggttctgctgccccccagggctct

SEQ ID NO: 319438 - DNA, 120 bp, Artificial Sequence
  ENSG00000135451_20 (sequence is synthesized)
ccatgatgagacaaccactcctgccctgccgtacttcttccttttagcccttatttattgtcggtctgcccatgggactgggagccgcccacttttgtcctcaataaagtttctaaagta

SEQ ID NO: 319439 - DNA, 120 bp, Artificial Sequence
  ENSG00000135451_21 (sequence is synthesized)
agtcctggtcccagctcctggaaagctctttgctcttagaagatctccctttcctccagcaaaatgtcatctcgccaggtgccatggcttgtacctgtaatcacagctactcaggaggct

SEQ ID NO: 319440 - DNA, 120 bp, Artificial Sequence
  ENSG00000135451_22 (sequence is synthesized)
gaagcaggaggatcactggaggccaggagttggagaccagcctggatgacagagggagatcccatctctttaaaaaataaataaataaataaataataaatatcacttcttctgaagcct

SEQ ID NO: 319441 - DNA, 120 bp, Artificial Sequence
  ENSG00000135451_23 (sequence is synthesized)
aaatgtggggcctgggccccctgcccagacaggtacctgttggagccatggtaacacggcctccatggctgagtaggggactaggaagggtaaaagtggggttttggggttttgcactca

SEQ ID NO: 319442 - DNA, 120 bp, Artificial Sequence
  ENSG00000135451_24 (sequence is synthesized)
aggcaatctcatgcttccacaccttccaccctggcccagcctggctctccctcaggaagaggggaggggctgcacttccagccctgtgctcctaattggcttggccgttggtgggggagg

SEQ ID NO: 319443 - DNA, 120 bp, Artificial Sequence
  ENSG00000135451_25 (sequence is synthesized)
gcccagtggctgcgtggtgtctcccctcagtcctgctctgaagatcctgccctgccctgggtaagtatcagaagcttccccctactgagatcccttgccctgtgctgccagcctggaggc

SEQ ID NO: 319444 - DNA, 64 bp, Artificial Sequence
  ENSG00000135451_26 (sequence is synthesized)
cctactgagatcccttgccctgtgctgccagcctggaggcccaggagtttgaggcacacgtgct

SEQ ID NO: 319445 - DNA, 120 bp, Artificial Sequence
  ENSG00000135451_27 (sequence is synthesized)
aacgaaggctgctgggttcatagggaggagggcagtttggggcccgagggcgaaagagtaggctcggggtgtctggagatagcacccataagagcggtcttgcaggcgccgggggcttgt

SEQ ID NO: 319446 - DNA, 120 bp, Artificial Sequence
  ENSG00000135451_28 (sequence is synthesized)
gggcgcgtggattagggcggaggtatcagggatggcaggacaggtgccccgagaactggttgatctttgatcttagattctgcctgccttcttccccgtctcaattgtagccatcatgac

SEQ ID NO: 319447 - DNA, 120 bp, Artificial Sequence
  ENSG00000135451_29 (sequence is synthesized)
gagaccccagtccagcctggagaacgcgaggttgtcactcactcagatgaaggaggtgtggcctctcttggtctggcccagcgagtaccattaagagaaaaccgagaaatgtcacatacc

SEQ ID NO: 319448 - DNA, 120 bp, Artificial Sequence
  ENSG00000135451_30 (sequence is synthesized)
aattttaaaaattagaaagtgctctctggaaaagctgcctaactctcactgcttctctgctgcccctcctaatgtacatctagggcctctcagttaggggcttcaatccattcctcatga

SEQ ID NO: 319449 - DNA, 120 bp, Artificial Sequence
  ENSG00000135452_0 (sequence is synthesized)
attgggtttggctggcctcgatttaaagagacagaagctgtcggggtcctggaagacggtccccaataccctccccccaagtccttgggaccacttgggtccccagagctggggagatgg

SEQ ID NO: 319450 - DNA, 120 bp, Artificial Sequence
  ENSG00000135452_1 (sequence is synthesized)
tttgtggcggctttgcctgctccaagaatgcgctttgcgctctcaacgtggtctacatgctggtgagcttgttgctcattggagtggctgcttggggcaagggcctgggtctggtgtcca

SEQ ID NO: 319451 - DNA, 120 bp, Artificial Sequence
  ENSG00000135452_2 (sequence is synthesized)
gcatccacatcatcggcggagtcattgctgtgggagtcttccttctccttattgcagtggctggactggtgggtgctgtcaaccaccaccaagtcctgctgttcttttacatgatcatcc

SEQ ID NO: 319452 - DNA, 120 bp, Artificial Sequence
  ENSG00000135452_3 (sequence is synthesized)
ttggtttggtcttcatcttccaatttgtaatctcttgctcatgtctggctattaaccgaagcaaacagacagatgtcatcaatgcttcttggtgggtcatgagcaacaagactcgggatg

SEQ ID NO: 319453 - DNA, 120 bp, Artificial Sequence
  ENSG00000135452_4 (sequence is synthesized)
aactggaaagaagttttgattgttgtggcttattcaacctcacaaccctgtatcaacaagattatgatttctgcactgcaatctgcaagagccagagccccacatgccagatgtgtggag

SEQ ID NO: 319454 - DNA, 120 bp, Artificial Sequence
  ENSG00000135452_5 (sequence is synthesized)
aaaagtttcttaagcattcagacgaagccctgaaaatcctagggggtgttggactcttctttagctttacagagatccttggtgtttggctagcaatgagatttcggaatcagaaggatc

SEQ ID NO: 319455 - DNA, 120 bp, Artificial Sequence
  ENSG00000135452_6 (sequence is synthesized)
ctagagccaaccccagtgcctttctatgagactttggatccttctgacttttcttctgctctctctaagctttctcttcctcccttagggaatatctagggtctgtaaccgttttggttt

SEQ ID NO: 319456 - DNA, 120 bp, Artificial Sequence
  ENSG00000135452_7 (sequence is synthesized)
gagaaaaaggaaaggccccttgtcacatcctctaaaattgatggaatagcaagactttatgccttgacatattttagtgggagccagactataaggaataaaaggaaaaactttcttcct

SEQ ID NO: 319457 - DNA, 120 bp, Artificial Sequence
  ENSG00000135452_8 (sequence is synthesized)
ctctctccaagaggatatgggaagcttctgtgagtgcataggatgggggctggagtcattcttagctgtttcccttcctctgtccatatactggatcacctcaacataccctggtgtggc

SEQ ID NO: 319458 - DNA, 120 bp, Artificial Sequence
  ENSG00000135452_9 (sequence is synthesized)
tctaagggtaaatcagggatagggccaaggagaaaacaaccaagaactctttcctgtaataagcaggatccagtttgagaaagtttagcgaatataaaagtaaaagccatttaaaaatct

SEQ ID NO: 319459 - DNA, 120 bp, Artificial Sequence
  ENSG00000135452_10 (sequence is synthesized)
gggattataggcgtgagccaccacgccccgcctaaaatccatattcaaagaagcaatttcagttcctttctaagctttgtcagtcaaggggctccactgacttcctaggccctgtaattt

SEQ ID NO: 319460 - DNA, 120 bp, Artificial Sequence
  ENSG00000135452_11 (sequence is synthesized)
tccactgacttcctaggccctgtaatttaaccagtctttaaggttttgcaggaaagtcccttcttccaagtggtttttccaaatcgcacaatggcaaagccaaacagaggaagaaacatt

SEQ ID NO: 319461 - DNA, 120 bp, Artificial Sequence
  ENSG00000135452_12 (sequence is synthesized)
aaaaaaaaaaaaaagaccattatttctttgttttgtttttcctgtataaaaaaggaccccaaatataaaggtagggaaagggacaagagggaacataccccttagtgtagagaaatggga

SEQ ID NO: 319462 - DNA, 120 bp, Artificial Sequence
  ENSG00000135452_13 (sequence is synthesized)
gaggaggaccctccatagcctcagagataaaggcaaagattgccctctcagtgtccagaagggaaatggcagcttttcttccttccatggcagccactccattgctcactccggattacc

SEQ ID NO: 319463 - DNA, 120 bp, Artificial Sequence
  ENSG00000135452_14 (sequence is synthesized)
ttcatccttatgtagataagagtgctgcagagctcgaaaggcagagattcgcttgtgtgggttaaaagtcagcatttcctgaggggagaggcaaaggtcagaaaaccatgaagaaaacag

SEQ ID NO: 319464 - DNA, 73 bp, Artificial Sequence
  ENSG00000135452_15 (sequence is synthesized)
gaggggagaggcaaaggtcagaaaaccatgaagaaaacagacttctgcccacccacaacaatacctgggatga

SEQ ID NO: 319465 - DNA, 62 bp, Artificial Sequence
  ENSG00000135452_16 (sequence is synthesized)
actgcaacctccgcctcctgagttgccccggcttatttttgtacttttagtagagacgaggt

SEQ ID NO: 319466 - DNA, 120 bp, Artificial Sequence
  ENSG00000135452_17 (sequence is synthesized)
tctatatccttctctgtgggtggctatttgcagctgtaataaaaactacagcccatctaccaaccaagtttcattaaccacagtggccagggccctgcatactgctctatttctttcccc

SEQ ID NO: 319467 - DNA, 120 bp, Artificial Sequence
  ENSG00000135452_18 (sequence is synthesized)
agtctctatttctttccctgtgcccacagccatctccagtaccagcagcagctgtgctcccgactcctccatctcaggtaccaccgactgcactgggcggggccctctggggggaaaggc

SEQ ID NO: 319468 - DNA, 120 bp, Artificial Sequence
  ENSG00000135452_19 (sequence is synthesized)
tccacggggcagggatacatctcgaggccagtcatcctctggaggcagcccaatcaggctgtgggggacaggagaactctggtcaggagggtcctccagttcccatccccatgggcagag

SEQ ID NO: 319469 - DNA, 120 bp, Artificial Sequence
  ENSG00000135452_20 (sequence is synthesized)
ccagttgccatcctgggttcagcagaaagaggactcagaatagaaaatctttttctcccatgttggtcacttactcaaagattttgcccaactggtcggcttcagagtttccacagaaga

SEQ ID NO: 319470 - DNA, 120 bp, Artificial Sequence
  ENSG00000135452_21 (sequence is synthesized)
gaggcctaaggtgagaagggatataaggtagcagtcattttcaaagatatcttagttgaatggttactgcttagtggctcaaaataggaagtatagggaataaaggccaacaattccagc

SEQ ID NO: 319471 - DNA, 120 bp, Artificial Sequence
  ENSG00000135452_22 (sequence is synthesized)
actttgggatgctgaggtgagaggactgcttgagcccaggagttctagatcagcctgggcaagcaagaccttgtctctttttttaaaaaaaaagaaatgccaggtgcagcggctcacgcc

SEQ ID NO: 319472 - DNA, 85 bp, Artificial Sequence
  ENSG00000135452_23 (sequence is synthesized)
gtcatggtggcgtgcacctgtagtcttagcccaggaggtagaggctacagtgagctgtaattgggccactgcactccagcctggg

SEQ ID NO: 319473 - DNA, 75 bp, Artificial Sequence
  ENSG00000135452_24 (sequence is synthesized)
catggtgaaaccctgtcattactaaaagtacaaaaattagctgatcaagagaattgcttgaatctgggaggtgga

SEQ ID NO: 319474 - DNA, 120 bp, Artificial Sequence
  ENSG00000135452_25 (sequence is synthesized)
tttgtggcggctttgcctgctccaagaatgcgctttgcgctctcaacgtggtctacatggtgaggttttggagctggtgagcttgttgctcattggagtggctgcttggggcaagggcct

SEQ ID NO: 319475 - DNA, 120 bp, Artificial Sequence
  ENSG00000135452_26 (sequence is synthesized)
ctgacacctggctacccacaggtggaggatttcactccccaagtataaggacccttcagttgaggcagtgagagccggcctcttcagggttccctttcagtctcctgaggtttgctgagt

SEQ ID NO: 319476 - DNA, 120 bp, Artificial Sequence
  ENSG00000135452_27 (sequence is synthesized)
cagaagattaaagaggaggcaggcagagtgaatggaaaccgtctgctccgtgtcccccacccctctaggggtcttggagttcaaggctctctatcctccagccagctggtgagcttgttg

SEQ ID NO: 319477 - DNA, 120 bp, Artificial Sequence
  ENSG00000135452_28 (sequence is synthesized)
ctccttccttagtctggccccaactacccaaagatcatccttaggtgcactgcttctggcctcttgggctatttgcttcctctgggatgtctggttaattttccatgaggatgatctaga

SEQ ID NO: 319478 - DNA, 120 bp, Artificial Sequence
  ENSG00000135452_29 (sequence is synthesized)
gatccacagcgcatcctgccggtggaagagacgttcgtgccgcttcttgcccggctcctccgcgcctcgggggctgccaggatccccagtctcggagcctctggcaccggcggcgccggc

SEQ ID NO: 319479 - DNA, 120 bp, Artificial Sequence
  ENSG00000135452_30 (sequence is synthesized)
cgcggccgcagacggagaaggcggcggcggaggcaccgactcgagcttaaccagggtcagcgagatgaggacctcaaagaaaagaaggtagatgaggaactgaaggagacaatgaagatg

SEQ ID NO: 319480 - DNA, 120 bp, Artificial Sequence
  ENSG00000135452_31 (sequence is synthesized)
ttcctgtgaacctcagtttcttccaaactggaagtgataggatgatcctgagggttcatcttttgcattcatactaccatccctgccaccccctccccgccatcctagccattctaacct

SEQ ID NO: 319481 - DNA, 120 bp, Artificial Sequence
  ENSG00000135452_32 (sequence is synthesized)
ttgggagtgcctagggatgctcccggtgcggatagcaccatccccagctcccattcacacactattccattattccttccccctgccccgctcccaagtcctcttgtatggccttgggct

SEQ ID NO: 319482 - DNA, 120 bp, Artificial Sequence
  ENSG00000135452_33 (sequence is synthesized)
cctcaaaaggtagatatttatcgtgtctataattgttgcacaccgttatgcttctgtttgacttcctttgctgggctagggaaattgaggcacttgaactgataacaggatgtagggaga

SEQ ID NO: 319483 - DNA, 120 bp, Artificial Sequence
  ENSG00000135452_34 (sequence is synthesized)
gcccaagttggcaaatttagtttgaatgtcattgtttctctctctacaagccctcttgtattggggctgtgttggtgggaggtgggggtggatagaggctggggaattagccaagtagga

SEQ ID NO: 319484 - DNA, 120 bp, Artificial Sequence
  ENSG00000135452_35 (sequence is synthesized)
ttttagtttgtaggacactggtcagataacagtaaagtttctagggacattcggcataggtattagtcactagcaactttacattcacaactttgcattcttcacgttttatcctcagat

SEQ ID NO: 319485 - DNA, 120 bp, Artificial Sequence
  ENSG00000135454_0 (sequence is synthesized)
gcattccccgcgcggagccgaagcagccgcaacgagccgggagctgagccgcgctgcgctgcggtgcgaagagccgggcggcggccagagccctccccgcgctgccagtgggacgcggag

SEQ ID NO: 319486 - DNA, 120 bp, Artificial Sequence
  ENSG00000135454_1 (sequence is synthesized)
ccagggatccccggctttgccccggggctggggtgcaacagactcttaacttggtcctcgcgccccgccaaccgcccccgggcaggaaacgcccagaaccaccaccgcgccgcgctccac

SEQ ID NO: 319487 - DNA, 120 bp, Artificial Sequence
  ENSG00000135454_2 (sequence is synthesized)
aaaagccccgggagttccaagacgggagggatcgggcgcgctccagaggcaggagggtcccccacaccctcaggctcatgcccagctcccccatcgggcagcccccagccccatgaggac

SEQ ID NO: 319488 - DNA, 120 bp, Artificial Sequence
  ENSG00000135454_3 (sequence is synthesized)
cctcaggccggggcgagagcccggcacagcccggaccgaaattttgccgctgccttagagcgttagacaggatgtggctgggccgccgggccctgtgcgctctggtccttctgctcgcct

SEQ ID NO: 319489 - DNA, 120 bp, Artificial Sequence
  ENSG00000135454_4 (sequence is synthesized)
gcgcctcgctggggctcctgtacgcgagcacccgggacgcgcccggcctccggctacctcttgcgccgtgggcgcccccgcaaagcccccgcaggcccgagctgccagatcttgctcctg

SEQ ID NO: 319490 - DNA, 120 bp, Artificial Sequence
  ENSG00000135454_5 (sequence is synthesized)
agccccgctacgcacacatcccggtcaggatcaaggagcaagtagtggggctgctggcttggaacaactgcagttgtgagtccagtggggggggcctccccctccccttccagaaacaag

SEQ ID NO: 319491 - DNA, 120 bp, Artificial Sequence
  ENSG00000135454_6 (sequence is synthesized)
tccgagctattgacctcaccaaggcctttgaccctgcagagctgagggctgcctctgccacaagagagcaggagttccaggcctttctgtcgaggagccagtccccagctgaccagctgc

SEQ ID NO: 319492 - DNA, 120 bp, Artificial Sequence
  ENSG00000135454_7 (sequence is synthesized)
tcatagcccctgccaactccccgctccagtaccccctacagggtgtggaagttcagcccctcaggagcatcttggtgccagggctgagccttcaggcagcttctggtcaggaggtatacc

SEQ ID NO: 319493 - DNA, 120 bp, Artificial Sequence
  ENSG00000135454_8 (sequence is synthesized)
aggtgaacctgactgcctccctaggcacctgggacgtggcaggggaagtgactggagttactctcactggagagggtcaggcagatctcacccttgtcagcccagggctggaccaactca

SEQ ID NO: 319494 - DNA, 120 bp, Artificial Sequence
  ENSG00000135454_9 (sequence is synthesized)
acaggcaactacaactggtcacttacagcagccgaagctaccagaccaacacagcagacacagtccggttctccaccgagggacatgaggctgctttcactatccgcataagacacccgc

SEQ ID NO: 319495 - DNA, 120 bp, Artificial Sequence
  ENSG00000135454_10 (sequence is synthesized)
ccaaccctcggctgtacccacctgggtctctaccccagggagcccagtacaacatcagcgctctagtcacgattgccaccaagaccttcctccgttatgatcggctacgggctctcatca

SEQ ID NO: 319496 - DNA, 120 bp, Artificial Sequence
  ENSG00000135454_11 (sequence is synthesized)
ccagtatccgccgcttctacccaacggttaccgtggtcatcgctgacgacagcgacaagccagagcgcgttagtggcccctacgtggaacactatctcatgcccttcggcaagggctggt

SEQ ID NO: 319497 - DNA, 120 bp, Artificial Sequence
  ENSG00000135454_12 (sequence is synthesized)
tcgcaggccggaacctggccgtgtctcaagtaaccaccaagtacgtgctgtgggtggacgacgacttcgtcttcacggcgcggacgcggctggagaggcttgtggacgtgctggagcgga

SEQ ID NO: 319498 - DNA, 120 bp, Artificial Sequence
  ENSG00000135454_13 (sequence is synthesized)
cgccgctggacctggtggggggcgcggtgcgcgagatctccggctttgccaccacttatcggcagctgctgagcgtggagcccggcgccccaggcctcgggaactgcctccggcaaaggc

SEQ ID NO: 319499 - DNA, 120 bp, Artificial Sequence
  ENSG00000135454_14 (sequence is synthesized)
gcggcttccaccacgagctcgtcggcttcccaggctgcgtggtcaccgacggcgtggttaacttcttcctggcgcggactgacaaggtgcgcgaggtcggtttcgacccccgcctcagcc

SEQ ID NO: 319500 - DNA, 120 bp, Artificial Sequence
  ENSG00000135454_15 (sequence is synthesized)
gcgtggctcatctggaattcttcttggatgggcttggttcccttcgggttggctcctgctccgacgtcgtggtggatcatgcatccaaactgaagctgccttggacatcaagggatgccg

SEQ ID NO: 319501 - DNA, 120 bp, Artificial Sequence
  ENSG00000135454_16 (sequence is synthesized)
gagcagagacttacgcccggtaccgttacccaggatcactggacgagagccagatggccaaacaccggctgctcttcttcaaacaccggctgcagtgcatgacctcccagtgatggcccg

SEQ ID NO: 319502 - DNA, 120 bp, Artificial Sequence
  ENSG00000135454_17 (sequence is synthesized)
ctggggatttctgactgtcaggctgggcctgcctccttgtccctgccaggaatttccaacaaaccccaccaccctgtgagcactctactggctgtccctgagcctctagttcctcactct

SEQ ID NO: 319503 - DNA, 120 bp, Artificial Sequence
  ENSG00000135454_18 (sequence is synthesized)
tccttttcagaacctgatgcccagtaggggttgtcctggtgacacccctcctttttccagtgcccagaggcctggtggagccataacctctcccacagccagtgccaagtcctccccctg

SEQ ID NO: 319504 - DNA, 120 bp, Artificial Sequence
  ENSG00000135454_19 (sequence is synthesized)
cccattctcatggggcaggaaatggggggatcactttccaagtgccaaagagcccagagggactctaagaacctaaggtggaaacactgtcctctcatcttgggaccgagggggtgggga

SEQ ID NO: 319505 - DNA, 120 bp, Artificial Sequence
  ENSG00000135454_20 (sequence is synthesized)
agttccccaacacataatcccaagactgtgcccctcatctgcatcttcagatccagtactctgtgtacctgctccagccccacccccacagagagaacttgtggctctggggctggggtg

SEQ ID NO: 319506 - DNA, 120 bp, Artificial Sequence
  ENSG00000135454_21 (sequence is synthesized)
agggctggtggttggtgaaagccattcttagttgtgtctctgcaatgctgtgggcacaaaagaaggggcaccagagtccctgtgcaaacacctagactcacttcatggattccaaagctc

SEQ ID NO: 319507 - DNA, 120 bp, Artificial Sequence
  ENSG00000135454_22 (sequence is synthesized)
cacatgatgaggtcagacccacacggtgcaaatctttgggtcagtgagctcctggagaagagaggagacatgtcaggaatagattaggcacccctcttccttaatgaaatgtggcagtcc

SEQ ID NO: 319508 - DNA, 120 bp, Artificial Sequence
  ENSG00000135454_23 (sequence is synthesized)
tctcaggggtaccccacctacttagggatctgagttcttcagttcctcacccatagctcagcccgggctccctgatttggtcttcaatctactattcattccgtccccacccttttcttc

SEQ ID NO: 319509 - DNA, 120 bp, Artificial Sequence
  ENSG00000135454_24 (sequence is synthesized)
ttgatcttcctcagaccctttcccaaacccctctccctgggtctccagccacttacccctgcctcacttgccgcagcccagtgcctcctggctcccgctcctggtgctactgccccttaa

SEQ ID NO: 319510 - DNA, 120 bp, Artificial Sequence
  ENSG00000135454_25 (sequence is synthesized)
caggctccccagggcataagcagctgcatcctgcacactcacaaacagctgatctggagtcaccctgtccaggagtcctacccgggtcagtgtcccctgcaccaaggctatgtggggagg

SEQ ID NO: 319511 - DNA, 120 bp, Artificial Sequence
  ENSG00000135454_26 (sequence is synthesized)
gtgtcagactctgagaccctaagtccacaccgggtccttttccctaccgcaggtgtccagtcattgcccaggcactgggccccgctcttctccacacatctcaccattacactgagccag

SEQ ID NO: 319512 - DNA, 120 bp, Artificial Sequence
  ENSG00000135454_27 (sequence is synthesized)
gaggaggcggatcctagcatctcgacatcggctggccagctgcagggatggggcaaaggggttaagtcccagatcagagggtatgagtgagatgctaaggggtttctcctcaacctaccc

SEQ ID NO: 319513 - DNA, 120 bp, Artificial Sequence
  ENSG00000135454_28 (sequence is synthesized)
tctccctcacctgcaccacttctctggccccagcagcatctgcaaaggtgacaccactgaagtctaggaccaccaccctgacaggctcagcaactagaatgggagaagacaggagtaccc

SEQ ID NO: 319514 - DNA, 120 bp, Artificial Sequence
  ENSG00000135454_29 (sequence is synthesized)
aggtgtcaccatgcaacatgcccaaatcttccttcttgtcaccccatctcacctgcaaccattgggccatctggctttgaagtctcctataagtaaagaagggcagtcaccactcccgaa

SEQ ID NO: 319515 - DNA, 120 bp, Artificial Sequence
  ENSG00000135454_30 (sequence is synthesized)
acacagcatgaacatgcaccccttgagcacaaggatccccctcagaacacccacctgcctcccactccctgaggatccacatccctcctaaaccaagctccttcaccttttctccttctc

SEQ ID NO: 319516 - DNA, 120 bp, Artificial Sequence
  ENSG00000135454_31 (sequence is synthesized)
cgagccccaggtgccactccaggttgcagcgaaactgcccacgggtcccaaagtacagtggtgttggatagctcaggatgcagagccccgggacctggaggagctaagaggtcaaaggat

SEQ ID NO: 319517 - DNA, 120 bp, Artificial Sequence
  ENSG00000135454_32 (sequence is synthesized)
cagagaaatgtctggggctaatcttcccttccttctttggctgcagcccacccaccctggggcttcctctgagtggtctgtagagctctgtcccctcagcctgtccaagtgccaggcact

SEQ ID NO: 319518 - DNA, 120 bp, Artificial Sequence
  ENSG00000135454_33 (sequence is synthesized)
acaccctagggaagaaggtggggccagatttccagcttagcctggcctggctggagagtcaccccaagcacctcattctcttcccctgccccgacctcaactccactcatctctatgccc

SEQ ID NO: 319519 - DNA, 120 bp, Artificial Sequence
  ENSG00000135454_34 (sequence is synthesized)
acctccgggtgcggcagaccacagtcatcatggagaagaccacacccacagccaggcccaaatccacactcagggtcactactgccacccaggtgaccatccacacagcctgcaggatag

SEQ ID NO: 319520 - DNA, 120 bp, Artificial Sequence
  ENSG00000135454_35 (sequence is synthesized)
ggataggggtggattgcccaaaagaaaagccaggccatcactgctgggtaaagagatccagggcagtgactaccaaggcaagtgatggggagagatgatccaggaagaagtggaaagcat

SEQ ID NO: 319521 - DNA, 120 bp, Artificial Sequence
  ENSG00000135454_36 (sequence is synthesized)
gacagaaggaaacaacagggttgattcaatgggacacacaccaaatgtaatgacccgcaccagttgggaagttacaaatattcaggccaaaggggttcaaaccccatcctttcccttgcc

SEQ ID NO: 319522 - DNA, 120 bp, Artificial Sequence
  ENSG00000135454_37 (sequence is synthesized)
tgtgagtaaagcatactaggagttatgtttgctgggggagtgggtgggttgcagaacttaagaccaggacaattaggtttggttcagggcagaggctggggatgctaacaagatgagagg

SEQ ID NO: 319523 - DNA, 120 bp, Artificial Sequence
  ENSG00000135454_38 (sequence is synthesized)
gggcaatctgggggtaatggcatttctcacaaagtccactcggctgatgtgccatagttgtggaagttcctgcatctggcagaacacctggcgcatgctggagatgttgatgcaagccag

SEQ ID NO: 319524 - DNA, 120 bp, Artificial Sequence
  ENSG00000135454_39 (sequence is synthesized)
gacagccttgaggcagaggaggtgggctgactacctcgatgtcctggaatacagctacccctcccagccatgctcatgcctcctctgctcattaccttgggcagatagtaaaagaagggc

SEQ ID NO: 319525 - DNA, 120 bp, Artificial Sequence
  ENSG00000135454_40 (sequence is synthesized)
cccagccacagcagcaccgacaggaccactgtgcaggagaagaggcctgccagctagagaaaaggaggaacaggagcaaaaaaggaagagagcctcccacccccacatgagagctggtct

SEQ ID NO: 319526 - DNA, 120 bp, Artificial Sequence
  ENSG00000135454_41 (sequence is synthesized)
tcctgcccactctgcctaatcttcctcggaagtctcccttctcccaaatctccttccacacaacccccttcttaatattctgccattcacatctaaccctcccgctccccccaattaatt

SEQ ID NO: 319527 - DNA, 120 bp, Artificial Sequence
  ENSG00000135454_42 (sequence is synthesized)
aaatgcccattattcaccagtctccttgtagatgtccattgttcaagttccccagttttgtagcccacctccaccttaaaagccactgttgggttaccctataagcagggtatatgtgtt

SEQ ID NO: 319528 - DNA, 120 bp, Artificial Sequence
  ENSG00000135454_43 (sequence is synthesized)
tagggcaccagcaaagtaagggaaaccaaaaatattagggggagactttgatatgtgatattccttttaaaagacaatgtcattgtgtgaaaaaaataagaattttatctcttaagttta

SEQ ID NO: 319529 - DNA, 120 bp, Artificial Sequence
  ENSG00000135454_44 (sequence is synthesized)
tcatcgggtcacctccgccgggggcgcccgccagcacgggcatgattctgcattttttcctgacaggctaggtgtggagccgccctccgcagcccaccccggcccaggatgtggctgggc

SEQ ID NO: 319530 - DNA, 120 bp, Artificial Sequence
  ENSG00000135454_45 (sequence is synthesized)
ctggcttggaacaactgcagttagctgagggctgcctctgccacaagagagcaggagttccaggcctttctgtcgaggtaccagcttgaaagaagcgcatgactcctcagggggagagca

SEQ ID NO: 319531 - DNA, 120 bp, Artificial Sequence
  ENSG00000135454_46 (sequence is synthesized)
ccgaagctaccagaccaacacagcagacacaggtgcaaggcctgggtggagagacgggcaggctgggcaaacagagaagaaccagaaaggctggagtgggcaaatggcagagggcatggg

SEQ ID NO: 319532 - DNA, 120 bp, Artificial Sequence
  ENSG00000135454_47 (sequence is synthesized)
aggcatctgggctatggccagagctgtccagccacacaatgggtgcttcaactggaccagcagggccagagggagaaagggggcctttgttcatctggggctggagcaggccagagggaa

SEQ ID NO: 319533 - DNA, 120 bp, Artificial Sequence
  ENSG00000135454_48 (sequence is synthesized)
acccgagccttgggtgtgtctcccctttaggccaactgtggggggccccaggaagagacttgtctaaggagttagaagactatattcccaacccaccccttactagagggcaaaggtctt

SEQ ID NO: 319534 - DNA, 120 bp, Artificial Sequence
  ENSG00000135454_49 (sequence is synthesized)
tactttcctgagatcccatttctcttccagcaaaagaggcctaaaagccctctttgcttctccccaaagctggtttgttgcactaagtttgcttccaccttagggcctttgcactttcta

SEQ ID NO: 319535 - DNA, 120 bp, Artificial Sequence
  ENSG00000135454_50 (sequence is synthesized)
ttttctcagcctggaatgctcttccccagatttttgcagactggcttcttcttgtcatttagatctcagttcaaatgcctcctcttcactatcacattacttgtttgtcttattttccac

SEQ ID NO: 319536 - DNA, 120 bp, Artificial Sequence
  ENSG00000135454_51 (sequence is synthesized)
tcaatacttaccagtatctgaattttttaatttacttagcctggcaccagactgactaggttgctatcagttttgttgcttaatagttgtgtaaatgtggcaagttacttttctgtgtct

SEQ ID NO: 319537 - DNA, 120 bp, Artificial Sequence
  ENSG00000135454_52 (sequence is synthesized)
cagcttttttttctgttgtaggaatctacttaatagggctatcatggggataaaatgagtgcatatatttaaggtaattttttaacgggtctggcacatagtaagtgctcaataaagatt

SEQ ID NO: 319538 - DNA, 120 bp, Artificial Sequence
  ENSG00000135454_53 (sequence is synthesized)
acggccgcgtcgaaaccgcggcatccaaatgtcttcagcattaagatgccaggcctcgggtgtgtgaggaaaccgagatgcaggagagggcgagaagaaaggaggccgggagaccctggg

SEQ ID NO: 319539 - DNA, 120 bp, Artificial Sequence
  ENSG00000135454_54 (sequence is synthesized)
gcctgggaagtgaggggaggggtaccgggaaaaccgcggctggcagtgcaaaccctagcgcgatgtgtggagtggagagcgctcttgggagccggcaggagcctctgaggacgcgggggc

SEQ ID NO: 319540 - DNA, 120 bp, Artificial Sequence
  ENSG00000135454_55 (sequence is synthesized)
ggccttgaacaggctaaggccacagcgggggcgctgcggccaggaacggccagccctaggacaaagagagaaccacgaagtggggcctgggaactgtctgggtcctgcaggggtgaagcg

SEQ ID NO: 319541 - DNA, 120 bp, Artificial Sequence
  ENSG00000135454_56 (sequence is synthesized)
tagtaagtgctcaataaagattagcttttacttaaaattttctttgttgttttttctcctacccattagaatgtaagttccataaaggtaagaaccttctgttcttgtccaccaaggcct

SEQ ID NO: 319542 - DNA, 120 bp, Artificial Sequence
  ENSG00000135454_57 (sequence is synthesized)
agaaaggtgggacacagagtaggcacttaaatattgattggctgaaaacagaatgttatcccacccttcagggtcaaatgccatgtcctttcttcccagtccggttctccaccgagggac

SEQ ID NO: 319543 - DNA, 120 bp, Artificial Sequence
  ENSG00000135454_58 (sequence is synthesized)
atgaggctgctttcactatccgcataagacacccgcccaaccctcggctgtacccacctgggtctctaccccagggaggtgaggctggtaggggcagggacatattagaaccagccttgg

SEQ ID NO: 319544 - DNA, 120 bp, Artificial Sequence
  ENSG00000135454_59 (sequence is synthesized)
tggggagcaagttgggagagggcagtcctgggaggggatatctacctgttcccctctcccaaccctccttgtctgcacccaaccctgtgcccccaatctcagcccagtacaacatcagcg

SEQ ID NO: 319545 - DNA, 120 bp, Artificial Sequence
  ENSG00000135454_60 (sequence is synthesized)
cctccagggtagtgattcgaggaccacctgcctcagaatcatggggtgcctgttaagcatgaggattcctggaatgtaagcttcgtgggagcaggaaattctctctgaattcttagaatg

SEQ ID NO: 319546 - DNA, 120 bp, Artificial Sequence
  ENSG00000135454_61 (sequence is synthesized)
gtgcttagtgcctaatggcattcaataaaatagctgatgaatgaataaataaatgcacacggaaattaaacgcattctaagaccactgacttggaacctctgtggggatctgcatttctt

SEQ ID NO: 319547 - DNA, 120 bp, Artificial Sequence
  ENSG00000135454_62 (sequence is synthesized)
ttacctagctcctggcctttcgaaagcactcaaaagtctggagaagaatacaagctgagaagggtcgggggagagaaagaaaggtggcagagggccatgtcctatttctgcagcctcccc

SEQ ID NO: 319548 - DNA, 120 bp, Artificial Sequence
  ENSG00000135457_0 (sequence is synthesized)
gttcgccgggcaggcgaggaaagaggacgccatgattggttggcgctggggcggcggacggtggaagggcctggcgagtctaggttttacgcctgtgctggactttctccttccatgttt

SEQ ID NO: 319549 - DNA, 120 bp, Artificial Sequence
  ENSG00000135457_1 (sequence is synthesized)
ccaggccgtggggggctacagagggcgagaagtcggctcagcggaaacctggatttggttctaagccgtggggttgagaaggggtgaccggaagtgatcgtgggactgaccggaagcgag

SEQ ID NO: 319550 - DNA, 120 bp, Artificial Sequence
  ENSG00000135457_2 (sequence is synthesized)
gcctggaggggaaagagagagcgagacctgggagggagggggcctccagcagaaaggggcgggggaaaaggtgcaaaagcagcgtgggagcgccgggctggcttcctgcggctgctgctg

SEQ ID NO: 319551 - DNA, 120 bp, Artificial Sequence
  ENSG00000135457_3 (sequence is synthesized)
gtctgactgggaagcagcaagccaccactacgaactctcaagaggagtgggagtgcgggagtccagagctgcctctgggaagtctgcagtagttgagcaaaggggtcctcacgttcctga

SEQ ID NO: 319552 - DNA, 120 bp, Artificial Sequence
  ENSG00000135457_4 (sequence is synthesized)
gagctgggcaggggggattttggaacctggggcagccaagaacgagcagccaagggtacgggagattagttgtgcacagagcagtgctggtcgggcttgggggtggctggtgggcactgc

SEQ ID NO: 319553 - DNA, 120 bp, Artificial Sequence
  ENSG00000135457_5 (sequence is synthesized)
gtgggaaaccttggtttgtagttttcttggtttgcgttactcctgttgggtagaattaccctccgcgcctttgtacaagacacggtgtctcctggggcaaggaaggagccaggatggcct

SEQ ID NO: 319554 - DNA, 120 bp, Artificial Sequence
  ENSG00000135457_6 (sequence is synthesized)
gggctctgaagctgcctctggccgacgaagtgattgaatccgggttggtgcaggactttgatgctagcctgtccgggatcggccaggaactgggtgctggtgcctatagcatgagtgatg

SEQ ID NO: 319555 - DNA, 120 bp, Artificial Sequence
  ENSG00000135457_7 (sequence is synthesized)
tccttgcattgcccatttttaagcaagaagagtcgagtttgcctcctgataatgagaataaaatcctgccttttcaatatgtgctttgtgctgctacctctccagcagtgaaactccatg

SEQ ID NO: 319556 - DNA, 120 bp, Artificial Sequence
  ENSG00000135457_8 (sequence is synthesized)
atgaaaccctaacgtatctcaatcaaggacagtcttatgaaattcgaatgctagacaataggaaacttggagaacttccagaaattaatggcaaattggtgaagagtatattccgtgtgg

SEQ ID NO: 319557 - DNA, 120 bp, Artificial Sequence
  ENSG00000135457_9 (sequence is synthesized)
tgttccatgacagaaggcttcagtacactgagcatcagcagctagagggctggaggtggaaccgacctggagacagaattcttgacatagatatcccgatgtctgtgggtataatcgatc

SEQ ID NO: 319558 - DNA, 120 bp, Artificial Sequence
  ENSG00000135457_10 (sequence is synthesized)
ctagggctaatccaactcaactaaatacagtggagttcctgtgggaccctgcaaagaggacatctgtgtttattcaggtgcactgtattagcacagagttcactatgaggaaacatggtg

SEQ ID NO: 319559 - DNA, 120 bp, Artificial Sequence
  ENSG00000135457_11 (sequence is synthesized)
gagaaaagggggtgccattccgagtacaaatagataccttcaaggagaatgaaaacggggaatatactgagcacttacactcggccagctgccagatcaaagttttcaagcccaaaggtg

SEQ ID NO: 319560 - DNA, 120 bp, Artificial Sequence
  ENSG00000135457_12 (sequence is synthesized)
cagacagaaagcaaaaaacggatagggaaaaaatggagaaacgaacacctcatgaaaaggagaaatatcagccttcctatgagacaaccatactcacagagtgttctccatggcccgaga

SEQ ID NO: 319561 - DNA, 120 bp, Artificial Sequence
  ENSG00000135457_13 (sequence is synthesized)
tcacgtatgtcaataactccccatcacctggcttcaacagttcccatagcagtttttctcttggggaaggaaatggttcaccaaaccaccagccagagccaccccctccagtcacagata

SEQ ID NO: 319562 - DNA, 120 bp, Artificial Sequence
  ENSG00000135457_14 (sequence is synthesized)
acctcttaccaacaaccacacctcaggaagctcagcagtggttgcatcgaaatcgtttttctacattcacaaggcttttcacaaacttctcaggggcagatttattgaaattaactagag

SEQ ID NO: 319563 - DNA, 120 bp, Artificial Sequence
  ENSG00000135457_15 (sequence is synthesized)
tttatgtttgtcaggaatcactgcagttgagggagcagcaacaacagcagcagcaacagcagcagaagcatgaggatggagactcaaatggtactttcttcgtttaccatgctatctatc

SEQ ID NO: 319564 - DNA, 120 bp, Artificial Sequence
  ENSG00000135457_16 (sequence is synthesized)
tagaagaactaacagctgttgaattgacagaaaaaattgctcagcttttcagcatttccccttgccagatcagccagatttacaagcaggggccaacaggaattcatgtgctcatcagtg

SEQ ID NO: 319565 - DNA, 120 bp, Artificial Sequence
  ENSG00000135457_17 (sequence is synthesized)
atgagatgatacagaactttcaggaagaagcatgttttattctggacacaatgaaagcagaaaccaatgatagctatcatatcatactgaagtaggagtgcggcgtttcgtgcccagtgg

SEQ ID NO: 319566 - DNA, 120 bp, Artificial Sequence
  ENSG00000135457_18 (sequence is synthesized)
ctgctccttccttcacctctgaaaacggccctcttgaagggggatatgaatggagatttgaaggtctgcaagaacctgactcgtctgactgtgtgtggaggagtccaggccatggaggca

SEQ ID NO: 319567 - DNA, 120 bp, Artificial Sequence
  ENSG00000135457_19 (sequence is synthesized)
gaatcctggccctctgtgttggcccaagctcttgtggtacacacagattactgcccaatatgcagttctgcagctgttttagttaaatttctggaccttgttgttgttaaatatcagtag

SEQ ID NO: 319568 - DNA, 120 bp, Artificial Sequence
  ENSG00000135457_20 (sequence is synthesized)
aaactctacataatttagagtgtatgtagggcataatgatgatgggaattgtgtgatgtttaacaggaagatcttaaattttgtgatatggagccctgtaatttttttcttatataaaaa

SEQ ID NO: 319569 - DNA, 120 bp, Artificial Sequence
  ENSG00000135457_21 (sequence is synthesized)
tgggtatctatattcataagactaggtcttcaatctctttgtactggtctcaaatgtactggtatctctgctttttgccacagtttgtccctgaaaactttatcagtgaggagaaataca

SEQ ID NO: 319570 - DNA, 120 bp, Artificial Sequence
  ENSG00000135457_22 (sequence is synthesized)
gaattttccttttggttcccctgtaataccacaactaatagtattttcagctaacatttattgaccaggcagtgtgataaattttttgaatgaccatcttgtttaaccccctaatcacac

SEQ ID NO: 319571 - DNA, 120 bp, Artificial Sequence
  ENSG00000135457_23 (sequence is synthesized)
tatctgaagtaggtgctatagtgacccccaaccgaagatgaggaaatggagacacacagtggctaagtagcttgctaggtgccaggagctggcaggcagtgatgctgaaatccaaaccag

SEQ ID NO: 319572 - DNA, 120 bp, Artificial Sequence
  ENSG00000135457_24 (sequence is synthesized)
gcaatctggccctccttattcaccctctcataccaccagtgctacccattataacctgtgttcacttcgcttattactgtggcccttctggtgactacaacataacactgagtatgaact

SEQ ID NO: 319573 - DNA, 120 bp, Artificial Sequence
  ENSG00000135457_25 (sequence is synthesized)
gaggaattaaccactgaaagagacaaagcacacctaaataatgatgaacaaatcaagacctacaagaaatgaacacatagatgctttttaagtgtcattagttatcggaatcaaagaatt

SEQ ID NO: 319574 - DNA, 120 bp, Artificial Sequence
  ENSG00000135457_26 (sequence is synthesized)
tgaggtggtgacaactggggattatctgtaactccccaaatttactgttcttgaatgacattctcaaactatttattaatgagttagtctcatccctgctttctgtttcctctctctgca

SEQ ID NO: 319575 - DNA, 120 bp, Artificial Sequence
  ENSG00000135457_27 (sequence is synthesized)
tcttctcttggcataggaagttattttactcatgctatgttttttaatagaagctttacaaaaaaagatgcattcccttcctgttcacactcttaccatgtttttgttcttccttaagaa

SEQ ID NO: 319576 - DNA, 120 bp, Artificial Sequence
  ENSG00000135457_28 (sequence is synthesized)
tgtgtgtgtgtgtgtgtgtgtaagtgtgtaagtgtaacatcatgggttttctttcttcacttgtaaagttttatctagaaatacttttacaggttatgttgaggtacacaaagataatgt

SEQ ID NO: 319577 - DNA, 120 bp, Artificial Sequence
  ENSG00000135457_29 (sequence is synthesized)
gtgtgtgtgtgtgtgtgtgtgtttaaagcatttgataaggtttaaatgttttttatacagagatttttgttcattaaactcaatctgcatcatggtctaatttctcttggtttgaaacaa

SEQ ID NO: 319578 - DNA, 120 bp, Artificial Sequence
  ENSG00000135457_30 (sequence is synthesized)
caatctgcatcatggtctaatttctcttggtttgaaacaaattgaaaactttgaaaccaaaaaattaagtcaatgacttgtttaaaactgacctgagcaacttgttatattacaccaaaa

SEQ ID NO: 319579 - DNA, 120 bp, Artificial Sequence
  ENSG00000135457_31 (sequence is synthesized)
agaaaaggatggaactccttgagcatcttgcatggttggagaaagagaaaacaactttcacaaactaggcctgagtatggggttgtgtggggtgtttggctatgtgttacctaatggggt

SEQ ID NO: 319580 - DNA, 120 bp, Artificial Sequence
  ENSG00000135469_0 (sequence is synthesized)
ccttccttcctctcccaggcccgagccatggcaacagcgtgacgtgggggtaccgagatctgcgggagcagcggtcccggcttcagttctagcctacccggcagcctggacgggagcaag

SEQ ID NO: 319581 - DNA, 120 bp, Artificial Sequence
  ENSG00000135469_1 (sequence is synthesized)
gcgagaggtgctgccgcctcccgtcgcccctgcgctcagaggtcccgaaccagcccagccgctgcctcttgccgctccgcctttggagtgaggagggcgcagcccgcgtcagaacttaga

SEQ ID NO: 319582 - DNA, 120 bp, Artificial Sequence
  ENSG00000135469_2 (sequence is synthesized)
tcagaacttagagggccaggcagggtcgcgcgcatggcctgggcgggctcgcggcgggtcccagctgggacgcgcgcggcagccgagcgctgctgccggctctcgctcagcccgggcgcg

SEQ ID NO: 319583 - DNA, 120 bp, Artificial Sequence
  ENSG00000135469_3 (sequence is synthesized)
cccccaggccctctgccaccgccgcgaccaatgaggtttctgacctcctgcagcctcctcttgcctcgggctgcccagatcttggcggctgaggctggcttaccttcgagccgttccttc

SEQ ID NO: 319584 - DNA, 120 bp, Artificial Sequence
  ENSG00000135469_4 (sequence is synthesized)
atgggatttgctgctcccttcaccaacaagcgaaaggcttactcggagcgtagaatcatggggtactcaatgcaggagatgtatgaggtggtgtccaacgtccaggagtatcgtgagttt

SEQ ID NO: 319585 - DNA, 120 bp, Artificial Sequence
  ENSG00000135469_5 (sequence is synthesized)
gtgccctggtgtaagaagtctctggtggtatccagccgtaagggtcatttgaaagcccagctggaggttggctttccacctgtcatggaacgttacacctctgcagtttccatggtcaaa

SEQ ID NO: 319586 - DNA, 120 bp, Artificial Sequence
  ENSG00000135469_6 (sequence is synthesized)
tcgaacctgcactgtggacttttcgatttcctttgaatttcgttctctgctgcactcccagctggccaccatgttttttgatgaggttgtcaaacagaatgttgctgcctttgagcgtcg

SEQ ID NO: 319587 - DNA, 120 bp, Artificial Sequence
  ENSG00000135469_7 (sequence is synthesized)
ggcagccaccaagtttggtccagaaacagccatcccccgtgaactgatgttccatgaggtgcaccagacttgaggcaagggattgctccctgacctcccttctaccccacttccctacac

SEQ ID NO: 319588 - DNA, 120 bp, Artificial Sequence
  ENSG00000135469_8 (sequence is synthesized)
aattctcttatttatttggtttggctcctgttccaatttgaaaggagtctgtgttcataatactgtttctcctctcaatttcccagaaattgggttctatgctggctggaaatgttgggg

SEQ ID NO: 319589 - DNA, 120 bp, Artificial Sequence
  ENSG00000135469_9 (sequence is synthesized)
gaaagagaaggcaaaggatgtggaaatgagatgtgcttaggaaagggtcaggcccatcgtaggagcaccatatgcctgcagccttttcactacgaattagaataaggactatgtggttgt

SEQ ID NO: 319590 - DNA, 120 bp, Artificial Sequence
  ENSG00000135469_10 (sequence is synthesized)
ctctggaccttatcaagacaccttagtgtctgaccaggggacgatagtaacttttctaaggattgaataaattgagcttttcttctggcacagaggtactgagtggtaagtaacttttac

SEQ ID NO: 319591 - DNA, 120 bp, Artificial Sequence
  ENSG00000135469_11 (sequence is synthesized)
cctgcctgagattcctcaggagaaaaggcaacctgcctccagcctgaaatacataaagcctcattttaagactgtaagtccatgctgcctggctactagagagcaaggggctttcttacc

SEQ ID NO: 319592 - DNA, 120 bp, Artificial Sequence
  ENSG00000135469_12 (sequence is synthesized)
accagtgctgaggagaaaagtactgaacggaaacggagttgtctttgtactcttgagttgtaccttattcttccacttggcctgagtttttataaaatttcaataaattgtgacagtgtg

SEQ ID NO: 319593 - DNA, 120 bp, Artificial Sequence
  ENSG00000135469_13 (sequence is synthesized)
gggggtcgctgcgaaccccggggttccgcggtggaggggtgctatactgggatgcaggcgcggcggggactggcagcaatcatgccctgggagctaacgtagagctttggataatgcttt

SEQ ID NO: 319594 - DNA, 120 bp, Artificial Sequence
  ENSG00000135469_14 (sequence is synthesized)
aaagcttgtttggacgaccttcgtctgggatgcactcttcttctccttcacctacaaatgatagaggattacgaagaactatacggttggctcctctttcctttggccttaggtttctga

SEQ ID NO: 319595 - DNA, 120 bp, Artificial Sequence
  ENSG00000135469_15 (sequence is synthesized)
tcatccctagccatccccctccccagctacaatactgatcctcagtcctcccctgccactcttccgaccttaatttctcccttcttggttgctgtgcatgtgcttaagtgaaatgagact

SEQ ID NO: 319596 - DNA, 72 bp, Artificial Sequence
  ENSG00000135469_16 (sequence is synthesized)
cttcttggttgctgtgcatgtgcttaagtgaaatgagactagggttggactatactttaagacaacagggcg

SEQ ID NO: 319597 - DNA, 72 bp, Artificial Sequence
  ENSG00000135469_17 (sequence is synthesized)
aacacacacacaagaatcagcctggcacggtggcgggcgcctttaatcccagctatttgggaggctgaggca

SEQ ID NO: 319598 - DNA, 120 bp, Artificial Sequence
  ENSG00000135469_18 (sequence is synthesized)
aaagtgctattttggccttccttgtaagtactttatgtccatgtgtcaagtatttccctcatatcagaaaagaaggaaaatggctttcaattcctttatattgtatcctatacttagtaa

SEQ ID NO: 319599 - DNA, 120 bp, Artificial Sequence
  ENSG00000135469_19 (sequence is synthesized)
tcaaaaaacaaaacaaaaaacagggtgtatttttctggtgaccatttaaaaataatttttatgggtacctagtatgtgtaaattagcagcgtaacctttttagtatattttgagcataat

SEQ ID NO: 319600 - DNA, 120 bp, Artificial Sequence
  ENSG00000135469_20 (sequence is synthesized)
agctaaattatcgagcacttgctacatgctagcagcttgacttagatgttttacatagatatttctcatttaattctcacaacaaacctataaatcaggtgagaaaatggagacacaggt

SEQ ID NO: 319601 - DNA, 120 bp, Artificial Sequence
  ENSG00000135469_21 (sequence is synthesized)
aatttacctaaggccacattgttaaaaaattgttaagagctgggatctgatccttgtgtgatcaccagtaaaactgacagcctctgttctccctagatggtccctcttaaaatcaaaata

SEQ ID NO: 319602 - DNA, 120 bp, Artificial Sequence
  ENSG00000135469_22 (sequence is synthesized)
atctgtagttcctgaaggtgcgtggttagtgggcaaaggtatgaattaggggcctatagcaaggaggaacctgacccagctggcagctccttggcctgtgattcttcttctcctaggtac

SEQ ID NO: 319603 - DNA, 120 bp, Artificial Sequence
  ENSG00000135472_0 (sequence is synthesized)
agtggatgttgctagaacccacgcggaggaaggaagagacgcaggcaggctgcggttacccaagcggccacccgggcctcagggaccccttccccgagagacggcaccatgacccaggga

SEQ ID NO: 319604 - DNA, 120 bp, Artificial Sequence
  ENSG00000135472_1 (sequence is synthesized)
aagctctccgtggctaacaaggcccctgggaccgaggggcagcagcaggtgcatggcgagaagaaggaggctccagcagtgccctcagccccaccctcctatgaggaagccacctctggg

SEQ ID NO: 319605 - DNA, 120 bp, Artificial Sequence
  ENSG00000135472_2 (sequence is synthesized)
gaggggatgaaggcaggggccttccccccagcccccacagcggtgcctctccaccctagctgggcctatgtggaccccagcagcagctccagctatgacaacggtttccccaccggagac

SEQ ID NO: 319606 - DNA, 120 bp, Artificial Sequence
  ENSG00000135472_3 (sequence is synthesized)
catgagctcttcaccactttcagctgggatgaccagaaagttcgtcgagtctttgtcagaaaggtctacaccatcctgctgattcagctgctggtgaccttggctgtcgtggctctcttt

SEQ ID NO: 319607 - DNA, 120 bp, Artificial Sequence
  ENSG00000135472_4 (sequence is synthesized)
actttctgtgaccctgtcaaggactatgtccaggccaacccaggctggtactgggcatcctatgctgtgttctttgcaacctacctgaccctggcttgctgttctggacccaggaggcat

SEQ ID NO: 319608 - DNA, 120 bp, Artificial Sequence
  ENSG00000135472_5 (sequence is synthesized)
ttcccctggaacctgattctcctgaccgtctttaccctgtccatggcctacctcactgggatgctgtccagctactacaacaccacctccgtgctgctgtgcctgggcatcacggccctt

SEQ ID NO: 319609 - DNA, 120 bp, Artificial Sequence
  ENSG00000135472_6 (sequence is synthesized)
gtctgcctctcagtcaccgtcttcagcttccagaccaagttcgacttcacctcctgccagggcgtgctcttcgtgcttctcatgactcttttcttcagcggactcatcctggccatcctc

SEQ ID NO: 319610 - DNA, 120 bp, Artificial Sequence
  ENSG00000135472_7 (sequence is synthesized)
ctacccttccaatatgtgccctggctccatgcagtttatgcagcactgggagcgggtgtatttacattgttcctggcacttgacacccagttgctgatgggtaaccgacgccactcgctg

SEQ ID NO: 319611 - DNA, 120 bp, Artificial Sequence
  ENSG00000135472_8 (sequence is synthesized)
agccctgaggagtatatttttggagccctcaacatttacctagacatcatctatatcttcaccttcttcctgcagctttttggcactaaccgagaatgaggagccctccctgccccaccg

SEQ ID NO: 319612 - DNA, 120 bp, Artificial Sequence
  ENSG00000135472_9 (sequence is synthesized)
tcctccagagaatgcgcccctcctggttccctgtccctcccctgcgctcctgcgagaccagatataaaactagctgccaacccagcctgtggccaggtcactgtctaccccagcccagcc

SEQ ID NO: 319613 - DNA, 120 bp, Artificial Sequence
  ENSG00000135472_10 (sequence is synthesized)
cagccctctgccgcttgtacatacgccatggggaccctgaggaactgaggccacgtcaatccctgtgccgccccattcgcccgttacatcttccaaactgggacggtcaaggctgaaggc

SEQ ID NO: 319614 - DNA, 120 bp, Artificial Sequence
  ENSG00000135472_11 (sequence is synthesized)
tcctctgggtttgagggtccaagggacaaggaggagaagcctagcaggatttcagatgcaggagagagacccaggaagcccggcagagccctgagccccactgcaattcctcctagggct

SEQ ID NO: 319615 - DNA, 120 bp, Artificial Sequence
  ENSG00000135472_12 (sequence is synthesized)
gcacaatcatgtggccttagggcacactgtcctgcatccagtctgtgtcctcctgtctttctcatccaggtcaggcattgacactttgtaagaaagggggtaggggacacagctgggcag

SEQ ID NO: 319616 - DNA, 120 bp, Artificial Sequence
  ENSG00000135472_13 (sequence is synthesized)
gtggagtgggtgggcaggatggctgtcccagtctgcccatcttctcttggctctgggaccagcggcttgttctagggatttggacctggaggccaagggcaataggagagggtctgaagc

SEQ ID NO: 319617 - DNA, 120 bp, Artificial Sequence
  ENSG00000135472_14 (sequence is synthesized)
ctgtgctgtctgctgcttgctgtgaatggccctcccgggtcatgacagagctcttttggggcaggaggtgagggcagggggccccgctccttggtaagggcctgccctggggctcccagg

SEQ ID NO: 319618 - DNA, 120 bp, Artificial Sequence
  ENSG00000135472_15 (sequence is synthesized)
gaagtgggagctggggagccaatccacccagacccgcgtccacctgggaggcatttggggttgcaggaccgagacccacatcctctcactcacttctccacccgccaggcagctgccaca

SEQ ID NO: 319619 - DNA, 120 bp, Artificial Sequence
  ENSG00000135472_16 (sequence is synthesized)
ggcctaaggctgagtgaggtgtgattgggccctccggctggatgttctgggggaggaggcaatcgctgtagctgccaggccagccccatctggaaggagtccctgctctgcctcagccct

SEQ ID NO: 319620 - DNA, 120 bp, Artificial Sequence
  ENSG00000135472_17 (sequence is synthesized)
aacccgaggctgtgtgggagtcccttctgcacctcttatttcctaaacccttcctgtcagctgctgtttgctggctcgtccccagccaggcctcctgaggtcttcatagttggcacagtc

SEQ ID NO: 319621 - DNA, 120 bp, Artificial Sequence
  ENSG00000135472_18 (sequence is synthesized)
cacatctcttctagcttcactggccactcactcagcccagagtccctaagtgctcccccacttatctctgcatctctccaatttggaagccatccagctgatgctaacagccagggccag

SEQ ID NO: 319622 - DNA, 120 bp, Artificial Sequence
  ENSG00000135472_19 (sequence is synthesized)
ctgtggggagggaaccaggaggccacactgggggagcgtgcagccagcatgtgcagtggccaactccaggccagtggaaagttactgtgtggatacaggaaggctctgagtggctagcag

SEQ ID NO: 319623 - DNA, 120 bp, Artificial Sequence
  ENSG00000135472_20 (sequence is synthesized)
gaccctcccttggcttcgccctcctcctcttctctctcccctgtgctgggagctccgtctgccttgggaagggagacgaggtgtgctgttccttcccagccccatccctccccacccttc

SEQ ID NO: 319624 - DNA, 120 bp, Artificial Sequence
  ENSG00000135472_21 (sequence is synthesized)
ctactcccagctttcaagaaacattgcagaagcatttgaagttttgttccatcttggatatttgaagagaaaaggagccaagaactggcgggtggtgtgtgtgcagcaaaggcattgggg

SEQ ID NO: 319625 - DNA, 120 bp, Artificial Sequence
  ENSG00000135472_22 (sequence is synthesized)
gcacgggtgagatgcccactgtgtgctggtctaaattaatccatcgcagtgatcctccagagacagcgctctgctcatgtccgtagcagagggaaaagccgaggtgctcagaaaggctcg

SEQ ID NO: 319626 - DNA, 120 bp, Artificial Sequence
  ENSG00000135472_23 (sequence is synthesized)
gtaatgagtcccaggtcatacggctagcgagtggcgggcctggggttcagacccacagctgcctcaagcaaacagggtatcacgcttgcccctgggcctgggtgggggccggaatgagac

SEQ ID NO: 319627 - DNA, 120 bp, Artificial Sequence
  ENSG00000135472_24 (sequence is synthesized)
cacatgagagcgcagagaggtgggtggtcaggccctgatgtcctggggatttcttgtcctcagtgccacccggcctcccgtctttcctgaaacccctcgccagattttgcactctgaggt

SEQ ID NO: 319628 - DNA, 120 bp, Artificial Sequence
  ENSG00000135472_25 (sequence is synthesized)
ttctatcttccagacaagagctgggaggcaagatttctggtttctggttcctagcctcactgccagcgggctcctgctattaggtgagggtttcttgctgtctggaattcagtttttcca

SEQ ID NO: 319629 - DNA, 120 bp, Artificial Sequence
  ENSG00000135472_26 (sequence is synthesized)
tctgccacatggaagttcatagccaggatagggcgggagaggcaccagaacatttctctccactgactttctcacccggttcccaccctcctccacctcctctcctccgggcccctcagt

SEQ ID NO: 319630 - DNA, 120 bp, Artificial Sequence
  ENSG00000135472_27 (sequence is synthesized)
ttcctctcctcatctctggcctcagttccagagggttagccccagcaccccactctcctgccactgtcagatagccttggtcatgcttcctagaatctacttgtccaagttctcctctcc

SEQ ID NO: 319631 - DNA, 120 bp, Artificial Sequence
  ENSG00000135472_28 (sequence is synthesized)
ctgggataagttactgcagaaactggggatttagaagcttattcagggctgagtgccaaaagcttgggggaggagggacaggtcctcggcaataaacagtgtcacacacgcatcacagcc

SEQ ID NO: 319632 - DNA, 120 bp, Artificial Sequence
  ENSG00000135472_29 (sequence is synthesized)
atttgagaaatggcttctttgcagagctggggaagccgggcagaagatgccgcagcctcctactctgggtcctgagggggggtggcaggtaccacagtgtaggcagcagggtcagggcca

SEQ ID NO: 319633 - DNA, 120 bp, Artificial Sequence
  ENSG00000135472_30 (sequence is synthesized)
aagtctatgcgttccatctccaatccaggcagtgaggaatcctgaaacaccaggagaggcgtcagaagtaggaagggcaggggaacaggaatgcaagattaaggaaaccgcagctgagca

SEQ ID NO: 319634 - DNA, 120 bp, Artificial Sequence
  ENSG00000135472_31 (sequence is synthesized)
ggtgtcacaagctgtaaaggaggaagggagtctgcaggcccttcacatttttggcctgggtggggctgggcccaggaaggggtgggctggattttgtaaagctggaggcagccaggaatc

SEQ ID NO: 319635 - DNA, 120 bp, Artificial Sequence
  ENSG00000135472_32 (sequence is synthesized)
tgactgtccggaatgtgagttgaggggtctcccactgaagtcctcttctggaagctgcagatgggggcccgggaggcacacacgagtctgggactcattcccgggcacacctatggctcc

SEQ ID NO: 319636 - DNA, 120 bp, Artificial Sequence
  ENSG00000135472_33 (sequence is synthesized)
ttcggtatcacctggggaagccccggaatcttagttcttccattccctactcttccttccgagggagtcaggatgggacagacacccattttccaaaaggctccttgcctccttccctgg

SEQ ID NO: 319637 - DNA, 120 bp, Artificial Sequence
  ENSG00000135472_34 (sequence is synthesized)
cccacctgaagccaagtcccaggtgtcctggctgctctcctgggcggggtgggatttttgcataagcactttgctgccctccagtggctgcttgaggaaacgcagggcctggtttgggag

SEQ ID NO: 319638 - DNA, 120 bp, Artificial Sequence
  ENSG00000135472_35 (sequence is synthesized)
agtcaccgagggcccatgtggctggaggttgggggcaggatctggcccgagctctcctcagacctccccagacctgtcttctcatcagccaccgctgttttcttttgccgaacgatggtt

SEQ ID NO: 319639 - DNA, 120 bp, Artificial Sequence
  ENSG00000135472_36 (sequence is synthesized)
gcatctctcggacacagtgtaccccctcccaagccctccctgagccgttctcctgagtccctgagggcagacacagctccagggacccaggccagctgccacacccccgacactcctgct

SEQ ID NO: 319640 - DNA, 120 bp, Artificial Sequence
  ENSG00000135472_37 (sequence is synthesized)
gtccactggccttagctcctgcaagttccccagtgtccgcacctgttcccttccctgacctcaccttcctggggtctgtgactgactggagataaaaataaaagcaattgtgacacctga

SEQ ID NO: 319641 - DNA, 120 bp, Artificial Sequence
  ENSG00000135472_38 (sequence is synthesized)
ggccctgatgcccggctctggtttcacgcgggcagcgtcagctgcgtcctccgcagcatcttcccaggcccggccctctcctccccccgcgccgatggtacgcgccggctcgcctggccc

SEQ ID NO: 319642 - DNA, 120 bp, Artificial Sequence
  ENSG00000135472_39 (sequence is synthesized)
ctcagtggccctttaggtctaacacagtcttctgggaaccagacctaaatcccattttctgagagccgggctttttgttgctgtttcaatttcacaccaccccctccaccccagtctttc

SEQ ID NO: 319643 - DNA, 120 bp, Artificial Sequence
  ENSG00000135472_40 (sequence is synthesized)
cttctctggctgcctcattcaggccttcccagctcaaatcctctcaccaaagctaaacatgtccacgggtggggggcaggggacacatctgagtgtaaatggactcgcatttccaacctg

SEQ ID NO: 319644 - DNA, 120 bp, Artificial Sequence
  ENSG00000135472_41 (sequence is synthesized)
ccatggggacgtttccctttgagcctcagtttcctcatctgttcagtgacggaagagactcaactggatgtcttctgaggccccttccactgggtcactctgtgagtctgttctggttta

SEQ ID NO: 319645 - DNA, 120 bp, Artificial Sequence
  ENSG00000135472_42 (sequence is synthesized)
ggggagaggctgagattcctacaggatgaggccagaacagacccttagcctggatcctcttgcccttcctccaccctgaaggcccttcttcttttctgttttctccctctcctcttccct

SEQ ID NO: 319646 - DNA, 120 bp, Artificial Sequence
  ENSG00000135472_43 (sequence is synthesized)
ttctgttgcccttctctctcccatctccattctccttgcatcacttccagcgcaacagaaggatcaatcccagtggatgatgcctaggccctgcctctcagtgggccacatgcagctctg

SEQ ID NO: 319647 - DNA, 120 bp, Artificial Sequence
  ENSG00000135472_44 (sequence is synthesized)
tgaccttggatgaatcgctcttcctctgtgatcctcattctcctcattttaaagcaggggtcaaaatgcagctagcaagtctcaggaagattaaatgacataaccttttatttgtaacaa

SEQ ID NO: 319648 - DNA, 120 bp, Artificial Sequence
  ENSG00000135472_45 (sequence is synthesized)
tctactatgtgccaggctcttttctggaaccatagagaccctgcccctaccccagggacaatgacagtgacaaccaatggtggacactcctaagaattttctctttcctctgttcctatc

SEQ ID NO: 319649 - DNA, 120 bp, Artificial Sequence
  ENSG00000135472_46 (sequence is synthesized)
ccagctccaccatgtgccccagctagctctgacccctctggagcttagttctcttgtctataaaatagagacattcttgtctgcattcctggcttccaagtgcaggtaaggaaggaacca

SEQ ID NO: 319650 - DNA, 120 bp, Artificial Sequence
  ENSG00000135472_47 (sequence is synthesized)
catagggagtagccaccatggtctacacctcccactacaaatcccctgggcgcagacccctgaagactcaccccaccgtgacctactggagggtcaatgaaggcagcagctccagctatg

SEQ ID NO: 319651 - DNA, 120 bp, Artificial Sequence
  ENSG00000135473_0 (sequence is synthesized)
atgccccgagcccttcttgattggaagaagcgcctcggaccccggtccttggcgccgtagtggttaggttgagccctaggcgtgggggagaactggggaaactggaatttcccgcggagc

SEQ ID NO: 319652 - DNA, 120 bp, Artificial Sequence
  ENSG00000135473_1 (sequence is synthesized)
tgacagcgcttgcgctccccctactcgttctaattccacgcgctccaaaatatccgccatggagaaatcttggccaggatgtccattctaggcccatcggtgctgtcttgctgaaggttg

SEQ ID NO: 319653 - DNA, 120 bp, Artificial Sequence
  ENSG00000135473_2 (sequence is synthesized)
ggtcaggcatctaaagggactgtggtaagggagggtgtgacacaggtgtaagctgccatcgtcatcatgaactttgagggtctggaccctggactggcagaatatgccccagccatgcat

SEQ ID NO: 319654 - DNA, 120 bp, Artificial Sequence
  ENSG00000135473_3 (sequence is synthesized)
tctgccctggaccctgtcttggatgcccacctgaacccaagtctgctacagaatgtggagctggacccagagggagtggccttggaggctcttcccgtccaggaatcagtgcacataatg

SEQ ID NO: 319655 - DNA, 120 bp, Artificial Sequence
  ENSG00000135473_4 (sequence is synthesized)
gaaggtgtctactctgaattgcacagcgtggtggctgaagtgggtgtacctgtttccgtctcccactttgacttgcacgaggagatgctgtgggtggggagccacgggggccatgccact

SEQ ID NO: 319656 - DNA, 120 bp, Artificial Sequence
  ENSG00000135473_5 (sequence is synthesized)
tcattttttggcccagccttggagcgctactcatcctttcaagtcaatggcagtgatgatattcggcagatccagagcctggagaatggtatcctttttctcaccaagaacaacctcaag

SEQ ID NO: 319657 - DNA, 120 bp, Artificial Sequence
  ENSG00000135473_6 (sequence is synthesized)
tatatggcccgtgggggcctcattatatttgattacctgctggatgagaatgaggatatgcacagtctcctactgactgacagcagcactctactcgttggtgggctgcagaatcacata

SEQ ID NO: 319658 - DNA, 120 bp, Artificial Sequence
  ENSG00000135473_7 (sequence is synthesized)
atagagattgatcttaacactgtccaggagactcagaagtatgcagtagagacgcctggagtcaccatcatgagacagacaaatcgcttcttcttctgcggccacacgtctggcaaggtt

SEQ ID NO: 319659 - DNA, 120 bp, Artificial Sequence
  ENSG00000135473_8 (sequence is synthesized)
tccctgagagacctccgtacttttaaggtggaacatgagtttgatgccttctcaggaagtctgtcagactttgatgtgcatggcaacctgctagctgcctgtggcttctccagccgcctc

SEQ ID NO: 319660 - DNA, 120 bp, Artificial Sequence
  ENSG00000135473_9 (sequence is synthesized)
actggcctggcctgcgaccgtttcctcaaggtgtatgatttgcgcatgatgcgtgccatcacaccacttcaagtacatgtggatcctgccttcttgcgcttcattcctacatatacttct

SEQ ID NO: 319661 - DNA, 120 bp, Artificial Sequence
  ENSG00000135473_10 (sequence is synthesized)
cgtcttgctatcatctctcagtcagggcagtgccaattctgtgaacccacaggcctggccaacccagccgatatctttcatgtgaatcctgtggggcctctgctaatgacatttgatgtg

SEQ ID NO: 319662 - DNA, 120 bp, Artificial Sequence
  ENSG00000135473_11 (sequence is synthesized)
tcagccagcaagcaggctctggcctttggggattctgagggctgtgtgcacctctggactgattccccggagccttccttcaacccctactcccgtgagactgagtttgctttgccgtgt

SEQ ID NO: 319663 - DNA, 120 bp, Artificial Sequence
  ENSG00000135473_12 (sequence is synthesized)
ctcgtggactcactgcctcctctggactggagccaggacctgctgcctctttccctcatccctgtcccactcaccactgacacacttctctctgattggcctgctgccaactctgctcca

SEQ ID NO: 319664 - DNA, 120 bp, Artificial Sequence
  ENSG00000135473_13 (sequence is synthesized)
gctcccaggcgagcaccacccgtggatgcagagattctgcgcaccatgaagaaggtgggcttcattggctatgcgcccaatccccgcaccaggctgcgcaatcagataccctacagactc

SEQ ID NO: 319665 - DNA, 120 bp, Artificial Sequence
  ENSG00000135473_14 (sequence is synthesized)
aaggagtcagacagtgaatttgacagcttcagccaggtcactgagtcaccagtaggacgagaagaggaaccacatctccacatggtttctaagaaataccgcaaggtgaccatcaaatat

SEQ ID NO: 319666 - DNA, 120 bp, Artificial Sequence
  ENSG00000135473_15 (sequence is synthesized)
tccaagctagggctggaggactttgacttcaaacactacaataagaccttgtttgctggattagagccccacattcccaacgcctactgtaactgcatgatccaggtgctctatttcctg

SEQ ID NO: 319667 - DNA, 120 bp, Artificial Sequence
  ENSG00000135473_16 (sequence is synthesized)
gagcctgtacgctgtctaattcaaaaccacctttgccagaaggagttctgtctggcatgtgagctgggcttcctgtttcacatgttggacctctctcgtggtgacccttgccagggcaat

SEQ ID NO: 319668 - DNA, 120 bp, Artificial Sequence
  ENSG00000135473_17 (sequence is synthesized)
aattttcttcgggcattccgtactattcctgaggcctcagccctcggtctaatcctggctgactcagatgaggcctcaggcaagggcaatctggccaggctcattcagaggtggaatcgc

SEQ ID NO: 319669 - DNA, 120 bp, Artificial Sequence
  ENSG00000135473_18 (sequence is synthesized)
ttcattctcactcaactgcatcaagatatgcaggagctggaaataccacaggcttatcgaggtgctggaggcagcagcttttgctcatcgggggactctgttattgggcagctcttcagc

SEQ ID NO: 319670 - DNA, 120 bp, Artificial Sequence
  ENSG00000135473_19 (sequence is synthesized)
gcagcctctgccgctgtggcagtgagaccgtgcgagcctcatccactctgcttttcacactctcctaccctgatgataaaactgggaagaactatgactttgctcaggtgctgaagcgaa

SEQ ID NO: 319671 - DNA, 120 bp, Artificial Sequence
  ENSG00000135473_20 (sequence is synthesized)
gcatctgcctggaccagaatacacaggcctggtgtgacacctgtgaaaagtaccagcccacgattcagacccgcaacatccgccatctgccagatattcttgtcatcaattgtgaggtga

SEQ ID NO: 319672 - DNA, 120 bp, Artificial Sequence
  ENSG00000135473_21 (sequence is synthesized)
acagctcaaaagaggctgatttctggagaatgcaggctgaggttgccttcaagatggcagtaaagaaacacggtggggaaatctccaagaacaaggaatttgctttggctgattggaagg

SEQ ID NO: 319673 - DNA, 120 bp, Artificial Sequence
  ENSG00000135473_22 (sequence is synthesized)
aactagggagtccagagggtgtgctggtgtgtccctccattgaggagttgaagaacgtctggcttcctttctccattcgcatgaagatgaccaaaaacaaagggctggatgtttgcaatt

SEQ ID NO: 319674 - DNA, 120 bp, Artificial Sequence
  ENSG00000135473_23 (sequence is synthesized)
ggactgatggggatgagatgcagtggggcccagccagggcagaggaggagcatggtgtctatgtgtatgacctgatggctactgtggtacacatcctggactcacgcacagggggcagcc

SEQ ID NO: 319675 - DNA, 120 bp, Artificial Sequence
  ENSG00000135473_24 (sequence is synthesized)
tggtggctcacatcaaagttggagagacctaccaccagcgcaaggagggcgttactcaccagcagtggtatctgttcaatgactttcttattgaacctattgataagcatgaagctgtgc

SEQ ID NO: 319676 - DNA, 120 bp, Artificial Sequence
  ENSG00000135473_25 (sequence is synthesized)
agtttgacatgaattggaaagtacctgcaatcctttattatgtcaaacggaatctcaattccagatacaacctgaacatcaagaaccctattgaggcaagtgtcttgctggctgaagcct

SEQ ID NO: 319677 - DNA, 120 bp, Artificial Sequence
  ENSG00000135473_26 (sequence is synthesized)
cgctggcacggaagcagcggaaaacacatactacctttattccactgatgctgaatgagatgccacagattggggacctggtgggtctggatgctgagtttgtcacccttaatgaggagg

SEQ ID NO: 319678 - DNA, 120 bp, Artificial Sequence
  ENSG00000135473_27 (sequence is synthesized)
aagcagagttacgcagtgatggtaccaagtctaccattaaaccaagccagatgtcagtagccaggattacctgtgttcggggccagggacccaatgagggtatccccttcattgatgact

SEQ ID NO: 319679 - DNA, 120 bp, Artificial Sequence
  ENSG00000135473_28 (sequence is synthesized)
acatctctacccaggagcaggtggtggattacttgactcaatactcgggtataaagcctggtgacctcgatgccaaaatttcctccaagcacctaacaactctcaagtctacctacttaa

SEQ ID NO: 319680 - DNA, 120 bp, Artificial Sequence
  ENSG00000135473_29 (sequence is synthesized)
agcttcgttttctcattgacattggagtcaagtttgtgggtcatggcctgcagaaggacttccgggtcatcaacctgatggtgcccaaggaccaagtccttgacactgtctacctgttcc

SEQ ID NO: 319681 - DNA, 120 bp, Artificial Sequence
  ENSG00000135473_30 (sequence is synthesized)
atatgccccgaaaacgaatgatttccctgcgattccttgcttggtactttctggacctgaagattcaaggggaaacccatgacagtattgaggatgcccgcacagcccttcagctgtacc

SEQ ID NO: 319682 - DNA, 120 bp, Artificial Sequence
  ENSG00000135473_31 (sequence is synthesized)
gaaagtatctggagctaagcaaaaatggcactgagcctgagtctttccacaaggtgctcaagggtctttatgagaagggcagaaagatggactggaaggtgcctgagcctgagggccaaa

SEQ ID NO: 319683 - DNA, 120 bp, Artificial Sequence
  ENSG00000135473_32 (sequence is synthesized)
caagtcccaagaatgcagctgtcttctcctcagtgctggcgctctgactacccttcccaaagaaccacggccctctccctttactgttctatagccccagaactgggagatggcttccta

SEQ ID NO: 319684 - DNA, 120 bp, Artificial Sequence
  ENSG00000135473_33 (sequence is synthesized)
agttggctataccttgtccacttccagtactggacgtgctcagggtctagggtcacagatggtgctattaattgaactggaacacagcagaattgttgcaaaggttctaggagccagatt

SEQ ID NO: 319685 - DNA, 120 bp, Artificial Sequence
  ENSG00000135473_34 (sequence is synthesized)
cattccttcttcattctttgcaaaacagtggtacagacatggagtctagaattgacccagatggaaagtaattggtattcttaatatcctgggtgactaatatccaggcagagaagctcc

SEQ ID NO: 319686 - DNA, 120 bp, Artificial Sequence
  ENSG00000135473_35 (sequence is synthesized)
tggaaccataactgtaagttcctagctggctagggattgaagtcctggacagtgacagaggataccacagtagttcaagacttagcacaagtcaccaactgcttcagggatacctggagg

SEQ ID NO: 319687 - DNA, 120 bp, Artificial Sequence
  ENSG00000135473_36 (sequence is synthesized)
ggccagcaagtagagtgttggtggcccaagcaaaccagtgttgccaataccattgccaaaagggcctttggatcctggacaaagcttggctgccggcttcatttattcctgctgatggct

SEQ ID NO: 319688 - DNA, 120 bp, Artificial Sequence
  ENSG00000135473_37 (sequence is synthesized)
gagaagcatctgtcttccatcccacttgcctgtcccaagttttgttccattttttaaaaatttgttgtaaactgcatgttttataaaataaaaataaaatatcgtttgttatttatctca

SEQ ID NO: 319689 - DNA, 120 bp, Artificial Sequence
  ENSG00000135473_38 (sequence is synthesized)
gtgggtaactggccattattgttttcctctagagaatcctgggtagctattggagaggattctaggaaactgacttctcgttctccccaccgtccaatccacccgttttcacccccaatt

SEQ ID NO: 319690 - DNA, 120 bp, Artificial Sequence
  ENSG00000135473_39 (sequence is synthesized)
ctgggagaaagcaccttaaatccctctacctaactccaacccccgcaattctcgctcccttcacctgatgattcagggctgaacaaggccaggatgtccattctaggcccatcggtgctg

SEQ ID NO: 319691 - DNA, 86 bp, Artificial Sequence
  ENSG00000135473_40 (sequence is synthesized)
caaagttatggatatgaaagggtataattaggccgggcgcggtggctcactttggaacacgaggtcaggagttaaagaccagcctg

SEQ ID NO: 319692 - DNA, 63 bp, Artificial Sequence
  ENSG00000135473_41 (sequence is synthesized)
aggcagagccagcctgggcgatagggcgagactccgtctcaaaaaaaggggaaaaaggtataa

SEQ ID NO: 319693 - DNA, 120 bp, Artificial Sequence
  ENSG00000135473_42 (sequence is synthesized)
gggcgagactccgtctcaaaaaaaggggaaaaaggtataatttatgccttttctgggcaatgctgggtctttgctatagctgcccagtaccctaagtcagactgaagatgtacagtatgg

SEQ ID NO: 319694 - DNA, 120 bp, Artificial Sequence
  ENSG00000135473_43 (sequence is synthesized)
tttccgttaattgtgtaagccgacaaactacaggtcccaggatagcttgagacttgtagttgctcacaaagatgggtccggtgctgcggtgcttcctgggagatgtagtttcctgtgtat

SEQ ID NO: 319695 - DNA, 120 bp, Artificial Sequence
  ENSG00000135473_44 (sequence is synthesized)
tgaaacctggactgctcgctggccggcagcgcaccgttttgaaggtcctagcccacctgggctggctcacgcgcacgactagccgctcccatacagcacgcccggactctgtcgtcgctt

SEQ ID NO: 319696 - DNA, 120 bp, Artificial Sequence
  ENSG00000135473_45 (sequence is synthesized)
agggagagaaggtggggcagaaggtaaaggagggcaggggaaggtgaaacttagcagagggaaaaggaagagaataaggcctagtatttacctgttaggggattttccatagtcactcag

SEQ ID NO: 319697 - DNA, 120 bp, Artificial Sequence
  ENSG00000135473_46 (sequence is synthesized)
ttcagtgttggggtcctagatgggctaggatggagataacccaccctggtcccccatcccccatacccccaactccctgtcctctgtccccattcccctcccttccccatccttaaactt

SEQ ID NO: 319698 - DNA, 120 bp, Artificial Sequence
  ENSG00000135473_47 (sequence is synthesized)
accctgatggtagcaaaagtggtatacccttcagctcagttgggaaggctccccaaaatgtcctgtaatatcagggagagggtgttggggactaactgtgggtagaggggagaaccagga

SEQ ID NO: 319699 - DNA, 120 bp, Artificial Sequence
  ENSG00000135473_48 (sequence is synthesized)
gtatagcatctaattttccctcagataaaactgggaagaactatgactttgctcaggtgctgaagcgaagcatctgcctggaccagaatacacaggcctggtgtgacacctgtgaaaagt

SEQ ID NO: 319700 - DNA, 120 bp, Artificial Sequence
  ENSG00000135473_49 (sequence is synthesized)
aggcgtgggggagaactggggaaactggaatttcccgcggagctgacagcgcttgcgctccccctactcgttctaattccacgcgctccaaaatatccgccatggagaaatcttgggcca

SEQ ID NO: 319701 - DNA, 120 bp, Artificial Sequence
  ENSG00000135473_50 (sequence is synthesized)
ctgggaaggaagtcatatgagaaaggattgaaggactcagtcaggaggccttcaactaccaccctggacccaggaggaaggctctaggaaaggctgtggctactggaaagatttggggac

SEQ ID NO: 319702 - DNA, 120 bp, Artificial Sequence
  ENSG00000135473_51 (sequence is synthesized)
tctgagaatatccttgtcttgctcagacaatttctaccttaggtgaccatcaaatattccaagctagggctggaggactttgacttcaaacactacaataagaccttgtttgctggatta

SEQ ID NO: 319703 - DNA, 120 bp, Artificial Sequence
  ENSG00000135473_52 (sequence is synthesized)
gaatgatttccctgcgattccttgcttggtactttctggatgcagctgtcttctcctcagtgctggcgctctgactacccttcccaaagaaccacggccctctccctttactgttctata

SEQ ID NO: 319704 - DNA, 120 bp, Artificial Sequence
  ENSG00000135473_53 (sequence is synthesized)
atcaggatagaaatagttaaagccatcatgacaggcccctctgtgatttaaaaggtctcctaacttcctcaatgtgcatatatcatcctctccactcttagcagcttttgctcatcgggg

SEQ ID NO: 319705 - DNA, 120 bp, Artificial Sequence
  ENSG00000135473_54 (sequence is synthesized)
tgtgcactgaggaagatgtctgacaattttccttaagggcagtcaggctttttagttttctggagtcaggtaggagtggggagacatgttcctacctccctttgctgggtcccaaactat

SEQ ID NO: 319706 - DNA, 120 bp, Artificial Sequence
  ENSG00000135473_55 (sequence is synthesized)
gacctaccaccagcgcaaggaggtgagtgaggttgtagagggcaggaacactcctgggatggccacagtgagtcccagatctgtccttgagtctgagacagagtggtccagccatcaatt

SEQ ID NO: 319707 - DNA, 120 bp, Artificial Sequence
  ENSG00000135473_56 (sequence is synthesized)
tgtatcgccacaggctttctttgtatttccatagggcgttactcaccagcagtggtatctgttcaatgactttcttattgaacctattgataaggttagttgcaacatgttctgtttctt

SEQ ID NO: 319708 - DNA, 120 bp, Artificial Sequence
  ENSG00000135473_57 (sequence is synthesized)
ccttatctttagggctctatagaatgccaggcagattcaacagggagggaggaaggaatcctcaggaataaaaaccattagcacttaaaaatagcacctgaaaaaaaacaaaaactagca

SEQ ID NO: 319709 - DNA, 120 bp, Artificial Sequence
  ENSG00000135476_0 (sequence is synthesized)
ggttacattttggatcctcgcggagtactggtcaggcggttaagtcctgtacctaggaaagagggcgagctctggggcgctctccggtgtcatgaggagcttcaaaagagtcaactttgg

SEQ ID NO: 319710 - DNA, 120 bp, Artificial Sequence
  ENSG00000135476_1 (sequence is synthesized)
gactctgctaagcagccagaaggaggctgaagagttgctgcccgccttgaaggagttcctgtccaaccctccagctggttttcccagcagccgatctgatgctgagaggagacaagcttg

SEQ ID NO: 319711 - DNA, 120 bp, Artificial Sequence
  ENSG00000135476_2 (sequence is synthesized)
tgatgccatcctgagggcttgcaaccagcagctgactgctaagctagcttgccctaggcatctggggagcctgctggagctggcagagctggcctgtgatggctacttagtgtctacccc

SEQ ID NO: 319712 - DNA, 120 bp, Artificial Sequence
  ENSG00000135476_3 (sequence is synthesized)
acagcgtcctcccctctacctggaacgaattctctttgtcttactgcggaatgctgctgcacaaggaagcccagaggccacactccgccttgctcagcccctccatgcctgcttggtgca

SEQ ID NO: 319713 - DNA, 120 bp, Artificial Sequence
  ENSG00000135476_4 (sequence is synthesized)
gtgctctcgcgaggctgctccccaggactatgaggccgtggctcggggcagcttttctctgctttggaagggggcagaagccctgttggaacggcgagctgcatttgcagctcggctgaa

SEQ ID NO: 319714 - DNA, 120 bp, Artificial Sequence
  ENSG00000135476_5 (sequence is synthesized)
ggccttgagcttcctagtactcttggaggatgaaagtaccccttgtgaggttcctcactttgcttctccaacagcctgtcgagcggtagctgcccatcagctatttgatgccagtggcca

SEQ ID NO: 319715 - DNA, 120 bp, Artificial Sequence
  ENSG00000135476_6 (sequence is synthesized)
tggtctaaatgaagcagatgctgatttcctagatgacctgctctccaggcacgtgatcagagccttggtgggtgagagagggagctcttctgggcttctttctccccagagggccctctg

SEQ ID NO: 319716 - DNA, 120 bp, Artificial Sequence
  ENSG00000135476_7 (sequence is synthesized)
cctcttggagctcaccttggaacactgccgtcgcttttgctggagccgccaccatgacaaagccatcagcgcagtggagaaggctcacagttacctaaggaacaccaatctagcccctag

SEQ ID NO: 319717 - DNA, 120 bp, Artificial Sequence
  ENSG00000135476_8 (sequence is synthesized)
ccttcagctatgtcagctgggggttaagctgctgcaggttggggaggaaggacctcaggcagtggccaagcttctgatcaaggcatcagctgtcctgagcaagagtatggaggcaccatc

SEQ ID NO: 319718 - DNA, 120 bp, Artificial Sequence
  ENSG00000135476_9 (sequence is synthesized)
acccccacttcgggcattgtatgagagctgccagttcttcctttcaggcctggaacgaggcaccaagaggcgctatagacttgatgccattctgagcctctttgcttttcttggagggta

SEQ ID NO: 319719 - DNA, 120 bp, Artificial Sequence
  ENSG00000135476_10 (sequence is synthesized)
ctgctctcttctgcagcagctgcgggatgatggtgtgtatgggggctcctccaagcaacagcagtcttttcttcagatgtactttcagggacttcacctctacactgtggtggtttatga

SEQ ID NO: 319720 - DNA, 120 bp, Artificial Sequence
  ENSG00000135476_11 (sequence is synthesized)
ctttgcccaaggctgtcagatagttgatttggctgacctgacccaactagtggacagttgtaaatctaccgttgtctggatgctggaggccttagagggcctgtcgggccaagagctgac

SEQ ID NO: 319721 - DNA, 120 bp, Artificial Sequence
  ENSG00000135476_12 (sequence is synthesized)
ggaccacatggggatgaccgcttcttacaccagtaatttggcctacagcttctatagtcacaagctctatgccgaggcctgtgccatctctgagccgctctgtcagcacctgggtttggt

SEQ ID NO: 319722 - DNA, 120 bp, Artificial Sequence
  ENSG00000135476_13 (sequence is synthesized)
gaagccaggcacttatcccgaggtgcctcctgagaagttgcacaggtgcttccggctacaagtagagagtttgaagaaactgggtaaacaggcccagggctgcaagatggtgattttgtg

SEQ ID NO: 319723 - DNA, 120 bp, Artificial Sequence
  ENSG00000135476_14 (sequence is synthesized)
gctggcagccctgcaaccctgtagccctgaacacatggctgagccagtcactttctgggttcgggtcaagatggatgcggccagggctggagacaaggagctacagctaaagactctgcg

SEQ ID NO: 319724 - DNA, 120 bp, Artificial Sequence
  ENSG00000135476_15 (sequence is synthesized)
agacagcctcagtggctgggacccggagaccctggccctcctgctgagggaggagctgcaggcctacaaggcggtgcgggccgacactggacaggaacgcttcaacatcatctgtgacct

SEQ ID NO: 319725 - DNA, 120 bp, Artificial Sequence
  ENSG00000135476_16 (sequence is synthesized)
cctggagctgagccccgaggagacaccagccggggcctgggcacgagccacccacctggtagaactggctcaggtgctctgctaccacgactttacgcagcagaccaactgctctgctct

SEQ ID NO: 319726 - DNA, 120 bp, Artificial Sequence
  ENSG00000135476_17 (sequence is synthesized)
ggatgctatccgggaagccctgcagcttctggactctgtgaggcctgaggcccaggccagagatcagcttctggacgataaagcacaggccttgctgtggctttacatctgtactctgga

SEQ ID NO: 319727 - DNA, 120 bp, Artificial Sequence
  ENSG00000135476_18 (sequence is synthesized)
agccaaaatgcaggaaggtatcgagcgggatcggagagcccaggcccctggtaacttggaggaatttgaagtcaatgacctgaactatgaagataaactccaggaagatcgtttcctata

SEQ ID NO: 319728 - DNA, 120 bp, Artificial Sequence
  ENSG00000135476_19 (sequence is synthesized)
cagtaacattgccttcaacctggctgcagatgctgctcagtccaaatgcctggaccaagccctggccctgtggaaggagctgcttacaaaggggcaggccccagctgtacggtgtctcca

SEQ ID NO: 319729 - DNA, 120 bp, Artificial Sequence
  ENSG00000135476_20 (sequence is synthesized)
gcagacagcagcctcactgcagatcctagcagccctctaccagctggtggcaaagcccatgcaggctctggaggtcctcctgctgctacggattgtctctgagagactgaaggaccactc

SEQ ID NO: 319730 - DNA, 120 bp, Artificial Sequence
  ENSG00000135476_21 (sequence is synthesized)
gaaggcagctggctcctcctgccacatcacccagctcctcctgaccctcggctgtcccagctatgcccagttacacctggaagaggcagcatcgagcctgaagcatctcgatcagactac

SEQ ID NO: 319731 - DNA, 120 bp, Artificial Sequence
  ENSG00000135476_22 (sequence is synthesized)
tgacacatacctgctcctttccctgacctgtgatctgcttcgaagtcaactctactggactcaccagaaggtgaccaagggtgtctctctgctgctgtctgtgcttcgggatcctgccct

SEQ ID NO: 319732 - DNA, 120 bp, Artificial Sequence
  ENSG00000135476_23 (sequence is synthesized)
ccagaagtcctccaaggcttggtacttgctgcgtgtccaggtcctgcagctggtggcagcttaccttagcctcccgtcaaacaacctctcacactccctgtgggagcagctctgtgccca

SEQ ID NO: 319733 - DNA, 120 bp, Artificial Sequence
  ENSG00000135476_24 (sequence is synthesized)
aggctggcagacacctgagatagctctcatagactcccataagctcctccgaagcatcatcctcctgctgatgggcagtgacattctctcaactcagaaagcagctgtggagacatcgtt

SEQ ID NO: 319734 - DNA, 120 bp, Artificial Sequence
  ENSG00000135476_25 (sequence is synthesized)
tttggactatggtgaaaatctggtacaaaaatggcaggttctttcagaggtgctgagctgctcagagaagctggtctgccacctgggccgcctgggtagtgtgagtgaagccaaggcctt

SEQ ID NO: 319735 - DNA, 120 bp, Artificial Sequence
  ENSG00000135476_26 (sequence is synthesized)
ttgcttggaggccctaaaacttacaacaaagctgcagataccacgccagtgtgccctgttcctggtgctgaagggcgagctggagctggcccgcaatgacattgatctctgtcagtcgga

SEQ ID NO: 319736 - DNA, 120 bp, Artificial Sequence
  ENSG00000135476_27 (sequence is synthesized)
ttgagtcttgcacagagtttggtggggtgactcagcacctggactctgtgaagaaggtccacctgcagaaggggaagcagcaggcccaggtcccctgtcctccacagctcccagaggagg

SEQ ID NO: 319737 - DNA, 120 bp, Artificial Sequence
  ENSG00000135476_28 (sequence is synthesized)
agctcttcctaagaggccctgctctagagctggtggccactgtggccaaggagcctggccccatagcaccttctacaaactcctccccagtcttgaaaaccaagccccagcccataccca

SEQ ID NO: 319738 - DNA, 120 bp, Artificial Sequence
  ENSG00000135476_29 (sequence is synthesized)
acttcctgtcccattcacccacctgtgactgctcgctctgcgccagccctgtcctcacagcagtctgtctgcgctgggtattggtcacggcaggggtgaggctggccatgggccaccaag

SEQ ID NO: 319739 - DNA, 120 bp, Artificial Sequence
  ENSG00000135476_30 (sequence is synthesized)
cccagggtctggatctgctgcaggtcgtgctgaagggctgtcctgaagccgctgagcgcctcacccaagctctccaagcttccctgaatcataaaacacccccctccttggttccaagcc

SEQ ID NO: 319740 - DNA, 120 bp, Artificial Sequence
  ENSG00000135476_31 (sequence is synthesized)
tcttggatgagatcttggctcaagcatacacactgttggcactggagggcctgaaccagccatcaaacgagagcctgcagaaggttctacagtcagggctgaagtttgtagcagcacgga

SEQ ID NO: 319741 - DNA, 120 bp, Artificial Sequence
  ENSG00000135476_32 (sequence is synthesized)
taccccacctagagccctggcgagccagcctgctcttgatttgggccctcacaaaactaggtggcctcagctgctgtactacccaactttttgcaagctcctggggctggcagccaccat

SEQ ID NO: 319742 - DNA, 120 bp, Artificial Sequence
  ENSG00000135476_33 (sequence is synthesized)
taataaaaagtgtccctggctcagagccctctaagactcagggccaaaaacgttctggacgagggcgccaaaagttagcctctgctcccctgcgcctcaataatacctctcagaaaggtc

SEQ ID NO: 319743 - DNA, 120 bp, Artificial Sequence
  ENSG00000135476_34 (sequence is synthesized)
tggaaggtagaggactgccctgcacacctaaacccccagaccggatcaggcaagctggccctcatgtccccttcacggtgtttgaggaagtctgccctacagagagcaagcctgaagtac

SEQ ID NO: 319744 - DNA, 120 bp, Artificial Sequence
  ENSG00000135476_35 (sequence is synthesized)
cccaggcccccagggtacaacagagagtccagacgcgcctcaaggtgaacttcagtgatgacagtgacttggaagaccctgtctcagctgaggcctggctggcagaggagcctaagagac

SEQ ID NO: 319745 - DNA, 120 bp, Artificial Sequence
  ENSG00000135476_36 (sequence is synthesized)
ggggcactgcttcccggggccgggggcgagcaaggaagggcctgagcctaaagacggatgccgtggttgccccaggtagtgcccctgggaaccctggcctgaatggcaggagccggaggg

SEQ ID NO: 319746 - DNA, 120 bp, Artificial Sequence
  ENSG00000135476_37 (sequence is synthesized)
ccaagaaggtggcatcaagacattgtgaggagcggcgtccccagagggccagtgaccaggccaggcctggccctgagatcatgaggaccatccctgaggaagaactgactgacaactgga

SEQ ID NO: 319747 - DNA, 120 bp, Artificial Sequence
  ENSG00000135476_38 (sequence is synthesized)
gaaaaatgagctttgagatcctcaggggctctgacggggaagactcagcctcaggtgggaagactccagctccgggccctgaggcagcttctggagaatgggagctgctgaggctggatt

SEQ ID NO: 319748 - DNA, 120 bp, Artificial Sequence
  ENSG00000135476_39 (sequence is synthesized)
ccagcaagaagaagctgcccagcccatgcccagacaaggagagtgacaaggaccttggtcctcggctccggctcccctcagcccccgtagccactggtctttctaccctggactccatct

SEQ ID NO: 319749 - DNA, 120 bp, Artificial Sequence
  ENSG00000135476_40 (sequence is synthesized)
gtgactccctgagtgttgctttccggggcattagtcactgtcctcctagtgggctctatgcccacctctgccgcttcctggccttgtgcctgggccaccgggatccttatgccactgctt

SEQ ID NO: 319750 - DNA, 120 bp, Artificial Sequence
  ENSG00000135476_41 (sequence is synthesized)
tccttgtcaccgagtctgtctccatcacctgtcgccaccagctgctcacccacctccacagacagctcagcaaggcccagaagcaccgaggatcacttgaaatagcagaccagctgcagg

SEQ ID NO: 319751 - DNA, 120 bp, Artificial Sequence
  ENSG00000135476_42 (sequence is synthesized)
ggctgagccttcaggagatgcctggagatgtccccctggcccgcatccagcgcctcttttccttcagggctttggaatctggccacttcccccagcctgaaaaggagagtttccaggagc

SEQ ID NO: 319752 - DNA, 120 bp, Artificial Sequence
  ENSG00000135476_43 (sequence is synthesized)
gcctggctctgatccccagtggggtgactgtgtgtgtgttggccctggccaccctccagcccggaaccgtgggcaacaccctcctgctgacccggctggaaaaggacagtcccccagtca

SEQ ID NO: 319753 - DNA, 120 bp, Artificial Sequence
  ENSG00000135476_44 (sequence is synthesized)
gtgtgcagattcccactggccagaacaagcttcatctgcgttcagtcctgaatgagtttgatgccatccagaaggcacagaaagagaacagcagctgtactgacaagcgagaatggtgga

SEQ ID NO: 319754 - DNA, 120 bp, Artificial Sequence
  ENSG00000135476_45 (sequence is synthesized)
cagggcggctggcactggaccacaggatggaggttctcatcgcttccctagagaagtctgtgctgggctgctggaaggggctgctgctgccgtccagtgaggagcccggccctgcccagg

SEQ ID NO: 319755 - DNA, 120 bp, Artificial Sequence
  ENSG00000135476_46 (sequence is synthesized)
aggcctcccgcctacaggagctgctacaggactgtggctggaaatatcctgaccgcactctgctgaaaatcatgctcagtggtgccggtgccctcacccctcaggacattcaggccctgg

SEQ ID NO: 319756 - DNA, 120 bp, Artificial Sequence
  ENSG00000135476_47 (sequence is synthesized)
cctacgggctgtgcccaacccagccagagcgagcccaggagctcctgaatgaggcagtaggacgtctacagggcctgacagtaccaagcaatagccaccttgtcttggtcctagacaagg

SEQ ID NO: 319757 - DNA, 120 bp, Artificial Sequence
  ENSG00000135476_48 (sequence is synthesized)
acttgcagaagctgccgtgggaaagcatgcccagcctccaagcactgcctgtcacccggctgccctccttccgcttcctactcagctactccatcatcaaagagtatggggcctcgccag

SEQ ID NO: 319758 - DNA, 120 bp, Artificial Sequence
  ENSG00000135476_49 (sequence is synthesized)
tgctgagtcaaggggtggatccacgaagtaccttctatgtcctgaaccctcacaataacctgtcaagcacagaggagcaatttcgagccaatttcagcagtgaagctggctggagaggag

SEQ ID NO: 319759 - DNA, 120 bp, Artificial Sequence
  ENSG00000135476_50 (sequence is synthesized)
tggttggggaggtgccaagacctgaacaggtgcaggaagccctgacaaagcatgatttgtatatctatgcagggcatggggctggtgcccgcttccttgatgggcaggctgtcctgcggc

SEQ ID NO: 319760 - DNA, 120 bp, Artificial Sequence
  ENSG00000135476_51 (sequence is synthesized)
tgagctgtcgggcagtggccctgctgtttggctgtagcagtgcggccctggctgtgcgtggaaacctggagggggctggcatcgtgctcaagtacatcatggctggttgccccttgtttc

SEQ ID NO: 319761 - DNA, 120 bp, Artificial Sequence
  ENSG00000135476_52 (sequence is synthesized)
tgggtaatctctgggatgtgactgaccgcgacattgaccgctacacggaagctctgctgcaaggctggcttggagcaggcccaggggccccccttctctactatgtaaaccaggcccgcc

SEQ ID NO: 319762 - DNA, 120 bp, Artificial Sequence
  ENSG00000135476_53 (sequence is synthesized)
aagctccccgactcaagtatcttattggggctgcacctatagcctatggcttgcctgtctctctgcggtaaccccatggagctgtcttattgatgctagaagcctcataactgttctacc

SEQ ID NO: 319763 - DNA, 120 bp, Artificial Sequence
  ENSG00000135476_54 (sequence is synthesized)
tccaaggttagatttaatccttaggataactcttttaaagtgattttccccagtgttttatatgaaacatttccttttgatttaacctcagtataataaagatacatcatttaaaccctg

SEQ ID NO: 319764 - DNA, 120 bp, Artificial Sequence
  ENSG00000135476_55 (sequence is synthesized)
ttgctgcccgccttgaaggtgggggtgctgcctggctcgggatacacctggctttccaaactgagctgttttgtgtttgccttttgaagagatggataagagttcctgtccaaccctcca

SEQ ID NO: 319765 - DNA, 64 bp, Artificial Sequence
  ENSG00000135476_56 (sequence is synthesized)
attaccggcgtgagccaccatgctcagcctctttttttttttgagacggactctcactctgtcg

SEQ ID NO: 319766 - DNA, 75 bp, Artificial Sequence
  ENSG00000135476_57 (sequence is synthesized)
agcaattacacccagcttatttatgtatttttagtaaagacggggttttaccatgatggccaggctggtctcaaa

SEQ ID NO: 319767 - DNA, 120 bp, Artificial Sequence
  ENSG00000135476_58 (sequence is synthesized)
tgggattacagacgtgagccactgtgccaggccaacatctttcacagcaagacctatttccaagtctccctttgtttcagacagagacattttccttaactctaatgtttcttttacctt

SEQ ID NO: 319768 - DNA, 120 bp, Artificial Sequence
  ENSG00000135476_59 (sequence is synthesized)
atgtttcttttaccttttcatcccaccttctgttccctcattttctccctccttccacacccaagagtcgctgcccctgatctagagtgttggctgtcatgtgagaagttagttctgaaa

SEQ ID NO: 319769 - DNA, 120 bp, Artificial Sequence
  ENSG00000135476_60 (sequence is synthesized)
tcttccagggtcctgtgtgatggtgcctgatggtgcctccactacgccacctgctgtcacaaggtgtcttgtcactgaagacctcttagcccttcaccctttcactctgatctcaggtga

SEQ ID NO: 319770 - DNA, 120 bp, Artificial Sequence
  ENSG00000135476_61 (sequence is synthesized)
tccaggctgggttcggatctggatccagtagcctctgaacctgtgtttgaaccccagcactctgtctatgagctgtgtgcaggtcacttaacctctccaagcttctattccttctgtaaa

SEQ ID NO: 319771 - DNA, 120 bp, Artificial Sequence
  ENSG00000135476_62 (sequence is synthesized)
aatggggtttagggagcatggtggaataagttgatgcctgttagttgcatggcaccccacttggcacattgcccttcataaatggtagttgctgtttgccatgtgggagatgagataggg

SEQ ID NO: 319772 - DNA, 120 bp, Artificial Sequence
  ENSG00000135476_63 (sequence is synthesized)
cagtggtatgcgggcagccttctggccggctcctctgtcctcttctgcatcttcttacttgggagctgggtgaaggagttttaggcattggttagtttacatagatttatgacccttatg

SEQ ID NO: 319773 - DNA, 120 bp, Artificial Sequence
  ENSG00000135476_64 (sequence is synthesized)
tcataccttttcacctgttagcatcttacatcaggaaggtttgttgttttttttaaacctcaactttgaattaccagcaaattcagtgtctttcctcagaggtgagttcagatgactggg

SEQ ID NO: 319774 - DNA, 120 bp, Artificial Sequence
  ENSG00000135476_65 (sequence is synthesized)
gtcttctgtgctaacatgaaacatattcacatgatttgagtgcctcactttgttagttgctgtgagggacacaaagtacaagtcatggtctctgtgcacagggagctattagagcaaggg

SEQ ID NO: 319775 - DNA, 120 bp, Artificial Sequence
  ENSG00000135476_66 (sequence is synthesized)
agagcaccttgacctctagtgaccagggaaggcttcttgatgctggcttgagtgatggataggaattgagtgcccaagacagggaagggaattcctttaacagctgaatgagtctggctg

SEQ ID NO: 319776 - DNA, 120 bp, Artificial Sequence
  ENSG00000135476_67 (sequence is synthesized)
agattcccactggccagaacaaggtaggattcctgggccatggagcaaagttgggctggattgggcttcgggtcaagctgctcacattctgtgttgagggagggagagatggtgatcacg

SEQ ID NO: 319777 - DNA, 120 bp, Artificial Sequence
  ENSG00000135476_68 (sequence is synthesized)
ctcccaaagtgctgggattaccggcgcaagccaccgcgctgggcaagaaccagtgttcttaagcaagaatacctgtgaactgatgcattggcgggattggcaagcaagatgagtcataga

SEQ ID NO: 319778 - DNA, 120 bp, Artificial Sequence
  ENSG00000135476_69 (sequence is synthesized)
gggattggcaagcaagatgagtcatagaggggcttgggtttcatcttaactgagatgataagcctctaaaggatttaagtggaggcatgacagcagacaggcattttggatttccctgac

SEQ ID NO: 319779 - DNA, 120 bp, Artificial Sequence
  ENSG00000135476_70 (sequence is synthesized)
caggctgctatagtattctaggcagggaagggtgggctgaactgaagcagctgcacgagggatggaatgcagtggatcggtgcgagaagccaaggattaacctgttgcacaggtgcttcc

SEQ ID NO: 319780 - DNA, 120 bp, Artificial Sequence
  ENSG00000135480_0 (sequence is synthesized)
agcgagtgcgcgctcctcctcgcccgccgctaggtccatcccggcccagccaccatgtccatccacttcagctccccggtattcacctcgcgctcagccgccttctcgggccgcggcgcc

SEQ ID NO: 319781 - DNA, 120 bp, Artificial Sequence
  ENSG00000135480_1 (sequence is synthesized)
ccttctcgggccgcggcgcccaggtgcgcctgagctccgctcgccccggcggccttggcagcagcagcctctacggcctcggcgcctcacggccgcgcgtggccgtgcgctctgcctatg

SEQ ID NO: 319782 - DNA, 120 bp, Artificial Sequence
  ENSG00000135480_2 (sequence is synthesized)
cggcatccgcgaggtcaccattaaccagagcctgctggccccgctgcggctggacgccgacccctccctccagcgggtgcgccaggaggagagcgagcagatcaagaccctcaacaacaa

SEQ ID NO: 319783 - DNA, 120 bp, Artificial Sequence
  ENSG00000135480_3 (sequence is synthesized)
gcctccttcatcgacaaggtgcggtttctggagcagcagaacaagctgctggagaccaagtggacgctgctgcaggagcagaagtcggccaagagcagccgcctcccagacatctttgag

SEQ ID NO: 319784 - DNA, 120 bp, Artificial Sequence
  ENSG00000135480_4 (sequence is synthesized)
gcccagattgctggccttcggggtcagcttgaggcactgcaggtggatgggggccgcctggaggcggagctgcggagcatgcaggatgtggtggaggacttcaagaataagtacgaagat

SEQ ID NO: 319785 - DNA, 120 bp, Artificial Sequence
  ENSG00000135480_5 (sequence is synthesized)
gaaattaaccaccgcacagctgctgagaatgagtttgtggtgctgaagaaggatgtggatgctgcctacatgagcaaggtggagctggaggccaaggtggatgccctgaatgatgagatc

SEQ ID NO: 319786 - DNA, 120 bp, Artificial Sequence
  ENSG00000135480_6 (sequence is synthesized)
tgtggtgctgtccatggacaacagtcgctccctggacctggacggcatcatcgctgaggtcaaggcgcagtatgaggagatggccaaatgcagccgggctgaggctgaagcctggtacca

SEQ ID NO: 319787 - DNA, 120 bp, Artificial Sequence
  ENSG00000135480_7 (sequence is synthesized)
gaccaagtttgagaccctccaggcccaggctgggaagcatggggacgacctccggaatacccggaatgagatttcagagatgaaccgggccatccagaggctgcaggctgagatcgacaa

SEQ ID NO: 319788 - DNA, 120 bp, Artificial Sequence
  ENSG00000135480_8 (sequence is synthesized)
catcaagaaccagcgtgccaagttggaggccgccattgccgaggctgaggagcgtggggagctggcgctcaaggatgctcgtgccaagcaggaggagctggaagccgccctgcagcgggg

SEQ ID NO: 319789 - DNA, 120 bp, Artificial Sequence
  ENSG00000135480_9 (sequence is synthesized)
caagcaggatatggcacggcagctgcgtgagtaccaggaactcatgagcgtgaagctggccctggacatcgagatcgccacctaccgcaagctgctggagggcgaggagagccggttggc

SEQ ID NO: 319790 - DNA, 120 bp, Artificial Sequence
  ENSG00000135480_10 (sequence is synthesized)
tggagatggagtgggagccgtgaatatctctgtgatgaattccactggtggcagtagcagtggcggtggcattgggctgaccctcgggggaaccatgggcagcaatgccctgagcttctc

SEQ ID NO: 319791 - DNA, 120 bp, Artificial Sequence
  ENSG00000135480_11 (sequence is synthesized)
cagcagtgcgggtcctgggctcctgaaggcttattccatccggaccgcatccgccagtcgcaggagtgcccgcgactgagccgcctcccaccactccactcctccagccaccacccacaa

SEQ ID NO: 319792 - DNA, 120 bp, Artificial Sequence
  ENSG00000135480_12 (sequence is synthesized)
tcacaagaagattcccacccctgcctcccatgcctggtcccaagacagtgagacagtctggaaagtgatgtcagaatagcttccaataaagcagcctcattctgaggcctgagtgatcca

SEQ ID NO: 319793 - DNA, 120 bp, Artificial Sequence
  ENSG00000135480_13 (sequence is synthesized)
aggtcctggcatgggctgatgggagaaaggtcctggatgtgcacagagcctgtggagggagactcaggctggctggccagaagaaagccaccactggttccacattgatactgagcactc

SEQ ID NO: 319794 - DNA, 120 bp, Artificial Sequence
  ENSG00000135480_14 (sequence is synthesized)
tgcttgcacctggttctggctgcagggcgctgtccctgggagctcatcattcattgcagggacagaggacagcagaagaccttataatgactcacatggccctttcccacccactccaac

SEQ ID NO: 319795 - DNA, 120 bp, Artificial Sequence
  ENSG00000135480_15 (sequence is synthesized)
gggcccaaggcataggtgggaaatggaggccctgagacattgcctggggtcaggtggccagtggatagaagggccaaggtgaacactcccttcctgcatgcctcctcgctccttttacaa

SEQ ID NO: 319796 - DNA, 120 bp, Artificial Sequence
  ENSG00000135480_16 (sequence is synthesized)
ggctgaaggcaggctggaagtgtggggcaagaaggaaaaatcaatgatcctgcttggggcctggaaggagagagggctgagagcgcttccctcccacgctaggaaagagccgtcctcact

SEQ ID NO: 319797 - DNA, 120 bp, Artificial Sequence
  ENSG00000135480_17 (sequence is synthesized)
aaaataaatgggcaggaatatgagtggagggtccgggaggtgagggtccagggtaagcattcccaaggtccctgggattccgatgcctactggagtggggaggggaggagccagaggtgc

SEQ ID NO: 319798 - DNA, 120 bp, Artificial Sequence
  ENSG00000135480_18 (sequence is synthesized)
cagcctagtttctatgggaaatgaagtaggaaggaacgcagccagggaaactagctgggccaggaggggtcagacccctgaacaagtgagctgatctctcaaggaggagctggatcggtg

SEQ ID NO: 319799 - DNA, 120 bp, Artificial Sequence
  ENSG00000135480_19 (sequence is synthesized)
tgagggagagcgggatggcgctcctgcctactccggaccatccctgcttggactgaaagcctgggcttcggcggggcgggcgggcagagggcggagggcggccccaggaggggcctggca

SEQ ID NO: 319800 - DNA, 120 bp, Artificial Sequence
  ENSG00000135480_20 (sequence is synthesized)
tccaggcctatagccaggtgtctaccaccactgaggggcgtcatggggagctacaaggggtctccagaggcagcggggatggcgttggctctgggggcaccagtgtgacagggcagggca

SEQ ID NO: 319801 - DNA, 120 bp, Artificial Sequence
  ENSG00000135480_21 (sequence is synthesized)
ccgagctgtggccgaggggcagagtgtcagagggcctcctggggaatgctgtctctggcagagaggcagactgcctccactgagggaagaggatctgaggatagagaatggccggatggg

SEQ ID NO: 319802 - DNA, 120 bp, Artificial Sequence
  ENSG00000135480_22 (sequence is synthesized)
cccactgttctggcaggcaccagtggtttaagtctgtggtgctcagccctggagaaaatcccaagatgggaggacagggcagaggaaatagatatggattaatcattataatagctaaaa

SEQ ID NO: 319803 - DNA, 120 bp, Artificial Sequence
  ENSG00000135480_23 (sequence is synthesized)
tatggcaagtacttacacagtactaggctcatgtaattattgactcatgtaatccacagaacagccctattagataggcatcattattacccccattttgttttatttaatttaatttat

SEQ ID NO: 319804 - DNA, 120 bp, Artificial Sequence
  ENSG00000135480_24 (sequence is synthesized)
tcttggaacccagtcataccgcttccttcaagtattgcctttggctgtggctgctttacatgacaacggagtggagcagttgaggcagagactacatggcccacgagcctaaagttttta

SEQ ID NO: 319805 - DNA, 120 bp, Artificial Sequence
  ENSG00000135480_25 (sequence is synthesized)
ctatctgaagctctaagaaaaagtttgcctgcccagaaccccaagctgttatttcaggacccacaaaatggattacttacagacatttacagcaccaacgccctcacacaaccttatagg

SEQ ID NO: 319806 - DNA, 120 bp, Artificial Sequence
  ENSG00000135480_26 (sequence is synthesized)
gaaagcaaagagacagaaattagttgtggggagcaaagctggtgaaatctgtttaacctgcaaattctctcctccaattagcgttgatgcacattccaagtaaataatatgcagacatgc

SEQ ID NO: 319807 - DNA, 120 bp, Artificial Sequence
  ENSG00000135480_27 (sequence is synthesized)
atgggacaaaggaccacaggatcctctcacctgagcagcccatggggacctctggccaaggcctgcctgagctgtccaagaggaagtctgcacagcctgtcctgtgggatgtggatgctg

SEQ ID NO: 319808 - DNA, 120 bp, Artificial Sequence
  ENSG00000135480_28 (sequence is synthesized)
ggctggagccccattcaatcagtcaacgattcacgaattattttgacatatattaagcaatgacttctccaggcctcatactggggataaaagtatcaataggccacagacacctttagg

SEQ ID NO: 319809 - DNA, 120 bp, Artificial Sequence
  ENSG00000135480_29 (sequence is synthesized)
ggggcatgcaggggtggccagctgaggccaaactcaggatgtggagcaggaggttcccatctcccggccaaagctggtgccactgtctcagacccccttgtgagatctccagcacagaat

SEQ ID NO: 319810 - DNA, 120 bp, Artificial Sequence
  ENSG00000135480_30 (sequence is synthesized)
gttcttggccaggtcctggcatgggctgatgggagaaaggtcctggatgtgcacagagcctgtggagggagactcaggctggctggccagaagaaagccaccactggttccacattgata

SEQ ID NO: 319811 - DNA, 120 bp, Artificial Sequence
  ENSG00000135482_0 (sequence is synthesized)
gtcgaagctagaggaccggcaggcggcagcagcaactacggcggcggcggcagaacccagcagtgatgtggaggtggagacccacaggagccccggacttcacctgagctacctcagtgg

SEQ ID NO: 319812 - DNA, 120 bp, Artificial Sequence
  ENSG00000135482_1 (sequence is synthesized)
tcaccaagagtggcaagataaagaaaaccctgagttgggcgggaccaggatgcctgaccgggacagctatgccaacggtaccgggagcagcggtggaggccctggaggtggtggcagcga

SEQ ID NO: 319813 - DNA, 120 bp, Artificial Sequence
  ENSG00000135482_2 (sequence is synthesized)
ggaggccagtggggcaggggtaggcagtggcggggccagctcagatgccatctgtagagacttcttgaggaatgtgtgcaagcgaggcaagcgttgccgatatcgccacccagacatgag

SEQ ID NO: 319814 - DNA, 120 bp, Artificial Sequence
  ENSG00000135482_3 (sequence is synthesized)
cgaggtgtccaacttgggggtgagcaaaaacgagttcatcttctgccatgacttccagaacaaggagtgtagccgcccaaattgccgtttcatccatggctccaaggaggatgaggatgg

SEQ ID NO: 319815 - DNA, 120 bp, Artificial Sequence
  ENSG00000135482_4 (sequence is synthesized)
ctataagaagacaggagagcttcccccacggctgaggcagaaagtagcagctggccttggcctttcaccggctgacctaccaaatggcaaggaggaggtccctatctgccgtgactttct

SEQ ID NO: 319816 - DNA, 120 bp, Artificial Sequence
  ENSG00000135482_5 (sequence is synthesized)
caagggtgactgtcagagaggagccaagtgcaagttccgtcacctgcaacgggattttgagtttgatgctcggggtggaggaggcactggtgggggctcaacaggctcagtcctcccagg

SEQ ID NO: 319817 - DNA, 120 bp, Artificial Sequence
  ENSG00000135482_6 (sequence is synthesized)
acgacgtcatgatctctatgatatctatgaccttcctgacaggggctttgaggaccatgagccaggcccaaaacgccggcgaggtggatgctgcccccctgatggccctcattttgagtc

SEQ ID NO: 319818 - DNA, 120 bp, Artificial Sequence
  ENSG00000135482_7 (sequence is synthesized)
atatgaatatagtttggctccaccgcgaggggtggagtgcagactgctagaggaggagaatgccatgctcaggaagcgggtagaggagttaaagaagcaggtcagcaacctgctggccac

SEQ ID NO: 319819 - DNA, 120 bp, Artificial Sequence
  ENSG00000135482_8 (sequence is synthesized)
caatgaggtactactggaacaaaatgctcagttccgcaatcaggccaaggtcataaccctgagctccactgcaccagcgactgagcagactctggcccccactgtgggcactgttgccac

SEQ ID NO: 319820 - DNA, 120 bp, Artificial Sequence
  ENSG00000135482_9 (sequence is synthesized)
ttttaaccatggcattgcccagactcacactactctcagcagccaggctctacagcctcgtccagtgtcccagcaagaactggtggcccctgctggagctccagctgctcccccaactaa

SEQ ID NO: 319821 - DNA, 120 bp, Artificial Sequence
  ENSG00000135482_10 (sequence is synthesized)
tgctgcacctcctgctgctccaccacccccacccccacacttgaccccagagatcacgccactgtcagctgccctggctcaaacaattgcccagggaatggcacctccacctgtctccat

SEQ ID NO: 319822 - DNA, 120 bp, Artificial Sequence
  ENSG00000135482_11 (sequence is synthesized)
ggctcctgtggctgtatctgtggctcctgtggcccctgtggctgtatcgatggcccaacccttggcaggaatcacaatgagccacaccaccactcccatggtgacttaccctatcgcttc

SEQ ID NO: 319823 - DNA, 120 bp, Artificial Sequence
  ENSG00000135482_12 (sequence is synthesized)
ccagagcatgcgcatcacggccatgccacactgatggggctaatggacactcccctggtatagcctcgcagggctggggtcagggggcccttgcccactcacctagccttccccatccct

SEQ ID NO: 319824 - DNA, 120 bp, Artificial Sequence
  ENSG00000135482_13 (sequence is synthesized)
gtctgaagggctcccttgagaactaggacaagagactacaaggagtatgtcctgaggaggggttgggatggtgtgttttctctcacctcccttttatgagggtcctcttgtccatcttca

SEQ ID NO: 319825 - DNA, 120 bp, Artificial Sequence
  ENSG00000135482_14 (sequence is synthesized)
agcctcacagtgggggcttgcagaggagtgcagactgaagccagcagagaggaaggactgactgaggggctgtgtcctcttatgggaatttgggaacatccctcgtcttgtcctctcttc

SEQ ID NO: 319826 - DNA, 120 bp, Artificial Sequence
  ENSG00000135482_15 (sequence is synthesized)
tgcacagcacaggttccagcactggttttagaagaaaaaaataccctgcccagagggaaagccaggaaagattgggaagtgggtggtcaggagagaaggcctgataggagccttcagaca

SEQ ID NO: 319827 - DNA, 120 bp, Artificial Sequence
  ENSG00000135482_16 (sequence is synthesized)
atttgggtcctagttgcttgggttggacaatacaggaattgcttctgggccctgggaaagctgggaccatagtgctccagcccaaagactaggggagcattcattaccctagtttgacct

SEQ ID NO: 319828 - DNA, 120 bp, Artificial Sequence
  ENSG00000135482_17 (sequence is synthesized)
gaaaatccatagggcagggcccactactttccaaagaaataaaagaacaattatttttaacaaatggaggcagtgaaaacttgcttagctattctgtgtggaagatgggagcagtaaata

SEQ ID NO: 319829 - DNA, 120 bp, Artificial Sequence
  ENSG00000135482_18 (sequence is synthesized)
gatctcatgccaaaatgggataaagaccccagcctcacatagctttggtaagatggatagaagccagtgaagaagggtagggacccagaacaagaccaaatggggctttggggaaggcac

SEQ ID NO: 319830 - DNA, 120 bp, Artificial Sequence
  ENSG00000135482_19 (sequence is synthesized)
tttatggggtaaaagctttggagccacccagtctagttttaaaaatagtcccatctgtttctggtctctgtctgtatgtgctattcccaggttgcctcagtaaccagggctcctagggtc

SEQ ID NO: 319831 - DNA, 120 bp, Artificial Sequence
  ENSG00000135482_20 (sequence is synthesized)
atttagcagggcaggcagtaaggagagtgtatttgctgaaatgcggatgggatgttacatagttgacagatccttattcaaacagagcaggacaggtggagttgatggccattgagttga

SEQ ID NO: 319832 - DNA, 120 bp, Artificial Sequence
  ENSG00000135482_21 (sequence is synthesized)
tggcagttgccgctcagttgatggcagttaatgtccctcctaccccaccccttcagtggccagttcctgaagccttcaaggcttgggaggtctgggaaaagagagtccttctagggacac

SEQ ID NO: 319833 - DNA, 120 bp, Artificial Sequence
  ENSG00000135482_22 (sequence is synthesized)
aagcctcagggtccatccctttcctctgtctccacataggaccagaagttttaaatctacttaagtcagtaaggccaggggccccaatagtcaaacctcagttcctcctcagctcacggc

SEQ ID NO: 319834 - DNA, 120 bp, Artificial Sequence
  ENSG00000135482_23 (sequence is synthesized)
tgatgtagggaaaacaactcaggtgtctagtctaatgggacagtagatttgggggtagagagtgatcctggattgtgttccccctcatcatgtctcctgctacctcttgctttcttgtct

SEQ ID NO: 319835 - DNA, 120 bp, Artificial Sequence
  ENSG00000135482_24 (sequence is synthesized)
ggttgatcactcaggtcacatctgggattggagatggtgggctaggtcaaggccagtcattaaaaaaaaaagcctaaagactaaaagtgggctaacattgtggattttagaaacaacaca

SEQ ID NO: 319836 - DNA, 84 bp, Artificial Sequence
  ENSG00000135482_25 (sequence is synthesized)
ctaaaagtgggctaacattgtggattttagaaacaacacattgataagcttaatgttttttgggacacagtcaccagaccggag

SEQ ID NO: 319837 - DNA, 62 bp, Artificial Sequence
  ENSG00000135482_26 (sequence is synthesized)
tgcagtggcgcaatctcggttcactgtaacctgcgcctcctgggttcaagcgattctcttgc

SEQ ID NO: 319838 - DNA, 81 bp, Artificial Sequence
  ENSG00000135482_27 (sequence is synthesized)
aattctagactattaaaagagatggtttaagagcatttagagaagaatgtaaccatagataccaacatgaattctcagtca

SEQ ID NO: 319839 - DNA, 120 bp, Artificial Sequence
  ENSG00000135482_28 (sequence is synthesized)
gaagaatgtaaccatagataccaacatgaattctcagtcaaatcctgactgactttatttcctccttgccaggttatctccaaagaggtagatttgggaaattttagacattgtatgtct

SEQ ID NO: 319840 - DNA, 120 bp, Artificial Sequence
  ENSG00000135482_29 (sequence is synthesized)
tggtaattgagcaagttgggtttaatgctcattgcagtgagggggagggctcaccattggggataacgtggtgtgtctcagcatgagggtgttaggaacgacttagagaacttagacttt

SEQ ID NO: 319841 - DNA, 120 bp, Artificial Sequence
  ENSG00000135482_30 (sequence is synthesized)
ggttaagtgattttggggaagattcaagaaagtgggtgttcttttggattgggtgctgttaagggaatccaggataattgggtagcttgtctagaagaagggcagacaagtgaacctaag

SEQ ID NO: 319842 - DNA, 120 bp, Artificial Sequence
  ENSG00000135482_31 (sequence is synthesized)
cacagtcgatgatgaagtcactcactagctgggaaaggggatgtttgctgttttgtggtttgcacactgaccttgttttgtgcttaaacaaaattgtgtagtgattttgttttttgtctc

SEQ ID NO: 319843 - DNA, 120 bp, Artificial Sequence
  ENSG00000135482_32 (sequence is synthesized)
acttcatcgcagtcactgagtgaccttgtctgatgctggtgttttgtgagattgtttgtgtccaagagaactcattggctacctgtgagcaccaggtcagccctaacagctctgaagcct

SEQ ID NO: 319844 - DNA, 120 bp, Artificial Sequence
  ENSG00000135482_33 (sequence is synthesized)
ggctgtgtcaggccagttcccagattacaggagctactttcctctctctcacctgctaagtcatcacagataagaggaaaattacgggtcagttaatcgtagcattttttccatgcaaat

SEQ ID NO: 319845 - DNA, 120 bp, Artificial Sequence
  ENSG00000135482_34 (sequence is synthesized)
ggctctggttaaaaaataatgagaaaaaaatagtagcatttggtagaatcaaactgaacacttgtacttagtgttggttagcgcatttatgttagagaaatctctgttctctagtgataa

SEQ ID NO: 319846 - DNA, 120 bp, Artificial Sequence
  ENSG00000135482_35 (sequence is synthesized)
gcccaagggctatgttttattgtaaaaagaaaaaacccaactcgggtaaacatgtaaaaaacccatttatcaacagtaacacaggaagagctaaataatattcaaagtgtctgtaacttg

SEQ ID NO: 319847 - DNA, 120 bp, Artificial Sequence
  ENSG00000135482_36 (sequence is synthesized)
aattgactaaaacactggagcactctcacactaaaaaattgcttagatcttgaactagtttgaggaacaatgttagagatttatattagcaataattcacatgagaacaaactgggactt

SEQ ID NO: 319848 - DNA, 120 bp, Artificial Sequence
  ENSG00000135482_37 (sequence is synthesized)
ccagttggctgcaaaaaaatagaatcttagccctcaagatgtccatttataaatatttattaagagcctgctatgttctaggcatctttctaggagctccataagggtagtagaaccttg

SEQ ID NO: 319849 - DNA, 120 bp, Artificial Sequence
  ENSG00000135482_38 (sequence is synthesized)
gtaatagattacaaatacagcagttctatgttctgcctaagtgtaaccacttagtagtgtgttgttctaaatgtaatttttaaagagggccattgacaaaccagtgtgttgctagaaaaa

SEQ ID NO: 319850 - DNA, 120 bp, Artificial Sequence
  ENSG00000135482_39 (sequence is synthesized)
aaaggctggcaagagaaagcttcaaatagaagtcttcaaatatttgaagggctgcccagtggaggaagatcctgtttgctacacaggaagtaaaaagggatttctagaataatggctaac

SEQ ID NO: 319851 - DNA, 89 bp, Artificial Sequence
  ENSG00000135482_40 (sequence is synthesized)
tgagacggagtctagctgtgtggcccaggcttcactctgcctccagggtttacgccattctgctgcctcagcctccagagtagctggga

SEQ ID NO: 319852 - DNA, 120 bp, Artificial Sequence
  ENSG00000135482_41 (sequence is synthesized)
ctgggattacaggcgttgagccaccgcacccagccggctagcatttgttgactgcttaatataagccaaggctctgtgctaggcactttacatgcaacatctcattgacacaatgggtaa

SEQ ID NO: 319853 - DNA, 120 bp, Artificial Sequence
  ENSG00000135482_42 (sequence is synthesized)
ctcattgacacaatgggtaatattattgtacccattttacagaggagaaagcaggcttaaaaagtaacctgcccagggttctgcaagtaaggaatggggccaggaatctattcaggcagt

SEQ ID NO: 319854 - DNA, 120 bp, Artificial Sequence
  ENSG00000135482_43 (sequence is synthesized)
gggccaggaatctattcaggcagtctcactccagacgacaaaagaaagttctaatgatatagccatccaacaaagcgatcactacttggcagtaattttttttttttttttttgagacgg

SEQ ID NO: 319855 - DNA, 68 bp, Artificial Sequence
  ENSG00000135482_44 (sequence is synthesized)
tggcgtgatctcggcccactgcagtaactgggattacaggtacatgccaccatgctcggctaattttt

SEQ ID NO: 319856 - DNA, 120 bp, Artificial Sequence
  ENSG00000135482_45 (sequence is synthesized)
gccaccgcgactggcttggcagtaacttttgaggaataaagaatacagaaggagtttcctcaaatcttgttgcccttcccatctttgtgagctgagatcagagtaccgtatctcaccctc

SEQ ID NO: 319857 - DNA, 120 bp, Artificial Sequence
  ENSG00000135482_46 (sequence is synthesized)
tgcctcttggaggtgattatggtttacatataaatgcagattgcaagtccaggaagtttactctctctcctcctgtaggcctcatcctgtaagacacttcctctaacaaatgggcatccc

SEQ ID NO: 319858 - DNA, 120 bp, Artificial Sequence
  ENSG00000135482_47 (sequence is synthesized)
ttcctgttgtccacttactgcttatcaccaccaggtggcacctgggcagcagaattgtcagtgggcggggacccaccctgtttacttgtgttggtaactgcattgcagctgctgatcctg

SEQ ID NO: 319859 - DNA, 120 bp, Artificial Sequence
  ENSG00000135482_48 (sequence is synthesized)
tggctcctgggccccagctgggacaagaacttcctgaggatgaagttttatcccctatataatttctgatgatctggatgaggtgaggaagggagaagtttggaaaagaacctccatagg

SEQ ID NO: 319860 - DNA, 120 bp, Artificial Sequence
  ENSG00000135482_49 (sequence is synthesized)
tcaccctctccattcccccattctcaggaacctccttgcctactccagtgcttggcaaatttcagtttatagagaggtttctctctaaggttcatccatgttccttctgtagttctgctt

SEQ ID NO: 319861 - DNA, 120 bp, Artificial Sequence
  ENSG00000135482_50 (sequence is synthesized)
tatcagttggtgagcaggtcactcataattcctccaatttccttgtttcccttttctacctgcttacctctgggaatatggaggatataggagacagaatattgtttcttaaatagttct

SEQ ID NO: 319862 - DNA, 120 bp, Artificial Sequence
  ENSG00000135482_51 (sequence is synthesized)
gcaaactgaatgaagcagtcaagatactgctagccctagggaagtagagaaaaggaagtgaaaaaatttaagtgatagaggctgagcagggacaggttttaagcagctttggtaaacaca

SEQ ID NO: 319863 - DNA, 120 bp, Artificial Sequence
  ENSG00000135482_52 (sequence is synthesized)
ggctgatgaaatctatgccctgcagaaccagataaaatttatcagctgcaggcctcatcctgtaagacacttcctctaagaaatggctagtttcttcccagtgatcaaccccagttcttc

SEQ ID NO: 319864 - DNA, 120 bp, Artificial Sequence
  ENSG00000135482_53 (sequence is synthesized)
tgctgcatctgacagatttacataatatgccccatatatactgcattaaaaggtaatcatcttatgaccaacacttccctcatcaacttccaattagtctagttcctagatcctaggaca

SEQ ID NO: 319865 - DNA, 120 bp, Artificial Sequence
  ENSG00000135482_54 (sequence is synthesized)
acactccacctctaacgccagttaactagtaacaatagtcatcggtgtaccctgcactttttccttcctaaacctacaccgtacactgtgggactgcactagttctgcacctgactgtat

SEQ ID NO: 319866 - DNA, 120 bp, Artificial Sequence
  ENSG00000135482_55 (sequence is synthesized)
ggcaaaccttccttctaactcaggcaaatgtgaaaaggaattgtctttcccttactcttgatccctcattttagtgtcctagaagttcttcagggtcagaaaattattggaaaatgtaat

SEQ ID NO: 319867 - DNA, 120 bp, Artificial Sequence
  ENSG00000135482_56 (sequence is synthesized)
aatttgcgctgcctccctcccttttggagccaactagtcttacatccatcctctaagatagagatgacttactaactcttggaaatttccaaaaagaaataaagcctcactttctattca

SEQ ID NO: 319868 - DNA, 120 bp, Artificial Sequence
  ENSG00000135482_57 (sequence is synthesized)
aaggccccccagaaccgagctggctcgtcctcacaccccagggcagtgccccttttctgagtgaccccgcatcgcgagcaaacgccagcttcgtgacgtcacaaccctgcccatcccctc

SEQ ID NO: 319869 - DNA, 120 bp, Artificial Sequence
  ENSG00000135482_58 (sequence is synthesized)
agcttgatgacacctggagctccagctccccgcttcacttcgcgcgcccttagtgtcccattcacgtagcccacggctgagcgccggcggcactgcacggaacctgccaagctagaagac

SEQ ID NO: 319870 - DNA, 120 bp, Artificial Sequence
  ENSG00000135482_59 (sequence is synthesized)
ttgctgcgggaaaactcctaggacttctttcgcaaactctagggtgttgggaagcgtcacaatcactgccttcaagtctaatcggccatcccaatgcactgtcagacgctgcctttttga

SEQ ID NO: 319871 - DNA, 120 bp, Artificial Sequence
  ENSG00000135482_60 (sequence is synthesized)
ctctttgtcgaagctagaggaccggcaggcggcagcagcaactacggcggcggcggcaggtgaagttcagtttgaaccctgaggaaatcctcacgttctcgaagctttgccgttttgtca

SEQ ID NO: 319872 - DNA, 120 bp, Artificial Sequence
  ENSG00000135482_61 (sequence is synthesized)
gatttcttgtgacaaccaccccatagtcctccactcttactccttcttccacccaagtctctgtttttttcctgctcagaacccagcagtgatgtggaggtggagacccacaggagcccc

SEQ ID NO: 319873 - DNA, 120 bp, Artificial Sequence
  ENSG00000135482_62 (sequence is synthesized)
gttcactcagggctggttttccaacccctcctcccagtccctccgaattagttttactcttcttactggcaacttctcccttggacaggtgaagttcagtttgaaccctgaggaaatcct

SEQ ID NO: 319874 - DNA, 120 bp, Artificial Sequence
  ENSG00000135482_63 (sequence is synthesized)
ctttgtcgaagctagaggaccggcaggcggcagcagcaactacggcggcggcggcagaacccagcagtgatgtggaggtggagacccacaggagccccggacttcacctgagctacctca

SEQ ID NO: 319875 - DNA, 120 bp, Artificial Sequence
  ENSG00000135482_64 (sequence is synthesized)
ggtatcaattctgggagagtggggtggggaggagcatcataactaattatctgctgctggtgcgacttgcaacgtgagccaggcttggatagatggcatttgtacttcacctggtcattc

SEQ ID NO: 319876 - DNA, 120 bp, Artificial Sequence
  ENSG00000135482_65 (sequence is synthesized)
taactctggcctctggtttggttagttcattttagggagatctgaaggcaaagtcacagtagtggggtgggggtaggtcaaggccaaaggaattaggaaagattcccttattctcaaagg

SEQ ID NO: 319877 - DNA, 120 bp, Artificial Sequence
  ENSG00000135482_66 (sequence is synthesized)
gaacaatatgaagttttcctatttcagcagcagggggagcctgaacaccgcataggaaaggcttgggaggtcagacacgtggtagcagggactccaggtcttactgggggtggagagagg

SEQ ID NO: 319878 - DNA, 120 bp, Artificial Sequence
  ENSG00000135486_0 (sequence is synthesized)
aaagctaggacaaactcccgccaacacgcaggcgccgtaggttcactgcctactcctgcccgccatttcacgtgttctcagaggcaggtggaacttcttaatgcgcctgcgcaaaactcg

SEQ ID NO: 319879 - DNA, 120 bp, Artificial Sequence
  ENSG00000135486_1 (sequence is synthesized)
ccattttactacacgtgcggtcaacaagagttcattgcaaaaaaattgttacctcctggctgcttgtctaatacatagtgttaatcatgctttgccaagcgacttgactgtaatatttgc

SEQ ID NO: 319880 - DNA, 120 bp, Artificial Sequence
  ENSG00000135486_2 (sequence is synthesized)
gcgtggaagattaaaaagatgttaaacacccaaggtagattcaaatgtgaatgattggtcggttggccaatcagactggttaacaataacattactcgggaaccaatggactccaagggg

SEQ ID NO: 319881 - DNA, 120 bp, Artificial Sequence
  ENSG00000135486_3 (sequence is synthesized)
tggagacggcgtagaacgaccgaaggaatgacgttacacagcaatgtggcaccacaggccaatagcagggggaagcgatttcaagtatccaatcagagctgttccagggcggagtctacc

SEQ ID NO: 319882 - DNA, 120 bp, Artificial Sequence
  ENSG00000135486_4 (sequence is synthesized)
aatgccgaaagcgaggaggcggggtaaaaaagagagggcgaaggtaggctggcagatacgttcgtcagcttgctcctttctgcccgtggacgccgccgaagaagcatcgttaaagtctct

SEQ ID NO: 319883 - DNA, 85 bp, Artificial Sequence
  ENSG00000135486_5 (sequence is synthesized)
tgcccgtggacgccgccgaagaagcatcgttaaagtctctcttcaccctgccgtcatgtctaagtcagagtctcctaaagagccc

SEQ ID NO: 319884 - DNA, 120 bp, Artificial Sequence
  ENSG00000135486_6 (sequence is synthesized)
ctttgaaacaactgatgagagcctgaggagccattttgagcaatggggaacgctcacggactgtgtggtaatgagagatccaaacaccaagcgctccaggggctttgggtttgtcacata

SEQ ID NO: 319885 - DNA, 90 bp, Artificial Sequence
  ENSG00000135486_7 (sequence is synthesized)
gtgggaatgacaacttcggtcgtggaggaaacttcagtggtcgtggtggctttggtggcagccgtggtggtggtggatatggtggcagtg

SEQ ID NO: 319886 - DNA, 120 bp, Artificial Sequence
  ENSG00000135486_8 (sequence is synthesized)
atgaagggaggaaattttggaggcagaagctctggcccctatggcggtggaggccaatactttgcaaaaccacgaaaccaaggtggctatggcggttccagcagcagcagtagctatggc

SEQ ID NO: 319887 - DNA, 120 bp, Artificial Sequence
  ENSG00000135486_9 (sequence is synthesized)
caaagggttttaatgtagatttttttttttgcaccccatgctgttgattgctaaatgtaacagtctgatcgtgacgctgaataaatgtcttttttttaatgtgctgtgtaaagttagtct

SEQ ID NO: 319888 - DNA, 61 bp, Artificial Sequence
  ENSG00000135486_10 (sequence is synthesized)
ctgatcgtgacgctgaataaatgtcttttttttaatgtgctgtgtaaagttagtctactct

SEQ ID NO: 319889 - DNA, 120 bp, Artificial Sequence
  ENSG00000135486_11 (sequence is synthesized)
atagatgggaatgaagcttgtgtatccattatcatgtgtaatcaataaacgatttaattctcttgaatgaaatgacaactgtatggatttgggactggcagagatttggactttccctac

SEQ ID NO: 319890 - DNA, 120 bp, Artificial Sequence
  ENSG00000135486_12 (sequence is synthesized)
gactttccctacccactccccctgataataatgttgaatgcttctatcacaattcaagttcaaagctctgccagggaatagaaactagctgctggctaatgccgctccataaatccgcag

SEQ ID NO: 319891 - DNA, 120 bp, Artificial Sequence
  ENSG00000135486_13 (sequence is synthesized)
atttgaagtgtctgggaggccttttaaaaataactaatatcagaaagcattttaatgaacgtaaagataggcttacattaaaggaaaactgcagtttgactgggttctggttgggtgggc

SEQ ID NO: 319892 - DNA, 120 bp, Artificial Sequence
  ENSG00000135486_14 (sequence is synthesized)
cttcagaggttctatcagttaactatactaattaatttggagattcaaaccataccaatagaaactaaatttttctacataatttcatgttaactgcagtttccctttatggcacaaggg

SEQ ID NO: 319893 - DNA, 120 bp, Artificial Sequence
  ENSG00000135486_15 (sequence is synthesized)
gtcacacaacctacctaaaatgttaattgtatagaaaatgatttctaaacctttaacagttaatatccaataatgtgttatttgtacatagattcttttgagccttacctttggtgctct

SEQ ID NO: 319894 - DNA, 120 bp, Artificial Sequence
  ENSG00000135486_16 (sequence is synthesized)
ctcaatttcagtgctattgtacctagtagcatagagatttgtctatcaataggactgtatattccatcccatgggtgtgttggaagtttggggaggaggagggtggtgggaggtgggtgg

SEQ ID NO: 319895 - DNA, 120 bp, Artificial Sequence
  ENSG00000135486_17 (sequence is synthesized)
gaggtggtggtgggtgggaaagcatgggtgatagttccatgatactggctgagtttgcaatagcaggtggaaccctaactattgagggagtttgcagatacctcaggattcgtgacaatg

SEQ ID NO: 319896 - DNA, 120 bp, Artificial Sequence
  ENSG00000135486_18 (sequence is synthesized)
cctttaaagatccaggagagatgttcagctactaggaactgctagcaagtatagcgcgaatggctccgagctcagacactctacagctgagagtagacacttgtggtatgtggagtacag

SEQ ID NO: 319897 - DNA, 120 bp, Artificial Sequence
  ENSG00000135486_19 (sequence is synthesized)
ataagccaggggcaggccacggcacgctccatgaaagctaggagggagtgaaatatcagtgatcatcgcaaggaaggaggcagacaagagtaaggcacacctgactcttaggactagcag

SEQ ID NO: 319898 - DNA, 120 bp, Artificial Sequence
  ENSG00000135486_20 (sequence is synthesized)
tcagaaccaggaggaaaggttttattgctatgcgggtaggtaagaacagattttacttacatccatatagttacttaaagtccagttttctgttaaacatttttcttaatatattgagcc

SEQ ID NO: 319899 - DNA, 120 bp, Artificial Sequence
  ENSG00000135486_21 (sequence is synthesized)
aaaactagtccagttaagctgaacttggtttttctggagatgaattgttttaaattgacaccctattgatggctcccagttgaaggaagtgagcacattatttgtactgtgaatataaat

SEQ ID NO: 319900 - DNA, 120 bp, Artificial Sequence
  ENSG00000135486_22 (sequence is synthesized)
ttttgcccttttatttatcttcctttgacccatttccttaaaataatggctcaaagtaatagacttccccaaatggtggggggatgggtgggttattaatgggaggtatggggggtttag

SEQ ID NO: 319901 - DNA, 120 bp, Artificial Sequence
  ENSG00000135486_23 (sequence is synthesized)
cttgagatgggacttggtcttagagctagttctaaaggttgtttacttttctagggaggagtctgctactagtcttatcagctcttaaaaacagaaactcatctgtccaagttcgtggca

SEQ ID NO: 319902 - DNA, 120 bp, Artificial Sequence
  ENSG00000135486_24 (sequence is synthesized)
gaaaggtaagtttttacaaattagtgctcagcaaaagaatgccctgcgttcccaaagtaaaagaatgacaagctgtaccttaaaccaaaacacttcgtaatctcatccaattgcaaaaag

SEQ ID NO: 319903 - DNA, 120 bp, Artificial Sequence
  ENSG00000135486_25 (sequence is synthesized)
agttattagccaaccaggtattcccagtagtgacagtggatataactgtgtagtcattcacctctgcttatatgaatactttacaacctcttttgccttttgcaggaacgtccttgtgaa

SEQ ID NO: 319904 - DNA, 120 bp, Artificial Sequence
  ENSG00000135486_26 (sequence is synthesized)
gacctttatctgagccactgtacttcgttatcactgccatgcagtttacatgagctgttctgcagctcaaattccattttgtgaatgggtttttttttttaataaactgtatttaactta

SEQ ID NO: 319905 - DNA, 120 bp, Artificial Sequence
  ENSG00000135486_27 (sequence is synthesized)
agggacgcatgcgcttgcgatttcctagcactcccaactccagcatacggcctcccttgataggcagaagcacgtgtcttgttgcgacctgaacgaacaataagtgctagtctcctaaag

SEQ ID NO: 319906 - DNA, 60 bp, Artificial Sequence
  ENSG00000135486_28 (sequence is synthesized)
accaaagagagctgtctcctttggtggcagccgtggtggtggtggatatggtggcagtgg

SEQ ID NO: 319907 - DNA, 120 bp, Artificial Sequence
  ENSG00000135486_29 (sequence is synthesized)
atcttggtgcagtcttctccgaatgcttatgaaagtagttaatagcattatagttagagctttgttggcaaaggaacgtcctgctttgattttaaaagctacctcttaaatctagggtag

SEQ ID NO: 319908 - DNA, 120 bp, Artificial Sequence
  ENSG00000135486_30 (sequence is synthesized)
ctttttgtgtgttgacataattttttaaattgctgatgaacccaataaccctaatgtagctgagcagtgcaacatagttaacattataattgcagtaattgtggatataaagttaatatt

SEQ ID NO: 319909 - DNA, 120 bp, Artificial Sequence
  ENSG00000135486_31 (sequence is synthesized)
cagatcagcaaaatttgtgggaaacaaacttgatattggattgtagccttgagtcttaatatgtttagattaacaactttattccatattgttcaacaggaaacaaagcttagcaggaga

SEQ ID NO: 319910 - DNA, 87 bp, Artificial Sequence
  ENSG00000135486_32 (sequence is synthesized)
tcaaccttattttattctgactgctaaacagaattggaaactaacatcatcctcaggtaacagataaaggccctctttcccattcat

SEQ ID NO: 319911 - DNA, 120 bp, Artificial Sequence
  ENSG00000135486_33 (sequence is synthesized)
cagggttatggaaaccagggcagtggctatggcgggagtggcagctatgacagctataacaacggaggcggaggcggctttggcggtggtagtggaagcaattttggaggtggtggaagc

SEQ ID NO: 319912 - DNA, 120 bp, Artificial Sequence
  ENSG00000135502_0 (sequence is synthesized)
cacaagctctagagggcttccgggaggaggcttagggagctgggaatccgggagcagatggtgggttcctaccgtcgagggtgggagagagggatctgaggccaagtttgaggtaaggac

SEQ ID NO: 319913 - DNA, 120 bp, Artificial Sequence
  ENSG00000135502_1 (sequence is synthesized)
tgtggagctccatcagatccccatccccacctcccctcatctgcgcaatcctgcgagaagccttagacaggttctggctcagagaaccggagagaggcacaacgcctggcccccaggact

SEQ ID NO: 319914 - DNA, 120 bp, Artificial Sequence
  ENSG00000135502_2 (sequence is synthesized)
tggccacagcgtccctgaccttgtctgctccatgacctctcactgaggcccattaacccctcagttccctgatgaggcttgatttagcatccttgatgtcagctcctaagagtctgggaa

SEQ ID NO: 319915 - DNA, 120 bp, Artificial Sequence
  ENSG00000135502_3 (sequence is synthesized)
gtgcatttaagtcctggaggttggacaaggccccctccccacagcacacctttccatccacttctatcccaggcatggcttttgctctcctggcctccgtgcccccggtgtttggactct

SEQ ID NO: 319916 - DNA, 120 bp, Artificial Sequence
  ENSG00000135502_4 (sequence is synthesized)
acacttctttcttccccgtcctcatctacagcttgctaggtactgggagacacctgtccacaggaactttcgccatactcagcctcatgacaggctcggccgtcgagcggctggtgccgg

SEQ ID NO: 319917 - DNA, 120 bp, Artificial Sequence
  ENSG00000135502_5 (sequence is synthesized)
aacccctcgtggggaatctgagcggaatcgagaaggagcagctggacgctcaacgggttggggtagccgcggccgtggccttcgggagcggggcgttgatgctggggatgttcgtgctgc

SEQ ID NO: 319918 - DNA, 120 bp, Artificial Sequence
  ENSG00000135502_6 (sequence is synthesized)
agctcggcgtcttgtccacctttttgtccgagcctgtggtcaaggcgctgaccagcggggccgcgctgcacgtgctcttgtcccagctgccgagcctcttggggttgtccctcccgcgcc

SEQ ID NO: 319919 - DNA, 120 bp, Artificial Sequence
  ENSG00000135502_7 (sequence is synthesized)
agatcggctgcttctctctcttcaagacgctggcctccttgctgactgcgctgcctcggagcagtccggccgaactgaccatctccgcgctcagcctggcgctgctcgtgccggtcaagg

SEQ ID NO: 319920 - DNA, 120 bp, Artificial Sequence
  ENSG00000135502_8 (sequence is synthesized)
aattgaacgtgagattccgagaccggctacccacgccgatcccgggggaagtcgtcttggtgcttctggcctccgtgctctgcttcacctcttctgtggacacaagataccaagtccaga

SEQ ID NO: 319921 - DNA, 120 bp, Artificial Sequence
  ENSG00000135502_9 (sequence is synthesized)
tagtggggctgttgcctggaggatttccccaacccctcctccccaacctggctgagctgcccaggattctggctgactcgctgcccattgcactggttagttttgcggtgtctgcctccc

SEQ ID NO: 319922 - DNA, 120 bp, Artificial Sequence
  ENSG00000135502_10 (sequence is synthesized)
atccatgcagacaagtatagctacactattgactccaaccaggagttcctggcacatggtgcctccaacctcatctcctccctcttctcttgctttcccaactcggctacgctggccacc

SEQ ID NO: 319923 - DNA, 120 bp, Artificial Sequence
  ENSG00000135502_11 (sequence is synthesized)
accaatctactggtggatgctggtgggaaaacacagctggcaggcctcttctcctgcacagtggtcctgtcggtgctgctgtggctggggcccttcttttactatctgcccaaggctgtc

SEQ ID NO: 319924 - DNA, 120 bp, Artificial Sequence
  ENSG00000135502_12 (sequence is synthesized)
ctggcttgcatcaacatctccagcatgcgccaggtgttctgccagatgcaggaacttccacaactatggcacatcagccgagtggactttctcctccaggtcccggggctctgcatcctg

SEQ ID NO: 319925 - DNA, 120 bp, Artificial Sequence
  ENSG00000135502_13 (sequence is synthesized)
agctatccaacaccactgtactttgggacccgtgggcagtttcgctgcaacctggagtggcacctggggctcggagaaggagaaaaggagacttcaaagccagatggcccaatggttgca

SEQ ID NO: 319926 - DNA, 120 bp, Artificial Sequence
  ENSG00000135502_14 (sequence is synthesized)
gttgctgagcctgtcagggtggtggtcctagacttcagtggtgtcacctttgcagatgctgctggggccagagaagtggtgcaggtgagggagaggctggccagccgatgtcgagatgct

SEQ ID NO: 319927 - DNA, 120 bp, Artificial Sequence
  ENSG00000135502_15 (sequence is synthesized)
aggatccgcctcctcctggctcagtgtaatgccttggtgcaggggacactgacccgggtaggactcctggacagggtgactccagatcagctgtttgtgagtgtgcaggatgcagctgct

SEQ ID NO: 319928 - DNA, 120 bp, Artificial Sequence
  ENSG00000135502_16 (sequence is synthesized)
tatgccctggggagcctgttaaggggcagtagcaccaggagcgggagccaggaggcactgggctgcggcaagtgaggcaggggtaagtggctggagacccagggagaggggtttgggaaa

SEQ ID NO: 319929 - DNA, 120 bp, Artificial Sequence
  ENSG00000135502_17 (sequence is synthesized)
gggtctgaggaagatcaagaagaaaagggtggggacggaatgaatagtagattgaagaccaaatcagggagcccgggctgagctatgggtgaggaactgaagaactcagatccctaagta

SEQ ID NO: 319930 - DNA, 120 bp, Artificial Sequence
  ENSG00000135502_18 (sequence is synthesized)
ggtggggtacccctgagaggactgccacatttcattaaggaagaggggtgcctaatctattcctgacatgtctcctctcttctccaggagctcactgacccaaagatttgcaccgtgtgg

SEQ ID NO: 319931 - DNA, 120 bp, Artificial Sequence
  ENSG00000135502_19 (sequence is synthesized)
gtctgacctcatcatgtggagtgcagagggccctgatgacatgtgtgtgatgaggaccatgacccttgaacccccttacctaacgtaactaataaaatgaagctgagagctttggaatcc

SEQ ID NO: 319932 - DNA, 120 bp, Artificial Sequence
  ENSG00000135502_20 (sequence is synthesized)
ggtttgaacccctttggcctgaatatttgtaacttcccaactggtgcgggtcattacatttggtgtgtgtcccattgaatcaaccctgttgtttccttctgtcatgctttccacttcttc

SEQ ID NO: 319933 - DNA, 120 bp, Artificial Sequence
  ENSG00000135502_21 (sequence is synthesized)
ctggatcatctctccccatcacttgccttggtagtcactgccctggatctctttacccagcagtgatggcctggcttttcttttgggcaatccacccctatccctatcctgcaggctgtg

SEQ ID NO: 319934 - DNA, 120 bp, Artificial Sequence
  ENSG00000135502_22 (sequence is synthesized)
tgctaggatccgcctcctcctggctcagtgtaatggtgagatgtgtggagaagagcggggcccagtgcctgggcaatgactggacacctgcggtagggaaaaggacccggtgtggactta

SEQ ID NO: 319935 - DNA, 120 bp, Artificial Sequence
  ENSG00000135502_23 (sequence is synthesized)
gcagaatattaagaagggggttgtgtggaaggagatttgggagaagggagacttccgaggaagattaggcagagtgggcaggaagaccagctctcatgtgggggtgggaggctctcttcc

SEQ ID NO: 319936 - DNA, 120 bp, Artificial Sequence
  ENSG00000135502_24 (sequence is synthesized)
ttttttgctcctgttcctccttttctctagctggcaggcctcttctcctgcacagtggtcctgtcggtgctgctgtggctggggcccttcttttactatctgcccaaggtaatgagcaga

SEQ ID NO: 319937 - DNA, 120 bp, Artificial Sequence
  ENSG00000135502_25 (sequence is synthesized)
ggaggcatgagcatggctgggaggggtagctgtattccaggacatcgaggtagtcagcccacctcctctgcctcaaggctgtcctggcttgcatcaacatctccagcatgcgccaggtgt

SEQ ID NO: 319938 - DNA, 120 bp, Artificial Sequence
  ENSG00000135502_26 (sequence is synthesized)
tctgccagatgcaggaacttccacaactatggcacatcagccgagtggactttgtgagaaatgccattacccccagattgccccctctcatcttgttagcatccccagcctctgccctga

SEQ ID NO: 319939 - DNA, 120 bp, Artificial Sequence
  ENSG00000135502_27 (sequence is synthesized)
gcaggggaagagaatgaggtgcttggggtgactctccagccaggccaggctaagctggaaatctggccccaccttcttccctagggtgtagtgcctggcacttggacaggctgaggggac

SEQ ID NO: 319940 - DNA, 120 bp, Artificial Sequence
  ENSG00000135502_28 (sequence is synthesized)
agagctctacagaccactcagaggaagccccagggtgggtgggctgcagccaaagaaggaagggaagattagccccagacatttctctgatcctttgacctcttagctcctccaggtccc

SEQ ID NO: 319941 - DNA, 120 bp, Artificial Sequence
  ENSG00000135502_29 (sequence is synthesized)
atgagcgggattcagggcaccaggacctacccaggcgcgggggacacctctgaccttaagtaccccttggcgaccaggctcagggaagctctcaccgaggctcggttccatcagctcttc

SEQ ID NO: 319942 - DNA, 120 bp, Artificial Sequence
  ENSG00000135502_30 (sequence is synthesized)
ctgtggaggctgcgggctcgcgcttgttccgggacaggggcgtggcgcctgctgctggctcggctgcccgcgctgcactggctgccccattaccgctggcgggcctggctgctcggagat

SEQ ID NO: 319943 - DNA, 120 bp, Artificial Sequence
  ENSG00000135502_31 (sequence is synthesized)
cacctgggtggcagtagtgaccctgagtgtggatttgggcctggctgtgggtgtggtcttctccatgatgactgtggtctgccgcacccggagctcctccaggtcccggggctctgcatc

SEQ ID NO: 319944 - DNA, 120 bp, Artificial Sequence
  ENSG00000135502_32 (sequence is synthesized)
gctggggccagagaagtggtgcagctggccagccgatgtcgagatgctaggatccgcctcctcctggctcagtgtaatgggtgactccagatcagctgtttgtgagtgtgcaggatgcag

SEQ ID NO: 319945 - DNA, 120 bp, Artificial Sequence
  ENSG00000135502_33 (sequence is synthesized)
gaaaagatgccagctttctcttctcccacctctcccacccaacactccctcttatctccaccccccattttctctgccttccttatctcactgaagcacctaacccctcctcaccatgga

SEQ ID NO: 319946 - DNA, 120 bp, Artificial Sequence
  ENSG00000135502_34 (sequence is synthesized)
ttctagaggtcccgtgaatagggaaactcgaaaagggaggaaggacggagggtggaggggtagtatgtgacaagggagcaggaaaggaggttggagccacgtggctgaacgagggcgctg

SEQ ID NO: 319947 - DNA, 120 bp, Artificial Sequence
  ENSG00000135502_35 (sequence is synthesized)
aggaggtgtaagccctggtggcactgggtagagagggcctcgctctgggggtcccgcgccggggcgcatgagccctggcacggggccctctgctcatcgcccctgccctcagacgctggc

SEQ ID NO: 319948 - DNA, 120 bp, Artificial Sequence
  ENSG00000135503_0 (sequence is synthesized)
gggcgctgctgggctgcggcggcggcggcggcggcggtggttactatggcggagtcggccggagcctcctccttcttcccccttgttgtcctcctgctcgccggcagcggcgggtccggg

SEQ ID NO: 319949 - DNA, 120 bp, Artificial Sequence
  ENSG00000135503_1 (sequence is synthesized)
ccccggggggtccaggctctgctgtgtgcgtgcaccagctgcctccaggccaactacacgtgtgagacagatggggcctgcatggtttccattttcaatctggatgggatggagcaccat

SEQ ID NO: 319950 - DNA, 120 bp, Artificial Sequence
  ENSG00000135503_2 (sequence is synthesized)
gtgcgcacctgcatccccaaagtggagctggtccctgccgggaagcccttctactgcctgagctcggaggacctgcgcaacacccactgctgctacactgactactgcaacaggatcgac

SEQ ID NO: 319951 - DNA, 120 bp, Artificial Sequence
  ENSG00000135503_3 (sequence is synthesized)
ttgagggtgcccagtggtcacctcaaggagcctgagcacccgtccatgtggggcccggtggagctggtaggcatcatcgccggcccggtgttcctcctgttcctcatcatcatcattgtt

SEQ ID NO: 319952 - DNA, 120 bp, Artificial Sequence
  ENSG00000135503_4 (sequence is synthesized)
ttccttgtcattaactatcatcagcgtgtctatcacaaccgccagagactggacatggaagatccctcatgtgagatgtgtctctccaaagacaagacgctccaggatcttgtctacgat

SEQ ID NO: 319953 - DNA, 120 bp, Artificial Sequence
  ENSG00000135503_5 (sequence is synthesized)
ctctccacctcagggtctggctcagggttacccctctttgtccagcgcacagtggcccgaaccatcgttttacaagagattattggcaagggtcggtttggggaagtatggcggggccgc

SEQ ID NO: 319954 - DNA, 120 bp, Artificial Sequence
  ENSG00000135503_6 (sequence is synthesized)
tggaggggtggtgatgtggctgtgaaaatattctcttctcgtgaagaacggtcttggttcagggaagcagagatataccagacggtcatgctgcgccatgaaaacatccttggatttatt

SEQ ID NO: 319955 - DNA, 120 bp, Artificial Sequence
  ENSG00000135503_7 (sequence is synthesized)
gctgctgacaataaagataatggcacctggacacagctgtggcttgtttctgactatcatgagcacgggtccctgtttgattatctgaaccggtacacagtgacaattgaggggatgatt

SEQ ID NO: 319956 - DNA, 120 bp, Artificial Sequence
  ENSG00000135503_8 (sequence is synthesized)
aagctggccttgtctgctgctagtgggctggcacacctgcacatggagatcgtgggcacccaagggaagcctggaattgctcatcgagacttaaagtcaaagaacattctggtgaagaaa

SEQ ID NO: 319957 - DNA, 120 bp, Artificial Sequence
  ENSG00000135503_9 (sequence is synthesized)
aatggcatgtgtgccatagcagacctgggcctggctgtccgtcatgatgcagtcactgacaccattgacattgccccgaatcagagggtggggaccaaacgatacatggcccctgaagta

SEQ ID NO: 319958 - DNA, 120 bp, Artificial Sequence
  ENSG00000135503_10 (sequence is synthesized)
cttgatgaaaccattaatatgaaacactttgactcctttaaatgtgctgatatttatgccctcgggcttgtatattgggagattgctcgaagatgcaattctggaggagtccatgaagaa

SEQ ID NO: 319959 - DNA, 120 bp, Artificial Sequence
  ENSG00000135503_11 (sequence is synthesized)
tatcagctgccatattacgacttagtgccctctgacccttccattgaggaaatgcgaaaggttgtatgtgatcagaagctgcgtcccaacatccccaactggtggcagagttatgaggca

SEQ ID NO: 319960 - DNA, 120 bp, Artificial Sequence
  ENSG00000135503_12 (sequence is synthesized)
ctgcgggtgatggggaagatgatgcgagagtgttggtatgccaacggcgcagcccgcctgacggccctgcgcatcaagaagaccctctcccagctcagcgtgcaggaagacgtgaagatc

SEQ ID NO: 319961 - DNA, 120 bp, Artificial Sequence
  ENSG00000135503_13 (sequence is synthesized)
taactgctccctctctccacacggagctcctggcagcgagaactacgcacagctgccgcgttgagcgtacgatggaggcctacctctcgtttctgcccagccctctgtggccaggagccc

SEQ ID NO: 319962 - DNA, 120 bp, Artificial Sequence
  ENSG00000135503_14 (sequence is synthesized)
tggcccgcaagagggacagagcccgggagagactcgctcactcccatgttgggtttgagacagacaccttttctatttacctcctaatggcatggagactctgagagcgaattgtgtgga

SEQ ID NO: 319963 - DNA, 120 bp, Artificial Sequence
  ENSG00000135503_15 (sequence is synthesized)
gaactcagtgccacacctcgaactggttgtagtgggaagtcccgcgaaacccggtgcatctggcacgtggccaggagccatgacaggggcgcttgggaggggccggaggaaccgaggtgt

SEQ ID NO: 319964 - DNA, 120 bp, Artificial Sequence
  ENSG00000135503_16 (sequence is synthesized)
tgccagtgctaagctgccctgagggtttccttcggggaccagcccacagcacaccaaggtggcccggaagaaccagaagtgcagcccctctcacaggcagctctgagccgcgctttcccc

SEQ ID NO: 319965 - DNA, 120 bp, Artificial Sequence
  ENSG00000135503_17 (sequence is synthesized)
tcctccctgggatggacgctgccgggagactgccagtggagacggaatctgccgctttgtctgtccagccgtgtgtgcatgtgccgaggtgcgtcccccgttgtgcctggttcgtgccat

SEQ ID NO: 319966 - DNA, 120 bp, Artificial Sequence
  ENSG00000135503_18 (sequence is synthesized)
gtcgtcatgctgtccgtgcttgctggtgcctcttttcagtagtgagcagcatctagtttccctggtgcccttccctggaggtctctccctcccccagagcccctcatgccacagtggtac

SEQ ID NO: 319967 - DNA, 120 bp, Artificial Sequence
  ENSG00000135503_19 (sequence is synthesized)
tctgtgtctggcaggctactctgcccaccccagcatcagcacagctctcctcctccatctcagactgtggaaccaaagctggcccagttgtccatgacaaaagaggcttttgggccaaaa

SEQ ID NO: 319968 - DNA, 120 bp, Artificial Sequence
  ENSG00000135503_20 (sequence is synthesized)
tgtgagggtggtgggtgggatgggcagggaaggaatcctggtggaagtcttgggtgttagtgtcagccatgggaaatgagccagcccaagggcatcatcctcagcagcatcgaggaaggg

SEQ ID NO: 319969 - DNA, 120 bp, Artificial Sequence
  ENSG00000135503_21 (sequence is synthesized)
ccgaggaatgtgaagccagatctcgggactcagattggaatgttacatctgtctttcatctcccagatcctggaaacagcagtgtatatttttggtggtggtgggtttggggtggggaag

SEQ ID NO: 319970 - DNA, 120 bp, Artificial Sequence
  ENSG00000135503_22 (sequence is synthesized)
ggaagggcgggcaaggagtggggagggagtctggggtgggagggaggcatctgcatgggtcttcttttactggactgtctgatcagggtggagggaaggtgagaggtttgcatccacttc

SEQ ID NO: 319971 - DNA, 120 bp, Artificial Sequence
  ENSG00000135503_23 (sequence is synthesized)
aggagccctactgaagggaacagcctgagccgaacatgttatttaacctgagtatagtatttaacgaagcctagaagcacggctgtgggtggtgatttggtcagcatatcttaggtatat

SEQ ID NO: 319972 - DNA, 120 bp, Artificial Sequence
  ENSG00000135503_24 (sequence is synthesized)
aataactttgaagccataacttttaactggagtggtttgatttctttttttaattttattgggagggtttggattttaactttttttaatgttgttaaatattaagtttttgtaaaagga

SEQ ID NO: 319973 - DNA, 120 bp, Artificial Sequence
  ENSG00000135503_25 (sequence is synthesized)
aaaccatctctgtgattacctctcaatctatttgtttttaaagaaatccctaaaaaaaaaaattatccaattgaacgcacatagctcaatcacactggaaatgtttgtccttgcacctga

SEQ ID NO: 319974 - DNA, 120 bp, Artificial Sequence
  ENSG00000135503_26 (sequence is synthesized)
gcctgttcccactcagcagtgagagttcctctttgccctgaggctcagtctctctcgtattttgtccccacccccaattccttgagtggtttttgctctagggccctttcttgcactgtc

SEQ ID NO: 319975 - DNA, 120 bp, Artificial Sequence
  ENSG00000135503_27 (sequence is synthesized)
cagctggttgtaccctctccaggcatttattcaacaaatgtgggtgaagtgcctgctgggtgccaggtgctgggaatacatctgtggacaagacatgcttgggtcctactcctggagcac

SEQ ID NO: 319976 - DNA, 120 bp, Artificial Sequence
  ENSG00000135503_28 (sequence is synthesized)
tgtaaaaagagctgattcaagtaagtagatgcctgttttgagaccagaaggtttcataattggttctacgacccttttgagcctagaattattgttcttatataagatcactgaagaaag

SEQ ID NO: 319977 - DNA, 120 bp, Artificial Sequence
  ENSG00000135503_29 (sequence is synthesized)
aggaacccccacaaccccctccacaaagagaccaggggcgggtgatgagacctggggtttagaaccccaggtgagacctcaaatcactgcattcattctgagcccccttcctgtccccag

SEQ ID NO: 319978 - DNA, 120 bp, Artificial Sequence
  ENSG00000135503_30 (sequence is synthesized)
gggaggtgtattgtgtatgtagccttagagcatctctgcctccaacccagcagttctctgccaaagcttgtggaggagggagagccctgtccctgccctcaggctccccagtgctcctgg

SEQ ID NO: 319979 - DNA, 120 bp, Artificial Sequence
  ENSG00000135503_31 (sequence is synthesized)
cccttctatttatttgactgattattgcttctttccttgcattaaaggagatcttcccctaacctttgggccaatttactggccactaatttcgtttaaataccattgtgtcattggggg

SEQ ID NO: 319980 - DNA, 120 bp, Artificial Sequence
  ENSG00000135503_32 (sequence is synthesized)
gaccgtctttacccctgctgacctcccacctatccgccctgcagcagaaccttggcggtttataggtaatgatggaacttagactcctcttcccagagtcacaagtagcctctgggatct

SEQ ID NO: 319981 - DNA, 120 bp, Artificial Sequence
  ENSG00000135503_33 (sequence is synthesized)
gccaacacacgtccactcccaagccactagcccactccccagttggcccttctgcccttaccccacacacagtccaactcttccacctctggggaagatggagcaggtctttgggaagct

SEQ ID NO: 319982 - DNA, 120 bp, Artificial Sequence
  ENSG00000135503_34 (sequence is synthesized)
cccacacccacctctgccactcttaacactaagtgagagttggggagaaactgaagccgtgtttttggccccccgaggctaaccctgatccatagtgctacctgcacctctggattctgg

SEQ ID NO: 319983 - DNA, 120 bp, Artificial Sequence
  ENSG00000135503_35 (sequence is synthesized)
attcacagaccaagtccaagcccgttcttacgtcgccataaaggcccccgaacggcattctcggtacttctgtttgtttttgtacattttattagaaaggactgtaaaatagccacttag

SEQ ID NO: 319984 - DNA, 120 bp, Artificial Sequence
  ENSG00000135503_36 (sequence is synthesized)
acactttacctcttcagtatgcaaatgtaaataaattgtaatataggaaatcttttgttttaatataagaatgagcctgtccaatttctgctgtacattattaaaagttttattcacaga

SEQ ID NO: 319985 - DNA, 120 bp, Artificial Sequence
  ENSG00000135503_37 (sequence is synthesized)
aatgcttctcctaagcacctcgtgtgtgttcttcggcctcactgctctgtggcttaggtatctgtgctgtggggtttgagaaacatggtgaaggtgtatgaacagagcttgacatttgtg

SEQ ID NO: 319986 - DNA, 120 bp, Artificial Sequence
  ENSG00000135503_38 (sequence is synthesized)
gttattatttactattacgtgctattttacatatcccaagccctttagggctacagtctcttgtcctggaccctgtagggtgccatttggagttcacagcctagaagaagaaaaggcttt

SEQ ID NO: 319987 - DNA, 120 bp, Artificial Sequence
  ENSG00000135503_39 (sequence is synthesized)
gggcctggtgtggtggcataggcctgtaatcgtagcgctttgagaggctgaggcaggaagatagcttgagctcagaagttcgagacaaacctgggcaatgtggggagaccccatctctac

SEQ ID NO: 319988 - DNA, 120 bp, Artificial Sequence
  ENSG00000135503_40 (sequence is synthesized)
gctggatcacccaaagctgttttactgccccctttctttttacaacctgttggatgcctgttgccagagcctgaatcatcgtttaaggttgccatcaaaggtgtggaggtagctgtgctt

SEQ ID NO: 319989 - DNA, 120 bp, Artificial Sequence
  ENSG00000135503_41 (sequence is synthesized)
agggtgcgtttattcttcagggatcagtttgttgaatagcgttgtgtgttatggtaaccattctgaaggctcgtttggctttataaacaaacaaacattgttttattagtccgtggcggg

SEQ ID NO: 319990 - DNA, 120 bp, Artificial Sequence
  ENSG00000135503_42 (sequence is synthesized)
gagtgccccggtgcgcatagcacgggattcatgcagtggtctccttcacatcagaagcagtatattctaacgcggtggctcccaagccacattcatgggaaaccctgctgtttcattgtt

SEQ ID NO: 319991 - DNA, 120 bp, Artificial Sequence
  ENSG00000135503_43 (sequence is synthesized)
gggtccagggatgtgcctagcaccaagctgaatgctgagagggatcctgaggaaagagtctgtccttgccctttggaagtttacacacagagaccggccacagtggctcatgcctgtaat

SEQ ID NO: 319992 - DNA, 120 bp, Artificial Sequence
  ENSG00000135506_0 (sequence is synthesized)
agattctctgcataagaaggggaacgaaagatggcggcggaaacgctgctgtccagtttgttaggactgctgcttctgggactcctgttacccgcaagtctgaccggcggtgtcgggagc

SEQ ID NO: 319993 - DNA, 120 bp, Artificial Sequence
  ENSG00000135506_1 (sequence is synthesized)
ctgaacctggaggagctgagtgagatgcgttatgggatcgagatcctgccgttgcctgtcatgggagggcagagccaatcttcggacgtggtgattgtctcctctaagtacaaacagcgc

SEQ ID NO: 319994 - DNA, 120 bp, Artificial Sequence
  ENSG00000135506_2 (sequence is synthesized)
tatgagtgtcgcctgccagctggagctattcacttccagcgtgaaagggaggaggaaacacctgcttaccaagggcctgggatccctgagttgttgagcccaatgagagatgctccctgc

SEQ ID NO: 319995 - DNA, 120 bp, Artificial Sequence
  ENSG00000135506_3 (sequence is synthesized)
ttgctgaagacaaaggactggtggacatatgaattctgttatggacgccacatccagcaataccacatggaagattcagagatcaaaggtgaagtcctctatctcggctactaccaatca

SEQ ID NO: 319996 - DNA, 120 bp, Artificial Sequence
  ENSG00000135506_4 (sequence is synthesized)
gccttcgactgggatgatgaaacagccaaggcctccaagcagcatcgtcttaaacgctaccacagccagacctatggcaatgggtccaagtgcgaccttaatgggaggccccgggaggcc

SEQ ID NO: 319997 - DNA, 120 bp, Artificial Sequence
  ENSG00000135506_5 (sequence is synthesized)
gaggttcggttcctctgtgacgagggtgcaggtatctctggggactacatcgatcgcgtggacgagcccttgtcctgctcttatgtgctgaccattcgcactcctcggctctgcccccac

SEQ ID NO: 319998 - DNA, 120 bp, Artificial Sequence
  ENSG00000135506_6 (sequence is synthesized)
cctctcctccggcccccacccagtgctgcaccgcaggccatcctctgtcacccttccctacagcctgaggagtacatggcctacgttcagaggcaagccgactcaaagcagtatggagat

SEQ ID NO: 319999 - DNA, 120 bp, Artificial Sequence
  ENSG00000135506_7 (sequence is synthesized)
aaaatcatagaggagctgcaagatctaggcccccaagtgtggagtgagaccaagtctggggtggcaccccaaaagatggcaggtgcgagcccgaccaaggatgacagtaaggactcagat

SEQ ID NO: 320000 - DNA, 120 bp, Artificial Sequence
  ENSG00000135506_8 (sequence is synthesized)
ttctggaagatgcttaatgagccagaggaccaggccccaggaggggaggaggtgccggctgaggagcaggacccaagccctgaggcagcagattcagcttctggtgctcccaatgatttt

SEQ ID NO: 320001 - DNA, 120 bp, Artificial Sequence
  ENSG00000135506_9 (sequence is synthesized)
cagaacaacgtgcaggtcaaagtcattcgaagccctgcggatttgattcgattcatagaggagctgaaaggtggaacaaaaaaggggaagccaaatataggccaagagcagcctgtggat

SEQ ID NO: 320002 - DNA, 120 bp, Artificial Sequence
  ENSG00000135506_10 (sequence is synthesized)
gatgctgcagaagtccctcagagggaaccagagaaggaaaggggtgatccagaacggcagagagagatggaagaagaggaggatgaggatgaggatgaggatgaagatgaggatgaacgg

SEQ ID NO: 320003 - DNA, 120 bp, Artificial Sequence
  ENSG00000135506_11 (sequence is synthesized)
cttccgtcagaccgagaccggctccgttcggaggtgaaggctggcatggagcgggaactggaaaacatcatccaggagacagagaaagagctggacccagatgggctgaagaaggagtca

SEQ ID NO: 320004 - DNA, 120 bp, Artificial Sequence
  ENSG00000135506_12 (sequence is synthesized)
gagcgggatcgggcaatgctggctctcacatccactctcaacaaactcatcaaaagactggaggaaaaacagagtccagagctggtgaagaagcacaagaaaaagagggttgtccccaaa

SEQ ID NO: 320005 - DNA, 120 bp, Artificial Sequence
  ENSG00000135506_13 (sequence is synthesized)
aagcctcccccatcaccccaacctacagaggaggatcctgagcacagagtccgggtccgggtcaccaagctccgtctcggaggccctaatcaggatctgactgtcctcgagatgaaacgg

SEQ ID NO: 320006 - DNA, 120 bp, Artificial Sequence
  ENSG00000135506_14 (sequence is synthesized)
gaaaacccacagctgaaacaaatcgaggggctggtgaaggagctgctggagagggagggactcacagctgcagggaaaattgagatcaaaattgtccgcccatgggctgaagggactgaa

SEQ ID NO: 320007 - DNA, 120 bp, Artificial Sequence
  ENSG00000135506_15 (sequence is synthesized)
gagggtgcacgttggctgactgatgaggacacgagaaacctcaaggagatcttcttcaatatcttggtgccgggagctgaagaggcccagaaggaacgccagcggcagaaagagctggag

SEQ ID NO: 320008 - DNA, 120 bp, Artificial Sequence
  ENSG00000135506_16 (sequence is synthesized)
agcaattaccgccgggtgtggggctctccaggtggggagggcacaggggacctggacgaatttgacttctgagaccaacactacacttgacccttcacggaatccagactcttcctggac

SEQ ID NO: 320009 - DNA, 120 bp, Artificial Sequence
  ENSG00000135506_17 (sequence is synthesized)
tggcttgcctcctccccacctccccaccctggaacccctgagggccaaacagcagagtggagctgagctgtggacctctcgggcaactctgtgggtgtgggggccctgggtgaatgctgc

SEQ ID NO: 320010 - DNA, 120 bp, Artificial Sequence
  ENSG00000135506_18 (sequence is synthesized)
tgcccctgctggcagccaccttgagacctcaccgggcctgtgatatttgctctcctgaactctcactcaatcctcttcctctcctctgtggcttttcctgttattgtcccctaatgatag

SEQ ID NO: 320011 - DNA, 120 bp, Artificial Sequence
  ENSG00000135506_19 (sequence is synthesized)
gatattccctgctgcctacctggagattcagtaggatcttttgagtggaggtgggtagagagagcaaggagggcaggacacttagcaggcactgagcaagcaggcccccacctgccctta

SEQ ID NO: 320012 - DNA, 120 bp, Artificial Sequence
  ENSG00000135506_20 (sequence is synthesized)
gtgatgtttggagtcgttttaccctcttctattgaattgccttgggatttccttctccctttccctgcccaccctgtcccctacaatttgtgcttctgagttgaggagccttcacctctg

SEQ ID NO: 320013 - DNA, 120 bp, Artificial Sequence
  ENSG00000135506_21 (sequence is synthesized)
ttgctgaggaaatggtagaatgctgcctatcacctccagcacaatcccagtgaaaaaggtgtgaagcacccaccatgttcttgaacaatcaggtttctaaataaacaactggaccatcaa

SEQ ID NO: 320014 - DNA, 120 bp, Artificial Sequence
  ENSG00000135506_22 (sequence is synthesized)
ctgaccaatcacggacagcgattgatatttctaatcgtcgtgatccacctccccaggaccttggagccacgtttacaaataggaatagggtacgtgggagggatagaacgtacagccaat

SEQ ID NO: 320015 - DNA, 120 bp, Artificial Sequence
  ENSG00000135506_23 (sequence is synthesized)
ttaagaagaccactggaggagtagacagattacacggacaggaaagaagcaaagaatcctgcaaccactgatgacactttgctgaacgtaggagcaggttaggatagaagatctcagaaa

SEQ ID NO: 320016 - DNA, 120 bp, Artificial Sequence
  ENSG00000135506_24 (sequence is synthesized)
gtgtcatatcatggaagttccccagttccctcctcctcctcctcctcttaagagtaacagtgcttcactgtggcttcccttgcagattcagagatcaaaggtgaagtcctctatctcggc

SEQ ID NO: 320017 - DNA, 120 bp, Artificial Sequence
  ENSG00000135506_25 (sequence is synthesized)
aattagagaaggaggagaagacggggagatacgggggcagggggtggcaaaagatcaagtattgaatagctggaggaatgtgttcctggcctgcttgcatgctgtttctcagtagactca

SEQ ID NO: 320018 - DNA, 120 bp, Artificial Sequence
  ENSG00000135506_26 (sequence is synthesized)
aggagctgaaaggtggaacaaaaaaggtataggccgtgcttagggaatgggtagaacccacctcccaactgcgagcatttgaaaaactaccctgacctgggactcaactcctgggtcccc

SEQ ID NO: 320019 - DNA, 120 bp, Artificial Sequence
  ENSG00000135506_27 (sequence is synthesized)
aatcgaggggctggtgaaggagctgctggagagggagggactcacagctgcaggtgggccctggagggcggctggacccagtgctgtcggaagggcaagctgccggaagtggaggggctg

SEQ ID NO: 320020 - DNA, 120 bp, Artificial Sequence
  ENSG00000135506_28 (sequence is synthesized)
ggaccagtggggcagggggcctgccctgaggctcccaaccatcctctcctctcactgcatactgctcctttccagggaaaattgagatcaaaattgtccgcccatgggctgaagggactg

SEQ ID NO: 320021 - DNA, 120 bp, Artificial Sequence
  ENSG00000135506_29 (sequence is synthesized)
gagagccctgacaagaaggggagggtcaagattagctgatctgtttcttggggcttggtggccattaggacaaagtttcctggggcctgggggcacaggccattcttttgtctctttggg

SEQ ID NO: 320022 - DNA, 120 bp, Artificial Sequence
  ENSG00000135506_30 (sequence is synthesized)
cttatctttatggagggcaaataaggatttaaaaaatcttttaaaagggaggaatggaaagaccacaagtggaaaacagactttagagatatctctccaagtcacagaaggaaagcagcc

SEQ ID NO: 320023 - DNA, 120 bp, Artificial Sequence
  ENSG00000135506_31 (sequence is synthesized)
ctccctccttactgaaagtctggagaattgagagtggaagtgaagggaagagaattgagtgtgtaagtagatgagaggttatgtgtcttggagccaggagactctggttccaagaaaaga

SEQ ID NO: 320024 - DNA, 120 bp, Artificial Sequence
  ENSG00000135506_32 (sequence is synthesized)
cctcagctggttctgttcccagaggggaccctgttccttcccttctgagggtgctcattctctccccactttctggaacactgtcctcacttgcgcctgcttcccaacaccatcatccct

SEQ ID NO: 320025 - DNA, 120 bp, Artificial Sequence
  ENSG00000135506_33 (sequence is synthesized)
ttgcgtgtttacctcctattcatccctctgggaagcagcttttagagcatatctgctggttttctggtttgctcctgtacacccagtgcctagcactctgcctggcacacaatggatgat

SEQ ID NO: 320026 - DNA, 120 bp, Artificial Sequence
  ENSG00000135506_34 (sequence is synthesized)
cagtagctagtaattgaatgcttgtgagtctatatgctgaaaaccactttaggactttgcaccaagagaggccccagctgtcagggcatgaataggagagcccagctgcacatgagccaa

SEQ ID NO: 320027 - DNA, 120 bp, Artificial Sequence
  ENSG00000135506_35 (sequence is synthesized)
tagcttggatagactttaaattatttcttcttcttgtatccccttgtgtccatttcatagtgtcctatgggtgtggacatcagatattctaaatggaatgttccagtttcaaaccttcca

SEQ ID NO: 320028 - DNA, 120 bp, Artificial Sequence
  ENSG00000135506_36 (sequence is synthesized)
ttcccactctctctataaacattgaaatgtctttaaagtcccaacatatggaggaggagaccacacttttccaacctgcttcttcaaacagaactttgttggtgcaggtggcctgatttt

SEQ ID NO: 320029 - DNA, 120 bp, Artificial Sequence
  ENSG00000135506_37 (sequence is synthesized)
ggctttagaaaacatttgttttcctataggtgacgggcagaattattgggtagggcgggaagatggaaggctgcaattggtggagggagctctacaggctgaactgggaggggcggggca

SEQ ID NO: 320030 - DNA, 120 bp, Artificial Sequence
  ENSG00000135506_38 (sequence is synthesized)
cacatttttttgagccctggctcatatacatgttgagatggaagagctgccaaagccaactgatgttttagggggagatgacccccacacccctaaccctggagtcacgcctctgctttg

SEQ ID NO: 320031 - DNA, 120 bp, Artificial Sequence
  ENSG00000135517_0 (sequence is synthesized)
atgggggtagcagggacccaggcactgtgaccatcccccctgccatgtgggaactgcgatcagcctccttttggagggccatattcgctgagttctttgccaccctcttctatgtcttct

SEQ ID NO: 320032 - DNA, 120 bp, Artificial Sequence
  ENSG00000135517_1 (sequence is synthesized)
ttgggctggggtcctcactgcgctgggctcctggacccctgcatgttctgcaggtggctatggcatttggcttggccctggctacactggtgcagtctgtgggccacatcagtggagccc

SEQ ID NO: 320033 - DNA, 120 bp, Artificial Sequence
  ENSG00000135517_2 (sequence is synthesized)
acgtcaatcctgcagtcacttttgctttccttgtgggctcccagatgtccctgctccgtgccttctgctatatggcagcccagctcctgggagctgtggctggggccgctgtgctgtata

SEQ ID NO: 320034 - DNA, 120 bp, Artificial Sequence
  ENSG00000135517_3 (sequence is synthesized)
gcgttaccccacctgctgtccgaggaaacctagcactcaacacgttgcaccctgcggtgagcgtgggccaggcaaccacagtggagatcttcctgacgctccagttcgtgctctgcatct

SEQ ID NO: 320035 - DNA, 120 bp, Artificial Sequence
  ENSG00000135517_4 (sequence is synthesized)
ttgccacatacgacgagaggcggaatggccaactgggctccgtggccctggccgttggcttctcccttgccctggggcacctctttgggatgtattatactggtgcaggcatgaatcctg

SEQ ID NO: 320036 - DNA, 120 bp, Artificial Sequence
  ENSG00000135517_5 (sequence is synthesized)
cccgctcctttgctcctgccattctcactgggaacttcactaaccactgggtgtactgggtaggcccaatcattggagggggtctgggcagcctcctgtacgactttcttctcttccccc

SEQ ID NO: 320037 - DNA, 120 bp, Artificial Sequence
  ENSG00000135517_6 (sequence is synthesized)
ggctcaagagtatttctgagagactgtctgtcctcaagggtgccaaacccgatgtctccaatggacaaccagaggtcacaggggaacctgttgaactgaacacccaggccctgtagaagc

SEQ ID NO: 320038 - DNA, 120 bp, Artificial Sequence
  ENSG00000135517_7 (sequence is synthesized)
tccagctgaatagagggagtagaaagcttctgagtttacgtggaggggtttagccagcccctagatgaagaaagagactgtggggagggtcatgtacttctttattttttaacttatgta

SEQ ID NO: 320039 - DNA, 120 bp, Artificial Sequence
  ENSG00000135517_8 (sequence is synthesized)
tgtggttgttttttttttttttttccttttgctgtgtgaaatctttcaagttgcattcatgagctggttggtgcaaacttcccttcctccccatcccaccacccttcgccgtgtgtgctg

SEQ ID NO: 320040 - DNA, 120 bp, Artificial Sequence
  ENSG00000135517_9 (sequence is synthesized)
attgtgcatatgaatgtgagtgtggctgtgtctgagttttggggcatgagagctaaggaagcaaaaagaggtgccatcctatacctcccttcctcgacccagtatggtgagtactgggta

SEQ ID NO: 320041 - DNA, 120 bp, Artificial Sequence
  ENSG00000135517_10 (sequence is synthesized)
acacgaggcagatggagagaagtggaggagacaaggcttccaagggttaggagaagggactcaagggaggtgggtggtgaaaacggagtattagccccagatcaggatgtaggtgtaccg

SEQ ID NO: 320042 - DNA, 120 bp, Artificial Sequence
  ENSG00000135517_11 (sequence is synthesized)
aagaattggggggaagttaatgggaatatatagcctacttatcttagggatgcttgccccagggacttgggtggggaagtagctctgagaaaagtgaacactaggatttagctgttctgt

SEQ ID NO: 320043 - DNA, 120 bp, Artificial Sequence
  ENSG00000135517_12 (sequence is synthesized)
aaagccacgtaaacctgtctacatccgctggctggttgtgttcattctgacataatggatctcttcagaggtcctgggccaaagagcttccaacctaaatagagcttgggcaagcctaga

SEQ ID NO: 320044 - DNA, 120 bp, Artificial Sequence
  ENSG00000135517_13 (sequence is synthesized)
atctagaaaaattaagcagcttaactggtcagcctgacatccactgttgtggctgcctggcagatggtatttaagccccacaattgttccctaaggccaacacaggaaatctgattcctg

SEQ ID NO: 320045 - DNA, 120 bp, Artificial Sequence
  ENSG00000135517_14 (sequence is synthesized)
gagcaaataaatgaacgggtggtagtagggggcatgaggggagaggctttgactctgttctaatttatttagagcaaatcaaaacactcctcaaatggcatctttctgcttttatcacta

SEQ ID NO: 320046 - DNA, 120 bp, Artificial Sequence
  ENSG00000135517_15 (sequence is synthesized)
gttccgtgttttttttcttgttttgtgtctgtgtattttcatttctctgtcatccgtcctttcatcttgaagcaaatctcttctaactccctcataccccagaaattgattccttctatt

SEQ ID NO: 320047 - DNA, 120 bp, Artificial Sequence
  ENSG00000135517_16 (sequence is synthesized)
caaatgcttaataattcaggagattattatttgtttgagccctatcttctttttttttttgagagggggtcttactatgttgaccaggttggagtgcaatggatattcacaggcacgatc

SEQ ID NO: 320048 - DNA, 83 bp, Artificial Sequence
  ENSG00000135517_17 (sequence is synthesized)
tggccagagcacagccctattttcttttccttttggcaagatcatctcagcagaggccagaagagaccctcaactgttcaatg

SEQ ID NO: 320049 - DNA, 120 bp, Artificial Sequence
  ENSG00000135517_18 (sequence is synthesized)
atctcagcagaggccagaagagaccctcaactgttcaatgaatatttacggttgctttcttccttttatgagcctcttgcatactttgaaagctttaaatttatacctataatacaacgg

SEQ ID NO: 320050 - DNA, 120 bp, Artificial Sequence
  ENSG00000135517_19 (sequence is synthesized)
acatcccctatcccagaagaccattcctccctgtacttcagctctttacttcctcccaaataaaacctaacttttctaactaactatttaagacttggaatagtccgcttgactagaaga

SEQ ID NO: 320051 - DNA, 120 bp, Artificial Sequence
  ENSG00000135517_20 (sequence is synthesized)
aggggaagaatgtttgtaaattcacctctaatcggactttgattctactataattcagcagaaaattcatagcgctgtgatttttagatcgacctcacataaaacagtccctgcactcgc

SEQ ID NO: 320052 - DNA, 120 bp, Artificial Sequence
  ENSG00000135517_21 (sequence is synthesized)
gaagcgctccacattcaaggccaccttggtgggctccaatcccaccaagccatatttgacacccgtatcatctctgaagagtgccaggctgctgtgggcggttttttcttccagtttgaa

SEQ ID NO: 320053 - DNA, 120 bp, Artificial Sequence
  ENSG00000135517_22 (sequence is synthesized)
actgacgcctgcgggcagagcaaaaagacgggataataacaggggctagaaccctagggctggtgatatattcagatatgaggcaggcagccatgatacacgagcaactagggaagagtc

SEQ ID NO: 320054 - DNA, 120 bp, Artificial Sequence
  ENSG00000135517_23 (sequence is synthesized)
agaatgccaagcgggcaagagagtcgcgaggtcgctttactacggatagctcacggagctgaaaaactcggattgattgcaccctgcggtgagcgtgggccaggcaaccacagtggagat

SEQ ID NO: 320055 - DNA, 120 bp, Artificial Sequence
  ENSG00000135517_24 (sequence is synthesized)
gctcctttgctcctgccattctcactgggaacttcactaaccactgggtgagtgaagggagaggggcaagatcctgaagcccttctggatggttgtggactgcaggttccaggctggatt

SEQ ID NO: 320056 - DNA, 120 bp, Artificial Sequence
  ENSG00000135517_25 (sequence is synthesized)
cctgctttccttctgcgtgtgttggctgctgtaccagcactcagctaagggggctgtcagagagtttggcatgcctgtgtgagcaggattcatgattttgctagaaggagaggctcttgc

SEQ ID NO: 320057 - DNA, 120 bp, Artificial Sequence
  ENSG00000135517_26 (sequence is synthesized)
tcatatttttccttctctggttagtcagggagtatgcactgagtattcactggttgctgaactagcgggtatgaagagagacaactaaatatgagcagaataaattctgctctcagagat

SEQ ID NO: 320058 - DNA, 120 bp, Artificial Sequence
  ENSG00000135517_27 (sequence is synthesized)
caagatgtgttgtgagcacagatgggcctcagccccattccagttctaatacgttatcggctttgtgtgtgaccatgggcaaataatcactctgtgcttcagtttgttttactataaaat

SEQ ID NO: 320059 - DNA, 120 bp, Artificial Sequence
  ENSG00000135517_28 (sequence is synthesized)
gatagctcacggagctgaaaaactcggattgagaggggttttgccatattgcccacgctgctctctgactcctgagctcaaacgatcctcctacctcagcctcctgatttgctgggacta

SEQ ID NO: 320060 - DNA, 120 bp, Artificial Sequence
  ENSG00000135519_0 (sequence is synthesized)
aggctgcagcttctccccgacagacggagggagctgccgagagccggcgccgagcgaagccgagcggaagcccacccgcagccgacacgcgagccgctgccgcggcgggaggtgctgaga

SEQ ID NO: 320061 - DNA, 80 bp, Artificial Sequence
  ENSG00000135519_1 (sequence is synthesized)
tgctgagagcgcggcggccgcggggcctggagcccgggatttgtgggcggcgagggcgcgaggggccgcgcgccatgctc

SEQ ID NO: 320062 - DNA, 80 bp, Artificial Sequence
  ENSG00000135519_2 (sequence is synthesized)
gccagcgtccggcgcgaccccggatcccggtctgcgcattgccccccgacggctgcgctagggagcgcggggcccggcgg

SEQ ID NO: 320063 - DNA, 120 bp, Artificial Sequence
  ENSG00000135519_3 (sequence is synthesized)
tggggcgggcagccgcgggcgcctaagatgccggccatgcggggcctcctggcgccgcagaacaccttcctggacaccatcgctacgcgcttcgacggcacgcacagtaacttcgtgctg

SEQ ID NO: 320064 - DNA, 120 bp, Artificial Sequence
  ENSG00000135519_4 (sequence is synthesized)
ggcaacgcccaggtggcggggctcttccccgtggtctactgctctgatggcttctgtgacctcacgggcttctcccgggctgaggtcatgcagcggggctgtgcctgctccttcctttat

SEQ ID NO: 320065 - DNA, 120 bp, Artificial Sequence
  ENSG00000135519_5 (sequence is synthesized)
gggccagacaccagtgagctcgtccgccaacagatccgcaaggccctggacgagcacaaggagttcaaggctgagctgatcctgtaccggaagagcgggctcccgttctggtgtctcctg

SEQ ID NO: 320066 - DNA, 120 bp, Artificial Sequence
  ENSG00000135519_6 (sequence is synthesized)
gatgtgatacccataaagaatgagaaaggggaggtggctctcttcctagtctctcacaaggacatcagcgaaaccaagaaccgagggggccccgacagatggaaggagacaggtggtggc

SEQ ID NO: 320067 - DNA, 120 bp, Artificial Sequence
  ENSG00000135519_7 (sequence is synthesized)
cggcgccgatatggccgggcacgatccaaaggcttcaatgccaaccggcggcggagccgggccgtgctctaccacctgtccgggcacctgcagaagcagcccaagggcaagcacaagctc

SEQ ID NO: 320068 - DNA, 120 bp, Artificial Sequence
  ENSG00000135519_8 (sequence is synthesized)
aataagggggtgtttggggagaaaccaaacttgcctgagtacaaagtagccgccatccggaagtcgcccttcatcctgttgcactgtggggcactgagagccacctgggatggcttcatc

SEQ ID NO: 320069 - DNA, 120 bp, Artificial Sequence
  ENSG00000135519_9 (sequence is synthesized)
ctgctcgccacactctatgtggctgtcactgtgccctacagcgtgtgtgtgagcacagcacgggagcccagtgccgcccgcggcccgcccagcgtctgtgacctggccgtggaggtcctc

SEQ ID NO: 320070 - DNA, 120 bp, Artificial Sequence
  ENSG00000135519_10 (sequence is synthesized)
ttcatccttgacattgtgctgaatttccgtaccacattcgtgtccaagtcgggccaggtggtgtttgccccaaagtccatttgcctccactacgtcaccacctggttcctgctggatgtc

SEQ ID NO: 320071 - DNA, 120 bp, Artificial Sequence
  ENSG00000135519_11 (sequence is synthesized)
atcgcagcgctgccctttgacctgctacatgccttcaaggtcaacgtgtacttcggggcccatctgctgaagacggtgcgcctgctgcgcctgctgcgcctgcttccgcggctggaccgg

SEQ ID NO: 320072 - DNA, 120 bp, Artificial Sequence
  ENSG00000135519_12 (sequence is synthesized)
tactcgcagtacagcgccgtggtgctgacactgctcatggccgtgttcgccctgctcgcgcactgggtcgcctgcgtctggttttacattggccagcgggagatcgagagcagcgaatcc

SEQ ID NO: 320073 - DNA, 120 bp, Artificial Sequence
  ENSG00000135519_13 (sequence is synthesized)
gagctgcctgagattggctggctgcaggagctggcccgccgactggagactccctactacctggtgggccggaggccagctggagggaacagctccggccagagtgacaactgcagcagc

SEQ ID NO: 320074 - DNA, 120 bp, Artificial Sequence
  ENSG00000135519_14 (sequence is synthesized)
agcagcgaggccaacgggacggggctggagctgctgggcggcccgtcgctgcgcagcgcctacatcacctccctctacttcgcactcagcagcctcaccagcgtgggcttcggcaacgtg

SEQ ID NO: 320075 - DNA, 120 bp, Artificial Sequence
  ENSG00000135519_15 (sequence is synthesized)
tccgccaacacggacaccgagaagatcttctccatctgcaccatgctcatcggcgccctgatgcacgcggtggtgtttgggaacgtgacggccatcatccagcgcatgtacgcccgccgc

SEQ ID NO: 320076 - DNA, 120 bp, Artificial Sequence
  ENSG00000135519_16 (sequence is synthesized)
cccctcaagcagcgcatgctggagtacttccaggccacctgggcggtgaacaatggcatcgacaccaccgagctgctgcagagcctccctgacgagctgcgcgcagacatcgccatgcac

SEQ ID NO: 320077 - DNA, 120 bp, Artificial Sequence
  ENSG00000135519_17 (sequence is synthesized)
ctgcacaaggaggtcctgcagctgccactgtttgaggcggccagccgcggctgcctgcgggcactgtctctggccctgcggcccgccttctgcacgccgggcgagtacctcatccaccaa

SEQ ID NO: 320078 - DNA, 120 bp, Artificial Sequence
  ENSG00000135519_18 (sequence is synthesized)
ggcgatgccctgcaggccctctactttgtctgctctggctccatggaggtgctcaagggtggcaccgtgctcgccatcctagggaagggcgacctgatcggctgtgagctgccccggcgg

SEQ ID NO: 320079 - DNA, 120 bp, Artificial Sequence
  ENSG00000135519_19 (sequence is synthesized)
gagcaggtggtaaaggccaatgccgacgtgaaggggctgacgtactgcgtcctgcagtgtctgcagctggctggcctgcacgacagccttgcgctgtaccccgagtttgccccgcgcttc

SEQ ID NO: 320080 - DNA, 120 bp, Artificial Sequence
  ENSG00000135519_20 (sequence is synthesized)
agtcgtggcctccgaggggagctcagctacaacctgggtgctgggggaggctctgcagaggtggacaccagctccctgagcggcgacaatacccttatgtccacgctggaggagaaggag

SEQ ID NO: 320081 - DNA, 120 bp, Artificial Sequence
  ENSG00000135519_21 (sequence is synthesized)
acagatggggagcagggccccacggtctccccagccccagctgatgagccctccagccccctgctgtcccctggctgcacctcctcatcctcagctgccaagctgctatccccacgtcga

SEQ ID NO: 320082 - DNA, 120 bp, Artificial Sequence
  ENSG00000135519_22 (sequence is synthesized)
acagcaccccggcctcgtctaggtggcagagggaggccaggcagggcaggggctttgaaggctgaggctggcccctctgctcccccacgggccctagaggggctacggctgccccccatg

SEQ ID NO: 320083 - DNA, 120 bp, Artificial Sequence
  ENSG00000135519_23 (sequence is synthesized)
ccatggaatgtgcccccagatctgagccccagggtagtagatggcattgaagacggctgtggctcggaccagcccaagttctctttccgcgtgggccagtctggcccggaatgtagcagc

SEQ ID NO: 320084 - DNA, 120 bp, Artificial Sequence
  ENSG00000135519_24 (sequence is synthesized)
agcccctcccctggaccagagagcggcctgctcactgttccccatgggcccagcgaggcaaggaacacagacacactggacaagcttcggcaggcggtgacagagctgtcagagcaggtg

SEQ ID NO: 320085 - DNA, 120 bp, Artificial Sequence
  ENSG00000135519_25 (sequence is synthesized)
ctgcagatgcgggaaggactgcagtcacttcgccaggctgtgcagcttgtcctggcgccccacagggagggtccgtgccctcgggcatcgggagaggggccgtgcccagccagcacctcc

SEQ ID NO: 320086 - DNA, 120 bp, Artificial Sequence
  ENSG00000135519_26 (sequence is synthesized)
gggcttctgcagcctctgtgtgtggacactggggcatcctcctactgcctgcagcccccagctggctctgtcttgagtgggacttggccccaccctcgtccggggcctcctcccctcatg

SEQ ID NO: 320087 - DNA, 120 bp, Artificial Sequence
  ENSG00000135519_27 (sequence is synthesized)
gcaccctggccctggggtcccccagcgtctcagagctccccctggcctcgagccacagctttctggacctccacctcagactcagagccccctgcctcaggagacctctgctctgagccc

SEQ ID NO: 320088 - DNA, 120 bp, Artificial Sequence
  ENSG00000135519_28 (sequence is synthesized)
agcacccctgcctcccctcctccttctgaggaaggggctaggactgggcccgcagagcctgtgagccaggctgaggctaccagcactggagagcccccaccagggtcagggggcctggcc

SEQ ID NO: 320089 - DNA, 120 bp, Artificial Sequence
  ENSG00000135519_29 (sequence is synthesized)
ttgccctgggacccccacagcctggagatggtgcttattggctgccatggctctggcacagtccagtggacccaggaagaaggcacaggggtctgagtaccagccctagaactcagcgtt

SEQ ID NO: 320090 - DNA, 120 bp, Artificial Sequence
  ENSG00000135519_30 (sequence is synthesized)
gccaggtgtgctgccatctgctgttcggcccaacctcagagtgaaggcagggtggcagcctccccacggactccatgcggcccgctggctcagggcagggagcctggaagcaaaggagga

SEQ ID NO: 320091 - DNA, 120 bp, Artificial Sequence
  ENSG00000135519_31 (sequence is synthesized)
cctggctcctgactctcagagaggataggctggatccctggggcaggcctctcctcggcctgctcctctgacctcccggtctccctctgcaggctgggggcagaggcctgaggacaagga

SEQ ID NO: 320092 - DNA, 120 bp, Artificial Sequence
  ENSG00000135519_32 (sequence is synthesized)
agagctttgccatcccctgcatgtgcccctgcctctacctgtccccaaatttttatattaaaaaaaaaaaataaaataaactactttggaacctggtgctttttatttacaaaagaaaaa

SEQ ID NO: 320093 - DNA, 120 bp, Artificial Sequence
  ENSG00000135519_33 (sequence is synthesized)
tcatgctgctcaagcttggccccccagctaaactgtaagctcctaggggaagggaccccatgttagctttctcctgggctcctggtcagttccacgctcctgcagcctgtgtgtgtggac

SEQ ID NO: 320094 - DNA, 120 bp, Artificial Sequence
  ENSG00000135521_0 (sequence is synthesized)
gtgacgttatcgccgggtcctggggctgcacgtgtggtgaggcctacagaagcggccttcagctggaccttggtctccccgccggacttcgagggtgtcatcgccgcccctgttgggggt

SEQ ID NO: 320095 - DNA, 120 bp, Artificial Sequence
  ENSG00000135521_1 (sequence is synthesized)
gagcgccgcgcggctgcagcatgcctcacaggaagaaaaagccctttatagagaagaagaaagctgtgtcttttcacttggtccaccggagccaacgagatcctttagcagcagatgaga

SEQ ID NO: 320096 - DNA, 120 bp, Artificial Sequence
  ENSG00000135521_2 (sequence is synthesized)
gtgcaccccagagggttctattgcccacacaaaaaatagacaatgaagaaaggcgagcagaacagaggaagtatggagtgttctttgatgacgactatgactacctgcagcacctgaagg

SEQ ID NO: 320097 - DNA, 120 bp, Artificial Sequence
  ENSG00000135521_3 (sequence is synthesized)
aaccatctgggccttcagagcttattccctcaagtaccttcagtgcacacaacaggagagaggagaaagaagaaacgctagtaattccaagcactggaattaagttgccttcatcagtgt

SEQ ID NO: 320098 - DNA, 120 bp, Artificial Sequence
  ENSG00000135521_4 (sequence is synthesized)
ttgcttcagagtttgaggaagatgttggattgttaaataaagcagctccagtttcaggacctcgactggattttgatcctgacattgttgcagctcttgatgatgattttgactttgatg

SEQ ID NO: 320099 - DNA, 120 bp, Artificial Sequence
  ENSG00000135521_5 (sequence is synthesized)
atccagataatctgcttgaggatgactttattcttcaggccaataaggcaacaggagaggaagagggaatggatatacagaaatctgagaatgaagatgacagcgagtgggaagatgtgg

SEQ ID NO: 320100 - DNA, 120 bp, Artificial Sequence
  ENSG00000135521_6 (sequence is synthesized)
atgatgagaagggagatagcaatgatgactatgactctgcaggcctattgtcagatgaagactgtatgtctgtgcccggaaaaactcacagagctatagcagatcacttgttctggagtg

SEQ ID NO: 320101 - DNA, 120 bp, Artificial Sequence
  ENSG00000135521_7 (sequence is synthesized)
agaaatgaacagctgaccctacatgatgagaggtttgagaagttttatgagcaatatgatgatgatgaaattggagctctggataatgcagaattggaaggttctattcaagtggacagc

SEQ ID NO: 320102 - DNA, 120 bp, Artificial Sequence
  ENSG00000135521_8 (sequence is synthesized)
aatcgcttacaggaagttttgaatgactactataaagagaaggcagagaattgtgtaaaattgaatacccttgaacccttggaggatcaagacctgccaatgaatgagcttgatgagtct

SEQ ID NO: 320103 - DNA, 120 bp, Artificial Sequence
  ENSG00000135521_9 (sequence is synthesized)
gaggaggaagaaatgattactgtagtccttgaagaagccaaagagaagtgggattgtgaatctatttgtagtacatactcaaatttatataaccatccacagcttatcaagtatcaacca

SEQ ID NO: 320104 - DNA, 120 bp, Artificial Sequence
  ENSG00000135521_10 (sequence is synthesized)
aagcccaaacaaattcgaatatcttctaaaacaggaatacctctcaatgtcttaccaaagaaaggactcacagcaaagcaaactgaaagaatacagatgattaatggcagtgatcttcct

SEQ ID NO: 320105 - DNA, 120 bp, Artificial Sequence
  ENSG00000135521_11 (sequence is synthesized)
aaagtatcaactcagccacgttctaaaaatgaaagcaaagaagataaaagagcaagaaagcaagctataaaagaagagcgcaaggaacgaagagtggagaagaaagctaacaaattagca

SEQ ID NO: 320106 - DNA, 120 bp, Artificial Sequence
  ENSG00000135521_12 (sequence is synthesized)
tttaaactggagaaaagaaggcaagaaaaagagctgctgaacttgaagaagaatgttgagggtctaaagctatagacagtggagcatacagggcaaggcactttattaggggctcctcat

SEQ ID NO: 320107 - DNA, 120 bp, Artificial Sequence
  ENSG00000135521_13 (sequence is synthesized)
ctttggttattgactagaaacttcagaaagacaaaactgtttgccatttttactggcagataagaggaaaatacaatatttgtattatttttatactagtaagtgtcccctgccaaccat

SEQ ID NO: 320108 - DNA, 120 bp, Artificial Sequence
  ENSG00000135521_14 (sequence is synthesized)
cttgtaaatattgtaatactttaatttttaatattataagcttacatttgctctgaagtaaatgacttcatgaatgtgaaatgtttgataaattaaaggaaaatatcttcataacgtgaa

SEQ ID NO: 320109 - DNA, 120 bp, Artificial Sequence
  ENSG00000135525_0 (sequence is synthesized)
gggaaatagcgtctccgtaccctcgccccacctgggctgctcctcggaccgccgctcgtcccagactccaggaggcgccaccaggcctcgctgaccccgctccatatctccgggagccct

SEQ ID NO: 320110 - DNA, 120 bp, Artificial Sequence
  ENSG00000135525_1 (sequence is synthesized)
cagctggtcggccgcggcgaccggaagctccggactgaggtactggttccgcccgccgctcttccagccgagactcggcagcggcggtcggagcggctgccacgccgcacctgcccgcga

SEQ ID NO: 320111 - DNA, 120 bp, Artificial Sequence
  ENSG00000135525_2 (sequence is synthesized)
caggccgcagccgactgccgcgctctctgtccccgccctccgccatccccggactgcgctcacctgtctgggccgctggcctgggaggcgggggccggcgggagccaagccgaggaaagg

SEQ ID NO: 320112 - DNA, 120 bp, Artificial Sequence
  ENSG00000135525_3 (sequence is synthesized)
ccaagccgaggaaagggcggagcggctctccgggcgcgtcatcggagcaccatggcggagctaggagctggcggcgacggccacaggggcggcgacggcgcagtgcgaagcgaaacagca

SEQ ID NO: 320113 - DNA, 120 bp, Artificial Sequence
  ENSG00000135525_4 (sequence is synthesized)
cccgacagctacaaagtgcaagataagaaaaatgcctccagccgccctgcctctgcaatttcaggacaaaataacaaccactcaggaaataaaccagaccctccgcctgtgttacgtgtt

SEQ ID NO: 320114 - DNA, 120 bp, Artificial Sequence
  ENSG00000135525_5 (sequence is synthesized)
gatgaccggcagcggctggcccgggagcgacgtgaggaacgggagaaacagctagctgcaagagaaatagtgtggttagaaagagaagagcgagccaggcagcactacgagaagcacctg

SEQ ID NO: 320115 - DNA, 120 bp, Artificial Sequence
  ENSG00000135525_6 (sequence is synthesized)
gaagagcggaagaagaggttggaggagcagaggcagaaggaggagcggaggagggctgctgtggaggagaagcggaggcagagacttgaggaggacaaagaacgccacgaagctgttgta

SEQ ID NO: 320116 - DNA, 120 bp, Artificial Sequence
  ENSG00000135525_7 (sequence is synthesized)
cggcgcacaatggaaaggagccagaagccaaaacagaagcataaccgttggtcgtggggaggctctctccatgggagccctagcatccacagtgcagatccagacaggcggtcagtttcc

SEQ ID NO: 320117 - DNA, 120 bp, Artificial Sequence
  ENSG00000135525_8 (sequence is synthesized)
accatgaatctttcgaaatatgttgatcccgtcattagcaagcggctctcctcttcatctgcaactttactaaattctccagatagagctcgccgcctgcagctcagcccatgggagagc

SEQ ID NO: 320118 - DNA, 120 bp, Artificial Sequence
  ENSG00000135525_9 (sequence is synthesized)
agcgttgttaacagactcctgacgcccacacattcgttcctggccagaagtaaaagcacagctgccttgtctggagaagcagcatcttgcagccccatcatcatgccctacaaagctgca

SEQ ID NO: 320119 - DNA, 120 bp, Artificial Sequence
  ENSG00000135525_10 (sequence is synthesized)
cactctagaaattcgatggatcgaccaaaactctttgtaacaccacctgagggctcttctcgcaggaggatcattcatggcacagcgagctataaaaaagaaagagagagagaaaatgta

SEQ ID NO: 320120 - DNA, 120 bp, Artificial Sequence
  ENSG00000135525_11 (sequence is synthesized)
ctcttcctcacatctggcacccgaagggctgtatctccatctaatcccaaagcaagacaaccagctcgctcccgactttggcttccgtccaagtctcttcctcatttgcctggcacaccc

SEQ ID NO: 320121 - DNA, 120 bp, Artificial Sequence
  ENSG00000135525_12 (sequence is synthesized)
agaccgacatcctccttgccacccggctcagtcaaagctgctcctgctcaggtccggcccccatcccccggcaacatccgccctgtcaagagggaagtcaaagtggagcctgagaagaaa

SEQ ID NO: 320122 - DNA, 120 bp, Artificial Sequence
  ENSG00000135525_13 (sequence is synthesized)
gatcctgagaaggaacctcagaaagttgccaatgagccctcactaaagggcagagcacctttagtgaaggtagaagaagccacagttgaagagcggacacctgctgaaccagaagttggc

SEQ ID NO: 320123 - DNA, 120 bp, Artificial Sequence
  ENSG00000135525_14 (sequence is synthesized)
cctgctgctccagccatggccccagctccagcctcggccccagctccagcctcggccccagctccagccccggtccccaccccagccatggtctcagccccgtcatccactgtgaatgcc

SEQ ID NO: 320124 - DNA, 120 bp, Artificial Sequence
  ENSG00000135525_15 (sequence is synthesized)
agtgcttctgttaagacttctgcaggcaccaccgacccagaggaggccacaaggcttctagctgagaagaggcggctggcccgagagcagagagaaaaggaagaaagggagaggagggag

SEQ ID NO: 320125 - DNA, 120 bp, Artificial Sequence
  ENSG00000135525_16 (sequence is synthesized)
caggaagagcttgaaagacaaaagagagaggaattggctcaacgtgtggctgaagagaggacgactcgccgtgaggaggagtcgcgcaggctggaagccgagcaggcccgggagaaggag

SEQ ID NO: 320126 - DNA, 120 bp, Artificial Sequence
  ENSG00000135525_17 (sequence is synthesized)
aaagaagaagaagctcgcgttcgtgaagaagcagagagggtccggcaggaacgagagaagcatttccagagagaagagcaagagcgcctggagagaaagaagcgacttgaggagattatg

SEQ ID NO: 320127 - DNA, 120 bp, Artificial Sequence
  ENSG00000135525_18 (sequence is synthesized)
aaaagaaccaggagaacagaagctacagataagaaaaccagtgatcagagaaacggtgatatagccaagggagctctcactggaggaacagaggtgtctgcacttccatgtacaacaaac

SEQ ID NO: 320128 - DNA, 120 bp, Artificial Sequence
  ENSG00000135525_19 (sequence is synthesized)
gctccgggaaatggaaagccagttggcagcccacatgtggttacctcacaccagtcaaaagtgacagtggagagcactcccgatttggaaaaacaaccaaatgaaaatggtgtatctgtt

SEQ ID NO: 320129 - DNA, 120 bp, Artificial Sequence
  ENSG00000135525_20 (sequence is synthesized)
cagaatgaaaattttgaagaaattataaacttacccattggatctaaaccatccagattagatgtcaccaacagtgagagcccagaaattcctttgaatccaattttggcctttgatgat

SEQ ID NO: 320130 - DNA, 120 bp, Artificial Sequence
  ENSG00000135525_21 (sequence is synthesized)
gaagggacacttgggcccctgcctcaggtagatggtgttcagacacagcagactgcagaagttatatgagtgtttcttctgaagaaccaaagctgaaatttaatgagaatttctacaatt

SEQ ID NO: 320131 - DNA, 120 bp, Artificial Sequence
  ENSG00000135525_22 (sequence is synthesized)
aatggaattcctttcctgctataaaggagcatcccctccacccgttttctagagttcttgaccatcattttgaaaagatttattaaaactagctaaagacaacagactggatagcttttc

SEQ ID NO: 320132 - DNA, 120 bp, Artificial Sequence
  ENSG00000135525_23 (sequence is synthesized)
taataattttcatcaataggaaaaaagaaatacgtctcattcttcaatactttaaaatggctttttccagtgtgctccttcttagcaatcaatatttttctgcattctttaaaagacaag

SEQ ID NO: 320133 - DNA, 120 bp, Artificial Sequence
  ENSG00000135525_24 (sequence is synthesized)
agaatttggttataaaagaaatgggctgactaggcatgatttttttggtcttaaaagcttaacatgtaaaattggcaaaaaaaattttttaccttttataatacttgaaaaataagtacc

SEQ ID NO: 320134 - DNA, 120 bp, Artificial Sequence
  ENSG00000135525_25 (sequence is synthesized)
tctttgttctacaagtagaatgaataggagaagagtttaagcctgtttttttaaaatattattgcaaagagctctatttgtagaagcaaattataggcagattaccaggttcttataaat

SEQ ID NO: 320135 - DNA, 120 bp, Artificial Sequence
  ENSG00000135525_26 (sequence is synthesized)
acagcttgtacatggacattctgcaaacccagctgtcacatttttcttgcaactccttttgcaaaagcagactaaaatgttttaaaatgtgaaaaaacattattttttcaaagcaagaaa

SEQ ID NO: 320136 - DNA, 120 bp, Artificial Sequence
  ENSG00000135525_27 (sequence is synthesized)
ataatttactgccctcttacataatgtatttataaagtttttccagataaactaatcaaataaattagaataatgtgacaacattacaaatttaatttgttagctgcattccttctgatg

SEQ ID NO: 320137 - DNA, 120 bp, Artificial Sequence
  ENSG00000135525_28 (sequence is synthesized)
ttaccacgatagaatgttactgatgattcagggctatttctgaagtctgtatgttgctgctgtccccagtgatggtggacttatctttgccttacctgatcacaaattatgttggggaaa

SEQ ID NO: 320138 - DNA, 120 bp, Artificial Sequence
  ENSG00000135525_29 (sequence is synthesized)
ataaagatttaatatttctttaaatagaaaaagaatttggttttgctcgtttaagagcaatgagaaaatgatggaatgttgactgtgtttggcacacaggacacggaccttcatggaagt

SEQ ID NO: 320139 - DNA, 120 bp, Artificial Sequence
  ENSG00000135525_30 (sequence is synthesized)
ccttgctctgcgtggcatctgtcagcttttcacctttcattcttattcttcacttttgctgctgagcctagctgtacaaacttgcactttcatttgctaatataaattcagttttatttt

SEQ ID NO: 320140 - DNA, 120 bp, Artificial Sequence
  ENSG00000135525_31 (sequence is synthesized)
accattttagagactactaatgattaaatgtagaaggagagggtgcacatgtttttatgtggagtgtttaaaagataaatttataccactgtaatgtgcagcttttattaaaagagaaat

SEQ ID NO: 320141 - DNA, 120 bp, Artificial Sequence
  ENSG00000135525_32 (sequence is synthesized)
tggttgaactgctaggttgaatgagagacttcatctattggactattttttttaatccaggcatatggtctttagtaatggcttgtaatttgtgaaaacattaatttgggggttttccct

SEQ ID NO: 320142 - DNA, 120 bp, Artificial Sequence
  ENSG00000135525_33 (sequence is synthesized)
gttttcagttgtccatgtacacatagtcattatattagaaaagaaatctgttcaacaaacttgtttaatttgtttaaatcaacatagcatgaaacaccaaataaaatgtttgacatagtt

SEQ ID NO: 320143 - DNA, 120 bp, Artificial Sequence
  ENSG00000135525_34 (sequence is synthesized)
gtaaccctctgctggtgagttcccagaacccagcatcctgcaagctgccgcttctcagctggggagatggagccgctctgggcccttcttgattaggatatgttagggttgtcagggcaa

SEQ ID NO: 320144 - DNA, 120 bp, Artificial Sequence
  ENSG00000135525_35 (sequence is synthesized)
ctgttaacggcagcatatcatattttcccctctctgctgtgggctgaatattttactgtgtggtagcaggaagaagattggaaaaaggtgctgcagcaggaagaagctgggatctgattg

SEQ ID NO: 320145 - DNA, 120 bp, Artificial Sequence
  ENSG00000135525_36 (sequence is synthesized)
cctgttgattaagcatataggatagccttatttaaaatttagagcagtaggtgtattttggctgtttttctttttcatgtgtgtttttaaactttagtcatcattagcaaacggaaagcc

SEQ ID NO: 320146 - DNA, 120 bp, Artificial Sequence
  ENSG00000135525_37 (sequence is synthesized)
ttctaagtaatcaagttttaattagaagtggtgcaaaattcttaattatattgtgttaaagagcagcgctgccagagaatgaccctgacctttacaatggctggcttgctttttggccag

SEQ ID NO: 320147 - DNA, 120 bp, Artificial Sequence
  ENSG00000135525_38 (sequence is synthesized)
cactggaaaaatctatatttacttgcagaccttaaggaggtcttcagtattcaccctacattaaggggagcgctcaggaatcaaatatggccctcagtatgaaatgagagtgaatgggct

SEQ ID NO: 320148 - DNA, 120 bp, Artificial Sequence
  ENSG00000135525_39 (sequence is synthesized)
aaaaacaagtagcagcggtatgcctggatcagctacagctctccgacatgagagactgaagaagaccaatgcaaggccaattcctcttggtttattcaccattaatgaggaagacgaaca

SEQ ID NO: 320149 - DNA, 120 bp, Artificial Sequence
  ENSG00000135525_40 (sequence is synthesized)
agtgggagggggctggtaggggaggtggggaagctgctgctaggtgaggggaactgcagggcctcagttgccaagtggctggtactatctgtcagctgtttgcaaactgtttacccatag

SEQ ID NO: 320150 - DNA, 120 bp, Artificial Sequence
  ENSG00000135535_0 (sequence is synthesized)
agtctcggaggcggcgccgcaggggattgaggggttgactgagcgttgcgagccttagctttctcccgaacgccagcgctgaggacacgatgtcgcggctctcccgctcactgctttggg

SEQ ID NO: 320151 - DNA, 120 bp, Artificial Sequence
  ENSG00000135535_1 (sequence is synthesized)
ccgccacctgcctgggcgtgctctgcgtgctgtccgcggacaagaacacgacccagcacccgaacgtgacgactttagcgcccatctccaacgtaacctcggcgccggtgacgtccctcc

SEQ ID NO: 320152 - DNA, 120 bp, Artificial Sequence
  ENSG00000135535_2 (sequence is synthesized)
cgctggtcaccactccggcaccagaaacctgtgaaggtcgaaacagctgcgtttcctgttttaatgttagcgttgttaatactacctgcttttggatagaatgtaaagatgagagctatt

SEQ ID NO: 320153 - DNA, 120 bp, Artificial Sequence
  ENSG00000135535_3 (sequence is synthesized)
gttcacataactcaacagttagtgattgtcaagtggggaacacgacagacttctgttccgtttccacggccactccagtgccaacagccaattctacagctaaacccacagttcagccct

SEQ ID NO: 320154 - DNA, 120 bp, Artificial Sequence
  ENSG00000135535_4 (sequence is synthesized)
ccccttctacaacttccaagacagttactacatcaggtacaacaaataacactgtgactccaacctcacaacctgtgcgaaagtctacctttgatgcagccagtttcattggaggaattg

SEQ ID NO: 320155 - DNA, 120 bp, Artificial Sequence
  ENSG00000135535_5 (sequence is synthesized)
tcctggtcttgggtgtgcaggctgtaattttctttctttataaattctgcaaatctaaagaacgaaattaccacactctgtaaacagacccattgaattaataaggactggtgattcatt

SEQ ID NO: 320156 - DNA, 120 bp, Artificial Sequence
  ENSG00000135535_6 (sequence is synthesized)
tgtgtaactcactgaagccaaaatactatcttttaagatgtcccacatggaagacgctattccaggatctttaaatttccatggatgcatataggatgtttgggagcatcatccgtgaag

SEQ ID NO: 320157 - DNA, 120 bp, Artificial Sequence
  ENSG00000135535_7 (sequence is synthesized)
aaaaaatcaattaaatcattgtgttcaacaggaatatttaaaatattctgcatgaatcctgtggctgtcttattttaaatagctgctgctgtgggattatattttttttccttaacatgc

SEQ ID NO: 320158 - DNA, 120 bp, Artificial Sequence
  ENSG00000135535_8 (sequence is synthesized)
caaatataactttctgaaagtgatggaaaatgttgtcttgtgcagacaacatcatggctcttggcagtttaaatttagtaattttaatttagtgaacagaattgagaagaacgtgccaaa

SEQ ID NO: 320159 - DNA, 120 bp, Artificial Sequence
  ENSG00000135535_9 (sequence is synthesized)
tgagaatcaattaggtggatttttggctgtcatttcaaaagtggaataaatttattaatttagtagtactaaatggtatccttagattaaaattttgtgcttgataacagctgttttttc

SEQ ID NO: 320160 - DNA, 120 bp, Artificial Sequence
  ENSG00000135535_10 (sequence is synthesized)
tacattagaaataagatgccacacaaggaactacattccagatttaaagaaatgaaaggataccattagtgtgtataacagattattgttcatacttgtaaagcatcttatgtcattgag

SEQ ID NO: 320161 - DNA, 120 bp, Artificial Sequence
  ENSG00000135535_11 (sequence is synthesized)
aatataaagaacagtgccttagaagacagtgaaaggtaagctctagcttaatgtctatgatttgttctttgacattaaggaaggtaaggattggtcagaggatgtaacttgatgtgagca

SEQ ID NO: 320162 - DNA, 120 bp, Artificial Sequence
  ENSG00000135535_12 (sequence is synthesized)
atcatactgttaatattttattgaaaatttatttcagagcggagaaacttaagctaaagtctgttatacagaattgaaagccttcgtatcttgaacctcccaacatttttcttatggctg

SEQ ID NO: 320163 - DNA, 120 bp, Artificial Sequence
  ENSG00000135535_13 (sequence is synthesized)
ttgaaaagtatagagctaaattgatttaattacactttcctttgtactttaaaaaaaagtatgctagcactattgtaccttgaaaggatttccaccagactgtcttgagtagtgacttct

SEQ ID NO: 320164 - DNA, 120 bp, Artificial Sequence
  ENSG00000135535_14 (sequence is synthesized)
ttggtgaggcaagaaggatatacattattttagaatcatttactatttaaatgagacaatcatattattttagaatcatttattttaaatgagacaatcattttaagttttaagataaca

SEQ ID NO: 320165 - DNA, 120 bp, Artificial Sequence
  ENSG00000135535_15 (sequence is synthesized)
gaagtgaccaatgtaatttcacaacacctaaggattttttggttgatcaggttactgtagatttttactgattgtcctggatgaatagactgtgctttttctttttctctcccttccttc

SEQ ID NO: 320166 - DNA, 120 bp, Artificial Sequence
  ENSG00000135535_16 (sequence is synthesized)
ttggtttcccatagtataataagcatgcatactttaacttctatagttttctcctttagagggtcgtcttcagttttagaggtttacttctcccttgcctttgactcattggactagtgc

SEQ ID NO: 320167 - DNA, 120 bp, Artificial Sequence
  ENSG00000135535_17 (sequence is synthesized)
agaggctttaagtagtttaaaatgggcttttgcttttctaggtcattaacgttttttatttagtttctttagccaatagtggctgagtttcgcacttgattttcaatattttatagtaag

SEQ ID NO: 320168 - DNA, 120 bp, Artificial Sequence
  ENSG00000135535_18 (sequence is synthesized)
aaatgacaaactgctttgtttcatttcataaacaaactctgcatttagataactattaaaggttgttaagatgaagatttactgtttctttgttactcgttggtacagctgtttgtttta

SEQ ID NO: 320169 - DNA, 120 bp, Artificial Sequence
  ENSG00000135535_19 (sequence is synthesized)
cttgcacatttgtacatatacttaatgttttcaagtgccttaattgtttaaaatctctggcttcaaagtttcttggggaaaggtcggtttacctcacattttttgtttccattagtaata

SEQ ID NO: 320170 - DNA, 120 bp, Artificial Sequence
  ENSG00000135535_20 (sequence is synthesized)
ttctaggtacctcacaaaatgtattatggtgccatggctgttagtttttagtgagtgctgtaggattaattcgaaaataggcagaattccattcctcccaaggtggcaaaaattagctat

SEQ ID NO: 320171 - DNA, 120 bp, Artificial Sequence
  ENSG00000135535_21 (sequence is synthesized)
actgatgtaattgtcatttacctgggtatgaattccctgacacacattcatgtcaacatatgtagcaaattttgtgaaaacataacaatttgaagcttctgtaattttgagcactgctct

SEQ ID NO: 320172 - DNA, 120 bp, Artificial Sequence
  ENSG00000135535_22 (sequence is synthesized)
aacaacaagcataatataaaattagttagattttgcaagtctacaaatgagctcttgcaacagaactcacagcctttttacttttttcccctaactttagcaatgtagtatcttgagcca

SEQ ID NO: 320173 - DNA, 120 bp, Artificial Sequence
  ENSG00000135535_23 (sequence is synthesized)
ttaatttttgggtttttttaaaatccagaaggtatatagaaaccttttcagatttttcatctgatttgttcttgcagatgttcttctatcaaataccttattttaccttacagatatttg

SEQ ID NO: 320174 - DNA, 120 bp, Artificial Sequence
  ENSG00000135535_24 (sequence is synthesized)
ttgcacaggcagatactgctgtatttagacatttctatttcagttcattaaaaactgcaaaaccaatctgtatcatgtaccaaactgacttaaaataaatctacatgtttattgaattaa

SEQ ID NO: 320175 - DNA, 120 bp, Artificial Sequence
  ENSG00000135535_25 (sequence is synthesized)
ggaagtccgggaaagagaaacttaaagacggtaatgctcgttcgtgtctcagacttgagtctgagaaggtcgcttgagatttaattacattggttttgcagataggaatagaatgtagct

SEQ ID NO: 320176 - DNA, 120 bp, Artificial Sequence
  ENSG00000135535_26 (sequence is synthesized)
gacgtttgagcacgtagttagtgaaaacttcacacttcaaagtatgcgaaaaggaagaaaagtacccatgtatgtaccgggtgttttgcgtacgtatcctaaggctaaactggaagaaac

SEQ ID NO: 320177 - DNA, 120 bp, Artificial Sequence
  ENSG00000135535_27 (sequence is synthesized)
gctgggtaatgagaaccaaattgcaaatttgcagaatttttttcctaacattgtcaaacaattggtaatagtgttttgagattgaacagaatttgatgtgtttaatttgtaaagtgtatt

SEQ ID NO: 320178 - DNA, 120 bp, Artificial Sequence
  ENSG00000135535_28 (sequence is synthesized)
tttttgtggttacacagaagcagtaaaaaccttgacagaaataatgagctttaacataaccacagcctctaatctaagaattctgtgtaaggaccagtcttaccagagataaggtcaaat

SEQ ID NO: 320179 - DNA, 120 bp, Artificial Sequence
  ENSG00000135535_29 (sequence is synthesized)
attttcctgtaagattttctcagcatggagagttgagagaactgtttaatcaagagcaggatggatggaagtatgtacaacaatgcttgaagtaagagggaaaaaagaaagcaaatgggt

SEQ ID NO: 320180 - DNA, 120 bp, Artificial Sequence
  ENSG00000135535_30 (sequence is synthesized)
ctgaacatatccatcagtattatttgtatatcacctattagcttctaagtagtatcaatattaataaaagaagtcttaagctctctgtgactcatggtcatgtgaaaattagaatacctt

SEQ ID NO: 320181 - DNA, 120 bp, Artificial Sequence
  ENSG00000135535_31 (sequence is synthesized)
agtttcctaggattcagtcaaccttgggattatgggtagtcagcctgttacgagagtcctggtctttaaagatctacttttagcaacaattcaggtatttagcaatatctgaaaactgtc

SEQ ID NO: 320182 - DNA, 120 bp, Artificial Sequence
  ENSG00000135535_32 (sequence is synthesized)
aagccctgctcttttagtgtatatttactgttaaagcacagaacttcctcttttatattagtagaatttgggaggatgctgattcctattgaggtttttgttcgattgtttgaaagtcta

SEQ ID NO: 320183 - DNA, 120 bp, Artificial Sequence
  ENSG00000135535_33 (sequence is synthesized)
atgcagtgaaaagattactcatttctgtgcttcatcaacagttatttggcaccctttccctgtctttcgtgggttaagcatatcactttgaagtctgttcagttatgtactttaaacaga

SEQ ID NO: 320184 - DNA, 120 bp, Artificial Sequence
  ENSG00000135535_34 (sequence is synthesized)
agtaacatttgttttccaaattctctttagccttcaaacccttttttctgaaatagtacaaaaatgaatgtttgcatagcaccttacatttttataaaaatataaatctcatatgattaa

SEQ ID NO: 320185 - DNA, 120 bp, Artificial Sequence
  ENSG00000135535_35 (sequence is synthesized)
tcttcctcatctttccccagatcatccctagcggcccaccagcataagcatatcctcatattgaagcccttgcactctgaagcctgacttacctaatgatttcctgagacaaaataagct

SEQ ID NO: 320186 - DNA, 120 bp, Artificial Sequence
  ENSG00000135535_36 (sequence is synthesized)
ctcttagctagtgactcctatagtgcactttccaaaaatttgaaccctacccttaggacaacctcttaatgaaacctttctcaaatgctccagcaaactttgaatttatttggtagccat

SEQ ID NO: 320187 - DNA, 120 bp, Artificial Sequence
  ENSG00000135535_37 (sequence is synthesized)
ttggatgttagaaaaaatgttaatttgtagaaactatattcacatccttcctttctgaaagccttggtcagacttctattagtattcatactaccaatagaaacttaataggtgatatac

SEQ ID NO: 320188 - DNA, 72 bp, Artificial Sequence
  ENSG00000135535_38 (sequence is synthesized)
agtattcatactaccaatagaaacttaataggtgatatactggctggacgaggtgattgaggtcaggagttc

SEQ ID NO: 320189 - DNA, 120 bp, Artificial Sequence
  ENSG00000135535_39 (sequence is synthesized)
gagactccatctcaaaaaaaaaaaaagagtgctttagtccctaaaatgattttacattcaaactaatccttctcagagtgtacatttctttagcagtatcatcagctattaggttggtgc

SEQ ID NO: 320190 - DNA, 120 bp, Artificial Sequence
  ENSG00000135535_40 (sequence is synthesized)
ttaggttggtgcaaaagtaattgcagttcttgcctttagtaatggcaactcaaatagtattttggcctcatgcagtgtggtggactagagcttacttaaccttgggctcttagaatctta

SEQ ID NO: 320191 - DNA, 120 bp, Artificial Sequence
  ENSG00000135535_41 (sequence is synthesized)
ggctcttagaatcttacgttggggaactgtgggcccagggcccctgttcttataaagctttattggaacataccatgcccattcgtctgcatgttgactttggctgcttttgcatcacac

SEQ ID NO: 320192 - DNA, 120 bp, Artificial Sequence
  ENSG00000135535_42 (sequence is synthesized)
agtgcccaaagagtaaaatatttgctttcaacccatttaagaaaagtttgccaactcctgaagtgaagaagataggcaaatctcaatacccttgtaagagagaacttacgactttaatag

SEQ ID NO: 320193 - DNA, 120 bp, Artificial Sequence
  ENSG00000135535_43 (sequence is synthesized)
tttttgtcttaggagaaagattatgaagaacctatagtttcctcacctaaatgttcttgcccttggcagtgagcaagataagagttttcgcaaattttatccagatgtatacatagattt

SEQ ID NO: 320194 - DNA, 120 bp, Artificial Sequence
  ENSG00000135535_44 (sequence is synthesized)
tatacaagatagatacatagatattaacaattttatgattgcttattgttttaaaatacacttaaatcctagtattcttgggtgcatagctatgttagtgaaccattaactgaaatttgg

SEQ ID NO: 320195 - DNA, 120 bp, Artificial Sequence
  ENSG00000135535_45 (sequence is synthesized)
cttttggtctctaaaaaattgaaagcatgttgaagttggcaggattattttttaaagctgttagataactgggaagctagaaatttaaggttttttaaaaagacattttgttttcattcc

SEQ ID NO: 320196 - DNA, 120 bp, Artificial Sequence
  ENSG00000135535_46 (sequence is synthesized)
gatgaagtattgaaagcagtgcctctgcagaactattttttaggcaggagcaaagcaaacgagaatgtttggaggcatctagtttctaggaaaatgaatggagcccaattcttttttttc

SEQ ID NO: 320197 - DNA, 120 bp, Artificial Sequence
  ENSG00000135535_47 (sequence is synthesized)
ttttattttgctgctttttctcactggaaaatagagcccaattttatagtccgttcttctccagaaattgaattatggtgatgagtacttgtttctggattgtttggcctaggatgaact

SEQ ID NO: 320198 - DNA, 120 bp, Artificial Sequence
  ENSG00000135535_48 (sequence is synthesized)
attgacaaataccttgttaacctgaattgtatgcacttgaatatgggcttttagatgttgtctccagttgtggaggatcctgtcgagagtggatcatttatgaatcgagaatccctggga

SEQ ID NO: 320199 - DNA, 120 bp, Artificial Sequence
  ENSG00000135535_49 (sequence is synthesized)
aattatctttgtttgcagcagaatgggcatcatcagtgcttgggttcaacctgttaaactactactgttactactaaaaatctcagggttttatctgatgtttgggggtagtggttttcc

SEQ ID NO: 320200 - DNA, 120 bp, Artificial Sequence
  ENSG00000135535_50 (sequence is synthesized)
tatgtgtagtgttggtattatatcaaagcctttttctcgatatttttatgtattaaggatgctttgaaatgcctaaatccttagtggctgtgggtgtcttccaatagttgtcctgtgaaa

SEQ ID NO: 320201 - DNA, 120 bp, Artificial Sequence
  ENSG00000135535_51 (sequence is synthesized)
aaggattggttagacagataccatcaggcactgtactgagagtgaccactagcttgtttttctaatgcgtttacttacagctttgtaatgattggaatttcttagtaaaccagtataaag

SEQ ID NO: 320202 - DNA, 120 bp, Artificial Sequence
  ENSG00000135535_52 (sequence is synthesized)
ttttatcatttatctgaattagtaattttgatgctgtatgtaatgcttattgttcaaaaagataagtaatacagattcaaataagatactaataaaatcattgatttcatgcatctctcc

SEQ ID NO: 320203 - DNA, 120 bp, Artificial Sequence
  ENSG00000135535_53 (sequence is synthesized)
ggggtcggaaatggggacgtggcttccttccgcgggggcagcggtggggttgaggatggggccgggcgtcgcgcctctgaggttggcggtggggccgagctgcctctccctgccactggt

SEQ ID NO: 320204 - DNA, 120 bp, Artificial Sequence
  ENSG00000135535_54 (sequence is synthesized)
taaataattatgtaaaagttgttagtataattttaaagatgagtaaaaacttaaaagtcttggaccacagcaattaacgttaatctctaccttttgtgacagtgacacatagctccagtg

SEQ ID NO: 320205 - DNA, 120 bp, Artificial Sequence
  ENSG00000135537_0 (sequence is synthesized)
cttcctctcctcgtacggagttcaagatggcggcctcctggtcgctcttggttaccctgcgccccttagcacagagcccgctgagagggagatgtgttgggtgcggggcctgggccgccg

SEQ ID NO: 320206 - DNA, 120 bp, Artificial Sequence
  ENSG00000135537_1 (sequence is synthesized)
ctctcgctcctctggccaccgcccctgggaagcccttttggaaagcctatacggttcagacatccgagagcatgaccccaactgccacttcagagacttatttgaaagctttggccgttt

SEQ ID NO: 320207 - DNA, 120 bp, Artificial Sequence
  ENSG00000135537_2 (sequence is synthesized)
gccatggacctctggaccactatgattttctgatcaaagctcatgagctaaaggatgatgaacatcaaagaagagtcatacagtgtttgcagaaattacacgaggaccttaaaggataca

SEQ ID NO: 320208 - DNA, 120 bp, Artificial Sequence
  ENSG00000135537_3 (sequence is synthesized)
atatagaggcagaaggccttttttcaaagcttttttcaaggagcaaacctccaaggggcctgtatgtttatggagatgttggtacaggaaaaacaatggtgatggacatgttttatgctt

SEQ ID NO: 320209 - DNA, 120 bp, Artificial Sequence
  ENSG00000135537_4 (sequence is synthesized)
atgtggaaatgaagaggaaaaaacgggttcattttcatggtttcatgctagatgtgcacaaaagaatacatcgccttaaacagagtttgccaaaaaggaaaccaggattcatggctaaat

SEQ ID NO: 320210 - DNA, 120 bp, Artificial Sequence
  ENSG00000135537_5 (sequence is synthesized)
catatgacccaatagctcccatagccgaagaaatcagcgaagaagcatgtctcctatgttttgatgaatttcaggtcactgacattgctgatgccatgattctgaaacagctttttgaaa

SEQ ID NO: 320211 - DNA, 120 bp, Artificial Sequence
  ENSG00000135537_6 (sequence is synthesized)
atctgttcaaaaacggggtcgtcgttgtggcaacatccaacaggccaccggaagatctctataaaaatggactccaaagagctaactttgtaccattcatagcagtcttgaaggaatatt

SEQ ID NO: 320212 - DNA, 120 bp, Artificial Sequence
  ENSG00000135537_7 (sequence is synthesized)
gtaatacagtccagctagattctgggatagattaccggaaaagggaacttcctgctgcaggaaaactctactacctcacaagtgaagctgatgtggaggctgtcatggataagttgtttg

SEQ ID NO: 320213 - DNA, 120 bp, Artificial Sequence
  ENSG00000135537_8 (sequence is synthesized)
atgagctggctcagaaacaaaatgatttaactagaccaaggattctaaaagtgcaaggcagagagctgcgcctgaataaagcctgtggaaccgttgccgactgcacatttgaagagctgt

SEQ ID NO: 320214 - DNA, 120 bp, Artificial Sequence
  ENSG00000135537_9 (sequence is synthesized)
gtgagagaccacttggagccagtgactatttggaactatcaaagaattttgatacaatatttttacgaaacattccgcaatttactctggcaaacaggactcaaggtcgaagattcataa

SEQ ID NO: 320215 - DNA, 120 bp, Artificial Sequence
  ENSG00000135537_10 (sequence is synthesized)
ctctcatcgataacttttatgatctcaaggtgcgtataatttgctctgcgtcgactcctatatcaagcttatttttgcatcaacatcatgacagtgagttggagcaaagcagaatactga

SEQ ID NO: 320216 - DNA, 120 bp, Artificial Sequence
  ENSG00000135537_11 (sequence is synthesized)
tggatgatttggggctgagccaggattcagcagaaggactctccatgtttaccggagaagaggaaatctttgcatttcagcgcacaatttcccgactcacggaaatgcagactgaacagt

SEQ ID NO: 320217 - DNA, 120 bp, Artificial Sequence
  ENSG00000135537_12 (sequence is synthesized)
actggaatgaaggagacagaaccaagaagtaactgccacttttgcataaataaaactctagacaaatggttaacgcaggcagaactccttattgtgggacttgaaggaatcattttctca

SEQ ID NO: 320218 - DNA, 120 bp, Artificial Sequence
  ENSG00000135537_13 (sequence is synthesized)
tcattaattatgcactttgtcctctggaccattttaatctaaaattgctctcaaggatctagtggattagtaagttaaacacttaacattttttaggtctgctttttcttatttggcctt

SEQ ID NO: 320219 - DNA, 120 bp, Artificial Sequence
  ENSG00000135537_14 (sequence is synthesized)
atttctgcaccatgaaattaaaatcatctcattcctgaagatgaatgtaggaccagacattttagcttcacattaaaccacctgaatgaaccttgaatgcacaagtaaatgcaagacgtc

SEQ ID NO: 320220 - DNA, 120 bp, Artificial Sequence
  ENSG00000135537_15 (sequence is synthesized)
tggataccttcaagctttggctgcatggtggtggcatgttagaaatacatcttttataatgggggaagaatgccctatgtttcaattcaaaacaaagacagttttccaatctgatataaa

SEQ ID NO: 320221 - DNA, 120 bp, Artificial Sequence
  ENSG00000135537_16 (sequence is synthesized)
ctaaaagggataatattttagaatatgggcttatatgtggtttttttttttggttatgaattacagtaaatctcccaggccttcagatttctacataatggaagaatatgtttttaaccc

SEQ ID NO: 320222 - DNA, 120 bp, Artificial Sequence
  ENSG00000135537_17 (sequence is synthesized)
tgagatcaagtttagtaggcaggacttgatctcaagtggtcacaaagttttctaaaaaaaaatagaaaattatgatgggatcaaataaggagcaagtgtcaaattccagccaacaggcag

SEQ ID NO: 320223 - DNA, 120 bp, Artificial Sequence
  ENSG00000135537_18 (sequence is synthesized)
atctgcaggcagagctacaaactctgcagccaggaatggggaccagtgagagagtgtgggcgggggggtgggtgtcagagtcgtaggcactccaacagcagaggagactcccgctcacat

SEQ ID NO: 320224 - DNA, 120 bp, Artificial Sequence
  ENSG00000135537_19 (sequence is synthesized)
gaggccagccgtaccccagtggacagcaggctccttctcactgttgtagacacttgctctccttgcagcatgctgcccccgcccttgccgccaactctgccgtgagatggacctaatagg

SEQ ID NO: 320225 - DNA, 120 bp, Artificial Sequence
  ENSG00000135537_20 (sequence is synthesized)
aaataggaaagaaagcctgacaagcctgcttcacaggaaatctgatttgtccttcactgagctcatcttttgcttctttgagtaaaacctggctttactaactattgtcacaaagtggat

SEQ ID NO: 320226 - DNA, 120 bp, Artificial Sequence
  ENSG00000135537_21 (sequence is synthesized)
gtggatgagtgtgaaaaacagaaaaaatataaaatccacaaaatcttgtgaaaattaagcatttgggggaaggtaaggcataggtgagtcagtccaatgaatacaatggtcaacataagt

SEQ ID NO: 320227 - DNA, 120 bp, Artificial Sequence
  ENSG00000135537_22 (sequence is synthesized)
aagctctttgaacctatttattttctatttattattatttttattttttatatcttggccactctagccatctcctggcaggggtagtgtggcacagcatggccctatttaatttcttag

SEQ ID NO: 320228 - DNA, 120 bp, Artificial Sequence
  ENSG00000135537_23 (sequence is synthesized)
tcaataatccatcacatagtctcttttagatattaacctaattaaggcaagcaggtagatggatgagtacccaagccgagagaagagtttaaatcaagccttctgtaaataaaatgtggt

SEQ ID NO: 320229 - DNA, 120 bp, Artificial Sequence
  ENSG00000135537_24 (sequence is synthesized)
ttaaagatatttttattgaagtgaaacacagtaatttcaaagaggttacgtaatagggagaaaggatgggaaataaccactttgtgctggattgaatgctatatatttacattagctcag

SEQ ID NO: 320230 - DNA, 120 bp, Artificial Sequence
  ENSG00000135537_25 (sequence is synthesized)
ttaaaaaaaatagtcttagaaagtgaatattataacccctgtttaaaaataagaaaactgagtcttgggaaagttaagtagcttgacctgagattcacagtttacaactacaaaactcat

SEQ ID NO: 320231 - DNA, 120 bp, Artificial Sequence
  ENSG00000135537_26 (sequence is synthesized)
atactatattttataacacactgtctcttactcttactatttaaaaaaaagagattgttttaaaaattgattcatttaactcagtgaatgaagttgaagataaattcacaacagaaccat

SEQ ID NO: 320232 - DNA, 120 bp, Artificial Sequence
  ENSG00000135537_27 (sequence is synthesized)
tgatttgaactcagtgaatataaaatgtttaactttattctttagatcttagctttttacttttcacattcctttggtaattattctgtatcttaatttttaaaaaaatcatgtgaatgg

SEQ ID NO: 320233 - DNA, 120 bp, Artificial Sequence
  ENSG00000135537_28 (sequence is synthesized)
acagacagatagatggacagtatgaccgatagacagacctgtccctgagtgtgagtgtatgtagaagagtccccctgtcaagttatgttataaaagttcatctgaggtcagatattggga

SEQ ID NO: 320234 - DNA, 120 bp, Artificial Sequence
  ENSG00000135537_29 (sequence is synthesized)
ataaagtttcatttttccatcgaaacaatcacgtaatgttagttggggtgctggtcaaacgcatagaagcctatgtaattctcagtgtagcttccctataatgtcattttggtacgaaag

SEQ ID NO: 320235 - DNA, 120 bp, Artificial Sequence
  ENSG00000135537_30 (sequence is synthesized)
aacttaaaccctgagaaaaaaactgtagctcagtctccacctaagtaactggagcatgtgcccacttctgtgcccccaatccgcaatctccttccccagttccaggggcctgctgggatt

SEQ ID NO: 320236 - DNA, 120 bp, Artificial Sequence
  ENSG00000135537_31 (sequence is synthesized)
ggctgcagtggaagaggctctttgagctgggagaagggtttatgcagaaagtggggctagaaggctttggctggatctctggaggggagggagttccatggtggctggaaatctccaaag

SEQ ID NO: 320237 - DNA, 120 bp, Artificial Sequence
  ENSG00000135537_32 (sequence is synthesized)
ctggtttcataaaatagcatgcaagaaaaaaacccaagtcttcaagaatagccatcactaggaaacagtatggtagctctactaaaagaaaagtaatgccaacatgaaaaacaaccccta

SEQ ID NO: 320238 - DNA, 120 bp, Artificial Sequence
  ENSG00000135537_33 (sequence is synthesized)
gattggagagcaacatttcactttatatgtctttcttctgagccctgcccctattacattctcagcattccagtctttctccatagaagtctctcagcaaatgctctttttttgaaatgc

SEQ ID NO: 320239 - DNA, 120 bp, Artificial Sequence
  ENSG00000135537_34 (sequence is synthesized)
tttaaatgtatactttgagacggaggtttgagctgagtactgctgtggaaagctcctgctcaattcaaaacacagaccggggggatgtctttagagtcaggagaaaacatcatgtgccaa

SEQ ID NO: 320240 - DNA, 120 bp, Artificial Sequence
  ENSG00000135537_35 (sequence is synthesized)
gggtgctctccaaactgatgactagttcccagacttaacagaggtcaagcggagaaaaaggaaaactttctttagagaagaaaaagaaaaatcttatcacttctcatatttctttaggca

SEQ ID NO: 320241 - DNA, 120 bp, Artificial Sequence
  ENSG00000135537_36 (sequence is synthesized)
gtgtatgagcttatttgctgatatcactaatcctgagatgaaaaacaggatggacttaagtaatttttaacctatttctgaggccaaaaagactgtagtattattttaatcaaatttatg

SEQ ID NO: 320242 - DNA, 120 bp, Artificial Sequence
  ENSG00000135537_37 (sequence is synthesized)
cattttcagtgggacttcaaattttaataataaggcaatacttttatcttcttaaagtatatttcctgtacttataagtgtgcaaatgacataattttaaaattagttggaatattgaaa

SEQ ID NO: 320243 - DNA, 120 bp, Artificial Sequence
  ENSG00000135537_38 (sequence is synthesized)
aaaattaaaatttcacttgtaaaataagtggatgtgcttatatccatttatttatttaagaaacacatgatgttttctgtgtcctgggcatggttctatgtgctttataaataaactctt

SEQ ID NO: 320244 - DNA, 120 bp, Artificial Sequence
  ENSG00000135537_39 (sequence is synthesized)
ttgatccatataacagtcttatgagataggtgccattataatcattttatagacagggaagctgagacacagaaaacagctaaaacagattaatgaattgctaagatataaccgaagtca

SEQ ID NO: 320245 - DNA, 120 bp, Artificial Sequence
  ENSG00000135537_40 (sequence is synthesized)
ataaaattagcaaagtgctaacgtattaaattttccatttcattgcctctgtcctgaaaacagtattgctggtccaagtaacttgaacctacacttgacggctgctttatctgagattaa

SEQ ID NO: 320246 - DNA, 120 bp, Artificial Sequence
  ENSG00000135537_41 (sequence is synthesized)
aaacatgcagaaggattgggcgcctgggtccctgacatttgggttcttgatcagttacgggaatctgtcttgcagcaagtctgtaagttacctttattagatttactaatctcaaaagaa

SEQ ID NO: 320247 - DNA, 120 bp, Artificial Sequence
  ENSG00000135537_42 (sequence is synthesized)
ctccctggcttccttcattcagttatatgttcatgaatgaatgaatgaatgtatattctgagtaaccaagagtgccagttttactgctctattcatgtattcgcactaaactgcacgatt

SEQ ID NO: 320248 - DNA, 120 bp, Artificial Sequence
  ENSG00000135537_43 (sequence is synthesized)
ttcaaagagatgaggtcttgctatgttgccaaggctggagtgcagtggccattcacaggtatgatcatggtgctctgcagcctccaacttttggtttcaagggatcctcctgcctcagcc

SEQ ID NO: 320249 - DNA, 120 bp, Artificial Sequence
  ENSG00000135537_44 (sequence is synthesized)
caatgcccaatctccactgaccaattaataagttccattgctgtatatgggttgatgccacgctcaagtggcagtcattgtatcagcattttgtctaatttatgtgttgaatcatgtgct

SEQ ID NO: 320250 - DNA, 120 bp, Artificial Sequence
  ENSG00000135537_45 (sequence is synthesized)
attattcatcaagctatgcatttcctatctgtaagagatgaattttatagtaattatccagacaagattgagtctttgttcatgttcccatagtaactagaccaaggattctaaaagtgc

SEQ ID NO: 320251 - DNA, 120 bp, Artificial Sequence
  ENSG00000135537_46 (sequence is synthesized)
aaggcagagagctgcgcctgaataaagcctgtggaaccgttgccgactgcacatttgaagagctgtgtgagagagtgcgtataatttgctctgcgtcgactcctatatcaagcttatttt

SEQ ID NO: 320252 - DNA, 120 bp, Artificial Sequence
  ENSG00000135537_47 (sequence is synthesized)
tgcatcaacatcatgacagtgagttggagcaaagcagaatactgatggatgatttggggctgagccaggtaggcgatattaacataatctctttttattataaaacagcttaattgtttt

SEQ ID NO: 320253 - DNA, 120 bp, Artificial Sequence
  ENSG00000135537_48 (sequence is synthesized)
tggtttgatgcatggctacattttgaagaagaaatgcagtgtatagttaaccattgattggcgcttcttctataagcccatgtagcaaatttatcattctcaatatcactgaatatagaa

SEQ ID NO: 320254 - DNA, 120 bp, Artificial Sequence
  ENSG00000135537_49 (sequence is synthesized)
aattataaacttacagtggaaggaaccttagtggtcatgtagttcagtgctccattttgcatgtgataaaaatgaagcccacggaggtggactaaggtgcccacagtcacactgctgaat

SEQ ID NO: 320255 - DNA, 120 bp, Artificial Sequence
  ENSG00000135537_50 (sequence is synthesized)
aatggcaggccagagctggatgccaaaccacctgtgcccggttctgggcttgctctgctataccatgctgccctttctgggtatctttctaaatgattgctggatttgtagagtgcatga

SEQ ID NO: 320256 - DNA, 120 bp, Artificial Sequence
  ENSG00000135537_51 (sequence is synthesized)
tacagtatccaagcatgtaggctggctagtccaggaccatggagtgcctagcaaggccccaggcttgaaaagaaatccctaactaatctctcaacctccattctgcaaacatttatggag

SEQ ID NO: 320257 - DNA, 120 bp, Artificial Sequence
  ENSG00000135537_52 (sequence is synthesized)
tacctgtgggtgccaggctctgaggacactctgtagggaacaaacagatgctagtccagttctcctggagcttggagtctggtgattcaccccaggccaactagaagtgactttgcgttt

SEQ ID NO: 320258 - DNA, 120 bp, Artificial Sequence
  ENSG00000135537_53 (sequence is synthesized)
tcttcttctataagaacgttatgagatgtgtttctcaactatcgacaactgaaatattagtcaaaagtttacaactatcaacactcaccccatgaggggagcccaattcttccagcccca

SEQ ID NO: 320259 - DNA, 120 bp, Artificial Sequence
  ENSG00000135537_54 (sequence is synthesized)
caggtgaaagacctctggaacaaggaaacaattccttatcaacctgaatagaaatgaggcattttcaggagtttgggagaacgaggccaatttaaaaagtgaactttccaatatgatgac

SEQ ID NO: 320260 - DNA, 120 bp, Artificial Sequence
  ENSG00000135537_55 (sequence is synthesized)
caatatgatgacttaaacctatgtgtatgtcttagtctgctataacaaaacaccatgaactgggtagcttacagacaacagaaatttatttctaacagttctggaggctgggaagtccaa

SEQ ID NO: 320261 - DNA, 120 bp, Artificial Sequence
  ENSG00000135537_56 (sequence is synthesized)
agggatctctctggggcatgttttataaaggcattaatcccattcatgagggctccacccacaagacctaatcatctcccaaaagctccgcctccaataccatcaccttatgggttagga

SEQ ID NO: 320262 - DNA, 120 bp, Artificial Sequence
  ENSG00000135537_57 (sequence is synthesized)
tttcagcatatgaattttggatgtacataaacattcagctctaacctagaacagtttcatcctgaaaccatccccctgcccctggtccatggaaaaattgtcttccacgaaactggcccc

SEQ ID NO: 320263 - DNA, 120 bp, Artificial Sequence
  ENSG00000135537_58 (sequence is synthesized)
gaaactggcccctggtgccaaaaggttggtaaagtttacatcattggctcttaaaacttttttcccctaggctggtgcaatgggtcattcctacaatcctagcactttgggaggccgagg

SEQ ID NO: 320264 - DNA, 64 bp, Artificial Sequence
  ENSG00000135537_59 (sequence is synthesized)
aaggcagaggttgcagtgagttcccctaggatcaagaaaaaataagctcagcagacagagccaa

SEQ ID NO: 320265 - DNA, 120 bp, Artificial Sequence
  ENSG00000135537_60 (sequence is synthesized)
cctaggatcaagaaaaaataagctcagcagacagagccaatcatgcatgaagaaatcagggaatgtgatctcagggtcatgaaggttcacaatggatcagtggagaagatggacttagga

SEQ ID NO: 320266 - DNA, 120 bp, Artificial Sequence
  ENSG00000135537_61 (sequence is synthesized)
atctagaatttttctctgaaaaagcatactagcaaacccctaaggaaagagaaaaattccaagcccacttagtggccatgagtctgtgttggtatcaccagtctggggttaccagcctca

SEQ ID NO: 320267 - DNA, 120 bp, Artificial Sequence
  ENSG00000135537_62 (sequence is synthesized)
cagagacagagtttcccaatttggtcctagatggtgggatcagttgtcccagcagctgaagactaaaaacagccctgcctttcagccctggcttttagatcccaggcacattctccagaa

SEQ ID NO: 320268 - DNA, 120 bp, Artificial Sequence
  ENSG00000135537_63 (sequence is synthesized)
cccagacccactgctcatttgcatttgctctcctttagtcattggttggattggaaaacgctctccagaggtttgtccttagggcctcccccttaggcactgggaccctgtctggaggcc

SEQ ID NO: 320269 - DNA, 120 bp, Artificial Sequence
  ENSG00000135537_64 (sequence is synthesized)
tacaccagcctctttctagcttctcagaactactggttttttttttgccattacttatttctggtgtacacttttggagaaagttttcccttttaagttttctctctgataatttgatgt

SEQ ID NO: 320270 - DNA, 120 bp, Artificial Sequence
  ENSG00000135537_65 (sequence is synthesized)
gtttactgcctatcagtttaaattggttgactctctagtctcatttaagagattgtatatggaaaaaaaaagttataaaaaaaggcataatctaaaccggtaagcctaaaaagttttttt

SEQ ID NO: 320271 - DNA, 120 bp, Artificial Sequence
  ENSG00000135537_66 (sequence is synthesized)
aacccactggtttctaacagaagggaaaagatacgcattaaatggctagacaccaagagcacacgggtctggcttaatgagatgctggagaagattgttaaattcaaatccatgttttca

SEQ ID NO: 320272 - DNA, 120 bp, Artificial Sequence
  ENSG00000135540_0 (sequence is synthesized)
aggttcaaggactgttaatggtttgtaactgcctgacaataaactcaacctcagttacatcagcctgggcagatgtctaaggatatgagaccgggggaagaaaaagttagaatctgtagc

SEQ ID NO: 320273 - DNA, 120 bp, Artificial Sequence
  ENSG00000135540_1 (sequence is synthesized)
agaaggacgaagcttgccacctgcctactgggctgagcttttaatgtgatttacatttctaagctctatgtaggtgccctggaaatggtggtcttcattaatgcaaagattaagtcttta

SEQ ID NO: 320274 - DNA, 120 bp, Artificial Sequence
  ENSG00000135540_2 (sequence is synthesized)
attaaactttttaagaagaaaacggtttccaacctagatgaggaaagccgatggacagtccactacactgccccgtggcaccagcaggagaatgtgttccttcccaccacaagacccccc

SEQ ID NO: 320275 - DNA, 120 bp, Artificial Sequence
  ENSG00000135540_3 (sequence is synthesized)
tgtgttgaggacctgcaccgccaagccaagctcaacctcaaatcagtactgagggaatgcgataagttgcggcatgatggctaccgcagttctcagtactactctcagggacccaccttt

SEQ ID NO: 320276 - DNA, 120 bp, Artificial Sequence
  ENSG00000135540_4 (sequence is synthesized)
gcggccaacgccagcccattctgtgatgattaccaagatgaagatgaagaaacagatcaaaagtgttctctgtcttcatcagaagaagaaagatttatttccatcaggagacctaaaaca

SEQ ID NO: 320277 - DNA, 120 bp, Artificial Sequence
  ENSG00000135540_5 (sequence is synthesized)
ccagcctcaagtgacttctccgaccttaatactcagacgaactggaccaagtcgcttccactgccaacaccagaagagaagatgcgacagcaagcccaaacagtccaggctgacgtggtg

SEQ ID NO: 320278 - DNA, 120 bp, Artificial Sequence
  ENSG00000135540_6 (sequence is synthesized)
cctattaacataactggggagaatttcgatcgccaggccagccttcggcggtctctaatttacacagacactctggtaagacgaccgaagaaagtcaaaaggagaaagactattacagga

SEQ ID NO: 320279 - DNA, 120 bp, Artificial Sequence
  ENSG00000135540_7 (sequence is synthesized)
gtccctgacaacatacagaaggagctagcatcaggcactggccaagatgatgctgatggccactcagtgtacacccctgatcactactctacactaggaaggttcaatagctgtcggtct

SEQ ID NO: 320280 - DNA, 120 bp, Artificial Sequence
  ENSG00000135540_8 (sequence is synthesized)
gctgggcagcgctcagaaaccagggactccagctgtcagacggaggatgtgaaggtcgtaccaccttccatgaggagaatcagggcacagaaggggcaaggcattgctgcccagatgggc

SEQ ID NO: 320281 - DNA, 120 bp, Artificial Sequence
  ENSG00000135540_9 (sequence is synthesized)
cacttctcaggttcctctggcaacatgtctgtgctgagcgattctgcagggatcgtattcccttcccgccttgacagtgatgctggcttccatagtcttccgcgttctggagcaagggca

SEQ ID NO: 320282 - DNA, 120 bp, Artificial Sequence
  ENSG00000135540_10 (sequence is synthesized)
aacattcagtcccttgagccgaggctgggtgccctcggccctgcaggagacatgaatggcactttcctctaccagagaggtcacccacaagcagatgaaaacttaggccatttaggaggt

SEQ ID NO: 320283 - DNA, 120 bp, Artificial Sequence
  ENSG00000135540_11 (sequence is synthesized)
gcctcagggactggaacacttttgagacccaaatcccaggagttgagacacttcgagagtgaaaatataatgagcccagcgtgtgtggtttctcctcatgcaacctactccaccagcatc

SEQ ID NO: 320284 - DNA, 120 bp, Artificial Sequence
  ENSG00000135540_12 (sequence is synthesized)
atcccaaatgccacactgtcttcctcttccgaggtcatcgctattcccactgctcagagtgcgggacagcgggaaagtaaaagttctggctcatcacatgcaaggataaaatccagagac

SEQ ID NO: 320285 - DNA, 120 bp, Artificial Sequence
  ENSG00000135540_13 (sequence is synthesized)
cacctcatctccaggcatgctgtgaaaggtgatcctcagtctcccggtcgccactggaatgagggccatgccaccattctttcacaggacttagaccctcattcccctggtgaacccgca

SEQ ID NO: 320286 - DNA, 120 bp, Artificial Sequence
  ENSG00000135540_14 (sequence is synthesized)
ctgttgtccctctgtgactcagccgtccctctaaatgctccagcaaatagggagaatgggtcccaagctatgccgtataattgtagaaacaacctggccttcccagcccacccccaagat

SEQ ID NO: 320287 - DNA, 120 bp, Artificial Sequence
  ENSG00000135540_15 (sequence is synthesized)
gtggatggcaagagtgaatctagttattcagggggcggagggcacagcagctcggagccctgggaatacaaatcctcaggtaatggaagggcatcccccctgaagccgcatttagcaact

SEQ ID NO: 320288 - DNA, 120 bp, Artificial Sequence
  ENSG00000135540_16 (sequence is synthesized)
cctggctattccactcccacaagtaacatgagcagctgcagtttggaccaaacgtccaacaaagaggatgctgggtcgctgtattctgaggaccacgatggctactgtgcatctgtgcac

SEQ ID NO: 320289 - DNA, 120 bp, Artificial Sequence
  ENSG00000135540_17 (sequence is synthesized)
actgactctggacatggatctgggaatctgtgcaatagcagtgatggctttgggaaccccaggcacagcgtgatcaatgtttttgttggaagagctcagaaaaaccaaggggaccggtcc

SEQ ID NO: 320290 - DNA, 120 bp, Artificial Sequence
  ENSG00000135540_18 (sequence is synthesized)
aattaccaggataaatccctatcaagaaacatctctttgaagaaagcaaagaagcctcccctgccaccctcccggacagactccctccgcaggattcccaagaagagcagccagtgcaac

SEQ ID NO: 320291 - DNA, 120 bp, Artificial Sequence
  ENSG00000135540_19 (sequence is synthesized)
gggcaggtgctcaacgagagcctgatcgccacactccagcactcgctgcagctgagcctcccaggcaagagtggcagctcgccctcccagagcccctgcagtgacttggaagagccctgg

SEQ ID NO: 320292 - DNA, 120 bp, Artificial Sequence
  ENSG00000135540_20 (sequence is synthesized)
ctgccccgctcccggagccagagcacagttagtgctggcagcagcatgacttccgccaccacccccaatgtctactccctgtgcggggccacgccatcgcagagtgacacaagcagcgtc

SEQ ID NO: 320293 - DNA, 120 bp, Artificial Sequence
  ENSG00000135540_21 (sequence is synthesized)
aagtcagagtacacggacccctggggttattacattgactacacgggcatgcaggaagatccggggaacccggcagggggctgttcaaccagcagtggggtgcccactgggaacgggcca

SEQ ID NO: 320294 - DNA, 120 bp, Artificial Sequence
  ENSG00000135540_22 (sequence is synthesized)
gtccgccatgtccaagaagggtccagagccacaatgccccaagtgcccggtggttcagtcaaaccaaagatcatgtcaccagagaagtcacacagagtcatttctccatccagtgggtat

SEQ ID NO: 320295 - DNA, 120 bp, Artificial Sequence
  ENSG00000135540_23 (sequence is synthesized)
tccagccagtcgaatacacccacagcactcacccctgtgcctgtgtttttaaaatcagtgtcaccagcaaacgggaaggggaagcccaagcccaaggtaccagaaaggaagtcctctctg

SEQ ID NO: 320296 - DNA, 120 bp, Artificial Sequence
  ENSG00000135540_24 (sequence is synthesized)
atatcttcagtatccatttcctcatcgtccacttctctttcttctagtacttctactgaaggaagtggcactatgaagaagctggatccagccgtgggctctcccccggctcctcctcct

SEQ ID NO: 320297 - DNA, 120 bp, Artificial Sequence
  ENSG00000135540_25 (sequence is synthesized)
cctcctgttccctctcctccattcccttgtcctgcagacaggtctcctttccttcctcccccacctcctgtcacagattgctcccagggctctcctctgcctcactctcctgtgttcccc

SEQ ID NO: 320298 - DNA, 120 bp, Artificial Sequence
  ENSG00000135540_26 (sequence is synthesized)
cctccgccgccagaagctctcattcctttctgctccccacctgattggtgcctttctcctccccgccctgcactgagccccattcttccagattcacctgtgtccttgccattgccccca
